United States Patent Application Publication US 2019/0016770 A1 - sequence listing, part 6

SEQ ID NO: 66520 - protein, 37 aa, Artificial Sequence; identical to SEQ ID NO: 14888
  GFR-binding peptide
  MOD_RES (4)..(5): Xaa is C or S
  MOD_RES (19)..(20)..(21)..(22)..(23): Xaa is A or G
  MOD_RES (24)..(25)..(26)..(27): Xaa is A or G or is absent

SEQ ID NO: 66521 - protein, 34 aa, Artificial Sequence
  GFR-binding peptide
  MOD_RES (1)..(33): Xaa is C or S
XVPTRLSPISILYKDSANNVVLKYHYDMVVESXG

SEQ ID NO: 66522 - protein, 38 aa, Artificial Sequence; identical to SEQ ID NO: 32884
  GFR-binding peptide
  MOD_RES (5)..(6): Xaa is C or S
  MOD_RES (20)..(21)..(22)..(23)..(24): Xaa is A or G
  MOD_RES (25)..(26)..(27)..(28): Xaa is A or G or is absent

SEQ ID NO: 66523 - protein, 39 aa, Artificial Sequence
  GFR-binding peptide
  MOD_RES (5)..(6): Xaa is C or S
  MOD_RES (20)..(21)..(22)..(23)..(24): Xaa is A or G
  MOD_RES (25)..(26)..(27)..(28): Xaa is A or G or is absent
SAGPXXTPTKMEPISMLYLXXXXXXXXXKFKYEGMVVDR

SEQ ID NO: 66524 - protein, 40 aa, Artificial Sequence; identical to SEQ ID NO: 7582
  GFR-binding peptide
  MOD_RES (5)..(6)..(37)..(39): Xaa is C or S

SEQ ID NO: 66525 - protein, 35 aa, Artificial Sequence
  GFR-binding peptide
  MOD_RES (1)..(2)..(35): Xaa is C or S
  MOD_RES (16)..(17)..(18)..(19)..(20): Xaa is A or G
  MOD_RES (21)..(22)..(23)..(24): Xaa is A or G or is absent
XXVPQDLSPINILYFXXXXXXXXXYGKIPMVVKSX

SEQ ID NO: 66526 - protein, 37 aa, Artificial Sequence
  GFR-binding peptide
  MOD_RES (1)..(2)..(34)..(36): Xaa is C or S
XXVPTRLSPISILYKDSANNVVLKYHYDMVVESXGXR

SEQ ID NO: 66527 - protein, 33 aa, Artificial Sequence; identical to SEQ ID NO: 7583
  GFR-binding peptide
  MOD_RES (1)..(1): Xaa is C or S
  MOD_RES (15)..(16)..(17)..(18)..(19): Xaa is A or G
  MOD_RES (20)..(21)..(22)..(23): Xaa is A or G or is absent

SEQ ID NO: 66528 - protein, 36 aa, Artificial Sequence
  GFR-binding peptide
  MOD_RES (3)..(4)..(36): Xaa is C or S
KAXXVPTKLSATSILYYDKGVVTYLRKHRGMAVSEX

SEQ ID NO: 66529 - protein, 34 aa, Artificial Sequence; identical to SEQ ID NO: 7584
  GFR-binding peptide
  MOD_RES (2)..(2): Xaa is C or S
  MOD_RES (16)..(17)..(18)..(19)..(20): Xaa is A or G
  MOD_RES (21)..(22)..(23)..(24): Xaa is A or G or is absent

SEQ ID NO: 66530 - protein, 35 aa, Artificial Sequence; identical to SEQ ID NO: 7586
  GFR-binding peptide
  MOD_RES (32)..(34): Xaa is C or S

SEQ ID NO: 66531 - protein, 43 aa, Artificial Sequence
  GFR-binding peptide
  MOD_RES (6)..(7)..(40)..(42): Xaa is C or S
  MOD_RES (21)..(22)..(23)..(24)..(25): Xaa is A or G
  MOD_RES (26)..(27)..(28)..(29): Xaa is A or G or is absent
ASASPXXVSQDLSPINILYFXXXXXXXXXYGKIPMIVKSXKXS

SEQ ID NO: 66532 - protein, 39 aa, Artificial Sequence; identical to SEQ ID NO: 28828
  GFR-binding peptide
  MOD_RES (3)..(4)..(38): Xaa is C or S
  MOD_RES (18)..(19)..(20)..(21)..(22): Xaa is A or G
  MOD_RES (23)..(24)..(25)..(26): Xaa is A or G or is absent

SEQ ID NO: 66533 - protein, 38 aa, Artificial Sequence; identical to SEQ ID NO: 28829
  GFR-binding peptide
  MOD_RES (4)..(5)..(37): Xaa is C or S

SEQ ID NO: 66534 - protein, 36 aa, Artificial Sequence; identical to SEQ ID NO: 28830
  GFR-binding peptide
  MOD_RES (35)..(35): Xaa is C or S
  MOD_RES (14)..(15)..(16)..(17)..(18): Xaa is A or G
  MOD_RES (19)..(20)..(21)..(22): Xaa is A or G or is absent

SEQ ID NO: 66535 - protein, 34 aa, Artificial Sequence; identical to SEQ ID NO: 32891
  GFR-binding peptide
  MOD_RES (2)..(3): Xaa is C or S

SEQ ID NO: 66536 - protein, 38 aa, Artificial Sequence; identical to SEQ ID NO: 32898
  GFR-binding peptide
  MOD_RES (6)..(7): Xaa is C or S

SEQ ID NO: 66537 - protein, 35 aa, Artificial Sequence; identical to SEQ ID NO: 7592
  GFR-binding peptide
  MOD_RES (1)..(2)..(35): Xaa is C or S
  MOD_RES (16)..(17)..(18)..(19)..(20): Xaa is A or G
  MOD_RES (21)..(22)..(23)..(24): Xaa is A or G or is absent

SEQ ID NO: 66538 - protein, 35 aa, Artificial Sequence
  GFR-binding peptide
  MOD_RES (1)..(2)..(34): Xaa is C or S
XXVPEKMSPISILYKDENKNVVLKYHYNMTVESXA

SEQ ID NO: 66539 - protein, 39 aa, Artificial Sequence; identical to SEQ ID NO: 28835
  GFR-binding peptide
  MOD_RES (3)..(4)..(38): Xaa is C or S
  MOD_RES (18)..(19)..(20)..(21)..(22): Xaa is A or G
  MOD_RES (23)..(24)..(25)..(26): Xaa is A or G or is absent

SEQ ID NO: 66540 - protein, 35 aa, Artificial Sequence; identical to SEQ ID NO: 28836
  GFR-binding peptide
  MOD_RES (1)..(34): Xaa is C or S
  MOD_RES (15)..(16)..(17)..(18)..(19): Xaa is A or G
  MOD_RES (20)..(21)..(22)..(23): Xaa is A or G or is absent

SEQ ID NO: 66541 - protein, 38 aa, Artificial Sequence; identical to SEQ ID NO: 7596
  GFR-binding peptide
  MOD_RES (5)..(6)..(37): Xaa is C or S

SEQ ID NO: 66542 - protein, 36 aa, Artificial Sequence; identical to SEQ ID NO: 28837
  GFR-binding peptide
  MOD_RES (4)..(5)..(36): Xaa is C or S

SEQ ID NO: 66543 - protein, 40 aa, Artificial Sequence; identical to SEQ ID NO: 7597
  GFR-binding peptide
  MOD_RES (5)..(6)..(38)..(40): Xaa is C or S

SEQ ID NO: 66544 - protein, 41 aa, Artificial Sequence
  GFR-binding peptide
  MOD_RES (6)..(7)..(38)..(40): Xaa is C or S
ASAAPXXVPQALSPINILYFVGRKPKVYGKIPMIVRSXKXS

SEQ ID NO: 66545 - protein, 41 aa, Artificial Sequence; identical to SEQ ID NO: 28841
  GFR-binding peptide
  MOD_RES (6)..(7)..(39)..(41): Xaa is C or S

SEQ ID NO: 66546 - protein, 34 aa, Artificial Sequence; identical to SEQ ID NO: 32915
  GFR-binding peptide
  MOD_RES (32)..(34): Xaa is C or S

SEQ ID NO: 66547 - protein, 37 aa, Artificial Sequence; identical to SEQ ID NO: 28842
  GFR-binding peptide
  MOD_RES (6)..(7): Xaa is C or S

SEQ ID NO: 66548 - protein, 39 aa, Artificial Sequence; identical to SEQ ID NO: 28844
  GFR-binding peptide
  MOD_RES (5)..(6)..(38): Xaa is C or S

SEQ ID NO: 66549 - protein, 35 aa, Artificial Sequence; identical to SEQ ID NO: 28848
  GFR-binding peptide
  MOD_RES (1)..(2)..(34): Xaa is C or S

SEQ ID NO: 66550 - protein, 40 aa, Artificial Sequence
  GFR-binding peptide
  MOD_RES (6)..(7)..(40): Xaa is C or S
  MOD_RES (21)..(22)..(23)..(24)..(25): Xaa is A or G
  MOD_RES (26)..(27)..(28)..(29): Xaa is A or G or is absent
ASASPXXVPQDLSPINILYFXXXXXXXXXYGKIPMVVKSX

SEQ ID NO: 66551 - protein, 38 aa, Artificial Sequence; identical to SEQ ID NO: 7605
  GFR-binding peptide
  MOD_RES (6)..(7)..(38): Xaa is C or S

SEQ ID NO: 66552 - protein, 41 aa, Artificial Sequence; identical to SEQ ID NO: 32922
  GFR-binding peptide
  MOD_RES (6)..(7)..(39)..(41): Xaa is C or S

SEQ ID NO: 66553 - protein, 39 aa, Artificial Sequence
  GFR-binding peptide
  MOD_RES (5)..(6): Xaa is C or S
  MOD_RES (20)..(21)..(22)..(23)..(24): Xaa is A or G
  MOD_RES (25)..(26)..(27)..(28): Xaa is A or G or is absent
TPPTXXVPTRLSATSILYYXXXXXXXXXLRKHRDMVVES

SEQ ID NO: 66554 - protein, 35 aa, Artificial Sequence; identical to SEQ ID NO: 7607
  GFR-binding peptide
  MOD_RES (4)..(5): Xaa is C or S

SEQ ID NO: 66555 - protein, 36 aa, Artificial Sequence; identical to SEQ ID NO: 57826
  GFR-binding peptide
  MOD_RES (3)..(4)..(35): Xaa is C or S

SEQ ID NO: 66556 - protein, 36 aa, Artificial Sequence
  GFR-binding peptide
  MOD_RES (1)..(35): Xaa is C or S
  MOD_RES (15)..(16)..(17)..(18)..(19): Xaa is A or G
  MOD_RES (20)..(21)..(22)..(23): Xaa is A or G or is absent
XVPEKMSPINILYFXXXXXXXXXYGKIPNMTVESXA

SEQ ID NO: 66557 - protein, 43 aa, Artificial Sequence; identical to SEQ ID NO: 28857
  GFR-binding peptide
  MOD_RES (5)..(6)..(40)..(42): Xaa is C or S
  MOD_RES (20)..(21)..(22)..(23)..(24): Xaa is A or G
  MOD_RES (25)..(26)..(27)..(28): Xaa is A or G or is absent

SEQ ID NO: 66558 - protein, 37 aa, Artificial Sequence; identical to SEQ ID NO: 32932
  GFR-binding peptide
  MOD_RES (1)..(2)..(34)..(36): Xaa is C or S

SEQ ID NO: 66559 - protein, 37 aa, Artificial Sequence; identical to SEQ ID NO: 28863
  GFR-binding peptide
  MOD_RES (3)..(4): Xaa is C or S
  MOD_RES (18)..(19)..(20)..(21)..(22): Xaa is A or G
  MOD_RES (23)..(24)..(25)..(26): Xaa is A or G or is absent

SEQ ID NO: 66560 - protein, 34 aa, Artificial Sequence; identical to SEQ ID NO: 28864
  GFR-binding peptide
  MOD_RES (2)..(2): Xaa is C or S
  MOD_RES (16)..(17)..(18)..(19)..(20): Xaa is A or G
  MOD_RES (21)..(22)..(23)..(24): Xaa is A or G or is absent

SEQ ID NO: 66561 - protein, 43 aa, Artificial Sequence; identical to SEQ ID NO: 32936
  GFR-binding peptide
  MOD_RES (6)..(7)..(40)..(42): Xaa is C or S
  MOD_RES (21)..(22)..(23)..(24)..(25): Xaa is A or G
  MOD_RES (26)..(27)..(28)..(29): Xaa is A or G or is absent

SEQ ID NO: 66562 - protein, 33 aa, Artificial Sequence
  GFR-binding peptide
  MOD_RES (2)..(3): Xaa is C or S
PXXVPEKMSPISILYKDENKNVVLKYHYNMTVE

SEQ ID NO: 66563 - protein, 40 aa, Artificial Sequence; identical to SEQ ID NO: 28871
  GFR-binding peptide
  MOD_RES (5)..(39): Xaa is C or S
  MOD_RES (19)..(20)..(21)..(22)..(23): Xaa is A or G
  MOD_RES (24)..(25)..(26)..(27): Xaa is A or G or is absent

SEQ ID NO: 66564 - protein, 41 aa, Artificial Sequence; identical to SEQ ID NO: 32940
  GFR-binding peptide
  MOD_RES (3)..(4)..(38)..(40): Xaa is C or S
  MOD_RES (18)..(19)..(20)..(21)..(22): Xaa is A or G
  MOD_RES (23)..(24)..(25)..(26): Xaa is A or G or is absent

SEQ ID NO: 66565 - protein, 36 aa, Artificial Sequence; identical to SEQ ID NO: 7615
  GFR-binding peptide
  MOD_RES (1)..(2)..(36): Xaa is C or S
  MOD_RES (16)..(17)..(18)..(19)..(20): Xaa is A or G
  MOD_RES (21)..(22)..(23)..(24): Xaa is A or G or is absent

SEQ ID NO: 66566 - protein, 33 aa, Artificial Sequence; identical to SEQ ID NO: 32941
  GFR-binding peptide
  MOD_RES (2)..(3): Xaa is C or S

SEQ ID NO: 66567 - protein, 39 aa, Artificial Sequence; identical to SEQ ID NO: 7616
  GFR-binding peptide
  MOD_RES (6)..(7): Xaa is C or S
  MOD_RES (21)..(22)..(23)..(24)..(25): Xaa is A or G
  MOD_RES (26)..(27)..(28)..(29): Xaa is A or G or is absent

SEQ ID NO: 66568 - protein, 40 aa, Artificial Sequence; identical to SEQ ID NO: 28873
  GFR-binding peptide
  MOD_RES (2)..(3)..(37)..(39): Xaa is C or S
  MOD_RES (17)..(18)..(19)..(20)..(21): Xaa is A or G
  MOD_RES (22)..(23)..(24)..(25): Xaa is A or G or is absent

SEQ ID NO: 66569 - protein, 36 aa, Artificial Sequence; identical to SEQ ID NO: 32942
  GFR-binding peptide
  MOD_RES (1)..(33)..(35): Xaa is C or S

SEQ ID NO: 66570 - protein, 36 aa, Artificial Sequence; identical to SEQ ID NO: 32943
  GFR-binding peptide
  MOD_RES (1)..(34)..(36): Xaa is C or S
  MOD_RES (15)..(16)..(17)..(18)..(19): Xaa is A or G
  MOD_RES (20)..(21)..(22)..(23): Xaa is A or G or is absent

SEQ ID NO: 66571 - protein, 35 aa, Artificial Sequence
  GFR-binding peptide
  MOD_RES (2)..(3): Xaa is C or S
  MOD_RES (17)..(18)..(19)..(20)..(21): Xaa is A or G
  MOD_RES (22)..(23)..(24)..(25): Xaa is A or G or is absent
PXXVPEKMSPISILYKXXXXXXXXXLKYHYNMTVE

SEQ ID NO: 66572 - protein, 38 aa, Artificial Sequence; identical to SEQ ID NO: 32945
  GFR-binding peptide
  MOD_RES (1)..(35)..(37): Xaa is C or S
  MOD_RES (15)..(16)..(17)..(18)..(19): Xaa is A or G
  MOD_RES (20)..(21)..(22)..(23): Xaa is A or G or is absent

SEQ ID NO: 66573 - protein, 38 aa, Artificial Sequence; identical to SEQ ID NO: 7619
  GFR-binding peptide
  MOD_RES (5)..(6)..(38): Xaa is C or S

SEQ ID NO: 66574 - protein, 37 aa, Artificial Sequence
  GFR-binding peptide
  MOD_RES (2)..(3)..(36): Xaa is C or S
  MOD_RES (17)..(18)..(19)..(20)..(21): Xaa is A or G
  MOD_RES (22)..(23)..(24)..(25): Xaa is A or G or is absent
TXXAPVKTEPISMLYLXXXXXXXXXKFKYEMIVEEXG

SEQ ID NO: 66575 - protein, 35 aa, Artificial Sequence; identical to SEQ ID NO: 7624
  GFR-binding peptide
  MOD_RES (3)..(35): Xaa is C or S

SEQ ID NO: 66576 - protein, 40 aa, Artificial Sequence
  GFR-binding peptide
  MOD_RES (4)..(5)..(37)..(39): Xaa is C or S
PASXXVPARLSATSILYYDAANNVVLRKHRDMVVEAXGXR

SEQ ID NO: 66577 - protein, 39 aa, Artificial Sequence; identical to SEQ ID NO: 32959
  GFR-binding peptide
  MOD_RES (2)..(3)..(37)..(39): Xaa is C or S
  MOD_RES (17)..(18)..(19)..(20)..(21): Xaa is A or G
  MOD_RES (22)..(23)..(24)..(25): Xaa is A or G or is absent

SEQ ID NO: 66578 - protein, 36 aa, Artificial Sequence; identical to SEQ ID NO: 7629
  GFR-binding peptide
  MOD_RES (3)..(4): Xaa is C or S
  MOD_RES (18)..(19)..(20)..(21)..(22): Xaa is A or G
  MOD_RES (23)..(24)..(25)..(26): Xaa is A or G or is absent

SEQ ID NO: 66579 - protein, 31 aa, Artificial Sequence; identical to SEQ ID NO: 28901
  GFR-binding peptide

SEQ ID NO: 66580 - protein, 34 aa, Artificial Sequence
  GFR-binding peptide
  MOD_RES (1)..(2): Xaa is C or S
  MOD_RES (16)..(17)..(18)..(19)..(20): Xaa is A or G
  MOD_RES (21)..(22)..(23)..(24): Xaa is A or G or is absent
XXTPTKMSPISMLYKXXXXXXXXXLKYHYGMVVD

SEQ ID NO: 66581 - protein, 41 aa, Artificial Sequence; identical to SEQ ID NO: 7630
  GFR-binding peptide
  MOD_RES (5)..(6)..(40): Xaa is C or S
  MOD_RES (20)..(21)..(22)..(23)..(24): Xaa is A or G
  MOD_RES (25)..(26)..(27)..(28): Xaa is A or G or is absent

SEQ ID NO: 66582 - protein, 41 aa, Artificial Sequence
  GFR-binding peptide
  MOD_RES (3)..(4)..(38)..(40): Xaa is C or S
  MOD_RES (18)..(19)..(20)..(21)..(22): Xaa is A or G
  MOD_RES (23)..(24)..(25)..(26): Xaa is A or G or is absent
GPXXTPTKMSATSMLYYXXXXXXXXXLRKHRGMVVDRXGXS

SEQ ID NO: 66583 - protein, 37 aa, Artificial Sequence
  GFR-binding peptide
  MOD_RES (2)..(3)..(37): Xaa is C or S
  MOD_RES (17)..(18)..(19)..(20)..(21): Xaa is A or G
  MOD_RES (22)..(23)..(24)..(25): Xaa is A or G or is absent
PXXVPEKMNAISILYFXXXXXXXXXLKKYRNMTVESX

SEQ ID NO: 66584 - protein, 38 aa, Artificial Sequence; identical to SEQ ID NO: 28908
  GFR-binding peptide
  MOD_RES (2)..(3)..(35)..(37): Xaa is C or S

SEQ ID NO: 66585 - protein, 42 aa, Artificial Sequence; identical to SEQ ID NO: 28909
  GFR-binding peptide
  MOD_RES (4)..(5)..(39)..(41): Xaa is C or S
  MOD_RES (19)..(20)..(21)..(22)..(23): Xaa is A or G
  MOD_RES (24)..(25)..(26)..(27): Xaa is A or G or is absent

SEQ ID NO: 66586 - protein, 39 aa, Artificial Sequence
  GFR-binding peptide
  MOD_RES (3)..(4)..(36)..(38): Xaa is C or S
GPXXTPTKMSPISMLYKNDKQQIILKYHYGMVVDRXGXS

SEQ ID NO: 66587 - protein, 31 aa, Artificial Sequence; identical to SEQ ID NO: 28912
  GFR-binding peptide
  MOD_RES (31)..(31): Xaa is C or S

SEQ ID NO: 66588 - protein, 37 aa, Artificial Sequence; identical to SEQ ID NO: 7636
  GFR-binding peptide
  MOD_RES (3)..(4)..(36): Xaa is C or S

SEQ ID NO: 66589 - protein, 38 aa, Artificial Sequence; identical to SEQ ID NO: 7637
  GFR-binding peptide
  MOD_RES (2)..(3)..(37): Xaa is C or S
  MOD_RES (17)..(18)..(19)..(20)..(21): Xaa is A or G
  MOD_RES (22)..(23)..(24)..(25): Xaa is A or G or is absent

SEQ ID NO: 66590 - protein, 36 aa, Artificial Sequence
  GFR-binding peptide
  MOD_RES (2)..(3)..(34)..(36): Xaa is C or S
PXXVPQALSPINILYFVGRKPKVYGKIPMIVRSXKX

SEQ ID NO: 66591 - protein, 40 aa, Artificial Sequence; identical to SEQ ID NO: 7641
  GFR-binding peptide
  MOD_RES (6)..(7): Xaa is C or S
  MOD_RES (21)..(22)..(23)..(24)..(25): Xaa is A or G
  MOD_RES (26)..(27)..(28)..(29): Xaa is A or G or is absent

SEQ ID NO: 66592 - protein, 37 aa, Artificial Sequence; identical to SEQ ID NO: 28922
  GFR-binding peptide
  MOD_RES (1)..(35)..(37): Xaa is C or S
  MOD_RES (15)..(16)..(17)..(18)..(19): Xaa is A or G
  MOD_RES (20)..(21)..(22)..(23): Xaa is A or G or is absent

SEQ ID NO: 66593 - protein, 36 aa, Artificial Sequence
  GFR-binding peptide
  MOD_RES (2)..(3): Xaa is C or S
  MOD_RES (17)..(18)..(19)..(20)..(21): Xaa is A or G
  MOD_RES (22)..(23)..(24)..(25): Xaa is A or G or is absent
PXXTPTKMEPISMLYLXXXXXXXXXKFKYEGMVVDR

SEQ ID NO: 66594 - protein, 42 aa, Artificial Sequence; identical to SEQ ID NO: 7645
  GFR-binding peptide
  MOD_RES (5)..(6)..(39)..(41): Xaa is C or S
  MOD_RES (20)..(21)..(22)..(23)..(24): Xaa is A or G
  MOD_RES (25)..(26)..(27)..(28): Xaa is A or G or is absent

SEQ ID NO: 66595 - protein, 40 aa, Artificial Sequence; identical to SEQ ID NO: 28927
  GFR-binding peptide
  MOD_RES (2)..(3)..(37)..(39): Xaa is C or S
  MOD_RES (17)..(18)..(19)..(20)..(21): Xaa is A or G
  MOD_RES (22)..(23)..(24)..(25): Xaa is A or G or is absent

SEQ ID NO: 66596 - protein, 40 aa, Artificial Sequence; identical to SEQ ID NO: 28928
  GFR-binding peptide
  MOD_RES (1)..(2)..(37)..(39): Xaa is C or S
  MOD_RES (16)..(17)..(18)..(19)..(20): Xaa is A or G
  MOD_RES (21)..(22)..(23)..(24): Xaa is A or G or is absent

SEQ ID NO: 66597 - protein, 35 aa, Artificial Sequence
  GFR-binding peptide
  MOD_RES (1)..(2): Xaa is C or S
  MOD_RES (16)..(17)..(18)..(19)..(20): Xaa is A or G
  MOD_RES (21)..(22)..(23)..(24): Xaa is A or G or is absent
XXTPTKMEPISMLYLXXXXXXXXXKFKYEGMVVDR

SEQ ID NO: 66598 - protein, 33 aa, Artificial Sequence; identical to SEQ ID NO: 7648
  GFR-binding peptide
  MOD_RES (1)..(32): Xaa is C or S

SEQ ID NO: 66599 - protein, 43 aa, Artificial Sequence
  GFR-binding peptide
  MOD_RES (6)..(7)..(40)..(42): Xaa is C or S
  MOD_RES (21)..(22)..(23)..(24)..(25): Xaa is A or G
  MOD_RES (26)..(27)..(28)..(29): Xaa is A or G or is absent
RVPSTXXAPVKTSPISMLYKXXXXXXXXXLKYHYMIVEEXGXL

SEQ ID NO: 66600 - protein, 39 aa, Artificial Sequence; identical to SEQ ID NO: 7649
  GFR-binding peptide
  MOD_RES (4)..(5)..(37)..(39): Xaa is C or S

SEQ ID NO: 66601 - protein, 41 aa, Artificial Sequence; identical to SEQ ID NO: 7651
  GFR-binding peptide
  MOD_RES (5)..(6)..(40): Xaa is C or S
  MOD_RES (20)..(21)..(22)..(23)..(24): Xaa is A or G
  MOD_RES (25)..(26)..(27)..(28): Xaa is A or G or is absent

SEQ ID NO: 66602 - protein, 37 aa, Artificial Sequence; identical to SEQ ID NO: 7653
  GFR-binding peptide
  MOD_RES (1)..(2)..(35)..(37): Xaa is C or S
  MOD_RES (16)..(17)..(18)..(19)..(20): Xaa is A or G
  MOD_RES (21)..(22)..(23)..(24): Xaa is A or G or is absent

SEQ ID NO: 66603 - protein, 35 aa, Artificial Sequence; identical to SEQ ID NO: 28936
  GFR-binding peptide
  MOD_RES (32)..(34): Xaa is C or S

SEQ ID NO: 66604 - protein, 33 aa, Artificial Sequence; identical to SEQ ID NO: 28937
  GFR-binding peptide
  MOD_RES (32)..(32): Xaa is C or S

SEQ ID NO: 66605 - protein, 36 aa, Artificial Sequence; identical to SEQ ID NO: 32992
  GFR-binding peptide
  MOD_RES (5)..(6): Xaa is C or S

SEQ ID NO: 66606 - protein, 39 aa, Artificial Sequence
  GFR-binding peptide
  MOD_RES (4)..(5)..(38): Xaa is C or S
  MOD_RES (19)..(20)..(21)..(22)..(23): Xaa is A or G
  MOD_RES (24)..(25)..(26)..(27): Xaa is A or G or is absent
PSTXXAPVKTSPISMLYKXXXXXXXXXLKYHYMIVEEXG

SEQ ID NO: 66607 - protein, 40 aa, Artificial Sequence; identical to SEQ ID NO: 28940
  GFR-binding peptide
  MOD_RES (4)..(38)..(40): Xaa is C or S
  MOD_RES (18)..(19)..(20)..(21)..(22): Xaa is A or G
  MOD_RES (23)..(24)..(25)..(26): Xaa is A or G or is absent

SEQ ID NO: 66608 - protein, 40 aa, Artificial Sequence
  GFR-binding peptide
  MOD_RES (5)..(6)..(39): Xaa is C or S
  MOD_RES (20)..(21)..(22)..(23)..(24): Xaa is A or G
  MOD_RES (25)..(26)..(27)..(28): Xaa is A or G or is absent
VPSTXXAPVKTSATSMLYYXXXXXXXXXLRKHRMIVEEXG

SEQ ID NO: 66609 - protein, 36 aa, Artificial Sequence; identical to SEQ ID NO: 7658
  GFR-binding peptide
  MOD_RES (5)..(6): Xaa is C or S

SEQ ID NO: 66610 - protein, 40 aa, Artificial Sequence; identical to SEQ ID NO: 7660
  GFR-binding peptide
  MOD_RES (3)..(4)..(38)..(40): Xaa is C or S
  MOD_RES (18)..(19)..(20)..(21)..(22): Xaa is A or G
  MOD_RES (23)..(24)..(25)..(26): Xaa is A or G or is absent

SEQ ID NO: 66611 - protein, 36 aa, Artificial Sequence; identical to SEQ ID NO: 28946
  GFR-binding peptide
  MOD_RES (3)..(4): Xaa is C or S
  MOD_RES (18)..(19)..(20)..(21)..(22): Xaa is A or G
  MOD_RES (23)..(24)..(25)..(26): Xaa is A or G or is absent

SEQ ID NO: 66612 - protein, 35 aa, Artificial Sequence
  GFR-binding peptide
  MOD_RES (1)..(2)..(33)..(35): Xaa is C or S
XXAPVKTEPISMLYLDNGRVLLKFKYEMIVEEXGX

SEQ ID NO: 66613 - protein, 38 aa, Artificial Sequence; identical to SEQ ID NO: 33007
  GFR-binding peptide
  MOD_RES (5)..(37): Xaa is C or S

SEQ ID NO: 66614 - protein, 34 aa, Artificial Sequence; identical to SEQ ID NO: 7664
  GFR-binding peptide
  MOD_RES (34)..(34): Xaa is C or S
  MOD_RES (14)..(15)..(16)..(17)..(18): Xaa is A or G
  MOD_RES (19)..(20)..(21)..(22): Xaa is A or G or is absent

SEQ ID NO: 66615 - protein, 38 aa, Artificial Sequence; identical to SEQ ID NO: 7665
  GFR-binding peptide
  MOD_RES (4)..(38): Xaa is C or S
  MOD_RES (18)..(19)..(20)..(21)..(22): Xaa is A or G
  MOD_RES (23)..(24)..(25)..(26): Xaa is A or G or is absent

SEQ ID NO: 66616 - protein, 37 aa, Artificial Sequence; identical to SEQ ID NO: 7666
  GFR-binding peptide
  MOD_RES (2)..(3)..(34)..(36): Xaa is C or S

SEQ ID NO: 66617 - protein, 39 aa, Artificial Sequence; identical to SEQ ID NO: 28955
  GFR-binding peptide
  MOD_RES (4)..(5)..(36)..(38): Xaa is C or S

SEQ ID NO: 66618 - protein, 42 aa, Artificial Sequence; identical to SEQ ID NO: 7668
  GFR-binding peptide
  MOD_RES (3)..(4)..(39)..(41): Xaa is C or S
  MOD_RES (18)..(19)..(20)..(21)..(22): Xaa is A or G
  MOD_RES (23)..(24)..(25)..(26): Xaa is A or G or is absent

SEQ ID NO: 66619 - protein, 35 aa, Artificial Sequence; identical to SEQ ID NO: 28956
  GFR-binding peptide
  MOD_RES (2)..(3)..(35): Xaa is C or S

SEQ ID NO: 66620 - protein, 42 aa, Artificial Sequence; identical to SEQ ID NO: 33013
  GFR-binding peptide
  MOD_RES (6)..(40)..(42): Xaa is C or S
  MOD_RES (20)..(21)..(22)..(23)..(24): Xaa is A or G
  MOD_RES (25)..(26)..(27)..(28): Xaa is A or G or is absent

SEQ ID NO: 66621 - protein, 37 aa, Artificial Sequence; identical to SEQ ID NO: 28958
  GFR-binding peptide
  MOD_RES (2)..(3): Xaa is C or S
  MOD_RES (17)..(18)..(19)..(20)..(21): Xaa is A or G
  MOD_RES (22)..(23)..(24)..(25): Xaa is A or G or is absent

SEQ ID NO: 66622 - protein, 36 aa, Artificial Sequence; identical to SEQ ID NO: 33015
  GFR-binding peptide
  MOD_RES (1)..(35): Xaa is C or S
  MOD_RES (15)..(16)..(17)..(18)..(19): Xaa is A or G
  MOD_RES (20)..(21)..(22)..(23): Xaa is A or G or is absent

SEQ ID NO: 66623 - protein, 36 aa, Artificial Sequence; identical to SEQ ID NO: 28962
  GFR-binding peptide
  MOD_RES (1)..(35): Xaa is C or S
  MOD_RES (15)..(16)..(17)..(18)..(19): Xaa is A or G
  MOD_RES (20)..(21)..(22)..(23): Xaa is A or G or is absent

SEQ ID NO: 66624 - protein, 34 aa, Artificial Sequence; identical to SEQ ID NO: 33018
  GFR-binding peptide
  MOD_RES (1)..(2)..(34): Xaa is C or S

SEQ ID NO: 66625 - protein, 38 aa, Artificial Sequence; identical to SEQ ID NO: 33023
  GFR-binding peptide
  MOD_RES (3)..(4)..(38): Xaa is C or S
  MOD_RES (18)..(19)..(20)..(21)..(22): Xaa is A or G
  MOD_RES (23)..(24)..(25)..(26): Xaa is A or G or is absent

SEQ ID NO: 66626 - protein, 44 aa, Artificial Sequence; identical to SEQ ID NO: 28965
  GFR-binding peptide
  MOD_RES (7)..(41)..(43): Xaa is C or S
  MOD_RES (21)..(22)..(23)..(24)..(25): Xaa is A or G
  MOD_RES (26)..(27)..(28)..(29): Xaa is A or G or is absent

SEQ ID NO: 66627 - protein, 42 aa, Artificial Sequence; identical to SEQ ID NO: 28966
  GFR-binding peptide
  MOD_RES (5)..(6)..(40)..(42): Xaa is C or S
  MOD_RES (20)..(21)..(22)..(23)..(24): Xaa is A or G
  MOD_RES (25)..(26)..(27)..(28): Xaa is A or G or is absent

SEQ ID NO: 66628 - protein, 36 aa, Artificial Sequence; identical to SEQ ID NO: 7673
  GFR-binding peptide
  MOD_RES (2)..(3)..(35): Xaa is C or S

SEQ ID NO: 66629 - protein, 32 aa, Artificial Sequence; identical to SEQ ID NO: 33028
  GFR-binding peptide
  MOD_RES (32)..(32): Xaa is C or S

SEQ ID NO: 66630 - protein, 37 aa, Artificial Sequence
  GFR-binding peptide
  MOD_RES (2)..(3)..(35)..(37): Xaa is C or S
SXXVPARLSATSILYYDAANNVVLRKHRDMVVEAXGX

SEQ ID NO: 66631 - protein, 39 aa, Artificial Sequence; identical to SEQ ID NO: 33030
  GFR-binding peptide
  MOD_RES (5)..(6): Xaa is C or S
  MOD_RES (20)..(21)..(22)..(23)..(24): Xaa is A or G
  MOD_RES (25)..(26)..(27)..(28): Xaa is A or G or is absent

SEQ ID NO: 66632 - protein, 40 aa, Artificial Sequence; identical to SEQ ID NO: 33033
  GFR-binding peptide
  MOD_RES (3)..(4)..(38)..(40): Xaa is C or S
  MOD_RES (18)..(19)..(20)..(21)..(22): Xaa is A or G
  MOD_RES (23)..(24)..(25)..(26): Xaa is A or G or is absent

SEQ ID NO: 66633 - protein, 33 aa, Artificial Sequence; identical to SEQ ID NO: 33034
  GFR-binding peptide
  MOD_RES (1)..(33): Xaa is C or S

SEQ ID NO: 66634 - protein, 32 aa, Artificial Sequence; identical to SEQ ID NO: 7678
  GFR-binding peptide
  MOD_RES (32)..(32): Xaa is C or S

SEQ ID NO: 66635 - protein, 39 aa, Artificial Sequence; identical to SEQ ID NO: 7679
  GFR-binding peptide
  MOD_RES (3)..(4)..(37)..(39): Xaa is C or S
  MOD_RES (18)..(19)..(20)..(21)..(22): Xaa is A or G
  MOD_RES (23)..(24)..(25)..(26): Xaa is A or G or is absent

SEQ ID NO: 66636 - protein, 35 aa, Artificial Sequence; identical to SEQ ID NO: 7682
  GFR-binding peptide
  MOD_RES (4)..(5): Xaa is C or S

SEQ ID NO: 66637 - protein, 41 aa, Artificial Sequence; identical to SEQ ID NO: 7683
  GFR-binding peptide
  MOD_RES (6)..(7)..(40): Xaa is C or S
  MOD_RES (21)..(22)..(23)..(24)..(25): Xaa is A or G
  MOD_RES (26)..(27)..(28)..(29): Xaa is A or G or is absent

SEQ ID NO: 66638 - protein, 36 aa, Artificial Sequence
  GFR-binding peptide
  MOD_RES (3)..(4)..(35): Xaa is C or S
STXXAPVKTSPISMLYKDNGRVLLLKYHYMIVEEXG

SEQ ID NO: 66639 - protein, 41 aa, Artificial Sequence; identical to SEQ ID NO: 7684
  GFR-binding peptide
  MOD_RES (6)..(7)..(40): Xaa is C or S
  MOD_RES (21)..(22)..(23)..(24)..(25): Xaa is A or G
  MOD_RES (26)..(27)..(28)..(29): Xaa is A or G or is absent

SEQ ID NO: 66640 - protein, 33 aa, Artificial Sequence; identical to SEQ ID NO: 7685
  GFR-binding peptide
  MOD_RES (2)..(3): Xaa is C or S

SEQ ID NO: 66641 - protein, 36 aa, Artificial Sequence
  GFR-binding peptide
  MOD_RES (4)..(5): Xaa is C or S
AGPXXTPTKMEPISMLYLNDKQQIIKFKYEGMVVDR

SEQ ID NO: 66642 - protein, 37 aa, Artificial Sequence
  GFR-binding peptide
  MOD_RES (4)..(5)..(37): Xaa is C or S
PEPXXVPEKMSPINILYFDENKNVVYGKIPNMTVESX

SEQ ID NO: 66643 - protein, 35 aa, Artificial Sequence; identical to SEQ ID NO: 7688
  GFR-binding peptide
  MOD_RES (1)..(2)..(35): Xaa is C or S

SEQ ID NO: 66644 - protein, 37 aa, Artificial Sequence; identical to SEQ ID NO: 7689
  GFR-binding peptide
  MOD_RES (4)..(5): Xaa is C or S
  MOD_RES (19)..(20)..(21)..(22)..(23): Xaa is A or G
  MOD_RES (24)..(25)..(26)..(27): Xaa is A or G or is absent

SEQ ID NO: 66645 - protein, 39 aa, Artificial Sequence; identical to SEQ ID NO: 7690
  GFR-binding peptide
  MOD_RES (6)..(7): Xaa is C or S
  MOD_RES (21)..(22)..(23)..(24)..(25): Xaa is A or G
  MOD_RES (26)..(27)..(28)..(29): Xaa is A or G or is absent

SEQ ID NO: 66646 - protein, 36 aa, Artificial Sequence; identical to SEQ ID NO: 7695
  GFR-binding peptide
  MOD_RES (1)..(2)..(36): Xaa is C or S
  MOD_RES (16)..(17)..(18)..(19)..(20): Xaa is A or G
  MOD_RES (21)..(22)..(23)..(24): Xaa is A or G or is absent

SEQ ID NO: 66647 - protein, 36 aa, Artificial Sequence; identical to SEQ ID NO: 7696
  GFR-binding peptide
  MOD_RES (5)..(6): Xaa is C or S

SEQ ID NO: 66648 - protein, 40 aa, Artificial Sequence; identical to SEQ ID NO: 7697
  GFR-binding peptide
  MOD_RES (2)..(3)..(37)..(39): Xaa is C or S
  MOD_RES (17)..(18)..(19)..(20)..(21): Xaa is A or G
  MOD_RES (22)..(23)..(24)..(25): Xaa is A or G or is absent

SEQ ID NO: 66649 - protein, 32 aa, Artificial Sequence
  GFR-binding peptide
  MOD_RES (1)..(2): Xaa is C or S
XXVPQALSPINILYFVGRKPKVYGKIPMIVRS

SEQ ID NO: 66650 - protein, 35 aa, Artificial Sequence; identical to SEQ ID NO: 7701
  GFR-binding peptide
  MOD_RES (2)..(3)..(35): Xaa is C or S

SEQ ID NO: 66651 - protein, 38 aa, Artificial Sequence; identical to SEQ ID NO: 33058
  GFR-binding peptide
  MOD_RES (6)..(7): Xaa is C or S

SEQ ID NO: 66652 - protein, 35 aa, Artificial Sequence; identical to SEQ ID NO: 7702
  GFR-binding peptide
  MOD_RES (2)..(3): Xaa is C or S
  MOD_RES (17)..(18)..(19)..(20)..(21): Xaa is A or G
  MOD_RES (22)..(23)..(24)..(25): Xaa is A or G or is absent

SEQ ID NO: 66653 - protein, 35 aa, Artificial Sequence; identical to SEQ ID NO: 7703
  GFR-binding peptide
  MOD_RES (2)..(3)..(35): Xaa is C or S

SEQ ID NO: 66654 - protein, 35 aa, Artificial Sequence; identical to SEQ ID NO: 7704
  GFR-binding peptide
  MOD_RES (1)..(2)..(33)..(35): Xaa is C or S

SEQ ID NO: 66655 - protein, 34 aa, Artificial Sequence; identical to SEQ ID NO: 33059
  GFR-binding peptide
  MOD_RES (1)..(2)..(34): Xaa is C or S

SEQ ID NO: 66656 - protein, 35 aa, Artificial Sequence; identical to SEQ ID NO: 15003
  GFR-binding peptide
  MOD_RES (3)..(4): Xaa is C or S

SEQ ID NO: 66657 - protein, 34 aa, Artificial Sequence; identical to SEQ ID NO: 7705
  GFR-binding peptide
  MOD_RES (34)..(34): Xaa is C or S
  MOD_RES (14)..(15)..(16)..(17)..(18): Xaa is A or G
  MOD_RES (19)..(20)..(21)..(22): Xaa is A or G or is absent

SEQ ID NO: 66658 - protein, 44 aa, Artificial Sequence; identical to SEQ ID NO: 7706
  GFR-binding peptide
  MOD_RES (7)..(41)..(43): Xaa is C or S
  MOD_RES (21)..(22)..(23)..(24)..(25): Xaa is A or G
  MOD_RES (26)..(27)..(28)..(29): Xaa is A or G or is absent

SEQ ID NO: 66659 - protein, 36 aa, Artificial Sequence; identical to SEQ ID NO: 29006
  GFR-binding peptide
  MOD_RES (2)..(36): Xaa is C or S
  MOD_RES (16)..(17)..(18)..(19)..(20): Xaa is A or G
  MOD_RES (21)..(22)..(23)..(24): Xaa is A or G or is absent

SEQ ID NO: 66660 - protein, 34 aa, Artificial Sequence; identical to SEQ ID NO: 7709
  GFR-binding peptide
  MOD_RES (1)..(2): Xaa is C or S
  MOD_RES (16)..(17)..(18)..(19)..(20): Xaa is A or G
  MOD_RES (21)..(22)..(23)..(24): Xaa is A or G or is absent

SEQ ID NO: 66661 - protein, 39 aa, Artificial Sequence; identical to SEQ ID NO: 29009
  GFR-binding peptide
  MOD_RES (5)..(6): Xaa is C or S
  MOD_RES (20)..(21)..(22)..(23)..(24): Xaa is A or G
  MOD_RES (25)..(26)..(27)..(28): Xaa is A or G or is absent

SEQ ID NO: 66662 - protein, 35 aa, Artificial Sequence; identical to SEQ ID NO: 7714
  GFR-binding peptide
  MOD_RES (1)..(2)..(33)..(35): Xaa is C or S

SEQ ID NO: 66663 - protein, 36 aa, Artificial Sequence
  GFR-binding peptide
  MOD_RES (5)..(6): Xaa is C or S
TPPTXXVPTRLEPISILYLDSANNVVKFKYEDMVVE

SEQ ID NO: 66664 - protein, 35 aa, Artificial Sequence
  GFR-binding peptide
  MOD_RES (34)..(34): Xaa is C or S
  MOD_RES (14)..(15)..(16)..(17)..(18): Xaa is A or G
  MOD_RES (19)..(20)..(21)..(22): Xaa is A or G or is absent
TPTKMSPISMLYKXXXXXXXXXLKYHYGMVVDRXG

SEQ ID NO: 66665 - protein, 36 aa, Artificial Sequence; identical to SEQ ID NO: 33069
  GFR-binding peptide
  MOD_RES (4)..(5): Xaa is C or S

SEQ ID NO: 66666 - protein, 32 aa, Artificial Sequence; identical to SEQ ID NO: 29012
  GFR-binding peptide
  MOD_RES (1)..(1): Xaa is C or S

SEQ ID NO: 66667 - protein, 35 aa, Artificial Sequence
  GFR-binding peptide
  MOD_RES (2)..(3): Xaa is C or S
  MOD_RES (17)..(18)..(19)..(20)..(21): Xaa is A or G
  MOD_RES (22)..(23)..(24)..(25): Xaa is A or G or is absent
PXXVPEKMEPISILYLXXXXXXXXXKFKYENMTVE

SEQ ID NO: 66668 - protein, 36 aa, Artificial Sequence
  GFR-binding peptide
  MOD_RES (3)..(4)..(35): Xaa is C or S
SPXXVPQDLSPINILYFVGRTPKVYGKIPMVVKSXK

SEQ ID NO: 66669 - protein, 39 aa, Artificial Sequence; identical to SEQ ID NO: 29013
  GFR-binding peptide
  MOD_RES (4)..(38): Xaa is C or S
  MOD_RES (18)..(19)..(20)..(21)..(22): Xaa is A or G
  MOD_RES (23)..(24)..(25)..(26): Xaa is A or G or is absent

SEQ ID NO: 66670 - protein, 39 aa, Artificial Sequence; identical to SEQ ID NO: 29014
  GFR-binding peptide
  MOD_RES (4)..(5): Xaa is C or S
  MOD_RES (19)..(20)..(21)..(22)..(23): Xaa is A or G
  MOD_RES (24)..(25)..(26)..(27): Xaa is A or G or is absent

SEQ ID NO: 66671 - protein, 37 aa, Artificial Sequence; identical to SEQ ID NO: 29015
  GFR-binding peptide
  MOD_RES (7)..(7): Xaa is C or S

SEQ ID NO: 66672 - protein, 34 aa, Artificial Sequence; identical to SEQ ID NO: 7721
  GFR-binding peptide
  MOD_RES (32)..(34): Xaa is C or S

SEQ ID NO: 66673 - protein, 40 aa, Artificial Sequence; identical to SEQ ID NO: 29021
  GFR-binding peptide
  MOD_RES (6)..(7)..(39): Xaa is C or S

SEQ ID NO: 66674 - protein, 35 aa, Artificial Sequence; identical to SEQ ID NO: 33080
  GFR-binding peptide
  MOD_RES (1)..(35): Xaa is C or S
  MOD_RES (15)..(16)..(17)..(18)..(19): Xaa is A or G
  MOD_RES (20)..(21)..(22)..(23): Xaa is A or G or is absent

SEQ ID NO: 66675 - protein, 43 aa, Artificial Sequence; identical to SEQ ID NO: 33083
  GFR-binding peptide
  MOD_RES (6)..(7)..(41)..(43): Xaa is C or S
  MOD_RES (21)..(22)..(23)..(24)..(25): Xaa is A or G
  MOD_RES (26)..(27)..(28)..(29): Xaa is A or G or is absent

SEQ ID NO: 66676 - protein, 39 aa, Artificial Sequence; identical to SEQ ID NO: 7726
  GFR-binding peptide
  MOD_RES (3)..(4)..(36)..(38): Xaa is C or S

SEQ ID NO: 66677 - protein, 42 aa, Artificial Sequence; identical to SEQ ID NO: 33086
  GFR-binding peptide
  MOD_RES (5)..(6)..(40)..(42): Xaa is C or S
  MOD_RES (20)..(21)..(22)..(23)..(24): Xaa is A or G
  MOD_RES (25)..(26)..(27)..(28): Xaa is A or G or is absent

SEQ ID NO: 66678 - protein, 40 aa, Artificial Sequence; identical to SEQ ID NO: 29025
  GFR-binding peptide
  MOD_RES (5)..(6)..(37)..(39): Xaa is C or S

SEQ ID NO: 66679 - protein, 36 aa, Artificial Sequence; identical to SEQ ID NO: 7732
  GFR-binding peptide
  MOD_RES (34)..(36): Xaa is C or S
  MOD_RES (14)..(15)..(16)..(17)..(18): Xaa is A or G
  MOD_RES (19)..(20)..(21)..(22): Xaa is A or G or is absent

SEQ ID NO: 66680 - protein, 37 aa, Artificial Sequence; identical to SEQ ID NO: 7733
  GFR-binding peptide
  MOD_RES (3)..(4)..(36): Xaa is C or S

SEQ ID NO: 66681 - protein, 34 aa, Artificial Sequence; identical to SEQ ID NO: 7735
  GFR-binding peptide
  MOD_RES (1)..(34): Xaa is C or S
  MOD_RES (15)..(16)..(17)..(18)..(19): Xaa is A or G
  MOD_RES (20)..(21)..(22)..(23): Xaa is A or G or is absent

SEQ ID NO: 66682 - protein, 35 aa, Artificial Sequence; identical to SEQ ID NO: 7736
  GFR-binding peptide
  MOD_RES (1)..(35): Xaa is C or S
  MOD_RES (15)..(16)..(17)..(18)..(19): Xaa is A or G
  MOD_RES (20)..(21)..(22)..(23): Xaa is A or G or is absent

SEQ ID NO: 66683 - protein, 38 aa, Artificial Sequence; identical to SEQ ID NO: 29032
  GFR-binding peptide
  MOD_RES (4)..(5): Xaa is C or S
  MOD_RES (19)..(20)..(21)..(22)..(23): Xaa is A or G
  MOD_RES (24)..(25)..(26)..(27): Xaa is A or G or is absent

SEQ ID NO: 66684 - protein, 39 aa, Artificial Sequence; identical to SEQ ID NO: 29034
  GFR-binding peptide
  MOD_RES (1)..(2)..(36)..(38): Xaa is C or S
  MOD_RES (16)..(17)..(18)..(19)..(20): Xaa is A or G
  MOD_RES (21)..(22)..(23)..(24): Xaa is A or G or is absent

SEQ ID NO: 66685 - protein, 36 aa, Artificial Sequence; identical to SEQ ID NO: 29035
  GFR-binding peptide
  MOD_RES (5)..(6): Xaa is C or S

SEQ ID NO: 66686 - protein, 42 aa, Artificial Sequence; identical to SEQ ID NO: 29037
  GFR-binding peptide
  MOD_RES (6)..(7)..(40)..(42): Xaa is C or S
  MOD_RES (21)..(22)..(23)..(24)..(25): Xaa is A or G
  MOD_RES (26)..(27)..(28)..(29): Xaa is A or G or is absent

SEQ ID NO: 66687 - protein, 41 aa, Artificial Sequence; identical to SEQ ID NO: 15038
  GFR-binding peptide
  MOD_RES (6)..(7)..(41): Xaa is C or S
  MOD_RES (21)..(22)..(23)..(24)..(25): Xaa is A or G
  MOD_RES (26)..(27)..(28)..(29): Xaa is A or G or is absent

SEQ ID NO: 66688 - protein, 39 aa, Artificial Sequence; identical to SEQ ID NO: 33107
  GFR-binding peptide
  MOD_RES (6)..(7)..(39): Xaa is C or S

SEQ ID NO: 66689 - protein, 34 aa, Artificial Sequence; identical to SEQ ID NO: 7743
  GFR-binding peptide
  MOD_RES (3)..(4): Xaa is C or S

SEQ ID NO: 66690 - protein, 41 aa, Artificial Sequence; identical to SEQ ID NO: 7748
  GFR-binding peptide
  MOD_RES (4)..(5)..(39)..(41): Xaa is C or S
  MOD_RES (19)..(20)..(21)..(22)..(23): Xaa is A or G
  MOD_RES (24)..(25)..(26)..(27): Xaa is A or G or is absent

SEQ ID NO: 66691 - protein, 33 aa, Artificial Sequence; identical to SEQ ID NO: 57994
  GFR-binding peptide
  MOD_RES (33)..(33): Xaa is C or S
  MOD_RES (14)..(15)..(16)..(17)..(18): Xaa is A or G
  MOD_RES (19)..(20)..(21)..(22): Xaa is A or G or is absent

SEQ ID NO: 66692 - protein, 38 aa, Artificial Sequence; identical to SEQ ID NO: 33120
  GFR-binding peptide
  MOD_RES (3)..(4)..(37): Xaa is C or S

SEQ ID NO: 66693 - protein, 39 aa, Artificial Sequence; identical to SEQ ID NO: 33122
  GFR-binding peptide
  MOD_RES (7)..(7): Xaa is C or S
  MOD_RES (21)..(22)..(23)..(24)..(25): Xaa is A or G
  MOD_RES (26)..(27)..(28)..(29): Xaa is A or G or is absent

SEQ ID NO: 66694 - protein, 40 aa, Artificial Sequence
  GFR-binding peptide
  MOD_RES (6)..(7): Xaa is C or S
  MOD_RES (21)..(22)..(23)..(24)..(25): Xaa is A or G
  MOD_RES (26)..(27)..(28)..(29): Xaa is A or G or is absent
HVPKPXXAPTKLSATSVLYYXXXXXXXXXLRKHRNMVVRS

SEQ ID NO: 66695 - protein, 36 aa, Artificial Sequence
  GFR-binding peptide
  MOD_RES (3)..(4)..(36): Xaa is C or S
EPXXVPEKMSPINILYFDENKNVVYGKIPNMTVESX

SEQ ID NO: 66696 - protein, 32 aa, Artificial Sequence; identical to SEQ ID NO: 7753
  GFR-binding peptide
  MOD_RES (1)..(1): Xaa is C or S

SEQ ID NO: 66697 - protein, 39 aa, Artificial Sequence; identical to SEQ ID NO: 29053
  GFR-binding peptide
  MOD_RES (5)..(6): Xaa is C or S
  MOD_RES (20)..(21)..(22)..(23)..(24): Xaa is A or G
  MOD_RES (25)..(26)..(27)..(28): Xaa is A or G or is absent

SEQ ID NO: 66698 - protein, 40 aa, Artificial Sequence
  GFR-binding peptide
  MOD_RES (4)..(5)..(37)..(39): Xaa is C or S
AGPXXTPTKMSPISMLYKNDKQQIILKYHYGMVVDRXGXS

SEQ ID NO: 66699 - protein, 34 aa, Artificial Sequence; identical to SEQ ID NO: 29056
  GFR-binding peptide
  MOD_RES (1)..(2)..(33): Xaa is C or S

SEQ ID NO: 66700 - protein, 37 aa, Artificial Sequence; identical to SEQ ID NO: 58001
  GFR-binding peptide
  MOD_RES (34)..(36): Xaa is C or S
  MOD_RES (14)..(15)..(16)..(17)..(18): Xaa is A or G
  MOD_RES (19)..(20)..(21)..(22): Xaa is A or G or is absent

SEQ ID NO: 66701 - protein, 37 aa, Artificial Sequence; identical to SEQ ID NO: 7758
  GFR-binding peptide
  MOD_RES (4)..(5): Xaa is C or S
  MOD_RES (19)..(20)..(21)..(22)..(23): Xaa is A or G
  MOD_RES (24)..(25)..(26)..(27): Xaa is A or G or is absent

SEQ ID NO: 66702 - protein, 33 aa, Artificial Sequence; identical to SEQ ID NO: 33134
  GFR-binding peptide
  MOD_RES (1)..(33): Xaa is C or S

SEQ ID NO: 66703 - protein, 42 aa, Artificial Sequence; identical to SEQ ID NO: 29060
  GFR-binding peptide
  MOD_RES (6)..(7)..(39)..(41): Xaa is C or S

SEQ ID NO: 66704 - protein, 37 aa, Artificial Sequence
  GFR-binding peptide
  MOD_RES (1)..(35)..(37): Xaa is C or S
  MOD_RES (15)..(16)..(17)..(18)..(19): Xaa is A or G
  MOD_RES (20)..(21)..(22)..(23): Xaa is A or G or is absent
XVPEKMNAISILYFXXXXXXXXXLKKYRNMTVESXAX

SEQ ID NO: 66705 - protein, 39 aa, Artificial Sequence; identical to SEQ ID NO: 7760
  GFR-binding peptide
  MOD_RES (2)..(3)..(36)..(38): Xaa is C or S

SEQ ID NO: 66706 - protein, 37 aa, Artificial Sequence
  GFR-binding peptide
  MOD_RES (2)..(3)..(35)..(37): Xaa is C or S
PXXVPEKMSPINILYFDENKNVVYGKIPNMTVESXAX

SEQ ID NO: 66707 - protein, 34 aa, Artificial Sequence
  GFR-binding peptide
  MOD_RES (33)..(33): Xaa is C or S
  MOD_RES (14)..(15)..(16)..(17)..(18): Xaa is A or G
  MOD_RES (19)..(20)..(21)..(22): Xaa is A or G or is absent
VPQALSPINILYFXXXXXXXXXYGKIPMIVRSXK

SEQ ID NO: 66708 - protein, 32 aa, Artificial Sequence; identical to SEQ ID NO: 7761
  GFR-binding peptide
  MOD_RES (1)..(1): Xaa is C or S

SEQ ID NO: 66709 - protein, 35 aa, Artificial Sequence; identical to SEQ ID NO: 7762
  GFR-binding peptide
  MOD_RES (2)..(2): Xaa is C or S
  MOD_RES (16)..(17)..(18)..(19)..(20): Xaa is A or G
  MOD_RES (21)..(22)..(23)..(24): Xaa is A or G or is absent

SEQ ID NO: 66710 - protein, 36 aa, Artificial Sequence; identical to SEQ ID NO: 7763
  GFR-binding peptide
  MOD_RES (2)..(3): Xaa is C or S
  MOD_RES (17)..(18)..(19)..(20)..(21): Xaa is A or G
  MOD_RES (22)..(23)..(24)..(25): Xaa is A or G or is absent

SEQ ID NO: 66711 - protein, 35 aa, Artificial Sequence
  GFR-binding peptide
  MOD_RES (34)..(34): Xaa is C or S
  MOD_RES (14)..(15)..(16)..(17)..(18): Xaa is A or G
  MOD_RES (19)..(20)..(21)..(22): Xaa is A or G or is absent
VPTKLSATSILYYXXXXXXXXXLRKHRGMAVSEXG

SEQ ID NO: 66712 - protein, 37 aa, Artificial Sequence; identical to SEQ ID NO: 7770
  GFR-binding peptide
  MOD_RES (3)..(4)..(35)..(37): Xaa is C or S

SEQ ID NO: 66713 - protein, 39 aa, Artificial Sequence; identical to SEQ ID NO: 29070
  GFR-binding peptide
  MOD_RES (5)..(6)..(38): Xaa is C or S

SEQ ID NO: 66714 - protein, 36 aa, Artificial Sequence; identical to SEQ ID NO: 7773
  GFR-binding peptide
  MOD_RES (1)..(2)..(36): Xaa is C or S
  MOD_RES (16)..(17)..(18)..(19)..(20): Xaa is A or G
  MOD_RES (21)..(22)..(23)..(24): Xaa is A or G or is absent

SEQ ID NO: 66715 - protein, 34 aa, Artificial Sequence; identical to SEQ ID NO: 29072
  GFR-binding peptide
  MOD_RES (3)..(4): Xaa is C or S

SEQ ID NO: 66716 - protein, 41 aa, Artificial Sequence; identical to SEQ ID NO: 7774
  GFR-binding peptide
  MOD_RES (2)..(3)..(38)..(40): Xaa is C or S
  MOD_RES (17)..(18)..(19)..(20)..(21): Xaa is A or G
  MOD_RES (22)..(23)..(24)..(25): Xaa is A or G or is absent

SEQ ID NO: 66717 - protein, 41 aa, Artificial Sequence
  GFR-binding peptide
  MOD_RES (6)..(7)..(39)..(41): Xaa is C or S
AAPASXXVPARLSATSILYYDAANNVVLRKHRDMVVEAXGX

SEQ ID NO: 66718 - protein, 36 aa, Artificial Sequence; identical to SEQ ID NO: 7775
  GFR-binding peptide
  MOD_RES (2)..(3)..(35): Xaa is C or S

SEQ ID NO: 66719 - protein, 38 aa, Artificial Sequence; identical to SEQ ID NO: 7776
  GFR-binding peptide
  MOD_RES (5)..(6)..(37): Xaa is C or S

SEQ ID NO: 66720 - protein, 39 aa, Artificial Sequence; identical to SEQ ID NO: 7781
  GFR-binding peptide
  MOD_RES (4)..(5)..(39): Xaa is C or S
  MOD_RES (19)..(20)..(21)..(22)..(23): Xaa is A or G
  MOD_RES (24)..(25)..(26)..(27): Xaa is A or G or is absent

SEQ ID NO: 66721 - protein, 39 aa, Artificial Sequence; identical to SEQ ID NO: 15087
  GFR-binding peptide
  MOD_RES (3)..(4)..(36)..(38): Xaa is C or S

SEQ ID NO: 66722 - protein, 40 aa, Artificial Sequence; identical to SEQ ID NO: 29078
  GFR-binding peptide
  MOD_RES (4)..(5)..(37)..(39): Xaa is C or S

SEQ ID NO: 66723 - protein, 42 aa, Artificial Sequence; identical to SEQ ID NO: 7782
  GFR-binding peptide
  MOD_RES (5)..(6)..(39)..(41): Xaa is C or S
  MOD_RES (20)..(21)..(22)..(23)..(24): Xaa is A or G
  MOD_RES (25)..(26)..(27)..(28): Xaa is A or G or is absent

SEQ ID NO: 66724 - protein, 41 aa, Artificial Sequence; identical to SEQ ID NO: 29079
  GFR-binding peptide
  MOD_RES (4)..(5)..(39)..(41): Xaa is C or S
  MOD_RES (19)..(20)..(21)..(22)..(23): Xaa is A or G
  MOD_RES (24)..(25)..(26)..(27): Xaa is A or G or is absent

SEQ ID NO: 66725 - protein, 37 aa, Artificial Sequence; identical to SEQ ID NO: 7785
  GFR-binding peptide
  MOD_RES (3)..(4)..(35)..(37): Xaa is C or S

SEQ ID NO: 66726 - protein, 35 aa, Artificial Sequence
  GFR-binding peptide
  MOD_RES (32)..(34): Xaa is C or S
VPTRLEPISILYLDSANNVVKFKYEDMVVESXGXR

SEQ ID NO: 66727 - protein, 38 aa, Artificial Sequence; identical to SEQ ID NO: 33180
  GFR-binding peptide
  MOD_RES (4)..(36)..(38): Xaa is C or S

SEQ ID NO: 66728 - protein, 36 aa, Artificial Sequence; identical to SEQ ID NO: 7790
  GFR-binding peptide
  MOD_RES (1)..(36): Xaa is C or S
  MOD_RES (15)..(16)..(17)..(18)..(19): Xaa is A or G
  MOD_RES (20)..(21)..(22)..(23): Xaa is A or G or is absent

SEQ ID NO: 66729 - protein, 38 aa, Artificial Sequence; identical to SEQ ID NO: 33182
  GFR-binding peptide
  MOD_RES (6)..(7): Xaa is C or S

SEQ ID NO: 66730 - protein, 31 aa, Artificial Sequence; identical to SEQ ID NO: 33185
  GFR-binding peptide
  MOD_RES (1)..(1): Xaa is C or S

SEQ ID NO: 66731 - protein, 38 aa, Artificial Sequence; identical to SEQ ID NO: 33188
  GFR-binding peptide
  MOD_RES (5)..(6)..(38): Xaa is C or S

SEQ ID NO: 66732 - protein, 41 aa, Artificial Sequence; identical to SEQ ID NO: 29087
  GFR-binding peptide
  MOD_RES (5)..(6)..(38)..(40): Xaa is C or S

SEQ ID NO: 66733 - protein, 38 aa, Artificial Sequence; identical to SEQ ID NO: 15103
  GFR-binding peptide
  MOD_RES (2)..(3)..(35)..(37): Xaa is C or S

SEQ ID NO: 66734 - protein, 37 aa, Artificial Sequence
  GFR-binding peptide
  MOD_RES (1)..(2)..(34)..(36): Xaa is C or S
XXVPEKMSPINILYFDENKNVVYGKIPNMTVESXAXR

SEQ ID NO: 66735 - protein, 40 aa, Artificial Sequence; identical to SEQ ID NO: 29089
  GFR-binding peptide
  MOD_RES (5)..(6)..(40): Xaa is C or S
  MOD_RES (20)..(21)..(22)..(23)..(24): Xaa is A or G
  MOD_RES (25)..(26)..(27)..(28): Xaa is A or G or is absent

SEQ ID NO: 66736 - protein, 33 aa, Artificial Sequence; identical to SEQ ID NO: 7794
  GFR-binding peptide
  MOD_RES (33)..(33): Xaa is C or S
  MOD_RES (14)..(15)..(16)..(17)..(18): Xaa is A or G
  MOD_RES (19)..(20)..(21)..(22): Xaa is A or G or is absent

SEQ ID NO: 66737 - protein, 35 aa, Artificial Sequence; identical to SEQ ID NO: 7795
  GFR-binding peptide
  MOD_RES (2)..(3): Xaa is C or S
  MOD_RES (17)..(18)..(19)..(20)..(21): Xaa is A or G
  MOD_RES (22)..(23)..(24)..(25): Xaa is A or G or is absent

SEQ ID NO: 66738 - protein, 31 aa, Artificial Sequence; identical to SEQ ID NO: 33196
  GFR-binding peptide
  MOD_RES (1)..(1): Xaa is C or S

SEQ ID NO: 66739 - protein, 37 aa, Artificial Sequence; identical to SEQ ID NO: 29095
  GFR-binding peptide
  MOD_RES (1)..(2)..(34)..(36): Xaa is C or S

SEQ ID NO: 66740 - protein, 43 aa, Artificial Sequence; identical to SEQ ID NO: 7799
  GFR-binding peptide
  MOD_RES (6)..(7)..(41)..(43): Xaa is C or S
  MOD_RES (21)..(22)..(23)..(24)..(25): Xaa is A or G
  MOD_RES (26)..(27)..(28)..(29): Xaa is A or G or is absent

SEQ ID NO: 66741 - protein, 36 aa, Artificial Sequence; identical to SEQ ID NO: 29096
  GFR-binding peptide
  MOD_RES (1)..(35): Xaa is C or S
  MOD_RES (15)..(16)..(17)..(18)..(19): Xaa is A or G
  MOD_RES (20)..(21)..(22)..(23): Xaa is A or G or is absent

SEQ ID NO: 66742 - protein, 38 aa, Artificial Sequence; identical to SEQ ID NO: 7800
  GFR-binding peptide
  MOD_RES (4)..(5)..(38): Xaa is C or S
  MOD_RES (19)..(20)..(21)..(22)..(23): Xaa is A or G
  MOD_RES (24)..(25)..(26)..(27): Xaa is A or G or is absent

SEQ ID NO: 66743 - protein, 39 aa, Artificial Sequence; identical to SEQ ID NO: 29098
  GFR-binding peptide
  MOD_RES (4)..(5)..(37)..(39): Xaa is C or S

SEQ ID NO: 66744 - protein, 36 aa, Artificial Sequence; identical to SEQ ID NO: 7804
  GFR-binding peptide
  MOD_RES (35)..(35): Xaa is C or S
  MOD_RES (14)..(15)..(16)..(17)..(18): Xaa is A or G
  MOD_RES (19)..(20)..(21)..(22): Xaa is A or G or is absent

SEQ ID NO: 66745 - protein, 37 aa, Artificial Sequence; identical to SEQ ID NO: 7805
  GFR-binding peptide
  MOD_RES (1)..(2)..(35)..(37): Xaa is C or S

SEQ ID NO: 66746 - protein, 36 aa, Artificial Sequence
  GFR-binding peptide
  MOD_RES (2)..(3): Xaa is C or S
  MOD_RES (17)..(18)..(19)..(20)..(21): Xaa is A or G
  MOD_RES (22)..(23)..(24)..(25): Xaa is A or G or is absent
PXXTPTKMSPISMLYKXXXXXXXXXLKYHYGMVVDR

SEQ ID NO: 66747 - protein, 40 aa, Artificial Sequence; identical to SEQ ID NO: 7809
  GFR-binding peptide
  MOD_RES (5)..(6)..(39): Xaa is C or S
  MOD_RES (20)..(21)..(22)..(23)..(24): Xaa is A or G
  MOD_RES (25)..(26)..(27)..(28): Xaa is A or G or is absent

SEQ ID NO: 66748 - protein, 35 aa, Artificial Sequence; identical to SEQ ID NO: 7811
  GFR-binding peptide
  MOD_RES (1)..(2): Xaa is C or S
  MOD_RES (16)..(17)..(18)..(19)..(20): Xaa is A or G
  MOD_RES (21)..(22)..(23)..(24): Xaa is A or G or is absent

SEQ ID NO: 66749 - protein, 36 aa, Artificial Sequence; identical to SEQ ID NO: 33211
  GFR-binding peptide
  MOD_RES (4)..(5): Xaa is C or S

SEQ ID NO: 66750 - protein, 37 aa, Artificial Sequence; identical to SEQ ID NO: 29103
  GFR-binding peptide
  MOD_RES (3)..(4)..(36): Xaa is C or S

SEQ ID NO: 66751 - protein, 36 aa, Artificial Sequence; identical to SEQ ID NO: 7812
  GFR-binding peptide
  MOD_RES (1)..(35): Xaa is C or S
  MOD_RES (15)..(16)..(17)..(18)..(19): Xaa is A or G
  MOD_RES (20)..(21)..(22)..(23): Xaa is A or G or is absent

SEQ ID NO: 66752 - protein, 39 aa, Artificial Sequence; identical to SEQ ID NO: 7813
  GFR-binding peptide
  MOD_RES (6)..(7): Xaa is C or S
  MOD_RES (21)..(22)..(23)..(24)..(25): Xaa is A or G
  MOD_RES (26)..(27)..(28)..(29): Xaa is A or G or is absent

SEQ ID NO: 66753 - protein, 37 aa, Artificial Sequence; identical to SEQ ID NO: 29106
  GFR-binding peptide
  MOD_RES (2)..(3)..(36): Xaa is C or S
  MOD_RES (17)..(18)..(19)..(20)..(21): Xaa is A or G
  MOD_RES (22)..(23)..(24)..(25): Xaa is A or G or is absent

SEQ ID NO: 66754 - protein, 38 aa, Artificial Sequence; identical to SEQ ID NO: 7817
  GFR-binding peptide
  MOD_RES (2)..(3)..(35)..(37): Xaa is C or S

SEQ ID NO: 66755 - protein, 37 aa, Artificial Sequence
  GFR-binding peptide
  MOD_RES (4)..(5)..(37): Xaa is C or S
AGPXXTPTKMSATSMLYYNDKQQIILRKHRGMVVDRX

SEQ ID NO: 66756 - protein, 34 aa, Artificial Sequence; identical to SEQ ID NO: 7820
  GFR-binding peptide
  MOD_RES (4)..(4): Xaa is C or S

SEQ ID NO: 66757 - protein, 40 aa, Artificial Sequence; identical to SEQ ID NO: 7821
  GFR-binding peptide
  MOD_RES (3)..(4)..(38)..(40): Xaa is C or S
  MOD_RES (18)..(19)..(20)..(21)..(22): Xaa is A or G
  MOD_RES (23)..(24)..(25)..(26): Xaa is A or G or is absent

SEQ ID NO: 66758 - protein, 37 aa, Artificial Sequence
  GFR-binding peptide
  MOD_RES (2)..(3)..(37): Xaa is C or S
  MOD_RES (17)..(18)..(19)..(20)..(21): Xaa is A or G
  MOD_RES (22)..(23)..(24)..(25): Xaa is A or G or is absent
PXXTPTKMSATSMLYYXXXXXXXXXLRKHRGMVVDRX

SEQ ID NO: 66759 - protein, 36 aa, Artificial Sequence; identical to SEQ ID NO: 29111
  GFR-binding peptide
  MOD_RES (2)..(3): Xaa is C or S
  MOD_RES (17)..(18)..(19)..(20)..(21): Xaa is A or G
  MOD_RES (22)..(23)..(24)..(25): Xaa is A or G or is absent

SEQ ID NO: 66760 - protein, 37 aa, Artificial Sequence; identical to SEQ ID NO: 29112
  GFR-binding peptide
  MOD_RES (6)..(7): Xaa is C or S

SEQ ID NO: 66761 - protein, 32 aa, Artificial Sequence; identical to SEQ ID NO: 7823
  GFR-binding peptide
  MOD_RES (31)..(31): Xaa is C or S

SEQ ID NO: 66762 - protein, 40 aa, Artificial Sequence
  GFR-binding peptide
  MOD_RES (3)..(4)..(37)..(39): Xaa is C or S
  MOD_RES (18)..(19)..(20)..(21)..(22): Xaa is A or G
  MOD_RES (23)..(24)..(25)..(26): Xaa is A or G or is absent
SPXXVSQDLSPINILYFXXXXXXXXXYGKIPMIVKSXKXS

SEQ ID NO: 66763 - protein, 35 aa, Artificial Sequence; identical to SEQ ID NO: 7825
  GFR-binding peptide
  MOD_RES (3)..(4)..(35): Xaa is C or S

SEQ ID NO: 66764 - protein, 35 aa, Artificial Sequence
  GFR-binding peptide
  MOD_RES (2)..(3)..(35): Xaa is C or S
PXXTPTKMSPISMLYKNDKQQIILKYHYGMVVDRX

SEQ ID NO: 66765 - protein, 35 aa, Artificial Sequence; identical to SEQ ID NO: 29118
  GFR-binding peptide
  MOD_RES (2)..(3): Xaa is C or S
  MOD_RES (17)..(18)..(19)..(20)..(21): Xaa is A or G
  MOD_RES (22)..(23)..(24)..(25): Xaa is A or G or is absent

SEQ ID NO: 66766 - protein, 34 aa, Artificial Sequence; identical to SEQ ID NO: 7827
  GFR-binding peptide
  MOD_RES (1)..(1): Xaa is C or S
  MOD_RES (15)..(16)..(17)..(18)..(19): Xaa is A or G
  MOD_RES (20)..(21)..(22)..(23): Xaa is A or G or is absent

SEQ ID NO: 66767 - protein, 35 aa, Artificial Sequence; identical to SEQ ID NO: 58074
  GFR-binding peptide
  MOD_RES (3)..(4)..(35): Xaa is C or S

SEQ ID NO: 66768 - protein, 36 aa, Artificial Sequence
  GFR-binding peptide
  MOD_RES (4)..(5): Xaa is C or S
AGPXXTPTKMSATSMLYYNDKQQIILRKHRGMVVDR

SEQ ID NO: 66769 - protein, 37 aa, Artificial Sequence; identical to SEQ ID NO: 29123
  GFR-binding peptide
  MOD_RES (34)..(36): Xaa is C or S
  MOD_RES (14)..(15)..(16)..(17)..(18): Xaa is A or G
  MOD_RES (19)..(20)..(21)..(22): Xaa is A or G or is absent

SEQ ID NO: 66770 - protein, 32 aa, Artificial Sequence; identical to SEQ ID NO: 29124
  GFR-binding peptide
  MOD_RES (1)..(32): Xaa is C or S

SEQ ID NO: 66771 - protein, 37 aa, Artificial Sequence; identical to SEQ ID NO: 7835
  GFR-binding peptide
  MOD_RES (5)..(6)..(37): Xaa is C or S

SEQ ID NO: 66772 - protein, 38 aa, Artificial Sequence; identical to SEQ ID NO: 29126
  GFR-binding peptide
  MOD_RES (6)..(7): Xaa is C or S

SEQ ID NO: 66773 - protein, 41 aa, Artificial Sequence
  GFR-binding peptide
  MOD_RES (6)..(7)..(39)..(41): Xaa is C or S
STPPTXXVPTRLSATSILYYDSANNVVLRKHRDMVVESXGX

SEQ ID NO: 66774 - protein, 42 aa, Artificial Sequence
  GFR-binding peptide
  MOD_RES (6)..(7)..(41): Xaa is C or S
  MOD_RES (21)..(22)..(23)..(24)..(25): Xaa is A or G
  MOD_RES (26)..(27)..(28)..(29): Xaa is A or G or is absent
GIPEPXXVPEKMSPISILYKXXXXXXXXXLKYHYNMTVESXA

SEQ ID NO: 66775 - protein, 33 aa, Artificial Sequence; identical to SEQ ID NO: 29128
  GFR-binding peptide
  MOD_RES (32)..(32): Xaa is C or S

SEQ ID NO: 66776 - protein, 36 aa, Artificial Sequence; identical to SEQ ID NO: 29132
  GFR-binding peptide
  MOD_RES (3)..(4): Xaa is C or S
  MOD_RES (18)..(19)..(20)..(21)..(22): Xaa is A or G
  MOD_RES (23)..(24)..(25)..(26): Xaa is A or G or is absent

SEQ ID NO: 66777 - protein, 39 aa, Artificial Sequence; identical to SEQ ID NO: 7837
  GFR-binding peptide
  MOD_RES (1)..(2)..(36)..(38): Xaa is C or S
  MOD_RES (16)..(17)..(18)..(19)..(20): Xaa is A or G
  MOD_RES (21)..(22)..(23)..(24): Xaa is A or G or is absent

SEQ ID NO: 66778 - protein, 32 aa, Artificial Sequence
  GFR-binding peptide
  MOD_RES (14)..(15)..(16)..(17)..(18): Xaa is A or G
  MOD_RES (19)..(20)..(21)..(22): Xaa is A or G or is absent
VPARLSATSILYYXXXXXXXXXLRKHRDMVVE

SEQ ID NO: 66779 - protein, 36 aa, Artificial Sequence; identical to SEQ ID NO: 7843
  GFR-binding peptide
  MOD_RES (34)..(36): Xaa is C or S
  MOD_RES (14)..(15)..(16)..(17)..(18): Xaa is A or G
  MOD_RES (19)..(20)..(21)..(22): Xaa is A or G or is absent

SEQ ID NO: 66780 - protein, 36 aa, Artificial Sequence; identical to SEQ ID NO: 7847
  GFR-binding peptide
  MOD_RES (3)..(4): Xaa is C or S
  MOD_RES (18)..(19)..(20)..(21)..(22): Xaa is A or G
  MOD_RES (23)..(24)..(25)..(26): Xaa is A or G or is absent

SEQ ID NO: 66781 - protein, 35 aa, Artificial Sequence; identical to SEQ ID NO: 7849
  GFR-binding peptide
  MOD_RES (4)..(4): Xaa is C or S

SEQ ID NO: 66782 - protein, 34 aa, Artificial Sequence; identical to SEQ ID NO: 7856
  GFR-binding peptide
  MOD_RES (1)..(34): Xaa is C or S
  MOD_RES (15)..(16)..(17)..(18)..(19): Xaa is A or G
  MOD_RES (20)..(21)..(22)..(23): Xaa is A or G or is absent

SEQ ID NO: 66783 - protein, 38 aa, Artificial Sequence; identical to SEQ ID NO: 7861
  GFR-binding peptide
  MOD_RES (3)..(4)..(37): Xaa is C or S

SEQ ID NO: 66784 - protein, 32 aa, Artificial Sequence
  GFR-binding peptide
  MOD_RES (32)..(32): Xaa is C or S
VPEKMEPISILYLDENKNVVKFKYENMTVESX

SEQ ID NO: 66785 - protein, 37 aa, Artificial Sequence; identical to SEQ ID NO: 7870
  GFR-binding peptide
  MOD_RES (4)..(5)..(37): Xaa is C or S

SEQ ID NO: 66786 - protein, 36 aa, Artificial Sequence
  GFR-binding peptide
  MOD_RES (1)..(2)..(34)..(36): Xaa is C or S
XXVPTRLEPISILYLDSANNVVKFKYEDMVVESXGX

SEQ ID NO: 66787 - protein, 41 aa, Artificial Sequence; identical to SEQ ID NO: 33251
  GFR-binding peptide
  MOD_RES (5)..(6)..(40): Xaa is C or S
  MOD_RES (20)..(21)..(22)..(23)..(24): Xaa is A or G
  MOD_RES (25)..(26)..(27)..(28): Xaa is A or G or is absent

SEQ ID NO: 66788 - protein, 39 aa, Artificial Sequence
  GFR-binding peptide
  MOD_RES (4)..(5)..(39): Xaa is C or S
  MOD_RES (19)..(20)..(21)..(22)..(23): Xaa is A or G
  MOD_RES (24)..(25)..(26)..(27): Xaa is A or G or is absent
PASXXVPARLSATSILYYXXXXXXXXXLRKHRDMVVEAX

SEQ ID NO: 66789 - protein, 36 aa, Artificial Sequence; identical to SEQ ID NO: 7875
  GFR-binding peptide
  MOD_RES (3)..(4)..(36): Xaa is C or S

SEQ ID NO: 66790 - protein, 34 aa, Artificial Sequence; identical to SEQ ID NO: 33259
  GFR-binding peptide
  MOD_RES (34)..(34): Xaa is C or S
  MOD_RES (14)..(15)..(16)..(17)..(18): Xaa is A or G
  MOD_RES (19)..(20)..(21)..(22): Xaa is A or G or is absent

SEQ ID NO: 66791 - protein, 37 aa, Artificial Sequence; identical to SEQ ID NO: 7879
  GFR-binding peptide
  MOD_RES (1)..(2)..(34)..(36): Xaa is C or S

SEQ ID NO: 66792 - protein, 42 aa, Artificial Sequence
  GFR-binding peptide
  MOD_RES (5)..(6)..(40)..(42): Xaa is C or S
  MOD_RES (20)..(21)..(22)..(23)..(24): Xaa is A or G
  MOD_RES (25)..(26)..(27)..(28): Xaa is A or G or is absent
IPEPXXVPEKMSPISILYKXXXXXXXXXLKYHYNMTVESXAX

SEQ ID NO: 66793 - protein, 40 aa, Artificial Sequence
  GFR-binding peptide
  MOD_RES (3)..(4)..(38)..(40): Xaa is C or S
  MOD_RES (18)..(19)..(20)..(21)..(22): Xaa is A or G
  MOD_RES (23)..(24)..(25)..(26): Xaa is A or G or is absent
PTXXVPTRLSATSILYYXXXXXXXXXLRKHRDMVVESXGX

SEQ ID NO: 66794 - protein, 37 aa, Artificial Sequence
  GFR-binding peptide
  MOD_RES (6)..(7): Xaa is C or S
GIPEPXXVPEKMNAISILYFDENKNVVLKKYRNMTVE

SEQ ID NO: 66795 - protein, 37 aa, Artificial Sequence; identical to SEQ ID NO: 7890
  GFR-binding peptide
  MOD_RES (1)..(2)..(36): Xaa is C or S
  MOD_RES (16)..(17)..(18)..(19)..(20): Xaa is A or G
  MOD_RES (21)..(22)..(23)..(24): Xaa is A or G or is absent

SEQ ID NO: 66796 - protein, 38 aa, Artificial Sequence; identical to SEQ ID NO: 7891
  GFR-binding peptide
  MOD_RES (4)..(5)..(37): Xaa is C or S

SEQ ID NO: 66797 - protein, 36 aa, Artificial Sequence
  GFR-binding peptide
  MOD_RES (34)..(36): Xaa is C or S
  MOD_RES (14)..(15)..(16)..(17)..(18): Xaa is A or G
  MOD_RES (19)..(20)..(21)..(22): Xaa is A or G or is absent
VPTRLEPISILYLXXXXXXXXXKFKYEDMVVESXGX

SEQ ID NO: 66798 - protein, 39 aa, Artificial Sequence; identical to SEQ ID NO: 7893
  GFR-binding peptide
  MOD_RES (5)..(6)..(38): Xaa is C or S

SEQ ID NO: 66799 - protein, 43 aa, Artificial Sequence; identical to SEQ ID NO: 7895
  GFR-binding peptide
  MOD_RES (5)..(6)..(40)..(42): Xaa is C or S
  MOD_RES (20)..(21)..(22)..(23)..(24): Xaa is A or G
  MOD_RES (25)..(26)..(27)..(28): Xaa is A or G or is absent

SEQ ID NO: 66800 - protein, 35 aa, Artificial Sequence
  GFR-binding peptide
  MOD_RES (1)..(2)..(33)..(35): Xaa is C or S
XXVSQDLSPINILYFIGKTPKIYGKIPMIVKSXKX

SEQ ID NO: 66801 - protein, 39 aa, Artificial Sequence
  GFR-binding peptide
  MOD_RES (4)..(5)..(36)..(38): Xaa is C or S
ASPXXVSQDLSPINILYFIGKTPKIYGKIPMIVKSXKXS

SEQ ID NO: 66802 - protein, 36 aa, Artificial Sequence; identical to SEQ ID NO: 7897
  GFR-binding peptide
  MOD_RES (1)..(2)..(35): Xaa is C or S
  MOD_RES (16)..(17)..(18)..(19)..(20): Xaa is A or G
  MOD_RES (21)..(22)..(23)..(24): Xaa is A or G or is absent

SEQ ID NO: 66803 - protein, 35 aa, Artificial Sequence; identical to SEQ ID NO: 29172
  GFR-binding peptide
  MOD_RES (34)..(34): Xaa is C or S
  MOD_RES (14)..(15)..(16)..(17)..(18): Xaa is A or G
  MOD_RES (19)..(20)..(21)..(22): Xaa is A or G or is absent

SEQ ID NO: 66804 - protein, 35 aa, Artificial Sequence; identical to SEQ ID NO: 7899
  GFR-binding peptide
  MOD_RES (3)..(4)..(35): Xaa is C or S

SEQ ID NO: 66805 - protein, 34 aa, Artificial Sequence
  GFR-binding peptide
  MOD_RES (1)..(2): Xaa is C or S
  MOD_RES (16)..(17)..(18)..(19)..(20): Xaa is A or G
  MOD_RES (21)..(22)..(23)..(24): Xaa is A or G or is absent
XXAPVKTSPISMLYKXXXXXXXXXLKYHYMIVEE

SEQ ID NO: 66806 - protein, 35 aa, Artificial Sequence; identical to SEQ ID NO: 29176
  GFR-binding peptide
  MOD_RES (1)..(33)..(35): Xaa is C or S

SEQ ID NO: 66807 - protein, 32 aa, Artificial Sequence
  GFR-binding peptide
  MOD_RES (14)..(15)..(16)..(17)..(18): Xaa is A or G
  MOD_RES (19)..(20)..(21)..(22): Xaa is A or G or is absent
VPEKMNAISILYFXXXXXXXXXLKKYRNMTVE

SEQ ID NO: 66808 - protein, 38 aa, Artificial Sequence
  GFR-binding peptide
  MOD_RES (2)..(3)..(37): Xaa is C or S
  MOD_RES (17)..(18)..(19)..(20)..(21): Xaa is A or G
  MOD_RES (22)..(23)..(24)..(25): Xaa is A or G or is absent
PXXVPEKMNAISILYFXXXXXXXXXLKKYRNMTVESXA

SEQ ID NO: 66809 - protein, 44 aa, Artificial Sequence; identical to SEQ ID NO: 29177
  GFR-binding peptide
  MOD_RES (6)..(7)..(41)..(43): Xaa is C or S
  MOD_RES (21)..(22)..(23)..(24)..(25): Xaa is A or G
  MOD_RES (26)..(27)..(28)..(29): Xaa is A or G or is absent

SEQ ID NO: 66810 - protein, 39 aa, Artificial Sequence
  GFR-binding peptide
  MOD_RES (6)..(7): Xaa is C or S
  MOD_RES (21)..(22)..(23)..(24)..(25): Xaa is A or G
  MOD_RES (26)..(27)..(28)..(29): Xaa is A or G or is absent
GIPEPXXVPEKMSATSILYYXXXXXXXXXLRKHRNMTVE

SEQ ID NO: 66811 - protein, 38 aa, Artificial Sequence; identical to SEQ ID NO: 29179
  GFR-binding peptide
  MOD_RES (1)..(35)..(37): Xaa is C or S
  MOD_RES (15)..(16)..(17)..(18)..(19): Xaa is A or G
  MOD_RES (20)..(21)..(22)..(23): Xaa is A or G or is absent

SEQ ID NO: 66812 - protein, 34 aa, Artificial Sequence; identical to SEQ ID NO: 29180
  GFR-binding peptide
  MOD_RES (1)..(32)..(34): Xaa is C or S

SEQ ID NO: 66813 - protein, 40 aa, Artificial Sequence; identical to SEQ ID NO: 7904
  GFR-binding peptide
  MOD_RES (6)..(7)..(40): Xaa is C or S
  MOD_RES (21)..(22)..(23)..(24)..(25): Xaa is A or G
  MOD_RES (26)..(27)..(28)..(29): Xaa is A or G or is absent

SEQ ID NO: 66814 - protein, 35 aa, Artificial Sequence; identical to SEQ ID NO: 7905
  GFR-binding peptide
  MOD_RES (1)..(33)..(35): Xaa is C or S

SEQ ID NO: 66815 - protein, 32 aa, Artificial Sequence; identical to SEQ ID NO: 7907
  GFR-binding peptide
  MOD_RES (31)..(31): Xaa is C or S

SEQ ID NO: 66816 - protein, 39 aa, Artificial Sequence; identical to SEQ ID NO: 33282
  GFR-binding peptide
  MOD_RES (6)..(7): Xaa is C or S
  MOD_RES (21)..(22)..(23)..(24)..(25): Xaa is A or G
  MOD_RES (26)..(27)..(28)..(29): Xaa is A or G or is absent

SEQ ID NO: 66817 - protein, 35 aa, Artificial Sequence; identical to SEQ ID NO: 7910
  GFR-binding peptide
  MOD_RES (2)..(3)..(35): Xaa is C or S

SEQ ID NO: 66818 - protein, 41 aa, Artificial Sequence; identical to SEQ ID NO: 33287
  GFR-binding peptide
  MOD_RES (6)..(7)..(40): Xaa is C or S
  MOD_RES (21)..(22)..(23)..(24)..(25): Xaa is A or G
  MOD_RES (26)..(27)..(28)..(29): Xaa is A or G or is absent

SEQ ID NO: 66819 - protein, 38 aa, Artificial Sequence; identical to SEQ ID NO: 7912
  GFR-binding peptide
  MOD_RES (2)..(3)..(37): Xaa is C or S
  MOD_RES (17)..(18)..(19)..(20)..(21): Xaa is A or G
  MOD_RES (22)..(23)..(24)..(25): Xaa is A or G or is absent

SEQ ID NO: 66820 - protein, 37 aa, Artificial Sequence; identical to SEQ ID NO: 7914
  GFR-binding peptide
  MOD_RES (1)..(2)..(34)..(36): Xaa is C or S

SEQ ID NO: 66821 - protein, 40 aa, Artificial Sequence
  GFR-binding peptide
  MOD_RES (6)..(7)..(39): Xaa is C or S
HVPKPXXAPTKLEPISVLYLDDSSNVIKFKYENMVVRSXG

SEQ ID NO: 66822 - protein, 35 aa, Artificial Sequence
  GFR-binding peptide
  MOD_RES (1)..(2)..(35): Xaa is C or S
  MOD_RES (16)..(17)..(18)..(19)..(20): Xaa is A or G
  MOD_RES (21)..(22)..(23)..(24): Xaa is A or G or is absent
XXAPVKTSPISMLYKXXXXXXXXXLKYHYMIVEEX

SEQ ID NO: 66823 - protein, 40 aa, Artificial Sequence; identical to SEQ ID NO: 7916
  GFR-binding peptide
  MOD_RES (5)..(39): Xaa is C or S
  MOD_RES (19)..(20)..(21)..(22)..(23): Xaa is A or G
  MOD_RES (24)..(25)..(26)..(27): Xaa is A or G or is absent

SEQ ID NO: 66824 - protein, 37 aa, Artificial Sequence; identical to SEQ ID NO: 7918
  GFR-binding peptide
  MOD_RES (5)..(6)..(37): Xaa is C or S

SEQ ID NO: 66825 - protein, 36 aa, Artificial Sequence; identical to SEQ ID NO: 33297
  GFR-binding peptide
  MOD_RES (1)..(2)..(36): Xaa is C or S
  MOD_RES (16)..(17)..(18)..(19)..(20): Xaa is A or G
  MOD_RES (21)..(22)..(23)..(24): Xaa is A or G or is absent

SEQ ID NO: 66826 - protein, 36 aa, Artificial Sequence
  GFR-binding peptide
  MOD_RES (2)..(3): Xaa is C or S
  MOD_RES (17)..(18)..(19)..(20)..(21): Xaa is A or G
  MOD_RES (22)..(23)..(24)..(25): Xaa is A or G or is absent
PXXVPEKMEPISILYLXXXXXXXXXKFKYENMTVES

SEQ ID NO: 66827 - protein, 34 aa, Artificial Sequence; identical to SEQ ID NO: 7922
  GFR-binding peptide
  MOD_RES (1)..(2): Xaa is C or S

SEQ ID NO: 66828 - protein, 38 aa, Artificial Sequence
  GFR-binding peptide
  MOD_RES (4)..(5)..(38): Xaa is C or S
  MOD_RES (19)..(20)..(21)..(22)..(23): Xaa is A or G
  MOD_RES (24)..(25)..(26)..(27): Xaa is A or G or is absent
ASPXXVSQDLSPINILYFXXXXXXXXXYGKIPMIVKSX

SEQ ID NO: 66829 - protein, 34 aa, Artificial Sequence; identical to SEQ ID NO: 29202
  GFR-binding peptide
  MOD_RES (1)..(32)..(34): Xaa is C or S

SEQ ID NO: 66830 - protein, 42 aa, Artificial Sequence
  GFR-binding peptide
  MOD_RES (5)..(6)..(40)..(42): Xaa is C or S
  MOD_RES (20)..(21)..(22)..(23)..(24): Xaa is A or G
  MOD_RES (25)..(26)..(27)..(28): Xaa is A or G or is absent
TPPTXXVPTRLSPISILYKXXXXXXXXXLKYHYDMVVESXGX

SEQ ID NO: 66831 - protein, 38 aa, Artificial Sequence; identical to SEQ ID NO: 7933
  GFR-binding peptide
  MOD_RES (3)..(4)..(38): Xaa is C or S
  MOD_RES (18)..(19)..(20)..(21)..(22): Xaa is A or G
  MOD_RES (23)..(24)..(25)..(26): Xaa is A or G or is absent

SEQ ID NO: 66832 - protein, 34 aa, Artificial Sequence; identical to SEQ ID NO: 33310
  GFR-binding peptide
  MOD_RES (1)..(1): Xaa is C or S
  MOD_RES (15)..(16)..(17)..(18)..(19): Xaa is A or G
  MOD_RES (20)..(21)..(22)..(23): Xaa is A or G or is absent

SEQ ID NO: 66833 - protein, 44 aa, Artificial Sequence; identical to SEQ ID NO: 7936
  GFR-binding peptide
  MOD_RES (5)..(6)..(41)..(43): Xaa is C or S
  MOD_RES (20)..(21)..(22)..(23)..(24): Xaa is A or G
  MOD_RES (25)..(26)..(27)..(28): Xaa is A or G or is absent

SEQ ID NO: 66834 - protein, 42 aa, Artificial Sequence
  GFR-binding peptide
  MOD_RES (6)..(7)..(39)..(41): Xaa is C or S
HVPKPXXAPTKLEPISVLYLDDSSNVIKFKYENMVVRSXGXH

SEQ ID NO: 66835 - protein, 42 aa, Artificial Sequence
  GFR-binding peptide
  MOD_RES (6)..(7)..(41): Xaa is C or S
  MOD_RES (21)..(22)..(23)..(24)..(25): Xaa is A or G
  MOD_RES (26)..(27)..(28)..(29): Xaa is A or G or is absent
HVPKPXXAPTKLSPISVLYKXXXXXXXXXLKYHYNMVVRSXG

SEQ ID NO: 66836 - protein, 34 aa, Artificial Sequence
  GFR-binding peptide
  MOD_RES (1)..(2): Xaa is C or S
  MOD_RES (16)..(17)..(18)..(19)..(20): Xaa is A or G
  MOD_RES (21)..(22)..(23)..(24): Xaa is A or G or is absent
XXTPTKMSATSMLYYXXXXXXXXXLRKHRGMVVD

SEQ ID NO: 66837 - protein, 31 aa, Artificial Sequence; identical to SEQ ID NO: 29213
  GFR-binding peptide
  MOD_RES (31)..(31): Xaa is C or S

SEQ ID NO: 66838 - protein, 40 aa, Artificial Sequence; identical to SEQ ID NO: 7940
  GFR-binding peptide
  MOD_RES (6)..(7): Xaa is C or S
  MOD_RES (21)..(22)..(23)..(24)..(25): Xaa is A or G
  MOD_RES (26)..(27)..(28)..(29): Xaa is A or G or is absent

SEQ ID NO: 66839 - protein, 35 aa, Artificial Sequence
  GFR-binding peptide
  MOD_RES (1)..(2)..(33)..(35): Xaa is C or S
XXVPQDLSPINILYFVGRTPKVYGKIPMVVKSXKX

SEQ ID NO: 66840 - protein, 33 aa, Artificial Sequence; identical to SEQ ID NO: 29215
  GFR-binding peptide
  MOD_RES (31)..(33): Xaa is C or S

SEQ ID NO: 66841 - protein, 37 aa, Artificial Sequence; identical to SEQ ID NO: 7942
  GFR-binding peptide
  MOD_RES (3)..(4)..(36): Xaa is C or S

SEQ ID NO: 66842 - protein, 42 aa, Artificial Sequence; identical to SEQ ID NO: 7943
  GFR-binding peptide
  MOD_RES (6)..(7)..(40)..(42): Xaa is C or S
  MOD_RES (21)..(22)..(23)..(24)..(25): Xaa is A or G
  MOD_RES (26)..(27)..(28)..(29): Xaa is A or G or is absent

SEQ ID NO: 66843 - protein, 37 aa, Artificial Sequence; identical to SEQ ID NO: 29219
  GFR-binding peptide
  MOD_RES (2)..(3)..(37): Xaa is C or S
  MOD_RES (17)..(18)..(19)..(20)..(21): Xaa is A or G
  MOD_RES (22)..(23)..(24)..(25): Xaa is A or G or is absent

SEQ ID NO: 66844 - protein, 33 aa, Artificial Sequence
  GFR-binding peptide
  MOD_RES (2)..(3): Xaa is C or S
PXXVPEKMNAISILYFDENKNVVLKKYRNMTVE

SEQ ID NO: 66845 - protein, 35 aa, Artificial Sequence; identical to SEQ ID NO: 7946
  GFR-binding peptide
  MOD_RES (2)..(3)..(35): Xaa is C or S

SEQ ID NO: 66846 - protein, 33 aa, Artificial Sequence; identical to SEQ ID NO: 7947
  GFR-binding peptide
  MOD_RES (2)..(3): Xaa is C or S

SEQ ID NO: 66847 - protein, 39 aa, Artificial Sequence
  GFR-binding peptide
  MOD_RES (6)..(7): Xaa is C or S
  MOD_RES (21)..(22)..(23)..(24)..(25): Xaa is A or G
  MOD_RES (26)..(27)..(28)..(29): Xaa is A or G or is absent
ASAAPXXVPQALSPINILYFXXXXXXXXXYGKIPMIVRS

SEQ ID NO: 66848 - protein, 42 aa, Artificial Sequence
  GFR-binding peptide
  MOD_RES (4)..(5)..(39)..(41): Xaa is C or S
  MOD_RES (19)..(20)..(21)..(22)..(23): Xaa is A or G
  MOD_RES (24)..(25)..(26)..(27): Xaa is A or G or is absent
PASXXVPARLSATSILYYXXXXXXXXXLRKHRDMVVEAXGXR

SEQ ID NO: 66849 - protein, 37 aa, Artificial Sequence
  GFR-binding peptide
  MOD_RES (4)..(5): Xaa is C or S
  MOD_RES (19)..(20)..(21)..(22)..(23): Xaa is A or G
  MOD_RES (24)..(25)..(26)..(27): Xaa is A or G or is absent
PSTXXAPVKTEPISMLYLXXXXXXXXXKFKYEMIVEE

SEQ ID NO: 66850 - protein, 32 aa, Artificial Sequence; identical to SEQ ID NO: 7949
  GFR-binding peptide
  MOD_RES (14)..(15)..(16)..(17)..(18): Xaa is A or G
  MOD_RES (19)..(20)..(21)..(22): Xaa is A or G or is absent

SEQ ID NO: 66851 - protein, 38 aa, Artificial Sequence; identical to SEQ ID NO: 29227
  GFR-binding peptide
  MOD_RES (5)..(6): Xaa is C or S
  MOD_RES (20)..(21)..(22)..(23)..(24): Xaa is A or G
  MOD_RES (25)..(26)..(27)..(28): Xaa is A or G or is absent

SEQ ID NO: 66852 - protein, 42 aa, Artificial Sequence
  GFR-binding peptide
  MOD_RES (5)..(6)..(40)..(42): Xaa is C or S
  MOD_RES (20)..(21)..(22)..(23)..(24): Xaa is A or G
  MOD_RES (25)..(26)..(27)..(28): Xaa is A or G or is absent
IPEPXXVPEKMSPINILYFXXXXXXXXXYGKIPNMTVESXAX

SEQ ID NO: 66853 - protein, 34 aa, Artificial Sequence; identical to SEQ ID NO: 7951
  GFR-binding peptide
  MOD_RES (3)..(4): Xaa is C or S

SEQ ID NO: 66854 - protein, 36 aa, Artificial Sequence
  GFR-binding peptide
  MOD_RES (1)..(2)..(35): Xaa is C or S
  MOD_RES (16)..(17)..(18)..(19)..(20): Xaa is A or G
  MOD_RES (21)..(22)..(23)..(24): Xaa is A or G or is absent
XXAPVKTEPISMLYLXXXXXXXXXKFKYEMIVEEXG

SEQ ID NO: 66855 - protein, 33 aa, Artificial Sequence; identical to SEQ ID NO: 29232
  GFR-binding peptide
  MOD_RES (31)..(33): Xaa is C or S

SEQ ID NO: 66856 - protein, 37 aa, Artificial Sequence; identical to SEQ ID NO: 7952
  GFR-binding peptide
  MOD_RES (1)..(35)..(37): Xaa is C or S
  MOD_RES (15)..(16)..(17)..(18)..(19): Xaa is A or G
  MOD_RES (20)..(21)..(22)..(23): Xaa is A or G or is absent

SEQ ID NO: 66857 - protein, 33 aa, Artificial Sequence; identical to SEQ ID NO: 29236
  GFR-binding peptide
  MOD_RES (2)..(2): Xaa is C or S

SEQ ID NO: 66858 - protein, 38 aa, Artificial Sequence; identical to SEQ ID NO: 33335
  GFR-binding peptide
  MOD_RES (4)..(5)..(36)..(38): Xaa is C or S

SEQ ID NO: 66859 - protein, 39 aa, Artificial Sequence; identical to SEQ ID NO: 15243
  GFR-binding peptide
  MOD_RES (2)..(3)..(37)..(39): Xaa is C or S
  MOD_RES (17)..(18)..(19)..(20)..(21): Xaa is A or G
  MOD_RES (22)..(23)..(24)..(25): Xaa is A or G or is absent

SEQ ID NO: 66860 - protein, 37 aa, Artificial Sequence; identical to SEQ ID NO: 29238
  GFR-binding peptide
  MOD_RES (3)..(4): Xaa is C or S
  MOD_RES (18)..(19)..(20)..(21)..(22): Xaa is A or G
  MOD_RES (23)..(24)..(25)..(26): Xaa is A or G or is absent

SEQ ID NO: 66861 - protein, 37 aa, Artificial Sequence; identical to SEQ ID NO: 33338
  GFR-binding peptide
  MOD_RES (1)..(2)..(34)..(36): Xaa is C or S

SEQ ID NO: 66862 - protein, 38 aa, Artificial Sequence; identical to SEQ ID NO: 7957
  GFR-binding peptide
  MOD_RES (3)..(4)..(38): Xaa is C or S
  MOD_RES (18)..(19)..(20)..(21)..(22): Xaa is A or G
  MOD_RES (23)..(24)..(25)..(26): Xaa is A or G or is absent

SEQ ID NO: 66863 - protein, 35 aa, Artificial Sequence; identical to SEQ ID NO: 15246
  GFR-binding peptide
  MOD_RES (1)..(33)..(35): Xaa is C or S

SEQ ID NO: 66864 - protein, 41 aa, Artificial Sequence
  GFR-binding peptide
  MOD_RES (3)..(4)..(38)..(40): Xaa is C or S
  MOD_RES (18)..(19)..(20)..(21)..(22): Xaa is A or G
  MOD_RES (23)..(24)..(25)..(26): Xaa is A or G or is absent
GPXXTPTKMEPISMLYLXXXXXXXXXKFKYEGMVVDRXGXS

SEQ ID NO: 66865 - protein, 38 aa, Artificial Sequence; identical to SEQ ID NO: 7959
  GFR-binding peptide
  MOD_RES (2)..(3)..(37): Xaa is C or S
  MOD_RES (17)..(18)..(19)..(20)..(21): Xaa is A or G
  MOD_RES (22)..(23)..(24)..(25): Xaa is A or G or is absent

SEQ ID NO: 66866 - protein, 36 aa, Artificial Sequence
  GFR-binding peptide
  MOD_RES (1)..(2)..(36): Xaa is C or S
  MOD_RES (16)..(17)..(18)..(19)..(20): Xaa is A or G
  MOD_RES (21)..(22)..(23)..(24): Xaa is A or G or is absent
XXVPARLSATSILYYXXXXXXXXXLRKHRDMVVEAX

SEQ ID NO: 66867 - protein, 37 aa, Artificial Sequence; identical to SEQ ID NO: 7962
  GFR-binding peptide
  MOD_RES (2)..(3)..(37): Xaa is C or S
  MOD_RES (17)..(18)..(19)..(20)..(21): Xaa is A or G
  MOD_RES (22)..(23)..(24)..(25): Xaa is A or G or is absent

SEQ ID NO: 66868 - protein, 38 aa, Artificial Sequence; identical to SEQ ID NO: 7963
  GFR-binding peptide
  MOD_RES (6)..(7)..(38): Xaa is C or S

SEQ ID NO: 66869 - protein, 36 aa, Artificial Sequence; identical to SEQ ID NO: 29245
  GFR-binding peptide
  MOD_RES (1)..(2)..(36): Xaa is C or S
  MOD_RES (16)..(17)..(18)..(19)..(20): Xaa is A or G
  MOD_RES (21)..(22)..(23)..(24): Xaa is A or G or is absent

SEQ ID NO: 66870 - protein, 30 aa, Artificial Sequence; identical to SEQ ID NO: 7964
  GFR-binding peptide

SEQ ID NO: 66871 - protein, 39 aa, Artificial Sequence
  GFR-binding peptide
  MOD_RES (6)..(7): Xaa is C or S
  MOD_RES (21)..(22)..(23)..(24)..(25): Xaa is A or G
  MOD_RES (26)..(27)..(28)..(29): Xaa is A or G or is absent
GSAGPXXTPTKMSATSMLYYXXXXXXXXXLRKHRGMVVD

SEQ ID NO: 66872 - protein, 37 aa, Artificial Sequence; identical to SEQ ID NO: 7969
  GFR-binding peptide
  MOD_RES (1)..(2)..(36): Xaa is C or S
  MOD_RES (16)..(17)..(18)..(19)..(20): Xaa is A or G
  MOD_RES (21)..(22)..(23)..(24): Xaa is A or G or is absent

SEQ ID NO: 66873 - protein, 36 aa, Artificial Sequence; identical to SEQ ID NO: 7970
  GFR-binding peptide
  MOD_RES (1)..(2)..(33)..(35): Xaa is C or S

SEQ ID NO: 66874 - protein, 35 aa, Artificial Sequence; identical to SEQ ID NO: 33352
  GFR-binding peptide
  MOD_RES (1)..(2): Xaa is C or S
  MOD_RES (16)..(17)..(18)..(19)..(20): Xaa is A or G
  MOD_RES (21)..(22)..(23)..(24): Xaa is A or G or is absent

SEQ ID NO: 66875 - protein, 39 aa, Artificial Sequence; identical to SEQ ID NO: 29253
  GFR-binding peptide
  MOD_RES (6)..(7): Xaa is C or S
  MOD_RES (21)..(22)..(23)..(24)..(25): Xaa is A or G
  MOD_RES (26)..(27)..(28)..(29): Xaa is A or G or is absent

SEQ ID NO: 66876 - protein, 38 aa, Artificial Sequence
  GFR-binding peptide
  MOD_RES (5)..(6): Xaa is C or S
  MOD_RES (20)..(21)..(22)..(23)..(24): Xaa is A or G
  MOD_RES (25)..(26)..(27)..(28): Xaa is A or G or is absent
SAAPXXVPQALSPINILYFXXXXXXXXXYGKIPMIVRS

SEQ ID NO: 66877 - protein, 35 aa, Artificial Sequence; identical to SEQ ID NO: 7971
  GFR-binding peptide
  MOD_RES (1)..(32)..(34): Xaa is C or S

SEQ ID NO: 66878 - protein, 32 aa, Artificial Sequence
  GFR-binding peptide
  MOD_RES (14)..(15)..(16)..(17)..(18): Xaa is A or G
  MOD_RES (19)..(20)..(21)..(22): Xaa is A or G or is absent
TPTKMEPISMLYLXXXXXXXXXKFKYEGMVVD

SEQ ID NO: 66879 - protein, 40 aa, Artificial Sequence
  GFR-binding peptide
  MOD_RES (4)..(5)..(38)..(40): Xaa is C or S
  MOD_RES (19)..(20)..(21)..(22)..(23): Xaa is A or G
  MOD_RES (24)..(25)..(26)..(27): Xaa is A or G or is absent
PSTXXAPVKTSATSMLYYXXXXXXXXXLRKHRMIVEEXGX

SEQ ID NO: 66880 - protein, 38 aa, Artificial Sequence; identical to SEQ ID NO: 7973
  GFR-binding peptide
  MOD_RES (4)..(5)..(38): Xaa is C or S
  MOD_RES (19)..(20)..(21)..(22)..(23): Xaa is A or G
  MOD_RES (24)..(25)..(26)..(27): Xaa is A or G or is absent

SEQ ID NO: 66881 - protein, 41 aa, Artificial Sequence
  GFR-binding peptide
  MOD_RES (5)..(6)..(40): Xaa is C or S
  MOD_RES (20)..(21)..(22)..(23)..(24): Xaa is A or G
  MOD_RES (25)..(26)..(27)..(28): Xaa is A or G or is absent
IPEPXXVPEKMSPINILYFXXXXXXXXXYGKIPNMTVESXA

SEQ ID NO: 66882 - protein, 41 aa, Artificial Sequence; identical to SEQ ID NO: 32310
  GFR-binding peptide
  MOD_RES (4)..(5)..(39)..(41): Xaa is C or S
  MOD_RES (19)..(20)..(21)..(22)..(23): Xaa is A or G
  MOD_RES (24)..(25)..(26)..(27): Xaa is A or G or is absent

SEQ ID NO: 66883 - protein, 37 aa, Artificial Sequence; identical to SEQ ID NO: 7974
  GFR-binding peptide
  MOD_RES (2)..(3)..(34)..(36): Xaa is C or S

SEQ ID NO: 66884 - protein, 40 aa, Artificial Sequence; identical to SEQ ID NO: 32313
  GFR-binding peptide
  MOD_RES (5)..(6)..(38)..(40): Xaa is C or S

SEQ ID NO: 66885 - protein, 37 aa, Artificial Sequence; identical to SEQ ID NO: 32314
  GFR-binding peptide
  MOD_RES (4)..(36): Xaa is C or S

SEQ ID NO: 66886 - protein, 40 aa, Artificial Sequence; identical to SEQ ID NO: 29261
  GFR-binding peptide
  MOD_RES (6)..(7): Xaa is C or S
  MOD_RES (21)..(22)..(23)..(24)..(25): Xaa is A or G
  MOD_RES (26)..(27)..(28)..(29): Xaa is A or G or is absent

SEQ ID NO: 66887 - protein, 35 aa, Artificial Sequence; identical to SEQ ID NO: 7976
  GFR-binding peptide
  MOD_RES (1)..(2)..(33)..(35): Xaa is C or S

SEQ ID NO: 66888 - protein, 35 aa, Artificial Sequence
  GFR-binding peptide
  MOD_RES (1)..(35): Xaa is C or S
  MOD_RES (15)..(16)..(17)..(18)..(19): Xaa is A or G
  MOD_RES (20)..(21)..(22)..(23): Xaa is A or G or is absent
XVPTRLSPISILYKXXXXXXXXXLKYHYDMVVESX

SEQ ID NO: 66889 - protein, 42 aa, Artificial Sequence; identical to SEQ ID NO: 7977
  GFR-binding peptide
  MOD_RES (5)..(6)..(39)..(41): Xaa is C or S
  MOD_RES (20)..(21)..(22)..(23)..(24): Xaa is A or G
  MOD_RES (25)..(26)..(27)..(28): Xaa is A or G or is absent

SEQ ID NO: 66890 - protein, 38 aa, Artificial Sequence; identical to SEQ ID NO: 7979
  GFR-binding peptide
  MOD_RES (5)..(6)..(38): Xaa is C or S

SEQ ID NO: 66891 - protein, 35 aa, Artificial Sequence
  GFR-binding peptide
  MOD_RES (2)..(3)..(34): Xaa is C or S
TXXAPVKTEPISMLYLDNGRVLLKFKYEMIVEEXG

SEQ ID NO: 66892 - protein, 41 aa, Artificial Sequence; identical to SEQ ID NO: 29265
  GFR-binding peptide
  MOD_RES (4)..(38)..(40): Xaa is C or S
  MOD_RES (18)..(19)..(20)..(21)..(22): Xaa is A or G
  MOD_RES (23)..(24)..(25)..(26): Xaa is A or G or is absent

SEQ ID NO: 66893 - protein, 39 aa, Artificial Sequence
  GFR-binding peptide
  MOD_RES (3)..(4)..(36)..(38): Xaa is C or S
KAXXVPTKLSATSILYYDKGVVTYLRKHRGMAVSEXGXR

SEQ ID NO: 66894 - protein, 37 aa, Artificial Sequence; identical to SEQ ID NO: 7983
  GFR-binding peptide
  MOD_RES (2)..(3)..(35)..(37): Xaa is C or S

SEQ ID NO: 66895 - protein, 39 aa, Artificial Sequence
  GFR-binding peptide
  MOD_RES (6)..(7)..(39): Xaa is C or S
GIPEPXXVPEKMSPISILYKDENKNVVLKYHYNMTVESX

SEQ ID NO: 66896 - protein, 40 aa, Artificial Sequence
  GFR-binding peptide
  MOD_RES (6)..(7)..(39): Xaa is C or S
GIPEPXXVPEKMSPINILYFDENKNVVYGKIPNMTVESXA

SEQ ID NO: 66897 - protein, 39 aa, Artificial Sequence; identical to SEQ ID NO: 32324
  GFR-binding peptide
  MOD_RES (2)..(3)..(36)..(38): Xaa is C or S

SEQ ID NO: 66898 - protein, 38 aa, Artificial Sequence; identical to SEQ ID NO: 7988
  GFR-binding peptide
  MOD_RES (3)..(4)..(37): Xaa is C or S

SEQ ID NO: 66899 - protein, 37 aa, Artificial Sequence; identical to SEQ ID NO: 7989
  GFR-binding peptide
  MOD_RES (2)..(3)..(36): Xaa is C or S
  MOD_RES (17)..(18)..(19)..(20)..(21): Xaa is A or G
  MOD_RES (22)..(23)..(24)..(25): Xaa is A or G or is absent

SEQ ID NO: 66900 - protein, 33 aa, Artificial Sequence; identical to SEQ ID NO: 32330
  GFR-binding peptide
  MOD_RES (1)..(2): Xaa is C or S

SEQ ID NO: 66901 - protein, 39 aa, Artificial Sequence; identical to SEQ ID NO: 7990
  GFR-binding peptide
  MOD_RES (3)..(4)..(38): Xaa is C or S
  MOD_RES (18)..(19)..(20)..(21)..(22): Xaa is A or G
  MOD_RES (23)..(24)..(25)..(26): Xaa is A or G or is absent

SEQ ID NO: 66902 - protein, 39 aa, Artificial Sequence; identical to SEQ ID NO: 32332
  GFR-binding peptide
  MOD_RES (3)..(4)..(36)..(38): Xaa is C or S

SEQ ID NO: 66903 - protein, 31 aa, Artificial Sequence; identical to SEQ ID NO: 57259
  GFR-binding peptide
  MOD_RES (31)..(31): Xaa is C or S

SEQ ID NO: 66904 - protein, 39 aa, Artificial Sequence
  GFR-binding peptide
  MOD_RES (5)..(6): Xaa is C or S
  MOD_RES (20)..(21)..(22)..(23)..(24): Xaa is A or G
  MOD_RES (25)..(26)..(27)..(28): Xaa is A or G or is absent
TPPTXXVPTRLEPISILYLXXXXXXXXXKFKYEDMVVES

SEQ ID NO: 66905 - protein, 35 aa, Artificial Sequence; identical to SEQ ID NO: 7994
  GFR-binding peptide
  MOD_RES (1)..(32)..(34): Xaa is C or S

SEQ ID NO: 66906 - protein, 37 aa, Artificial Sequence; identical to SEQ ID NO: 7997
  GFR-binding peptide
  MOD_RES (6)..(7): Xaa is C or S

SEQ ID NO: 66907 - protein, 36 aa, Artificial Sequence
  GFR-binding peptide
  MOD_RES (3)..(4)..(36): Xaa is C or S
GPXXTPTKMEPISMLYLNDKQQIIKFKYEGMVVDRX

SEQ ID NO: 66908 - protein, 36 aa, Artificial Sequence
  GFR-binding peptide
  MOD_RES (4)..(5): Xaa is C or S
PEPXXVPEKMEPISILYLDENKNVVKFKYENMTVES

SEQ ID NO: 66909 - protein, 40 aa, Artificial Sequence
  GFR-binding peptide
  MOD_RES (4)..(5)..(37)..(39): Xaa is C or S
PEPXXVPEKMSPINILYFDENKNVVYGKIPNMTVESXAXR

SEQ ID NO: 66910 - protein, 40 aa, Artificial Sequence
  GFR-binding peptide
  MOD_RES (3)..(4)..(38)..(40): Xaa is C or S
  MOD_RES (18)..(19)..(20)..(21)..(22): Xaa is A or G
  MOD_RES (23)..(24)..(25)..(26): Xaa is A or G or is absent
ASXXVPARLSATSILYYXXXXXXXXXLRKHRDMVVEAXGX

SEQ ID NO: 66911 - protein, 39 aa, Artificial Sequence; identical to SEQ ID NO: 32341
  GFR-binding peptide
  MOD_RES (6)..(7)..(39): Xaa is C or S

SEQ ID NO: 66912 - protein, 39 aa, Artificial Sequence; identical to SEQ ID NO: 8000
  GFR-binding peptide
  MOD_RES (5)..(6): Xaa is C or S
  MOD_RES (20)..(21)..(22)..(23)..(24): Xaa is A or G
  MOD_RES (25)..(26)..(27)..(28): Xaa is A or G or is absent

SEQ ID NO: 66913 - protein, 37 aa, Artificial Sequence; identical to SEQ ID NO: 8001
  GFR-binding peptide
  MOD_RES (2)..(3)..(34)..(36): Xaa is C or S

SEQ ID NO: 66914 - protein, 39 aa, Artificial Sequence
  GFR-binding peptide
  MOD_RES (3)..(4)..(38): Xaa is C or S
  MOD_RES (18)..(19)..(20)..(21)..(22): Xaa is A or G
  MOD_RES (23)..(24)..(25)..(26): Xaa is A or G or is absent
GPXXTPTKMEPISMLYLXXXXXXXXXKFKYEGMVVDRXG

SEQ ID NO: 66915 - protein, 37 aa, Artificial Sequence
  GFR-binding peptide
  MOD_RES (2)..(3)..(37): Xaa is C or S
  MOD_RES (17)..(18)..(19)..(20)..(21): Xaa is A or G
  MOD_RES (22)..(23)..(24)..(25): Xaa is A or G or is absent
AXXVPTKLSATSILYYXXXXXXXXXLRKHRGMAVSEX

SEQ ID NO: 66916 - protein, 32 aa, Artificial Sequence
  GFR-binding peptide
  MOD_RES (1)..(32): Xaa is C or S
XAPVKTSPISMLYKDNGRVLLLKYHYMIVEEX

SEQ ID NO: 66917 - protein, 36 aa, Artificial Sequence; identical to SEQ ID NO: 15303
  GFR-binding peptide
  MOD_RES (1)..(2)..(34)..(36): Xaa is C or S

SEQ ID NO: 66918 - protein, 40 aa, Artificial Sequence; identical to SEQ ID NO: 32355
  GFR-binding peptide
  MOD_RES (4)..(5)..(39): Xaa is C or S
  MOD_RES (19)..(20)..(21)..(22)..(23): Xaa is A or G
  MOD_RES (24)..(25)..(26)..(27): Xaa is A or G or is absent

SEQ ID NO: 66919 - protein, 37 aa, Artificial Sequence
  GFR-binding peptide
  MOD_RES (1)..(2)..(36): Xaa is C or S
  MOD_RES (16)..(17)..(18)..(19)..(20): Xaa is A or G
  MOD_RES (21)..(22)..(23)..(24): Xaa is A or G or is absent
XXVPEKMSPINILYFXXXXXXXXXYGKIPNMTVESXA

SEQ ID NO: 66920 - protein, 35 aa, Artificial Sequence; identical to SEQ ID NO: 32359
  GFR-binding peptide
  MOD_RES (34)..(34): Xaa is C or S
  MOD_RES (14)..(15)..(16)..(17)..(18): Xaa is A or G
  MOD_RES (19)..(20)..(21)..(22): Xaa is A or G or is absent

SEQ ID NO: 66921 - protein, 35 aa, Artificial Sequence; identical to SEQ ID NO: 15305
  GFR-binding peptide
  MOD_RES (2)..(3): Xaa is C or S
  MOD_RES (17)..(18)..(19)..(20)..(21): Xaa is A or G
  MOD_RES (22)..(23)..(24)..(25): Xaa is A or G or is absent

SEQ ID NO: 66922 - protein, 37 aa, Artificial Sequence
  GFR-binding peptide
  MOD_RES (1)..(2)..(35)..(37): Xaa is C or S
  MOD_RES (16)..(17)..(18)..(19)..(20): Xaa is A or G
  MOD_RES (21)..(22)..(23)..(24): Xaa is A or G or is absent
XXAPVKTSPISMLYKXXXXXXXXXLKYHYMIVEEXGX

SEQ ID NO: 66923 - protein, 41 aa, Artificial Sequence
  GFR-binding peptide
  MOD_RES (4)..(5)..(38)..(40): Xaa is C or S
  MOD_RES (19)..(20)..(21)..(22)..(23): Xaa is A or G
  MOD_RES (24)..(25)..(26)..(27): Xaa is A or G or is absent
ASPXXVPQDLSPINILYFXXXXXXXXXYGKIPMVVKSXKXS

SEQ ID NO: 66924 - protein, 39 aa, Artificial Sequence; identical to SEQ ID NO: 32364
  GFR-binding peptide
  MOD_RES (4)..(5)..(38): Xaa is C or S
  MOD_RES (19)..(20)..(21)..(22)..(23): Xaa is A or G
  MOD_RES (24)..(25)..(26)..(27): Xaa is A or G or is absent

SEQ ID NO: 66925 - protein, 36 aa, Artificial Sequence
  GFR-binding peptide
  MOD_RES (2)..(3)..(35): Xaa is C or S
PXXTPTKMSPISMLYKNDKQQIILKYHYGMVVDRXG

SEQ ID NO: 66926 - protein, 40 aa, Artificial Sequence; identical to SEQ ID NO: 32367
  GFR-binding peptide
  MOD_RES (6)..(7)..(39): Xaa is C or S

SEQ ID NO: 66927 - protein, 42 aa, Artificial Sequence; identical to SEQ ID NO: 8016
  GFR-binding peptide
  MOD_RES (5)..(6)..(39)..(41): Xaa is C or S

SEQ ID NO: 66928 - protein, 38 aa, Artificial Sequence; identical to SEQ ID NO: 29291
  GFR-binding peptide
  MOD_RES (4)..(5)..(37): Xaa is C or S

SEQ ID NO: 66929 - protein, 38 aa, Artificial Sequence
  GFR-binding peptide
  MOD_RES (5)..(6)..(37): Xaa is C or S
VPSTXXAPVKTEPISMLYLDNGRVLLKFKYEMIVEEXG

SEQ ID NO: 66930 - protein, 36 aa, Artificial Sequence; identical to SEQ ID NO: 8018
  GFR-binding peptide
  MOD_RES (2)..(36): Xaa is C or S
  MOD_RES (16)..(17)..(18)..(19)..(20): Xaa is A or G
  MOD_RES (21)..(22)..(23)..(24): Xaa is A or G or is absent

SEQ ID NO: 66931 - protein, 34 aa, Artificial Sequence; identical to SEQ ID NO: 8019
  GFR-binding peptide
  MOD_RES (34)..(34): Xaa is C or S
  MOD_RES (14)..(15)..(16)..(17)..(18): Xaa is A or G
  MOD_RES (19)..(20)..(21)..(22): Xaa is A or G or is absent

SEQ ID NO: 66932 - protein, 36 aa, Artificial Sequence
  GFR-binding peptide
  MOD_RES (5)..(6): Xaa is C or S
SASPXXVPQDLSPINILYFVGRTPKVYGKIPMVVKS

SEQ ID NO: 66933 - protein, 40 aa, Artificial Sequence; identical to SEQ ID NO: 32374
  GFR-binding peptide
  MOD_RES (5)..(6)..(38)..(40): Xaa is C or S

SEQ ID NO: 66934 - protein, 39 aa, Artificial Sequence
  GFR-binding peptide
  MOD_RES (3)..(4)..(38): Xaa is C or S
  MOD_RES (18)..(19)..(20)..(21)..(22): Xaa is A or G
  MOD_RES (23)..(24)..(25)..(26): Xaa is A or G or is absent
GPXXTPTKMSPISMLYKXXXXXXXXXLKYHYGMVVDRXG

SEQ ID NO: 66935 - protein, 32 aa, Artificial Sequence; identical to SEQ ID NO: 57305
  GFR-binding peptide
  MOD_RES (1)..(1): Xaa is C or S

SEQ ID NO: 66936 - protein, 41 aa, Artificial Sequence; identical to SEQ ID NO: 32379
  GFR-binding peptide
  MOD_RES (5)..(6)..(38)..(40): Xaa is C or S

SEQ ID NO: 66937 - protein, 34 aa, Artificial Sequence
  GFR-binding peptide
  MOD_RES (32)..(34): Xaa is C or S
VPEKMSPISILYKDENKNVVLKYHYNMTVESXAX

SEQ ID NO: 66938 - protein, 33 aa, Artificial Sequence; identical to SEQ ID NO: 8023
  GFR-binding peptide
  MOD_RES (3)..(3): Xaa is C or S

SEQ ID NO: 66939 - protein, 44 aa, Artificial Sequence; identical to SEQ ID NO: 8024
  GFR-binding peptide
  MOD_RES (6)..(7)..(41)..(43): Xaa is C or S
  MOD_RES (21)..(22)..(23)..(24)..(25): Xaa is A or G
  MOD_RES (26)..(27)..(28)..(29): Xaa is A or G or is absent

SEQ ID NO: 66940 - protein, 36 aa, Artificial Sequence
  GFR-binding peptide
  MOD_RES (2)..(3)..(35): Xaa is C or S
PXXVPEKMSPISILYKDENKNVVLKYHYNMTVESXA

SEQ ID NO: 66941 - protein, 38 aa, Artificial Sequence; identical to SEQ ID NO: 29297
  GFR-binding peptide
  MOD_RES (6)..(7): Xaa is C or S

SEQ ID NO: 66942 - protein, 32 aa, Artificial Sequence
  GFR-binding peptide
  MOD_RES (1)..(2): Xaa is C or S
XXVPTRLSATSILYYDSANNVVLRKHRDMVVE

SEQ ID NO: 66943 - protein, 32 aa, Artificial Sequence; identical to SEQ ID NO: 32392
  GFR-binding peptide
  MOD_RES (14)..(15)..(16)..(17)..(18): Xaa is A or G
  MOD_RES (19)..(20)..(21)..(22): Xaa is A or G or is absent

SEQ ID NO: 66944 - protein, 43 aa, Artificial Sequence; identical to SEQ ID NO: 32393
  GFR-binding peptide
  MOD_RES (5)..(6)..(40)..(42): Xaa is C or S
  MOD_RES (20)..(21)..(22)..(23)..(24): Xaa is A or G
  MOD_RES (25)..(26)..(27)..(28): Xaa is A or G or is absent

SEQ ID NO: 66945 - protein, 43 aa, Artificial Sequence; identical to SEQ ID NO: 8030
  GFR-binding peptide
  MOD_RES (6)..(7)..(41)..(43): Xaa is C or S
  MOD_RES (21)..(22)..(23)..(24)..(25): Xaa is A or G
  MOD_RES (26)..(27)..(28)..(29): Xaa is A or G or is absent

SEQ ID NO: 66946 - protein, 38 aa, Artificial Sequence; identical to SEQ ID NO: 32396
  GFR-binding peptide
  MOD_RES (3)..(4)..(36)..(38): Xaa is C or S

SEQ ID NO: 66947 - protein, 33 aa, Artificial Sequence; identical to SEQ ID NO: 32397
  GFR-binding peptide
  MOD_RES (1)..(1): Xaa is C or S
  MOD_RES (15)..(16)..(17)..(18)..(19): Xaa is A or G
  MOD_RES (20)..(21)..(22)..(23): Xaa is A or G or is absent

SEQ ID NO: 66948 - protein, 39 aa, Artificial Sequence
  GFR-binding peptide
  MOD_RES (5)..(6)..(38): Xaa is C or S
IPEPXXVPEKMSATSILYYDENKNVVLRKHRNMTVESXA

SEQ ID NO: 66949 - protein, 44 aa, Artificial Sequence; identical to SEQ ID NO: 29306
  GFR-binding peptide
  MOD_RES (6)..(7)..(41)..(43): Xaa is C or S
  MOD_RES (21)..(22)..(23)..(24)..(25): Xaa is A or G
  MOD_RES (26)..(27)..(28)..(29): Xaa is A or G or is absent

SEQ ID NO: 66950 - protein, 37 aa, Artificial Sequence; identical to SEQ ID NO: 29307
  GFR-binding peptide
  MOD_RES (4)..(5): Xaa is C or S
  MOD_RES (19)..(20)..(21)..(22)..(23): Xaa is A or G
  MOD_RES (24)..(25)..(26)..(27): Xaa is A or G or is absent

SEQ ID NO: 66951 - protein, 31 aa, Artificial Sequence; identical to SEQ ID NO: 32401
  GFR-binding peptide

SEQ ID NO: 66952 - protein, 33 aa, Artificial Sequence
  GFR-binding peptide
  MOD_RES (2)..(3): Xaa is C or S
TXXAPVKTSPISMLYKDNGRVLLLKYHYMIVEE

SEQ ID NO: 66953 - protein, 41 aa, Artificial Sequence; identical to SEQ ID NO: 8035
  GFR-binding peptide
  MOD_RES (4)..(5)..(40): Xaa is C or S
  MOD_RES (19)..(20)..(21)..(22)..(23): Xaa is A or G
  MOD_RES (24)..(25)..(26)..(27): Xaa is A or G or is absent

SEQ ID NO: 66954 - protein, 38 aa, Artificial Sequence; identical to SEQ ID NO: 8036
  GFR-binding peptide
  MOD_RES (5)..(6): Xaa is C or S
  MOD_RES (20)..(21)..(22)..(23)..(24): Xaa is A or G
  MOD_RES (25)..(26)..(27)..(28): Xaa is A or G or is absent

SEQ ID NO: 66955 - protein, 33 aa, Artificial Sequence; identical to SEQ ID NO: 8037
  GFR-binding peptide
  MOD_RES (1)..(32): Xaa is C or S

SEQ ID NO: 66956 - protein, 36 aa, Artificial Sequence
  GFR-binding peptide
  MOD_RES (5)..(6): Xaa is C or S
IPEPXXVPEKMNAISILYFDENKNVVLKKYRNMTVE

SEQ ID NO: 66957 - protein, 33 aa, Artificial Sequence; identical to SEQ ID NO: 8039
  GFR-binding peptide
  MOD_RES (1)..(32): Xaa is C or S

SEQ ID NO: 66958 - protein, 37 aa, Artificial Sequence; identical to SEQ ID NO: 8040
  GFR-binding peptide
  MOD_RES (1)..(2)..(36): Xaa is C or S
  MOD_RES (16)..(17)..(18)..(19)..(20): Xaa is A or G
  MOD_RES (21)..(22)..(23)..(24): Xaa is A or G or is absent

SEQ ID NO: 66959 - protein, 40 aa, Artificial Sequence; identical to SEQ ID NO: 32413
  GFR-binding peptide
  MOD_RES (4)..(5)..(39): Xaa is C or S
  MOD_RES (19)..(20)..(21)..(22)..(23): Xaa is A or G
  MOD_RES (24)..(25)..(26)..(27): Xaa is A or G or is absent

SEQ ID NO: 66960 - protein, 33 aa, Artificial Sequence
  GFR-binding peptide
  MOD_RES (1)..(2): Xaa is C or S
XXTPTKMSATSMLYYNDKQQIILRKHRGMVVDR

SEQ ID NO: 66961 - protein, 40 aa, Artificial Sequence; identical to SEQ ID NO: 32417
  GFR-binding peptide
  MOD_RES (6)..(7)..(38)..(40): Xaa is C or S

SEQ ID NO: 66962 - protein, 40 aa, Artificial Sequence; identical to SEQ ID NO: 8047
  GFR-binding peptide
  MOD_RES (5)..(6)..(39): Xaa is C or S

SEQ ID NO: 66963 - protein, 36 aa, Artificial Sequence; identical to SEQ ID NO: 32419
  GFR-binding peptide
  MOD_RES (3)..(4)..(36): Xaa is C or S

SEQ ID NO: 66964 - protein, 41 aa, Artificial Sequence; identical to SEQ ID NO: 8051
  GFR-binding peptide
  MOD_RES (6)..(7)..(41): Xaa is C or S
  MOD_RES (21)..(22)..(23)..(24)..(25): Xaa is A or G
  MOD_RES (26)..(27)..(28)..(29): Xaa is A or G or is absent

SEQ ID NO: 66965 - protein, 40 aa, Artificial Sequence; identical to SEQ ID NO: 57338
  GFR-binding peptide
  MOD_RES (5)..(6)..(38)..(40): Xaa is C or S

SEQ ID NO: 66966 - protein, 39 aa, Artificial Sequence; identical to SEQ ID NO: 8054
  GFR-binding peptide
  MOD_RES (6)..(7)..(38): Xaa is C or S

SEQ ID NO: 66967 - protein, 36 aa, Artificial Sequence
  GFR-binding peptide
  MOD_RES (1)..(2)..(33)..(35): Xaa is C or S
XXVSQDLSPINILYFIGKTPKIYGKIPMIVKSXKXS

SEQ ID NO: 66968 - protein, 39 aa, Artificial Sequence; identical to SEQ ID NO: 8056
  GFR-binding peptide
  MOD_RES (4)..(5): Xaa is C or S
  MOD_RES (19)..(20)..(21)..(22)..(23): Xaa is A or G
  MOD_RES (24)..(25)..(26)..(27): Xaa is A or G or is absent

SEQ ID NO: 66969 - protein, 36 aa, Artificial Sequence; identical to SEQ ID NO: 32430
  GFR-binding peptide
  MOD_RES (33)..(35): Xaa is C or S
  MOD_RES (14)..(15)..(16)..(17)..(18): Xaa is A or G
  MOD_RES (19)..(20)..(21)..(22): Xaa is A or G or is absent

SEQ ID NO: 66970 - protein, 39 aa, Artificial Sequence; identical to SEQ ID NO: 29335
  GFR-binding peptide
  MOD_RES (5)..(6)..(38): Xaa is C or S

SEQ ID NO: 66971 - protein, 36 aa, Artificial Sequence; identical to SEQ ID NO: 8058
  GFR-binding peptide
  MOD_RES (1)..(2)..(34)..(36): Xaa is C or S

SEQ ID NO: 66972 - protein, 36 aa, Artificial Sequence; identical to SEQ ID NO: 32441
  GFR-binding peptide
  MOD_RES (2)..(3)..(35): Xaa is C or S

SEQ ID NO: 66973 - protein, 38 aa, Artificial Sequence; identical to SEQ ID NO: 32442
  GFR-binding peptide
  MOD_RES (6)..(7): Xaa is C or S

SEQ ID NO: 66974 - protein, 38 aa, Artificial Sequence; identical to SEQ ID NO: 8063
  GFR-binding peptide
  MOD_RES (4)..(5)..(37): Xaa is C or S

SEQ ID NO: 66975 - protein, 37 aa, Artificial Sequence; identical to SEQ ID NO: 8064
  GFR-binding peptide
  MOD_RES (6)..(7): Xaa is C or S

SEQ ID NO: 66976 - protein, 33 aa, Artificial Sequence; identical to SEQ ID NO: 8065
  GFR-binding peptide
  MOD_RES (2)..(3): Xaa is C or S

SEQ ID NO: 66977 - protein, 36 aa, Artificial Sequence; identical to SEQ ID NO: 32444
  GFR-binding peptide
  MOD_RES (1)..(2)..(36): Xaa is C or S
  MOD_RES (16)..(17)..(18)..(19)..(20): Xaa is A or G
  MOD_RES (21)..(22)..(23)..(24): Xaa is A or G or is absent

SEQ ID NO: 66978 - protein, 38 aa, Artificial Sequence; identical to SEQ ID NO: 29350
  GFR-binding peptide
  MOD_RES (5)..(6)..(37): Xaa is C or S

SEQ ID NO: 66979 - protein, 35 aa, Artificial Sequence; identical to SEQ ID NO: 8066
  GFR-binding peptide
  MOD_RES (4)..(5): Xaa is C or S

SEQ ID NO: 66980 - protein, 36 aa, Artificial Sequence
  GFR-binding peptide
  MOD_RES (1)..(2)..(34)..(36): Xaa is C or S
XXTPTKMSATSMLYYNDKQQIILRKHRGMVVDRXGX

SEQ ID NO: 66981 - protein, 34 aa, Artificial Sequence
  GFR-binding peptide
  MOD_RES (1)..(2)..(33): Xaa is C or S
XXVSQDLSPINILYFIGKTPKIYGKIPMIVKSXK

SEQ ID NO: 66982 - protein, 43 aa, Artificial Sequence; identical to SEQ ID NO: 32446
  GFR-binding peptide
  MOD_RES (6)..(7)..(41)..(43): Xaa is C or S
  MOD_RES (21)..(22)..(23)..(24)..(25): Xaa is A or G
  MOD_RES (26)..(27)..(28)..(29): Xaa is A or G or is absent

SEQ ID NO: 66983 - protein, 38 aa, Artificial Sequence; identical to SEQ ID NO: 8067
  GFR-binding peptide
  MOD_RES (2)..(3)..(36)..(38): Xaa is C or S
  MOD_RES (17)..(18)..(19)..(20)..(21): Xaa is A or G
  MOD_RES (22)..(23)..(24)..(25): Xaa is A or G or is absent

SEQ ID NO: 66984 - protein, 34 aa, Artificial Sequence
  GFR-binding peptide
  MOD_RES (2)..(3): Xaa is C or S
AXXVPTKLSATSILYYDKGVVTYLRKHRGMAVSE

SEQ ID NO: 66985 - protein, 38 aa, Artificial Sequence; identical to SEQ ID NO: 29353
  GFR-binding peptide
  MOD_RES (5)..(6): Xaa is C or S
  MOD_RES (20)..(21)..(22)..(23)..(24): Xaa is A or G
  MOD_RES (25)..(26)..(27)..(28): Xaa is A or G or is absent

SEQ ID NO: 66986 - protein, 37 aa, Artificial Sequence; identical to SEQ ID NO: 8068
  GFR-binding peptide
  MOD_RES (2)..(3)..(34)..(36): Xaa is C or S

SEQ ID NO: 66987 - protein, 31 aa, Artificial Sequence; identical to SEQ ID NO: 32449
  GFR-binding peptide

SEQ ID NO: 66988 - protein, 34 aa, Artificial Sequence
  GFR-binding peptide
  MOD_RES (1)..(2)..(34): Xaa is C or S
XXVPTRLEPISILYLDSANNVVKFKYEDMVVESX

SEQ ID NO: 66989 - protein, 35 aa, Artificial Sequence; identical to SEQ ID NO: 29359
  GFR-binding peptide
  MOD_RES (1)..(35): Xaa is C or S
  MOD_RES (15)..(16)..(17)..(18)..(19): Xaa is A or G
  MOD_RES (20)..(21)..(22)..(23): Xaa is A or G or is absent

SEQ ID NO: 66990 - protein, 37 aa, Artificial Sequence; identical to SEQ ID NO: 32453
  GFR-binding peptide
  MOD_RES (6)..(7): Xaa is C or S

SEQ ID NO: 66991 - protein, 37 aa, Artificial Sequence
  GFR-binding peptide
  MOD_RES (6)..(7): Xaa is C or S
STPPTXXVPTRLSPISILYKDSANNVVLKYHYDMVVE

SEQ ID NO: 66992 - protein, 39 aa, Artificial Sequence; identical to SEQ ID NO: 8078
  GFR-binding peptide
  MOD_RES (6)..(7)..(38): Xaa is C or S

SEQ ID NO: 66993 - protein, 38 aa, Artificial Sequence; identical to SEQ ID NO: 57363
  GFR-binding peptide
  MOD_RES (2)..(3)..(37): Xaa is C or S
  MOD_RES (17)..(18)..(19)..(20)..(21): Xaa is A or G
  MOD_RES (22)..(23)..(24)..(25): Xaa is A or G or is absent

SEQ ID NO: 66994 - protein, 39 aa, Artificial Sequence
  GFR-binding peptide
  MOD_RES (6)..(7): Xaa is C or S
  MOD_RES (21)..(22)..(23)..(24)..(25): Xaa is A or G
  MOD_RES (26)..(27)..(28)..(29): Xaa is A or G or is absent
GSAGPXXTPTKMEPISMLYLXXXXXXXXXKFKYEGMVVD

SEQ ID NO: 66995 - protein, 36 aa, Artificial Sequence; identical to SEQ ID NO: 8082
  GFR-binding peptide
  MOD_RES (4)..(5)..(36): Xaa is C or S

SEQ ID NO: 66996 - protein, 38 aa, Artificial Sequence; identical to SEQ ID NO: 32462
  GFR-binding peptide
  MOD_RES (2)..(3)..(36)..(38): Xaa is C or S

SEQ ID NO: 66997 - protein, 37 aa, Artificial Sequence; identical to SEQ ID NO: 8083
  GFR-binding peptide
  MOD_RES (1)..(35)..(37): Xaa is C or S
  MOD_RES (15)..(16)..(17)..(18)..(19): Xaa is A or G
  MOD_RES (20)..(21)..(22)..(23): Xaa is A or G or is absent

SEQ ID NO: 66998 - protein, 38 aa, Artificial Sequence; identical to SEQ ID NO: 29366
  GFR-binding peptide
  MOD_RES (4)..(5)..(37): Xaa is C or S

SEQ ID NO: 66999 - protein, 31 aa, Artificial Sequence; identical to SEQ ID NO: 29367
  GFR-binding peptide

SEQ ID NO: 67000 - protein, 40 aa, Artificial Sequence; identical to SEQ ID NO: 8085
  GFR-binding peptide
  MOD_RES (3)..(4)..(37)..(39): Xaa is C or S
  MOD_RES (18)..(19)..(20)..(21)..(22): Xaa is A or G
  MOD_RES (23)..(24)..(25)..(26): Xaa is A or G or is absent

SEQ ID NO: 67001 - protein, 42 aa, Artificial Sequence
  GFR-binding peptide
  MOD_RES (4)..(5)..(39)..(41): Xaa is C or S
  MOD_RES (19)..(20)..(21)..(22)..(23): Xaa is A or G
  MOD_RES (24)..(25)..(26)..(27): Xaa is A or G or is absent
PPTXXVPTRLSPISILYKXXXXXXXXXLKYHYDMVVESXGXR

SEQ ID NO: 67002 - protein, 43 aa, Artificial Sequence
  GFR-binding peptide
  MOD_RES (5)..(6)..(40)..(42): Xaa is C or S
  MOD_RES (20)..(21)..(22)..(23)..(24): Xaa is A or G
  MOD_RES (25)..(26)..(27)..(28): Xaa is A or G or is absent
TPPTXXVPTRLSATSILYYXXXXXXXXXLRKHRDMVVESXGXR

SEQ ID NO: 67003 - protein, 34 aa, Artificial Sequence; identical to SEQ ID NO: 8089
  GFR-binding peptide
  MOD_RES (2)..(3)..(34): Xaa is C or S

SEQ ID NO: 67004 - protein, 37 aa, Artificial Sequence; identical to SEQ ID NO: 8091
  GFR-binding peptide
  MOD_RES (1)..(2)..(34)..(36): Xaa is C or S

SEQ ID NO: 67005 - protein, 39 aa, Artificial Sequence
  GFR-binding peptide
  MOD_RES (6)..(7): Xaa is C or S
  MOD_RES (21)..(22)..(23)..(24)..(25): Xaa is A or G
  MOD_RES (26)..(27)..(28)..(29): Xaa is A or G or is absent
GSAGPXXTPTKMSPISMLYKXXXXXXXXXLKYHYGMVVD

SEQ ID NO: 67006 - protein, 37 aa, Artificial Sequence; identical to SEQ ID NO: 57371
  GFR-binding peptide
  MOD_RES (3)..(4)..(37): Xaa is C or S
  MOD_RES (18)..(19)..(20)..(21)..(22): Xaa is A or G
  MOD_RES (23)..(24)..(25)..(26): Xaa is A or G or is absent

SEQ ID NO: 67007 - protein, 37 aa, Artificial Sequence; identical to SEQ ID NO: 29374
  GFR-binding peptide
  MOD_RES (5)..(6): Xaa is C or S

SEQ ID NO: 67008 - protein, 37 aa, Artificial Sequence; identical to SEQ ID NO: 8093
  GFR-binding peptide
  MOD_RES (1)..(2)..(34)..(36): Xaa is C or S

SEQ ID NO: 67009 - protein, 38 aa, Artificial Sequence; identical to SEQ ID NO: 32470
  GFR-binding peptide
  MOD_RES (3)..(4)..(38): Xaa is C or S
  MOD_RES (18)..(19)..(20)..(21)..(22): Xaa is A or G
  MOD_RES (23)..(24)..(25)..(26): Xaa is A or G or is absent

SEQ ID NO: 67010 - protein, 40 aa, Artificial Sequence
  GFR-binding peptide
  MOD_RES (5)..(6)..(40): Xaa is C or S
  MOD_RES (20)..(21)..(22)..(23)..(24): Xaa is A or G
  MOD_RES (25)..(26)..(27)..(28): Xaa is A or G or is absent
SAGPXXTPTKMSPISMLYKXXXXXXXXXLKYHYGMVVDRX

SEQ ID NO: 67011 - protein, 39 aa, Artificial Sequence
  GFR-binding peptide
  MOD_RES (5)..(6)..(37)..(39): Xaa is C or S
VPSTXXAPVKTSATSMLYYDNGRVLLLRKHRMIVEEXGX

SEQ ID NO: 67012 - protein, 35 aa, Artificial Sequence; identical to SEQ ID NO: 32473
  GFR-binding peptide
  MOD_RES (1)..(2): Xaa is C or S
  MOD_RES (16)..(17)..(18)..(19)..(20): Xaa is A or G
  MOD_RES (21)..(22)..(23)..(24): Xaa is A or G or is absent

SEQ ID NO: 67013 - protein, 42 aa, Artificial Sequence; identical to SEQ ID NO: 8096
  GFR-binding peptide
  MOD_RES (4)..(5)..(39)..(41): Xaa is C or S
  MOD_RES (19)..(20)..(21)..(22)..(23): Xaa is A or G
  MOD_RES (24)..(25)..(26)..(27): Xaa is A or G or is absent

SEQ ID NO: 67014 - protein, 43 aa, Artificial Sequence
  GFR-binding peptide
  MOD_RES (6)..(7)..(41)..(43): Xaa is C or S
  MOD_RES (21)..(22)..(23)..(24)..(25): Xaa is A or G
  MOD_RES (26)..(27)..(28)..(29): Xaa is A or G or is absent
STPPTXXVPTRLSPISILYKXXXXXXXXXLKYHYDMVVESXGX

SEQ ID NO: 67015 - protein, 42 aa, Artificial Sequence; identical to SEQ ID NO: 8097
  GFR-binding peptide
  MOD_RES (6)..(7)..(41): Xaa is C or S
  MOD_RES (21)..(22)..(23)..(24)..(25): Xaa is A or G
  MOD_RES (26)..(27)..(28)..(29): Xaa is A or G or is absent

SEQ ID NO: 67016 - protein, 35 aa, Artificial Sequence; identical to SEQ ID NO: 8098
  GFR-binding peptide
  MOD_RES (4)..(5): Xaa is C or S

SEQ ID NO: 67017 - protein, 32 aa, Artificial Sequence; identical to SEQ ID NO: 8099
  GFR-binding peptide
  MOD_RES (1)..(1): Xaa is C or S

SEQ ID NO: 67018 - protein, 34 aa, Artificial Sequence; identical to SEQ ID NO: 32475
  GFR-binding peptide
  MOD_RES (3)..(4): Xaa is C or S

SEQ ID NO: 67019 - protein, 31 aa, Artificial Sequence; identical to SEQ ID NO: 29382
  GFR-binding peptide

SEQ ID NO: 67020 - protein, 34 aa, Artificial Sequence; identical to SEQ ID NO: 32481
  GFR-binding peptide
  MOD_RES (1)..(2): Xaa is C or S
  MOD_RES (16)..(17)..(18)..(19)..(20): Xaa is A or G
  MOD_RES (21)..(22)..(23)..(24): Xaa is A or G or is absent

SEQ ID NO: 67021 - protein, 38 aa, Artificial Sequence; identical to SEQ ID NO: 29384
  GFR-binding peptide
  MOD_RES (6)..(7): Xaa is C or S

SEQ ID NO: 67022 - protein, 34 aa, Artificial Sequence; identical to SEQ ID NO: 8101
  GFR-binding peptide
  MOD_RES (34)..(34): Xaa is C or S
  MOD_RES (14)..(15)..(16)..(17)..(18): Xaa is A or G
  MOD_RES (19)..(20)..(21)..(22): Xaa is A or G or is absent

SEQ ID NO: 67023 - protein, 37 aa, Artificial Sequence
  GFR-binding peptide
  MOD_RES (1)..(35)..(37): Xaa is C or S
  MOD_RES (15)..(16)..(17)..(18)..(19): Xaa is A or G
  MOD_RES (20)..(21)..(22)..(23): Xaa is A or G or is absent
XVPEKMEPISILYLXXXXXXXXXKFKYENMTVESXAX

SEQ ID NO: 67024 - protein, 38 aa, Artificial Sequence; identical to SEQ ID NO: 29387
  GFR-binding peptide
  MOD_RES (3)..(4)..(36)..(38): Xaa is C or S

SEQ ID NO: 67025 - protein, 33 aa, Artificial Sequence; identical to SEQ ID NO: 32487
  GFR-binding peptide
  MOD_RES (32)..(32): Xaa is C or S

SEQ ID NO: 67026 - protein, 40 aa, Artificial Sequence; identical to SEQ ID NO: 29389
  GFR-binding peptide
  MOD_RES (3)..(4)..(38)..(40): Xaa is C or S
  MOD_RES (18)..(19)..(20)..(21)..(22): Xaa is A or G
  MOD_RES (23)..(24)..(25)..(26): Xaa is A or G or is absent

SEQ ID NO: 67027 - protein, 40 aa, Artificial Sequence; identical to SEQ ID NO: 32491
  GFR-binding peptide
  MOD_RES (2)..(3)..(38)..(40): Xaa is C or S
  MOD_RES (17)..(18)..(19)..(20)..(21): Xaa is A or G
  MOD_RES (22)..(23)..(24)..(25): Xaa is A or G or is absent

SEQ ID NO: 67028 - protein, 42 aa, Artificial Sequence; identical to SEQ ID NO: 29392
  GFR-binding peptide
  MOD_RES (6)..(7)..(39)..(41): Xaa is C or S

SEQ ID NO: 67029 - protein, 33 aa, Artificial Sequence; identical to SEQ ID NO: 32498
  GFR-binding peptide
  MOD_RES (1)..(33): Xaa is C or S

SEQ ID NO: 67030 - protein, 39 aa, Artificial Sequence; identical to SEQ ID NO: 32502
  GFR-binding peptide
  MOD_RES (4)..(5)..(37)..(39): Xaa is C or S

SEQ ID NO: 67031 - protein, 33 aa, Artificial Sequence; identical to SEQ ID NO: 32503
  GFR-binding peptide
  MOD_RES (14)..(15)..(16)..(17)..(18): Xaa is A or G
  MOD_RES (19)..(20)..(21)..(22): Xaa is A or G or is absent

SEQ ID NO: 67032 - protein, 35 aa, Artificial Sequence; identical to SEQ ID NO: 29398
  GFR-binding peptide
  MOD_RES (1)..(35): Xaa is C or S
  MOD_RES (15)..(16)..(17)..(18)..(19): Xaa is A or G
  MOD_RES (20)..(21)..(22)..(23): Xaa is A or G or is absent

SEQ ID NO: 67033 - protein, 38 aa, Artificial Sequence; identical to SEQ ID NO: 15413
  GFR-binding peptide
  MOD_RES (4)..(5): Xaa is C or S
  MOD_RES (19)..(20)..(21)..(22)..(23): Xaa is A or G
  MOD_RES (24)..(25)..(26)..(27): Xaa is A or G or is absent

SEQ ID NO: 67034 - protein, 36 aa, Artificial Sequence; identical to SEQ ID NO: 29401
  GFR-binding peptide
  MOD_RES (2)..(3)..(34)..(36): Xaa is C or S

SEQ ID NO: 67035 - protein, 37 aa, Artificial Sequence; identical to SEQ ID NO: 8117
  GFR-binding peptide
  MOD_RES (1)..(35)..(37): Xaa is C or S
  MOD_RES (15)..(16)..(17)..(18)..(19): Xaa is A or G
  MOD_RES (20)..(21)..(22)..(23): Xaa is A or G or is absent

SEQ ID NO: 67036 - protein, 36 aa, Artificial Sequence; identical to SEQ ID NO: 29404
  GFR-binding peptide
  MOD_RES (34)..(36): Xaa is C or S
  MOD_RES (14)..(15)..(16)..(17)..(18): Xaa is A or G
  MOD_RES (19)..(20)..(21)..(22): Xaa is A or G or is absent

SEQ ID NO: 67037 - protein, 40 aa, Artificial Sequence; identical to SEQ ID NO: 8118
  GFR-binding peptide
  MOD_RES (3)..(4)..(37)..(39): Xaa is C or S
  MOD_RES (18)..(19)..(20)..(21)..(22): Xaa is A or G
  MOD_RES (23)..(24)..(25)..(26): Xaa is A or G or is absent

SEQ ID NO: 67038 - protein, 37 aa, Artificial Sequence
  GFR-binding peptide
  MOD_RES (3)..(4)..(37): Xaa is C or S
  MOD_RES (18)..(19)..(20)..(21)..(22): Xaa is A or G
  MOD_RES (23)..(24)..(25)..(26): Xaa is A or G or is absent
STXXAPVKTEPISMLYLXXXXXXXXXKFKYEMIVEEX

SEQ ID NO: 67039 - protein, 38 aa, Artificial Sequence
  GFR-binding peptide
  MOD_RES (5)..(6)..(38): Xaa is C or S
IPEPXXVPEKMNAISILYFDENKNVVLKKYRNMTVESX

SEQ ID NO: 67040 - protein, 36 aa, Artificial Sequence; identical to SEQ ID NO: 8120
  GFR-binding peptide
  MOD_RES (1)..(35): Xaa is C or S
  MOD_RES (15)..(16)..(17)..(18)..(19): Xaa is A or G
  MOD_RES (20)..(21)..(22)..(23): Xaa is A or G or is absent

SEQ ID NO: 67041 - protein, 40 aa, Artificial Sequence; identical to SEQ ID NO: 32516
  GFR-binding peptide
  MOD_RES (4)..(5)..(37)..(39): Xaa is C or S

SEQ ID NO: 67042 - protein, 36 aa, Artificial Sequence; identical to SEQ ID NO: 8121
  GFR-binding peptide
  MOD_RES (33)..(35): Xaa is C or S
  MOD_RES (14)..(15)..(16)..(17)..(18): Xaa is A or G
  MOD_RES (19)..(20)..(21)..(22): Xaa is A or G or is absent

SEQ ID NO: 67043 - protein, 32 aa, Artificial Sequence
  GFR-binding peptide
  MOD_RES (1)..(2): Xaa is C or S
XXTPTKMSPISMLYKNDKQQIILKYHYGMVVD

SEQ ID NO: 67044 - protein, 36 aa, Artificial Sequence; identical to SEQ ID NO: 15425
  GFR-binding peptide
  MOD_RES (2)..(3): Xaa is C or S
  MOD_RES (17)..(18)..(19)..(20)..(21): Xaa is A or G
  MOD_RES (22)..(23)..(24)..(25): Xaa is A or G or is absent

SEQ ID NO: 67045 - protein, 40 aa, Artificial Sequence; identical to SEQ ID NO: 29410
  GFR-binding peptide
  MOD_RES (4)..(5)..(38)..(40): Xaa is C or S

SEQ ID NO: 67046 - protein, 33 aa, Artificial Sequence; identical to SEQ ID NO: 8128
  GFR-binding peptide
  MOD_RES (1)..(2): Xaa is C or S

SEQ ID NO: 67047 - protein, 35 aa, Artificial Sequence; identical to SEQ ID NO: 8130
  GFR-binding peptide
  MOD_RES (2)..(3)..(34): Xaa is C or S

SEQ ID NO: 67048 - protein, 40 aa, Artificial Sequence
  GFR-binding peptide
  MOD_RES (5)..(6)..(39): Xaa is C or S
  MOD_RES (20)..(21)..(22)..(23)..(24): Xaa is A or G
  MOD_RES (25)..(26)..(27)..(28): Xaa is A or G or is absent
VPSTXXAPVKTEPISMLYLXXXXXXXXXKFKYEMIVEEXG

SEQ ID NO: 67049 - protein, 40 aa, Artificial Sequence; identical to SEQ ID NO: 8131
  GFR-binding peptide
  MOD_RES (6)..(7): Xaa is C or S
  MOD_RES (21)..(22)..(23)..(24)..(25): Xaa is A or G
  MOD_RES (26)..(27)..(28)..(29): Xaa is A or G or is absent

SEQ ID NO: 67050 - protein, 38 aa, Artificial Sequence; identical to SEQ ID NO: 32521
  GFR-binding peptide
  MOD_RES (6)..(7): Xaa is C or S

SEQ ID NO: 67051 - protein, 33 aa, Artificial Sequence; identical to SEQ ID NO: 8134
  GFR-binding peptide
  MOD_RES (1)..(33): Xaa is C or S

SEQ ID NO: 67052 - protein, 34 aa, Artificial Sequence; identical to SEQ ID NO: 8137
  GFR-binding peptide
  MOD_RES (32)..(34): Xaa is C or S

SEQ ID NO: 67053 - protein, 34 aa, Artificial Sequence
  GFR-binding peptide
  MOD_RES (1)..(2): Xaa is C or S
  MOD_RES (16)..(17)..(18)..(19)..(20): Xaa is A or G
  MOD_RES (21)..(22)..(23)..(24): Xaa is A or G or is absent
XXAPVKTSATSMLYYXXXXXXXXXLRKHRMIVEE

SEQ ID NO: 67054 - protein, 35 aa, Artificial Sequence; identical to SEQ ID NO: 8138
  GFR-binding peptide
  MOD_RES (35)..(35): Xaa is C or S
  MOD_RES (14)..(15)..(16)..(17)..(18): Xaa is A or G
  MOD_RES (19)..(20)..(21)..(22): Xaa is A or G or is absent

SEQ ID NO: 67055 - protein, 40 aa, Artificial Sequence; identical to SEQ ID NO: 32532
  GFR-binding peptide
  MOD_RES (5)..(6)..(38)..(40): Xaa is C or S

SEQ ID NO: 67056 - protein, 34 aa, Artificial Sequence; identical to SEQ ID NO: 8139
  GFR-binding peptide
  MOD_RES (3)..(4): Xaa is C or S

SEQ ID NO: 67057 - protein, 34 aa, Artificial Sequence; identical to SEQ ID NO: 8142
  GFR-binding peptide
  MOD_RES (1)..(33): Xaa is C or S

SEQ ID NO: 67058 - protein, 38 aa, Artificial Sequence; identical to SEQ ID NO: 29431
  GFR-binding peptide
  MOD_RES (5)..(37): Xaa is C or S

SEQ ID NO: 67059 - protein, 40 aa, Artificial Sequence
  GFR-binding peptide
  MOD_RES (6)..(7)..(40): Xaa is C or S
  MOD_RES (21)..(22)..(23)..(24)..(25): Xaa is A or G
  MOD_RES (26)..(27)..(28)..(29): Xaa is A or G or is absent
ASAAPXXVPQALSPINILYFXXXXXXXXXYGKIPMIVRSX

SEQ ID NO: 67060 - protein, 37 aa, Artificial Sequence
  GFR-binding peptide
  MOD_RES (1)..(35)..(37): Xaa is C or S
  MOD_RES (15)..(16)..(17)..(18)..(19): Xaa is A or G
  MOD_RES (20)..(21)..(22)..(23): Xaa is A or G or is absent
XVPARLSATSILYYXXXXXXXXXLRKHRDMVVEAXGX

SEQ ID NO: 67061 - protein, 33 aa, Artificial Sequence; identical to SEQ ID NO: 8146
  GFR-binding peptide
  MOD_RES (1)..(2)..(33): Xaa is C or S

SEQ ID NO: 67062 - protein, 35 aa, Artificial Sequence; identical to SEQ ID NO: 32544
  GFR-binding peptide
  MOD_RES (32)..(34): Xaa is C or S

SEQ ID NO: 67063 - protein, 35 aa, Artificial Sequence; identical to SEQ ID NO: 8148
  GFR-binding peptide
  MOD_RES (4)..(5): Xaa is C or S

SEQ ID NO: 67064 - protein, 37 aa, Artificial Sequence
  GFR-binding peptide
  MOD_RES (4)..(5): Xaa is C or S
  MOD_RES (19)..(20)..(21)..(22)..(23): Xaa is A or G
  MOD_RES (24)..(25)..(26)..(27): Xaa is A or G or is absent
PSTXXAPVKTSATSMLYYXXXXXXXXXLRKHRMIVEE

SEQ ID NO: 67065 - protein, 33 aa, Artificial Sequence; identical to SEQ ID NO: 8150
  GFR-binding peptide
  MOD_RES (2)..(3): Xaa is C or S

SEQ ID NO: 67066 - protein, 38 aa, Artificial Sequence
  GFR-binding peptide
  MOD_RES (3)..(4)..(36)..(38): Xaa is C or S
EPXXVPEKMSPISILYKDENKNVVLKYHYNMTVESXAX

SEQ ID NO: 67067 - protein, 35 aa, Artificial Sequence
  GFR-binding peptide
  MOD_RES (1)..(34): Xaa is C or S
  MOD_RES (15)..(16)..(17)..(18)..(19): Xaa is A or G
  MOD_RES (20)..(21)..(22)..(23): Xaa is A or G or is absent
XAPVKTSPISMLYKXXXXXXXXXLKYHYMIVEEXG

SEQ ID NO: 67068 - protein, 34 aa, Artificial Sequence; identical to SEQ ID NO: 8156
  GFR-binding peptide
  MOD_RES (1)..(34): Xaa is C or S
  MOD_RES (15)..(16)..(17)..(18)..(19): Xaa is A or G
  MOD_RES (20)..(21)..(22)..(23): Xaa is A or G or is absent

SEQ ID NO: 67069 - protein, 38 aa, Artificial Sequence; identical to SEQ ID NO: 29448
  GFR-binding peptide
  MOD_RES (1)..(35)..(37): Xaa is C or S
  MOD_RES (15)..(16)..(17)..(18)..(19): Xaa is A or G
  MOD_RES (20)..(21)..(22)..(23): Xaa is A or G or is absent

SEQ ID NO: 67070 - protein, 36 aa, Artificial Sequence; identical to SEQ ID NO: 8158
  GFR-binding peptide
  MOD_RES (33)..(35): Xaa is C or S

SEQ ID NO: 67071 - protein, 38 aa, Artificial Sequence; identical to SEQ ID NO: 8161
  GFR-binding peptide
  MOD_RES (5)..(6)..(37): Xaa is C or S

SEQ ID NO: 67072 - protein, 39 aa, Artificial Sequence
  GFR-binding peptide
  MOD_RES (5)..(6): Xaa is C or S
  MOD_RES (20)..(21)..(22)..(23)..(24): Xaa is A or G
  MOD_RES (25)..(26)..(27)..(28): Xaa is A or G or is absent
APASXXVPARLSATSILYYXXXXXXXXXLRKHRDMVVEA

SEQ ID NO: 67073 - protein, 44 aa, Artificial Sequence; identical to SEQ ID NO: 29458
  GFR-binding peptide
  MOD_RES (6)..(7)..(41)..(43): Xaa is C or S
  MOD_RES (21)..(22)..(23)..(24)..(25): Xaa is A or G
  MOD_RES (26)..(27)..(28)..(29): Xaa is A or G or is absent

SEQ ID NO: 67074 - protein, 34 aa, Artificial Sequence; identical to SEQ ID NO: 8166
  GFR-binding peptide
  MOD_RES (1)..(2)..(34): Xaa is C or S

SEQ ID NO: 67075 - protein, 35 aa, Artificial Sequence; identical to SEQ ID NO: 8167
  GFR-binding peptide
  MOD_RES (1)..(2)..(34): Xaa is C or S

SEQ ID NO: 67076 - protein, 36 aa, Artificial Sequence; identical to SEQ ID NO: 29466
  GFR-binding peptide
  MOD_RES (2)..(3): Xaa is C or S
  MOD_RES (17)..(18)..(19)..(20)..(21): Xaa is A or G
  MOD_RES (22)..(23)..(24)..(25): Xaa is A or G or is absent

SEQ ID NO: 67077 - protein, 39 aa, Artificial Sequence; identical to SEQ ID NO: 32564
  GFR-binding peptide
  MOD_RES (6)..(7)..(39): Xaa is C or S

SEQ ID NO: 67078 - protein, 40 aa, Artificial Sequence
  GFR-binding peptide
  MOD_RES (5)..(6)..(40): Xaa is C or S
  MOD_RES (20)..(21)..(22)..(23)..(24): Xaa is A or G
  MOD_RES (25)..(26)..(27)..(28): Xaa is A or G or is absent
TPPTXXVPTRLSATSILYYXXXXXXXXXLRKHRDMVVESX

SEQ ID NO: 67079 - protein, 42 aa, Artificial Sequence; identical to SEQ ID NO: 29473
  GFR-binding peptide
  MOD_RES (6)..(7)..(41): Xaa is C or S
  MOD_RES (21)..(22)..(23)..(24)..(25): Xaa is A or G
  MOD_RES (26)..(27)..(28)..(29): Xaa is A or G or is absent

SEQ ID NO: 67080 - protein, 32 aa, Artificial Sequence
  GFR-binding peptide
  MOD_RES (1)..(2): Xaa is C or S
XXVPTRLEPISILYLDSANNVVKFKYEDMVVE

SEQ ID NO: 67081 - protein, 41 aa, Artificial Sequence; identical to SEQ ID NO: 32567
  GFR-binding peptide
  MOD_RES (5)..(6)..(38)..(40): Xaa is C or S

SEQ ID NO: 67082 - protein, 41 aa, Artificial Sequence; identical to SEQ ID NO: 29474
  GFR-binding peptide
  MOD_RES (3)..(4)..(38)..(40): Xaa is C or S
  MOD_RES (18)..(19)..(20)..(21)..(22): Xaa is A or G
  MOD_RES (23)..(24)..(25)..(26): Xaa is A or G or is absent

SEQ ID NO: 67083 - protein, 39 aa, Artificial Sequence
  GFR-binding peptide
  MOD_RES (1)..(2)..(36)..(38): Xaa is C or S
  MOD_RES (16)..(17)..(18)..(19)..(20): Xaa is A or G
  MOD_RES (21)..(22)..(23)..(24): Xaa is A or G or is absent
XXVPTRLSATSILYYXXXXXXXXXLRKHRDMVVESXGXR

SEQ ID NO: 67084 - protein, 41 aa, Artificial Sequence
  GFR-binding peptide
  MOD_RES (5)..(6)..(40): Xaa is C or S
  MOD_RES (20)..(21)..(22)..(23)..(24): Xaa is A or G
  MOD_RES (25)..(26)..(27)..(28): Xaa is A or G or is absent
APASXXVPARLSATSILYYXXXXXXXXXLRKHRDMVVEAXG

SEQ ID NO: 67085 - protein, 42 aa, Artificial Sequence; identical to SEQ ID NO: 32569
  GFR-binding peptide
  MOD_RES (6)..(7)..(41): Xaa is C or S
  MOD_RES (21)..(22)..(23)..(24)..(25): Xaa is A or G
  MOD_RES (26)..(27)..(28)..(29): Xaa is A or G or is absent

SEQ ID NO: 67086 - protein, 44 aa, Artificial Sequence; identical to SEQ ID NO: 29475
  GFR-binding peptide
  MOD_RES (6)..(7)..(41)..(43): Xaa is C or S
  MOD_RES (21)..(22)..(23)..(24)..(25): Xaa is A or G
  MOD_RES (26)..(27)..(28)..(29): Xaa is A or G or is absent

SEQ ID NO: 67087 - protein, 40 aa, Artificial Sequence
  GFR-binding peptide
  MOD_RES (6)..(7): Xaa is C or S
  MOD_RES (21)..(22)..(23)..(24)..(25): Xaa is A or G
  MOD_RES (26)..(27)..(28)..(29): Xaa is A or G or is absent
GIPEPXXVPEKMSPISILYKXXXXXXXXXLKYHYNMTVES

SEQ ID NO: 67088 - protein, 39 aa, Artificial Sequence; identical to SEQ ID NO: 8177
  GFR-binding peptide
  MOD_RES (7)..(7): Xaa is C or S
  MOD_RES (21)..(22)..(23)..(24)..(25): Xaa is A or G
  MOD_RES (26)..(27)..(28)..(29): Xaa is A or G or is absent

SEQ ID NO: 67089 - protein, 35 aa, Artificial Sequence
  GFR-binding peptide
  MOD_RES (34)..(34): Xaa is C or S
  MOD_RES (14)..(15)..(16)..(17)..(18): Xaa is A or G
  MOD_RES (19)..(20)..(21)..(22): Xaa is A or G or is absent
VPARLSATSILYYXXXXXXXXXLRKHRDMVVEAXG

SEQ ID NO: 67090 - protein, 36 aa, Artificial Sequence
  GFR-binding peptide
  MOD_RES (1)..(2)..(36): Xaa is C or S
  MOD_RES (16)..(17)..(18)..(19)..(20): Xaa is A or G
  MOD_RES (21)..(22)..(23)..(24): Xaa is A or G or is absent
XXVPTRLSPISILYKXXXXXXXXXLKYHYDMVVESX

SEQ ID NO: 67091 - protein, 36 aa, Artificial Sequence; identical to SEQ ID NO: 8179
  GFR-binding peptide
  MOD_RES (5)..(6): Xaa is C or S

SEQ ID NO: 67092 - protein, 38 aa, Artificial Sequence; identical to SEQ ID NO: 57482
  GFR-binding peptide
  MOD_RES (3)..(4)..(36)..(38): Xaa is C or S

SEQ ID NO: 67093 - protein, 34 aa, Artificial Sequence
  GFR-binding peptide
  MOD_RES (34)..(34): Xaa is C or S
  MOD_RES (14)..(15)..(16)..(17)..(18): Xaa is A or G
  MOD_RES (19)..(20)..(21)..(22): Xaa is A or G or is absent
TPTKMSATSMLYYXXXXXXXXXLRKHRGMVVDRX

SEQ ID NO: 67094 - protein, 41 aa, Artificial Sequence; identical to SEQ ID NO: 8181
  GFR-binding peptide
  MOD_RES (3)..(4)..(39)..(41): Xaa is C or S
  MOD_RES (18)..(19)..(20)..(21)..(22): Xaa is A or G
  MOD_RES (23)..(24)..(25)..(26): Xaa is A or G or is absent

SEQ ID NO: 67095 - protein, 35 aa, Artificial Sequence; identical to SEQ ID NO: 8183
  GFR-binding peptide
  MOD_RES (2)..(3): Xaa is C or S
  MOD_RES (17)..(18)..(19)..(20)..(21): Xaa is A or G
  MOD_RES (22)..(23)..(24)..(25): Xaa is A or G or is absent

SEQ ID NO: 67096 - protein, 41 aa, Artificial Sequence; identical to SEQ ID NO: 29482
  GFR-binding peptide
  MOD_RES (3)..(4)..(38)..(40): Xaa is C or S
  MOD_RES (18)..(19)..(20)..(21)..(22): Xaa is A or G
  MOD_RES (23)..(24)..(25)..(26): Xaa is A or G or is absent

SEQ ID NO: 67097 - protein, 37 aa, Artificial Sequence
  GFR-binding peptide
  MOD_RES (6)..(7): Xaa is C or S
STPPTXXVPTRLSATSILYYDSANNVVLRKHRDMVVE

SEQ ID NO: 67098 - protein, 36 aa, Artificial Sequence
  GFR-binding peptide
  MOD_RES (1)..(2)..(36): Xaa is C or S
  MOD_RES (16)..(17)..(18)..(19)..(20): Xaa is A or G
  MOD_RES (21)..(22)..(23)..(24): Xaa is A or G or is absent
XXVPEKMNAISILYFXXXXXXXXXLKKYRNMTVESX

SEQ ID NO: 67099 - protein, 36 aa, Artificial Sequence; identical to SEQ ID NO: 32583
  GFR-binding peptide
  MOD_RES (4)..(36): Xaa is C or S

SEQ ID NO: 67100 - protein, 39 aa, Artificial Sequence; identical to SEQ ID NO: 29485
  GFR-binding peptide
  MOD_RES (4)..(5)..(39): Xaa is C or S
  MOD_RES (19)..(20)..(21)..(22)..(23): Xaa is A or G
  MOD_RES (24)..(25)..(26)..(27): Xaa is A or G or is absent

SEQ ID NO: 67101 - protein, 32 aa, Artificial Sequence; identical to SEQ ID NO: 32587
  GFR-binding peptide
  MOD_RES (14)..(15)..(16)..(17)..(18): Xaa is A or G
  MOD_RES (19)..(20)..(21)..(22): Xaa is A or G or is absent

SEQ ID NO: 67102 - protein, 39 aa, Artificial Sequence
  GFR-binding peptide
  MOD_RES (6)..(7): Xaa is C or S
  MOD_RES (21)..(22)..(23)..(24)..(25): Xaa is A or G
  MOD_RES (26)..(27)..(28)..(29): Xaa is A or G or is absent
HVPKPXXAPTKLSATSVLYYXXXXXXXXXLRKHRNMVVR

SEQ ID NO: 67103 - protein, 43 aa, Artificial Sequence; identical to SEQ ID NO: 8186
  GFR-binding peptide
  MOD_RES (6)..(7)..(40)..(42): Xaa is C or S
  MOD_RES (21)..(22)..(23)..(24)..(25): Xaa is A or G
  MOD_RES (26)..(27)..(28)..(29): Xaa is A or G or is absent

SEQ ID NO: 67104 - protein, 39 aa, Artificial Sequence; identical to SEQ ID NO: 29490
  GFR-binding peptide
  MOD_RES (3)..(4)..(37)..(39): Xaa is C or S
  MOD_RES (18)..(19)..(20)..(21)..(22): Xaa is A or G
  MOD_RES (23)..(24)..(25)..(26): Xaa is A or G or is absent

SEQ ID NO: 67105 - protein, 36 aa, Artificial Sequence; identical to SEQ ID NO: 8191
  GFR-binding peptide
  MOD_RES (33)..(35): Xaa is C or S
  MOD_RES (14)..(15)..(16)..(17)..(18): Xaa is A or G
  MOD_RES (19)..(20)..(21)..(22): Xaa is A or G or is absent

SEQ ID NO: 67106 - protein, 36 aa, Artificial Sequence; identical to SEQ ID NO: 8192
  GFR-binding peptide
  MOD_RES (2)..(3)..(36): Xaa is C or S
  MOD_RES (17)..(18)..(19)..(20)..(21): Xaa is A or G
  MOD_RES (22)..(23)..(24)..(25): Xaa is A or G or is absent

SEQ ID NO: 67107 - protein, 34 aa, Artificial Sequence; identical to SEQ ID NO: 57499
  GFR-binding peptide
  MOD_RES (1)..(2)..(34): Xaa is C or S

SEQ ID NO: 67108 - protein, 41 aa, Artificial Sequence
  GFR-binding peptide
  MOD_RES (5)..(6)..(38)..(40): Xaa is C or S
TPPTXXVPTRLSPISILYKDSANNVVLKYHYDMVVESXGXR

SEQ ID NO: 67109 - protein, 42 aa, Artificial Sequence; identical to SEQ ID NO: 32597
  GFR-binding peptide
  MOD_RES (6)..(7)..(39)..(41): Xaa is C or S

SEQ ID NO: 67110 - protein, 41 aa, Artificial Sequence
  GFR-binding peptide
  MOD_RES (4)..(5)..(39)..(41): Xaa is C or S
  MOD_RES (19)..(20)..(21)..(22)..(23): Xaa is A or G
  MOD_RES (24)..(25)..(26)..(27): Xaa is A or G or is absent
PEPXXVPEKMSPISILYKXXXXXXXXXLKYHYNMTVESXAX

SEQ ID NO: 67111 - protein, 36 aa, Artificial Sequence
  GFR-binding peptide
  MOD_RES (1)..(2)..(34)..(36): Xaa is C or S
XXVPARLSATSILYYDAANNVVLRKHRDMVVEAXGX

SEQ ID NO: 67112 - protein, 33 aa, Artificial Sequence; identical to SEQ ID NO: 8202
  GFR-binding peptide
  MOD_RES (32)..(32): Xaa is C or S

SEQ ID NO: 67113 - protein, 39 aa, Artificial Sequence; identical to SEQ ID NO: 29512
  GFR-binding peptide
  MOD_RES (6)..(7)..(39): Xaa is C or S

SEQ ID NO: 67114 - protein, 39 aa, Artificial Sequence; identical to SEQ ID NO: 32608
  GFR-binding peptide
  MOD_RES (3)..(4)..(38): Xaa is C or S
  MOD_RES (18)..(19)..(20)..(21)..(22): Xaa is A or G
  MOD_RES (23)..(24)..(25)..(26): Xaa is A or G or is absent

SEQ ID NO: 67115 - protein, 33 aa, Artificial Sequence
  GFR-binding peptide
  MOD_RES (32)..(32): Xaa is C or S
TPTKMSPISMLYKNDKQQIILKYHYGMVVDRXG

SEQ ID NO: 67116 - protein, 34 aa, Artificial Sequence
  GFR-binding peptide
  MOD_RES (1)..(2)..(34): Xaa is C or S
XXVPARLSATSILYYDAANNVVLRKHRDMVVEAX

SEQ ID NO: 67117 - protein, 35 aa, Artificial Sequence; identical to SEQ ID NO: 8209
  GFR-binding peptide
  MOD_RES (4)..(5): Xaa is C or S

SEQ ID NO: 67118 - protein, 34 aa, Artificial Sequence; identical to SEQ ID NO: 29523
  GFR-binding peptide
  MOD_RES (1)..(2): Xaa is C or S
  MOD_RES (16)..(17)..(18)..(19)..(20): Xaa is A or G
  MOD_RES (21)..(22)..(23)..(24): Xaa is A or G or is absent

SEQ ID NO: 67119 - protein, 36 aa, Artificial Sequence
  GFR-binding peptide
  MOD_RES (4)..(5): Xaa is C or S
AGPXXTPTKMSPISMLYKNDKQQIILKYHYGMVVDR

SEQ ID NO: 67120 - protein, 38 aa, Artificial Sequence; identical to SEQ ID NO: 8210
  GFR-binding peptide
  MOD_RES (1)..(2)..(36)..(38): Xaa is C or S
  MOD_RES (16)..(17)..(18)..(19)..(20): Xaa is A or G
  MOD_RES (21)..(22)..(23)..(24): Xaa is A or G or is absent

SEQ ID NO: 67121 - protein, 39 aa, Artificial Sequence; identical to SEQ ID NO: 8212
  GFR-binding peptide
  MOD_RES (5)..(6)..(39): Xaa is C or S
  MOD_RES (20)..(21)..(22)..(23)..(24): Xaa is A or G
  MOD_RES (25)..(26)..(27)..(28): Xaa is A or G or is absent

SEQ ID NO: 67122 - protein, 36 aa, Artificial Sequence; identical to SEQ ID NO: 15518
  GFR-binding peptide
  MOD_RES (1)..(33)..(35): Xaa is C or S

SEQ ID NO: 67123 - protein, 37 aa, Artificial Sequence; identical to SEQ ID NO: 8214
  GFR-binding peptide
  MOD_RES (4)..(5)..(36): Xaa is C or S

SEQ ID NO: 67124 - protein, 38 aa, Artificial Sequence; identical to SEQ ID NO: 32625
  GFR-binding peptide
  MOD_RES (2)..(3)..(37): Xaa is C or S
  MOD_RES (17)..(18)..(19)..(20)..(21): Xaa is A or G
  MOD_RES (22)..(23)..(24)..(25): Xaa is A or G or is absent

SEQ ID NO: 67125 - protein, 37 aa, Artificial Sequence; identical to SEQ ID NO: 32628
  GFR-binding peptide
  MOD_RES (2)..(3)..(37): Xaa is C or S
  MOD_RES (17)..(18)..(19)..(20)..(21): Xaa is A or G
  MOD_RES (22)..(23)..(24)..(25): Xaa is A or G or is absent

SEQ ID NO: 67126 - protein, 40 aa, Artificial Sequence; identical to SEQ ID NO: 29535
  GFR-binding peptide
  MOD_RES (4)..(5)..(39): Xaa is C or S
  MOD_RES (19)..(20)..(21)..(22)..(23): Xaa is A or G
  MOD_RES (24)..(25)..(26)..(27): Xaa is A or G or is absent

SEQ ID NO: 67127 - protein, 41 aa, Artificial Sequence
  GFR-binding peptide
  MOD_RES (5)..(6)..(39)..(41): Xaa is C or S
  MOD_RES (20)..(21)..(22)..(23)..(24): Xaa is A or G
  MOD_RES (25)..(26)..(27)..(28): Xaa is A or G or is absent
VPSTXXAPVKTSPISMLYKXXXXXXXXXLKYHYMIVEEXGX

SEQ ID NO: 67128 - protein, 35 aa, Artificial Sequence; identical to SEQ ID NO: 8219
  GFR-binding peptide
  MOD_RES (2)..(3)..(35): Xaa is C or S

SEQ ID NO: 67129 - protein, 37 aa, Artificial Sequence
  GFR-binding peptide
  MOD_RES (2)..(3)..(35)..(37): Xaa is C or S
PXXVPEKMEPISILYLDENKNVVKFKYENMTVESXAX

SEQ ID NO: 67130 - protein, 38 aa, Artificial Sequence; identical to SEQ ID NO: 29539
  GFR-binding peptide
  MOD_RES (2)..(3)..(37): Xaa is C or S
  MOD_RES (17)..(18)..(19)..(20)..(21): Xaa is A or G
  MOD_RES (22)..(23)..(24)..(25): Xaa is A or G or is absent

SEQ ID NO: 67131 - protein, 38 aa, Artificial Sequence; identical to SEQ ID NO: 32636
  GFR-binding peptide
  MOD_RES (2)..(3)..(35)..(37): Xaa is C or S

SEQ ID NO: 67132 - protein, 41 aa, Artificial Sequence; identical to SEQ ID NO: 8221
  GFR-binding peptide
  MOD_RES (6)..(7)..(39)..(41): Xaa is C or S

SEQ ID NO: 67133 - protein, 34 aa, Artificial Sequence
  GFR-binding peptide
  MOD_RES (33)..(33): Xaa is C or S
  MOD_RES (14)..(15)..(16)..(17)..(18): Xaa is A or G
  MOD_RES (19)..(20)..(21)..(22): Xaa is A or G or is absent
APVKTSPISMLYKXXXXXXXXXLKYHYMIVEEXG

SEQ ID NO: 67134 - protein, 40 aa, Artificial Sequence; identical to SEQ ID NO: 29541
  GFR-binding peptide
  MOD_RES (5)..(6)..(39): Xaa is C or S
  MOD_RES (20)..(21)..(22)..(23)..(24): Xaa is A or G
  MOD_RES (25)..(26)..(27)..(28): Xaa is A or G or is absent

SEQ ID NO: 67135 - protein, 42 aa, Artificial Sequence; identical to SEQ ID NO: 8224
  GFR-binding peptide
  MOD_RES (6)..(7)..(40)..(42): Xaa is C or S
  MOD_RES (21)..(22)..(23)..(24)..(25): Xaa is A or G
  MOD_RES (26)..(27)..(28)..(29): Xaa is A or G or is absent

SEQ ID NO: 67136 - protein, 40 aa, Artificial Sequence; identical to SEQ ID NO: 8225
  GFR-binding peptide
  MOD_RES (4)..(5)..(39): Xaa is C or S
  MOD_RES (19)..(20)..(21)..(22)..(23): Xaa is A or G
  MOD_RES (24)..(25)..(26)..(27): Xaa is A or G or is absent

SEQ ID NO: 67137 - protein, 34 aa, Artificial Sequence; identical to SEQ ID NO: 32641
  GFR-binding peptide
  MOD_RES (1)..(1): Xaa is C or S
  MOD_RES (15)..(16)..(17)..(18)..(19): Xaa is A or G
  MOD_RES (20)..(21)..(22)..(23): Xaa is A or G or is absent

SEQ ID NO: 67138 - protein, 37 aa, Artificial Sequence; identical to SEQ ID NO: 32642
  GFR-binding peptide
  MOD_RES (5)..(6): Xaa is C or S

SEQ ID NO: 67139 - protein, 39 aa, Artificial Sequence; identical to SEQ ID NO: 32643
  GFR-binding peptide
  MOD_RES (1)..(2)..(37)..(39): Xaa is C or S
  MOD_RES (16)..(17)..(18)..(19)..(20): Xaa is A or G
  MOD_RES (21)..(22)..(23)..(24): Xaa is A or G or is absent

SEQ ID NO: 67140 - protein, 35 aa, Artificial Sequence; identical to SEQ ID NO: 32644
  GFR-binding peptide
  MOD_RES (1)..(34): Xaa is C or S

SEQ ID NO: 67141 - protein, 43 aa, Artificial Sequence; identical to SEQ ID NO: 32646
  GFR-binding peptide
  MOD_RES (6)..(7)..(40)..(42): Xaa is C or S

SEQ ID NO: 67142 - protein, 39 aa, Artificial Sequence; identical to SEQ ID NO: 8228
  GFR-binding peptide
  MOD_RES (5)..(6): Xaa is C or S
  MOD_RES (20)..(21)..(22)..(23)..(24): Xaa is A or G
  MOD_RES (25)..(26)..(27)..(28): Xaa is A or G or is absent

SEQ ID NO: 67143 - protein, 38 aa, Artificial Sequence; identical to SEQ ID NO: 29550
  GFR-binding peptide
  MOD_RES (6)..(7)..(38): Xaa is C or S

SEQ ID NO: 67144 - protein, 36 aa, Artificial Sequence; identical to SEQ ID NO: 57556
  GFR-binding peptide
  MOD_RES (4)..(5)..(36): Xaa is C or S

SEQ ID NO: 67145 - protein, 39 aa, Artificial Sequence
  GFR-binding peptide
  MOD_RES (2)..(3)..(37)..(39): Xaa is C or S
  MOD_RES (17)..(18)..(19)..(20)..(21): Xaa is A or G
  MOD_RES (22)..(23)..(24)..(25): Xaa is A or G or is absent
PXXVPEKMEPISILYLXXXXXXXXXKFKYENMTVESXAX

SEQ ID NO: 67146 - protein, 39 aa, Artificial Sequence; identical to SEQ ID NO: 8231
  GFR-binding peptide
  MOD_RES (6)..(7)..(39): Xaa is C or S

SEQ ID NO: 67147 - protein, 37 aa, Artificial Sequence; identical to SEQ ID NO: 15547
  GFR-binding peptide
  MOD_RES (1)..(2)..(34)..(36): Xaa is C or S

SEQ ID NO: 67148 - protein, 37 aa, Artificial Sequence
  GFR-binding peptide
  MOD_RES (2)..(3)..(34)..(36): Xaa is C or S
TXXAPVKTSPISMLYKDNGRVLLLKYHYMIVEEXGXL

SEQ ID NO: 67149 - protein, 40 aa, Artificial Sequence; identical to SEQ ID NO: 32656
  GFR-binding peptide
  MOD_RES (4)..(5)..(37)..(39): Xaa is C or S

SEQ ID NO: 67150 - protein, 37 aa, Artificial Sequence; identical to SEQ ID NO: 8238
  GFR-binding peptide
  MOD_RES (2)..(3)..(36): Xaa is C or S
  MOD_RES (17)..(18)..(19)..(20)..(21): Xaa is A or G
  MOD_RES (22)..(23)..(24)..(25): Xaa is A or G or is absent

SEQ ID NO: 67151 - protein, 41 aa, Artificial Sequence; identical to SEQ ID NO: 29559
  GFR-binding peptide
  MOD_RES (4)..(5)..(39)..(41): Xaa is C or S
  MOD_RES (19)..(20)..(21)..(22)..(23): Xaa is A or G
  MOD_RES (24)..(25)..(26)..(27): Xaa is A or G or is absent

SEQ ID NO: 67152 - protein, 40 aa, Artificial Sequence
  GFR-binding peptide
  MOD_RES (2)..(3)..(37)..(39): Xaa is C or S
  MOD_RES (17)..(18)..(19)..(20)..(21): Xaa is A or G
  MOD_RES (22)..(23)..(24)..(25): Xaa is A or G or is absent
TXXVPTRLSATSILYYXXXXXXXXXLRKHRDMVVESXGXR

SEQ ID NO: 67153 - protein, 39 aa, Artificial Sequence; identical to SEQ ID NO: 8241
  GFR-binding peptide
  MOD_RES (3)..(4)..(38): Xaa is C or S
  MOD_RES (18)..(19)..(20)..(21)..(22): Xaa is A or G
  MOD_RES (23)..(24)..(25)..(26): Xaa is A or G or is absent

SEQ ID NO: 67154 - protein, 32 aa, Artificial Sequence; identical to SEQ ID NO: 57572
  GFR-binding peptide
  MOD_RES (32)..(32): Xaa is C or S

SEQ ID NO: 67155 - protein, 33 aa, Artificial Sequence; identical to SEQ ID NO: 8246
  GFR-binding peptide
  MOD_RES (2)..(3): Xaa is C or S

SEQ ID NO: 67156 - protein, 37 aa, Artificial Sequence; identical to SEQ ID NO: 8247
  GFR-binding peptide
  MOD_RES (3)..(4): Xaa is C or S
  MOD_RES (18)..(19)..(20)..(21)..(22): Xaa is A or G
  MOD_RES (23)..(24)..(25)..(26): Xaa is A or G or is absent

SEQ ID NO: 67157 - protein, 35 aa, Artificial Sequence; identical to SEQ ID NO: 8249
  GFR-binding peptide
  MOD_RES (2)..(3): Xaa is C or S
  MOD_RES (17)..(18)..(19)..(20)..(21): Xaa is A or G
  MOD_RES (22)..(23)..(24)..(25): Xaa is A or G or is absent

SEQ ID NO: 67158 - protein, 36 aa, Artificial Sequence; identical to SEQ ID NO: 8250
  GFR-binding peptide
  MOD_RES (34)..(36): Xaa is C or S
  MOD_RES (14)..(15)..(16)..(17)..(18): Xaa is A or G
  MOD_RES (19)..(20)..(21)..(22): Xaa is A or G or is absent

SEQ ID NO: 67159 - protein, 41 aa, Artificial Sequence
  GFR-binding peptide
  MOD_RES (5)..(6)..(38)..(40): Xaa is C or S
IPEPXXVPEKMSPINILYFDENKNVVYGKIPNMTVESXAXR

SEQ ID NO: 67160 - protein, 36 aa, Artificial Sequence; identical to SEQ ID NO: 29575
  GFR-binding peptide
  MOD_RES (4)..(36): Xaa is C or S

SEQ ID NO: 67161 - protein, 38 aa, Artificial Sequence; identical to SEQ ID NO: 29579
  GFR-binding peptide
  MOD_RES (5)..(6)..(38): Xaa is C or S

SEQ ID NO: 67162 - protein, 41 aa, Artificial Sequence; identical to SEQ ID NO: 8257
  GFR-binding peptide
  MOD_RES (2)..(3)..(38)..(40): Xaa is C or S
  MOD_RES (17)..(18)..(19)..(20)..(21): Xaa is A or G
  MOD_RES (22)..(23)..(24)..(25): Xaa is A or G or is absent

SEQ ID NO: 67163 - protein, 43 aa, Artificial Sequence; identical to SEQ ID NO: 32686
  GFR-binding peptide
  MOD_RES (7)..(41)..(43): Xaa is C or S
  MOD_RES (21)..(22)..(23)..(24)..(25): Xaa is A or G
  MOD_RES (26)..(27)..(28)..(29): Xaa is A or G or is absent

SEQ ID NO: 67164 - protein, 39 aa, Artificial Sequence; identical to SEQ ID NO: 8258
  GFR-binding peptide
  MOD_RES (4)..(5)..(39): Xaa is C or S
  MOD_RES (19)..(20)..(21)..(22)..(23): Xaa is A or G
  MOD_RES (24)..(25)..(26)..(27): Xaa is A or G or is absent

SEQ ID NO: 67165 - protein, 38 aa, Artificial Sequence; identical to SEQ ID NO: 8259
  GFR-binding peptide
  MOD_RES (3)..(35)..(37): Xaa is C or S

SEQ ID NO: 67166 - protein, 34 aa, Artificial Sequence; identical to SEQ ID NO: 8262
  GFR-binding peptide
  MOD_RES (1)..(2)..(33): Xaa is C or S

SEQ ID NO: 67167 - protein, 34 aa, Artificial Sequence; identical to SEQ ID NO: 8264
  GFR-binding peptide
  MOD_RES (1)..(33): Xaa is C or S

SEQ ID NO: 67168 - protein, 37 aa, Artificial Sequence; identical to SEQ ID NO: 29588
  GFR-binding peptide
  MOD_RES (1)..(2)..(34)..(36): Xaa is C or S

SEQ ID NO: 67169 - protein, 40 aa, Artificial Sequence; identical to SEQ ID NO: 8267
  GFR-binding peptide
  MOD_RES (6)..(7)..(38)..(40): Xaa is C or S

SEQ ID NO: 67170 - protein, 34 aa, Artificial Sequence
  GFR-binding peptide
  MOD_RES (1)..(33): Xaa is C or S
XVPARLSATSILYYDAANNVVLRKHRDMVVEAXG

SEQ ID NO: 67171 - protein, 38 aa, Artificial Sequence
  GFR-binding peptide
  MOD_RES (5)..(6): Xaa is C or S
  MOD_RES (20)..(21)..(22)..(23)..(24): Xaa is A or G
  MOD_RES (25)..(26)..(27)..(28): Xaa is A or G or is absent
SASPXXVSQDLSPINILYFXXXXXXXXXYGKIPMIVKS

SEQ ID NO: 67172 - protein, 41 aa, Artificial Sequence; identical to SEQ ID NO: 8269
  GFR-binding peptide
  MOD_RES (3)..(4)..(38)..(40): Xaa is C or S
  MOD_RES (18)..(19)..(20)..(21)..(22): Xaa is A or G
  MOD_RES (23)..(24)..(25)..(26): Xaa is A or G or is absent

SEQ ID NO: 67173 - protein, 33 aa, Artificial Sequence; identical to SEQ ID NO: 29593
  GFR-binding peptide
  MOD_RES (14)..(15)..(16)..(17)..(18): Xaa is A or G
  MOD_RES (19)..(20)..(21)..(22): Xaa is A or G or is absent

SEQ ID NO: 67174 - protein, 40 aa, Artificial Sequence; identical to SEQ ID NO: 8273
  GFR-binding peptide
  MOD_RES (5)..(6)..(40): Xaa is C or S
  MOD_RES (20)..(21)..(22)..(23)..(24): Xaa is A or G
  MOD_RES (25)..(26)..(27)..(28): Xaa is A or G or is absent

SEQ ID NO: 67175 - protein, 42 aa, Artificial Sequence
  GFR-binding peptide
  MOD_RES (4)..(5)..(39)..(41): Xaa is C or S
  MOD_RES (19)..(20)..(21)..(22)..(23): Xaa is A or G
  MOD_RES (24)..(25)..(26)..(27): Xaa is A or G or is absent
PEPXXVPEKMSATSILYYXXXXXXXXXLRKHRNMTVESXAXR

SEQ ID NO: 67176 - protein, 37 aa, Artificial Sequence; identical to SEQ ID NO: 8282
  GFR-binding peptide
  MOD_RES (2)..(3)..(37): Xaa is C or S
  MOD_RES (17)..(18)..(19)..(20)..(21): Xaa is A or G
  MOD_RES (22)..(23)..(24)..(25): Xaa is A or G or is absent

SEQ ID NO: 67177 - protein, 38 aa, Artificial Sequence; identical to SEQ ID NO: 8286
  GFR-binding peptide
  MOD_RES (2)..(3)..(36)..(38): Xaa is C or S
  MOD_RES (17)..(18)..(19)..(20)..(21): Xaa is A or G
  MOD_RES (22)..(23)..(24)..(25): Xaa is A or G or is absent

SEQ ID NO: 67178 - protein, 39 aa, Artificial Sequence; identical to SEQ ID NO: 29607
  GFR-binding peptide
  MOD_RES (4)..(5)..(39): Xaa is C or S
  MOD_RES (19)..(20)..(21)..(22)..(23): Xaa is A or G
  MOD_RES (24)..(25)..(26)..(27): Xaa is A or G or is absent

SEQ ID NO: 67179 - protein, 37 aa, Artificial Sequence; identical to SEQ ID NO: 32705
  GFR-binding peptide
  MOD_RES (1)..(2)..(34)..(36): Xaa is C or S

SEQ ID NO: 67180 - protein, 37 aa, Artificial Sequence; identical to SEQ ID NO: 8287
  GFR-binding peptide
  MOD_RES (1)..(35)..(37): Xaa is C or S
  MOD_RES (15)..(16)..(17)..(18)..(19): Xaa is A or G
  MOD_RES (20)..(21)..(22)..(23): Xaa is A or G or is absent

SEQ ID NO: 67181 - protein, 37 aa, Artificial Sequence
  GFR-binding peptide
  MOD_RES (1)..(2)..(36): Xaa is C or S
  MOD_RES (16)..(17)..(18)..(19)..(20): Xaa is A or G
  MOD_RES (21)..(22)..(23)..(24): Xaa is A or G or is absent
XXVPEKMNAISILYFXXXXXXXXXLKKYRNMTVESXA

SEQ ID NO: 67182 - protein, 39 aa, Artificial Sequence; identical to SEQ ID NO: 8290
  GFR-binding peptide
  MOD_RES (4)..(5)..(37)..(39): Xaa is C or S

SEQ ID NO: 67183 - protein, 41 aa, Artificial Sequence
  GFR-binding peptide
  MOD_RES (6)..(7)..(41): Xaa is C or S
  MOD_RES (21)..(22)..(23)..(24)..(25): Xaa is A or G
  MOD_RES (26)..(27)..(28)..(29): Xaa is A or G or is absent
HVPKPXXAPTKLEPISVLYLXXXXXXXXXKFKYENMVVRSX

SEQ ID NO: 67184 - protein, 39 aa, Artificial Sequence
  GFR-binding peptide
  MOD_RES (4)..(5)..(39): Xaa is C or S
  MOD_RES (19)..(20)..(21)..(22)..(23): Xaa is A or G
  MOD_RES (24)..(25)..(26)..(27): Xaa is A or G or is absent
PEPXXVPEKMSPINILYFXXXXXXXXXYGKIPNMTVESX

SEQ ID NO: 67185 - protein, 37 aa, Artificial Sequence; identical to SEQ ID NO: 8293
  GFR-binding peptide
  MOD_RES (3)..(4): Xaa is C or S
  MOD_RES (18)..(19)..(20)..(21)..(22): Xaa is A or G
  MOD_RES (23)..(24)..(25)..(26): Xaa is A or G or is absent

SEQ ID NO: 67186 - protein, 36 aa, Artificial Sequence; identical to SEQ ID NO: 29611
  GFR-binding peptide
  MOD_RES (3)..(4): Xaa is C or S
  MOD_RES (18)..(19)..(20)..(21)..(22): Xaa is A or G
  MOD_RES (23)..(24)..(25)..(26): Xaa is A or G or is absent

SEQ ID NO: 67187 - protein, 37 aa, Artificial Sequence; identical to SEQ ID NO: 32716
  GFR-binding peptide
  MOD_RES (1)..(35)..(37): Xaa is C or S
  MOD_RES (15)..(16)..(17)..(18)..(19): Xaa is A or G
  MOD_RES (20)..(21)..(22)..(23): Xaa is A or G or is absent

SEQ ID NO: 67188 - protein, 36 aa, Artificial Sequence; identical to SEQ ID NO: 57614
  GFR-binding peptide
  MOD_RES (1)..(2)..(33)..(35): Xaa is C or S

SEQ ID NO: 67189 - protein, 41 aa, Artificial Sequence; identical to SEQ ID NO: 8295
  GFR-binding peptide
  MOD_RES (6)..(7)..(39)..(41): Xaa is C or S

SEQ ID NO: 67190 - protein, 40 aa, Artificial Sequence; identical to SEQ ID NO: 32718
  GFR-binding peptide
  MOD_RES (5)..(6)..(38)..(40): Xaa is C or S

SEQ ID NO: 67191 - protein, 38 aa, Artificial Sequence; identical to SEQ ID NO: 8299
  GFR-binding peptide
  MOD_RES (6)..(7): Xaa is C or S

SEQ ID NO: 67192 - protein, 37 aa, Artificial Sequence; identical to SEQ ID NO: 29617
  GFR-binding peptide
  MOD_RES (5)..(6): Xaa is C or S

SEQ ID NO: 67193 - protein, 33 aa, Artificial Sequence
  GFR-binding peptide
  MOD_RES (33)..(33): Xaa is C or S
  MOD_RES (14)..(15)..(16)..(17)..(18): Xaa is A or G
  MOD_RES (19)..(20)..(21)..(22): Xaa is A or G or is absent
APVKTSPISMLYKXXXXXXXXXLKYHYMIVEEX

SEQ ID NO: 67194 - protein, 41 aa, Artificial Sequence
  GFR-binding peptide
  MOD_RES (6)..(7)..(39)..(41): Xaa is C or S
GIPEPXXVPEKMSPISILYKDENKNVVLKYHYNMTVESXAX

SEQ ID NO: 67195 - protein, 37 aa, Artificial Sequence; identical to SEQ ID NO: 32723
  GFR-binding peptide
  MOD_RES (6)..(7): Xaa is C or S

SEQ ID NO: 67196 - protein, 34 aa, Artificial Sequence; identical to SEQ ID NO: 29620
  GFR-binding peptide
  MOD_RES (1)..(1): Xaa is C or S
  MOD_RES (15)..(16)..(17)..(18)..(19): Xaa is A or G
  MOD_RES (20)..(21)..(22)..(23): Xaa is A or G or is absent

SEQ ID NO: 67197 - protein, 35 aa, Artificial Sequence; identical to SEQ ID NO: 8304
  GFR-binding peptide
  MOD_RES (34)..(34): Xaa is C or S
  MOD_RES (14)..(15)..(16)..(17)..(18): Xaa is A or G
  MOD_RES (19)..(20)..(21)..(22): Xaa is A or G or is absent

SEQ ID NO: 67198 - protein, 38 aa, Artificial Sequence; identical to SEQ ID NO: 57633
  GFR-binding peptide
  MOD_RES (5)..(6)..(38): Xaa is C or S

SEQ ID NO: 67199 - protein, 40 aa, Artificial Sequence
  GFR-binding peptide
  MOD_RES (3)..(4)..(38)..(40): Xaa is C or S
  MOD_RES (18)..(19)..(20)..(21)..(22): Xaa is A or G
  MOD_RES (23)..(24)..(25)..(26): Xaa is A or G or is absent
GPXXTPTKMEPISMLYLXXXXXXXXXKFKYEGMVVDRXGX

SEQ ID NO: 67200 - protein, 32 aa, Artificial Sequence; identical to SEQ ID NO: 29628
  GFR-binding peptide
  MOD_RES (32)..(32): Xaa is C or S

SEQ ID NO: 67201 - protein, 40 aa, Artificial Sequence
  GFR-binding peptide
  MOD_RES (5)..(6)..(40): Xaa is C or S
  MOD_RES (20)..(21)..(22)..(23)..(24): Xaa is A or G
  MOD_RES (25)..(26)..(27)..(28): Xaa is A or G or is absent
ASKAXXVPTKLSATSILYYXXXXXXXXXLRKHRGMAVSEX

SEQ ID NO: 67202 - protein, 37 aa, Artificial Sequence
  GFR-binding peptide
  MOD_RES (6)..(7): Xaa is C or S
ASASPXXVSQDLSPINILYFIGKTPKIYGKIPMIVKS

SEQ ID NO: 67203 - protein, 33 aa, Artificial Sequence
  GFR-binding peptide
  MOD_RES (1)..(32): Xaa is C or S
XVSQDLSPINILYFIGKTPKIYGKIPMIVKSXK

SEQ ID NO: 67204 - protein, 40 aa, Artificial Sequence; identical to SEQ ID NO: 29632
  GFR-binding peptide
  MOD_RES (4)..(5)..(38)..(40): Xaa is C or S
  MOD_RES (19)..(20)..(21)..(22)..(23): Xaa is A or G
  MOD_RES (24)..(25)..(26)..(27): Xaa is A or G or is absent

SEQ ID NO: 67205 - protein, 37 aa, Artificial Sequence; identical to SEQ ID NO: 8314
  GFR-binding peptide
  MOD_RES (2)..(3)..(37): Xaa is C or S
  MOD_RES (17)..(18)..(19)..(20)..(21): Xaa is A or G
  MOD_RES (22)..(23)..(24)..(25): Xaa is A or G or is absent

SEQ ID NO: 67206 - protein, 33 aa, Artificial Sequence; identical to SEQ ID NO: 29634
  GFR-binding peptide
  MOD_RES (14)..(15)..(16)..(17)..(18): Xaa is A or G
  MOD_RES (19)..(20)..(21)..(22): Xaa is A or G or is absent

SEQ ID NO: 67207 - protein, 38 aa, Artificial Sequence; identical to SEQ ID NO: 29635
  GFR-binding peptide
  MOD_RES (2)..(3)..(37): Xaa is C or S
  MOD_RES (17)..(18)..(19)..(20)..(21): Xaa is A or G
  MOD_RES (22)..(23)..(24)..(25): Xaa is A or G or is absent

SEQ ID NO: 67208 - protein, 40 aa, Artificial Sequence; identical to SEQ ID NO: 8318
  GFR-binding peptide
  MOD_RES (5)..(6)..(38)..(40): Xaa is C or S

SEQ ID NO: 67209 - protein, 40 aa, Artificial Sequence; identical to SEQ ID NO: 29639
  GFR-binding peptide
  MOD_RES (6)..(7)..(39): Xaa is C or S

SEQ ID NO: 67210 - protein, 34 aa, Artificial Sequence; identical to SEQ ID NO: 8319
  GFR-binding peptide
  MOD_RES (1)..(32)..(34): Xaa is C or S

SEQ ID NO: 67211 - protein, 37 aa, Artificial Sequence; identical to SEQ ID NO: 32743
  GFR-binding peptide
  MOD_RES (3)..(35)..(37): Xaa is C or S

SEQ ID NO: 67212 - protein, 34 aa, Artificial Sequence; identical to SEQ ID NO: 8320
  GFR-binding peptide
  MOD_RES (1)..(32)..(34): Xaa is C or S

SEQ ID NO: 67213 - protein, 42 aa, Artificial Sequence; identical to SEQ ID NO: 8324
  GFR-binding peptide
  MOD_RES (5)..(39)..(41): Xaa is C or S
  MOD_RES (19)..(20)..(21)..(22)..(23): Xaa is A or G
  MOD_RES (24)..(25)..(26)..(27): Xaa is A or G or is absent

SEQ ID NO: 67214 - protein, 34 aa, Artificial Sequence
  GFR-binding peptide
  MOD_RES (1)..(2): Xaa is C or S
  MOD_RES (16)..(17)..(18)..(19)..(20): Xaa is A or G
  MOD_RES (21)..(22)..(23)..(24): Xaa is A or G or is absent
XXAPVKTEPISMLYLXXXXXXXXXKFKYEMIVEE

SEQ ID NO: 67215 - protein, 37 aa, Artificial Sequence
  GFR-binding peptide
  MOD_RES (5)..(6)..(37): Xaa is C or S
SASPXXVPQDLSPINILYFVGRTPKVYGKIPMVVKSX

SEQ ID NO: 67216 - protein, 34 aa, Artificial Sequence; identical to SEQ ID NO: 32750
  GFR-binding peptide
  MOD_RES (34)..(34): Xaa is C or S
  MOD_RES (14)..(15)..(16)..(17)..(18): Xaa is A or G
  MOD_RES (19)..(20)..(21)..(22): Xaa is A or G or is absent

SEQ ID NO: 67217 - protein, 34 aa, Artificial Sequence; identical to SEQ ID NO: 29648
  GFR-binding peptide
  MOD_RES (31)..(33): Xaa is C or S

SEQ ID NO: 67218 - protein, 36 aa, Artificial Sequence; identical to SEQ ID NO: 29653
  GFR-binding peptide
  MOD_RES (1)..(33)..(35): Xaa is C or S

SEQ ID NO: 67219 - protein, 41 aa, Artificial Sequence; identical to SEQ ID NO: 8334
  GFR-binding peptide
  MOD_RES (4)..(5)..(39)..(41): Xaa is C or S
  MOD_RES (19)..(20)..(21)..(22)..(23): Xaa is A or G
  MOD_RES (24)..(25)..(26)..(27): Xaa is A or G or is absent

SEQ ID NO: 67220 - protein, 37 aa, Artificial Sequence; identical to SEQ ID NO: 29657
  GFR-binding peptide
  MOD_RES (1)..(35)..(37): Xaa is C or S
  MOD_RES (15)..(16)..(17)..(18)..(19): Xaa is A or G
  MOD_RES (20)..(21)..(22)..(23): Xaa is A or G or is absent

SEQ ID NO: 67221 - protein, 32 aa, Artificial Sequence; identical to SEQ ID NO: 32753
  GFR-binding peptide
  MOD_RES (14)..(15)..(16)..(17)..(18): Xaa is A or G
  MOD_RES (19)..(20)..(21)..(22): Xaa is A or G or is absent

SEQ ID NO: 67222 - protein, 33 aa, Artificial Sequence
  GFR-binding peptide
  MOD_RES (1)..(2): Xaa is C or S
XXVPTRLSPISILYKDSANNVVLKYHYDMVVES

SEQ ID NO: 67223 - protein, 34 aa, Artificial Sequence; identical to SEQ ID NO: 29659
  GFR-binding peptide
  MOD_RES (1)..(34): Xaa is C or S
  MOD_RES (15)..(16)..(17)..(18)..(19): Xaa is A or G
  MOD_RES (20)..(21)..(22)..(23): Xaa is A or G or is absent

SEQ ID NO: 67224 - protein, 40 aa, Artificial Sequence; identical to SEQ ID NO: 32757
  GFR-binding peptide
  MOD_RES (2)..(3)..(37)..(39): Xaa is C or S
  MOD_RES (17)..(18)..(19)..(20)..(21): Xaa is A or G
  MOD_RES (22)..(23)..(24)..(25): Xaa is A or G or is absent

SEQ ID NO: 67225 - protein, 39 aa, Artificial Sequence; identical to SEQ ID NO: 8347
  GFR-binding peptide
  MOD_RES (5)..(6)..(39): Xaa is C or S
  MOD_RES (20)..(21)..(22)..(23)..(24): Xaa is A or G
  MOD_RES (25)..(26)..(27)..(28): Xaa is A or G or is absent

SEQ ID NO: 67226 - protein, 37 aa, Artificial Sequence; identical to SEQ ID NO: 32764
  GFR-binding peptide
  MOD_RES (2)..(3)..(35)..(37): Xaa is C or S

SEQ ID NO: 67227 - protein, 33 aa, Artificial Sequence
  GFR-binding peptide
  MOD_RES (1)..(33): Xaa is C or S
XVPARLSATSILYYDAANNVVLRKHRDMVVEAX

SEQ ID NO: 67228 - protein, 39 aa, Artificial Sequence; identical to SEQ ID NO: 29663
  GFR-binding peptide
  MOD_RES (2)..(3)..(37)..(39): Xaa is C or S
  MOD_RES (17)..(18)..(19)..(20)..(21): Xaa is A or G
  MOD_RES (22)..(23)..(24)..(25): Xaa is A or G or is absent

SEQ ID NO: 67229 - protein, 41 aa, Artificial Sequence; identical to SEQ ID NO: 32765
  GFR-binding peptide
  MOD_RES (5)..(6)..(38)..(40): Xaa is C or S

SEQ ID NO: 67230 - protein, 39 aa, Artificial Sequence; identical to SEQ ID NO: 32766
  GFR-binding peptide
  MOD_RES (1)..(2)..(36)..(38): Xaa is C or S
  MOD_RES (16)..(17)..(18)..(19)..(20): Xaa is A or G
  MOD_RES (21)..(22)..(23)..(24): Xaa is A or G or is absent

SEQ ID NO: 67231 - protein, 34 aa, Artificial Sequence; identical to SEQ ID NO: 57672
  GFR-binding peptide
  MOD_RES (1)..(2): Xaa is C or S
  MOD_RES (16)..(17)..(18)..(19)..(20): Xaa is A or G
  MOD_RES (21)..(22)..(23)..(24): Xaa is A or G or is absent

SEQ ID NO: 67232 - protein, 41 aa, Artificial Sequence; identical to SEQ ID NO: 29665
  GFR-binding peptide
  MOD_RES (5)..(6)..(40): Xaa is C or S
  MOD_RES (20)..(21)..(22)..(23)..(24): Xaa is A or G
  MOD_RES (25)..(26)..(27)..(28): Xaa is A or G or is absent

SEQ ID NO: 67233 - protein, 37 aa, Artificial Sequence; identical to SEQ ID NO: 29667
  GFR-binding peptide
  MOD_RES (5)..(6)..(37): Xaa is C or S

SEQ ID NO: 67234 - protein, 36 aa, Artificial Sequence; identical to SEQ ID NO: 8351
  GFR-binding peptide
  MOD_RES (34)..(36): Xaa is C or S
  MOD_RES (14)..(15)..(16)..(17)..(18): Xaa is A or G
  MOD_RES (19)..(20)..(21)..(22): Xaa is A or G or is absent

SEQ ID NO: 67235 - protein, 34 aa, Artificial Sequence; identical to SEQ ID NO: 32768
  GFR-binding peptide
  MOD_RES (1)..(33): Xaa is C or S

SEQ ID NO: 67236 - protein, 39 aa, Artificial Sequence
  GFR-binding peptide
  MOD_RES (6)..(7)..(39): Xaa is C or S
GSAGPXXTPTKMSPISMLYKNDKQQIILKYHYGMVVDRX

SEQ ID NO: 67237 - protein, 31 aa, Artificial Sequence
  GFR-binding peptide
  MOD_RES (1)..(1): Xaa is C or S
XVPTKLSATSILYYDKGVVTYLRKHRGMAVS

SEQ ID NO: 67238 - protein, 39 aa, Artificial Sequence; identical to SEQ ID NO: 29672
  GFR-binding peptide
  MOD_RES (3)..(4)..(38): Xaa is C or S
  MOD_RES (18)..(19)..(20)..(21)..(22): Xaa is A or G
  MOD_RES (23)..(24)..(25)..(26): Xaa is A or G or is absent

SEQ ID NO: 67239 - protein, 32 aa, Artificial Sequence; identical to SEQ ID NO: 32776
  GFR-binding peptide
  MOD_RES (32)..(32): Xaa is C or S

SEQ ID NO: 67240 - protein, 34 aa, Artificial Sequence; identical to SEQ ID NO: 32780
  GFR-binding peptide
  MOD_RES (3)..(4): Xaa is C or S

SEQ ID NO: 67241 - protein, 38 aa, Artificial Sequence
  GFR-binding peptide
  MOD_RES (6)..(7): Xaa is C or S
HVPKPXXAPTKLEPISVLYLDDSSNVIKFKYENMVVRS

SEQ ID NO: 67242 - protein, 37 aa, Artificial Sequence; identical to SEQ ID NO: 32783
  GFR-binding peptide
  MOD_RES (2)..(36): Xaa is C or S
  MOD_RES (16)..(17)..(18)..(19)..(20): Xaa is A or G
  MOD_RES (21)..(22)..(23)..(24): Xaa is A or G or is absent

SEQ ID NO: 67243 - protein, 34 aa, Artificial Sequence; identical to SEQ ID NO: 57688
  GFR-binding peptide
  MOD_RES (1)..(34): Xaa is C or S
  MOD_RES (15)..(16)..(17)..(18)..(19): Xaa is A or G
  MOD_RES (20)..(21)..(22)..(23): Xaa is A or G or is absent

SEQ ID NO: 67244 - protein, 36 aa, Artificial Sequence; identical to SEQ ID NO: 32785
  GFR-binding peptide
  MOD_RES (3)..(4): Xaa is C or S
  MOD_RES (18)..(19)..(20)..(21)..(22): Xaa is A or G
  MOD_RES (23)..(24)..(25)..(26): Xaa is A or G or is absent

SEQ ID NO: 67245 - protein, 39 aa, Artificial Sequence; identical to SEQ ID NO: 8358
  GFR-binding peptide
  MOD_RES (5)..(6): Xaa is C or S
  MOD_RES (20)..(21)..(22)..(23)..(24): Xaa is A or G
  MOD_RES (25)..(26)..(27)..(28): Xaa is A or G or is absent

SEQ ID NO: 67246 - protein, 38 aa, Artificial Sequence
  GFR-binding peptide
  MOD_RES (1)..(35)..(37): Xaa is C or S
  MOD_RES (15)..(16)..(17)..(18)..(19): Xaa is A or G
  MOD_RES (20)..(21)..(22)..(23): Xaa is A or G or is absent
XVPEKMSPINILYFXXXXXXXXXYGKIPNMTVESXAXR

SEQ ID NO: 67247 - protein, 39 aa, Artificial Sequence; identical to SEQ ID NO: 8359
  GFR-binding peptide
  MOD_RES (4)..(5)..(38): Xaa is C or S
  MOD_RES (19)..(20)..(21)..(22)..(23): Xaa is A or G
  MOD_RES (24)..(25)..(26)..(27): Xaa is A or G or is absent

SEQ ID NO: 67248 - protein, 38 aa, Artificial Sequence; identical to SEQ ID NO: 57689
  GFR-binding peptide
  MOD_RES (3)..(4)..(38): Xaa is C or S
  MOD_RES (18)..(19)..(20)..(21)..(22): Xaa is A or G
  MOD_RES (23)..(24)..(25)..(26): Xaa is A or G or is absent

SEQ ID NO: 67249 - protein, 38 aa, Artificial Sequence; identical to SEQ ID NO: 32787
  GFR-binding peptide
  MOD_RES (4)..(5)..(37): Xaa is C or S

SEQ ID NO: 67250 - protein, 40 aa, Artificial Sequence; identical to SEQ ID NO: 32790
  GFR-binding peptide
  MOD_RES (5)..(6)..(40): Xaa is C or S
  MOD_RES (20)..(21)..(22)..(23)..(24): Xaa is A or G
  MOD_RES (25)..(26)..(27)..(28): Xaa is A or G or is absent

SEQ ID NO: 67251 - protein, 41 aa, Artificial Sequence; identical to SEQ ID NO: 29683
  GFR-binding peptide
  MOD_RES (6)..(7)..(39)..(41): Xaa is C or S

SEQ ID NO: 67252 - protein, 37 aa, Artificial Sequence; identical to SEQ ID NO: 32791
  GFR-binding peptide
  MOD_RES (3)..(37): Xaa is C or S
  MOD_RES (17)..(18)..(19)..(20)..(21): Xaa is A or G
  MOD_RES (22)..(23)..(24)..(25): Xaa is A or G or is absent

SEQ ID NO: 67253 - protein, 38 aa, Artificial Sequence; identical to SEQ ID NO: 8365
  GFR-binding peptide
  MOD_RES (4)..(5)..(36)..(38): Xaa is C or S

SEQ ID NO: 67254 - protein, 31 aa, Artificial Sequence; identical to SEQ ID NO: 8371
  GFR-binding peptide
  MOD_RES (31)..(31): Xaa is C or S

SEQ ID NO: 67255 - protein, 34 aa, Artificial Sequence; identical to SEQ ID NO: 32796
  GFR-binding peptide
  MOD_RES (33)..(33): Xaa is C or S

SEQ ID NO: 67256 - protein, 38 aa, Artificial Sequence; identical to SEQ ID NO: 29691
  GFR-binding peptide
  MOD_RES (1)..(2)..(36)..(38): Xaa is C or S
  MOD_RES (16)..(17)..(18)..(19)..(20): Xaa is A or G
  MOD_RES (21)..(22)..(23)..(24): Xaa is A or G or is absent

SEQ ID NO: 67257 - protein, 38 aa, Artificial Sequence; identical to SEQ ID NO: 29695
  GFR-binding peptide
  MOD_RES (5)..(6): Xaa is C or S
  MOD_RES (20)..(21)..(22)..(23)..(24): Xaa is A or G
  MOD_RES (25)..(26)..(27)..(28): Xaa is A or G or is absent

SEQ ID NO: 67258 - protein, 41 aa, Artificial Sequence; identical to SEQ ID NO: 29696
  GFR-binding peptide
  MOD_RES (5)..(6)..(40): Xaa is C or S
  MOD_RES (20)..(21)..(22)..(23)..(24): Xaa is A or G
  MOD_RES (25)..(26)..(27)..(28): Xaa is A or G or is absent

SEQ ID NO: 67259 - protein, 43 aa, Artificial Sequence
  GFR-binding peptide
  MOD_RES (5)..(6)..(40)..(42): Xaa is C or S
  MOD_RES (20)..(21)..(22)..(23)..(24): Xaa is A or G
  MOD_RES (25)..(26)..(27)..(28): Xaa is A or G or is absent
IPEPXXVPEKMEPISILYLXXXXXXXXXKFKYENMTVESXAXR

SEQ ID NO: 67260 - protein, 38 aa, Artificial Sequence
  GFR-binding peptide
  MOD_RES (4)..(5)..(37): Xaa is C or S
PEPXXVPEKMNAISILYFDENKNVVLKKYRNMTVESXA

SEQ ID NO: 67261 - protein, 36 aa, Artificial Sequence
  GFR-binding peptide
  MOD_RES (1)..(2)..(35): Xaa is C or S
  MOD_RES (16)..(17)..(18)..(19)..(20): Xaa is A or G
  MOD_RES (21)..(22)..(23)..(24): Xaa is A or G or is absent
XXAPVKTSATSMLYYXXXXXXXXXLRKHRMIVEEXG

SEQ ID NO: 67262 - protein, 32 aa, Artificial Sequence; identical to SEQ ID NO: 8373
  GFR-binding peptide
  MOD_RES (1)..(1): Xaa is C or S

SEQ ID NO: 67263 - protein, 38 aa, Artificial Sequence
  GFR-binding peptide
  MOD_RES (2)..(3)..(36)..(38): Xaa is C or S
  MOD_RES (17)..(18)..(19)..(20)..(21): Xaa is A or G
  MOD_RES (22)..(23)..(24)..(25): Xaa is A or G or is absent
PXXVPQALSPINILYFXXXXXXXXXYGKIPMIVRSXKX

SEQ ID NO: 67264 - protein, 31 aa, Artificial Sequence; identical to SEQ ID NO: 8378
  GFR-binding peptide

SEQ ID NO: 67265 - protein, 40 aa, Artificial Sequence; identical to SEQ ID NO: 32805
  GFR-binding peptide
  MOD_RES (2)..(3)..(37)..(39): Xaa is C or S
  MOD_RES (17)..(18)..(19)..(20)..(21): Xaa is A or G
  MOD_RES (22)..(23)..(24)..(25): Xaa is A or G or is absent

SEQ ID NO: 67266 - protein, 38 aa, Artificial Sequence; identical to SEQ ID NO: 8383
  GFR-binding peptide
  MOD_RES (5)..(6): Xaa is C or S
  MOD_RES (20)..(21)..(22)..(23)..(24): Xaa is A or G
  MOD_RES (25)..(26)..(27)..(28): Xaa is A or G or is absent

SEQ ID NO: 67267 - protein, 36 aa, Artificial Sequence; identical to SEQ ID NO: 57717
  GFR-binding peptide
  MOD_RES (2)..(3)..(34)..(36): Xaa is C or S

SEQ ID NO: 67268 - protein, 39 aa, Artificial Sequence; identical to SEQ ID NO: 8384
  GFR-binding peptide
  MOD_RES (5)..(6)..(37)..(39): Xaa is C or S

SEQ ID NO: 67269 - protein, 37 aa, Artificial Sequence; identical to SEQ ID NO: 8385
  GFR-binding peptide
  MOD_RES (5)..(6): Xaa is C or S

SEQ ID NO: 67270 - protein, 42 aa, Artificial Sequence; identical to SEQ ID NO: 32812
  GFR-binding peptide
  MOD_RES (4)..(5)..(39)..(41): Xaa is C or S
  MOD_RES (19)..(20)..(21)..(22)..(23): Xaa is A or G
  MOD_RES (24)..(25)..(26)..(27): Xaa is A or G or is absent

SEQ ID NO: 67271 - protein, 37 aa, Artificial Sequence
  GFR-binding peptide
  MOD_RES (6)..(7): Xaa is C or S
GIPEPXXVPEKMEPISILYLDENKNVVKFKYENMTVE

SEQ ID NO: 67272 - protein, 37 aa, Artificial Sequence; identical to SEQ ID NO: 8386
  GFR-binding peptide
  MOD_RES (1)..(2)..(36): Xaa is C or S
  MOD_RES (16)..(17)..(18)..(19)..(20): Xaa is A or G
  MOD_RES (21)..(22)..(23)..(24): Xaa is A or G or is absent

SEQ ID NO: 67273 - protein, 38 aa, Artificial Sequence
  GFR-binding peptide
  MOD_RES (4)..(5): Xaa is C or S
  MOD_RES (19)..(20)..(21)..(22)..(23): Xaa is A or G
  MOD_RES (24)..(25)..(26)..(27): Xaa is A or G or is absent
PEPXXVPEKMNAISILYFXXXXXXXXXLKKYRNMTVES

SEQ ID NO: 67274 - protein, 35 aa, Artificial Sequence; identical to SEQ ID NO: 8387
  GFR-binding peptide
  MOD_RES (2)..(3): Xaa is C or S
  MOD_RES (17)..(18)..(19)..(20)..(21): Xaa is A or G
  MOD_RES (22)..(23)..(24)..(25): Xaa is A or G or is absent

SEQ ID NO: 67275 - protein, 38 aa, Artificial Sequence; identical to SEQ ID NO: 57720
  GFR-binding peptide
  MOD_RES (3)..(4)..(37): Xaa is C or S
  MOD_RES (18)..(19)..(20)..(21)..(22): Xaa is A or G
  MOD_RES (23)..(24)..(25)..(26): Xaa is A or G or is absent

SEQ ID NO: 67276 - protein, 39 aa, Artificial Sequence; identical to SEQ ID NO: 29708
  GFR-binding peptide
  MOD_RES (5)..(6)..(39): Xaa is C or S

SEQ ID NO: 67277 - protein, 32 aa, Artificial Sequence; identical to SEQ ID NO: 8389
  GFR-binding peptide
  MOD_RES (14)..(15)..(16)..(17)..(18): Xaa is A or G
  MOD_RES (19)..(20)..(21)..(22): Xaa is A or G or is absent

SEQ ID NO: 67278 - protein, 38 aa, Artificial Sequence
  GFR-binding peptide
  MOD_RES (4)..(5)..(37): Xaa is C or S
AGPXXTPTKMSATSMLYYNDKQQIILRKHRGMVVDRXG

SEQ ID NO: 67279 - protein, 37 aa, Artificial Sequence; identical to SEQ ID NO: 29711
  GFR-binding peptide
  MOD_RES (2)..(3)..(35)..(37): Xaa is C or S

SEQ ID NO: 67280 - protein, 40 aa, Artificial Sequence; identical to SEQ ID NO: 8394
  GFR-binding peptide
  MOD_RES (6)..(7)..(39): Xaa is C or S

SEQ ID NO: 67281 - protein, 37 aa, Artificial Sequence; identical to SEQ ID NO: 8396
  GFR-binding peptide
  MOD_RES (3)..(4)..(35)..(37): Xaa is C or S

SEQ ID NO: 67282 - protein, 37 aa, Artificial Sequence
  GFR-binding peptide
  MOD_RES (2)..(3)..(35)..(37): Xaa is C or S
TXXVPTRLSPISILYKDSANNVVLKYHYDMVVESXGX

SEQ ID NO: 67283 - protein, 38 aa, Artificial Sequence; identical to SEQ ID NO: 32821
  GFR-binding peptide
  MOD_RES (2)..(3)..(37): Xaa is C or S
  MOD_RES (17)..(18)..(19)..(20)..(21): Xaa is A or G
  MOD_RES (22)..(23)..(24)..(25): Xaa is A or G or is absent

SEQ ID NO: 67284 - protein, 36 aa, Artificial Sequence; identical to SEQ ID NO: 8397
  GFR-binding peptide
  MOD_RES (3)..(4)..(35): Xaa is C or S

SEQ ID NO: 67285 - protein, 38 aa, Artificial Sequence
  GFR-binding peptide
  MOD_RES (4)..(5)..(37): Xaa is C or S
PASXXVPARLSATSILYYDAANNVVLRKHRDMVVEAXG

SEQ ID NO: 67286 - protein, 32 aa, Artificial Sequence; identical to SEQ ID NO: 8400
  GFR-binding peptide
  MOD_RES (1)..(32): Xaa is C or S

SEQ ID NO: 67287 - protein, 32 aa, Artificial Sequence
  GFR-binding peptide
  MOD_RES (1)..(32): Xaa is C or S
XVPQALSPINILYFVGRKPKVYGKIPMIVRSX

SEQ ID NO: 67288 - protein, 38 aa, Artificial Sequence; identical to SEQ ID NO: 57730
  GFR-binding peptide
  MOD_RES (6)..(7)..(38): Xaa is C or S

SEQ ID NO: 67289 - protein, 36 aa, Artificial Sequence; identical to SEQ ID NO: 8401
  GFR-binding peptide
  MOD_RES (1)..(2)..(35): Xaa is C or S
  MOD_RES (16)..(17)..(18)..(19)..(20): Xaa is A or G
  MOD_RES (21)..(22)..(23)..(24): Xaa is A or G or is absent

SEQ ID NO: 67290 - protein, 43 aa, Artificial Sequence; identical to SEQ ID NO: 29718
  GFR-binding peptide
  MOD_RES (6)..(7)..(40)..(42): Xaa is C or S
  MOD_RES (21)..(22)..(23)..(24)..(25): Xaa is A or G
  MOD_RES (26)..(27)..(28)..(29): Xaa is A or G or is absent

SEQ ID NO: 67291 - protein, 36 aa, Artificial Sequence
  GFR-binding peptide
  MOD_RES (1)..(35): Xaa is C or S
  MOD_RES (15)..(16)..(17)..(18)..(19): Xaa is A or G
  MOD_RES (20)..(21)..(22)..(23): Xaa is A or G or is absent
XTPTKMSPISMLYKXXXXXXXXXLKYHYGMVVDRXG

SEQ ID NO: 67292 - protein, 38 aa, Artificial Sequence; identical to SEQ ID NO: 8402
  GFR-binding peptide
  MOD_RES (1)..(2)..(36)..(38): Xaa is C or S
  MOD_RES (16)..(17)..(18)..(19)..(20): Xaa is A or G
  MOD_RES (21)..(22)..(23)..(24): Xaa is A or G or is absent

SEQ ID NO: 67293 - protein, 36 aa, Artificial Sequence
  GFR-binding peptide
  MOD_RES (1)..(35): Xaa is C or S
  MOD_RES (15)..(16)..(17)..(18)..(19): Xaa is A or G
  MOD_RES (20)..(21)..(22)..(23): Xaa is A or G or is absent
XVPTRLSPISILYKXXXXXXXXXLKYHYDMVVESXG

SEQ ID NO: 67294 - protein, 36 aa, Artificial Sequence; identical to SEQ ID NO: 8404
  GFR-binding peptide
  MOD_RES (1)..(2)..(36): Xaa is C or S
  MOD_RES (16)..(17)..(18)..(19)..(20): Xaa is A or G
  MOD_RES (21)..(22)..(23)..(24): Xaa is A or G or is absent

SEQ ID NO: 67295 - protein, 36 aa, Artificial Sequence; identical to SEQ ID NO: 32843
  GFR-binding peptide
  MOD_RES (1)..(2)..(34)..(36): Xaa is C or S

SEQ ID NO: 67296 - protein, 35 aa, Artificial Sequence; identical to SEQ ID NO: 29725
  GFR-binding peptide
  MOD_RES (1)..(35): Xaa is C or S
  MOD_RES (15)..(16)..(17)..(18)..(19): Xaa is A or G
  MOD_RES (20)..(21)..(22)..(23): Xaa is A or G or is absent

SEQ ID NO: 67297 - protein, 38 aa, Artificial Sequence; identical to SEQ ID NO: 29726
  GFR-binding peptide
  MOD_RES (2)..(3)..(37): Xaa is C or S
  MOD_RES (17)..(18)..(19)..(20)..(21): Xaa is A or G
  MOD_RES (22)..(23)..(24)..(25): Xaa is A or G or is absent

SEQ ID NO: 67298 - protein, 41 aa, Artificial Sequence; identical to SEQ ID NO: 8406
  GFR-binding peptide
  MOD_RES (5)..(6)..(40): Xaa is C or S
  MOD_RES (20)..(21)..(22)..(23)..(24): Xaa is A or G
  MOD_RES (25)..(26)..(27)..(28): Xaa is A or G or is absent

SEQ ID NO: 67299 - protein, 40 aa, Artificial Sequence
  GFR-binding peptide
  MOD_RES (6)..(7): Xaa is C or S
  MOD_RES (21)..(22)..(23)..(24)..(25): Xaa is A or G
  MOD_RES (26)..(27)..(28)..(29): Xaa is A or G or is absent
HVPKPXXAPTKLSPISVLYKXXXXXXXXXLKYHYNMVVRS

SEQ ID NO: 67300 - protein, 34 aa, Artificial Sequence; identical to SEQ ID NO: 8411
  GFR-binding peptide
  MOD_RES (1)..(2)..(33): Xaa is C or S

SEQ ID NO: 67301 - protein, 43 aa, Artificial Sequence; identical to SEQ ID NO: 8414
  GFR-binding peptide
  MOD_RES (6)..(7)..(41)..(43): Xaa is C or S
  MOD_RES (21)..(22)..(23)..(24)..(25): Xaa is A or G
  MOD_RES (26)..(27)..(28)..(29): Xaa is A or G or is absent

SEQ ID NO: 67302 - protein, 36 aa, Artificial Sequence; identical to SEQ ID NO: 8415
  GFR-binding peptide
  MOD_RES (2)..(3)..(36): Xaa is C or S
  MOD_RES (17)..(18)..(19)..(20)..(21): Xaa is A or G
  MOD_RES (22)..(23)..(24)..(25): Xaa is A or G or is absent

SEQ ID NO: 67303 - protein, 36 aa, Artificial Sequence
  GFR-binding peptide
  MOD_RES (2)..(3)..(34)..(36): Xaa is C or S
TXXAPVKTSPISMLYKDNGRVLLLKYHYMIVEEXGX

SEQ ID NO: 67304 - protein, 34 aa, Artificial Sequence
  GFR-binding peptide
  MOD_RES (1)..(1): Xaa is C or S
  MOD_RES (15)..(16)..(17)..(18)..(19): Xaa is A or G
  MOD_RES (20)..(21)..(22)..(23): Xaa is A or G or is absent
XTPTKMSATSMLYYXXXXXXXXXLRKHRGMVVDR

SEQ ID NO: 67305 - protein, 40 aa, Artificial Sequence; identical to SEQ ID NO: 8416
  GFR-binding peptide
  MOD_RES (3)..(37)..(39): Xaa is C or S
  MOD_RES (17)..(18)..(19)..(20)..(21): Xaa is A or G
  MOD_RES (22)..(23)..(24)..(25): Xaa is A or G or is absent

SEQ ID NO: 67306 - protein, 37 aa, Artificial Sequence
  GFR-binding peptide
  MOD_RES (3)..(4): Xaa is C or S
  MOD_RES (18)..(19)..(20)..(21)..(22): Xaa is A or G
  MOD_RES (23)..(24)..(25)..(26): Xaa is A or G or is absent
PTXXVPTRLEPISILYLXXXXXXXXXKFKYEDMVVES

SEQ ID NO: 67307 - protein, 34 aa, Artificial Sequence; identical to SEQ ID NO: 8421
  GFR-binding peptide
  MOD_RES (1)..(2)..(34): Xaa is C or S

SEQ ID NO: 67308 - protein, 35 aa, Artificial Sequence
  GFR-binding peptide
  MOD_RES (2)..(3)..(35): Xaa is C or S
PXXVPEKMSPISILYKDENKNVVLKYHYNMTVESX

SEQ ID NO: 67309 - protein, 35 aa, Artificial Sequence; identical to SEQ ID NO: 8422
  GFR-binding peptide
  MOD_RES (34)..(34): Xaa is C or S
  MOD_RES (14)..(15)..(16)..(17)..(18): Xaa is A or G
  MOD_RES (19)..(20)..(21)..(22): Xaa is A or G or is absent

SEQ ID NO: 67310 - protein, 42 aa, Artificial Sequence; identical to SEQ ID NO: 29736
  GFR-binding peptide
  MOD_RES (6)..(7)..(40)..(42): Xaa is C or S
  MOD_RES (21)..(22)..(23)..(24)..(25): Xaa is A or G
  MOD_RES (26)..(27)..(28)..(29): Xaa is A or G or is absent

SEQ ID NO: 67311 - protein, 40 aa, Artificial Sequence; identical to SEQ ID NO: 32857
  GFR-binding peptide
  MOD_RES (7)..(39): Xaa is C or S

SEQ ID NO: 67312 - protein, 37 aa, Artificial Sequence; identical to SEQ ID NO: 29737
  GFR-binding peptide
  MOD_RES (5)..(6): Xaa is C or S

SEQ ID NO: 67313 - protein, 38 aa, Artificial Sequence; identical to SEQ ID NO: 8425
  GFR-binding peptide
  MOD_RES (1)..(2)..(37): Xaa is C or S
  MOD_RES (16)..(17)..(18)..(19)..(20): Xaa is A or G
  MOD_RES (21)..(22)..(23)..(24): Xaa is A or G or is absent

SEQ ID NO: 67314 - protein, 36 aa, Artificial Sequence; identical to SEQ ID NO: 32860
  GFR-binding peptide
  MOD_RES (5)..(6): Xaa is C or S

SEQ ID NO: 67315 - protein, 35 aa, Artificial Sequence; identical to SEQ ID NO: 29739
  GFR-binding peptide
  MOD_RES (32)..(34): Xaa is C or S

SEQ ID NO: 67316 - protein, 32 aa, Artificial Sequence; identical to SEQ ID NO: 29740
  GFR-binding peptide
  MOD_RES (1)..(2): Xaa is C or S

SEQ ID NO: 67317 - protein, 36 aa, Artificial Sequence; identical to SEQ ID NO: 8428
  GFR-binding peptide
  MOD_RES (1)..(2)..(34)..(36): Xaa is C or S

SEQ ID NO: 67318 - protein, 33 aa, Artificial Sequence
  GFR-binding peptide
  MOD_RES (1)..(32): Xaa is C or S
XAPVKTSPISMLYKDNGRVLLLKYHYMIVEEXG

SEQ ID NO: 67319 - protein, 33 aa, Artificial Sequence
  GFR-binding peptide
  MOD_RES (33)..(33): Xaa is C or S
  MOD_RES (14)..(15)..(16)..(17)..(18): Xaa is A or G
  MOD_RES (19)..(20)..(21)..(22): Xaa is A or G or is absent
VPQALSPINILYFXXXXXXXXXYGKIPMIVRSX

SEQ ID NO: 67320 - protein, 40 aa, Artificial Sequence
  GFR-binding peptide
  MOD_RES (6)..(7)..(39): Xaa is C or S
GSAGPXXTPTKMEPISMLYLNDKQQIIKFKYEGMVVDRXG

SEQ ID NO: 67321 - protein, 31 aa, Artificial Sequence
  GFR-binding peptide
  MOD_RES (1)..(1): Xaa is C or S
XVPQDLSPINILYFVGRTPKVYGKIPMVVKS

SEQ ID NO: 67322 - protein, 37 aa, Artificial Sequence; identical to SEQ ID NO: 8432
  GFR-binding peptide
  MOD_RES (5)..(6)..(37): Xaa is C or S

SEQ ID NO: 67323 - protein, 37 aa, Artificial Sequence; identical to SEQ ID NO: 29748
  GFR-binding peptide
  MOD_RES (2)..(3)..(35)..(37): Xaa is C or S

SEQ ID NO: 67324 - protein, 33 aa, Artificial Sequence; identical to SEQ ID NO: 29749
  GFR-binding peptide
  MOD_RES (3)..(3): Xaa is C or S

SEQ ID NO: 67325 - protein, 34 aa, Artificial Sequence; identical to SEQ ID NO: 8434
  GFR-binding peptide
  MOD_RES (1)..(2): Xaa is C or S
  MOD_RES (16)..(17)..(18)..(19)..(20): Xaa is A or G
  MOD_RES (21)..(22)..(23)..(24): Xaa is A or G or is absent

SEQ ID NO: 67326 - protein, 32 aa, Artificial Sequence; identical to SEQ ID NO: 32866
  GFR-binding peptide
  MOD_RES (14)..(15)..(16)..(17)..(18): Xaa is A or G
  MOD_RES (19)..(20)..(21)..(22): Xaa is A or G or is absent

SEQ ID NO: 67327 - protein, 36 aa, Artificial Sequence; identical to SEQ ID NO: 32870
  GFR-binding peptide
  MOD_RES (5)..(6): Xaa is C or S

SEQ ID NO: 67328 - protein, 37 aa, Artificial Sequence
  GFR-binding peptide
  MOD_RES (2)..(3)..(37): Xaa is C or S
  MOD_RES (17)..(18)..(19)..(20)..(21): Xaa is A or G
  MOD_RES (22)..(23)..(24)..(25): Xaa is A or G or is absent
PXXVPEKMSPINILYFXXXXXXXXXYGKIPNMTVESX

SEQ ID NO: 67329 - protein, 33 aa, Artificial Sequence; identical to SEQ ID NO: 8441
  GFR-binding peptide
  MOD_RES (33)..(33): Xaa is C or S
  MOD_RES (14)..(15)..(16)..(17)..(18): Xaa is A or G
  MOD_RES (19)..(20)..(21)..(22): Xaa is A or G or is absent

SEQ ID NO: 67330 - protein, 40 aa, Artificial Sequence; identical to SEQ ID NO: 32872
  GFR-binding peptide
  MOD_RES (3)..(4)..(38)..(40): Xaa is C or S
  MOD_RES (18)..(19)..(20)..(21)..(22): Xaa is A or G
  MOD_RES (23)..(24)..(25)..(26): Xaa is A or G or is absent

SEQ ID NO: 67331 - protein, 32 aa, Artificial Sequence; identical to SEQ ID NO: 8444
  GFR-binding peptide
  MOD_RES (1)..(2): Xaa is C or S

SEQ ID NO: 67332 - protein, 38 aa, Artificial Sequence
  GFR-binding peptide
  MOD_RES (4)..(5): Xaa is C or S
  MOD_RES (19)..(20)..(21)..(22)..(23): Xaa is A or G
  MOD_RES (24)..(25)..(26)..(27): Xaa is A or G or is absent
AGPXXTPTKMSPISMLYKXXXXXXXXXLKYHYGMVVDR

SEQ ID NO: 67333 - protein, 35 aa, Artificial Sequence; identical to SEQ ID NO: 32876
  GFR-binding peptide
  MOD_RES (1)..(2): Xaa is C or S
  MOD_RES (16)..(17)..(18)..(19)..(20): Xaa is A or G
  MOD_RES (21)..(22)..(23)..(24): Xaa is A or G or is absent

SEQ ID NO: 67334 - protein, 37 aa, Artificial Sequence; identical to SEQ ID NO: 29758
  GFR-binding peptide
  MOD_RES (1)..(35)..(37): Xaa is C or S
  MOD_RES (15)..(16)..(17)..(18)..(19): Xaa is A or G
  MOD_RES (20)..(21)..(22)..(23): Xaa is A or G or is absent

SEQ ID NO: 67335 - protein, 41 aa, Artificial Sequence; identical to SEQ ID NO: 8447
  GFR-binding peptide
  MOD_RES (5)..(6)..(40): Xaa is C or S
  MOD_RES (20)..(21)..(22)..(23)..(24): Xaa is A or G
  MOD_RES (25)..(26)..(27)..(28): Xaa is A or G or is absent

SEQ ID NO: 67336 - protein, 41 aa, Artificial Sequence; identical to SEQ ID NO: 8450
  GFR-binding peptide
  MOD_RES (5)..(6)..(39)..(41): Xaa is C or S
  MOD_RES (20)..(21)..(22)..(23)..(24): Xaa is A or G
  MOD_RES (25)..(26)..(27)..(28): Xaa is A or G or is absent

SEQ ID NO: 67337 - protein, 40 aa, Artificial Sequence; identical to SEQ ID NO: 8451
  GFR-binding peptide
  MOD_RES (6)..(7)..(38)..(40): Xaa is C or S

SEQ ID NO: 67338 - protein, 35 aa, Artificial Sequence
  GFR-binding peptide
  MOD_RES (2)..(3): Xaa is C or S
  MOD_RES (17)..(18)..(19)..(20)..(21): Xaa is A or G
  MOD_RES (22)..(23)..(24)..(25): Xaa is A or G or is absent
TXXVPTRLSPISILYKXXXXXXXXXLKYHYDMVVE

SEQ ID NO: 67339 - protein, 39 aa, Artificial Sequence; identical to SEQ ID NO: 32883
  GFR-binding peptide
  MOD_RES (4)..(5)..(39): Xaa is C or S
  MOD_RES (19)..(20)..(21)..(22)..(23): Xaa is A or G
  MOD_RES (24)..(25)..(26)..(27): Xaa is A or G or is absent

SEQ ID NO: 67340 - protein, 35 aa, Artificial Sequence
  GFR-binding peptide
  MOD_RES (2)..(3): Xaa is C or S
  MOD_RES (17)..(18)..(19)..(20)..(21): Xaa is A or G
  MOD_RES (22)..(23)..(24)..(25): Xaa is A or G or is absent
TXXVPTRLEPISILYLXXXXXXXXXKFKYEDMVVE

SEQ ID NO: 67341 - protein, 41 aa, Artificial Sequence; identical to SEQ ID NO: 32892
  GFR-binding peptide
  MOD_RES (3)..(4)..(38)..(40): Xaa is C or S
  MOD_RES (18)..(19)..(20)..(21)..(22): Xaa is A or G
  MOD_RES (23)..(24)..(25)..(26): Xaa is A or G or is absent

SEQ ID NO: 67342 - protein, 39 aa, Artificial Sequence; identical to SEQ ID NO: 29767
  GFR-binding peptide
  MOD_RES (1)..(2)..(36)..(38): Xaa is C or S
  MOD_RES (16)..(17)..(18)..(19)..(20): Xaa is A or G
  MOD_RES (21)..(22)..(23)..(24): Xaa is A or G or is absent

SEQ ID NO: 67343 - protein, 39 aa, Artificial Sequence; identical to SEQ ID NO: 8455
  GFR-binding peptide
  MOD_RES (4)..(5)..(39): Xaa is C or S
  MOD_RES (19)..(20)..(21)..(22)..(23): Xaa is A or G
  MOD_RES (24)..(25)..(26)..(27): Xaa is A or G or is absent

SEQ ID NO: 67344 - protein, 34 aa, Artificial Sequence; identical to SEQ ID NO: 8456
  GFR-binding peptide
  MOD_RES (1)..(2): Xaa is C or S
  MOD_RES (16)..(17)..(18)..(19)..(20): Xaa is A or G
  MOD_RES (21)..(22)..(23)..(24): Xaa is A or G or is absent

SEQ ID NO: 67345 - protein, 38 aa, Artificial Sequence; identical to SEQ ID NO: 29769
  GFR-binding peptide
  MOD_RES (2)..(3)..(35)..(37): Xaa is C or S

SEQ ID NO: 67346 - protein, 39 aa, Artificial Sequence; identical to SEQ ID NO: 8457
  GFR-binding peptide
  MOD_RES (2)..(3)..(37)..(39): Xaa is C or S
  MOD_RES (17)..(18)..(19)..(20)..(21): Xaa is A or G
  MOD_RES (22)..(23)..(24)..(25): Xaa is A or G or is absent

SEQ ID NO: 67347 - protein, 37 aa, Artificial Sequence; identical to SEQ ID NO: 8458
  GFR-binding peptide
  MOD_RES (6)..(7): Xaa is C or S

SEQ ID NO: 67348 - protein, 33 aa, Artificial Sequence; identical to SEQ ID NO: 29775
  GFR-binding peptide
  MOD_RES (2)..(3): Xaa is C or S

SEQ ID NO: 67349 - protein, 36 aa, Artificial Sequence; identical to SEQ ID NO: 8461
  GFR-binding peptide
  MOD_RES (33)..(35): Xaa is C or S
  MOD_RES (14)..(15)..(16)..(17)..(18): Xaa is A or G
  MOD_RES (19)..(20)..(21)..(22): Xaa is A or G or is absent

SEQ ID NO: 67350 - protein, 37 aa, Artificial Sequence; identical to SEQ ID NO: 8462
  GFR-binding peptide
  MOD_RES (2)..(3)..(35)..(37): Xaa is C or S

SEQ ID NO: 67351 - protein, 38 aa, Artificial Sequence; identical to SEQ ID NO: 32914
  GFR-binding peptide
  MOD_RES (3)..(4): Xaa is C or S
  MOD_RES (18)..(19)..(20)..(21)..(22): Xaa is A or G
  MOD_RES (23)..(24)..(25)..(26): Xaa is A or G or is absent

SEQ ID NO: 67352 - protein, 36 aa, Artificial Sequence; identical to SEQ ID NO: 29781
  GFR-binding peptide
  MOD_RES (1)..(33)..(35): Xaa is C or S

SEQ ID NO: 67353 - protein, 37 aa, Artificial Sequence
  GFR-binding peptide
  MOD_RES (4)..(5): Xaa is C or S
  MOD_RES (19)..(20)..(21)..(22)..(23): Xaa is A or G
  MOD_RES (24)..(25)..(26)..(27): Xaa is A or G or is absent
PEPXXVPEKMSATSILYYXXXXXXXXXLRKHRNMTVE

SEQ ID NO: 67354 - protein, 35 aa, Artificial Sequence
  GFR-binding peptide
  MOD_RES (32)..(34): Xaa is C or S
VPARLSATSILYYDAANNVVLRKHRDMVVEAXGXR

SEQ ID NO: 67355 - protein, 38 aa, Artificial Sequence; identical to SEQ ID NO: 29786
  GFR-binding peptide
  MOD_RES (6)..(7): Xaa is C or S

SEQ ID NO: 67356 - protein, 40 aa, Artificial Sequence; identical to SEQ ID NO: 32918
  GFR-binding peptide
  MOD_RES (5)..(6)..(40): Xaa is C or S
  MOD_RES (20)..(21)..(22)..(23)..(24): Xaa is A or G
  MOD_RES (25)..(26)..(27)..(28): Xaa is A or G or is absent

SEQ ID NO: 67357 - protein, 38 aa, Artificial Sequence; identical to SEQ ID NO: 29790
  GFR-binding peptide
  MOD_RES (4)..(5)..(37): Xaa is C or S

SEQ ID NO: 67358 - protein, 37 aa, Artificial Sequence; identical to SEQ ID NO: 32925
  GFR-binding peptide
  MOD_RES (2)..(3)..(37): Xaa is C or S
  MOD_RES (17)..(18)..(19)..(20)..(21): Xaa is A or G
  MOD_RES (22)..(23)..(24)..(25): Xaa is A or G or is absent

SEQ ID NO: 67359 - protein, 39 aa, Artificial Sequence; identical to SEQ ID NO: 8471
  GFR-binding peptide
  MOD_RES (4)..(38): Xaa is C or S
  MOD_RES (18)..(19)..(20)..(21)..(22): Xaa is A or G
  MOD_RES (23)..(24)..(25)..(26): Xaa is A or G or is absent

SEQ ID NO: 67360 - protein, 37 aa, Artificial Sequence; identical to SEQ ID NO: 8475
  GFR-binding peptide
  MOD_RES (3)..(4): Xaa is C or S
  MOD_RES (18)..(19)..(20)..(21)..(22): Xaa is A or G
  MOD_RES (23)..(24)..(25)..(26): Xaa is A or G or is absent

SEQ ID NO: 67361 - protein, 40 aa, Artificial Sequence
  GFR-binding peptide
  MOD_RES (5)..(6)..(37)..(39): Xaa is C or S
VPSTXXAPVKTEPISMLYLDNGRVLLKFKYEMIVEEXGXL

SEQ ID NO: 67362 - protein, 38 aa, Artificial Sequence
  GFR-binding peptide
  MOD_RES (3)..(4)..(35)..(37): Xaa is C or S
APXXVPQALSPINILYFVGRKPKVYGKIPMIVRSXKXS

SEQ ID NO: 67363 - protein, 37 aa, Artificial Sequence; identical to SEQ ID NO: 15783
  GFR-binding peptide
  MOD_RES (3)..(4)..(36): Xaa is C or S

SEQ ID NO: 67364 - protein, 40 aa, Artificial Sequence
  GFR-binding peptide
  MOD_RES (2)..(3)..(37)..(39): Xaa is C or S
  MOD_RES (17)..(18)..(19)..(20)..(21): Xaa is A or G
  MOD_RES (22)..(23)..(24)..(25): Xaa is A or G or is absent
TXXVPTRLSPISILYKXXXXXXXXXLKYHYDMVVESXGXR

SEQ ID NO: 67365 - protein, 37 aa, Artificial Sequence
  GFR-binding peptide
  MOD_RES (1)..(35)..(37): Xaa is C or S
  MOD_RES (15)..(16)..(17)..(18)..(19): Xaa is A or G
  MOD_RES (20)..(21)..(22)..(23): Xaa is A or G or is absent
XVPEKMSATSILYYXXXXXXXXXLRKHRNMTVESXAX

SEQ ID NO: 67366 - protein, 37 aa, Artificial Sequence; identical to SEQ ID NO: 57834
  GFR-binding peptide
  MOD_RES (2)..(3)..(36): Xaa is C or S
  MOD_RES (17)..(18)..(19)..(20)..(21): Xaa is A or G
  MOD_RES (22)..(23)..(24)..(25): Xaa is A or G or is absent

SEQ ID NO: 67367 - protein, 40 aa, Artificial Sequence; identical to SEQ ID NO: 29801
  GFR-binding peptide
  MOD_RES (3)..(37)..(39): Xaa is C or S
  MOD_RES (17)..(18)..(19)..(20)..(21): Xaa is A or G
  MOD_RES (22)..(23)..(24)..(25): Xaa is A or G or is absent

SEQ ID NO: 67368 - protein, 35 aa, Artificial Sequence
  GFR-binding peptide
  MOD_RES (1)..(33)..(35): Xaa is C or S
XVPEKMSPISILYKDENKNVVLKYHYNMTVESXAX

SEQ ID NO: 67369 - protein, 40 aa, Artificial Sequence
  GFR-binding peptide
  MOD_RES (2)..(3)..(37)..(39): Xaa is C or S
  MOD_RES (17)..(18)..(19)..(20)..(21): Xaa is A or G
  MOD_RES (22)..(23)..(24)..(25): Xaa is A or G or is absent
PXXTPTKMSATSMLYYXXXXXXXXXLRKHRGMVVDRXGXS

SEQ ID NO: 67370 - protein, 34 aa, Artificial Sequence
  GFR-binding peptide
  MOD_RES (1)..(2): Xaa is C or S
  MOD_RES (16)..(17)..(18)..(19)..(20): Xaa is A or G
  MOD_RES (21)..(22)..(23)..(24): Xaa is A or G or is absent
XXVPEKMNAISILYFXXXXXXXXXLKKYRNMTVE

SEQ ID NO: 67371 - protein, 32 aa, Artificial Sequence
  GFR-binding peptide
  MOD_RES (31)..(31): Xaa is C or S
VSQDLSPINILYFIGKTPKIYGKIPMIVKSXK

SEQ ID NO: 67372 - protein, 35 aa, Artificial Sequence; identical to SEQ ID NO: 8482
  GFR-binding peptide
  MOD_RES (4)..(4): Xaa is C or S

SEQ ID NO: 67373 - protein, 37 aa, Artificial Sequence; identical to SEQ ID NO: 32939
  GFR-binding peptide
  MOD_RES (4)..(5): Xaa is C or S
  MOD_RES (19)..(20)..(21)..(22)..(23): Xaa is A or G
  MOD_RES (24)..(25)..(26)..(27): Xaa is A or G or is absent

SEQ ID NO: 67374 - protein, 36 aa, Artificial Sequence; identical to SEQ ID NO: 8483
  GFR-binding peptide
  MOD_RES (33)..(35): Xaa is C or S

SEQ ID NO: 67375 - protein, 41 aa, Artificial Sequence; identical to SEQ ID NO: 8485
  GFR-binding peptide
  MOD_RES (3)..(4)..(38)..(40): Xaa is C or S
  MOD_RES (18)..(19)..(20)..(21)..(22): Xaa is A or G
  MOD_RES (23)..(24)..(25)..(26): Xaa is A or G or is absent

SEQ ID NO: 67376 - protein, 32 aa, Artificial Sequence; identical to SEQ ID NO: 29806
  GFR-binding peptide
  MOD_RES (1)..(1): Xaa is C or S

SEQ ID NO: 67377 - protein, 36 aa, Artificial Sequence; identical to SEQ ID NO: 8489
  GFR-binding peptide
  MOD_RES (3)..(3): Xaa is C or S
  MOD_RES (17)..(18)..(19)..(20)..(21): Xaa is A or G
  MOD_RES (22)..(23)..(24)..(25): Xaa is A or G or is absent

SEQ ID NO: 67378 - protein, 35 aa, Artificial Sequence; identical to SEQ ID NO: 8490
  GFR-binding peptide
  MOD_RES (1)..(35): Xaa is C or S
  MOD_RES (15)..(16)..(17)..(18)..(19): Xaa is A or G
  MOD_RES (20)..(21)..(22)..(23): Xaa is A or G or is absent

SEQ ID NO: 67379 - protein, 36 aa, Artificial Sequence; identical to SEQ ID NO: 8492
  GFR-binding peptide
  MOD_RES (5)..(6): Xaa is C or S

SEQ ID NO: 67380 - protein, 35 aa, Artificial Sequence
  GFR-binding peptide
  MOD_RES (3)..(4)..(35): Xaa is C or S
STXXAPVKTSPISMLYKDNGRVLLLKYHYMIVEEX

SEQ ID NO: 67381 - protein, 34 aa, Artificial Sequence; identical to SEQ ID NO: 15792
  GFR-binding peptide
  MOD_RES (3)..(4): Xaa is C or S

SEQ ID NO: 67382 - protein, 42 aa, Artificial Sequence; identical to SEQ ID NO: 8493
  GFR-binding peptide
  MOD_RES (6)..(7)..(39)..(41): Xaa is C or S

SEQ ID NO: 67383 - protein, 42 aa, Artificial Sequence; identical to SEQ ID NO: 29811
  GFR-binding peptide
  MOD_RES (6)..(7)..(41): Xaa is C or S
  MOD_RES (21)..(22)..(23)..(24)..(25): Xaa is A or G
  MOD_RES (26)..(27)..(28)..(29): Xaa is A or G or is absent

SEQ ID NO: 67384 - protein, 38 aa, Artificial Sequence; identical to SEQ ID NO: 8495
  GFR-binding peptide
  MOD_RES (5)..(6)..(37): Xaa is C or S

SEQ ID NO: 67385 - protein, 40 aa, Artificial Sequence
  GFR-binding peptide
  MOD_RES (4)..(5)..(39): Xaa is C or S
  MOD_RES (19)..(20)..(21)..(22)..(23): Xaa is A or G
  MOD_RES (24)..(25)..(26)..(27): Xaa is A or G or is absent
PASXXVPARLSATSILYYXXXXXXXXXLRKHRDMVVEAXG

SEQ ID NO: 67386 - protein, 35 aa, Artificial Sequence; identical to SEQ ID NO: 8498
  GFR-binding peptide
  MOD_RES (5)..(5): Xaa is C or S

SEQ ID NO: 67387 - protein, 33 aa, Artificial Sequence
  GFR-binding peptide
  MOD_RES (2)..(3): Xaa is C or S
TXXAPVKTEPISMLYLDNGRVLLKFKYEMIVEE

SEQ ID NO: 67388 - protein, 39 aa, Artificial Sequence
  GFR-binding peptide
  MOD_RES (2)..(3)..(37)..(39): Xaa is C or S
  MOD_RES (17)..(18)..(19)..(20)..(21): Xaa is A or G
  MOD_RES (22)..(23)..(24)..(25): Xaa is A or G or is absent
PXXTPTKMSPISMLYKXXXXXXXXXLKYHYGMVVDRXGX

SEQ ID NO: 67389 - protein, 34 aa, Artificial Sequence; identical to SEQ ID NO: 32948
  GFR-binding peptide
  MOD_RES (1)..(1): Xaa is C or S
  MOD_RES (15)..(16)..(17)..(18)..(19): Xaa is A or G
  MOD_RES (20)..(21)..(22)..(23): Xaa is A or G or is absent

SEQ ID NO: 67390 - protein, 33 aa, Artificial Sequence; identical to SEQ ID NO: 8501
  GFR-binding peptide
  MOD_RES (1)..(1): Xaa is C or S
  MOD_RES (15)..(16)..(17)..(18)..(19): Xaa is A or G
  MOD_RES (20)..(21)..(22)..(23): Xaa is A or G or is absent

SEQ ID NO: 67391 - protein, 37 aa, Artificial Sequence; identical to SEQ ID NO: 8504
  GFR-binding peptide
  MOD_RES (1)..(2)..(35)..(37): Xaa is C or S
  MOD_RES (16)..(17)..(18)..(19)..(20): Xaa is A or G
  MOD_RES (21)..(22)..(23)..(24): Xaa is A or G or is absent

SEQ ID NO: 67392 - protein, 39 aa, Artificial Sequence; identical to SEQ ID NO: 32953
  GFR-binding peptide
  MOD_RES (5)..(6): Xaa is C or S
  MOD_RES (20)..(21)..(22)..(23)..(24): Xaa is A or G
  MOD_RES (25)..(26)..(27)..(28): Xaa is A or G or is absent

SEQ ID NO: 67393 - protein, 40 aa, Artificial Sequence; identical to SEQ ID NO: 8506
  GFR-binding peptide
  MOD_RES (1)..(2)..(37)..(39): Xaa is C or S
  MOD_RES (16)..(17)..(18)..(19)..(20): Xaa is A or G
  MOD_RES (21)..(22)..(23)..(24): Xaa is A or G or is absent

SEQ ID NO: 67394 - protein, 39 aa, Artificial Sequence; identical to SEQ ID NO: 8507
  GFR-binding peptide
  MOD_RES (2)..(3)..(37)..(39): Xaa is C or S
  MOD_RES (17)..(18)..(19)..(20)..(21): Xaa is A or G
  MOD_RES (22)..(23)..(24)..(25): Xaa is A or G or is absent

SEQ ID NO: 67395 - protein, 41 aa, Artificial Sequence; identical to SEQ ID NO: 8510
  GFR-binding peptide
  MOD_RES (5)..(6)..(40): Xaa is C or S
  MOD_RES (20)..(21)..(22)..(23)..(24): Xaa is A or G
  MOD_RES (25)..(26)..(27)..(28): Xaa is A or G or is absent

SEQ ID NO: 67396 - protein, 39 aa, Artificial Sequence; identical to SEQ ID NO: 8511
  GFR-binding peptide
  MOD_RES (4)..(5)..(36)..(38): Xaa is C or S

SEQ ID NO: 67397 - protein, 39 aa, Artificial Sequence; identical to SEQ ID NO: 29828
  GFR-binding peptide
  MOD_RES (3)..(4)..(38): Xaa is C or S
  MOD_RES (18)..(19)..(20)..(21)..(22): Xaa is A or G
  MOD_RES (23)..(24)..(25)..(26): Xaa is A or G or is absent

SEQ ID NO: 67398 - protein, 33 aa, Artificial Sequence; identical to SEQ ID NO: 8512
  GFR-binding peptide
  MOD_RES (31)..(33): Xaa is C or S

SEQ ID NO: 67399 - protein, 37 aa, Artificial Sequence; identical to SEQ ID NO: 8513
  GFR-binding peptide
  MOD_RES (2)..(3)..(35)..(37): Xaa is C or S

SEQ ID NO: 67400 - protein, 37 aa, Artificial Sequence; identical to SEQ ID NO: 29830
  GFR-binding peptide
  MOD_RES (3)..(4)..(37): Xaa is C or S
  MOD_RES (18)..(19)..(20)..(21)..(22): Xaa is A or G
  MOD_RES (23)..(24)..(25)..(26): Xaa is A or G or is absent

SEQ ID NO: 67401 - protein, 37 aa, Artificial Sequence; identical to SEQ ID NO: 32965
  GFR-binding peptide
  MOD_RES (2)..(3)..(35)..(37): Xaa is C or S

SEQ ID NO: 67402 - protein, 36 aa, Artificial Sequence
  GFR-binding peptide
  MOD_RES (3)..(4): Xaa is C or S
  MOD_RES (18)..(19)..(20)..(21)..(22): Xaa is A or G
  MOD_RES (23)..(24)..(25)..(26): Xaa is A or G or is absent
ASXXVPARLSATSILYYXXXXXXXXXLRKHRDMVVE

SEQ ID NO: 67403 - protein, 32 aa, Artificial Sequence; identical to SEQ ID NO: 8514
  GFR-binding peptide
  MOD_RES (32)..(32): Xaa is C or S

SEQ ID NO: 67404 - protein, 40 aa, Artificial Sequence; identical to SEQ ID NO: 29835
  GFR-binding peptide
  MOD_RES (4)..(5)..(39): Xaa is C or S
  MOD_RES (19)..(20)..(21)..(22)..(23): Xaa is A or G
  MOD_RES (24)..(25)..(26)..(27): Xaa is A or G or is absent

SEQ ID NO: 67405 - protein, 40 aa, Artificial Sequence; identical to SEQ ID NO: 8515
  GFR-binding peptide
  MOD_RES (3)..(4)..(39): Xaa is C or S
  MOD_RES (18)..(19)..(20)..(21)..(22): Xaa is A or G
  MOD_RES (23)..(24)..(25)..(26): Xaa is A or G or is absent

SEQ ID NO: 67406 - protein, 33 aa, Artificial Sequence; identical to SEQ ID NO: 8516
  GFR-binding peptide
  MOD_RES (14)..(15)..(16)..(17)..(18): Xaa is A or G
  MOD_RES (19)..(20)..(21)..(22): Xaa is A or G or is absent

SEQ ID NO: 67407 - protein, 38 aa, Artificial Sequence; identical to SEQ ID NO: 32969
  GFR-binding peptide
  MOD_RES (2)..(3)..(35)..(37): Xaa is C or S

SEQ ID NO: 67408 - protein, 41 aa, Artificial Sequence; identical to SEQ ID NO: 29838
  GFR-binding peptide
  MOD_RES (6)..(7)..(39)..(41): Xaa is C or S

SEQ ID NO: 67409 - protein, 31 aa, Artificial Sequence; identical to SEQ ID NO: 8519
  GFR-binding peptide
  MOD_RES (1)..(1): Xaa is C or S

SEQ ID NO: 67410 - protein, 37 aa, Artificial Sequence; identical to SEQ ID NO: 8521
  GFR-binding peptide
  MOD_RES (4)..(5)..(37): Xaa is C or S

SEQ ID NO: 67411 - protein, 37 aa, Artificial Sequence; identical to SEQ ID NO: 8524
  GFR-binding peptide
  MOD_RES (5)..(6): Xaa is C or S

SEQ ID NO: 67412 - protein, 42 aa, Artificial Sequence; identical to SEQ ID NO: 32970
  GFR-binding peptide
  MOD_RES (4)..(5)..(39)..(41): Xaa is C or S
  MOD_RES (19)..(20)..(21)..(22)..(23): Xaa is A or G
  MOD_RES (24)..(25)..(26)..(27): Xaa is A or G or is absent

SEQ ID NO: 67413 - protein, 39 aa, Artificial Sequence; identical to SEQ ID NO: 8525
  GFR-binding peptide
  MOD_RES (4)..(5)..(38): Xaa is C or S

SEQ ID NO: 67414 - protein, 37 aa, Artificial Sequence; identical to SEQ ID NO: 8527
  GFR-binding peptide
  MOD_RES (6)..(7): Xaa is C or S

SEQ ID NO: 67415 - protein, 36 aa, Artificial Sequence
  GFR-binding peptide
  MOD_RES (2)..(3)..(35): Xaa is C or S
TXXVPTRLSATSILYYDSANNVVLRKHRDMVVESXG

SEQ ID NO: 67416 - protein, 37 aa, Artificial Sequence
  GFR-binding peptide
  MOD_RES (3)..(4)..(36): Xaa is C or S
PTXXVPTRLEPISILYLDSANNVVKFKYEDMVVESXG

SEQ ID NO: 67417 - protein, 38 aa, Artificial Sequence
  GFR-binding peptide
  MOD_RES (4)..(5)..(38): Xaa is C or S
  MOD_RES (19)..(20)..(21)..(22)..(23): Xaa is A or G
  MOD_RES (24)..(25)..(26)..(27): Xaa is A or G or is absent
AAPXXVPQALSPINILYFXXXXXXXXXYGKIPMIVRSX

SEQ ID NO: 67418 - protein, 39 aa, Artificial Sequence; identical to SEQ ID NO: 8528
  GFR-binding peptide
  MOD_RES (4)..(5): Xaa is C or S
  MOD_RES (19)..(20)..(21)..(22)..(23): Xaa is A or G
  MOD_RES (24)..(25)..(26)..(27): Xaa is A or G or is absent

SEQ ID NO: 67419 - protein, 39 aa, Artificial Sequence; identical to SEQ ID NO: 8531
  GFR-binding peptide
  MOD_RES (2)..(3)..(36)..(38): Xaa is C or S
  MOD_RES (17)..(18)..(19)..(20)..(21): Xaa is A or G
  MOD_RES (22)..(23)..(24)..(25): Xaa is A or G or is absent

SEQ ID NO: 67420 - protein, 38 aa, Artificial Sequence; identical to SEQ ID NO: 8534
  GFR-binding peptide
  MOD_RES (1)..(2)..(35)..(37): Xaa is C or S
  MOD_RES (16)..(17)..(18)..(19)..(20): Xaa is A or G
  MOD_RES (21)..(22)..(23)..(24): Xaa is A or G or is absent

SEQ ID NO: 67421 - protein, 42 aa, Artificial Sequence
  GFR-binding peptide
  MOD_RES (5)..(6)..(40)..(42): Xaa is C or S
  MOD_RES (20)..(21)..(22)..(23)..(24): Xaa is A or G
  MOD_RES (25)..(26)..(27)..(28): Xaa is A or G or is absent
TPPTXXVPTRLEPISILYLXXXXXXXXXKFKYEDMVVESXGX

SEQ ID NO: 67422 - protein, 34 aa, Artificial Sequence; identical to SEQ ID NO: 29850
  GFR-binding peptide
  MOD_RES (32)..(34): Xaa is C or S

SEQ ID NO: 67423 - protein, 39 aa, Artificial Sequence
  GFR-binding peptide
  MOD_RES (6)..(7)..(39): Xaa is C or S
STPPTXXVPTRLSATSILYYDSANNVVLRKHRDMVVESX

SEQ ID NO: 67424 - protein, 37 aa, Artificial Sequence; identical to SEQ ID NO: 32981
  GFR-binding peptide
  MOD_RES (1)..(35)..(37): Xaa is C or S
  MOD_RES (15)..(16)..(17)..(18)..(19): Xaa is A or G
  MOD_RES (20)..(21)..(22)..(23): Xaa is A or G or is absent

SEQ ID NO: 67425 - protein, 41 aa, Artificial Sequence
  GFR-binding peptide
  MOD_RES (5)..(6)..(40): Xaa is C or S
  MOD_RES (20)..(21)..(22)..(23)..(24): Xaa is A or G
  MOD_RES (25)..(26)..(27)..(28): Xaa is A or G or is absent
IPEPXXVPEKMSATSILYYXXXXXXXXXLRKHRNMTVESXA

SEQ ID NO: 67426 - protein, 35 aa, Artificial Sequence; identical to SEQ ID NO: 32982
  GFR-binding peptide
  MOD_RES (4)..(5): Xaa is C or S

SEQ ID NO: 67427 - protein, 36 aa, Artificial Sequence; identical to SEQ ID NO: 8539
  GFR-binding peptide
  MOD_RES (4)..(5)..(36): Xaa is C or S

SEQ ID NO: 67428 - protein, 34 aa, Artificial Sequence
  GFR-binding peptide
  MOD_RES (34)..(34): Xaa is C or S
  MOD_RES (14)..(15)..(16)..(17)..(18): Xaa is A or G
  MOD_RES (19)..(20)..(21)..(22): Xaa is A or G or is absent
TPTKMSPISMLYKXXXXXXXXXLKYHYGMVVDRX

SEQ ID NO: 67429 - protein, 38 aa, Artificial Sequence; identical to SEQ ID NO: 29853
  GFR-binding peptide
  MOD_RES (3)..(37): Xaa is C or S
  MOD_RES (17)..(18)..(19)..(20)..(21): Xaa is A or G
  MOD_RES (22)..(23)..(24)..(25): Xaa is A or G or is absent

SEQ ID NO: 67430 - protein, 36 aa, Artificial Sequence; identical to SEQ ID NO: 8544
  GFR-binding peptide
  MOD_RES (3)..(4): Xaa is C or S
  MOD_RES (18)..(19)..(20)..(21)..(22): Xaa is A or G
  MOD_RES (23)..(24)..(25)..(26): Xaa is A or G or is absent

SEQ ID NO: 67431 - protein, 43 aa, Artificial Sequence
  GFR-binding peptide
  MOD_RES (6)..(7)..(41)..(43): Xaa is C or S
  MOD_RES (21)..(22)..(23)..(24)..(25): Xaa is A or G
  MOD_RES (26)..(27)..(28)..(29): Xaa is A or G or is absent
GIPEPXXVPEKMEPISILYLXXXXXXXXXKFKYENMTVESXAX

SEQ ID NO: 67432 - protein, 39 aa, Artificial Sequence
  GFR-binding peptide
  MOD_RES (3)..(4)..(36)..(38): Xaa is C or S
EPXXVPEKMNAISILYFDENKNVVLKKYRNMTVESXAXR

SEQ ID NO: 67433 - protein, 37 aa, Artificial Sequence; identical to SEQ ID NO: 32989
  GFR-binding peptide
  MOD_RES (4)..(5): Xaa is C or S
  MOD_RES (19)..(20)..(21)..(22)..(23): Xaa is A or G
  MOD_RES (24)..(25)..(26)..(27): Xaa is A or G or is absent

SEQ ID NO: 67434 - protein, 37 aa, Artificial Sequence; identical to SEQ ID NO: 32991
  GFR-binding peptide
  MOD_RES (5)..(6): Xaa is C or S

SEQ ID NO: 67435 - protein, 35 aa, Artificial Sequence
  GFR-binding peptide
  MOD_RES (3)..(4)..(35): Xaa is C or S
STXXAPVKTSATSMLYYDNGRVLLLRKHRMIVEEX

SEQ ID NO: 67436 - protein, 36 aa, Artificial Sequence; identical to SEQ ID NO: 29861
  GFR-binding peptide
  MOD_RES (34)..(36): Xaa is C or S
  MOD_RES (14)..(15)..(16)..(17)..(18): Xaa is A or G
  MOD_RES (19)..(20)..(21)..(22): Xaa is A or G or is absent

SEQ ID NO: 67437 - protein, 39 aa, Artificial Sequence
  GFR-binding peptide
  MOD_RES (3)..(4)..(38): Xaa is C or S
  MOD_RES (18)..(19)..(20)..(21)..(22): Xaa is A or G
  MOD_RES (23)..(24)..(25)..(26): Xaa is A or G or is absent
ASXXVPARLSATSILYYXXXXXXXXXLRKHRDMVVEAXG

SEQ ID NO: 67438 - protein, 32 aa, Artificial Sequence; identical to SEQ ID NO: 8549
  GFR-binding peptide
  MOD_RES (1)..(1): Xaa is C or S

SEQ ID NO: 67439 - protein, 36 aa, Artificial Sequence; identical to SEQ ID NO: 8552
  GFR-binding peptide
  MOD_RES (4)..(4): Xaa is C or S
  MOD_RES (18)..(19)..(20)..(21)..(22): Xaa is A or G
  MOD_RES (23)..(24)..(25)..(26): Xaa is A or G or is absent

SEQ ID NO: 67440 - protein, 36 aa, Artificial Sequence; identical to SEQ ID NO: 8555
  GFR-binding peptide
  MOD_RES (3)..(4): Xaa is C or S
  MOD_RES (18)..(19)..(20)..(21)..(22): Xaa is A or G
  MOD_RES (23)..(24)..(25)..(26): Xaa is A or G or is absent

SEQ ID NO: 67441 - protein, 37 aa, Artificial Sequence; identical to SEQ ID NO: 57883
  GFR-binding peptide
  MOD_RES (3)..(4)..(35)..(37): Xaa is C or S

SEQ ID NO: 67442 - protein, 41 aa, Artificial Sequence; identical to SEQ ID NO: 8556
  GFR-binding peptide
  MOD_RES (6)..(7)..(41): Xaa is C or S
  MOD_RES (21)..(22)..(23)..(24)..(25): Xaa is A or G
  MOD_RES (26)..(27)..(28)..(29): Xaa is A or G or is absent

SEQ ID NO: 67443 - protein, 32 aa, Artificial Sequence; identical to SEQ ID NO: 8558
  GFR-binding peptide
  MOD_RES (1)..(1): Xaa is C or S

SEQ ID NO: 67444 - protein, 40 aa, Artificial Sequence; identical to SEQ ID NO: 57889
  GFR-binding peptide
  MOD_RES (3)..(4)..(37)..(39): Xaa is C or S
  MOD_RES (18)..(19)..(20)..(21)..(22): Xaa is A or G
  MOD_RES (23)..(24)..(25)..(26): Xaa is A or G or is absent

SEQ ID NO: 67445 - protein, 38 aa, Artificial Sequence; identical to SEQ ID NO: 8559
  GFR-binding peptide
  MOD_RES (2)..(3)..(37): Xaa is C or S
  MOD_RES (17)..(18)..(19)..(20)..(21): Xaa is A or G
  MOD_RES (22)..(23)..(24)..(25): Xaa is A or G or is absent

SEQ ID NO: 67446 - protein, 36 aa, Artificial Sequence
  GFR-binding peptide
  MOD_RES (34)..(36): Xaa is C or S
  MOD_RES (14)..(15)..(16)..(17)..(18): Xaa is A or G
  MOD_RES (19)..(20)..(21)..(22): Xaa is A or G or is absent
VPTRLSPISILYKXXXXXXXXXLKYHYDMVVESXGX

SEQ ID NO: 67447 - protein, 39 aa, Artificial Sequence; identical to SEQ ID NO: 8562
  GFR-binding peptide
  MOD_RES (4)..(5)..(39): Xaa is C or S
  MOD_RES (19)..(20)..(21)..(22)..(23): Xaa is A or G
  MOD_RES (24)..(25)..(26)..(27): Xaa is A or G or is absent

SEQ ID NO: 67448 - protein, 37 aa, Artificial Sequence; identical to SEQ ID NO: 8563
  GFR-binding peptide
  MOD_RES (34)..(36): Xaa is C or S
  MOD_RES (14)..(15)..(16)..(17)..(18): Xaa is A or G
  MOD_RES (19)..(20)..(21)..(22): Xaa is A or G or is absent

SEQ ID NO: 67449 - protein, 40 aa, Artificial Sequence; identical to SEQ ID NO: 29875
  GFR-binding peptide
  MOD_RES (5)..(6)..(40): Xaa is C or S
  MOD_RES (20)..(21)..(22)..(23)..(24): Xaa is A or G
  MOD_RES (25)..(26)..(27)..(28): Xaa is A or G or is absent

SEQ ID NO: 67450 - protein, 40 aa, Artificial Sequence
  GFR-binding peptide
  MOD_RES (6)..(7)..(39): Xaa is C or S
GIPEPXXVPEKMSATSILYYDENKNVVLRKHRNMTVESXA

SEQ ID NO: 67451 - protein, 40 aa, Artificial Sequence; identical to SEQ ID NO: 8566
  GFR-binding peptide
  MOD_RES (6)..(7)..(39): Xaa is C or S

SEQ ID NO: 67452 - protein, 30 aa, Artificial Sequence; identical to SEQ ID NO: 29879
  GFR-binding peptide

SEQ ID NO: 67453 - protein, 36 aa, Artificial Sequence
  GFR-binding peptide
  MOD_RES (3)..(4)..(36): Xaa is C or S
GPXXTPTKMSATSMLYYNDKQQIILRKHRGMVVDRX

SEQ ID NO: 67454 - protein, 31 aa, Artificial Sequence; identical to SEQ ID NO: 29880
  GFR-binding peptide

SEQ ID NO: 67455 - protein, 40 aa, Artificial Sequence
  GFR-binding peptide
  MOD_RES (6)..(7): Xaa is C or S
  MOD_RES (21)..(22)..(23)..(24)..(25): Xaa is A or G
  MOD_RES (26)..(27)..(28)..(29): Xaa is A or G or is absent
GSAGPXXTPTKMEPISMLYLXXXXXXXXXKFKYEGMVVDR

SEQ ID NO: 67456 - protein, 39 aa, Artificial Sequence; identical to SEQ ID NO: 33005
  GFR-binding peptide
  MOD_RES (6)..(6): Xaa is C or S
  MOD_RES (20)..(21)..(22)..(23)..(24): Xaa is A or G
  MOD_RES (25)..(26)..(27)..(28): Xaa is A or G or is absent

SEQ ID NO: 67457 - protein, 35 aa, Artificial Sequence; identical to SEQ ID NO: 29882
  GFR-binding peptide
  MOD_RES (32)..(34): Xaa is C or S

SEQ ID NO: 67458 - protein, 41 aa, Artificial Sequence; identical to SEQ ID NO: 33009
  GFR-binding peptide
  MOD_RES (3)..(4)..(38)..(40): Xaa is C or S
  MOD_RES (18)..(19)..(20)..(21)..(22): Xaa is A or G
  MOD_RES (23)..(24)..(25)..(26): Xaa is A or G or is absent

SEQ ID NO: 67459 - protein, 37 aa, Artificial Sequence
  GFR-binding peptide
  MOD_RES (1)..(2)..(36): Xaa is C or S
  MOD_RES (16)..(17)..(18)..(19)..(20): Xaa is A or G
  MOD_RES (21)..(22)..(23)..(24): Xaa is A or G or is absent
XXVPEKMSATSILYYXXXXXXXXXLRKHRNMTVESXA

SEQ ID NO: 67460 - protein, 34 aa, Artificial Sequence; identical to SEQ ID NO: 8568
  GFR-binding peptide
  MOD_RES (3)..(4): Xaa is C or S

SEQ ID NO: 67461 - protein, 33 aa, Artificial Sequence; identical to SEQ ID NO: 29886
  GFR-binding peptide
  MOD_RES (1)..(1): Xaa is C or S
  MOD_RES (15)..(16)..(17)..(18)..(19): Xaa is A or G
  MOD_RES (20)..(21)..(22)..(23): Xaa is A or G or is absent

SEQ ID NO: 67462 - protein, 35 aa, Artificial Sequence; identical to SEQ ID NO: 8569
  GFR-binding peptide
  MOD_RES (2)..(3)..(34): Xaa is C or S

SEQ ID NO: 67463 - protein, 44 aa, Artificial Sequence; identical to SEQ ID NO: 29889
  GFR-binding peptide
  MOD_RES (6)..(7)..(41)..(43): Xaa is C or S
  MOD_RES (21)..(22)..(23)..(24)..(25): Xaa is A or G
  MOD_RES (26)..(27)..(28)..(29): Xaa is A or G or is absent

SEQ ID NO: 67464 - protein, 35 aa, Artificial Sequence; identical to SEQ ID NO: 8570
  GFR-binding peptide
  MOD_RES (33)..(35): Xaa is C or S
  MOD_RES (14)..(15)..(16)..(17)..(18): Xaa is A or G
  MOD_RES (19)..(20)..(21)..(22): Xaa is A or G or is absent

SEQ ID NO: 67465 - protein, 38 aa, Artificial Sequence
  GFR-binding peptide
  MOD_RES (1)..(35)..(37): Xaa is C or S
  MOD_RES (15)..(16)..(17)..(18)..(19): Xaa is A or G
  MOD_RES (20)..(21)..(22)..(23): Xaa is A or G or is absent
XVPTRLSPISILYKXXXXXXXXXLKYHYDMVVESXGXR

SEQ ID NO: 67466 - protein, 38 aa, Artificial Sequence; identical to SEQ ID NO: 29892
  GFR-binding peptide
  MOD_RES (2)..(3)..(37): Xaa is C or S
  MOD_RES (17)..(18)..(19)..(20)..(21): Xaa is A or G
  MOD_RES (22)..(23)..(24)..(25): Xaa is A or G or is absent

SEQ ID NO: 67467 - protein, 39 aa, Artificial Sequence
  GFR-binding peptide
  MOD_RES (2)..(3)..(37)..(39): Xaa is C or S
  MOD_RES (17)..(18)..(19)..(20)..(21): Xaa is A or G
  MOD_RES (22)..(23)..(24)..(25): Xaa is A or G or is absent
SXXVPARLSATSILYYXXXXXXXXXLRKHRDMVVEAXGX

SEQ ID NO: 67468 - protein, 44 aa, Artificial Sequence; identical to SEQ ID NO: 8577
  GFR-binding peptide
  MOD_RES (5)..(6)..(41)..(43): Xaa is C or S
  MOD_RES (20)..(21)..(22)..(23)..(24): Xaa is A or G
  MOD_RES (25)..(26)..(27)..(28): Xaa is A or G or is absent

SEQ ID NO: 67469 - protein, 39 aa, Artificial Sequence; identical to SEQ ID NO: 29897
  GFR-binding peptide
  MOD_RES (3)..(37)..(39): Xaa is C or S
  MOD_RES (17)..(18)..(19)..(20)..(21): Xaa is A or G
  MOD_RES (22)..(23)..(24)..(25): Xaa is A or G or is absent

SEQ ID NO: 67470 - protein, 39 aa, Artificial Sequence; identical to SEQ ID NO: 8580
  GFR-binding peptide
  MOD_RES (3)..(4)..(36)..(38): Xaa is C or S

SEQ ID NO: 67471 - protein, 39 aa, Artificial Sequence
  GFR-binding peptide
  MOD_RES (3)..(4)..(36)..(38): Xaa is C or S
PTXXVPTRLEPISILYLDSANNVVKFKYEDMVVESXGXR

SEQ ID NO: 67472 - protein, 34 aa, Artificial Sequence; identical to SEQ ID NO: 29903
  GFR-binding peptide
  MOD_RES (1)..(1): Xaa is C or S
  MOD_RES (15)..(16)..(17)..(18)..(19): Xaa is A or G
  MOD_RES (20)..(21)..(22)..(23): Xaa is A or G or is absent

SEQ ID NO: 67473 - protein, 35 aa, Artificial Sequence; identical to SEQ ID NO: 8583
  GFR-binding peptide
  MOD_RES (1)..(35): Xaa is C or S
  MOD_RES (15)..(16)..(17)..(18)..(19): Xaa is A or G
  MOD_RES (20)..(21)..(22)..(23): Xaa is A or G or is absent

SEQ ID NO: 67474 - protein, 37 aa, Artificial Sequence; identical to SEQ ID NO: 33041
  GFR-binding peptide
  MOD_RES (1)..(2)..(34)..(36): Xaa is C or S

SEQ ID NO: 67475 - protein, 39 aa, Artificial Sequence; identical to SEQ ID NO: 29906
  GFR-binding peptide
  MOD_RES (2)..(36)..(38): Xaa is C or S
  MOD_RES (16)..(17)..(18)..(19)..(20): Xaa is A or G
  MOD_RES (21)..(22)..(23)..(24): Xaa is A or G or is absent

SEQ ID NO: 67476 - protein, 33 aa, Artificial Sequence; identical to SEQ ID NO: 29907
  GFR-binding peptide
  MOD_RES (1)..(2): Xaa is C or S

SEQ ID NO: 67477 - protein, 37 aa, Artificial Sequence; identical to SEQ ID NO: 33042
  GFR-binding peptide
  MOD_RES (34)..(36): Xaa is C or S
  MOD_RES (14)..(15)..(16)..(17)..(18): Xaa is A or G
  MOD_RES (19)..(20)..(21)..(22): Xaa is A or G or is absent

SEQ ID NO: 67478 - protein, 37 aa, Artificial Sequence; identical to SEQ ID NO: 8587
  GFR-binding peptide
  MOD_RES (6)..(7): Xaa is C or S

SEQ ID NO: 67479 - protein, 36 aa, Artificial Sequence; identical to SEQ ID NO: 29912
  GFR-binding peptide
  MOD_RES (5)..(6): Xaa is C or S

SEQ ID NO: 67480 - protein, 31 aa, Artificial Sequence
  GFR-binding peptide
TPTKMEPISMLYLNDKQQIIKFKYEGMVVDR

SEQ ID NO: 67481 - protein, 38 aa, Artificial Sequence
  GFR-binding peptide
  MOD_RES (4)..(5)..(36)..(38): Xaa is C or S
ASPXXVPQDLSPINILYFVGRTPKVYGKIPMVVKSXKX

SEQ ID NO: 67482 - protein, 36 aa, Artificial Sequence
  GFR-binding peptide
  MOD_RES (2)..(3)..(35): Xaa is C or S
PXXVPEKMSPINILYFDENKNVVYGKIPNMTVESXA

SEQ ID NO: 67483 - protein, 33 aa, Artificial Sequence
  GFR-binding peptide
  MOD_RES (2)..(3): Xaa is C or S
PXXTPTKMSATSMLYYNDKQQIILRKHRGMVVD

SEQ ID NO: 67484 - protein, 38 aa, Artificial Sequence; identical to SEQ ID NO: 29915
  GFR-binding peptide
  MOD_RES (1)..(2)..(36)..(38): Xaa is C or S
  MOD_RES (16)..(17)..(18)..(19)..(20): Xaa is A or G
  MOD_RES (21)..(22)..(23)..(24): Xaa is A or G or is absent

SEQ ID NO: 67485 - protein, 41 aa, Artificial Sequence; identical to SEQ ID NO: 29916
  GFR-binding peptide
  MOD_RES (3)..(4)..(38)..(40): Xaa is C or S
  MOD_RES (18)..(19)..(20)..(21)..(22): Xaa is A or G
  MOD_RES (23)..(24)..(25)..(26): Xaa is A or G or is absent

SEQ ID NO: 67486 - protein, 36 aa, Artificial Sequence; identical to SEQ ID NO: 33050
  GFR-binding peptide
  MOD_RES (1)..(2)..(34)..(36): Xaa is C or S

SEQ ID NO: 67487 - protein, 34 aa, Artificial Sequence; identical to SEQ ID NO: 8591
  GFR-binding peptide
  MOD_RES (1)..(2)..(34): Xaa is C or S

SEQ ID NO: 67488 - protein, 37 aa, Artificial Sequence; identical to SEQ ID NO: 29922
  GFR-binding peptide
  MOD_RES (4)..(5)..(37): Xaa is C or S

SEQ ID NO: 67489 - protein, 34 aa, Artificial Sequence; identical to SEQ ID NO: 8595
  GFR-binding peptide
  MOD_RES (2)..(3): Xaa is C or S

SEQ ID NO: 67490 - protein, 34 aa, Artificial Sequence; identical to SEQ ID NO: 8596
  GFR-binding peptide
  MOD_RES (32)..(34): Xaa is C or S

SEQ ID NO: 67491 - protein, 35 aa, Artificial Sequence
  GFR-binding peptide
  MOD_RES (32)..(34): Xaa is C or S
VPEKMSPINILYFDENKNVVYGKIPNMTVESXAXR

SEQ ID NO: 67492 - protein, 38 aa, Artificial Sequence; identical to SEQ ID NO: 8598
  GFR-binding peptide
  MOD_RES (7)..(7): Xaa is C or S

SEQ ID NO: 67493 - protein, 35 aa, Artificial Sequence
  GFR-binding peptide
  MOD_RES (1)..(2)..(35): Xaa is C or S
  MOD_RES (16)..(17)..(18)..(19)..(20): Xaa is A or G
  MOD_RES (21)..(22)..(23)..(24): Xaa is A or G or is absent
XXAPVKTEPISMLYLXXXXXXXXXKFKYEMIVEEX

SEQ ID NO: 67494 - protein, 35 aa, Artificial Sequence; identical to SEQ ID NO: 29928
  GFR-binding peptide
  MOD_RES (5)..(5): Xaa is C or S

SEQ ID NO: 67495 - protein, 37 aa, Artificial Sequence; identical to SEQ ID NO: 29929
  GFR-binding peptide
  MOD_RES (3)..(4)..(36): Xaa is C or S

SEQ ID NO: 67496 - protein, 39 aa, Artificial Sequence
  GFR-binding peptide
  MOD_RES (6)..(7): Xaa is C or S
  MOD_RES (21)..(22)..(23)..(24)..(25): Xaa is A or G
  MOD_RES (26)..(27)..(28)..(29): Xaa is A or G or is absent
RVPSTXXAPVKTSATSMLYYXXXXXXXXXLRKHRMIVEE

SEQ ID NO: 67497 - protein, 36 aa, Artificial Sequence
  GFR-binding peptide
  MOD_RES (1)..(35): Xaa is C or S
  MOD_RES (15)..(16)..(17)..(18)..(19): Xaa is A or G
  MOD_RES (20)..(21)..(22)..(23): Xaa is A or G or is absent
XVPEKMEPISILYLXXXXXXXXXKFKYENMTVESXA

SEQ ID NO: 67498 - protein, 32 aa, Artificial Sequence; identical to SEQ ID NO: 29936
  GFR-binding peptide
  MOD_RES (32)..(32): Xaa is C or S

SEQ ID NO: 67499 - protein, 40 aa, Artificial Sequence
  GFR-binding peptide
  MOD_RES (6)..(7)..(39): Xaa is C or S
STPPTXXVPTRLSPISILYKDSANNVVLKYHYDMVVESXG

SEQ ID NO: 67500 - protein, 41 aa, Artificial Sequence; identical to SEQ ID NO: 29937
  GFR-binding peptide
  MOD_RES (3)..(4)..(38)..(40): Xaa is C or S
  MOD_RES (18)..(19)..(20)..(21)..(22): Xaa is A or G
  MOD_RES (23)..(24)..(25)..(26): Xaa is A or G or is absent

SEQ ID NO: 67501 - protein, 35 aa, Artificial Sequence; identical to SEQ ID NO: 33061
  GFR-binding peptide
  MOD_RES (32)..(34): Xaa is C or S

SEQ ID NO: 67502 - protein, 41 aa, Artificial Sequence
  GFR-binding peptide
  MOD_RES (5)..(6)..(39)..(41): Xaa is C or S
  MOD_RES (20)..(21)..(22)..(23)..(24): Xaa is A or G
  MOD_RES (25)..(26)..(27)..(28): Xaa is A or G or is absent
VPSTXXAPVKTSATSMLYYXXXXXXXXXLRKHRMIVEEXGX

SEQ ID NO: 67503 - protein, 33 aa, Artificial Sequence; identical to SEQ ID NO: 29938
  GFR-binding peptide
  MOD_RES (33)..(33): Xaa is C or S
  MOD_RES (14)..(15)..(16)..(17)..(18): Xaa is A or G
  MOD_RES (19)..(20)..(21)..(22): Xaa is A or G or is absent

SEQ ID NO: 67504 - protein, 32 aa, Artificial Sequence; identical to SEQ ID NO: 33062
  GFR-binding peptide
  MOD_RES (1)..(32): Xaa is C or S

SEQ ID NO: 67505 - protein, 44 aa, Artificial Sequence; identical to SEQ ID NO: 29939
  GFR-binding peptide
  MOD_RES (6)..(7)..(41)..(43): Xaa is C or S
  MOD_RES (21)..(22)..(23)..(24)..(25): Xaa is A or G
  MOD_RES (26)..(27)..(28)..(29): Xaa is A or G or is absent

SEQ ID NO: 67506 - protein, 33 aa, Artificial Sequence; identical to SEQ ID NO: 8606
  GFR-binding peptide
  MOD_RES (1)..(33): Xaa is C or S

SEQ ID NO: 67507 - protein, 37 aa, Artificial Sequence; identical to SEQ ID NO: 29940
  GFR-binding peptide
  MOD_RES (2)..(3)..(36): Xaa is C or S
  MOD_RES (17)..(18)..(19)..(20)..(21): Xaa is A or G
  MOD_RES (22)..(23)..(24)..(25): Xaa is A or G or is absent

SEQ ID NO: 67508 - protein, 39 aa, Artificial Sequence; identical to SEQ ID NO: 29941
  GFR-binding peptide
  MOD_RES (3)..(4)..(38): Xaa is C or S
  MOD_RES (18)..(19)..(20)..(21)..(22): Xaa is A or G
  MOD_RES (23)..(24)..(25)..(26): Xaa is A or G or is absent

SEQ ID NO: 67509 - protein, 35 aa, Artificial Sequence; identical to SEQ ID NO: 29942
  GFR-binding peptide
  MOD_RES (1)..(2): Xaa is C or S
  MOD_RES (16)..(17)..(18)..(19)..(20): Xaa is A or G
  MOD_RES (21)..(22)..(23)..(24): Xaa is A or G or is absent

SEQ ID NO: 67510 - protein, 37 aa, Artificial Sequence
  GFR-binding peptide
  MOD_RES (2)..(3)..(34)..(36): Xaa is C or S
PXXVPQDLSPINILYFVGRTPKVYGKIPMVVKSXKXS

SEQ ID NO: 67511 - protein, 37 aa, Artificial Sequence
  GFR-binding peptide
  MOD_RES (5)..(6)..(37): Xaa is C or S
VPSTXXAPVKTSATSMLYYDNGRVLLLRKHRMIVEEX

SEQ ID NO: 67512 - protein, 41 aa, Artificial Sequence; identical to SEQ ID NO: 8611
  GFR-binding peptide
  MOD_RES (6)..(7)..(38)..(40): Xaa is C or S

SEQ ID NO: 67513 - protein, 39 aa, Artificial Sequence; identical to SEQ ID NO: 8615
  GFR-binding peptide
  MOD_RES (1)..(2)..(36)..(38): Xaa is C or S
  MOD_RES (16)..(17)..(18)..(19)..(20): Xaa is A or G
  MOD_RES (21)..(22)..(23)..(24): Xaa is A or G or is absent

SEQ ID NO: 67514 - protein, 35 aa, Artificial Sequence; identical to SEQ ID NO: 8618
  GFR-binding peptide
  MOD_RES (1)..(35): Xaa is C or S
  MOD_RES (15)..(16)..(17)..(18)..(19): Xaa is A or G
  MOD_RES (20)..(21)..(22)..(23): Xaa is A or G or is absent

SEQ ID NO: 67515 - protein, 33 aa, Artificial Sequence
  GFR-binding peptide
  MOD_RES (1)..(2)..(33): Xaa is C or S
XXVPQDLSPINILYFVGRTPKVYGKIPMVVKSX

SEQ ID NO: 67516 - protein, 36 aa, Artificial Sequence; identical to SEQ ID NO: 8620
  GFR-binding peptide
  MOD_RES (3)..(4): Xaa is C or S
  MOD_RES (18)..(19)..(20)..(21)..(22): Xaa is A or G
  MOD_RES (23)..(24)..(25)..(26): Xaa is A or G or is absent

SEQ ID NO: 67517 - protein, 40 aa, Artificial Sequence; identical to SEQ ID NO: 8622
  GFR-binding peptide
  MOD_RES (5)..(6)..(40): Xaa is C or S
  MOD_RES (20)..(21)..(22)..(23)..(24): Xaa is A or G
  MOD_RES (25)..(26)..(27)..(28): Xaa is A or G or is absent

SEQ ID NO: 67518 - protein, 33 aa, Artificial Sequence; identical to SEQ ID NO: 8623
  GFR-binding peptide
  MOD_RES (1)..(2): Xaa is C or S

SEQ ID NO: 67519 - protein, 45 aa, Artificial Sequence; identical to SEQ ID NO: 8625
  GFR-binding peptide
  MOD_RES (6)..(7)..(42)..(44): Xaa is C or S
  MOD_RES (21)..(22)..(23)..(24)..(25): Xaa is A or G
  MOD_RES (26)..(27)..(28)..(29): Xaa is A or G or is absent

SEQ ID NO: 67520 - protein, 33 aa, Artificial Sequence
  GFR-binding peptide
  MOD_RES (31)..(33): Xaa is C or S
APVKTSATSMLYYDNGRVLLLRKHRMIVEEXGX

SEQ ID NO: 67521 - protein, 38 aa, Artificial Sequence; identical to SEQ ID NO: 33076
  GFR-binding peptide
  MOD_RES (6)..(7): Xaa is C or S

SEQ ID NO: 67522 - protein, 36 aa, Artificial Sequence; identical to SEQ ID NO: 29960
  GFR-binding peptide
  MOD_RES (3)..(4)..(36): Xaa is C or S

SEQ ID NO: 67523 - protein, 38 aa, Artificial Sequence; identical to SEQ ID NO: 29961
  GFR-binding peptide
  MOD_RES (1)..(35)..(37): Xaa is C or S
  MOD_RES (15)..(16)..(17)..(18)..(19): Xaa is A or G
  MOD_RES (20)..(21)..(22)..(23): Xaa is A or G or is absent

SEQ ID NO: 67524 - protein, 32 aa, Artificial Sequence; identical to SEQ ID NO: 29963
  GFR-binding peptide
  MOD_RES (32)..(32): Xaa is C or S

SEQ ID NO: 67525 - protein, 34 aa, Artificial Sequence
  GFR-binding peptide
  MOD_RES (32)..(34): Xaa is C or S
VPTRLSATSILYYDSANNVVLRKHRDMVVESXGX

SEQ ID NO: 67526 - protein, 32 aa, Artificial Sequence
  GFR-binding peptide
  MOD_RES (1)..(2): Xaa is C or S
XXTPTKMSATSMLYYNDKQQIILRKHRGMVVD

SEQ ID NO: 67527 - protein, 39 aa, Artificial Sequence; identical to SEQ ID NO: 33092
  GFR-binding peptide
  MOD_RES (3)..(4)..(36)..(38): Xaa is C or S

SEQ ID NO: 67528 - protein, 40 aa, Artificial Sequence
  GFR-binding peptide
  MOD_RES (5)..(6)..(39): Xaa is C or S
  MOD_RES (20)..(21)..(22)..(23)..(24): Xaa is A or G
  MOD_RES (25)..(26)..(27)..(28): Xaa is A or G or is absent
VPSTXXAPVKTSPISMLYKXXXXXXXXXLKYHYMIVEEXG

SEQ ID NO: 67529 - protein, 41 aa, Artificial Sequence; identical to SEQ ID NO: 33094
  GFR-binding peptide
  MOD_RES (5)..(6)..(40): Xaa is C or S
  MOD_RES (20)..(21)..(22)..(23)..(24): Xaa is A or G
  MOD_RES (25)..(26)..(27)..(28): Xaa is A or G or is absent

SEQ ID NO: 67530 - protein, 36 aa, Artificial Sequence; identical to SEQ ID NO: 8632
  GFR-binding peptide
  MOD_RES (2)..(36): Xaa is C or S
  MOD_RES (16)..(17)..(18)..(19)..(20): Xaa is A or G
  MOD_RES (21)..(22)..(23)..(24): Xaa is A or G or is absent

SEQ ID NO: 67531 - protein, 36 aa, Artificial Sequence; identical to SEQ ID NO: 33097
  GFR-binding peptide
  MOD_RES (1)..(2)..(36): Xaa is C or S
  MOD_RES (16)..(17)..(18)..(19)..(20): Xaa is A or G
  MOD_RES (21)..(22)..(23)..(24): Xaa is A or G or is absent

SEQ ID NO: 67532 - protein, 36 aa, Artificial Sequence; identical to SEQ ID NO: 29974
  GFR-binding peptide
  MOD_RES (3)..(4)..(36): Xaa is C or S

SEQ ID NO: 67533 - protein, 35 aa, Artificial Sequence
  GFR-binding peptide
  MOD_RES (1)..(2): Xaa is C or S
  MOD_RES (16)..(17)..(18)..(19)..(20): Xaa is A or G
  MOD_RES (21)..(22)..(23)..(24): Xaa is A or G or is absent
XXVPTKLSATSILYYXXXXXXXXXLRKHRGMAVSE

SEQ ID NO: 67534 - protein, 34 aa, Artificial Sequence; identical to SEQ ID NO: 29975
  GFR-binding peptide
  MOD_RES (32)..(34): Xaa is C or S

SEQ ID NO: 67535 - protein, 33 aa, Artificial Sequence; identical to SEQ ID NO: 29977
  GFR-binding peptide
  MOD_RES (1)..(32): Xaa is C or S

SEQ ID NO: 67536 - protein, 42 aa, Artificial Sequence; identical to SEQ ID NO: 33108
  GFR-binding peptide
  MOD_RES (6)..(7)..(40)..(42): Xaa is C or S

SEQ ID NO: 67537 - protein, 39 aa, Artificial Sequence; identical to SEQ ID NO: 57985
  GFR-binding peptide
  MOD_RES (6)..(7): Xaa is C or S
  MOD_RES (21)..(22)..(23)..(24)..(25): Xaa is A or G
  MOD_RES (26)..(27)..(28)..(29): Xaa is A or G or is absent

SEQ ID NO: 67538 - protein, 35 aa, Artificial Sequence; identical to SEQ ID NO: 29978
  GFR-binding peptide
  MOD_RES (4)..(5): Xaa is C or S

SEQ ID NO: 67539 - protein, 40 aa, Artificial Sequence; identical to SEQ ID NO: 33111
  GFR-binding peptide
  MOD_RES (6)..(7)..(39): Xaa is C or S

SEQ ID NO: 67540 - protein, 38 aa, Artificial Sequence; identical to SEQ ID NO: 8644
  GFR-binding peptide
  MOD_RES (4)..(36)..(38): Xaa is C or S

SEQ ID NO: 67541 - protein, 39 aa, Artificial Sequence; identical to SEQ ID NO: 29983
  GFR-binding peptide
  MOD_RES (6)..(7)..(39): Xaa is C or S

SEQ ID NO: 67542 - protein, 39 aa, Artificial Sequence; identical to SEQ ID NO: 29985
  GFR-binding peptide
  MOD_RES (2)..(3)..(36)..(38): Xaa is C or S

SEQ ID NO: 67543 - protein, 34 aa, Artificial Sequence; identical to SEQ ID NO: 8650
  GFR-binding peptide
  MOD_RES (31)..(33): Xaa is C or S

SEQ ID NO: 67544 - protein, 34 aa, Artificial Sequence
  GFR-binding peptide
  MOD_RES (34)..(34): Xaa is C or S
  MOD_RES (14)..(15)..(16)..(17)..(18): Xaa is A or G
  MOD_RES (19)..(20)..(21)..(22): Xaa is A or G or is absent
VPTRLEPISILYLXXXXXXXXXKFKYEDMVVESX

SEQ ID NO: 67545 - protein, 33 aa, Artificial Sequence; identical to SEQ ID NO: 33131
  GFR-binding peptide
  MOD_RES (1)..(1): Xaa is C or S
  MOD_RES (15)..(16)..(17)..(18)..(19): Xaa is A or G
  MOD_RES (20)..(21)..(22)..(23): Xaa is A or G or is absent

SEQ ID NO: 67546 - protein, 40 aa, Artificial Sequence; identical to SEQ ID NO: 29998
  GFR-binding peptide
  MOD_RES (3)..(4)..(37)..(39): Xaa is C or S
  MOD_RES (18)..(19)..(20)..(21)..(22): Xaa is A or G
  MOD_RES (23)..(24)..(25)..(26): Xaa is A or G or is absent

SEQ ID NO: 67547 - protein, 39 aa, Artificial Sequence; identical to SEQ ID NO: 29999
  GFR-binding peptide
  MOD_RES (4)..(5)..(38): Xaa is C or S
  MOD_RES (19)..(20)..(21)..(22)..(23): Xaa is A or G
  MOD_RES (24)..(25)..(26)..(27): Xaa is A or G or is absent

SEQ ID NO: 67548 - protein, 36 aa, Artificial Sequence; identical to SEQ ID NO: 8664
  GFR-binding peptide
  MOD_RES (1)..(33)..(35): Xaa is C or S

SEQ ID NO: 67549 - protein, 35 aa, Artificial Sequence; identical to SEQ ID NO: 8666
  GFR-binding peptide
  MOD_RES (34)..(34): Xaa is C or S
  MOD_RES (14)..(15)..(16)..(17)..(18): Xaa is A or G
  MOD_RES (19)..(20)..(21)..(22): Xaa is A or G or is absent

SEQ ID NO: 67550 - protein, 32 aa, Artificial Sequence; identical to SEQ ID NO: 8668
  GFR-binding peptide
  MOD_RES (14)..(15)..(16)..(17)..(18): Xaa is A or G
  MOD_RES (19)..(20)..(21)..(22): Xaa is A or G or is absent

SEQ ID NO: 67551 - protein, 42 aa, Artificial Sequence
  GFR-binding peptide
  MOD_RES (4)..(5)..(39)..(41): Xaa is C or S
  MOD_RES (19)..(20)..(21)..(22)..(23): Xaa is A or G
  MOD_RES (24)..(25)..(26)..(27): Xaa is A or G or is absent
PEPXXVPEKMSPISILYKXXXXXXXXXLKYHYNMTVESXAXR

SEQ ID NO: 67552 - protein, 41 aa, Artificial Sequence; identical to SEQ ID NO: 33138
  GFR-binding peptide
  MOD_RES (4)..(5)..(39)..(41): Xaa is C or S
  MOD_RES (19)..(20)..(21)..(22)..(23): Xaa is A or G
  MOD_RES (24)..(25)..(26)..(27): Xaa is A or G or is absent

SEQ ID NO: 67553 - protein, 40 aa, Artificial Sequence; identical to SEQ ID NO: 33139
  GFR-binding peptide
  MOD_RES (5)..(6): Xaa is C or S
  MOD_RES (20)..(21)..(22)..(23)..(24): Xaa is A or G
  MOD_RES (25)..(26)..(27)..(28): Xaa is A or G or is absent

SEQ ID NO: 67554 - protein, 40 aa, Artificial Sequence; identical to SEQ ID NO: 8669
  GFR-binding peptide
  MOD_RES (3)..(4)..(37)..(39): Xaa is C or S
  MOD_RES (18)..(19)..(20)..(21)..(22): Xaa is A or G
  MOD_RES (23)..(24)..(25)..(26): Xaa is A or G or is absent

SEQ ID NO: 67555 - protein, 38 aa, Artificial Sequence
  GFR-binding peptide
  MOD_RES (4)..(5)..(37): Xaa is C or S
PEPXXVPEKMEPISILYLDENKNVVKFKYENMTVESXA

SEQ ID NO: 67556 - protein, 42 aa, Artificial Sequence
  GFR-binding peptide
  MOD_RES (6)..(7)..(41): Xaa is C or S
  MOD_RES (21)..(22)..(23)..(24)..(25): Xaa is A or G
  MOD_RES (26)..(27)..(28)..(29): Xaa is A or G or is absent
GSAGPXXTPTKMSATSMLYYXXXXXXXXXLRKHRGMVVDRXG

SEQ ID NO: 67557 - protein, 40 aa, Artificial Sequence; identical to SEQ ID NO: 30008
  GFR-binding peptide
  MOD_RES (4)..(5)..(39): Xaa is C or S
  MOD_RES (19)..(20)..(21)..(22)..(23): Xaa is A or G
  MOD_RES (24)..(25)..(26)..(27): Xaa is A or G or is absent

SEQ ID NO: 67558 - protein, 40 aa, Artificial Sequence; identical to SEQ ID NO: 8671
  GFR-binding peptide
  MOD_RES (7)..(7): Xaa is C or S
  MOD_RES (21)..(22)..(23)..(24)..(25): Xaa is A or G
  MOD_RES (26)..(27)..(28)..(29): Xaa is A or G or is absent

SEQ ID NO: 67559 - protein, 35 aa, Artificial Sequence; identical to SEQ ID NO: 30010
  GFR-binding peptide
  MOD_RES (2)..(3): Xaa is C or S
  MOD_RES (17)..(18)..(19)..(20)..(21): Xaa is A or G
  MOD_RES (22)..(23)..(24)..(25): Xaa is A or G or is absent

SEQ ID NO: 67560 - protein, 34 aa, Artificial Sequence; identical to SEQ ID NO: 30011
  GFR-binding peptide
  MOD_RES (34)..(34): Xaa is C or S
  MOD_RES (14)..(15)..(16)..(17)..(18): Xaa is A or G
  MOD_RES (19)..(20)..(21)..(22): Xaa is A or G or is absent

SEQ ID NO: 67561 - protein, 38 aa, Artificial Sequence
  GFR-binding peptide
  MOD_RES (1)..(2)..(36)..(38): Xaa is C or S
  MOD_RES (16)..(17)..(18)..(19)..(20): Xaa is A or G
  MOD_RES (21)..(22)..(23)..(24): Xaa is A or G or is absent
XXVPTRLSPISILYKXXXXXXXXXLKYHYDMVVESXGX

SEQ ID NO: 67562 - protein, 41 aa, Artificial Sequence
  GFR-binding peptide
  MOD_RES (5)..(6)..(40): Xaa is C or S
  MOD_RES (20)..(21)..(22)..(23)..(24): Xaa is A or G
  MOD_RES (25)..(26)..(27)..(28): Xaa is A or G or is absent
TPPTXXVPTRLSATSILYYXXXXXXXXXLRKHRDMVVESXG

SEQ ID NO: 67563 - protein, 36 aa, Artificial Sequence; identical to SEQ ID NO: 33152
  GFR-binding peptide
  MOD_RES (1)..(35): Xaa is C or S
  MOD_RES (15)..(16)..(17)..(18)..(19): Xaa is A or G
  MOD_RES (20)..(21)..(22)..(23): Xaa is A or G or is absent

SEQ ID NO: 67564 - protein, 40 aa, Artificial Sequence; identical to SEQ ID NO: 33153
  GFR-binding peptide
  MOD_RES (2)..(3)..(37)..(39): Xaa is C or S
  MOD_RES (17)..(18)..(19)..(20)..(21): Xaa is A or G
  MOD_RES (22)..(23)..(24)..(25): Xaa is A or G or is absent

SEQ ID NO: 67565 - protein, 38 aa, Artificial Sequence; identical to SEQ ID NO: 8678
  GFR-binding peptide
  MOD_RES (5)..(6): Xaa is C or S
  MOD_RES (20)..(21)..(22)..(23)..(24): Xaa is A or G
  MOD_RES (25)..(26)..(27)..(28): Xaa is A or G or is absent

SEQ ID NO: 67566 - protein, 44 aa, Artificial Sequence; identical to SEQ ID NO: 8679
  GFR-binding peptide
  MOD_RES (6)..(7)..(41)..(43): Xaa is C or S
  MOD_RES (21)..(22)..(23)..(24)..(25): Xaa is A or G
  MOD_RES (26)..(27)..(28)..(29): Xaa is A or G or is absent

SEQ ID NO: 67567 - protein, 32 aa, Artificial Sequence; identical to SEQ ID NO: 30018
  GFR-binding peptide
  MOD_RES (14)..(15)..(16)..(17)..(18): Xaa is A or G
  MOD_RES (19)..(20)..(21)..(22): Xaa is A or G or is absent

SEQ ID NO: 67568 - protein, 32 aa, Artificial Sequence
  GFR-binding peptide
  MOD_RES (32)..(32): Xaa is C or S
VPARLSATSILYYDAANNVVLRKHRDMVVEAX

SEQ ID NO: 67569 - protein, 42 aa, Artificial Sequence; identical to SEQ ID NO: 30020
  GFR-binding peptide
  MOD_RES (6)..(7)..(42): Xaa is C or S
  MOD_RES (21)..(22)..(23)..(24)..(25): Xaa is A or G
  MOD_RES (26)..(27)..(28)..(29): Xaa is A or G or is absent

SEQ ID NO: 67570 - protein, 38 aa, Artificial Sequence; identical to SEQ ID NO: 30021
  GFR-binding peptide
  MOD_RES (3)..(4)..(38): Xaa is C or S
  MOD_RES (18)..(19)..(20)..(21)..(22): Xaa is A or G
  MOD_RES (23)..(24)..(25)..(26): Xaa is A or G or is absent

SEQ ID NO: 67571 - protein, 34 aa, Artificial Sequence; identical to SEQ ID NO: 30022
  GFR-binding peptide
  MOD_RES (1)..(2): Xaa is C or S
  MOD_RES (16)..(17)..(18)..(19)..(20): Xaa is A or G
  MOD_RES (21)..(22)..(23)..(24): Xaa is A or G or is absent

SEQ ID NO: 67572 - protein, 40 aa, Artificial Sequence; identical to SEQ ID NO: 33163
  GFR-binding peptide
  MOD_RES (6)..(40): Xaa is C or S
  MOD_RES (20)..(21)..(22)..(23)..(24): Xaa is A or G
  MOD_RES (25)..(26)..(27)..(28): Xaa is A or G or is absent

SEQ ID NO: 67573 - protein, 38 aa, Artificial Sequence; identical to SEQ ID NO: 8680
  GFR-binding peptide
  MOD_RES (5)..(6)..(37): Xaa is C or S

SEQ ID NO: 67574 - protein, 42 aa, Artificial Sequence; identical to SEQ ID NO: 58033
  GFR-binding peptide
  MOD_RES (6)..(7)..(40)..(42): Xaa is C or S
  MOD_RES (21)..(22)..(23)..(24)..(25): Xaa is A or G
  MOD_RES (26)..(27)..(28)..(29): Xaa is A or G or is absent

SEQ ID NO: 67575 - protein, 36 aa, Artificial Sequence; identical to SEQ ID NO: 8684
  GFR-binding peptide
  MOD_RES (1)..(2)..(34)..(36): Xaa is C or S

SEQ ID NO: 67576 - protein, 33 aa, Artificial Sequence; identical to SEQ ID NO: 30027
  GFR-binding peptide
  MOD_RES (1)..(33): Xaa is C or S

SEQ ID NO: 67577 - protein, 31 aa, Artificial Sequence; identical to SEQ ID NO: 8690
  GFR-binding peptide
  MOD_RES (1)..(1): Xaa is C or S

SEQ ID NO: 67578 - protein, 39 aa, Artificial Sequence; identical to SEQ ID NO: 8691
  GFR-binding peptide
  MOD_RES (4)..(5)..(37)..(39): Xaa is C or S

SEQ ID NO: 67579 - protein, 33 aa, Artificial Sequence; identical to SEQ ID NO: 8692
  GFR-binding peptide
  MOD_RES (2)..(3): Xaa is C or S

SEQ ID NO: 67580 - protein, 38 aa, Artificial Sequence; identical to SEQ ID NO: 33178
  GFR-binding peptide
  MOD_RES (2)..(36)..(38): Xaa is C or S
  MOD_RES (16)..(17)..(18)..(19)..(20): Xaa is A or G
  MOD_RES (21)..(22)..(23)..(24): Xaa is A or G or is absent

SEQ ID NO: 67581 - protein, 33 aa, Artificial Sequence
  GFR-binding peptide
  MOD_RES (1)..(2): Xaa is C or S
XXVPARLSATSILYYDAANNVVLRKHRDMVVEA

SEQ ID NO: 67582 - protein, 37 aa, Artificial Sequence; identical to SEQ ID NO: 8693
  GFR-binding peptide
  MOD_RES (3)..(4)..(35)..(37): Xaa is C or S

SEQ ID NO: 67583 - protein, 36 aa, Artificial Sequence; identical to SEQ ID NO: 30034
  GFR-binding peptide
  MOD_RES (3)..(4): Xaa is C or S
  MOD_RES (18)..(19)..(20)..(21)..(22): Xaa is A or G
  MOD_RES (23)..(24)..(25)..(26): Xaa is A or G or is absent

SEQ ID NO: 67584 - protein, 38 aa, Artificial Sequence; identical to SEQ ID NO: 33187
  GFR-binding peptide
  MOD_RES (4)..(5): Xaa is C or S
  MOD_RES (19)..(20)..(21)..(22)..(23): Xaa is A or G
  MOD_RES (24)..(25)..(26)..(27): Xaa is A or G or is absent

SEQ ID NO: 67585 - protein, 30 aa, Artificial Sequence; identical to SEQ ID NO: 33194
  GFR-binding peptide

SEQ ID NO: 67586 - protein, 32 aa, Artificial Sequence
  GFR-binding peptide
  MOD_RES (1)..(32): Xaa is C or S
XAPVKTEPISMLYLDNGRVLLKFKYEMIVEEX

SEQ ID NO: 67587 - protein, 39 aa, Artificial Sequence
  GFR-binding peptide
  MOD_RES (4)..(5)..(39): Xaa is C or S
  MOD_RES (19)..(20)..(21)..(22)..(23): Xaa is A or G
  MOD_RES (24)..(25)..(26)..(27): Xaa is A or G or is absent
SKAXXVPTKLSATSILYYXXXXXXXXXLRKHRGMAVSEX

SEQ ID NO: 67588 - protein, 33 aa, Artificial Sequence
  GFR-binding peptide
  MOD_RES (1)..(1): Xaa is C or S
  MOD_RES (15)..(16)..(17)..(18)..(19): Xaa is A or G
  MOD_RES (20)..(21)..(22)..(23): Xaa is A or G or is absent
XVPTRLSPISILYKXXXXXXXXXLKYHYDMVVE

SEQ ID NO: 67589 - protein, 37 aa, Artificial Sequence; identical to SEQ ID NO: 8700
  GFR-binding peptide
  MOD_RES (6)..(7): Xaa is C or S

SEQ ID NO: 67590 - protein, 39 aa, Artificial Sequence; identical to SEQ ID NO: 8701
  GFR-binding peptide
  MOD_RES (2)..(3)..(37)..(39): Xaa is C or S
  MOD_RES (17)..(18)..(19)..(20)..(21): Xaa is A or G
  MOD_RES (22)..(23)..(24)..(25): Xaa is A or G or is absent

SEQ ID NO: 67591 - protein, 39 aa, Artificial Sequence; identical to SEQ ID NO: 8702
  GFR-binding peptide
  MOD_RES (4)..(5)..(39): Xaa is C or S
  MOD_RES (19)..(20)..(21)..(22)..(23): Xaa is A or G
  MOD_RES (24)..(25)..(26)..(27): Xaa is A or G or is absent

SEQ ID NO: 67592 - protein, 36 aa, Artificial Sequence; identical to SEQ ID NO: 8703
  GFR-binding peptide
  MOD_RES (2)..(3)..(35): Xaa is C or S

SEQ ID NO: 67593 - protein, 39 aa, Artificial Sequence; identical to SEQ ID NO: 33199
  GFR-binding peptide
  MOD_RES (6)..(7)..(38): Xaa is C or S

SEQ ID NO: 67594 - protein, 43 aa, Artificial Sequence; identical to SEQ ID NO: 58054
  GFR-binding peptide
  MOD_RES (6)..(7)..(41)..(43): Xaa is C or S
  MOD_RES (21)..(22)..(23)..(24)..(25): Xaa is A or G
  MOD_RES (26)..(27)..(28)..(29): Xaa is A or G or is absent

SEQ ID NO: 67595 - protein, 40 aa, Artificial Sequence; identical to SEQ ID NO: 30044
  GFR-binding peptide
  MOD_RES (4)..(5)..(37)..(39): Xaa is C or S

SEQ ID NO: 67596 - protein, 44 aa, Artificial Sequence
  GFR-binding peptide
  MOD_RES (6)..(7)..(41)..(43): Xaa is C or S
  MOD_RES (21)..(22)..(23)..(24)..(25): Xaa is A or G
  MOD_RES (26)..(27)..(28)..(29): Xaa is A or G or is absent
KASKAXXVPTKLSATSILYYXXXXXXXXXLRKHRGMAVSEXGXR

SEQ ID NO: 67597 - protein, 34 aa, Artificial Sequence; identical to SEQ ID NO: 30047
  GFR-binding peptide
  MOD_RES (34)..(34): Xaa is C or S
  MOD_RES (14)..(15)..(16)..(17)..(18): Xaa is A or G
  MOD_RES (19)..(20)..(21)..(22): Xaa is A or G or is absent

SEQ ID NO: 67598 - protein, 33 aa, Artificial Sequence; identical to SEQ ID NO: 8713
  GFR-binding peptide
  MOD_RES (2)..(3): Xaa is C or S

SEQ ID NO: 67599 - protein, 40 aa, Artificial Sequence; identical to SEQ ID NO: 8714
  GFR-binding peptide
  MOD_RES (3)..(4)..(37)..(39): Xaa is C or S

SEQ ID NO: 67600 - protein, 36 aa, Artificial Sequence; identical to SEQ ID NO: 8716
  GFR-binding peptide
  MOD_RES (3)..(4): Xaa is C or S
  MOD_RES (18)..(19)..(20)..(21)..(22): Xaa is A or G
  MOD_RES (23)..(24)..(25)..(26): Xaa is A or G or is absent

SEQ ID NO: 67601 - protein, 37 aa, Artificial Sequence
  GFR-binding peptide
  MOD_RES (1)..(2)..(34)..(36): Xaa is C or S
XXVPEKMNAISILYFDENKNVVLKKYRNMTVESXAXR

SEQ ID NO: 67602 - protein, 36 aa, Artificial Sequence
  GFR-binding peptide
  MOD_RES (3)..(4)..(35): Xaa is C or S
APXXVPQALSPINILYFVGRKPKVYGKIPMIVRSXK

SEQ ID NO: 67603 - protein, 40 aa, Artificial Sequence
  GFR-binding peptide
  MOD_RES (5)..(6)..(40): Xaa is C or S
  MOD_RES (20)..(21)..(22)..(23)..(24): Xaa is A or G
  MOD_RES (25)..(26)..(27)..(28): Xaa is A or G or is absent
SAGPXXTPTKMSATSMLYYXXXXXXXXXLRKHRGMVVDRX

SEQ ID NO: 67604 - protein, 36 aa, Artificial Sequence; identical to SEQ ID NO: 33212
  GFR-binding peptide
  MOD_RES (3)..(4)..(36): Xaa is C or S

SEQ ID NO: 67605 - protein, 34 aa, Artificial Sequence; identical to SEQ ID NO: 30058
  GFR-binding peptide
  MOD_RES (1)..(33): Xaa is C or S

SEQ ID NO: 67606 - protein, 37 aa, Artificial Sequence; identical to SEQ ID NO: 8721
  GFR-binding peptide
  MOD_RES (6)..(7): Xaa is C or S

SEQ ID NO: 67607 - protein, 38 aa, Artificial Sequence; identical to SEQ ID NO: 33216
  GFR-binding peptide
  MOD_RES (5)..(6)..(38): Xaa is C or S

SEQ ID NO: 67608 - protein, 38 aa, Artificial Sequence; identical to SEQ ID NO: 8724
  GFR-binding peptide
  MOD_RES (1)..(2)..(35)..(37): Xaa is C or S

SEQ ID NO: 67609 - protein, 34 aa, Artificial Sequence; identical to SEQ ID NO: 8726
  GFR-binding peptide
  MOD_RES (2)..(3): Xaa is C or S

SEQ ID NO: 67610 - protein, 34 aa, Artificial Sequence
  GFR-binding peptide
  MOD_RES (2)..(3): Xaa is C or S
PXXVPEKMSPINILYFDENKNVVYGKIPNMTVES

SEQ ID NO: 67611 - protein, 41 aa, Artificial Sequence; identical to SEQ ID NO: 33222
  GFR-binding peptide
  MOD_RES (4)..(5)..(40): Xaa is C or S
  MOD_RES (19)..(20)..(21)..(22)..(23): Xaa is A or G
  MOD_RES (24)..(25)..(26)..(27): Xaa is A or G or is absent

SEQ ID NO: 67612 - protein, 37 aa, Artificial Sequence; identical to SEQ ID NO: 8728
  GFR-binding peptide
  MOD_RES (5)..(6): Xaa is C or S

SEQ ID NO: 67613 - protein, 42 aa, Artificial Sequence; identical to SEQ ID NO: 30067
  GFR-binding peptide
  MOD_RES (6)..(7)..(41): Xaa is C or S
  MOD_RES (21)..(22)..(23)..(24)..(25): Xaa is A or G
  MOD_RES (26)..(27)..(28)..(29): Xaa is A or G or is absent

SEQ ID NO: 67614 - protein, 37 aa, Artificial Sequence; identical to SEQ ID NO: 30069
  GFR-binding peptide
  MOD_RES (2)..(3)..(37): Xaa is C or S
  MOD_RES (17)..(18)..(19)..(20)..(21): Xaa is A or G
  MOD_RES (22)..(23)..(24)..(25): Xaa is A or G or is absent

SEQ ID NO: 67615 - protein, 36 aa, Artificial Sequence
  GFR-binding peptide
  MOD_RES (3)..(4): Xaa is C or S
  MOD_RES (18)..(19)..(20)..(21)..(22): Xaa is A or G
  MOD_RES (23)..(24)..(25)..(26): Xaa is A or G or is absent
PTXXVPTRLSATSILYYXXXXXXXXXLRKHRDMVVE

SEQ ID NO: 67616 - protein, 40 aa, Artificial Sequence; identical to SEQ ID NO: 30073
  GFR-binding peptide
  MOD_RES (5)..(6)..(38)..(40): Xaa is C or S

SEQ ID NO: 67617 - protein, 38 aa, Artificial Sequence; identical to SEQ ID NO: 8732
  GFR-binding peptide
  MOD_RES (1)..(35)..(37): Xaa is C or S
  MOD_RES (15)..(16)..(17)..(18)..(19): Xaa is A or G
  MOD_RES (20)..(21)..(22)..(23): Xaa is A or G or is absent

SEQ ID NO: 67618 - protein, 39 aa, Artificial Sequence; identical to SEQ ID NO: 8736
  GFR-binding peptide
  MOD_RES (1)..(2)..(36)..(38): Xaa is C or S
  MOD_RES (16)..(17)..(18)..(19)..(20): Xaa is A or G
  MOD_RES (21)..(22)..(23)..(24): Xaa is A or G or is absent

SEQ ID NO: 67619 - protein, 41 aa, Artificial Sequence; identical to SEQ ID NO: 30078
  GFR-binding peptide
  MOD_RES (4)..(5)..(38)..(40): Xaa is C or S
  MOD_RES (19)..(20)..(21)..(22)..(23): Xaa is A or G
  MOD_RES (24)..(25)..(26)..(27): Xaa is A or G or is absent

SEQ ID NO: 67620 - protein, 42 aa, Artificial Sequence
  GFR-binding peptide
  MOD_RES (5)..(6)..(39)..(41): Xaa is C or S
  MOD_RES (20)..(21)..(22)..(23)..(24): Xaa is A or G
  MOD_RES (25)..(26)..(27)..(28): Xaa is A or G or is absent
VPSTXXAPVKTEPISMLYLXXXXXXXXXKFKYEMIVEEXGXL

SEQ ID NO: 67621 - protein, 36 aa, Artificial Sequence; identical to SEQ ID NO: 30079
  GFR-binding peptide
  MOD_RES (4)..(5): Xaa is C or S

SEQ ID NO: 67622 - protein, 38 aa, Artificial Sequence; identical to SEQ ID NO: 8738
  GFR-binding peptide
  MOD_RES (6)..(6): Xaa is C or S
  MOD_RES (20)..(21)..(22)..(23)..(24): Xaa is A or G
  MOD_RES (25)..(26)..(27)..(28): Xaa is A or G or is absent

SEQ ID NO: 67623 - protein, 37 aa, Artificial Sequence
  GFR-binding peptide
  MOD_RES (2)..(3)..(36): Xaa is C or S
  MOD_RES (17)..(18)..(19)..(20)..(21): Xaa is A or G
  MOD_RES (22)..(23)..(24)..(25): Xaa is A or G or is absent
PXXVSQDLSPINILYFXXXXXXXXXYGKIPMIVKSXK

SEQ ID NO: 67624 - protein, 32 aa, Artificial Sequence; identical to SEQ ID NO: 30080
  GFR-binding peptide

SEQ ID NO: 67625 - protein, 39 aa, Artificial Sequence; identical to SEQ ID NO: 58083
  GFR-binding peptide
  MOD_RES (5)..(6)..(39): Xaa is C or S
  MOD_RES (20)..(21)..(22)..(23)..(24): Xaa is A or G
  MOD_RES (25)..(26)..(27)..(28): Xaa is A or G or is absent

SEQ ID NO: 67626 - protein, 39 aa, Artificial Sequence
  GFR-binding peptide
  MOD_RES (4)..(5)..(37)..(39): Xaa is C or S
PEPXXVPEKMSPISILYKDENKNVVLKYHYNMTVESXAX

SEQ ID NO: 67627 - protein, 38 aa, Artificial Sequence
  GFR-binding peptide
  MOD_RES (6)..(7): Xaa is C or S
GSAGPXXTPTKMSPISMLYKNDKQQIILKYHYGMVVDR

SEQ ID NO: 67628 - protein, 33 aa, Artificial Sequence; identical to SEQ ID NO: 30088
  GFR-binding peptide
  MOD_RES (32)..(32): Xaa is C or S

SEQ ID NO: 67629 - protein, 37 aa, Artificial Sequence
  GFR-binding peptide
  MOD_RES (2)..(3)..(37): Xaa is C or S
  MOD_RES (17)..(18)..(19)..(20)..(21): Xaa is A or G
  MOD_RES (22)..(23)..(24)..(25): Xaa is A or G or is absent
SXXVPARLSATSILYYXXXXXXXXXLRKHRDMVVEAX

SEQ ID NO: 67630 - protein, 34 aa, Artificial Sequence
  GFR-binding peptide
  MOD_RES (1)..(2): Xaa is C or S
  MOD_RES (16)..(17)..(18)..(19)..(20): Xaa is A or G
  MOD_RES (21)..(22)..(23)..(24): Xaa is A or G or is absent
XXVPEKMSATSILYYXXXXXXXXXLRKHRNMTVE

SEQ ID NO: 67631 - protein, 35 aa, Artificial Sequence
  GFR-binding peptide
  MOD_RES (3)..(4): Xaa is C or S
PTXXVPTRLSATSILYYDSANNVVLRKHRDMVVES

SEQ ID NO: 67632 - protein, 43 aa, Artificial Sequence
  GFR-binding peptide
  MOD_RES (6)..(7)..(40)..(42): Xaa is C or S
  MOD_RES (21)..(22)..(23)..(24)..(25): Xaa is A or G
  MOD_RES (26)..(27)..(28)..(29): Xaa is A or G or is absent
ASAAPXXVPQALSPINILYFXXXXXXXXXYGKIPMIVRSXKXS

SEQ ID NO: 67633 - protein, 36 aa, Artificial Sequence; identical to SEQ ID NO: 8749
  GFR-binding peptide
  MOD_RES (5)..(6): Xaa is C or S

SEQ ID NO: 67634 - protein, 34 aa, Artificial Sequence; identical to SEQ ID NO: 30098
  GFR-binding peptide
  MOD_RES (1)..(33): Xaa is C or S

SEQ ID NO: 67635 - protein, 39 aa, Artificial Sequence; identical to SEQ ID NO: 30100
  GFR-binding peptide
  MOD_RES (5)..(6)..(39): Xaa is C or S
  MOD_RES (20)..(21)..(22)..(23)..(24): Xaa is A or G
  MOD_RES (25)..(26)..(27)..(28): Xaa is A or G or is absent

SEQ ID NO: 67636 - protein, 40 aa, Artificial Sequence; identical to SEQ ID NO: 33238
  GFR-binding peptide
  MOD_RES (6)..(7)..(39): Xaa is C or S

SEQ ID NO: 67637 - protein, 34 aa, Artificial Sequence; identical to SEQ ID NO: 33239
  GFR-binding peptide
  MOD_RES (2)..(3): Xaa is C or S

SEQ ID NO: 67638 - protein, 40 aa, Artificial Sequence; identical to SEQ ID NO: 33240
  GFR-binding peptide
  MOD_RES (4)..(5)..(39): Xaa is C or S
  MOD_RES (19)..(20)..(21)..(22)..(23): Xaa is A or G
  MOD_RES (24)..(25)..(26)..(27): Xaa is A or G or is absent

SEQ ID NO: 67639 - protein, 37 aa, Artificial Sequence; identical to SEQ ID NO: 33241
  GFR-binding peptide
  MOD_RES (6)..(6): Xaa is C or S

SEQ ID NO: 67640 - protein, 33 aa, Artificial Sequence
  GFR-binding peptide
  MOD_RES (14)..(15)..(16)..(17)..(18): Xaa is A or G
  MOD_RES (19)..(20)..(21)..(22): Xaa is A or G or is absent
VPTKLSATSILYYXXXXXXXXXLRKHRGMAVSE

SEQ ID NO: 67641 - protein, 36 aa, Artificial Sequence; identical to SEQ ID NO: 33242
  GFR-binding peptide
  MOD_RES (4)..(4): Xaa is C or S
  MOD_RES (18)..(19)..(20)..(21)..(22): Xaa is A or G
  MOD_RES (23)..(24)..(25)..(26): Xaa is A or G or is absent

SEQ ID NO: 67642 - protein, 36 aa, Artificial Sequence; identical to SEQ ID NO: 8752
  GFR-binding peptide
  MOD_RES (3)..(4)..(36): Xaa is C or S

SEQ ID NO: 67643 - protein, 32 aa, Artificial Sequence; identical to SEQ ID NO: 58092
  GFR-binding peptide
  MOD_RES (1)..(2): Xaa is C or S

SEQ ID NO: 67644 - protein, 41 aa, Artificial Sequence
  GFR-binding peptide
  MOD_RES (6)..(7)..(39)..(41): Xaa is C or S
GSAGPXXTPTKMEPISMLYLNDKQQIIKFKYEGMVVDRXGX

SEQ ID NO: 67645 - protein, 37 aa, Artificial Sequence; identical to SEQ ID NO: 30103
  GFR-binding peptide
  MOD_RES (2)..(3)..(36): Xaa is C or S

SEQ ID NO: 67646 - protein, 41 aa, Artificial Sequence; identical to SEQ ID NO: 8753
  GFR-binding peptide
  MOD_RES (5)..(6)..(41): Xaa is C or S
  MOD_RES (20)..(21)..(22)..(23)..(24): Xaa is A or G
  MOD_RES (25)..(26)..(27)..(28): Xaa is A or G or is absent

SEQ ID NO: 67647 - protein, 36 aa, Artificial Sequence; identical to SEQ ID NO: 8754
  GFR-binding peptide
  MOD_RES (3)..(4): Xaa is C or S
  MOD_RES (18)..(19)..(20)..(21)..(22): Xaa is A or G
  MOD_RES (23)..(24)..(25)..(26): Xaa is A or G or is absent

SEQ ID NO: 67648 - protein, 35 aa, Artificial Sequence; identical to SEQ ID NO: 8755
  GFR-binding peptide
  MOD_RES (5)..(5): Xaa is C or S

SEQ ID NO: 67649 - protein, 35 aa, Artificial Sequence
  GFR-binding peptide
  MOD_RES (1)..(2): Xaa is C or S
  MOD_RES (16)..(17)..(18)..(19)..(20): Xaa is A or G
  MOD_RES (21)..(22)..(23)..(24): Xaa is A or G or is absent
XXVPEKMSPISILYKXXXXXXXXXLKYHYNMTVES

SEQ ID NO: 67650 - protein, 35 aa, Artificial Sequence; identical to SEQ ID NO: 30107
  GFR-binding peptide
  MOD_RES (3)..(4): Xaa is C or S

SEQ ID NO: 67651 - protein, 37 aa, Artificial Sequence; identical to SEQ ID NO: 8758
  GFR-binding peptide
  MOD_RES (1)..(2)..(34)..(36): Xaa is C or S

SEQ ID NO: 67652 - protein, 36 aa, Artificial Sequence
  GFR-binding peptide
  MOD_RES (2)..(3): Xaa is C or S
  MOD_RES (17)..(18)..(19)..(20)..(21): Xaa is A or G
  MOD_RES (22)..(23)..(24)..(25): Xaa is A or G or is absent
PXXVPEKMSATSILYYXXXXXXXXXLRKHRNMTVES

SEQ ID NO: 67653 - protein, 36 aa, Artificial Sequence; identical to SEQ ID NO: 8759
  GFR-binding peptide
  MOD_RES (2)..(3)..(35): Xaa is C or S

SEQ ID NO: 67654 - protein, 37 aa, Artificial Sequence; identical to SEQ ID NO: 30111
  GFR-binding peptide
  MOD_RES (35)..(37): Xaa is C or S
  MOD_RES (14)..(15)..(16)..(17)..(18): Xaa is A or G
  MOD_RES (19)..(20)..(21)..(22): Xaa is A or G or is absent

SEQ ID NO: 67655 - protein, 41 aa, Artificial Sequence; identical to SEQ ID NO: 8760
  GFR-binding peptide
  MOD_RES (6)..(7)..(41): Xaa is C or S
  MOD_RES (21)..(22)..(23)..(24)..(25): Xaa is A or G
  MOD_RES (26)..(27)..(28)..(29): Xaa is A or G or is absent

SEQ ID NO: 67656 - protein, 34 aa, Artificial Sequence
  GFR-binding peptide
  MOD_RES (32)..(34): Xaa is C or S
VPEKMNAISILYFDENKNVVLKKYRNMTVESXAX

SEQ ID NO: 67657 - protein, 32 aa, Artificial Sequence; identical to SEQ ID NO: 8764
  GFR-binding peptide
  MOD_RES (32)..(32): Xaa is C or S

SEQ ID NO: 67658 - protein, 34 aa, Artificial Sequence; identical to SEQ ID NO: 30119
  GFR-binding peptide
  MOD_RES (1)..(2)..(34): Xaa is C or S

SEQ ID NO: 67659 - protein, 35 aa, Artificial Sequence; identical to SEQ ID NO: 8767
  GFR-binding peptide
  MOD_RES (1)..(33)..(35): Xaa is C or S

SEQ ID NO: 67660 - protein, 35 aa, Artificial Sequence; identical to SEQ ID NO: 30122
  GFR-binding peptide
  MOD_RES (2)..(3)..(34): Xaa is C or S

SEQ ID NO: 67661 - protein, 41 aa, Artificial Sequence; identical to SEQ ID NO: 33254
  GFR-binding peptide
  MOD_RES (6)..(7)..(41): Xaa is C or S
  MOD_RES (21)..(22)..(23)..(24)..(25): Xaa is A or G
  MOD_RES (26)..(27)..(28)..(29): Xaa is A or G or is absent

SEQ ID NO: 67662 - protein, 39 aa, Artificial Sequence
  GFR-binding peptide
  MOD_RES (2)..(3)..(36)..(38): Xaa is C or S
  MOD_RES (17)..(18)..(19)..(20)..(21): Xaa is A or G
  MOD_RES (22)..(23)..(24)..(25): Xaa is A or G or is absent
TXXAPVKTSPISMLYKXXXXXXXXXLKYHYMIVEEXGXL

SEQ ID NO: 67663 - protein, 39 aa, Artificial Sequence; identical to SEQ ID NO: 8770
  GFR-binding peptide
  MOD_RES (4)..(36)..(38): Xaa is C or S

SEQ ID NO: 67664 - protein, 41 aa, Artificial Sequence; identical to SEQ ID NO: 8771
  GFR-binding peptide
  MOD_RES (5)..(6)..(40): Xaa is C or S
  MOD_RES (20)..(21)..(22)..(23)..(24): Xaa is A or G
  MOD_RES (25)..(26)..(27)..(28): Xaa is A or G or is absent

SEQ ID NO: 67665 - protein, 42 aa, Artificial Sequence; identical to SEQ ID NO: 30124
  GFR-binding peptide
  MOD_RES (5)..(6)..(39)..(41): Xaa is C or S
  MOD_RES (20)..(21)..(22)..(23)..(24): Xaa is A or G
  MOD_RES (25)..(26)..(27)..(28): Xaa is A or G or is absent

SEQ ID NO: 67666 - protein, 35 aa, Artificial Sequence
  GFR-binding peptide
  MOD_RES (3)..(4): Xaa is C or S
GPXXTPTKMEPISMLYLNDKQQIIKFKYEGMVVDR

SEQ ID NO: 67667 - protein, 41 aa, Artificial Sequence; identical to SEQ ID NO: 8776
  GFR-binding peptide
  MOD_RES (6)..(7)..(40): Xaa is C or S

SEQ ID NO: 67668 - protein, 36 aa, Artificial Sequence; identical to SEQ ID NO: 30126
  GFR-binding peptide
  MOD_RES (1)..(35): Xaa is C or S
  MOD_RES (15)..(16)..(17)..(18)..(19): Xaa is A or G
  MOD_RES (20)..(21)..(22)..(23): Xaa is A or G or is absent

SEQ ID NO: 67669 - protein, 38 aa, Artificial Sequence
  GFR-binding peptide
  MOD_RES (5)..(6)..(37): Xaa is C or S
SAAPXXVPQALSPINILYFVGRKPKVYGKIPMIVRSXK

SEQ ID NO: 67670 - protein, 33 aa, Artificial Sequence; identical to SEQ ID NO: 8780
  GFR-binding peptide
  MOD_RES (1)..(1): Xaa is C or S
  MOD_RES (15)..(16)..(17)..(18)..(19): Xaa is A or G
  MOD_RES (20)..(21)..(22)..(23): Xaa is A or G or is absent

SEQ ID NO: 67671 - protein, 36 aa, Artificial Sequence; identical to SEQ ID NO: 33266
  GFR-binding peptide
  MOD_RES (3)..(4): Xaa is C or S
  MOD_RES (18)..(19)..(20)..(21)..(22): Xaa is A or G
  MOD_RES (23)..(24)..(25)..(26): Xaa is A or G or is absent

SEQ ID NO: 67672 - protein, 37 aa, Artificial Sequence; identical to SEQ ID NO: 8781
  GFR-binding peptide
  MOD_RES (1)..(2)..(34)..(36): Xaa is C or S

SEQ ID NO: 67673 - protein, 31 aa, Artificial Sequence; identical to SEQ ID NO: 30131
  GFR-binding peptide
  MOD_RES (1)..(1): Xaa is C or S

SEQ ID NO: 67674 - protein, 34 aa, Artificial Sequence
  GFR-binding peptide
  MOD_RES (2)..(3): Xaa is C or S
PXXVPEKMSATSILYYDENKNVVLRKHRNMTVES

SEQ ID NO: 67675 - protein, 39 aa, Artificial Sequence; identical to SEQ ID NO: 30134
  GFR-binding peptide
  MOD_RES (6)..(7): Xaa is C or S
  MOD_RES (21)..(22)..(23)..(24)..(25): Xaa is A or G
  MOD_RES (26)..(27)..(28)..(29): Xaa is A or G or is absent

SEQ ID NO: 67676 - protein, 30 aa, Artificial Sequence; identical to SEQ ID NO: 8785
  GFR-binding peptide

SEQ ID NO: 67677 - protein, 33 aa, Artificial Sequence; identical to SEQ ID NO: 30137
  GFR-binding peptide
  MOD_RES (2)..(3): Xaa is C or S

SEQ ID NO: 67678 - protein, 39 aa, Artificial Sequence
  GFR-binding peptide
  MOD_RES (3)..(4)..(38): Xaa is C or S
  MOD_RES (18)..(19)..(20)..(21)..(22): Xaa is A or G
  MOD_RES (23)..(24)..(25)..(26): Xaa is A or G or is absent
EPXXVPEKMEPISILYLXXXXXXXXXKFKYENMTVESXA

SEQ ID NO: 67679 - protein, 41 aa, Artificial Sequence
  GFR-binding peptide
  MOD_RES (3)..(4)..(38)..(40): Xaa is C or S
  MOD_RES (18)..(19)..(20)..(21)..(22): Xaa is A or G
  MOD_RES (23)..(24)..(25)..(26): Xaa is A or G or is absent
KAXXVPTKLSATSILYYXXXXXXXXXLRKHRGMAVSEXGXR

SEQ ID NO: 67680 - protein, 35 aa, Artificial Sequence
  GFR-binding peptide
  MOD_RES (1)..(2)..(33)..(35): Xaa is C or S
XXAPVKTSATSMLYYDNGRVLLLRKHRMIVEEXGX

SEQ ID NO: 67681 - protein, 39 aa, Artificial Sequence; identical to SEQ ID NO: 33277
  GFR-binding peptide
  MOD_RES (2)..(3)..(37)..(39): Xaa is C or S
  MOD_RES (17)..(18)..(19)..(20)..(21): Xaa is A or G
  MOD_RES (22)..(23)..(24)..(25): Xaa is A or G or is absent

SEQ ID NO: 67682 - protein, 34 aa, Artificial Sequence; identical to SEQ ID NO: 30141
  GFR-binding peptide
  MOD_RES (3)..(4): Xaa is C or S

SEQ ID NO: 67683 - protein, 33 aa, Artificial Sequence; identical to SEQ ID NO: 8788
  GFR-binding peptide
  MOD_RES (1)..(1): Xaa is C or S
  MOD_RES (15)..(16)..(17)..(18)..(19): Xaa is A or G
  MOD_RES (20)..(21)..(22)..(23): Xaa is A or G or is absent

SEQ ID NO: 67684 - protein, 34 aa, Artificial Sequence; identical to SEQ ID NO: 8790
  GFR-binding peptide
  MOD_RES (1)..(33): Xaa is C or S

SEQ ID NO: 67685 - protein, 31 aa, Artificial Sequence; identical to SEQ ID NO: 8791
  GFR-binding peptide
  MOD_RES (31)..(31): Xaa is C or S

SEQ ID NO: 67686 - protein, 37 aa, Artificial Sequence; identical to SEQ ID NO: 8794
  GFR-binding peptide
  MOD_RES (7)..(7): Xaa is C or S

SEQ ID NO: 67687 - protein, 32 aa, Artificial Sequence; identical to SEQ ID NO: 8795
  GFR-binding peptide
  MOD_RES (1)..(2): Xaa is C or S

SEQ ID NO: 67688 - protein, 36 aa, Artificial Sequence; identical to SEQ ID NO: 30147
  GFR-binding peptide
  MOD_RES (4)..(4): Xaa is C or S
  MOD_RES (18)..(19)..(20)..(21)..(22): Xaa is A or G
  MOD_RES (23)..(24)..(25)..(26): Xaa is A or G or is absent

SEQ ID NO: 67689 - protein, 36 aa, Artificial Sequence; identical to SEQ ID NO: 8796
  GFR-binding peptide
  MOD_RES (1)..(34)..(36): Xaa is C or S

SEQ ID NO: 67690 - protein, 37 aa, Artificial Sequence
  GFR-binding peptide
  MOD_RES (4)..(5): Xaa is C or S
  MOD_RES (19)..(20)..(21)..(22)..(23): Xaa is A or G
  MOD_RES (24)..(25)..(26)..(27): Xaa is A or G or is absent
AGPXXTPTKMSPISMLYKXXXXXXXXXLKYHYGMVVD

SEQ ID NO: 67691 - protein, 35 aa, Artificial Sequence
  GFR-binding peptide
  MOD_RES (1)..(35): Xaa is C or S
  MOD_RES (15)..(16)..(17)..(18)..(19): Xaa is A or G
  MOD_RES (20)..(21)..(22)..(23): Xaa is A or G or is absent
XVPTRLEPISILYLXXXXXXXXXKFKYEDMVVESX

SEQ ID NO: 67692 - protein, 39 aa, Artificial Sequence; identical to SEQ ID NO: 16090
  GFR-binding peptide
  MOD_RES (5)..(6)..(38): Xaa is C or S

SEQ ID NO: 67693 - protein, 33 aa, Artificial Sequence; identical to SEQ ID NO: 8797
  GFR-binding peptide
  MOD_RES (31)..(33): Xaa is C or S

SEQ ID NO: 67694 - protein, 40 aa, Artificial Sequence; identical to SEQ ID NO: 30151
  GFR-binding peptide
  MOD_RES (6)..(7): Xaa is C or S
  MOD_RES (21)..(22)..(23)..(24)..(25): Xaa is A or G
  MOD_RES (26)..(27)..(28)..(29): Xaa is A or G or is absent

SEQ ID NO: 67695 - protein, 35 aa, Artificial Sequence; identical to SEQ ID NO: 33286
  GFR-binding peptide
  MOD_RES (34)..(34): Xaa is C or S
  MOD_RES (14)..(15)..(16)..(17)..(18): Xaa is A or G
  MOD_RES (19)..(20)..(21)..(22): Xaa is A or G or is absent

SEQ ID NO: 67696 - protein, 39 aa, Artificial Sequence; identical to SEQ ID NO: 8801
  GFR-binding peptide
  MOD_RES (3)..(4)..(38): Xaa is C or S
  MOD_RES (18)..(19)..(20)..(21)..(22): Xaa is A or G
  MOD_RES (23)..(24)..(25)..(26): Xaa is A or G or is absent

SEQ ID NO: 67697 - protein, 34 aa, Artificial Sequence; identical to SEQ ID NO: 8802
  GFR-binding peptide
  MOD_RES (1)..(2): Xaa is C or S
  MOD_RES (16)..(17)..(18)..(19)..(20): Xaa is A or G
  MOD_RES (21)..(22)..(23)..(24): Xaa is A or G or is absent

SEQ ID NO: 67698 - protein, 41 aa, Artificial Sequence; identical to SEQ ID NO: 8804
  GFR-binding peptide
  MOD_RES (6)..(7)..(41): Xaa is C or S
  MOD_RES (21)..(22)..(23)..(24)..(25): Xaa is A or G
  MOD_RES (26)..(27)..(28)..(29): Xaa is A or G or is absent

SEQ ID NO: 67699 - protein, 36 aa, Artificial Sequence; identical to SEQ ID NO: 30156
  GFR-binding peptide
  MOD_RES (3)..(4): Xaa is C or S
  MOD_RES (18)..(19)..(20)..(21)..(22): Xaa is A or G
  MOD_RES (23)..(24)..(25)..(26): Xaa is A or G or is absent

SEQ ID NO: 67700 - protein, 32 aa, Artificial Sequence
  GFR-binding peptide
  MOD_RES (14)..(15)..(16)..(17)..(18): Xaa is A or G
  MOD_RES (19)..(20)..(21)..(22): Xaa is A or G or is absent
APVKTSATSMLYYXXXXXXXXXLRKHRMIVEE

SEQ ID NO: 67701 - protein, 39 aa, Artificial Sequence; identical to SEQ ID NO: 33293
  GFR-binding peptide
  MOD_RES (6)..(7)..(39): Xaa is C or S

SEQ ID NO: 67702 - protein, 37 aa, Artificial Sequence; identical to SEQ ID NO: 8806
  GFR-binding peptide
  MOD_RES (3)..(4): Xaa is C or S
  MOD_RES (18)..(19)..(20)..(21)..(22): Xaa is A or G
  MOD_RES (23)..(24)..(25)..(26): Xaa is A or G or is absent

SEQ ID NO: 67703 - protein, 40 aa, Artificial Sequence; identical to SEQ ID NO: 8807
  GFR-binding peptide
  MOD_RES (5)..(37)..(39): Xaa is C or S

SEQ ID NO: 67704 - protein, 44 aa, Artificial Sequence; identical to SEQ ID NO: 8808
  GFR-binding peptide
  MOD_RES (6)..(7)..(41)..(43): Xaa is C or S
  MOD_RES (21)..(22)..(23)..(24)..(25): Xaa is A or G
  MOD_RES (26)..(27)..(28)..(29): Xaa is A or G or is absent

SEQ ID NO: 67705 - protein, 40 aa, Artificial Sequence; identical to SEQ ID NO: 33296
  GFR-binding peptide
  MOD_RES (3)..(4)..(37)..(39): Xaa is C or S

SEQ ID NO: 67706 - protein, 37 aa, Artificial Sequence; identical to SEQ ID NO: 33299
  GFR-binding peptide
  MOD_RES (5)..(6): Xaa is C or S

SEQ ID NO: 67707 - protein, 37 aa, Artificial Sequence; identical to SEQ ID NO: 30165
  GFR-binding peptide
  MOD_RES (6)..(7): Xaa is C or S

SEQ ID NO: 67708 - protein, 37 aa, Artificial Sequence; identical to SEQ ID NO: 8815
  GFR-binding peptide
  MOD_RES (2)..(36): Xaa is C or S
  MOD_RES (16)..(17)..(18)..(19)..(20): Xaa is A or G
  MOD_RES (21)..(22)..(23)..(24): Xaa is A or G or is absent

SEQ ID NO: 67709 - protein, 40 aa, Artificial Sequence; identical to SEQ ID NO: 30166
  GFR-binding peptide
  MOD_RES (2)..(3)..(37)..(39): Xaa is C or S
  MOD_RES (17)..(18)..(19)..(20)..(21): Xaa is A or G
  MOD_RES (22)..(23)..(24)..(25): Xaa is A or G or is absent

SEQ ID NO: 67710 - protein, 37 aa, Artificial Sequence
  GFR-binding peptide
  MOD_RES (3)..(4)..(35)..(37): Xaa is C or S
SPXXVSQDLSPINILYFIGKTPKIYGKIPMIVKSXKX

SEQ ID NO: 67711 - protein, 37 aa, Artificial Sequence
  GFR-binding peptide
  MOD_RES (3)..(4): Xaa is C or S
  MOD_RES (18)..(19)..(20)..(21)..(22): Xaa is A or G
  MOD_RES (23)..(24)..(25)..(26): Xaa is A or G or is absent
KAXXVPTKLSATSILYYXXXXXXXXXLRKHRGMAVSE

SEQ ID NO: 67712 - protein, 35 aa, Artificial Sequence
  GFR-binding peptide
  MOD_RES (32)..(34): Xaa is C or S
VPTKLSATSILYYDKGVVTYLRKHRGMAVSEXGXR

SEQ ID NO: 67713 - protein, 38 aa, Artificial Sequence; identical to SEQ ID NO: 8816
  GFR-binding peptide
  MOD_RES (4)..(5)..(37): Xaa is C or S

SEQ ID NO: 67714 - protein, 32 aa, Artificial Sequence; identical to SEQ ID NO: 8818
  GFR-binding peptide
  MOD_RES (32)..(32): Xaa is C or S

SEQ ID NO: 67715 - protein, 43 aa, Artificial Sequence
  GFR-binding peptide
  MOD_RES (5)..(6)..(40)..(42): Xaa is C or S
  MOD_RES (20)..(21)..(22)..(23)..(24): Xaa is A or G
  MOD_RES (25)..(26)..(27)..(28): Xaa is A or G or is absent
SAGPXXTPTKMSPISMLYKXXXXXXXXXLKYHYGMVVDRXGXS

SEQ ID NO: 67716 - protein, 39 aa, Artificial Sequence; identical to SEQ ID NO: 30172
  GFR-binding peptide
  MOD_RES (6)..(7)..(39): Xaa is C or S

SEQ ID NO: 67717 - protein, 34 aa, Artificial Sequence; identical to SEQ ID NO: 33305
  GFR-binding peptide
  MOD_RES (3)..(4): Xaa is C or S

SEQ ID NO: 67718 - protein, 40 aa, Artificial Sequence
  GFR-binding peptide
  MOD_RES (4)..(5)..(39): Xaa is C or S
  MOD_RES (19)..(20)..(21)..(22)..(23): Xaa is A or G
  MOD_RES (24)..(25)..(26)..(27): Xaa is A or G or is absent
PEPXXVPEKMEPISILYLXXXXXXXXXKFKYENMTVESXA

SEQ ID NO: 67719 - protein, 38 aa, Artificial Sequence; identical to SEQ ID NO: 30174
  GFR-binding peptide
  MOD_RES (3)..(4)..(36)..(38): Xaa is C or S

SEQ ID NO: 67720 - protein, 32 aa, Artificial Sequence; identical to SEQ ID NO: 8821
  GFR-binding peptide
  MOD_RES (1)..(32): Xaa is C or S

SEQ ID NO: 67721 - protein, 32 aa, Artificial Sequence; identical to SEQ ID NO: 33308
  GFR-binding peptide
  MOD_RES (1)..(2): Xaa is C or S

SEQ ID NO: 67722 - protein, 36 aa, Artificial Sequence
  GFR-binding peptide
  MOD_RES (3)..(4): Xaa is C or S
  MOD_RES (18)..(19)..(20)..(21)..(22): Xaa is A or G
  MOD_RES (23)..(24)..(25)..(26): Xaa is A or G or is absent
GPXXTPTKMSPISMLYKXXXXXXXXXLKYHYGMVVD

SEQ ID NO: 67723 - protein, 33 aa, Artificial Sequence; identical to SEQ ID NO: 33312
  GFR-binding peptide
  MOD_RES (3)..(3): Xaa is C or S

SEQ ID NO: 67724 - protein, 40 aa, Artificial Sequence; identical to SEQ ID NO: 16128
  GFR-binding peptide
  MOD_RES (3)..(4)..(38)..(40): Xaa is C or S
  MOD_RES (18)..(19)..(20)..(21)..(22): Xaa is A or G
  MOD_RES (23)..(24)..(25)..(26): Xaa is A or G or is absent

SEQ ID NO: 67725 - protein, 38 aa, Artificial Sequence
  GFR-binding peptide
  MOD_RES (2)..(3)..(37): Xaa is C or S
  MOD_RES (17)..(18)..(19)..(20)..(21): Xaa is A or G
  MOD_RES (22)..(23)..(24)..(25): Xaa is A or G or is absent
PXXTPTKMSATSMLYYXXXXXXXXXLRKHRGMVVDRXG

SEQ ID NO: 67726 - protein, 39 aa, Artificial Sequence; identical to SEQ ID NO: 8823
  GFR-binding peptide
  MOD_RES (6)..(7)..(39): Xaa is C or S

SEQ ID NO: 67727 - protein, 42 aa, Artificial Sequence; identical to SEQ ID NO: 33317
  GFR-binding peptide
  MOD_RES (6)..(7)..(39)..(41): Xaa is C or S

SEQ ID NO: 67728 - protein, 39 aa, Artificial Sequence
  GFR-binding peptide
  MOD_RES (6)..(7)..(39): Xaa is C or S
STPPTXXVPTRLEPISILYLDSANNVVKFKYEDMVVESX

SEQ ID NO: 67729 - protein, 34 aa, Artificial Sequence
  GFR-binding peptide
  MOD_RES (1)..(1): Xaa is C or S
  MOD_RES (15)..(16)..(17)..(18)..(19): Xaa is A or G
  MOD_RES (20)..(21)..(22)..(23): Xaa is A or G or is absent
XVPEKMSPISILYKXXXXXXXXXLKYHYNMTVES

SEQ ID NO: 67730 - protein, 33 aa, Artificial Sequence; identical to SEQ ID NO: 16137
  GFR-binding peptide
  MOD_RES (2)..(3): Xaa is C or S

SEQ ID NO: 67731 - protein, 37 aa, Artificial Sequence; identical to SEQ ID NO: 30184
  GFR-binding peptide
  MOD_RES (4)..(5): Xaa is C or S
  MOD_RES (19)..(20)..(21)..(22)..(23): Xaa is A or G
  MOD_RES (24)..(25)..(26)..(27): Xaa is A or G or is absent

SEQ ID NO: 67732 - protein, 34 aa, Artificial Sequence; identical to SEQ ID NO: 30185
  GFR-binding peptide
  MOD_RES (31)..(33): Xaa is C or S

SEQ ID NO: 67733 - protein, 34 aa, Artificial Sequence; identical to SEQ ID NO: 30186
  GFR-binding peptide
  MOD_RES (1)..(2): Xaa is C or S
  MOD_RES (16)..(17)..(18)..(19)..(20): Xaa is A or G
  MOD_RES (21)..(22)..(23)..(24): Xaa is A or G or is absent

SEQ ID NO: 67734 - protein, 37 aa, Artificial Sequence; identical to SEQ ID NO: 30188
  GFR-binding peptide
  MOD_RES (34)..(36): Xaa is C or S
  MOD_RES (14)..(15)..(16)..(17)..(18): Xaa is A or G
  MOD_RES (19)..(20)..(21)..(22): Xaa is A or G or is absent

SEQ ID NO: 67735 - protein, 39 aa, Artificial Sequence; identical to SEQ ID NO: 33319
  GFR-binding peptide
  MOD_RES (3)..(4)..(39): Xaa is C or S
  MOD_RES (18)..(19)..(20)..(21)..(22): Xaa is A or G
  MOD_RES (23)..(24)..(25)..(26): Xaa is A or G or is absent

SEQ ID NO: 67736 - protein, 34 aa, Artificial Sequence; identical to SEQ ID NO: 33322
  GFR-binding peptide
  MOD_RES (1)..(1): Xaa is C or S
  MOD_RES (15)..(16)..(17)..(18)..(19): Xaa is A or G
  MOD_RES (20)..(21)..(22)..(23): Xaa is A or G or is absent

SEQ ID NO: 67737 - protein, 39 aa, Artificial Sequence; identical to SEQ ID NO: 30193
  GFR-binding peptide
  MOD_RES (6)..(7)..(39): Xaa is C or S

SEQ ID NO: 67738 - protein, 41 aa, Artificial Sequence; identical to SEQ ID NO: 8836
  GFR-binding peptide
  MOD_RES (6)..(38)..(40): Xaa is C or S

SEQ ID NO: 67739 - protein, 34 aa, Artificial Sequence
  GFR-binding peptide
  MOD_RES (34)..(34): Xaa is C or S
  MOD_RES (14)..(15)..(16)..(17)..(18): Xaa is A or G
  MOD_RES (19)..(20)..(21)..(22): Xaa is A or G or is absent
VPTRLSPISILYKXXXXXXXXXLKYHYDMVVESX

SEQ ID NO: 67740 - protein, 36 aa, Artificial Sequence; identical to SEQ ID NO: 8840
  GFR-binding peptide
  MOD_RES (3)..(4)..(36): Xaa is C or S

SEQ ID NO: 67741 - protein, 42 aa, Artificial Sequence; identical to SEQ ID NO: 30200
  GFR-binding peptide
  MOD_RES (6)..(7)..(39)..(41): Xaa is C or S

SEQ ID NO: 67742 - protein, 38 aa, Artificial Sequence; identical to SEQ ID NO: 30201
  GFR-binding peptide
  MOD_RES (1)..(35)..(37): Xaa is C or S
  MOD_RES (15)..(16)..(17)..(18)..(19): Xaa is A or G
  MOD_RES (20)..(21)..(22)..(23): Xaa is A or G or is absent

SEQ ID NO: 67743 - protein, 36 aa, Artificial Sequence; identical to SEQ ID NO: 30203
  GFR-binding peptide
  MOD_RES (1)..(34)..(36): Xaa is C or S
  MOD_RES (15)..(16)..(17)..(18)..(19): Xaa is A or G
  MOD_RES (20)..(21)..(22)..(23): Xaa is A or G or is absent

SEQ ID NO: 67744 - protein, 36 aa, Artificial Sequence; identical to SEQ ID NO: 8843
  GFR-binding peptide
  MOD_RES (1)..(2)..(36): Xaa is C or S
  MOD_RES (16)..(17)..(18)..(19)..(20): Xaa is A or G
  MOD_RES (21)..(22)..(23)..(24): Xaa is A or G or is absent

SEQ ID NO: 67745 - protein, 42 aa, Artificial Sequence; identical to SEQ ID NO: 8846
  GFR-binding peptide
  MOD_RES (6)..(7)..(40)..(42): Xaa is C or S
  MOD_RES (21)..(22)..(23)..(24)..(25): Xaa is A or G
  MOD_RES (26)..(27)..(28)..(29): Xaa is A or G or is absent

SEQ ID NO: 67746 - protein, 35 aa, Artificial Sequence
  GFR-binding peptide
  MOD_RES (4)..(5): Xaa is C or S
PEPXXVPEKMEPISILYLDENKNVVKFKYENMTVE

SEQ ID NO: 67747 - protein, 34 aa, Artificial Sequence; identical to SEQ ID NO: 8849
  GFR-binding peptide
  MOD_RES (1)..(32)..(34): Xaa is C or S

SEQ ID NO: 67748 - protein, 38 aa, Artificial Sequence; identical to SEQ ID NO: 30212
  GFR-binding peptide
  MOD_RES (1)..(35)..(37): Xaa is C or S
  MOD_RES (15)..(16)..(17)..(18)..(19): Xaa is A or G
  MOD_RES (20)..(21)..(22)..(23): Xaa is A or G or is absent

SEQ ID NO: 67749 - protein, 32 aa, Artificial Sequence; identical to SEQ ID NO: 8852
  GFR-binding peptide
  MOD_RES (32)..(32): Xaa is C or S

SEQ ID NO: 67750 - protein, 37 aa, Artificial Sequence; identical to SEQ ID NO: 58189
  GFR-binding peptide
  MOD_RES (4)..(5): Xaa is C or S
  MOD_RES (19)..(20)..(21)..(22)..(23): Xaa is A or G
  MOD_RES (24)..(25)..(26)..(27): Xaa is A or G or is absent

SEQ ID NO: 67751 - protein, 37 aa, Artificial Sequence; identical to SEQ ID NO: 8853
  GFR-binding peptide
  MOD_RES (4)..(5): Xaa is C or S
  MOD_RES (19)..(20)..(21)..(22)..(23): Xaa is A or G
  MOD_RES (24)..(25)..(26)..(27): Xaa is A or G or is absent

SEQ ID NO: 67752 - protein, 33 aa, Artificial Sequence; identical to SEQ ID NO: 8854
  GFR-binding peptide
  MOD_RES (14)..(15)..(16)..(17)..(18): Xaa is A or G
  MOD_RES (19)..(20)..(21)..(22): Xaa is A or G or is absent

SEQ ID NO: 67753 - protein, 32 aa, Artificial Sequence; identical to SEQ ID NO: 58192
  GFR-binding peptide
  MOD_RES (14)..(15)..(16)..(17)..(18): Xaa is A or G
  MOD_RES (19)..(20)..(21)..(22): Xaa is A or G or is absent

SEQ ID NO: 67754 - protein, 38 aa, Artificial Sequence; identical to SEQ ID NO: 30220
  GFR-binding peptide
  MOD_RES (6)..(7): Xaa is C or S

SEQ ID NO: 67755 - protein, 39 aa, Artificial Sequence; identical to SEQ ID NO: 33342
  GFR-binding peptide
  MOD_RES (3)..(4)..(38): Xaa is C or S
  MOD_RES (18)..(19)..(20)..(21)..(22): Xaa is A or G
  MOD_RES (23)..(24)..(25)..(26): Xaa is A or G or is absent

SEQ ID NO: 67756 - protein, 36 aa, Artificial Sequence; identical to SEQ ID NO: 8858
  GFR-binding peptide
  MOD_RES (3)..(4)..(35): Xaa is C or S

SEQ ID NO: 67757 - protein, 39 aa, Artificial Sequence; identical to SEQ ID NO: 33345
  GFR-binding peptide
  MOD_RES (7)..(39): Xaa is C or S

SEQ ID NO: 67758 - protein, 37 aa, Artificial Sequence; identical to SEQ ID NO: 8860
  GFR-binding peptide
  MOD_RES (5)..(6)..(37): Xaa is C or S

SEQ ID NO: 67759 - protein, 33 aa, Artificial Sequence; identical to SEQ ID NO: 33349
  GFR-binding peptide
  MOD_RES (2)..(3): Xaa is C or S

SEQ ID NO: 67760 - protein, 38 aa, Artificial Sequence; identical to SEQ ID NO: 33351
  GFR-binding peptide
  MOD_RES (1)..(2)..(35)..(37): Xaa is C or S
  MOD_RES (16)..(17)..(18)..(19)..(20): Xaa is A or G
  MOD_RES (21)..(22)..(23)..(24): Xaa is A or G or is absent

SEQ ID NO: 67761 - protein, 39 aa, Artificial Sequence
  GFR-binding peptide
  MOD_RES (5)..(6)..(39): Xaa is C or S
  MOD_RES (20)..(21)..(22)..(23)..(24): Xaa is A or G
  MOD_RES (25)..(26)..(27)..(28): Xaa is A or G or is absent
SASPXXVPQDLSPINILYFXXXXXXXXXYGKIPMVVKSX

SEQ ID NO: 67762 - protein, 42 aa, Artificial Sequence; identical to SEQ ID NO: 8867
  GFR-binding peptide
  MOD_RES (4)..(5)..(39)..(41): Xaa is C or S
  MOD_RES (19)..(20)..(21)..(22)..(23): Xaa is A or G
  MOD_RES (24)..(25)..(26)..(27): Xaa is A or G or is absent

SEQ ID NO: 67763 - protein, 35 aa, Artificial Sequence; identical to SEQ ID NO: 8868
  GFR-binding peptide
  MOD_RES (3)..(4)..(35): Xaa is C or S

SEQ ID NO: 67764 - protein, 37 aa, Artificial Sequence; identical to SEQ ID NO: 33354
  GFR-binding peptide
  MOD_RES (1)..(2)..(35)..(37): Xaa is C or S
  MOD_RES (16)..(17)..(18)..(19)..(20): Xaa is A or G
  MOD_RES (21)..(22)..(23)..(24): Xaa is A or G or is absent

SEQ ID NO: 67765 - protein, 40 aa, Artificial Sequence; identical to SEQ ID NO: 30232
  GFR-binding peptide
  MOD_RES (4)..(5)..(37)..(39): Xaa is C or S

SEQ ID NO: 67766 - protein, 36 aa, Artificial Sequence; identical to SEQ ID NO: 8871
  GFR-binding peptide
  MOD_RES (4)..(5): Xaa is C or S

SEQ ID NO: 67767 - protein, 34 aa, Artificial Sequence; identical to SEQ ID NO: 30234
  GFR-binding peptide
  MOD_RES (1)..(33): Xaa is C or S

SEQ ID NO: 67768 - protein, 41 aa, Artificial Sequence; identical to SEQ ID NO: 8872
  GFR-binding peptide
  MOD_RES (7)..(39)..(41): Xaa is C or S

SEQ ID NO: 67769 - protein, 43 aa, Artificial Sequence; identical to SEQ ID NO: 32302
  GFR-binding peptide
  MOD_RES (6)..(7)..(41)..(43): Xaa is C or S
  MOD_RES (21)..(22)..(23)..(24)..(25): Xaa is A or G
  MOD_RES (26)..(27)..(28)..(29): Xaa is A or G or is absent

SEQ ID NO: 67770 - protein, 38 aa, Artificial Sequence; identical to SEQ ID NO: 8873
  GFR-binding peptide
  MOD_RES (5)..(6)..(38): Xaa is C or S

SEQ ID NO: 67771 - protein, 37 aa, Artificial Sequence; identical to SEQ ID NO: 30239
  GFR-binding peptide
  MOD_RES (3)..(4)..(37): Xaa is C or S

SEQ ID NO: 67772 - protein, 32 aa, Artificial Sequence; identical to SEQ ID NO: 32306
  GFR-binding peptide
  MOD_RES (31)..(31): Xaa is C or S

SEQ ID NO: 67773 - protein, 37 aa, Artificial Sequence; identical to SEQ ID NO: 8878
  GFR-binding peptide
  MOD_RES (3)..(4)..(36): Xaa is C or S

SEQ ID NO: 67774 - protein, 42 aa, Artificial Sequence
  GFR-binding peptide
  MOD_RES (6)..(7)..(41): Xaa is C or S
  MOD_RES (21)..(22)..(23)..(24)..(25): Xaa is A or G
  MOD_RES (26)..(27)..(28)..(29): Xaa is A or G or is absent
STPPTXXVPTRLSATSILYYXXXXXXXXXLRKHRDMVVESXG

SEQ ID NO: 67775 - protein, 35 aa, Artificial Sequence; identical to SEQ ID NO: 32311
  GFR-binding peptide
  MOD_RES (2)..(3)..(35): Xaa is C or S

SEQ ID NO: 67776 - protein, 40 aa, Artificial Sequence; identical to SEQ ID NO: 8885
  GFR-binding peptide
  MOD_RES (6)..(7): Xaa is C or S
  MOD_RES (21)..(22)..(23)..(24)..(25): Xaa is A or G
  MOD_RES (26)..(27)..(28)..(29): Xaa is A or G or is absent

SEQ ID NO: 67777 - protein, 40 aa, Artificial Sequence; identical to SEQ ID NO: 32319
  GFR-binding peptide
  MOD_RES (5)..(6)..(40): Xaa is C or S
  MOD_RES (20)..(21)..(22)..(23)..(24): Xaa is A or G
  MOD_RES (25)..(26)..(27)..(28): Xaa is A or G or is absent

SEQ ID NO: 67778 - protein, 35 aa, Artificial Sequence; identical to SEQ ID NO: 8887
  GFR-binding peptide
  MOD_RES (2)..(2): Xaa is C or S
  MOD_RES (16)..(17)..(18)..(19)..(20): Xaa is A or G
  MOD_RES (21)..(22)..(23)..(24): Xaa is A or G or is absent

SEQ ID NO: 67779 - protein, 31 aa, Artificial Sequence
  GFR-binding peptide
VPEKMSPISILYKDENKNVVLKYHYNMTVES

SEQ ID NO: 67780 - protein, 34 aa, Artificial Sequence
  GFR-binding peptide
  MOD_RES (3)..(4): Xaa is C or S
EPXXVPEKMSPISILYKDENKNVVLKYHYNMTVE

SEQ ID NO: 67781 - protein, 39 aa, Artificial Sequence
  GFR-binding peptide
  MOD_RES (1)..(2)..(36)..(38): Xaa is C or S
  MOD_RES (16)..(17)..(18)..(19)..(20): Xaa is A or G
  MOD_RES (21)..(22)..(23)..(24): Xaa is A or G or is absent
XXVPTRLEPISILYLXXXXXXXXXKFKYEDMVVESXGXR

SEQ ID NO: 67782 - protein, 37 aa, Artificial Sequence; identical to SEQ ID NO: 8889
  GFR-binding peptide
  MOD_RES (1)..(2)..(35)..(37): Xaa is C or S
  MOD_RES (16)..(17)..(18)..(19)..(20): Xaa is A or G
  MOD_RES (21)..(22)..(23)..(24): Xaa is A or G or is absent

SEQ ID NO: 67783 - protein, 36 aa, Artificial Sequence; identical to SEQ ID NO: 30252
  GFR-binding peptide
  MOD_RES (3)..(4)..(36): Xaa is C or S

SEQ ID NO: 67784 - protein, 35 aa, Artificial Sequence; identical to SEQ ID NO: 8891
  GFR-binding peptide
  MOD_RES (1)..(2)..(34): Xaa is C or S

SEQ ID NO: 67785 - protein, 37 aa, Artificial Sequence; identical to SEQ ID NO: 8893
  GFR-binding peptide
  MOD_RES (2)..(3)..(36): Xaa is C or S
  MOD_RES (17)..(18)..(19)..(20)..(21): Xaa is A or G
  MOD_RES (22)..(23)..(24)..(25): Xaa is A or G or is absent

SEQ ID NO: 67786 - protein, 36 aa, Artificial Sequence; identical to SEQ ID NO: 30257
  GFR-binding peptide
  MOD_RES (5)..(6): Xaa is C or S

SEQ ID NO: 67787 - protein, 40 aa, Artificial Sequence; identical to SEQ ID NO: 8894
  GFR-binding peptide
  MOD_RES (5)..(6)..(40): Xaa is C or S
  MOD_RES (20)..(21)..(22)..(23)..(24): Xaa is A or G
  MOD_RES (25)..(26)..(27)..(28): Xaa is A or G or is absent

SEQ ID NO: 67788 - protein, 42 aa, Artificial Sequence; identical to SEQ ID NO: 8896
  GFR-binding peptide
  MOD_RES (5)..(6)..(41): Xaa is C or S
  MOD_RES (20)..(21)..(22)..(23)..(24): Xaa is A or G
  MOD_RES (25)..(26)..(27)..(28): Xaa is A or G or is absent

SEQ ID NO: 67789 - protein, 40 aa, Artificial Sequence
  GFR-binding peptide
  MOD_RES (4)..(5)..(39): Xaa is C or S
  MOD_RES (19)..(20)..(21)..(22)..(23): Xaa is A or G
  MOD_RES (24)..(25)..(26)..(27): Xaa is A or G or is absent
PEPXXVPEKMNAISILYFXXXXXXXXXLKKYRNMTVESXA

SEQ ID NO: 67790 - protein, 37 aa, Artificial Sequence
  GFR-binding peptide
  MOD_RES (4)..(5): Xaa is C or S
  MOD_RES (19)..(20)..(21)..(22)..(23): Xaa is A or G
  MOD_RES (24)..(25)..(26)..(27): Xaa is A or G or is absent
PPTXXVPTRLSPISILYKXXXXXXXXXLKYHYDMVVE

SEQ ID NO: 67791 - protein, 38 aa, Artificial Sequence
  GFR-binding peptide
  MOD_RES (3)..(4)..(36)..(38): Xaa is C or S
GPXXTPTKMSPISMLYKNDKQQIILKYHYGMVVDRXGX

SEQ ID NO: 67792 - protein, 37 aa, Artificial Sequence
  GFR-binding peptide
  MOD_RES (1)..(35)..(37): Xaa is C or S
  MOD_RES (15)..(16)..(17)..(18)..(19): Xaa is A or G
  MOD_RES (20)..(21)..(22)..(23): Xaa is A or G or is absent
XVPTRLEPISILYLXXXXXXXXXKFKYEDMVVESXGX

SEQ ID NO: 67793 - protein, 35 aa, Artificial Sequence; identical to SEQ ID NO: 30264
  GFR-binding peptide
  MOD_RES (1)..(2)..(34): Xaa is C or S

SEQ ID NO: 67794 - protein, 39 aa, Artificial Sequence; identical to SEQ ID NO: 30265
  GFR-binding peptide
  MOD_RES (4)..(5)..(37)..(39): Xaa is C or S

SEQ ID NO: 67795 - protein, 37 aa, Artificial Sequence; identical to SEQ ID NO: 57265
  GFR-binding peptide
  MOD_RES (1)..(2)..(34)..(36): Xaa is C or S

SEQ ID NO: 67796 - protein, 38 aa, Artificial Sequence; identical to SEQ ID NO: 8900
  GFR-binding peptide
  MOD_RES (1)..(2)..(37): Xaa is C or S
  MOD_RES (16)..(17)..(18)..(19)..(20): Xaa is A or G
  MOD_RES (21)..(22)..(23)..(24): Xaa is A or G or is absent

SEQ ID NO: 67797 - protein, 43 aa, Artificial Sequence; identical to SEQ ID NO: 32335
  GFR-binding peptide
  MOD_RES (5)..(6)..(40)..(42): Xaa is C or S
  MOD_RES (20)..(21)..(22)..(23)..(24): Xaa is A or G
  MOD_RES (25)..(26)..(27)..(28): Xaa is A or G or is absent

SEQ ID NO: 67798 - protein, 34 aa, Artificial Sequence
  GFR-binding peptide
  MOD_RES (34)..(34): Xaa is C or S
  MOD_RES (14)..(15)..(16)..(17)..(18): Xaa is A or G
  MOD_RES (19)..(20)..(21)..(22): Xaa is A or G or is absent
VPARLSATSILYYXXXXXXXXXLRKHRDMVVEAX

SEQ ID NO: 67799 - protein, 37 aa, Artificial Sequence; identical to SEQ ID NO: 30267
  GFR-binding peptide
  MOD_RES (1)..(2)..(36): Xaa is C or S
  MOD_RES (16)..(17)..(18)..(19)..(20): Xaa is A or G
  MOD_RES (21)..(22)..(23)..(24): Xaa is A or G or is absent

SEQ ID NO: 67800 - protein, 35 aa, Artificial Sequence; identical to SEQ ID NO: 30269
  GFR-binding peptide
  MOD_RES (1)..(2)..(34): Xaa is C or S

SEQ ID NO: 67801 - protein, 35 aa, Artificial Sequence; identical to SEQ ID NO: 30270
  GFR-binding peptide
  MOD_RES (1)..(2)..(34): Xaa is C or S

SEQ ID NO: 67802 - protein, 35 aa, Artificial Sequence
  GFR-binding peptide
  MOD_RES (1)..(35): Xaa is C or S
  MOD_RES (15)..(16)..(17)..(18)..(19): Xaa is A or G
  MOD_RES (20)..(21)..(22)..(23): Xaa is A or G or is absent
XTPTKMSPISMLYKXXXXXXXXXLKYHYGMVVDRX

SEQ ID NO: 67803 - protein, 37 aa, Artificial Sequence; identical to SEQ ID NO: 16207
  GFR-binding peptide
  MOD_RES (2)..(3)..(35)..(37): Xaa is C or S

SEQ ID NO: 67804 - protein, 35 aa, Artificial Sequence; identical to SEQ ID NO: 8906
  GFR-binding peptide
  MOD_RES (1)..(2)..(34): Xaa is C or S

SEQ ID NO: 67805 - protein, 37 aa, Artificial Sequence; identical to SEQ ID NO: 32344
  GFR-binding peptide
  MOD_RES (2)..(34)..(36): Xaa is C or S

SEQ ID NO: 67806 - protein, 41 aa, Artificial Sequence
  GFR-binding peptide
  MOD_RES (5)..(6)..(39)..(41): Xaa is C or S
  MOD_RES (20)..(21)..(22)..(23)..(24): Xaa is A or G
  MOD_RES (25)..(26)..(27)..(28): Xaa is A or G or is absent
VPSTXXAPVKTEPISMLYLXXXXXXXXXKFKYEMIVEEXGX

SEQ ID NO: 67807 - protein, 35 aa, Artificial Sequence; identical to SEQ ID NO: 8907
  GFR-binding peptide
  MOD_RES (1)..(32)..(34): Xaa is C or S

SEQ ID NO: 67808 - protein, 42 aa, Artificial Sequence
  GFR-binding peptide
  MOD_RES (5)..(6)..(40)..(42): Xaa is C or S
  MOD_RES (20)..(21)..(22)..(23)..(24): Xaa is A or G
  MOD_RES (25)..(26)..(27)..(28): Xaa is A or G or is absent
TPPTXXVPTRLSATSILYYXXXXXXXXXLRKHRDMVVESXGX

SEQ ID NO: 67809 - protein, 31 aa, Artificial Sequence; identical to SEQ ID NO: 30276
  GFR-binding peptide
  MOD_RES (1)..(1): Xaa is C or S

SEQ ID NO: 67810 - protein, 35 aa, Artificial Sequence
  GFR-binding peptide
  MOD_RES (2)..(3): Xaa is C or S
  MOD_RES (17)..(18)..(19)..(20)..(21): Xaa is A or G
  MOD_RES (22)..(23)..(24)..(25): Xaa is A or G or is absent
PXXTPTKMEPISMLYLXXXXXXXXXKFKYEGMVVD

SEQ ID NO: 67811 - protein, 33 aa, Artificial Sequence
  GFR-binding peptide
  MOD_RES (1)..(2): Xaa is C or S
XXVPEKMNAISILYFDENKNVVLKKYRNMTVES

SEQ ID NO: 67812 - protein, 37 aa, Artificial Sequence; identical to SEQ ID NO: 32347
  GFR-binding peptide
  MOD_RES (2)..(3)..(36): Xaa is C or S

SEQ ID NO: 67813 - protein, 36 aa, Artificial Sequence
  GFR-binding peptide
  MOD_RES (1)..(2)..(36): Xaa is C or S
  MOD_RES (16)..(17)..(18)..(19)..(20): Xaa is A or G
  MOD_RES (21)..(22)..(23)..(24): Xaa is A or G or is absent
XXVPEKMEPISILYLXXXXXXXXXKFKYENMTVESX

SEQ ID NO: 67814 - protein, 42 aa, Artificial Sequence; identical to SEQ ID NO: 32348
  GFR-binding peptide
  MOD_RES (4)..(5)..(39)..(41): Xaa is C or S
  MOD_RES (19)..(20)..(21)..(22)..(23): Xaa is A or G
  MOD_RES (24)..(25)..(26)..(27): Xaa is A or G or is absent

SEQ ID NO: 67815 - protein, 36 aa, Artificial Sequence; identical to SEQ ID NO: 32351
  GFR-binding peptide
  MOD_RES (1)..(33)..(35): Xaa is C or S

SEQ ID NO: 67816 - protein, 41 aa, Artificial Sequence; identical to SEQ ID NO: 8913
  GFR-binding peptide
  MOD_RES (6)..(7)..(40): Xaa is C or S
  MOD_RES (21)..(22)..(23)..(24)..(25): Xaa is A or G
  MOD_RES (26)..(27)..(28)..(29): Xaa is A or G or is absent

SEQ ID NO: 67817 - protein, 38 aa, Artificial Sequence; identical to SEQ ID NO: 8914
  GFR-binding peptide
  MOD_RES (5)..(6): Xaa is C or S
  MOD_RES (20)..(21)..(22)..(23)..(24): Xaa is A or G
  MOD_RES (25)..(26)..(27)..(28): Xaa is A or G or is absent

SEQ ID NO: 67818 - protein, 41 aa, Artificial Sequence
  GFR-binding peptide
  MOD_RES (6)..(7)..(41): Xaa is C or S
  MOD_RES (21)..(22)..(23)..(24)..(25): Xaa is A or G
  MOD_RES (26)..(27)..(28)..(29): Xaa is A or G or is absent
HVPKPXXAPTKLSPISVLYKXXXXXXXXXLKYHYNMVVRSX

SEQ ID NO: 67819 - protein, 35 aa, Artificial Sequence; identical to SEQ ID NO: 32356
  GFR-binding peptide
  MOD_RES (1)..(2): Xaa is C or S
  MOD_RES (16)..(17)..(18)..(19)..(20): Xaa is A or G
  MOD_RES (21)..(22)..(23)..(24): Xaa is A or G or is absent

SEQ ID NO: 67820 - protein, 34 aa, Artificial Sequence; identical to SEQ ID NO: 30289
  GFR-binding peptide
  MOD_RES (2)..(3): Xaa is C or S

SEQ ID NO: 67821 - protein, 39 aa, Artificial Sequence; identical to SEQ ID NO: 30290
  GFR-binding peptide
  MOD_RES (5)..(6): Xaa is C or S
  MOD_RES (20)..(21)..(22)..(23)..(24): Xaa is A or G
  MOD_RES (25)..(26)..(27)..(28): Xaa is A or G or is absent

SEQ ID NO: 67822 - protein, 35 aa, Artificial Sequence; identical to SEQ ID NO: 8918
  GFR-binding peptide
  MOD_RES (4)..(5): Xaa is C or S

SEQ ID NO: 67823 - protein, 39 aa, Artificial Sequence; identical to SEQ ID NO: 32365
  GFR-binding peptide
  MOD_RES (6)..(38): Xaa is C or S

SEQ ID NO: 67824 - protein, 42 aa, Artificial Sequence; identical to SEQ ID NO: 32366
  GFR-binding peptide
  MOD_RES (5)..(6)..(41): Xaa is C or S
  MOD_RES (20)..(21)..(22)..(23)..(24): Xaa is A or G
  MOD_RES (25)..(26)..(27)..(28): Xaa is A or G or is absent

SEQ ID NO: 67825 - protein, 37 aa, Artificial Sequence; identical to SEQ ID NO: 8923
  GFR-binding peptide
  MOD_RES (3)..(4)..(37): Xaa is C or S

SEQ ID NO: 67826 - protein, 36 aa, Artificial Sequence
  GFR-binding peptide
  MOD_RES (2)..(3)..(36): Xaa is C or S
  MOD_RES (17)..(18)..(19)..(20)..(21): Xaa is A or G
  MOD_RES (22)..(23)..(24)..(25): Xaa is A or G or is absent
PXXVSQDLSPINILYFXXXXXXXXXYGKIPMIVKSX

SEQ ID NO: 67827 - protein, 44 aa, Artificial Sequence
  GFR-binding peptide
  MOD_RES (6)..(7)..(41)..(43): Xaa is C or S
  MOD_RES (21)..(22)..(23)..(24)..(25): Xaa is A or G
  MOD_RES (26)..(27)..(28)..(29): Xaa is A or G or is absent
GSAGPXXTPTKMSATSMLYYXXXXXXXXXLRKHRGMVVDRXGXS

SEQ ID NO: 67828 - protein, 38 aa, Artificial Sequence
  GFR-binding peptide
  MOD_RES (6)..(7): Xaa is C or S
GIPEPXXVPEKMSPINILYFDENKNVVYGKIPNMTVES

SEQ ID NO: 67829 - protein, 33 aa, Artificial Sequence; identical to SEQ ID NO: 8925
  GFR-binding peptide
  MOD_RES (1)..(1): Xaa is C or S
  MOD_RES (15)..(16)..(17)..(18)..(19): Xaa is A or G
  MOD_RES (20)..(21)..(22)..(23): Xaa is A or G or is absent

SEQ ID NO: 67830 - protein, 36 aa, Artificial Sequence; identical to SEQ ID NO: 32375
  GFR-binding peptide
  MOD_RES (34)..(36): Xaa is C or S
  MOD_RES (14)..(15)..(16)..(17)..(18): Xaa is A or G
  MOD_RES (19)..(20)..(21)..(22): Xaa is A or G or is absent

SEQ ID NO: 67831 - protein, 39 aa, Artificial Sequence; identical to SEQ ID NO: 8931
  GFR-binding peptide
  MOD_RES (2)..(3)..(37)..(39): Xaa is C or S
  MOD_RES (17)..(18)..(19)..(20)..(21): Xaa is A or G
  MOD_RES (22)..(23)..(24)..(25): Xaa is A or G or is absent

SEQ ID NO: 67832 - protein, 41 aa, Artificial Sequence; identical to SEQ ID NO: 30306
  GFR-binding peptide
  MOD_RES (7)..(39)..(41): Xaa is C or S

SEQ ID NO: 67833 - protein, 32 aa, Artificial Sequence; identical to SEQ ID NO: 8934
  GFR-binding peptide
  MOD_RES (31)..(31): Xaa is C or S

SEQ ID NO: 67834 - protein, 37 aa, Artificial Sequence; identical to SEQ ID NO: 8939
  GFR-binding peptide
  MOD_RES (2)..(3): Xaa is C or S
  MOD_RES (17)..(18)..(19)..(20)..(21): Xaa is A or G
  MOD_RES (22)..(23)..(24)..(25): Xaa is A or G or is absent

SEQ ID NO: 67835 - protein, 38 aa, Artificial Sequence; identical to SEQ ID NO: 32384
  GFR-binding peptide
  MOD_RES (2)..(3)..(37): Xaa is C or S
  MOD_RES (17)..(18)..(19)..(20)..(21): Xaa is A or G
  MOD_RES (22)..(23)..(24)..(25): Xaa is A or G or is absent

SEQ ID NO: 67836 - protein, 36 aa, Artificial Sequence; identical to SEQ ID NO: 8941
  GFR-binding peptide
  MOD_RES (4)..(5)..(36): Xaa is C or S

SEQ ID NO: 67837 - protein, 38 aa, Artificial Sequence; identical to SEQ ID NO: 32386
  GFR-binding peptide
  MOD_RES (5)..(6)..(38): Xaa is C or S

SEQ ID NO: 67838 - protein, 35 aa, Artificial Sequence; identical to SEQ ID NO: 32388
  GFR-binding peptide
  MOD_RES (4)..(5): Xaa is C or S

SEQ ID NO: 67839 - protein, 37 aa, Artificial Sequence
  GFR-binding peptide
  MOD_RES (4)..(5): Xaa is C or S
  MOD_RES (19)..(20)..(21)..(22)..(23): Xaa is A or G
  MOD_RES (24)..(25)..(26)..(27): Xaa is A or G or is absent
AGPXXTPTKMEPISMLYLXXXXXXXXXKFKYEGMVVD

SEQ ID NO: 67840 - protein, 41 aa, Artificial Sequence
  GFR-binding peptide
  MOD_RES (3)..(4)..(38)..(40): Xaa is C or S
  MOD_RES (18)..(19)..(20)..(21)..(22): Xaa is A or G
  MOD_RES (23)..(24)..(25)..(26): Xaa is A or G or is absent
ASXXVPARLSATSILYYXXXXXXXXXLRKHRDMVVEAXGXR

SEQ ID NO: 67841 - protein, 39 aa, Artificial Sequence; identical to SEQ ID NO: 32390
  GFR-binding peptide
  MOD_RES (6)..(7): Xaa is C or S

SEQ ID NO: 67842 - protein, 35 aa, Artificial Sequence; identical to SEQ ID NO: 30315
  GFR-binding peptide
  MOD_RES (34)..(34): Xaa is C or S
  MOD_RES (14)..(15)..(16)..(17)..(18): Xaa is A or G
  MOD_RES (19)..(20)..(21)..(22): Xaa is A or G or is absent

SEQ ID NO: 67843 - protein, 41 aa, Artificial Sequence
  GFR-binding peptide
  MOD_RES (6)..(7)..(39)..(41): Xaa is C or S
GIPEPXXVPEKMNAISILYFDENKNVVLKKYRNMTVESXAX

SEQ ID NO: 67844 - protein, 34 aa, Artificial Sequence; identical to SEQ ID NO: 30318
  GFR-binding peptide
  MOD_RES (2)..(3): Xaa is C or S

SEQ ID NO: 67845 - protein, 40 aa, Artificial Sequence; identical to SEQ ID NO: 8947
  GFR-binding peptide
  MOD_RES (6)..(7)..(39): Xaa is C or S

SEQ ID NO: 67846 - protein, 39 aa, Artificial Sequence; identical to SEQ ID NO: 32398
  GFR-binding peptide
  MOD_RES (1)..(2)..(36)..(38): Xaa is C or S
  MOD_RES (16)..(17)..(18)..(19)..(20): Xaa is A or G
  MOD_RES (21)..(22)..(23)..(24): Xaa is A or G or is absent

SEQ ID NO: 67847 - protein, 37 aa, Artificial Sequence; identical to SEQ ID NO: 30320
  GFR-binding peptide
  MOD_RES (2)..(3)..(35)..(37): Xaa is C or S

SEQ ID NO: 67848 - protein, 41 aa, Artificial Sequence; identical to SEQ ID NO: 30322
  GFR-binding peptide
  MOD_RES (5)..(6)..(41): Xaa is C or S
  MOD_RES (20)..(21)..(22)..(23)..(24): Xaa is A or G
  MOD_RES (25)..(26)..(27)..(28): Xaa is A or G or is absent

SEQ ID NO: 67849 - protein, 35 aa, Artificial Sequence
  GFR-binding peptide
  MOD_RES (4)..(5): Xaa is C or S
AAPXXVPQALSPINILYFVGRKPKVYGKIPMIVRS

SEQ ID NO: 67850 - protein, 38 aa, Artificial Sequence; identical to SEQ ID NO: 8948
  GFR-binding peptide
  MOD_RES (3)..(4)..(38): Xaa is C or S
  MOD_RES (18)..(19)..(20)..(21)..(22): Xaa is A or G
  MOD_RES (23)..(24)..(25)..(26): Xaa is A or G or is absent

SEQ ID NO: 67851 - protein, 37 aa, Artificial Sequence; identical to SEQ ID NO: 32404
  GFR-binding peptide
  MOD_RES (34)..(36): Xaa is C or S
  MOD_RES (14)..(15)..(16)..(17)..(18): Xaa is A or G
  MOD_RES (19)..(20)..(21)..(22): Xaa is A or G or is absent

SEQ ID NO: 67852 - protein, 38 aa, Artificial Sequence; identical to SEQ ID NO: 30327
  GFR-binding peptide
  MOD_RES (2)..(3)..(36)..(38): Xaa is C or S
  MOD_RES (17)..(18)..(19)..(20)..(21): Xaa is A or G
  MOD_RES (22)..(23)..(24)..(25): Xaa is A or G or is absent

SEQ ID NO: 67853 - protein, 39 aa, Artificial Sequence
  GFR-binding peptide
  MOD_RES (4)..(5)..(37)..(39): Xaa is C or S
PEPXXVPEKMEPISILYLDENKNVVKFKYENMTVESXAX

SEQ ID NO: 67854 - protein, 35 aa, Artificial Sequence; identical to SEQ ID NO: 8957
  GFR-binding peptide
  MOD_RES (1)..(33)..(35): Xaa is C or S

SEQ ID NO: 67855 - protein, 39 aa, Artificial Sequence; identical to SEQ ID NO: 30331
  GFR-binding peptide
  MOD_RES (5)..(6)..(37)..(39): Xaa is C or S

SEQ ID NO: 67856 - protein, 33 aa, Artificial Sequence; identical to SEQ ID NO: 8958
  GFR-binding peptide
  MOD_RES (2)..(3): Xaa is C or S

SEQ ID NO: 67857 - protein, 40 aa, Artificial Sequence; identical to SEQ ID NO: 8959
  GFR-binding peptide
  MOD_RES (3)..(4)..(37)..(39): Xaa is C or S
  MOD_RES (18)..(19)..(20)..(21)..(22): Xaa is A or G
  MOD_RES (23)..(24)..(25)..(26): Xaa is A or G or is absent

SEQ ID NO: 67858 - protein, 36 aa, Artificial Sequence; identical to SEQ ID NO: 8961
  GFR-binding peptide
  MOD_RES (2)..(34)..(36): Xaa is C or S

SEQ ID NO: 67859 - protein, 36 aa, Artificial Sequence; identical to SEQ ID NO: 32412
  GFR-binding peptide
  MOD_RES (4)..(5): Xaa is C or S

SEQ ID NO: 67860 - protein, 32 aa, Artificial Sequence; identical to SEQ ID NO: 8962
  GFR-binding peptide
  MOD_RES (1)..(2): Xaa is C or S

SEQ ID NO: 67861 - protein, 35 aa, Artificial Sequence; identical to SEQ ID NO: 8963
  GFR-binding peptide
  MOD_RES (1)..(2): Xaa is C or S
  MOD_RES (16)..(17)..(18)..(19)..(20): Xaa is A or G
  MOD_RES (21)..(22)..(23)..(24): Xaa is A or G or is absent

SEQ ID NO: 67862 - protein, 40 aa, Artificial Sequence; identical to SEQ ID NO: 30336
  GFR-binding peptide
  MOD_RES (3)..(4)..(38)..(40): Xaa is C or S
  MOD_RES (18)..(19)..(20)..(21)..(22): Xaa is A or G
  MOD_RES (23)..(24)..(25)..(26): Xaa is A or G or is absent

SEQ ID NO: 67863 - protein, 36 aa, Artificial Sequence; identical to SEQ ID NO: 30338
  GFR-binding peptide
  MOD_RES (3)..(4)..(36): Xaa is C or S

SEQ ID NO: 67864 - protein, 40 aa, Artificial Sequence; identical to SEQ ID NO: 8966
  GFR-binding peptide
  MOD_RES (3)..(4)..(38)..(40): Xaa is C or S
  MOD_RES (18)..(19)..(20)..(21)..(22): Xaa is A or G
  MOD_RES (23)..(24)..(25)..(26): Xaa is A or G or is absent

SEQ ID NO: 67865 - protein, 35 aa, Artificial Sequence; identical to SEQ ID NO: 8968
  GFR-binding peptide
  MOD_RES (32)..(34): Xaa is C or S

SEQ ID NO: 67866 - protein, 38 aa, Artificial Sequence; identical to SEQ ID NO: 8970
  GFR-binding peptide
  MOD_RES (3)..(4)..(35)..(37): Xaa is C or S

SEQ ID NO: 67867 - protein, 38 aa, Artificial Sequence
  GFR-binding peptide
  MOD_RES (5)..(6)..(38): Xaa is C or S
APASXXVPARLSATSILYYDAANNVVLRKHRDMVVEAX

SEQ ID NO: 67868 - protein, 36 aa, Artificial Sequence; identical to SEQ ID NO: 8971
  GFR-binding peptide
  MOD_RES (5)..(6): Xaa is C or S

SEQ ID NO: 67869 - protein, 38 aa, Artificial Sequence; identical to SEQ ID NO: 8973
  GFR-binding peptide
  MOD_RES (4)..(5)..(37): Xaa is C or S

SEQ ID NO: 67870 - protein, 33 aa, Artificial Sequence; identical to SEQ ID NO: 8974
  GFR-binding peptide
  MOD_RES (1)..(2): Xaa is C or S

SEQ ID NO: 67871 - protein, 33 aa, Artificial Sequence; identical to SEQ ID NO: 57343
  GFR-binding peptide
  MOD_RES (14)..(15)..(16)..(17)..(18): Xaa is A or G
  MOD_RES (19)..(20)..(21)..(22): Xaa is A or G or is absent

SEQ ID NO: 67872 - protein, 32 aa, Artificial Sequence; identical to SEQ ID NO: 30349
  GFR-binding peptide
  MOD_RES (32)..(32): Xaa is C or S

SEQ ID NO: 67873 - protein, 38 aa, Artificial Sequence
  GFR-binding peptide
  MOD_RES (4)..(5): Xaa is C or S
  MOD_RES (19)..(20)..(21)..(22)..(23): Xaa is A or G
  MOD_RES (24)..(25)..(26)..(27): Xaa is A or G or is absent
PPTXXVPTRLEPISILYLXXXXXXXXXKFKYEDMVVES

SEQ ID NO: 67874 - protein, 39 aa, Artificial Sequence; identical to SEQ ID NO: 8977
  GFR-binding peptide
  MOD_RES (3)..(4)..(36)..(38): Xaa is C or S

SEQ ID NO: 67875 - protein, 38 aa, Artificial Sequence; identical to SEQ ID NO: 8980
  GFR-binding peptide
  MOD_RES (5)..(6)..(38): Xaa is C or S

SEQ ID NO: 67876 - protein, 38 aa, Artificial Sequence; identical to SEQ ID NO: 32429
  GFR-binding peptide
  MOD_RES (4)..(5): Xaa is C or S
  MOD_RES (19)..(20)..(21)..(22)..(23): Xaa is A or G
  MOD_RES (24)..(25)..(26)..(27): Xaa is A or G or is absent

SEQ ID NO: 67877 - protein, 35 aa, Artificial Sequence; identical to SEQ ID NO: 32432
  GFR-binding peptide
  MOD_RES (1)..(33)..(35): Xaa is C or S

SEQ ID NO: 67878 - protein, 32 aa, Artificial Sequence; identical to SEQ ID NO: 8981
  GFR-binding peptide
  MOD_RES (31)..(31): Xaa is C or S

SEQ ID NO: 67879 - protein, 38 aa, Artificial Sequence; identical to SEQ ID NO: 8983
  GFR-binding peptide
  MOD_RES (5)..(6)..(37): Xaa is C or S

SEQ ID NO: 67880 - protein, 36 aa, Artificial Sequence; identical to SEQ ID NO: 30359
  GFR-binding peptide
  MOD_RES (34)..(36): Xaa is C or S
  MOD_RES (14)..(15)..(16)..(17)..(18): Xaa is A or G
  MOD_RES (19)..(20)..(21)..(22): Xaa is A or G or is absent

SEQ ID NO: 67881 - protein, 37 aa, Artificial Sequence; identical to SEQ ID NO: 32438
  GFR-binding peptide
  MOD_RES (1)..(35)..(37): Xaa is C or S
  MOD_RES (15)..(16)..(17)..(18)..(19): Xaa is A or G
  MOD_RES (20)..(21)..(22)..(23): Xaa is A or G or is absent

SEQ ID NO: 67882 - protein, 34 aa, Artificial Sequence; identical to SEQ ID NO: 30361
  GFR-binding peptide
  MOD_RES (1)..(2): Xaa is C or S

SEQ ID NO: 67883 - protein, 41 aa, Artificial Sequence
  GFR-binding peptide
  MOD_RES (6)..(7)..(41): Xaa is C or S
  MOD_RES (21)..(22)..(23)..(24)..(25): Xaa is A or G
  MOD_RES (26)..(27)..(28)..(29): Xaa is A or G or is absent
GIPEPXXVPEKMSATSILYYXXXXXXXXXLRKHRNMTVESX

SEQ ID NO: 67884 - protein, 40 aa, Artificial Sequence; identical to SEQ ID NO: 8985
  GFR-binding peptide
  MOD_RES (6)..(40): Xaa is C or S
  MOD_RES (20)..(21)..(22)..(23)..(24): Xaa is A or G
  MOD_RES (25)..(26)..(27)..(28): Xaa is A or G or is absent

SEQ ID NO: 67885 - protein, 39 aa, Artificial Sequence; identical to SEQ ID NO: 30362
  GFR-binding peptide
  MOD_RES (3)..(4)..(38): Xaa is C or S
  MOD_RES (18)..(19)..(20)..(21)..(22): Xaa is A or G
  MOD_RES (23)..(24)..(25)..(26): Xaa is A or G or is absent

SEQ ID NO: 67886 - protein, 30 aa, Artificial Sequence; identical to SEQ ID NO: 16279
  GFR-binding peptide

SEQ ID NO: 67887 - protein, 35 aa, Artificial Sequence; identical to SEQ ID NO: 30366
  GFR-binding peptide
  MOD_RES (34)..(34): Xaa is C or S
  MOD_RES (14)..(15)..(16)..(17)..(18): Xaa is A or G
  MOD_RES (19)..(20)..(21)..(22): Xaa is A or G or is absent

SEQ ID NO: 67888 - protein, 34 aa, Artificial Sequence
  GFR-binding peptide
  MOD_RES (1)..(2)..(33): Xaa is C or S
XXAPVKTSPISMLYKDNGRVLLLKYHYMIVEEXG

SEQ ID NO: 67889 - protein, 35 aa, Artificial Sequence; identical to SEQ ID NO: 32448
  GFR-binding peptide
  MOD_RES (1)..(2): Xaa is C or S
  MOD_RES (16)..(17)..(18)..(19)..(20): Xaa is A or G
  MOD_RES (21)..(22)..(23)..(24): Xaa is A or G or is absent

SEQ ID NO: 67890 - protein, 41 aa, Artificial Sequence; identical to SEQ ID NO: 32450
  GFR-binding peptide
  MOD_RES (3)..(4)..(38)..(40): Xaa is C or S
  MOD_RES (18)..(19)..(20)..(21)..(22): Xaa is A or G
  MOD_RES (23)..(24)..(25)..(26): Xaa is A or G or is absent

SEQ ID NO: 67891 - protein, 40 aa, Artificial Sequence; identical to SEQ ID NO: 32451
  GFR-binding peptide
  MOD_RES (5)..(6)..(38)..(40): Xaa is C or S

SEQ ID NO: 67892 - protein, 33 aa, Artificial Sequence; identical to SEQ ID NO: 8992
  GFR-binding peptide
  MOD_RES (1)..(33): Xaa is C or S

SEQ ID NO: 67893 - protein, 30 aa, Artificial Sequence; identical to SEQ ID NO: 8993
  GFR-binding peptide

SEQ ID NO: 67894 - protein, 39 aa, Artificial Sequence; identical to SEQ ID NO: 8996
  GFR-binding peptide
  MOD_RES (4)..(5)..(39): Xaa is C or S
  MOD_RES (19)..(20)..(21)..(22)..(23): Xaa is A or G
  MOD_RES (24)..(25)..(26)..(27): Xaa is A or G or is absent

SEQ ID NO: 67895 - protein, 39 aa, Artificial Sequence
  GFR-binding peptide
  MOD_RES (4)..(5)..(39): Xaa is C or S
  MOD_RES (19)..(20)..(21)..(22)..(23): Xaa is A or G
  MOD_RES (24)..(25)..(26)..(27): Xaa is A or G or is absent
PEPXXVPEKMSATSILYYXXXXXXXXXLRKHRNMTVESX

SEQ ID NO: 67896 - protein, 38 aa, Artificial Sequence
  GFR-binding peptide
  MOD_RES (2)..(3)..(35)..(37): Xaa is C or S
TXXVPTRLSATSILYYDSANNVVLRKHRDMVVESXGXR

SEQ ID NO: 67897 - protein, 32 aa, Artificial Sequence
  GFR-binding peptide
  MOD_RES (1)..(1): Xaa is C or S
XTPTKMSATSMLYYNDKQQIILRKHRGMVVDR

SEQ ID NO: 67898 - protein, 38 aa, Artificial Sequence
  GFR-binding peptide
  MOD_RES (4)..(5): Xaa is C or S
  MOD_RES (19)..(20)..(21)..(22)..(23): Xaa is A or G
  MOD_RES (24)..(25)..(26)..(27): Xaa is A or G or is absent
PEPXXVPEKMEPISILYLXXXXXXXXXKFKYENMTVES

SEQ ID NO: 67899 - protein, 41 aa, Artificial Sequence; identical to SEQ ID NO: 8998
  GFR-binding peptide
  MOD_RES (4)..(5)..(39)..(41): Xaa is C or S
  MOD_RES (19)..(20)..(21)..(22)..(23): Xaa is A or G
  MOD_RES (24)..(25)..(26)..(27): Xaa is A or G or is absent

SEQ ID NO: 67900 - protein, 35 aa, Artificial Sequence; identical to SEQ ID NO: 30374
  GFR-binding peptide
  MOD_RES (4)..(5): Xaa is C or S

SEQ ID NO: 67901 - protein, 36 aa, Artificial Sequence; identical to SEQ ID NO: 30375
  GFR-binding peptide
  MOD_RES (34)..(36): Xaa is C or S
  MOD_RES (14)..(15)..(16)..(17)..(18): Xaa is A or G
  MOD_RES (19)..(20)..(21)..(22): Xaa is A or G or is absent

SEQ ID NO: 67902 - protein, 34 aa, Artificial Sequence
  GFR-binding peptide
  MOD_RES (1)..(32)..(34): Xaa is C or S
XVSQDLSPINILYFIGKTPKIYGKIPMIVKSXKX

SEQ ID NO: 67903 - protein, 37 aa, Artificial Sequence
  GFR-binding peptide
  MOD_RES (5)..(6)..(37): Xaa is C or S
VPSTXXAPVKTSPISMLYKDNGRVLLLKYHYMIVEEX

SEQ ID NO: 67904 - protein, 31 aa, Artificial Sequence; identical to SEQ ID NO: 30379
  GFR-binding peptide

SEQ ID NO: 67905 - protein, 38 aa, Artificial Sequence
  GFR-binding peptide
  MOD_RES (5)..(6): Xaa is C or S
  MOD_RES (20)..(21)..(22)..(23)..(24): Xaa is A or G
  MOD_RES (25)..(26)..(27)..(28): Xaa is A or G or is absent
VPSTXXAPVKTEPISMLYLXXXXXXXXXKFKYEMIVEE

SEQ ID NO: 67906 - protein, 37 aa, Artificial Sequence; identical to SEQ ID NO: 32468
  GFR-binding peptide
  MOD_RES (4)..(4): Xaa is C or S
  MOD_RES (18)..(19)..(20)..(21)..(22): Xaa is A or G
  MOD_RES (23)..(24)..(25)..(26): Xaa is A or G or is absent

SEQ ID NO: 67907 - protein, 37 aa, Artificial Sequence
  GFR-binding peptide
  MOD_RES (2)..(3)..(35)..(37): Xaa is C or S
PXXTPTKMEPISMLYLNDKQQIIKFKYEGMVVDRXGX

SEQ ID NO: 67908 - protein, 38 aa, Artificial Sequence; identical to SEQ ID NO: 9005
  GFR-binding peptide
  MOD_RES (3)..(4)..(36)..(38): Xaa is C or S

SEQ ID NO: 67909 - protein, 40 aa, Artificial Sequence; identical to SEQ ID NO: 30387
  GFR-binding peptide
  MOD_RES (6)..(7)..(39): Xaa is C or S

SEQ ID NO: 67910 - protein, 39 aa, Artificial Sequence; identical to SEQ ID NO: 9008
  GFR-binding peptide
  MOD_RES (4)..(36)..(38): Xaa is C or S

SEQ ID NO: 67911 - protein, 39 aa, Artificial Sequence; identical to SEQ ID NO: 32478
  GFR-binding peptide
  MOD_RES (4)..(5)..(37)..(39): Xaa is C or S

SEQ ID NO: 67912 - protein, 40 aa, Artificial Sequence
  GFR-binding peptide
  MOD_RES (4)..(5)..(38)..(40): Xaa is C or S
  MOD_RES (19)..(20)..(21)..(22)..(23): Xaa is A or G
  MOD_RES (24)..(25)..(26)..(27): Xaa is A or G or is absent
PSTXXAPVKTSPISMLYKXXXXXXXXXLKYHYMIVEEXGX

SEQ ID NO: 67913 - protein, 37 aa, Artificial Sequence; identical to SEQ ID NO: 30392
  GFR-binding peptide
  MOD_RES (3)..(4)..(36): Xaa is C or S

SEQ ID NO: 67914 - protein, 34 aa, Artificial Sequence; identical to SEQ ID NO: 32483
  GFR-binding peptide
  MOD_RES (2)..(3): Xaa is C or S

SEQ ID NO: 67915 - protein, 36 aa, Artificial Sequence
  GFR-binding peptide
  MOD_RES (3)..(4): Xaa is C or S
  MOD_RES (18)..(19)..(20)..(21)..(22): Xaa is A or G
  MOD_RES (23)..(24)..(25)..(26): Xaa is A or G or is absent
KAXXVPTKLSATSILYYXXXXXXXXXLRKHRGMAVS

SEQ ID NO: 67916 - protein, 39 aa, Artificial Sequence; identical to SEQ ID NO: 9013
  GFR-binding peptide
  MOD_RES (4)..(5)..(37)..(39): Xaa is C or S

SEQ ID NO: 67917 - protein, 44 aa, Artificial Sequence; identical to SEQ ID NO: 9014
  GFR-binding peptide
  MOD_RES (6)..(7)..(41)..(43): Xaa is C or S
  MOD_RES (21)..(22)..(23)..(24)..(25): Xaa is A or G
  MOD_RES (26)..(27)..(28)..(29): Xaa is A or G or is absent

SEQ ID NO: 67918 - protein, 37 aa, Artificial Sequence; identical to SEQ ID NO: 57389
  GFR-binding peptide
  MOD_RES (2)..(3)..(37): Xaa is C or S
  MOD_RES (17)..(18)..(19)..(20)..(21): Xaa is A or G
  MOD_RES (22)..(23)..(24)..(25): Xaa is A or G or is absent

SEQ ID NO: 67919 - protein, 39 aa, Artificial Sequence; identical to SEQ ID NO: 32489
  GFR-binding peptide
  MOD_RES (1)..(2)..(36)..(38): Xaa is C or S
  MOD_RES (16)..(17)..(18)..(19)..(20): Xaa is A or G
  MOD_RES (21)..(22)..(23)..(24): Xaa is A or G or is absent

SEQ ID NO: 67920 - protein, 33 aa, Artificial Sequence; identical to SEQ ID NO: 9016
  GFR-binding peptide
  MOD_RES (2)..(3): Xaa is C or S

SEQ ID NO: 67921 - protein, 40 aa, Artificial Sequence; identical to SEQ ID NO: 9020
  GFR-binding peptide
  MOD_RES (5)..(6)..(40): Xaa is C or S
  MOD_RES (20)..(21)..(22)..(23)..(24): Xaa is A or G
  MOD_RES (25)..(26)..(27)..(28): Xaa is A or G or is absent

SEQ ID NO: 67922 - protein, 35 aa, Artificial Sequence; identical to SEQ ID NO: 9024
  GFR-binding peptide
  MOD_RES (3)..(4): Xaa is C or S

SEQ ID NO: 67923 - protein, 35 aa, Artificial Sequence
  GFR-binding peptide
  MOD_RES (2)..(3)..(35): Xaa is C or S
PXXVPEKMSPINILYFDENKNVVYGKIPNMTVESX

SEQ ID NO: 67924 - protein, 35 aa, Artificial Sequence; identical to SEQ ID NO: 9025
  GFR-binding peptide
  MOD_RES (4)..(5): Xaa is C or S

SEQ ID NO: 67925 - protein, 35 aa, Artificial Sequence; identical to SEQ ID NO: 32500
  GFR-binding peptide
  MOD_RES (2)..(3): Xaa is C or S

SEQ ID NO: 67926 - protein, 40 aa, Artificial Sequence; identical to SEQ ID NO: 30407
  GFR-binding peptide
  MOD_RES (3)..(4)..(38)..(40): Xaa is C or S
  MOD_RES (18)..(19)..(20)..(21)..(22): Xaa is A or G
  MOD_RES (23)..(24)..(25)..(26): Xaa is A or G or is absent

SEQ ID NO: 67927 - protein, 42 aa, Artificial Sequence; identical to SEQ ID NO: 32501
  GFR-binding peptide
  MOD_RES (6)..(7)..(42): Xaa is C or S
  MOD_RES (21)..(22)..(23)..(24)..(25): Xaa is A or G
  MOD_RES (26)..(27)..(28)..(29): Xaa is A or G or is absent

SEQ ID NO: 67928 - protein, 38 aa, Artificial Sequence
  GFR-binding peptide
  MOD_RES (1)..(2)..(36)..(38): Xaa is C or S
  MOD_RES (16)..(17)..(18)..(19)..(20): Xaa is A or G
  MOD_RES (21)..(22)..(23)..(24): Xaa is A or G or is absent
XXVPARLSATSILYYXXXXXXXXXLRKHRDMVVEAXGX

SEQ ID NO: 67929 - protein, 32 aa, Artificial Sequence; identical to SEQ ID NO: 30408
  GFR-binding peptide
  MOD_RES (14)..(15)..(16)..(17)..(18): Xaa is A or G
  MOD_RES (19)..(20)..(21)..(22): Xaa is A or G or is absent

SEQ ID NO: 67930 - protein, 38 aa, Artificial Sequence
  GFR-binding peptide
  MOD_RES (5)..(6)..(37): Xaa is C or S
SASPXXVPQDLSPINILYFVGRTPKVYGKIPMVVKSXK

SEQ ID NO: 67931 - protein, 37 aa, Artificial Sequence; identical to SEQ ID NO: 30410
  GFR-binding peptide
  MOD_RES (6)..(7): Xaa is C or S

SEQ ID NO: 67932 - protein, 39 aa, Artificial Sequence
  GFR-binding peptide
  MOD_RES (4)..(5)..(36)..(38): Xaa is C or S
ASPXXVPQDLSPINILYFVGRTPKVYGKIPMVVKSXKXS

SEQ ID NO: 67933 - protein, 37 aa, Artificial Sequence; identical to SEQ ID NO: 30411
  GFR-binding peptide
  MOD_RES (2)..(3)..(37): Xaa is C or S
  MOD_RES (17)..(18)..(19)..(20)..(21): Xaa is A or G
  MOD_RES (22)..(23)..(24)..(25): Xaa is A or G or is absent

SEQ ID NO: 67934 - protein, 41 aa, Artificial Sequence; identical to SEQ ID NO: 9027
  GFR-binding peptide
  MOD_RES (6)..(7)..(41): Xaa is C or S
  MOD_RES (21)..(22)..(23)..(24)..(25): Xaa is A or G
  MOD_RES (26)..(27)..(28)..(29): Xaa is A or G or is absent

SEQ ID NO: 67935 - protein, 34 aa, Artificial Sequence; identical to SEQ ID NO: 9029
  GFR-binding peptide
  MOD_RES (1)..(2): Xaa is C or S
  MOD_RES (16)..(17)..(18)..(19)..(20): Xaa is A or G
  MOD_RES (21)..(22)..(23)..(24): Xaa is A or G or is absent

SEQ ID NO: 67936 - protein, 39 aa, Artificial Sequence; identical to SEQ ID NO: 16329
  GFR-binding peptide
  MOD_RES (5)..(6): Xaa is C or S
  MOD_RES (20)..(21)..(22)..(23)..(24): Xaa is A or G
  MOD_RES (25)..(26)..(27)..(28): Xaa is A or G or is absent

SEQ ID NO: 67937 - protein, 35 aa, Artificial Sequence; identical to SEQ ID NO: 32509
  GFR-binding peptide
  MOD_RES (1)..(2)..(33)..(35): Xaa is C or S

SEQ ID NO: 67938 - protein, 35 aa, Artificial Sequence; identical to SEQ ID NO: 9031
  GFR-binding peptide
  MOD_RES (2)..(3): Xaa is C or S

SEQ ID NO: 67939 - protein, 33 aa, Artificial Sequence; identical to SEQ ID NO: 9032
  GFR-binding peptide
  MOD_RES (1)..(33): Xaa is C or S

SEQ ID NO: 67940 - protein, 34 aa, Artificial Sequence; identical to SEQ ID NO: 9035
  GFR-binding peptide
  MOD_RES (1)..(2): Xaa is C or S
  MOD_RES (16)..(17)..(18)..(19)..(20): Xaa is A or G
  MOD_RES (21)..(22)..(23)..(24): Xaa is A or G or is absent

SEQ ID NO: 67941 - protein, 42 aa, Artificial Sequence
  GFR-binding peptide
  MOD_RES (5)..(6)..(40)..(42): Xaa is C or S
  MOD_RES (20)..(21)..(22)..(23)..(24): Xaa is A or G
  MOD_RES (25)..(26)..(27)..(28): Xaa is A or G or is absent
IPEPXXVPEKMSATSILYYXXXXXXXXXLRKHRNMTVESXAX

SEQ ID NO: 67942 - protein, 40 aa, Artificial Sequence; identical to SEQ ID NO: 30422
  GFR-binding peptide
  MOD_RES (6)..(7)..(40): Xaa is C or S
  MOD_RES (21)..(22)..(23)..(24)..(25): Xaa is A or G
  MOD_RES (26)..(27)..(28)..(29): Xaa is A or G or is absent

SEQ ID NO: 67943 - protein, 33 aa, Artificial Sequence
  GFR-binding peptide
  MOD_RES (1)..(2): Xaa is C or S
XXVPTRLEPISILYLDSANNVVKFKYEDMVVES

SEQ ID NO: 67944 - protein, 37 aa, Artificial Sequence
  GFR-binding peptide
  MOD_RES (4)..(5)..(36): Xaa is C or S
AAPXXVPQALSPINILYFVGRKPKVYGKIPMIVRSXK

SEQ ID NO: 67945 - protein, 39 aa, Artificial Sequence
  GFR-binding peptide
  MOD_RES (2)..(3)..(36)..(38): Xaa is C or S
  MOD_RES (17)..(18)..(19)..(20)..(21): Xaa is A or G
  MOD_RES (22)..(23)..(24)..(25): Xaa is A or G or is absent
PXXVPQDLSPINILYFXXXXXXXXXYGKIPMVVKSXKXS

SEQ ID NO: 67946 - protein, 35 aa, Artificial Sequence; identical to SEQ ID NO: 30427
  GFR-binding peptide
  MOD_RES (4)..(5): Xaa is C or S

SEQ ID NO: 67947 - protein, 38 aa, Artificial Sequence; identical to SEQ ID NO: 32520
  GFR-binding peptide
  MOD_RES (3)..(4)..(36)..(38): Xaa is C or S

SEQ ID NO: 67948 - protein, 39 aa, Artificial Sequence
  GFR-binding peptide
  MOD_RES (3)..(4)..(37)..(39): Xaa is C or S
  MOD_RES (18)..(19)..(20)..(21)..(22): Xaa is A or G
  MOD_RES (23)..(24)..(25)..(26): Xaa is A or G or is absent
SPXXVSQDLSPINILYFXXXXXXXXXYGKIPMIVKSXKX

SEQ ID NO: 67949 - protein, 34 aa, Artificial Sequence
  GFR-binding peptide
  MOD_RES (1)..(32)..(34): Xaa is C or S
XAPVKTSATSMLYYDNGRVLLLRKHRMIVEEXGX

SEQ ID NO: 67950 - protein, 31 aa, Artificial Sequence
  GFR-binding peptide
VPTKLSATSILYYDKGVVTYLRKHRGMAVSE

SEQ ID NO: 67951 - protein, 43 aa, Artificial Sequence; identical to SEQ ID NO: 30429
  GFR-binding peptide
  MOD_RES (5)..(6)..(40)..(42): Xaa is C or S
  MOD_RES (20)..(21)..(22)..(23)..(24): Xaa is A or G
  MOD_RES (25)..(26)..(27)..(28): Xaa is A or G or is absent

SEQ ID NO: 67952 - protein, 34 aa, Artificial Sequence; identical to SEQ ID NO: 9045
  GFR-binding peptide
  MOD_RES (34)..(34): Xaa is C or S
  MOD_RES (14)..(15)..(16)..(17)..(18): Xaa is A or G
  MOD_RES (19)..(20)..(21)..(22): Xaa is A or G or is absent

SEQ ID NO: 67953 - protein, 32 aa, Artificial Sequence; identical to SEQ ID NO: 9046
  GFR-binding peptide
  MOD_RES (14)..(15)..(16)..(17)..(18): Xaa is A or G
  MOD_RES (19)..(20)..(21)..(22): Xaa is A or G or is absent

SEQ ID NO: 67954 - protein, 39 aa, Artificial Sequence
  GFR-binding peptide
  MOD_RES (3)..(4)..(36)..(38): Xaa is C or S
EPXXVPEKMSPISILYKDENKNVVLKYHYNMTVESXAXR

SEQ ID NO: 67955 - protein, 40 aa, Artificial Sequence
  GFR-binding peptide
  MOD_RES (3)..(4)..(38)..(40): Xaa is C or S
  MOD_RES (18)..(19)..(20)..(21)..(22): Xaa is A or G
  MOD_RES (23)..(24)..(25)..(26): Xaa is A or G or is absent
GPXXTPTKMSPISMLYKXXXXXXXXXLKYHYGMVVDRXGX

SEQ ID NO: 67956 - protein, 35 aa, Artificial Sequence; identical to SEQ ID NO: 9048
  GFR-binding peptide
  MOD_RES (1)..(34): Xaa is C or S
  MOD_RES (15)..(16)..(17)..(18)..(19): Xaa is A or G
  MOD_RES (20)..(21)..(22)..(23): Xaa is A or G or is absent

SEQ ID NO: 67957 - protein, 40 aa, Artificial Sequence; identical to SEQ ID NO: 9049
  GFR-binding peptide
  MOD_RES (5)..(6)..(38)..(40): Xaa is C or S

SEQ ID NO: 67958 - protein, 37 aa, Artificial Sequence; identical to SEQ ID NO: 9052
  GFR-binding peptide
  MOD_RES (2)..(3)..(37): Xaa is C or S
  MOD_RES (17)..(18)..(19)..(20)..(21): Xaa is A or G
  MOD_RES (22)..(23)..(24)..(25): Xaa is A or G or is absent

SEQ ID NO: 67959 - protein, 39 aa, Artificial Sequence; identical to SEQ ID NO: 30436
  GFR-binding peptide
  MOD_RES (3)..(4)..(36)..(38): Xaa is C or S

SEQ ID NO: 67960 - protein, 42 aa, Artificial Sequence; identical to SEQ ID NO: 16356
  GFR-binding peptide
  MOD_RES (6)..(7)..(39)..(41): Xaa is C or S

SEQ ID NO: 67961 - protein, 43 aa, Artificial Sequence; identical to SEQ ID NO: 32531
  GFR-binding peptide
  MOD_RES (5)..(6)..(40)..(42): Xaa is C or S
  MOD_RES (20)..(21)..(22)..(23)..(24): Xaa is A or G
  MOD_RES (25)..(26)..(27)..(28): Xaa is A or G or is absent

SEQ ID NO: 67962 - protein, 41 aa, Artificial Sequence; identical to SEQ ID NO: 9059
  GFR-binding peptide
  MOD_RES (4)..(5)..(40): Xaa is C or S
  MOD_RES (19)..(20)..(21)..(22)..(23): Xaa is A or G
  MOD_RES (24)..(25)..(26)..(27): Xaa is A or G or is absent

SEQ ID NO: 67963 - protein, 40 aa, Artificial Sequence; identical to SEQ ID NO: 9060
  GFR-binding peptide
  MOD_RES (5)..(6)..(40): Xaa is C or S
  MOD_RES (20)..(21)..(22)..(23)..(24): Xaa is A or G
  MOD_RES (25)..(26)..(27)..(28): Xaa is A or G or is absent

SEQ ID NO: 67964 - protein, 33 aa, Artificial Sequence; identical to SEQ ID NO: 30438
  GFR-binding peptide
  MOD_RES (32)..(32): Xaa is C or S

SEQ ID NO: 67965 - protein, 37 aa, Artificial Sequence; identical to SEQ ID NO: 9063
  GFR-binding peptide
  MOD_RES (2)..(3)..(34)..(36): Xaa is C or S

SEQ ID NO: 67966 - protein, 37 aa, Artificial Sequence; identical to SEQ ID NO: 30442
  GFR-binding peptide
  MOD_RES (1)..(2)..(34)..(36): Xaa is C or S

SEQ ID NO: 67967 - protein, 44 aa, Artificial Sequence; identical to SEQ ID NO: 30444
  GFR-binding peptide
  MOD_RES (6)..(7)..(41)..(43): Xaa is C or S
  MOD_RES (21)..(22)..(23)..(24)..(25): Xaa is A or G
  MOD_RES (26)..(27)..(28)..(29): Xaa is A or G or is absent

SEQ ID NO: 67968 - protein, 33 aa, Artificial Sequence; identical to SEQ ID NO: 32543
  GFR-binding peptide
  MOD_RES (33)..(33): Xaa is C or S
  MOD_RES (14)..(15)..(16)..(17)..(18): Xaa is A or G
  MOD_RES (19)..(20)..(21)..(22): Xaa is A or G or is absent

SEQ ID NO: 67969 - protein, 41 aa, Artificial Sequence
  GFR-binding peptide
  MOD_RES (6)..(7)..(40): Xaa is C or S
  MOD_RES (21)..(22)..(23)..(24)..(25): Xaa is A or G
  MOD_RES (26)..(27)..(28)..(29): Xaa is A or G or is absent
RVPSTXXAPVKTSPISMLYKXXXXXXXXXLKYHYMIVEEXG

SEQ ID NO: 67970 - protein, 34 aa, Artificial Sequence
  GFR-binding peptide
  MOD_RES (1)..(1): Xaa is C or S
  MOD_RES (15)..(16)..(17)..(18)..(19): Xaa is A or G
  MOD_RES (20)..(21)..(22)..(23): Xaa is A or G or is absent
XVPTKLSATSILYYXXXXXXXXXLRKHRGMAVSE

SEQ ID NO: 67971 - protein, 37 aa, Artificial Sequence
  GFR-binding peptide
  MOD_RES (34)..(36): Xaa is C or S
  MOD_RES (14)..(15)..(16)..(17)..(18): Xaa is A or G
  MOD_RES (19)..(20)..(21)..(22): Xaa is A or G or is absent
VPEKMEPISILYLXXXXXXXXXKFKYENMTVESXAXR

SEQ ID NO: 67972 - protein, 36 aa, Artificial Sequence; identical to SEQ ID NO: 32551
  GFR-binding peptide
  MOD_RES (3)..(4)..(36): Xaa is C or S

SEQ ID NO: 67973 - protein, 39 aa, Artificial Sequence; identical to SEQ ID NO: 9070
  GFR-binding peptide
  MOD_RES (3)..(4)..(37)..(39): Xaa is C or S
  MOD_RES (18)..(19)..(20)..(21)..(22): Xaa is A or G
  MOD_RES (23)..(24)..(25)..(26): Xaa is A or G or is absent

SEQ ID NO: 67974 - protein, 38 aa, Artificial Sequence; identical to SEQ ID NO: 9071
  GFR-binding peptide
  MOD_RES (3)..(4)..(37): Xaa is C or S
  MOD_RES (18)..(19)..(20)..(21)..(22): Xaa is A or G
  MOD_RES (23)..(24)..(25)..(26): Xaa is A or G or is absent

SEQ ID NO: 67975 - protein, 38 aa, Artificial Sequence
  GFR-binding peptide
  MOD_RES (6)..(7): Xaa is C or S
GSAGPXXTPTKMEPISMLYLNDKQQIIKFKYEGMVVDR

SEQ ID NO: 67976 - protein, 34 aa, Artificial Sequence; identical to SEQ ID NO: 30451
  GFR-binding peptide
  MOD_RES (1)..(2)..(33): Xaa is C or S

SEQ ID NO: 67977 - protein, 32 aa, Artificial Sequence; identical to SEQ ID NO: 32557
  GFR-binding peptide
  MOD_RES (1)..(2): Xaa is C or S

SEQ ID NO: 67978 - protein, 40 aa, Artificial Sequence; identical to SEQ ID NO: 30454
  GFR-binding peptide
  MOD_RES (2)..(3)..(37)..(39): Xaa is C or S
  MOD_RES (17)..(18)..(19)..(20)..(21): Xaa is A or G
  MOD_RES (22)..(23)..(24)..(25): Xaa is A or G or is absent

SEQ ID NO: 67979 - protein, 38 aa, Artificial Sequence; identical to SEQ ID NO: 9074
  GFR-binding peptide
  MOD_RES (2)..(3)..(37): Xaa is C or S
  MOD_RES (17)..(18)..(19)..(20)..(21): Xaa is A or G
  MOD_RES (22)..(23)..(24)..(25): Xaa is A or G or is absent

SEQ ID NO: 67980 - protein, 42 aa, Artificial Sequence; identical to SEQ ID NO: 30456
  GFR-binding peptide
  MOD_RES (6)..(7)..(41): Xaa is C or S
  MOD_RES (21)..(22)..(23)..(24)..(25): Xaa is A or G
  MOD_RES (26)..(27)..(28)..(29): Xaa is A or G or is absent

SEQ ID NO: 67981 - protein, 35 aa, Artificial Sequence; identical to SEQ ID NO: 30457
  GFR-binding peptide
  MOD_RES (2)..(3): Xaa is C or S
  MOD_RES (17)..(18)..(19)..(20)..(21): Xaa is A or G
  MOD_RES (22)..(23)..(24)..(25): Xaa is A or G or is absent

SEQ ID NO: 67982 - protein, 36 aa, Artificial Sequence; identical to SEQ ID NO: 9076
  GFR-binding peptide
  MOD_RES (1)..(34)..(36): Xaa is C or S
  MOD_RES (15)..(16)..(17)..(18)..(19): Xaa is A or G
  MOD_RES (20)..(21)..(22)..(23): Xaa is A or G or is absent

SEQ ID NO: 67983 - protein, 35 aa, Artificial Sequence
  GFR-binding peptide
  MOD_RES (1)..(34): Xaa is C or S
  MOD_RES (15)..(16)..(17)..(18)..(19): Xaa is A or G
  MOD_RES (20)..(21)..(22)..(23): Xaa is A or G or is absent
XAPVKTEPISMLYLXXXXXXXXXKFKYEMIVEEXG

SEQ ID NO: 67984 - protein, 39 aa, Artificial Sequence; identical to SEQ ID NO: 9077
  GFR-binding peptide
  MOD_RES (6)..(7): Xaa is C or S
  MOD_RES (21)..(22)..(23)..(24)..(25): Xaa is A or G
  MOD_RES (26)..(27)..(28)..(29): Xaa is A or G or is absent

SEQ ID NO: 67985 - protein, 34 aa, Artificial Sequence; identical to SEQ ID NO: 32562
  GFR-binding peptide
  MOD_RES (31)..(33): Xaa is C or S

SEQ ID NO: 67986 - protein, 35 aa, Artificial Sequence; identical to SEQ ID NO: 30461
  GFR-binding peptide
  MOD_RES (1)..(32)..(34): Xaa is C or S

SEQ ID NO: 67987 - protein, 38 aa, Artificial Sequence; identical to SEQ ID NO: 9082
  GFR-binding peptide
  MOD_RES (1)..(2)..(35)..(37): Xaa is C or S

SEQ ID NO: 67988 - protein, 35 aa, Artificial Sequence
  GFR-binding peptide
  MOD_RES (1)..(34): Xaa is C or S
  MOD_RES (15)..(16)..(17)..(18)..(19): Xaa is A or G
  MOD_RES (20)..(21)..(22)..(23): Xaa is A or G or is absent
XVSQDLSPINILYFXXXXXXXXXYGKIPMIVKSXK

SEQ ID NO: 67989 - protein, 36 aa, Artificial Sequence; identical to SEQ ID NO: 9086
  GFR-binding peptide
  MOD_RES (2)..(3): Xaa is C or S
  MOD_RES (17)..(18)..(19)..(20)..(21): Xaa is A or G
  MOD_RES (22)..(23)..(24)..(25): Xaa is A or G or is absent

SEQ ID NO: 67990 - protein, 34 aa, Artificial Sequence; identical to SEQ ID NO: 9087
  GFR-binding peptide
  MOD_RES (2)..(3)..(34): Xaa is C or S

SEQ ID NO: 67991 - protein, 40 aa, Artificial Sequence; identical to SEQ ID NO: 30465
  GFR-binding peptide
  MOD_RES (5)..(6)..(39): Xaa is C or S

SEQ ID NO: 67992 - protein, 43 aa, Artificial Sequence; identical to SEQ ID NO: 30466
  GFR-binding peptide
  MOD_RES (6)..(7)..(41)..(43): Xaa is C or S
  MOD_RES (21)..(22)..(23)..(24)..(25): Xaa is A or G
  MOD_RES (26)..(27)..(28)..(29): Xaa is A or G or is absent

SEQ ID NO: 67993 - protein, 44 aa, Artificial Sequence; identical to SEQ ID NO: 9089
  GFR-binding peptide
  MOD_RES (6)..(7)..(42)..(44): Xaa is C or S
  MOD_RES (21)..(22)..(23)..(24)..(25): Xaa is A or G
  MOD_RES (26)..(27)..(28)..(29): Xaa is A or G or is absent

SEQ ID NO: 67994 - protein, 40 aa, Artificial Sequence
  GFR-binding peptide
  MOD_RES (2)..(3)..(37)..(39): Xaa is C or S
  MOD_RES (17)..(18)..(19)..(20)..(21): Xaa is A or G
  MOD_RES (22)..(23)..(24)..(25): Xaa is A or G or is absent
PXXVPEKMSATSILYYXXXXXXXXXLRKHRNMTVESXAXR

SEQ ID NO: 67995 - protein, 39 aa, Artificial Sequence; identical to SEQ ID NO: 32571
  GFR-binding peptide
  MOD_RES (3)..(4)..(38): Xaa is C or S
  MOD_RES (18)..(19)..(20)..(21)..(22): Xaa is A or G
  MOD_RES (23)..(24)..(25)..(26): Xaa is A or G or is absent

SEQ ID NO: 67996 - protein, 34 aa, Artificial Sequence; identical to SEQ ID NO: 57478
  GFR-binding peptide
  MOD_RES (1)..(2): Xaa is C or S
  MOD_RES (16)..(17)..(18)..(19)..(20): Xaa is A or G
  MOD_RES (21)..(22)..(23)..(24): Xaa is A or G or is absent

SEQ ID NO: 67997 - protein, 38 aa, Artificial Sequence; identical to SEQ ID NO: 9092
  GFR-binding peptide
  MOD_RES (2)..(3)..(37): Xaa is C or S
  MOD_RES (17)..(18)..(19)..(20)..(21): Xaa is A or G
  MOD_RES (22)..(23)..(24)..(25): Xaa is A or G or is absent

SEQ ID NO: 67998 - protein, 33 aa, Artificial Sequence; identical to SEQ ID NO: 9093
  GFR-binding peptide
  MOD_RES (1)..(33): Xaa is C or S

SEQ ID NO: 67999 - protein, 33 aa, Artificial Sequence; identical to SEQ ID NO: 9095
  GFR-binding peptide
  MOD_RES (1)..(1): Xaa is C or S
  MOD_RES (15)..(16)..(17)..(18)..(19): Xaa is A or G
  MOD_RES (20)..(21)..(22)..(23): Xaa is A or G or is absent

SEQ ID NO: 68000 - protein, 35 aa, Artificial Sequence; identical to SEQ ID NO: 32580
  GFR-binding peptide
  MOD_RES (1)..(2)..(34): Xaa is C or S

SEQ ID NO: 68001 - protein, 38 aa, Artificial Sequence
  GFR-binding peptide
  MOD_RES (5)..(6): Xaa is C or S
  MOD_RES (20)..(21)..(22)..(23)..(24): Xaa is A or G
  MOD_RES (25)..(26)..(27)..(28): Xaa is A or G or is absent
VPSTXXAPVKTSPISMLYKXXXXXXXXXLKYHYMIVEE

SEQ ID NO: 68002 - protein, 41 aa, Artificial Sequence; identical to SEQ ID NO: 32581
  GFR-binding peptide
  MOD_RES (3)..(4)..(38)..(40): Xaa is C or S
  MOD_RES (18)..(19)..(20)..(21)..(22): Xaa is A or G
  MOD_RES (23)..(24)..(25)..(26): Xaa is A or G or is absent

SEQ ID NO: 68003 - protein, 35 aa, Artificial Sequence
  GFR-binding peptide
  MOD_RES (2)..(3): Xaa is C or S
  MOD_RES (17)..(18)..(19)..(20)..(21): Xaa is A or G
  MOD_RES (22)..(23)..(24)..(25): Xaa is A or G or is absent
PXXVPEKMNAISILYFXXXXXXXXXLKKYRNMTVE

SEQ ID NO: 68004 - protein, 40 aa, Artificial Sequence; identical to SEQ ID NO: 9102
  GFR-binding peptide
  MOD_RES (6)..(7)..(40): Xaa is C or S
  MOD_RES (21)..(22)..(23)..(24)..(25): Xaa is A or G
  MOD_RES (26)..(27)..(28)..(29): Xaa is A or G or is absent

SEQ ID NO: 68005 - protein, 35 aa, Artificial Sequence; identical to SEQ ID NO: 9104
  GFR-binding peptide
  MOD_RES (33)..(35): Xaa is C or S
  MOD_RES (14)..(15)..(16)..(17)..(18): Xaa is A or G
  MOD_RES (19)..(20)..(21)..(22): Xaa is A or G or is absent

SEQ ID NO: 68006 - protein, 34 aa, Artificial Sequence; identical to SEQ ID NO: 9105
  GFR-binding peptide
  MOD_RES (1)..(33): Xaa is C or S

SEQ ID NO: 68007 - protein, 33 aa, Artificial Sequence; identical to SEQ ID NO: 9106
  GFR-binding peptide
  MOD_RES (1)..(2)..(33): Xaa is C or S

SEQ ID NO: 68008 - protein, 36 aa, Artificial Sequence; identical to SEQ ID NO: 32591
  GFR-binding peptide
  MOD_RES (1)..(33)..(35): Xaa is C or S

SEQ ID NO: 68009 - protein, 34 aa, Artificial Sequence
  GFR-binding peptide
  MOD_RES (33)..(33): Xaa is C or S
  MOD_RES (14)..(15)..(16)..(17)..(18): Xaa is A or G
  MOD_RES (19)..(20)..(21)..(22): Xaa is A or G or is absent
VSQDLSPINILYFXXXXXXXXXYGKIPMIVKSXK

SEQ ID NO: 68010 - protein, 39 aa, Artificial Sequence; identical to SEQ ID NO: 9109
  GFR-binding peptide
  MOD_RES (1)..(2)..(36)..(38): Xaa is C or S
  MOD_RES (16)..(17)..(18)..(19)..(20): Xaa is A or G
  MOD_RES (21)..(22)..(23)..(24): Xaa is A or G or is absent

SEQ ID NO: 68011 - protein, 39 aa, Artificial Sequence; identical to SEQ ID NO: 30480
  GFR-binding peptide
  MOD_RES (5)..(6)..(38): Xaa is C or S

SEQ ID NO: 68012 - protein, 40 aa, Artificial Sequence; identical to SEQ ID NO: 9112
  GFR-binding peptide
  MOD_RES (6)..(7): Xaa is C or S
  MOD_RES (21)..(22)..(23)..(24)..(25): Xaa is A or G
  MOD_RES (26)..(27)..(28)..(29): Xaa is A or G or is absent

SEQ ID NO: 68013 - protein, 30 aa, Artificial Sequence
  GFR-binding peptide
APVKTEPISMLYLDNGRVLLKFKYEMIVEE

SEQ ID NO: 68014 - protein, 32 aa, Artificial Sequence
  GFR-binding peptide
  MOD_RES (1)..(1): Xaa is C or S
XVPEKMSATSILYYDENKNVVLRKHRNMTVES

SEQ ID NO: 68015 - protein, 38 aa, Artificial Sequence; identical to SEQ ID NO: 9115
  GFR-binding peptide
  MOD_RES (2)..(36)..(38): Xaa is C or S
  MOD_RES (16)..(17)..(18)..(19)..(20): Xaa is A or G
  MOD_RES (21)..(22)..(23)..(24): Xaa is A or G or is absent

SEQ ID NO: 68016 - protein, 40 aa, Artificial Sequence
  GFR-binding peptide
  MOD_RES (3)..(4)..(37)..(39): Xaa is C or S
  MOD_RES (18)..(19)..(20)..(21)..(22): Xaa is A or G
  MOD_RES (23)..(24)..(25)..(26): Xaa is A or G or is absent
STXXAPVKTSATSMLYYXXXXXXXXXLRKHRMIVEEXGXL

SEQ ID NO: 68017 - protein, 37 aa, Artificial Sequence; identical to SEQ ID NO: 9116
  GFR-binding peptide
  MOD_RES (3)..(4)..(37): Xaa is C or S
  MOD_RES (18)..(19)..(20)..(21)..(22): Xaa is A or G
  MOD_RES (23)..(24)..(25)..(26): Xaa is A or G or is absent

SEQ ID NO: 68018 - protein, 35 aa, Artificial Sequence
  GFR-binding peptide
  MOD_RES (4)..(5): Xaa is C or S
PSTXXAPVKTEPISMLYLDNGRVLLKFKYEMIVEE

SEQ ID NO: 68019 - protein, 43 aa, Artificial Sequence; identical to SEQ ID NO: 9120
  GFR-binding peptide
  MOD_RES (6)..(7)..(40)..(42): Xaa is C or S
  MOD_RES (21)..(22)..(23)..(24)..(25): Xaa is A or G
  MOD_RES (26)..(27)..(28)..(29): Xaa is A or G or is absent

SEQ ID NO: 68020 - protein, 41 aa, Artificial Sequence; identical to SEQ ID NO: 9121
  GFR-binding peptide
  MOD_RES (6)..(7)..(40): Xaa is C or S
  MOD_RES (21)..(22)..(23)..(24)..(25): Xaa is A or G
  MOD_RES (26)..(27)..(28)..(29): Xaa is A or G or is absent

SEQ ID NO: 68021 - protein, 31 aa, Artificial Sequence; identical to SEQ ID NO: 9122
  GFR-binding peptide
  MOD_RES (1)..(1): Xaa is C or S

SEQ ID NO: 68022 - protein, 39 aa, Artificial Sequence
  GFR-binding peptide
  MOD_RES (6)..(7): Xaa is C or S
  MOD_RES (21)..(22)..(23)..(24)..(25): Xaa is A or G
  MOD_RES (26)..(27)..(28)..(29): Xaa is A or G or is absent
STPPTXXVPTRLSATSILYYXXXXXXXXXLRKHRDMVVE

SEQ ID NO: 68023 - protein, 38 aa, Artificial Sequence; identical to SEQ ID NO: 32605
  GFR-binding peptide
  MOD_RES (4)..(5)..(37): Xaa is C or S

SEQ ID NO: 68024 - protein, 38 aa, Artificial Sequence; identical to SEQ ID NO: 9124
  GFR-binding peptide
  MOD_RES (5)..(6): Xaa is C or S
  MOD_RES (20)..(21)..(22)..(23)..(24): Xaa is A or G
  MOD_RES (25)..(26)..(27)..(28): Xaa is A or G or is absent

SEQ ID NO: 68025 - protein, 34 aa, Artificial Sequence; identical to SEQ ID NO: 30496
  GFR-binding peptide
  MOD_RES (1)..(2): Xaa is C or S
  MOD_RES (16)..(17)..(18)..(19)..(20): Xaa is A or G
  MOD_RES (21)..(22)..(23)..(24): Xaa is A or G or is absent

SEQ ID NO: 68026 - protein, 43 aa, Artificial Sequence; identical to SEQ ID NO: 9126
  GFR-binding peptide
  MOD_RES (6)..(7)..(41)..(43): Xaa is C or S
  MOD_RES (21)..(22)..(23)..(24)..(25): Xaa is A or G
  MOD_RES (26)..(27)..(28)..(29): Xaa is A or G or is absent

SEQ ID NO: 68027 - protein, 36 aa, Artificial Sequence; identical to SEQ ID NO: 9129
  GFR-binding peptide
  MOD_RES (4)..(36): Xaa is C or S

SEQ ID NO: 68028 - protein, 44 aa, Artificial Sequence; identical to SEQ ID NO: 9131
  GFR-binding peptide
  MOD_RES (6)..(7)..(41)..(43): Xaa is C or S
  MOD_RES (21)..(22)..(23)..(24)..(25): Xaa is A or G
  MOD_RES (26)..(27)..(28)..(29): Xaa is A or G or is absent

SEQ ID NO: 68029 - protein, 39 aa, Artificial Sequence; identical to SEQ ID NO: 30500
  GFR-binding peptide
  MOD_RES (2)..(3)..(37)..(39): Xaa is C or S
  MOD_RES (17)..(18)..(19)..(20)..(21): Xaa is A or G
  MOD_RES (22)..(23)..(24)..(25): Xaa is A or G or is absent

SEQ ID NO: 68030 - protein, 40 aa, Artificial Sequence; identical to SEQ ID NO: 32613
  GFR-binding peptide
  MOD_RES (6)..(7)..(39): Xaa is C or S

SEQ ID NO: 68031 - protein, 35 aa, Artificial Sequence
  GFR-binding peptide
  MOD_RES (33)..(35): Xaa is C or S
  MOD_RES (14)..(15)..(16)..(17)..(18): Xaa is A or G
  MOD_RES (19)..(20)..(21)..(22): Xaa is A or G or is absent
VSQDLSPINILYFXXXXXXXXXYGKIPMIVKSXKX

SEQ ID NO: 68032 - protein, 40 aa, Artificial Sequence; identical to SEQ ID NO: 32616
  GFR-binding peptide
  MOD_RES (1)..(2)..(37)..(39): Xaa is C or S
  MOD_RES (16)..(17)..(18)..(19)..(20): Xaa is A or G
  MOD_RES (21)..(22)..(23)..(24): Xaa is A or G or is absent

SEQ ID NO: 68033 - protein, 40 aa, Artificial Sequence; identical to SEQ ID NO: 30501
  GFR-binding peptide
  MOD_RES (4)..(5)..(39): Xaa is C or S
  MOD_RES (19)..(20)..(21)..(22)..(23): Xaa is A or G
  MOD_RES (24)..(25)..(26)..(27): Xaa is A or G or is absent

SEQ ID NO: 68034 - protein, 36 aa, Artificial Sequence
  GFR-binding peptide
  MOD_RES (1)..(2)..(36): Xaa is C or S
  MOD_RES (16)..(17)..(18)..(19)..(20): Xaa is A or G
  MOD_RES (21)..(22)..(23)..(24): Xaa is A or G or is absent
XXVPTKLSATSILYYXXXXXXXXXLRKHRGMAVSEX

SEQ ID NO: 68035 - protein, 34 aa, Artificial Sequence; identical to SEQ ID NO: 9137
  GFR-binding peptide
  MOD_RES (1)..(33): Xaa is C or S

SEQ ID NO: 68036 - protein, 36 aa, Artificial Sequence; identical to SEQ ID NO: 30504
  GFR-binding peptide
  MOD_RES (5)..(6): Xaa is C or S

SEQ ID NO: 68037 - protein, 36 aa, Artificial Sequence; identical to SEQ ID NO: 9140
  GFR-binding peptide
  MOD_RES (1)..(2)..(33)..(35): Xaa is C or S

SEQ ID NO: 68038 - protein, 43 aa, Artificial Sequence; identical to SEQ ID NO: 9141
  GFR-binding peptide
  MOD_RES (5)..(6)..(40)..(42): Xaa is C or S
  MOD_RES (20)..(21)..(22)..(23)..(24): Xaa is A or G
  MOD_RES (25)..(26)..(27)..(28): Xaa is A or G or is absent

SEQ ID NO: 68039 - protein, 38 aa, Artificial Sequence; identical to SEQ ID NO: 30507
  GFR-binding peptide
  MOD_RES (5)..(6)..(38): Xaa is C or S

SEQ ID NO: 68040 - protein, 37 aa, Artificial Sequence; identical to SEQ ID NO: 32622
  GFR-binding peptide
  MOD_RES (4)..(5): Xaa is C or S

SEQ ID NO: 68041 - protein, 43 aa, Artificial Sequence
  GFR-binding peptide
  MOD_RES (5)..(6)..(40)..(42): Xaa is C or S
  MOD_RES (20)..(21)..(22)..(23)..(24): Xaa is A or G
  MOD_RES (25)..(26)..(27)..(28): Xaa is A or G or is absent
APASXXVPARLSATSILYYXXXXXXXXXLRKHRDMVVEAXGXR

SEQ ID NO: 68042 - protein, 36 aa, Artificial Sequence; identical to SEQ ID NO: 9145
  GFR-binding peptide
  MOD_RES (3)..(4): Xaa is C or S
  MOD_RES (18)..(19)..(20)..(21)..(22): Xaa is A or G
  MOD_RES (23)..(24)..(25)..(26): Xaa is A or G or is absent

SEQ ID NO: 68043 - protein, 33 aa, Artificial Sequence
  GFR-binding peptide
  MOD_RES (2)..(3): Xaa is C or S
PXXVPQALSPINILYFVGRKPKVYGKIPMIVRS

SEQ ID NO: 68044 - protein, 34 aa, Artificial Sequence; identical to SEQ ID NO: 32624
  GFR-binding peptide
  MOD_RES (1)..(1): Xaa is C or S
  MOD_RES (15)..(16)..(17)..(18)..(19): Xaa is A or G
  MOD_RES (20)..(21)..(22)..(23): Xaa is A or G or is absent

SEQ ID NO: 68045 - protein, 34 aa, Artificial Sequence; identical to SEQ ID NO: 9147
  GFR-binding peptide
  MOD_RES (32)..(34): Xaa is C or S

SEQ ID NO: 68046 - protein, 34 aa, Artificial Sequence; identical to SEQ ID NO: 30510
  GFR-binding peptide
  MOD_RES (32)..(34): Xaa is C or S

SEQ ID NO: 68047 - protein, 30 aa, Artificial Sequence; identical to SEQ ID NO: 32633
  GFR-binding peptide

SEQ ID NO: 68048 - protein, 37 aa, Artificial Sequence; identical to SEQ ID NO: 32635
  GFR-binding peptide
  MOD_RES (3)..(4)..(37): Xaa is C or S

SEQ ID NO: 68049 - protein, 37 aa, Artificial Sequence
  GFR-binding peptide
  MOD_RES (4)..(5)..(37): Xaa is C or S
PEPXXVPEKMEPISILYLDENKNVVKFKYENMTVESX

SEQ ID NO: 68050 - protein, 42 aa, Artificial Sequence
  GFR-binding peptide
  MOD_RES (6)..(7)..(39)..(41): Xaa is C or S
GIPEPXXVPEKMSPINILYFDENKNVVYGKIPNMTVESXAXR

SEQ ID NO: 68051 - protein, 43 aa, Artificial Sequence; identical to SEQ ID NO: 32640
  GFR-binding peptide
  MOD_RES (5)..(6)..(41)..(43): Xaa is C or S
  MOD_RES (20)..(21)..(22)..(23)..(24): Xaa is A or G
  MOD_RES (25)..(26)..(27)..(28): Xaa is A or G or is absent

SEQ ID NO: 68052 - protein, 37 aa, Artificial Sequence; identical to SEQ ID NO: 9158
  GFR-binding peptide
  MOD_RES (4)..(5)..(37): Xaa is C or S

SEQ ID NO: 68053 - protein, 37 aa, Artificial Sequence; identical to SEQ ID NO: 30523
  GFR-binding peptide
  MOD_RES (4)..(4): Xaa is C or S
  MOD_RES (18)..(19)..(20)..(21)..(22): Xaa is A or G
  MOD_RES (23)..(24)..(25)..(26): Xaa is A or G or is absent

SEQ ID NO: 68054 - protein, 36 aa, Artificial Sequence; identical to SEQ ID NO: 30526
  GFR-binding peptide
  MOD_RES (3)..(4)..(36): Xaa is C or S

SEQ ID NO: 68055 - protein, 38 aa, Artificial Sequence; identical to SEQ ID NO: 30527
  GFR-binding peptide
  MOD_RES (3)..(4): Xaa is C or S
  MOD_RES (18)..(19)..(20)..(21)..(22): Xaa is A or G
  MOD_RES (23)..(24)..(25)..(26): Xaa is A or G or is absent

SEQ ID NO: 68056 - protein, 35 aa, Artificial Sequence; identical to SEQ ID NO: 9166
  GFR-binding peptide
  MOD_RES (32)..(34): Xaa is C or S

SEQ ID NO: 68057 - protein, 38 aa, Artificial Sequence; identical to SEQ ID NO: 9167
  GFR-binding peptide
  MOD_RES (5)..(6): Xaa is C or S
  MOD_RES (20)..(21)..(22)..(23)..(24): Xaa is A or G
  MOD_RES (25)..(26)..(27)..(28): Xaa is A or G or is absent

SEQ ID NO: 68058 - protein, 34 aa, Artificial Sequence; identical to SEQ ID NO: 9169
  GFR-binding peptide
  MOD_RES (3)..(3): Xaa is C or S

SEQ ID NO: 68059 - protein, 42 aa, Artificial Sequence; identical to SEQ ID NO: 9170
  GFR-binding peptide
  MOD_RES (6)..(7)..(41): Xaa is C or S
  MOD_RES (21)..(22)..(23)..(24)..(25): Xaa is A or G
  MOD_RES (26)..(27)..(28)..(29): Xaa is A or G or is absent

SEQ ID NO: 68060 - protein, 33 aa, Artificial Sequence; identical to SEQ ID NO: 30534
  GFR-binding peptide
  MOD_RES (1)..(33): Xaa is C or S

SEQ ID NO: 68061 - protein, 32 aa, Artificial Sequence; identical to SEQ ID NO: 9171
  GFR-binding peptide
  MOD_RES (1)..(2): Xaa is C or S

SEQ ID NO: 68062 - protein, 41 aa, Artificial Sequence
  GFR-binding peptide
  MOD_RES (3)..(4)..(38)..(40): Xaa is C or S
  MOD_RES (18)..(19)..(20)..(21)..(22): Xaa is A or G
  MOD_RES (23)..(24)..(25)..(26): Xaa is A or G or is absent
EPXXVPEKMSPISILYKXXXXXXXXXLKYHYNMTVESXAXR

SEQ ID NO: 68063 - protein, 37 aa, Artificial Sequence
  GFR-binding peptide
  MOD_RES (4)..(5): Xaa is C or S
  MOD_RES (19)..(20)..(21)..(22)..(23): Xaa is A or G
  MOD_RES (24)..(25)..(26)..(27): Xaa is A or G or is absent
ASPXXVPQDLSPINILYFXXXXXXXXXYGKIPMVVKS

SEQ ID NO: 68064 - protein, 43 aa, Artificial Sequence; identical to SEQ ID NO: 30537
  GFR-binding peptide
  MOD_RES (5)..(6)..(40)..(42): Xaa is C or S
  MOD_RES (20)..(21)..(22)..(23)..(24): Xaa is A or G
  MOD_RES (25)..(26)..(27)..(28): Xaa is A or G or is absent

SEQ ID NO: 68065 - protein, 37 aa, Artificial Sequence; identical to SEQ ID NO: 9172
  GFR-binding peptide
  MOD_RES (2)..(3)..(37): Xaa is C or S
  MOD_RES (17)..(18)..(19)..(20)..(21): Xaa is A or G
  MOD_RES (22)..(23)..(24)..(25): Xaa is A or G or is absent

SEQ ID NO: 68066 - protein, 39 aa, Artificial Sequence; identical to SEQ ID NO: 9174
  GFR-binding peptide
  MOD_RES (3)..(4)..(37)..(39): Xaa is C or S

SEQ ID NO: 68067 - protein, 38 aa, Artificial Sequence; identical to SEQ ID NO: 30541
  GFR-binding peptide
  MOD_RES (3)..(4)..(37): Xaa is C or S

SEQ ID NO: 68068 - protein, 30 aa, Artificial Sequence
  GFR-binding peptide
VPEKMSATSILYYDENKNVVLRKHRNMTVE

SEQ ID NO: 68069 - protein, 35 aa, Artificial Sequence; identical to SEQ ID NO: 32657
  GFR-binding peptide
  MOD_RES (1)..(2)..(34): Xaa is C or S

SEQ ID NO: 68070 - protein, 38 aa, Artificial Sequence
  GFR-binding peptide
  MOD_RES (4)..(5)..(36)..(38): Xaa is C or S
PSTXXAPVKTEPISMLYLDNGRVLLKFKYEMIVEEXGX

SEQ ID NO: 68071 - protein, 31 aa, Artificial Sequence; identical to SEQ ID NO: 30544
  GFR-binding peptide
  MOD_RES (1)..(1): Xaa is C or S

SEQ ID NO: 68072 - protein, 32 aa, Artificial Sequence; identical to SEQ ID NO: 9179
  GFR-binding peptide
  MOD_RES (1)..(1): Xaa is C or S

SEQ ID NO: 68073 - protein, 39 aa, Artificial Sequence; identical to SEQ ID NO: 30552
  GFR-binding peptide
  MOD_RES (6)..(7): Xaa is C or S
  MOD_RES (21)..(22)..(23)..(24)..(25): Xaa is A or G
  MOD_RES (26)..(27)..(28)..(29): Xaa is A or G or is absent

SEQ ID NO: 68074 - protein, 38 aa, Artificial Sequence; identical to SEQ ID NO: 30553
  GFR-binding peptide
  MOD_RES (5)..(6): Xaa is C or S
  MOD_RES (20)..(21)..(22)..(23)..(24): Xaa is A or G
  MOD_RES (25)..(26)..(27)..(28): Xaa is A or G or is absent

SEQ ID NO: 68075 - protein, 36 aa, Artificial Sequence; identical to SEQ ID NO: 9183
  GFR-binding peptide
  MOD_RES (1)..(2)..(36): Xaa is C or S
  MOD_RES (16)..(17)..(18)..(19)..(20): Xaa is A or G
  MOD_RES (21)..(22)..(23)..(24): Xaa is A or G or is absent

SEQ ID NO: 68076 - protein, 38 aa, Artificial Sequence; identical to SEQ ID NO: 9184
  GFR-binding peptide
  MOD_RES (5)..(6): Xaa is C or S
  MOD_RES (20)..(21)..(22)..(23)..(24): Xaa is A or G
  MOD_RES (25)..(26)..(27)..(28): Xaa is A or G or is absent

SEQ ID NO: 68077 - protein, 43 aa, Artificial Sequence; identical to SEQ ID NO: 30556
  GFR-binding peptide
  MOD_RES (6)..(7)..(40)..(42): Xaa is C or S
  MOD_RES (21)..(22)..(23)..(24)..(25): Xaa is A or G
  MOD_RES (26)..(27)..(28)..(29): Xaa is A or G or is absent

SEQ ID NO: 68078 - protein, 41 aa, Artificial Sequence
  GFR-binding peptide
  MOD_RES (6)..(7)..(41): Xaa is C or S
  MOD_RES (21)..(22)..(23)..(24)..(25): Xaa is A or G
  MOD_RES (26)..(27)..(28)..(29): Xaa is A or G or is absent
KASKAXXVPTKLSATSILYYXXXXXXXXXLRKHRGMAVSEX

SEQ ID NO: 68079 - protein, 38 aa, Artificial Sequence; identical to SEQ ID NO: 32671
  GFR-binding peptide
  MOD_RES (1)..(36)..(38): Xaa is C or S
  MOD_RES (15)..(16)..(17)..(18)..(19): Xaa is A or G
  MOD_RES (20)..(21)..(22)..(23): Xaa is A or G or is absent

SEQ ID NO: 68080 - protein, 34 aa, Artificial Sequence; identical to SEQ ID NO: 32674
  GFR-binding peptide
  MOD_RES (1)..(33): Xaa is C or S

SEQ ID NO: 68081 - protein, 35 aa, Artificial Sequence; identical to SEQ ID NO: 32677
  GFR-binding peptide
  MOD_RES (1)..(2): Xaa is C or S
  MOD_RES (16)..(17)..(18)..(19)..(20): Xaa is A or G
  MOD_RES (21)..(22)..(23)..(24): Xaa is A or G or is absent

SEQ ID NO: 68082 - protein, 35 aa, Artificial Sequence; identical to SEQ ID NO: 30559
  GFR-binding peptide
  MOD_RES (2)..(3): Xaa is C or S
  MOD_RES (17)..(18)..(19)..(20)..(21): Xaa is A or G
  MOD_RES (22)..(23)..(24)..(25): Xaa is A or G or is absent

SEQ ID NO: 68083 - protein, 38 aa, Artificial Sequence; identical to SEQ ID NO: 9189
  GFR-binding peptide
  MOD_RES (2)..(3)..(37): Xaa is C or S
  MOD_RES (17)..(18)..(19)..(20)..(21): Xaa is A or G
  MOD_RES (22)..(23)..(24)..(25): Xaa is A or G or is absent

SEQ ID NO: 68084 - protein, 39 aa, Artificial Sequence; identical to SEQ ID NO: 30561
  GFR-binding peptide
  MOD_RES (6)..(7): Xaa is C or S
  MOD_RES (21)..(22)..(23)..(24)..(25): Xaa is A or G
  MOD_RES (26)..(27)..(28)..(29): Xaa is A or G or is absent

SEQ ID NO: 68085 - protein, 39 aa, Artificial Sequence; identical to SEQ ID NO: 30563
  GFR-binding peptide
  MOD_RES (3)..(4)..(36)..(38): Xaa is C or S

SEQ ID NO: 68086 - protein, 32 aa, Artificial Sequence
  GFR-binding peptide
  MOD_RES (31)..(31): Xaa is C or S
APVKTSPISMLYKDNGRVLLLKYHYMIVEEXG

SEQ ID NO: 68087 - protein, 37 aa, Artificial Sequence
  GFR-binding peptide
  MOD_RES (2)..(3)..(35)..(37): Xaa is C or S
PXXTPTKMSPISMLYKNDKQQIILKYHYGMVVDRXGX

SEQ ID NO: 68088 - protein, 34 aa, Artificial Sequence; identical to SEQ ID NO: 30566
  GFR-binding peptide
  MOD_RES (32)..(34): Xaa is C or S

SEQ ID NO: 68089 - protein, 40 aa, Artificial Sequence; identical to SEQ ID NO: 9195
  GFR-binding peptide
  MOD_RES (3)..(4)..(38)..(40): Xaa is C or S
  MOD_RES (18)..(19)..(20)..(21)..(22): Xaa is A or G
  MOD_RES (23)..(24)..(25)..(26): Xaa is A or G or is absent

SEQ ID NO: 68090 - protein, 35 aa, Artificial Sequence; identical to SEQ ID NO: 9196
  GFR-binding peptide
  MOD_RES (2)..(3): Xaa is C or S
  MOD_RES (17)..(18)..(19)..(20)..(21): Xaa is A or G
  MOD_RES (22)..(23)..(24)..(25): Xaa is A or G or is absent

SEQ ID NO: 68091 - protein, 38 aa, Artificial Sequence; identical to SEQ ID NO: 30569
  GFR-binding peptide
  MOD_RES (5)..(6): Xaa is C or S
  MOD_RES (20)..(21)..(22)..(23)..(24): Xaa is A or G
  MOD_RES (25)..(26)..(27)..(28): Xaa is A or G or is absent

SEQ ID NO: 68092 - protein, 33 aa, Artificial Sequence; identical to SEQ ID NO: 9199
  GFR-binding peptide
  MOD_RES (1)..(33): Xaa is C or S

SEQ ID NO: 68093 - protein, 40 aa, Artificial Sequence; identical to SEQ ID NO: 30572
  GFR-binding peptide
  MOD_RES (5)..(6)..(39): Xaa is C or S
  MOD_RES (20)..(21)..(22)..(23)..(24): Xaa is A or G
  MOD_RES (25)..(26)..(27)..(28): Xaa is A or G or is absent

SEQ ID NO: 68094 - protein, 34 aa, Artificial Sequence; identical to SEQ ID NO: 9202
  GFR-binding peptide
  MOD_RES (31)..(33): Xaa is C or S

SEQ ID NO: 68095 - protein, 36 aa, Artificial Sequence; identical to SEQ ID NO: 30575
  GFR-binding peptide
  MOD_RES (4)..(5): Xaa is C or S

SEQ ID NO: 68096 - protein, 32 aa, Artificial Sequence; identical to SEQ ID NO: 30578
  GFR-binding peptide
  MOD_RES (1)..(1): Xaa is C or S

SEQ ID NO: 68097 - protein, 31 aa, Artificial Sequence
  GFR-binding peptide
TPTKMSPISMLYKNDKQQIILKYHYGMVVDR

SEQ ID NO: 68098 - protein, 37 aa, Artificial Sequence; identical to SEQ ID NO: 9205
  GFR-binding peptide
  MOD_RES (2)..(3)..(35)..(37): Xaa is C or S

SEQ ID NO: 68099 - protein, 36 aa, Artificial Sequence
  GFR-binding peptide
  MOD_RES (2)..(3): Xaa is C or S
  MOD_RES (17)..(18)..(19)..(20)..(21): Xaa is A or G
  MOD_RES (22)..(23)..(24)..(25): Xaa is A or G or is absent
PXXVPEKMNAISILYFXXXXXXXXXLKKYRNMTVES

SEQ ID NO: 68100 - protein, 33 aa, Artificial Sequence
  GFR-binding peptide
  MOD_RES (31)..(33): Xaa is C or S
VSQDLSPINILYFIGKTPKIYGKIPMIVKSXKX

SEQ ID NO: 68101 - protein, 32 aa, Artificial Sequence; identical to SEQ ID NO: 9207
  GFR-binding peptide
  MOD_RES (1)..(2): Xaa is C or S

SEQ ID NO: 68102 - protein, 38 aa, Artificial Sequence; identical to SEQ ID NO: 30583
  GFR-binding peptide
  MOD_RES (5)..(6)..(38): Xaa is C or S

SEQ ID NO: 68103 - protein, 33 aa, Artificial Sequence; identical to SEQ ID NO: 32699
  GFR-binding peptide
  MOD_RES (14)..(15)..(16)..(17)..(18): Xaa is A or G
  MOD_RES (19)..(20)..(21)..(22): Xaa is A or G or is absent

SEQ ID NO: 68104 - protein, 42 aa, Artificial Sequence; identical to SEQ ID NO: 9211
  GFR-binding peptide
  MOD_RES (5)..(6)..(40)..(42): Xaa is C or S
  MOD_RES (20)..(21)..(22)..(23)..(24): Xaa is A or G
  MOD_RES (25)..(26)..(27)..(28): Xaa is A or G or is absent

SEQ ID NO: 68105 - protein, 37 aa, Artificial Sequence; identical to SEQ ID NO: 57607
  GFR-binding peptide
  MOD_RES (2)..(3)..(34)..(36): Xaa is C or S

SEQ ID NO: 68106 - protein, 36 aa, Artificial Sequence
  GFR-binding peptide
  MOD_RES (33)..(35): Xaa is C or S
  MOD_RES (14)..(15)..(16)..(17)..(18): Xaa is A or G
  MOD_RES (19)..(20)..(21)..(22): Xaa is A or G or is absent
VPQALSPINILYFXXXXXXXXXYGKIPMIVRSXKXS

SEQ ID NO: 68107 - protein, 37 aa, Artificial Sequence
  GFR-binding peptide
  MOD_RES (6)..(7): Xaa is C or S
AAPASXXVPARLSATSILYYDAANNVVLRKHRDMVVE

SEQ ID NO: 68108 - protein, 38 aa, Artificial Sequence; identical to SEQ ID NO: 9216
  GFR-binding peptide
  MOD_RES (2)..(3)..(38): Xaa is C or S
  MOD_RES (17)..(18)..(19)..(20)..(21): Xaa is A or G
  MOD_RES (22)..(23)..(24)..(25): Xaa is A or G or is absent

SEQ ID NO: 68109 - protein, 38 aa, Artificial Sequence
  GFR-binding peptide
  MOD_RES (5)..(6)..(37): Xaa is C or S
VPSTXXAPVKTSATSMLYYDNGRVLLLRKHRMIVEEXG

SEQ ID NO: 68110 - protein, 44 aa, Artificial Sequence
  GFR-binding peptide
  MOD_RES (6)..(7)..(41)..(43): Xaa is C or S
  MOD_RES (21)..(22)..(23)..(24)..(25): Xaa is A or G
  MOD_RES (26)..(27)..(28)..(29): Xaa is A or G or is absent
HVPKPXXAPTKLSATSVLYYXXXXXXXXXLRKHRNMVVRSXGXH

SEQ ID NO: 68111 - protein, 33 aa, Artificial Sequence; identical to SEQ ID NO: 9221
  GFR-binding peptide
  MOD_RES (14)..(15)..(16)..(17)..(18): Xaa is A or G
  MOD_RES (19)..(20)..(21)..(22): Xaa is A or G or is absent

SEQ ID NO: 68112 - protein, 36 aa, Artificial Sequence; identical to SEQ ID NO: 9223
  GFR-binding peptide
  MOD_RES (2)..(3): Xaa is C or S
  MOD_RES (17)..(18)..(19)..(20)..(21): Xaa is A or G
  MOD_RES (22)..(23)..(24)..(25): Xaa is A or G or is absent

SEQ ID NO: 68113 - protein, 33 aa, Artificial Sequence; identical to SEQ ID NO: 30597
  GFR-binding peptide
  MOD_RES (14)..(15)..(16)..(17)..(18): Xaa is A or G
  MOD_RES (19)..(20)..(21)..(22): Xaa is A or G or is absent

SEQ ID NO: 68114 - protein, 34 aa, Artificial Sequence; identical to SEQ ID NO: 9227
  GFR-binding peptide
  MOD_RES (1)..(2): Xaa is C or S
  MOD_RES (16)..(17)..(18)..(19)..(20): Xaa is A or G
  MOD_RES (21)..(22)..(23)..(24): Xaa is A or G or is absent

SEQ ID NO: 68115 - protein, 40 aa, Artificial Sequence; identical to SEQ ID NO: 9230
  GFR-binding peptide
  MOD_RES (5)..(6)..(39): Xaa is C or S
  MOD_RES (20)..(21)..(22)..(23)..(24): Xaa is A or G
  MOD_RES (25)..(26)..(27)..(28): Xaa is A or G or is absent

SEQ ID NO: 68116 - protein, 36 aa, Artificial Sequence
  GFR-binding peptide
  MOD_RES (1)..(34)..(36): Xaa is C or S
  MOD_RES (15)..(16)..(17)..(18)..(19): Xaa is A or G
  MOD_RES (20)..(21)..(22)..(23): Xaa is A or G or is absent
XVPQALSPINILYFXXXXXXXXXYGKIPMIVRSXKX

SEQ ID NO: 68117 - protein, 37 aa, Artificial Sequence; identical to SEQ ID NO: 30605
  GFR-binding peptide
  MOD_RES (2)..(3)..(35)..(37): Xaa is C or S

SEQ ID NO: 68118 - protein, 35 aa, Artificial Sequence; identical to SEQ ID NO: 32732
  GFR-binding peptide
  MOD_RES (34)..(34): Xaa is C or S
  MOD_RES (14)..(15)..(16)..(17)..(18): Xaa is A or G
  MOD_RES (19)..(20)..(21)..(22): Xaa is A or G or is absent

SEQ ID NO: 68119 - protein, 41 aa, Artificial Sequence; identical to SEQ ID NO: 9240
  GFR-binding peptide
  MOD_RES (5)..(6)..(39)..(41): Xaa is C or S
  MOD_RES (20)..(21)..(22)..(23)..(24): Xaa is A or G
  MOD_RES (25)..(26)..(27)..(28): Xaa is A or G or is absent

SEQ ID NO: 68120 - protein, 36 aa, Artificial Sequence; identical to SEQ ID NO: 9241
  GFR-binding peptide
  MOD_RES (1)..(34)..(36): Xaa is C or S
  MOD_RES (15)..(16)..(17)..(18)..(19): Xaa is A or G
  MOD_RES (20)..(21)..(22)..(23): Xaa is A or G or is absent

SEQ ID NO: 68121 - protein, 41 aa, Artificial Sequence; identical to SEQ ID NO: 30611
  GFR-binding peptide
  MOD_RES (5)..(6)..(39)..(41): Xaa is C or S

SEQ ID NO: 68122 - protein, 32 aa, Artificial Sequence
  GFR-binding peptide
  MOD_RES (32)..(32): Xaa is C or S
VPTRLSATSILYYDSANNVVLRKHRDMVVESX

SEQ ID NO: 68123 - protein, 40 aa, Artificial Sequence; identical to SEQ ID NO: 32737
  GFR-binding peptide
  MOD_RES (4)..(5)..(39): Xaa is C or S
  MOD_RES (19)..(20)..(21)..(22)..(23): Xaa is A or G
  MOD_RES (24)..(25)..(26)..(27): Xaa is A or G or is absent

SEQ ID NO: 68124 - protein, 34 aa, Artificial Sequence; identical to SEQ ID NO: 32739
  GFR-binding peptide
  MOD_RES (1)..(1): Xaa is C or S
  MOD_RES (15)..(16)..(17)..(18)..(19): Xaa is A or G
  MOD_RES (20)..(21)..(22)..(23): Xaa is A or G or is absent

SEQ ID NO: 68125 - protein, 37 aa, Artificial Sequence; identical to SEQ ID NO: 9244
  GFR-binding peptide
  MOD_RES (3)..(4)..(37): Xaa is C or S
  MOD_RES (18)..(19)..(20)..(21)..(22): Xaa is A or G
  MOD_RES (23)..(24)..(25)..(26): Xaa is A or G or is absent

SEQ ID NO: 68126 - protein, 34 aa, Artificial Sequence
  GFR-binding peptide
  MOD_RES (1)..(34): Xaa is C or S
  MOD_RES (15)..(16)..(17)..(18)..(19): Xaa is A or G
  MOD_RES (20)..(21)..(22)..(23): Xaa is A or G or is absent
XVPQDLSPINILYFXXXXXXXXXYGKIPMVVKSX

SEQ ID NO: 68127 - protein, 34 aa, Artificial Sequence; identical to SEQ ID NO: 9249
  GFR-binding peptide
  MOD_RES (1)..(2)..(34): Xaa is C or S

SEQ ID NO: 68128 - protein, 43 aa, Artificial Sequence
  GFR-binding peptide
  MOD_RES (6)..(7)..(41)..(43): Xaa is C or S
  MOD_RES (21)..(22)..(23)..(24)..(25): Xaa is A or G
  MOD_RES (26)..(27)..(28)..(29): Xaa is A or G or is absent
STPPTXXVPTRLSATSILYYXXXXXXXXXLRKHRDMVVESXGX

SEQ ID NO: 68129 - protein, 34 aa, Artificial Sequence; identical to SEQ ID NO: 57652
  GFR-binding peptide
  MOD_RES (1)..(2)..(33): Xaa is C or S

SEQ ID NO: 68130 - protein, 33 aa, Artificial Sequence; identical to SEQ ID NO: 57653
  GFR-binding peptide
  MOD_RES (1)..(2): Xaa is C or S

SEQ ID NO: 68131 - protein, 35 aa, Artificial Sequence
  GFR-binding peptide
  MOD_RES (1)..(2)..(34): Xaa is C or S
XXVPTKLSATSILYYDKGVVTYLRKHRGMAVSEXG

SEQ ID NO: 68132 - protein, 36 aa, Artificial Sequence; identical to SEQ ID NO: 9253
  GFR-binding peptide
  MOD_RES (1)..(34)..(36): Xaa is C or S
  MOD_RES (15)..(16)..(17)..(18)..(19): Xaa is A or G
  MOD_RES (20)..(21)..(22)..(23): Xaa is A or G or is absent

SEQ ID NO: 68133 - protein, 38 aa, Artificial Sequence; identical to SEQ ID NO: 9255
  GFR-binding peptide
  MOD_RES (5)..(6)..(37): Xaa is C or S

SEQ ID NO: 68134 - protein, 36 aa, Artificial Sequence; identical to SEQ ID NO: 57655
  GFR-binding peptide
  MOD_RES (4)..(5): Xaa is C or S

SEQ ID NO: 68135 - protein, 41 aa, Artificial Sequence; identical to SEQ ID NO: 30628
  GFR-binding peptide
  MOD_RES (6)..(7)..(41): Xaa is C or S
  MOD_RES (21)..(22)..(23)..(24)..(25): Xaa is A or G
  MOD_RES (26)..(27)..(28)..(29): Xaa is A or G or is absent

SEQ ID NO: 68136 - protein, 37 aa, Artificial Sequence; identical to SEQ ID NO: 9256
  GFR-binding peptide
  MOD_RES (34)..(36): Xaa is C or S
  MOD_RES (14)..(15)..(16)..(17)..(18): Xaa is A or G
  MOD_RES (19)..(20)..(21)..(22): Xaa is A or G or is absent

SEQ ID NO: 68137 - protein, 40 aa, Artificial Sequence; identical to SEQ ID NO: 30630
  GFR-binding peptide
  MOD_RES (6)..(7)..(39): Xaa is C or S

SEQ ID NO: 68138 - protein, 39 aa, Artificial Sequence
  GFR-binding peptide
  MOD_RES (2)..(3)..(36)..(38): Xaa is C or S
  MOD_RES (17)..(18)..(19)..(20)..(21): Xaa is A or G
  MOD_RES (22)..(23)..(24)..(25): Xaa is A or G or is absent
PXXVPQALSPINILYFXXXXXXXXXYGKIPMIVRSXKXS

SEQ ID NO: 68139 - protein, 31 aa, Artificial Sequence; identical to SEQ ID NO: 30632
  GFR-binding peptide

SEQ ID NO: 68140 - protein, 39 aa, Artificial Sequence; identical to SEQ ID NO: 57665
  GFR-binding peptide
  MOD_RES (5)..(6): Xaa is C or S
  MOD_RES (20)..(21)..(22)..(23)..(24): Xaa is A or G
  MOD_RES (25)..(26)..(27)..(28): Xaa is A or G or is absent

SEQ ID NO: 68141 - protein, 37 aa, Artificial Sequence; identical to SEQ ID NO: 9258
  GFR-binding peptide
  MOD_RES (4)..(5)..(36): Xaa is C or S

SEQ ID NO: 68142 - protein, 34 aa, Artificial Sequence; identical to SEQ ID NO: 9261
  GFR-binding peptide
  MOD_RES (3)..(4): Xaa is C or S

SEQ ID NO: 68143 - protein, 41 aa, Artificial Sequence
  GFR-binding peptide
  MOD_RES (6)..(7)..(41): Xaa is C or S
  MOD_RES (21)..(22)..(23)..(24)..(25): Xaa is A or G
  MOD_RES (26)..(27)..(28)..(29): Xaa is A or G or is absent
GSAGPXXTPTKMSPISMLYKXXXXXXXXXLKYHYGMVVDRX

SEQ ID NO: 68144 - protein, 32 aa, Artificial Sequence; identical to SEQ ID NO: 32756
  GFR-binding peptide
  MOD_RES (1)..(1): Xaa is C or S

SEQ ID NO: 68145 - protein, 34 aa, Artificial Sequence
  GFR-binding peptide
  MOD_RES (3)..(4): Xaa is C or S
STXXAPVKTSPISMLYKDNGRVLLLKYHYMIVEE

SEQ ID NO: 68146 - protein, 36 aa, Artificial Sequence
  GFR-binding peptide
  MOD_RES (1)..(33)..(35): Xaa is C or S
XVPTRLSATSILYYDSANNVVLRKHRDMVVESXGXR

SEQ ID NO: 68147 - protein, 32 aa, Artificial Sequence; identical to SEQ ID NO: 9266
  GFR-binding peptide
  MOD_RES (1)..(32): Xaa is C or S

SEQ ID NO: 68148 - protein, 38 aa, Artificial Sequence
  GFR-binding peptide
  MOD_RES (3)..(4)..(36)..(38): Xaa is C or S
GPXXTPTKMEPISMLYLNDKQQIIKFKYEGMVVDRXGX

SEQ ID NO: 68149 - protein, 43 aa, Artificial Sequence
  GFR-binding peptide
  MOD_RES (6)..(7)..(41)..(43): Xaa is C or S
  MOD_RES (21)..(22)..(23)..(24)..(25): Xaa is A or G
  MOD_RES (26)..(27)..(28)..(29): Xaa is A or G or is absent
STPPTXXVPTRLEPISILYLXXXXXXXXXKFKYEDMVVESXGX

SEQ ID NO: 68150 - protein, 32 aa, Artificial Sequence; identical to SEQ ID NO: 30644
  GFR-binding peptide
  MOD_RES (14)..(15)..(16)..(17)..(18): Xaa is A or G
  MOD_RES (19)..(20)..(21)..(22): Xaa is A or G or is absent

SEQ ID NO: 68151 - protein, 37 aa, Artificial Sequence
  GFR-binding peptide
  MOD_RES (4)..(5)..(37): Xaa is C or S
PEPXXVPEKMSATSILYYDENKNVVLRKHRNMTVESX

SEQ ID NO: 68152 - protein, 34 aa, Artificial Sequence; identical to SEQ ID NO: 30645
  GFR-binding peptide
  MOD_RES (1)..(2)..(34): Xaa is C or S

SEQ ID NO: 68153 - protein, 40 aa, Artificial Sequence
  GFR-binding peptide
  MOD_RES (2)..(3)..(37)..(39): Xaa is C or S
  MOD_RES (17)..(18)..(19)..(20)..(21): Xaa is A or G
  MOD_RES (22)..(23)..(24)..(25): Xaa is A or G or is absent
PXXTPTKMEPISMLYLXXXXXXXXXKFKYEGMVVDRXGXS

SEQ ID NO: 68154 - protein, 40 aa, Artificial Sequence; identical to SEQ ID NO: 9271
  GFR-binding peptide
  MOD_RES (3)..(4)..(38)..(40): Xaa is C or S
  MOD_RES (18)..(19)..(20)..(21)..(22): Xaa is A or G
  MOD_RES (23)..(24)..(25)..(26): Xaa is A or G or is absent

SEQ ID NO: 68155 - protein, 39 aa, Artificial Sequence; identical to SEQ ID NO: 30651
  GFR-binding peptide
  MOD_RES (2)..(3)..(37)..(39): Xaa is C or S
  MOD_RES (17)..(18)..(19)..(20)..(21): Xaa is A or G
  MOD_RES (22)..(23)..(24)..(25): Xaa is A or G or is absent

SEQ ID NO: 68156 - protein, 38 aa, Artificial Sequence; identical to SEQ ID NO: 9272
  GFR-binding peptide
  MOD_RES (2)..(3)..(37): Xaa is C or S
  MOD_RES (17)..(18)..(19)..(20)..(21): Xaa is A or G
  MOD_RES (22)..(23)..(24)..(25): Xaa is A or G or is absent

SEQ ID NO: 68157 - protein, 35 aa, Artificial Sequence; identical to SEQ ID NO: 32767
  GFR-binding peptide
  MOD_RES (2)..(34): Xaa is C or S

SEQ ID NO: 68158 - protein, 36 aa, Artificial Sequence
  GFR-binding peptide
  MOD_RES (3)..(4)..(36): Xaa is C or S
EPXXVPEKMSATSILYYDENKNVVLRKHRNMTVESX

SEQ ID NO: 68159 - protein, 33 aa, Artificial Sequence; identical to SEQ ID NO: 30652
  GFR-binding peptide
  MOD_RES (1)..(1): Xaa is C or S
  MOD_RES (15)..(16)..(17)..(18)..(19): Xaa is A or G
  MOD_RES (20)..(21)..(22)..(23): Xaa is A or G or is absent

SEQ ID NO: 68160 - protein, 40 aa, Artificial Sequence; identical to SEQ ID NO: 9274
  GFR-binding peptide
  MOD_RES (2)..(3)..(37)..(39): Xaa is C or S
  MOD_RES (17)..(18)..(19)..(20)..(21): Xaa is A or G
  MOD_RES (22)..(23)..(24)..(25): Xaa is A or G or is absent

SEQ ID NO: 68161 - protein, 38 aa, Artificial Sequence; identical to SEQ ID NO: 30654
  GFR-binding peptide
  MOD_RES (3)..(4)..(38): Xaa is C or S
  MOD_RES (18)..(19)..(20)..(21)..(22): Xaa is A or G
  MOD_RES (23)..(24)..(25)..(26): Xaa is A or G or is absent

SEQ ID NO: 68162 - protein, 31 aa, Artificial Sequence; identical to SEQ ID NO: 9275
  GFR-binding peptide
  MOD_RES (31)..(31): Xaa is C or S

SEQ ID NO: 68163 - protein, 41 aa, Artificial Sequence; identical to SEQ ID NO: 9276
  GFR-binding peptide
  MOD_RES (6)..(7)..(38)..(40): Xaa is C or S

SEQ ID NO: 68164 - protein, 39 aa, Artificial Sequence; identical to SEQ ID NO: 9279
  GFR-binding peptide
  MOD_RES (4)..(5)..(36)..(38): Xaa is C or S

SEQ ID NO: 68165 - protein, 37 aa, Artificial Sequence; identical to SEQ ID NO: 9280
  GFR-binding peptide
  MOD_RES (1)..(2)..(36): Xaa is C or S
  MOD_RES (16)..(17)..(18)..(19)..(20): Xaa is A or G
  MOD_RES (21)..(22)..(23)..(24): Xaa is A or G or is absent

SEQ ID NO: 68166 - protein, 34 aa, Artificial Sequence; identical to SEQ ID NO: 9283
  GFR-binding peptide
  MOD_RES (34)..(34): Xaa is C or S
  MOD_RES (14)..(15)..(16)..(17)..(18): Xaa is A or G
  MOD_RES (19)..(20)..(21)..(22): Xaa is A or G or is absent

SEQ ID NO: 68167 - protein, 37 aa, Artificial Sequence
  GFR-binding peptide
  MOD_RES (1)..(2)..(34)..(36): Xaa is C or S
XXTPTKMSPISMLYKNDKQQIILKYHYGMVVDRXGXS

SEQ ID NO: 68168 - protein, 39 aa, Artificial Sequence; identical to SEQ ID NO: 32786
  GFR-binding peptide
  MOD_RES (2)..(3)..(37)..(39): Xaa is C or S
  MOD_RES (17)..(18)..(19)..(20)..(21): Xaa is A or G
  MOD_RES (22)..(23)..(24)..(25): Xaa is A or G or is absent

SEQ ID NO: 68169 - protein, 35 aa, Artificial Sequence; identical to SEQ ID NO: 32789
  GFR-binding peptide
  MOD_RES (34)..(34): Xaa is C or S
  MOD_RES (14)..(15)..(16)..(17)..(18): Xaa is A or G
  MOD_RES (19)..(20)..(21)..(22): Xaa is A or G or is absent

SEQ ID NO: 68170 - protein, 37 aa, Artificial Sequence; identical to SEQ ID NO: 9285
  GFR-binding peptide
  MOD_RES (4)..(5): Xaa is C or S
  MOD_RES (19)..(20)..(21)..(22)..(23): Xaa is A or G
  MOD_RES (24)..(25)..(26)..(27): Xaa is A or G or is absent

SEQ ID NO: 68171 - protein, 40 aa, Artificial Sequence; identical to SEQ ID NO: 30667
  GFR-binding peptide
  MOD_RES (6)..(7)..(38)..(40): Xaa is C or S

SEQ ID NO: 68172 - protein, 42 aa, Artificial Sequence; identical to SEQ ID NO: 30669
  GFR-binding peptide
  MOD_RES (5)..(39)..(41): Xaa is C or S
  MOD_RES (19)..(20)..(21)..(22)..(23): Xaa is A or G
  MOD_RES (24)..(25)..(26)..(27): Xaa is A or G or is absent

SEQ ID NO: 68173 - protein, 40 aa, Artificial Sequence; identical to SEQ ID NO: 9287
  GFR-binding peptide
  MOD_RES (5)..(6)..(38)..(40): Xaa is C or S

SEQ ID NO: 68174 - protein, 39 aa, Artificial Sequence; identical to SEQ ID NO: 9288
  GFR-binding peptide
  MOD_RES (5)..(6)..(39): Xaa is C or S

SEQ ID NO: 68175 - protein, 42 aa, Artificial Sequence; identical to SEQ ID NO: 30675
  GFR-binding peptide
  MOD_RES (5)..(6)..(40)..(42): Xaa is C or S
  MOD_RES (20)..(21)..(22)..(23)..(24): Xaa is A or G
  MOD_RES (25)..(26)..(27)..(28): Xaa is A or G or is absent

SEQ ID NO: 68176 - protein, 35 aa, Artificial Sequence; identical to SEQ ID NO: 30676
  GFR-binding peptide
  MOD_RES (2)..(34): Xaa is C or S

SEQ ID NO: 68177 - protein, 32 aa, Artificial Sequence; identical to SEQ ID NO: 32794
  GFR-binding peptide
  MOD_RES (1)..(1): Xaa is C or S

SEQ ID NO: 68178 - protein, 39 aa, Artificial Sequence
  GFR-binding peptide
  MOD_RES (6)..(7): Xaa is C or S
  MOD_RES (21)..(22)..(23)..(24)..(25): Xaa is A or G
  MOD_RES (26)..(27)..(28)..(29): Xaa is A or G or is absent
ASASPXXVPQDLSPINILYFXXXXXXXXXYGKIPMVVKS

SEQ ID NO: 68179 - protein, 38 aa, Artificial Sequence; identical to SEQ ID NO: 32795
  GFR-binding peptide
  MOD_RES (6)..(7): Xaa is C or S

SEQ ID NO: 68180 - protein, 40 aa, Artificial Sequence; identical to SEQ ID NO: 30677
  GFR-binding peptide
  MOD_RES (4)..(5)..(39): Xaa is C or S
  MOD_RES (19)..(20)..(21)..(22)..(23): Xaa is A or G
  MOD_RES (24)..(25)..(26)..(27): Xaa is A or G or is absent

SEQ ID NO: 68181 - protein, 40 aa, Artificial Sequence; identical to SEQ ID NO: 57704
  GFR-binding peptide
  MOD_RES (2)..(3)..(37)..(39): Xaa is C or S
  MOD_RES (17)..(18)..(19)..(20)..(21): Xaa is A or G
  MOD_RES (22)..(23)..(24)..(25): Xaa is A or G or is absent

SEQ ID NO: 68182 - protein, 34 aa, Artificial Sequence; identical to SEQ ID NO: 9289
  GFR-binding peptide
  MOD_RES (3)..(4): Xaa is C or S

SEQ ID NO: 68183 - protein, 39 aa, Artificial Sequence; identical to SEQ ID NO: 9290
  GFR-binding peptide
  MOD_RES (5)..(6)..(38): Xaa is C or S

SEQ ID NO: 68184 - protein, 34 aa, Artificial Sequence; identical to SEQ ID NO: 9293
  GFR-binding peptide
  MOD_RES (1)..(2): Xaa is C or S
  MOD_RES (16)..(17)..(18)..(19)..(20): Xaa is A or G
  MOD_RES (21)..(22)..(23)..(24): Xaa is A or G or is absent

SEQ ID NO: 68185 - protein, 36 aa, Artificial Sequence
  GFR-binding peptide
  MOD_RES (1)..(2)..(33)..(35): Xaa is C or S
XXAPVKTSPISMLYKDNGRVLLLKYHYMIVEEXGXL

SEQ ID NO: 68186 - protein, 39 aa, Artificial Sequence
  GFR-binding peptide
  MOD_RES (5)..(6)..(37)..(39): Xaa is C or S
VPSTXXAPVKTEPISMLYLDNGRVLLKFKYEMIVEEXGX

SEQ ID NO: 68187 - protein, 31 aa, Artificial Sequence; identical to SEQ ID NO: 30685
  GFR-binding peptide
  MOD_RES (1)..(1): Xaa is C or S

SEQ ID NO: 68188 - protein, 36 aa, Artificial Sequence; identical to SEQ ID NO: 32802
  GFR-binding peptide
  MOD_RES (5)..(6): Xaa is C or S

SEQ ID NO: 68189 - protein, 41 aa, Artificial Sequence; identical to SEQ ID NO: 9299
  GFR-binding peptide
  MOD_RES (4)..(5)..(39)..(41): Xaa is C or S
  MOD_RES (19)..(20)..(21)..(22)..(23): Xaa is A or G
  MOD_RES (24)..(25)..(26)..(27): Xaa is A or G or is absent

SEQ ID NO: 68190 - protein, 40 aa, Artificial Sequence; identical to SEQ ID NO: 30687
  GFR-binding peptide
  MOD_RES (5)..(6)..(40): Xaa is C or S
  MOD_RES (20)..(21)..(22)..(23)..(24): Xaa is A or G
  MOD_RES (25)..(26)..(27)..(28): Xaa is A or G or is absent

SEQ ID NO: 68191 - protein, 36 aa, Artificial Sequence; identical to SEQ ID NO: 9300
  GFR-binding peptide
  MOD_RES (5)..(6): Xaa is C or S

SEQ ID NO: 68192 - protein, 39 aa, Artificial Sequence
  GFR-binding peptide
  MOD_RES (3)..(4)..(36)..(38): Xaa is C or S
EPXXVPEKMEPISILYLDENKNVVKFKYENMTVESXAXR

SEQ ID NO: 68193 - protein, 33 aa, Artificial Sequence; identical to SEQ ID NO: 30690
  GFR-binding peptide
  MOD_RES (2)..(3): Xaa is C or S

SEQ ID NO: 68194 - protein, 39 aa, Artificial Sequence; identical to SEQ ID NO: 32803
  GFR-binding peptide
  MOD_RES (3)..(4)..(38): Xaa is C or S
  MOD_RES (18)..(19)..(20)..(21)..(22): Xaa is A or G
  MOD_RES (23)..(24)..(25)..(26): Xaa is A or G or is absent

SEQ ID NO: 68195 - protein, 40 aa, Artificial Sequence; identical to SEQ ID NO: 32806
  GFR-binding peptide
  MOD_RES (4)..(5)..(39): Xaa is C or S
  MOD_RES (19)..(20)..(21)..(22)..(23): Xaa is A or G
  MOD_RES (24)..(25)..(26)..(27): Xaa is A or G or is absent

SEQ ID NO: 68196 - protein, 37 aa, Artificial Sequence; identical to SEQ ID NO: 30693
  GFR-binding peptide
  MOD_RES (2)..(3)..(37): Xaa is C or S
  MOD_RES (17)..(18)..(19)..(20)..(21): Xaa is A or G
  MOD_RES (22)..(23)..(24)..(25): Xaa is A or G or is absent

SEQ ID NO: 68197 - protein, 42 aa, Artificial Sequence; identical to SEQ ID NO: 32808
  GFR-binding peptide
  MOD_RES (7)..(39)..(41): Xaa is C or S

SEQ ID NO: 68198 - protein, 33 aa, Artificial Sequence; identical to SEQ ID NO: 32810
  GFR-binding peptide
  MOD_RES (1)..(2)..(33): Xaa is C or S

SEQ ID NO: 68199 - protein, 33 aa, Artificial Sequence; identical to SEQ ID NO: 9304
  GFR-binding peptide
  MOD_RES (31)..(33): Xaa is C or S

SEQ ID NO: 68200 - protein, 36 aa, Artificial Sequence
  GFR-binding peptide
  MOD_RES (1)..(35): Xaa is C or S
  MOD_RES (15)..(16)..(17)..(18)..(19): Xaa is A or G
  MOD_RES (20)..(21)..(22)..(23): Xaa is A or G or is absent
XVPARLSATSILYYXXXXXXXXXLRKHRDMVVEAXG

SEQ ID NO: 68201 - protein, 35 aa, Artificial Sequence; identical to SEQ ID NO: 30697
  GFR-binding peptide
  MOD_RES (1)..(33)..(35): Xaa is C or S

SEQ ID NO: 68202 - protein, 35 aa, Artificial Sequence
  GFR-binding peptide
  MOD_RES (3)..(4): Xaa is C or S
EPXXVPEKMNAISILYFDENKNVVLKKYRNMTVES

SEQ ID NO: 68203 - protein, 30 aa, Artificial Sequence; identical to SEQ ID NO: 30698
  GFR-binding peptide

SEQ ID NO: 68204 - protein, 41 aa, Artificial Sequence; identical to SEQ ID NO: 9306
  GFR-binding peptide
  MOD_RES (5)..(6)..(38)..(40): Xaa is C or S

SEQ ID NO: 68205 - protein, 35 aa, Artificial Sequence; identical to SEQ ID NO: 9307
  GFR-binding peptide
  MOD_RES (34)..(34): Xaa is C or S
  MOD_RES (14)..(15)..(16)..(17)..(18): Xaa is A or G
  MOD_RES (19)..(20)..(21)..(22): Xaa is A or G or is absent

SEQ ID NO: 68206 - protein, 39 aa, Artificial Sequence; identical to SEQ ID NO: 9308
  GFR-binding peptide
  MOD_RES (3)..(4)..(39): Xaa is C or S
  MOD_RES (18)..(19)..(20)..(21)..(22): Xaa is A or G
  MOD_RES (23)..(24)..(25)..(26): Xaa is A or G or is absent

SEQ ID NO: 68207 - protein, 35 aa, Artificial Sequence; identical to SEQ ID NO: 9311
  GFR-binding peptide
  MOD_RES (1)..(35): Xaa is C or S
  MOD_RES (15)..(16)..(17)..(18)..(19): Xaa is A or G
  MOD_RES (20)..(21)..(22)..(23): Xaa is A or G or is absent

SEQ ID NO: 68208 - protein, 34 aa, Artificial Sequence
  GFR-binding peptide
  MOD_RES (2)..(3): Xaa is C or S
TXXVPTRLSATSILYYDSANNVVLRKHRDMVVES

SEQ ID NO: 68209 - protein, 36 aa, Artificial Sequence; identical to SEQ ID NO: 9315
  GFR-binding peptide
  MOD_RES (1)..(2)..(34)..(36): Xaa is C or S

SEQ ID NO: 68210 - protein, 42 aa, Artificial Sequence; identical to SEQ ID NO: 32824
  GFR-binding peptide
  MOD_RES (4)..(5)..(39)..(41): Xaa is C or S
  MOD_RES (19)..(20)..(21)..(22)..(23): Xaa is A or G
  MOD_RES (24)..(25)..(26)..(27): Xaa is A or G or is absent

SEQ ID NO: 68211 - protein, 39 aa, Artificial Sequence; identical to SEQ ID NO: 30709
  GFR-binding peptide
  MOD_RES (4)..(5)..(39): Xaa is C or S
  MOD_RES (19)..(20)..(21)..(22)..(23): Xaa is A or G
  MOD_RES (24)..(25)..(26)..(27): Xaa is A or G or is absent

SEQ ID NO: 68212 - protein, 43 aa, Artificial Sequence; identical to SEQ ID NO: 32832
  GFR-binding peptide
  MOD_RES (6)..(7)..(41)..(43): Xaa is C or S
  MOD_RES (21)..(22)..(23)..(24)..(25): Xaa is A or G
  MOD_RES (26)..(27)..(28)..(29): Xaa is A or G or is absent

SEQ ID NO: 68213 - protein, 37 aa, Artificial Sequence
  GFR-binding peptide
  MOD_RES (1)..(2)..(36): Xaa is C or S
  MOD_RES (16)..(17)..(18)..(19)..(20): Xaa is A or G
  MOD_RES (21)..(22)..(23)..(24): Xaa is A or G or is absent
XXVPTKLSATSILYYXXXXXXXXXLRKHRGMAVSEXG

SEQ ID NO: 68214 - protein, 37 aa, Artificial Sequence; identical to SEQ ID NO: 9320
  GFR-binding peptide
  MOD_RES (3)..(35)..(37): Xaa is C or S

SEQ ID NO: 68215 - protein, 35 aa, Artificial Sequence; identical to SEQ ID NO: 32834
  GFR-binding peptide
  MOD_RES (1)..(34): Xaa is C or S
  MOD_RES (15)..(16)..(17)..(18)..(19): Xaa is A or G
  MOD_RES (20)..(21)..(22)..(23): Xaa is A or G or is absent

SEQ ID NO: 68216 - protein, 40 aa, Artificial Sequence; identical to SEQ ID NO: 57735
  GFR-binding peptide
  MOD_RES (6)..(7): Xaa is C or S
  MOD_RES (21)..(22)..(23)..(24)..(25): Xaa is A or G
  MOD_RES (26)..(27)..(28)..(29): Xaa is A or G or is absent

SEQ ID NO: 68217 - protein, 41 aa, Artificial Sequence; identical to SEQ ID NO: 32837
  GFR-binding peptide
  MOD_RES (4)..(5)..(39)..(41): Xaa is C or S
  MOD_RES (19)..(20)..(21)..(22)..(23): Xaa is A or G
  MOD_RES (24)..(25)..(26)..(27): Xaa is A or G or is absent

SEQ ID NO: 68218 - protein, 39 aa, Artificial Sequence; identical to SEQ ID NO: 9325
  GFR-binding peptide
  MOD_RES (5)..(6): Xaa is C or S
  MOD_RES (20)..(21)..(22)..(23)..(24): Xaa is A or G
  MOD_RES (25)..(26)..(27)..(28): Xaa is A or G or is absent

SEQ ID NO: 68219 - protein, 35 aa, Artificial Sequence; identical to SEQ ID NO: 32839
  GFR-binding peptide
  MOD_RES (1)..(35): Xaa is C or S
  MOD_RES (15)..(16)..(17)..(18)..(19): Xaa is A or G
  MOD_RES (20)..(21)..(22)..(23): Xaa is A or G or is absent

SEQ ID NO: 68220 - protein, 40 aa, Artificial Sequence; identical to SEQ ID NO: 9326
  GFR-binding peptide
  MOD_RES (4)..(5)..(39): Xaa is C or S
  MOD_RES (19)..(20)..(21)..(22)..(23): Xaa is A or G
  MOD_RES (24)..(25)..(26)..(27): Xaa is A or G or is absent

SEQ ID NO: 68221 - protein, 37 aa, Artificial Sequence; identical to SEQ ID NO: 9328
  GFR-binding peptide
  MOD_RES (3)..(4)..(36): Xaa is C or S

SEQ ID NO: 68222 - protein, 32 aa, Artificial Sequence
  GFR-binding peptide
  MOD_RES (14)..(15)..(16)..(17)..(18): Xaa is A or G
  MOD_RES (19)..(20)..(21)..(22): Xaa is A or G or is absent
VPEKMSATSILYYXXXXXXXXXLRKHRNMTVE

SEQ ID NO: 68223 - protein, 35 aa, Artificial Sequence; identical to SEQ ID NO: 57744
  GFR-binding peptide
  MOD_RES (2)..(3): Xaa is C or S
  MOD_RES (17)..(18)..(19)..(20)..(21): Xaa is A or G
  MOD_RES (22)..(23)..(24)..(25): Xaa is A or G or is absent

SEQ ID NO: 68224 - protein, 41 aa, Artificial Sequence; identical to SEQ ID NO: 32846
  GFR-binding peptide
  MOD_RES (5)..(6)..(38)..(40): Xaa is C or S

SEQ ID NO: 68225 - protein, 43 aa, Artificial Sequence; identical to SEQ ID NO: 9333
  GFR-binding peptide
  MOD_RES (4)..(5)..(40)..(42): Xaa is C or S
  MOD_RES (19)..(20)..(21)..(22)..(23): Xaa is A or G
  MOD_RES (24)..(25)..(26)..(27): Xaa is A or G or is absent

SEQ ID NO: 68226 - protein, 35 aa, Artificial Sequence
  GFR-binding peptide
  MOD_RES (1)..(2)..(34): Xaa is C or S
XXVPARLSATSILYYDAANNVVLRKHRDMVVEAXG

SEQ ID NO: 68227 - protein, 37 aa, Artificial Sequence; identical to SEQ ID NO: 30723
  GFR-binding peptide
  MOD_RES (34)..(36): Xaa is C or S
  MOD_RES (14)..(15)..(16)..(17)..(18): Xaa is A or G
  MOD_RES (19)..(20)..(21)..(22): Xaa is A or G or is absent

SEQ ID NO: 68228 - protein, 38 aa, Artificial Sequence
  GFR-binding peptide
  MOD_RES (3)..(4)..(37): Xaa is C or S
  MOD_RES (18)..(19)..(20)..(21)..(22): Xaa is A or G
  MOD_RES (23)..(24)..(25)..(26): Xaa is A or G or is absent
SPXXVSQDLSPINILYFXXXXXXXXXYGKIPMIVKSXK

SEQ ID NO: 68229 - protein, 30 aa, Artificial Sequence; identical to SEQ ID NO: 57751
  GFR-binding peptide

SEQ ID NO: 68230 - protein, 39 aa, Artificial Sequence
  GFR-binding peptide
  MOD_RES (6)..(7): Xaa is C or S
  MOD_RES (21)..(22)..(23)..(24)..(25): Xaa is A or G
  MOD_RES (26)..(27)..(28)..(29): Xaa is A or G or is absent
GIPEPXXVPEKMNAISILYFXXXXXXXXXLKKYRNMTVE

SEQ ID NO: 68231 - protein, 40 aa, Artificial Sequence
  GFR-binding peptide
  MOD_RES (5)..(6)..(37)..(39): Xaa is C or S
VPSTXXAPVKTSPISMLYKDNGRVLLLKYHYMIVEEXGXL

SEQ ID NO: 68232 - protein, 38 aa, Artificial Sequence; identical to SEQ ID NO: 30728
  GFR-binding peptide
  MOD_RES (4)..(5)..(37): Xaa is C or S

SEQ ID NO: 68233 - protein, 33 aa, Artificial Sequence; identical to SEQ ID NO: 9341
  GFR-binding peptide
  MOD_RES (14)..(15)..(16)..(17)..(18): Xaa is A or G
  MOD_RES (19)..(20)..(21)..(22): Xaa is A or G or is absent

SEQ ID NO: 68234 - protein, 41 aa, Artificial Sequence; identical to SEQ ID NO: 9342
  GFR-binding peptide
  MOD_RES (6)..(7)..(38)..(40): Xaa is C or S

SEQ ID NO: 68235 - protein, 39 aa, Artificial Sequence; identical to SEQ ID NO: 9344
  GFR-binding peptide
  MOD_RES (3)..(4)..(38): Xaa is C or S
  MOD_RES (18)..(19)..(20)..(21)..(22): Xaa is A or G
  MOD_RES (23)..(24)..(25)..(26): Xaa is A or G or is absent

SEQ ID NO: 68236 - protein, 38 aa, Artificial Sequence
  GFR-binding peptide
  MOD_RES (3)..(4)..(38): Xaa is C or S
  MOD_RES (18)..(19)..(20)..(21)..(22): Xaa is A or G
  MOD_RES (23)..(24)..(25)..(26): Xaa is A or G or is absent
EPXXVPEKMEPISILYLXXXXXXXXXKFKYENMTVESX

SEQ ID NO: 68237 - protein, 35 aa, Artificial Sequence; identical to SEQ ID NO: 32859
  GFR-binding peptide
  MOD_RES (33)..(35): Xaa is C or S

SEQ ID NO: 68238 - protein, 41 aa, Artificial Sequence; identical to SEQ ID NO: 9348
  GFR-binding peptide
  MOD_RES (4)..(5)..(38)..(40): Xaa is C or S
  MOD_RES (19)..(20)..(21)..(22)..(23): Xaa is A or G
  MOD_RES (24)..(25)..(26)..(27): Xaa is A or G or is absent

SEQ ID NO: 68239 - protein, 38 aa, Artificial Sequence; identical to SEQ ID NO: 30738
  GFR-binding peptide
  MOD_RES (1)..(35)..(37): Xaa is C or S
  MOD_RES (15)..(16)..(17)..(18)..(19): Xaa is A or G
  MOD_RES (20)..(21)..(22)..(23): Xaa is A or G or is absent

SEQ ID NO: 68240 - protein, 41 aa, Artificial Sequence
  GFR-binding peptide
  MOD_RES (6)..(7)..(40): Xaa is C or S
  MOD_RES (21)..(22)..(23)..(24)..(25): Xaa is A or G
  MOD_RES (26)..(27)..(28)..(29): Xaa is A or G or is absent
RVPSTXXAPVKTSATSMLYYXXXXXXXXXLRKHRMIVEEXG

SEQ ID NO: 68241 - protein, 36 aa, Artificial Sequence; identical to SEQ ID NO: 32865
  GFR-binding peptide
  MOD_RES (1)..(35): Xaa is C or S
  MOD_RES (15)..(16)..(17)..(18)..(19): Xaa is A or G
  MOD_RES (20)..(21)..(22)..(23): Xaa is A or G or is absent

SEQ ID NO: 68242 - protein, 36 aa, Artificial Sequence
  GFR-binding peptide
  MOD_RES (1)..(33)..(35): Xaa is C or S
XVPARLSATSILYYDAANNVVLRKHRDMVVEAXGXR

SEQ ID NO: 68243 - protein, 38 aa, Artificial Sequence; identical to SEQ ID NO: 30741
  GFR-binding peptide
  MOD_RES (1)..(2)..(36)..(38): Xaa is C or S
  MOD_RES (16)..(17)..(18)..(19)..(20): Xaa is A or G
  MOD_RES (21)..(22)..(23)..(24): Xaa is A or G or is absent

SEQ ID NO: 68244 - protein, 37 aa, Artificial Sequence; identical to SEQ ID NO: 30742
  GFR-binding peptide
  MOD_RES (6)..(7): Xaa is C or S

SEQ ID NO: 68245 - protein, 37 aa, Artificial Sequence; identical to SEQ ID NO: 9355
  GFR-binding peptide
  MOD_RES (4)..(5)..(37): Xaa is C or S

SEQ ID NO: 68246 - protein, 37 aa, Artificial Sequence; identical to SEQ ID NO: 30746
  GFR-binding peptide
  MOD_RES (1)..(34)..(36): Xaa is C or S

SEQ ID NO: 68247 - protein, 36 aa, Artificial Sequence; identical to SEQ ID NO: 9356
  GFR-binding peptide
  MOD_RES (1)..(2)..(34)..(36): Xaa is C or S

SEQ ID NO: 68248 - protein, 35 aa, Artificial Sequence
  GFR-binding peptide
  MOD_RES (2)..(3)..(35): Xaa is C or S
PXXVPEKMNAISILYFDENKNVVLKKYRNMTVESX

SEQ ID NO: 68249 - protein, 38 aa, Artificial Sequence
  GFR-binding peptide
  MOD_RES (4)..(5)..(37): Xaa is C or S
PEPXXVPEKMSPINILYFDENKNVVYGKIPNMTVESXA

SEQ ID NO: 68250 - protein, 43 aa, Artificial Sequence
  GFR-binding peptide
  MOD_RES (5)..(6)..(40)..(42): Xaa is C or S
  MOD_RES (20)..(21)..(22)..(23)..(24): Xaa is A or G
  MOD_RES (25)..(26)..(27)..(28): Xaa is A or G or is absent
IPEPXXVPEKMNAISILYFXXXXXXXXXLKKYRNMTVESXAXR

SEQ ID NO: 68251 - protein, 38 aa, Artificial Sequence; identical to SEQ ID NO: 9361
  GFR-binding peptide
  MOD_RES (3)..(4)..(38): Xaa is C or S
  MOD_RES (18)..(19)..(20)..(21)..(22): Xaa is A or G
  MOD_RES (23)..(24)..(25)..(26): Xaa is A or G or is absent

SEQ ID NO: 68252 - protein, 44 aa, Artificial Sequence; identical to SEQ ID NO: 30754
  GFR-binding peptide
  MOD_RES (6)..(7)..(41)..(43): Xaa is C or S
  MOD_RES (21)..(22)..(23)..(24)..(25): Xaa is A or G
  MOD_RES (26)..(27)..(28)..(29): Xaa is A or G or is absent

SEQ ID NO: 68253 - protein, 37 aa, Artificial Sequence; identical to SEQ ID NO: 9363
  GFR-binding peptide
  MOD_RES (34)..(36): Xaa is C or S
  MOD_RES (14)..(15)..(16)..(17)..(18): Xaa is A or G
  MOD_RES (19)..(20)..(21)..(22): Xaa is A or G or is absent

SEQ ID NO: 68254 - protein, 36 aa, Artificial Sequence; identical to SEQ ID NO: 30755
  GFR-binding peptide
  MOD_RES (4)..(5): Xaa is C or S

SEQ ID NO: 68255 - protein, 33 aa, Artificial Sequence; identical to SEQ ID NO: 32878
  GFR-binding peptide
  MOD_RES (1)..(2): Xaa is C or S

SEQ ID NO: 68256 - protein, 36 aa, Artificial Sequence
  GFR-binding peptide
  MOD_RES (3)..(4): Xaa is C or S
  MOD_RES (18)..(19)..(20)..(21)..(22): Xaa is A or G
  MOD_RES (23)..(24)..(25)..(26): Xaa is A or G or is absent
STXXAPVKTSPISMLYKXXXXXXXXXLKYHYMIVEE

SEQ ID NO: 68257 - protein, 39 aa, Artificial Sequence; identical to SEQ ID NO: 30758
  GFR-binding peptide
  MOD_RES (1)..(2)..(36)..(38): Xaa is C or S
  MOD_RES (16)..(17)..(18)..(19)..(20): Xaa is A or G
  MOD_RES (21)..(22)..(23)..(24): Xaa is A or G or is absent

SEQ ID NO: 68258 - protein, 43 aa, Artificial Sequence
  GFR-binding peptide
  MOD_RES (6)..(7)..(41)..(43): Xaa is C or S
  MOD_RES (21)..(22)..(23)..(24)..(25): Xaa is A or G
  MOD_RES (26)..(27)..(28)..(29): Xaa is A or G or is absent
GIPEPXXVPEKMSPISILYKXXXXXXXXXLKYHYNMTVESXAX

SEQ ID NO: 68259 - protein, 39 aa, Artificial Sequence; identical to SEQ ID NO: 9370
  GFR-binding peptide
  MOD_RES (6)..(7): Xaa is C or S
  MOD_RES (21)..(22)..(23)..(24)..(25): Xaa is A or G
  MOD_RES (26)..(27)..(28)..(29): Xaa is A or G or is absent

SEQ ID NO: 68260 - protein, 34 aa, Artificial Sequence; identical to SEQ ID NO: 32890
  GFR-binding peptide
  MOD_RES (32)..(34): Xaa is C or S

SEQ ID NO: 68261 - protein, 33 aa, Artificial Sequence; identical to SEQ ID NO: 32895
  GFR-binding peptide
  MOD_RES (14)..(15)..(16)..(17)..(18): Xaa is A or G
  MOD_RES (19)..(20)..(21)..(22): Xaa is A or G or is absent

SEQ ID NO: 68262 - protein, 41 aa, Artificial Sequence; identical to SEQ ID NO: 9371
  GFR-binding peptide
  MOD_RES (6)..(7)..(39)..(41): Xaa is C or S

SEQ ID NO: 68263 - protein, 39 aa, Artificial Sequence; identical to SEQ ID NO: 9373
  GFR-binding peptide
  MOD_RES (4)..(5)..(36)..(38): Xaa is C or S

SEQ ID NO: 68264 - protein, 42 aa, Artificial Sequence; identical to SEQ ID NO: 9374
  GFR-binding peptide
  MOD_RES (4)..(5)..(39)..(41): Xaa is C or S
  MOD_RES (19)..(20)..(21)..(22)..(23): Xaa is A or G
  MOD_RES (24)..(25)..(26)..(27): Xaa is A or G or is absent

SEQ ID NO: 68265 - protein, 33 aa, Artificial Sequence; identical to SEQ ID NO: 9375
  GFR-binding peptide
  MOD_RES (32)..(32): Xaa is C or S

SEQ ID NO: 68266 - protein, 37 aa, Artificial Sequence; identical to SEQ ID NO: 57813
  GFR-binding peptide
  MOD_RES (4)..(5): Xaa is C or S
  MOD_RES (19)..(20)..(21)..(22)..(23): Xaa is A or G
  MOD_RES (24)..(25)..(26)..(27): Xaa is A or G or is absent

SEQ ID NO: 68267 - protein, 39 aa, Artificial Sequence
  GFR-binding peptide
  MOD_RES (5)..(6)..(39): Xaa is C or S
  MOD_RES (20)..(21)..(22)..(23)..(24): Xaa is A or G
  MOD_RES (25)..(26)..(27)..(28): Xaa is A or G or is absent
VPSTXXAPVKTSATSMLYYXXXXXXXXXLRKHRMIVEEX

SEQ ID NO: 68268 - protein, 39 aa, Artificial Sequence; identical to SEQ ID NO: 30775
  GFR-binding peptide
  MOD_RES (3)..(4)..(36)..(38): Xaa is C or S

SEQ ID NO: 68269 - protein, 37 aa, Artificial Sequence
  GFR-binding peptide
  MOD_RES (6)..(7): Xaa is C or S
STPPTXXVPTRLEPISILYLDSANNVVKFKYEDMVVE

SEQ ID NO: 68270 - protein, 37 aa, Artificial Sequence
  GFR-binding peptide
  MOD_RES (1)..(35)..(37): Xaa is C or S
  MOD_RES (15)..(16)..(17)..(18)..(19): Xaa is A or G
  MOD_RES (20)..(21)..(22)..(23): Xaa is A or G or is absent
XTPTKMSPISMLYKXXXXXXXXXLKYHYGMVVDRXGX

SEQ ID NO: 68271 - protein, 35 aa, Artificial Sequence; identical to SEQ ID NO: 9381
  GFR-binding peptide
  MOD_RES (2)..(3): Xaa is C or S
  MOD_RES (17)..(18)..(19)..(20)..(21): Xaa is A or G
  MOD_RES (22)..(23)..(24)..(25): Xaa is A or G or is absent

SEQ ID NO: 68272 - protein, 33 aa, Artificial Sequence; identical to SEQ ID NO: 32916
  GFR-binding peptide
  MOD_RES (32)..(32): Xaa is C or S

SEQ ID NO: 68273 - protein, 38 aa, Artificial Sequence
  GFR-binding peptide
  MOD_RES (6)..(7): Xaa is C or S
STPPTXXVPTRLSATSILYYDSANNVVLRKHRDMVVES

SEQ ID NO: 68274 - protein, 36 aa, Artificial Sequence
  GFR-binding peptide
  MOD_RES (2)..(3): Xaa is C or S
  MOD_RES (17)..(18)..(19)..(20)..(21): Xaa is A or G
  MOD_RES (22)..(23)..(24)..(25): Xaa is A or G or is absent
TXXVPTRLSATSILYYXXXXXXXXXLRKHRDMVVES

SEQ ID NO: 68275 - protein, 32 aa, Artificial Sequence; identical to SEQ ID NO: 9383
  GFR-binding peptide
  MOD_RES (14)..(15)..(16)..(17)..(18): Xaa is A or G
  MOD_RES (19)..(20)..(21)..(22): Xaa is A or G or is absent

SEQ ID NO: 68276 - protein, 35 aa, Artificial Sequence; identical to SEQ ID NO: 9385
  GFR-binding peptide
  MOD_RES (4)..(5): Xaa is C or S

SEQ ID NO: 68277 - protein, 37 aa, Artificial Sequence; identical to SEQ ID NO: 9386
  GFR-binding peptide
  MOD_RES (2)..(3)..(35)..(37): Xaa is C or S

SEQ ID NO: 68278 - protein, 42 aa, Artificial Sequence; identical to SEQ ID NO: 30784
  GFR-binding peptide
  MOD_RES (5)..(6)..(39)..(41): Xaa is C or S
  MOD_RES (20)..(21)..(22)..(23)..(24): Xaa is A or G
  MOD_RES (25)..(26)..(27)..(28): Xaa is A or G or is absent

SEQ ID NO: 68279 - protein, 37 aa, Artificial Sequence; identical to SEQ ID NO: 30786
  GFR-binding peptide
  MOD_RES (5)..(6): Xaa is C or S

SEQ ID NO: 68280 - protein, 40 aa, Artificial Sequence; identical to SEQ ID NO: 9388
  GFR-binding peptide
  MOD_RES (3)..(4)..(38)..(40): Xaa is C or S
  MOD_RES (18)..(19)..(20)..(21)..(22): Xaa is A or G
  MOD_RES (23)..(24)..(25)..(26): Xaa is A or G or is absent

SEQ ID NO: 68281 - protein, 38 aa, Artificial Sequence; identical to SEQ ID NO: 9389
  GFR-binding peptide
  MOD_RES (3)..(4)..(37): Xaa is C or S
  MOD_RES (18)..(19)..(20)..(21)..(22): Xaa is A or G
  MOD_RES (23)..(24)..(25)..(26): Xaa is A or G or is absent

SEQ ID NO: 68282 - protein, 38 aa, Artificial Sequence; identical to SEQ ID NO: 9390
  GFR-binding peptide
  MOD_RES (1)..(2)..(35)..(37): Xaa is C or S
  MOD_RES (16)..(17)..(18)..(19)..(20): Xaa is A or G
  MOD_RES (21)..(22)..(23)..(24): Xaa is A or G or is absent

SEQ ID NO: 68283 - protein, 32 aa, Artificial Sequence
  GFR-binding peptide
  MOD_RES (32)..(32): Xaa is C or S
VPTRLEPISILYLDSANNVVKFKYEDMVVESX

SEQ ID NO: 68284 - protein, 34 aa, Artificial Sequence; identical to SEQ ID NO: 9392
  GFR-binding peptide
  MOD_RES (1)..(1): Xaa is C or S
  MOD_RES (15)..(16)..(17)..(18)..(19): Xaa is A or G
  MOD_RES (20)..(21)..(22)..(23): Xaa is A or G or is absent

SEQ ID NO: 68285 - protein, 40 aa, Artificial Sequence
  GFR-binding peptide
  MOD_RES (5)..(6)..(38)..(40): Xaa is C or S
TPPTXXVPTRLSATSILYYDSANNVVLRKHRDMVVESXGX

SEQ ID NO: 68286 - protein, 33 aa, Artificial Sequence; identical to SEQ ID NO: 30790
  GFR-binding peptide
  MOD_RES (14)..(15)..(16)..(17)..(18): Xaa is A or G
  MOD_RES (19)..(20)..(21)..(22): Xaa is A or G or is absent

SEQ ID NO: 68287 - protein, 37 aa, Artificial Sequence; identical to SEQ ID NO: 9394
  GFR-binding peptide
  MOD_RES (35)..(37): Xaa is C or S
  MOD_RES (14)..(15)..(16)..(17)..(18): Xaa is A or G
  MOD_RES (19)..(20)..(21)..(22): Xaa is A or G or is absent

SEQ ID NO: 68288 - protein, 35 aa, Artificial Sequence
  GFR-binding peptide
  MOD_RES (2)..(3)..(34): Xaa is C or S
TXXAPVKTSATSMLYYDNGRVLLLRKHRMIVEEXG

SEQ ID NO: 68289 - protein, 39 aa, Artificial Sequence
  GFR-binding peptide
  MOD_RES (4)..(5)..(39): Xaa is C or S
  MOD_RES (19)..(20)..(21)..(22)..(23): Xaa is A or G
  MOD_RES (24)..(25)..(26)..(27): Xaa is A or G or is absent
PEPXXVPEKMSPISILYKXXXXXXXXXLKYHYNMTVESX

SEQ ID NO: 68290 - protein, 42 aa, Artificial Sequence; identical to SEQ ID NO: 9396
  GFR-binding peptide
  MOD_RES (5)..(6)..(40)..(42): Xaa is C or S
  MOD_RES (20)..(21)..(22)..(23)..(24): Xaa is A or G
  MOD_RES (25)..(26)..(27)..(28): Xaa is A or G or is absent

SEQ ID NO: 68291 - protein, 36 aa, Artificial Sequence; identical to SEQ ID NO: 30796
  GFR-binding peptide
  MOD_RES (1)..(2)..(36): Xaa is C or S
  MOD_RES (16)..(17)..(18)..(19)..(20): Xaa is A or G
  MOD_RES (21)..(22)..(23)..(24): Xaa is A or G or is absent

SEQ ID NO: 68292 - protein, 31 aa, Artificial Sequence
  GFR-binding peptide
  MOD_RES (1)..(1): Xaa is C or S
XTPTKMEPISMLYLNDKQQIIKFKYEGMVVD

SEQ ID NO: 68293 - protein, 40 aa, Artificial Sequence
  GFR-binding peptide
  MOD_RES (4)..(5)..(39): Xaa is C or S
  MOD_RES (19)..(20)..(21)..(22)..(23): Xaa is A or G
  MOD_RES (24)..(25)..(26)..(27): Xaa is A or G or is absent
PPTXXVPTRLSATSILYYXXXXXXXXXLRKHRDMVVESXG

SEQ ID NO: 68294 - protein, 39 aa, Artificial Sequence; identical to SEQ ID NO: 30802
  GFR-binding peptide
  MOD_RES (6)..(7): Xaa is C or S
  MOD_RES (21)..(22)..(23)..(24)..(25): Xaa is A or G
  MOD_RES (26)..(27)..(28)..(29): Xaa is A or G or is absent

SEQ ID NO: 68295 - protein, 40 aa, Artificial Sequence; identical to SEQ ID NO: 57836
  GFR-binding peptide
  MOD_RES (6)..(7)..(39): Xaa is C or S

SEQ ID NO: 68296 - protein, 34 aa, Artificial Sequence; identical to SEQ ID NO: 30803
  GFR-binding peptide
  MOD_RES (1)..(2)..(34): Xaa is C or S

SEQ ID NO: 68297 - protein, 44 aa, Artificial Sequence
  GFR-binding peptide
  MOD_RES (6)..(7)..(41)..(43): Xaa is C or S
  MOD_RES (21)..(22)..(23)..(24)..(25): Xaa is A or G
  MOD_RES (26)..(27)..(28)..(29): Xaa is A or G or is absent
AAPASXXVPARLSATSILYYXXXXXXXXXLRKHRDMVVEAXGXR

SEQ ID NO: 68298 - protein, 40 aa, Artificial Sequence; identical to SEQ ID NO: 9402
  GFR-binding peptide
  MOD_RES (7)..(7): Xaa is C or S
  MOD_RES (21)..(22)..(23)..(24)..(25): Xaa is A or G
  MOD_RES (26)..(27)..(28)..(29): Xaa is A or G or is absent

SEQ ID NO: 68299 - protein, 42 aa, Artificial Sequence; identical to SEQ ID NO: 30807
  GFR-binding peptide
  MOD_RES (6)..(7)..(39)..(41): Xaa is C or S

SEQ ID NO: 68300 - protein, 36 aa, Artificial Sequence
  GFR-binding peptide
  MOD_RES (34)..(36): Xaa is C or S
  MOD_RES (14)..(15)..(16)..(17)..(18): Xaa is A or G
  MOD_RES (19)..(20)..(21)..(22): Xaa is A or G or is absent
VPARLSATSILYYXXXXXXXXXLRKHRDMVVEAXGX

SEQ ID NO: 68301 - protein, 32 aa, Artificial Sequence
  GFR-binding peptide
  MOD_RES (31)..(31): Xaa is C or S
VPQDLSPINILYFVGRTPKVYGKIPMVVKSXK

SEQ ID NO: 68302 - protein, 37 aa, Artificial Sequence; identical to SEQ ID NO: 9406
  GFR-binding peptide
  MOD_RES (4)..(5)..(36): Xaa is C or S

SEQ ID NO: 68303 - protein, 35 aa, Artificial Sequence; identical to SEQ ID NO: 57845
  GFR-binding peptide
  MOD_RES (1)..(2): Xaa is C or S
  MOD_RES (16)..(17)..(18)..(19)..(20): Xaa is A or G
  MOD_RES (21)..(22)..(23)..(24): Xaa is A or G or is absent

SEQ ID NO: 68304 - protein, 30 aa, Artificial Sequence
  GFR-binding peptide
APVKTSATSMLYYDNGRVLLLRKHRMIVEE

SEQ ID NO: 68305 - protein, 35 aa, Artificial Sequence; identical to SEQ ID NO: 32952
  GFR-binding peptide
  MOD_RES (2)..(3): Xaa is C or S
  MOD_RES (17)..(18)..(19)..(20)..(21): Xaa is A or G
  MOD_RES (22)..(23)..(24)..(25): Xaa is A or G or is absent

SEQ ID NO: 68306 - protein, 36 aa, Artificial Sequence; identical to SEQ ID NO: 32956
  GFR-binding peptide
  MOD_RES (1)..(2)..(36): Xaa is C or S
  MOD_RES (16)..(17)..(18)..(19)..(20): Xaa is A or G
  MOD_RES (21)..(22)..(23)..(24): Xaa is A or G or is absent

SEQ ID NO: 68307 - protein, 36 aa, Artificial Sequence; identical to SEQ ID NO: 9415
  GFR-binding peptide
  MOD_RES (1)..(35): Xaa is C or S
  MOD_RES (15)..(16)..(17)..(18)..(19): Xaa is A or G
  MOD_RES (20)..(21)..(22)..(23): Xaa is A or G or is absent

SEQ ID NO: 68308 - protein, 33 aa, Artificial Sequence
  GFR-binding peptide
  MOD_RES (14)..(15)..(16)..(17)..(18): Xaa is A or G
  MOD_RES (19)..(20)..(21)..(22): Xaa is A or G or is absent
VPARLSATSILYYXXXXXXXXXLRKHRDMVVEA

SEQ ID NO: 68309 - protein, 37 aa, Artificial Sequence
  GFR-binding peptide
  MOD_RES (6)..(7): Xaa is C or S
GSAGPXXTPTKMSATSMLYYNDKQQIILRKHRGMVVD

SEQ ID NO: 68310 - protein, 34 aa, Artificial Sequence; identical to SEQ ID NO: 30827
  GFR-binding peptide
  MOD_RES (33)..(33): Xaa is C or S

SEQ ID NO: 68311 - protein, 37 aa, Artificial Sequence; identical to SEQ ID NO: 9422
  GFR-binding peptide
  MOD_RES (4)..(5): Xaa is C or S

SEQ ID NO: 68312 - protein, 39 aa, Artificial Sequence; identical to SEQ ID NO: 9423
  GFR-binding peptide
  MOD_RES (3)..(4)..(36)..(38): Xaa is C or S

SEQ ID NO: 68313 - protein, 38 aa, Artificial Sequence
  GFR-binding peptide
  MOD_RES (1)..(35)..(37): Xaa is C or S
  MOD_RES (15)..(16)..(17)..(18)..(19): Xaa is A or G
  MOD_RES (20)..(21)..(22)..(23): Xaa is A or G or is absent
XVPARLSATSILYYXXXXXXXXXLRKHRDMVVEAXGXR

SEQ ID NO: 68314 - protein, 34 aa, Artificial Sequence
  GFR-binding peptide
  MOD_RES (32)..(34): Xaa is C or S
TPTKMEPISMLYLNDKQQIIKFKYEGMVVDRXGX

SEQ ID NO: 68315 - protein, 35 aa, Artificial Sequence; identical to SEQ ID NO: 30832
  GFR-binding peptide
  MOD_RES (4)..(5): Xaa is C or S

SEQ ID NO: 68316 - protein, 40 aa, Artificial Sequence; identical to SEQ ID NO: 32971
  GFR-binding peptide
  MOD_RES (3)..(4)..(38)..(40): Xaa is C or S
  MOD_RES (18)..(19)..(20)..(21)..(22): Xaa is A or G
  MOD_RES (23)..(24)..(25)..(26): Xaa is A or G or is absent

SEQ ID NO: 68317 - protein, 37 aa, Artificial Sequence; identical to SEQ ID NO: 30834
  GFR-binding peptide
  MOD_RES (3)..(4): Xaa is C or S
  MOD_RES (18)..(19)..(20)..(21)..(22): Xaa is A or G
  MOD_RES (23)..(24)..(25)..(26): Xaa is A or G or is absent

SEQ ID NO: 68318 - protein, 39 aa, Artificial Sequence; identical to SEQ ID NO: 9428
  GFR-binding peptide
  MOD_RES (2)..(3)..(37)..(39): Xaa is C or S
  MOD_RES (17)..(18)..(19)..(20)..(21): Xaa is A or G
  MOD_RES (22)..(23)..(24)..(25): Xaa is A or G or is absent

SEQ ID NO: 68319 - protein, 38 aa, Artificial Sequence; identical to SEQ ID NO: 32975
  GFR-binding peptide
  MOD_RES (1)..(35)..(37): Xaa is C or S
  MOD_RES (15)..(16)..(17)..(18)..(19): Xaa is A or G
  MOD_RES (20)..(21)..(22)..(23): Xaa is A or G or is absent

SEQ ID NO: 68320 - protein, 35 aa, Artificial Sequence
  GFR-binding peptide
  MOD_RES (1)..(35): Xaa is C or S
  MOD_RES (15)..(16)..(17)..(18)..(19): Xaa is A or G
  MOD_RES (20)..(21)..(22)..(23): Xaa is A or G or is absent
XVPARLSATSILYYXXXXXXXXXLRKHRDMVVEAX

SEQ ID NO: 68321 - protein, 37 aa, Artificial Sequence; identical to SEQ ID NO: 9430
  GFR-binding peptide
  MOD_RES (5)..(6): Xaa is C or S

SEQ ID NO: 68322 - protein, 39 aa, Artificial Sequence; identical to SEQ ID NO: 57867
  GFR-binding peptide
  MOD_RES (6)..(7)..(38): Xaa is C or S

SEQ ID NO: 68323 - protein, 34 aa, Artificial Sequence; identical to SEQ ID NO: 30838
  GFR-binding peptide
  MOD_RES (3)..(4): Xaa is C or S

SEQ ID NO: 68324 - protein, 43 aa, Artificial Sequence; identical to SEQ ID NO: 30840
  GFR-binding peptide
  MOD_RES (6)..(7)..(41)..(43): Xaa is C or S
  MOD_RES (21)..(22)..(23)..(24)..(25): Xaa is A or G
  MOD_RES (26)..(27)..(28)..(29): Xaa is A or G or is absent

SEQ ID NO: 68325 - protein, 40 aa, Artificial Sequence; identical to SEQ ID NO: 9437
  GFR-binding peptide
  MOD_RES (3)..(4)..(38)..(40): Xaa is C or S
  MOD_RES (18)..(19)..(20)..(21)..(22): Xaa is A or G
  MOD_RES (23)..(24)..(25)..(26): Xaa is A or G or is absent

SEQ ID NO: 68326 - protein, 39 aa, Artificial Sequence; identical to SEQ ID NO: 57875
  GFR-binding peptide
  MOD_RES (6)..(7): Xaa is C or S
  MOD_RES (21)..(22)..(23)..(24)..(25): Xaa is A or G
  MOD_RES (26)..(27)..(28)..(29): Xaa is A or G or is absent

SEQ ID NO: 68327 - protein, 31 aa, Artificial Sequence; identical to SEQ ID NO: 32985
  GFR-binding peptide
  MOD_RES (1)..(1): Xaa is C or S

SEQ ID NO: 68328 - protein, 35 aa, Artificial Sequence; identical to SEQ ID NO: 32986
  GFR-binding peptide
  MOD_RES (34)..(34): Xaa is C or S
  MOD_RES (14)..(15)..(16)..(17)..(18): Xaa is A or G
  MOD_RES (19)..(20)..(21)..(22): Xaa is A or G or is absent

SEQ ID NO: 68329 - protein, 37 aa, Artificial Sequence; identical to SEQ ID NO: 32987
  GFR-binding peptide
  MOD_RES (2)..(3)..(37): Xaa is C or S
  MOD_RES (17)..(18)..(19)..(20)..(21): Xaa is A or G
  MOD_RES (22)..(23)..(24)..(25): Xaa is A or G or is absent

SEQ ID NO: 68330 - protein, 40 aa, Artificial Sequence; identical to SEQ ID NO: 30844
  GFR-binding peptide
  MOD_RES (3)..(4)..(38)..(40): Xaa is C or S
  MOD_RES (18)..(19)..(20)..(21)..(22): Xaa is A or G
  MOD_RES (23)..(24)..(25)..(26): Xaa is A or G or is absent

SEQ ID NO: 68331 - protein, 30 aa, Artificial Sequence; identical to SEQ ID NO: 9444
  GFR-binding peptide

SEQ ID NO: 68332 - protein, 41 aa, Artificial Sequence; identical to SEQ ID NO: 9445
  GFR-binding peptide
  MOD_RES (3)..(4)..(38)..(40): Xaa is C or S
  MOD_RES (18)..(19)..(20)..(21)..(22): Xaa is A or G
  MOD_RES (23)..(24)..(25)..(26): Xaa is A or G or is absent

SEQ ID NO: 68333 - protein, 41 aa, Artificial Sequence
  GFR-binding peptide
  MOD_RES (3)..(4)..(38)..(40): Xaa is C or S
  MOD_RES (18)..(19)..(20)..(21)..(22): Xaa is A or G
  MOD_RES (23)..(24)..(25)..(26): Xaa is A or G or is absent
GPXXTPTKMSPISMLYKXXXXXXXXXLKYHYGMVVDRXGXS

SEQ ID NO: 68334 - protein, 38 aa, Artificial Sequence; identical to SEQ ID NO: 9447
  GFR-binding peptide
  MOD_RES (6)..(7): Xaa is C or S

SEQ ID NO: 68335 - protein, 31 aa, Artificial Sequence; identical to SEQ ID NO: 9449
  GFR-binding peptide

SEQ ID NO: 68336 - protein, 40 aa, Artificial Sequence; identical to SEQ ID NO: 32997
  GFR-binding peptide
  MOD_RES (4)..(5)..(37)..(39): Xaa is C or S

SEQ ID NO: 68337 - protein, 36 aa, Artificial Sequence
  GFR-binding peptide
  MOD_RES (1)..(2)..(36): Xaa is C or S
  MOD_RES (16)..(17)..(18)..(19)..(20): Xaa is A or G
  MOD_RES (21)..(22)..(23)..(24): Xaa is A or G or is absent
XXVPTRLSATSILYYXXXXXXXXXLRKHRDMVVESX

SEQ ID NO: 68338 - protein, 34 aa, Artificial Sequence
  GFR-binding peptide
  MOD_RES (31)..(33): Xaa is C or S
APVKTSATSMLYYDNGRVLLLRKHRMIVEEXGXL

SEQ ID NO: 68339 - protein, 38 aa, Artificial Sequence; identical to SEQ ID NO: 9456
  GFR-binding peptide
  MOD_RES (5)..(6): Xaa is C or S
  MOD_RES (20)..(21)..(22)..(23)..(24): Xaa is A or G
  MOD_RES (25)..(26)..(27)..(28): Xaa is A or G or is absent

SEQ ID NO: 68340 - protein, 40 aa, Artificial Sequence; identical to SEQ ID NO: 9457
  GFR-binding peptide
  MOD_RES (6)..(40): Xaa is C or S
  MOD_RES (20)..(21)..(22)..(23)..(24): Xaa is A or G
  MOD_RES (25)..(26)..(27)..(28): Xaa is A or G or is absent

SEQ ID NO: 68341 - protein, 38 aa, Artificial Sequence; identical to SEQ ID NO: 9459
  GFR-binding peptide
  MOD_RES (2)..(3)..(35)..(37): Xaa is C or S

SEQ ID NO: 68342 - protein, 36 aa, Artificial Sequence; identical to SEQ ID NO: 9462
  GFR-binding peptide
  MOD_RES (3)..(4): Xaa is C or S
  MOD_RES (18)..(19)..(20)..(21)..(22): Xaa is A or G
  MOD_RES (23)..(24)..(25)..(26): Xaa is A or G or is absent

SEQ ID NO: 68343 - protein, 41 aa, Artificial Sequence; identical to SEQ ID NO: 30862
  GFR-binding peptide
  MOD_RES (6)..(7)..(39)..(41): Xaa is C or S

SEQ ID NO: 68344 - protein, 39 aa, Artificial Sequence; identical to SEQ ID NO: 9464
  GFR-binding peptide
  MOD_RES (7)..(39): Xaa is C or S

SEQ ID NO: 68345 - protein, 39 aa, Artificial Sequence; identical to SEQ ID NO: 9465
  GFR-binding peptide
  MOD_RES (3)..(4)..(36)..(38): Xaa is C or S

SEQ ID NO: 68346 - protein, 37 aa, Artificial Sequence
  GFR-binding peptide
  MOD_RES (3)..(4)..(36): Xaa is C or S
GPXXTPTKMSPISMLYKNDKQQIILKYHYGMVVDRXG

SEQ ID NO: 68347 - protein, 41 aa, Artificial Sequence
  GFR-binding peptide
  MOD_RES (6)..(7)..(41): Xaa is C or S
  MOD_RES (21)..(22)..(23)..(24)..(25): Xaa is A or G
  MOD_RES (26)..(27)..(28)..(29): Xaa is A or G or is absent
STPPTXXVPTRLEPISILYLXXXXXXXXXKFKYEDMVVESX

SEQ ID NO: 68348 - protein, 38 aa, Artificial Sequence; identical to SEQ ID NO: 30866
  GFR-binding peptide
  MOD_RES (1)..(2)..(36)..(38): Xaa is C or S
  MOD_RES (16)..(17)..(18)..(19)..(20): Xaa is A or G
  MOD_RES (21)..(22)..(23)..(24): Xaa is A or G or is absent

SEQ ID NO: 68349 - protein, 36 aa, Artificial Sequence; identical to SEQ ID NO: 9468
  GFR-binding peptide
  MOD_RES (3)..(4)..(35): Xaa is C or S

SEQ ID NO: 68350 - protein, 35 aa, Artificial Sequence; identical to SEQ ID NO: 33016
  GFR-binding peptide
  MOD_RES (1)..(35): Xaa is C or S
  MOD_RES (15)..(16)..(17)..(18)..(19): Xaa is A or G
  MOD_RES (20)..(21)..(22)..(23): Xaa is A or G or is absent

SEQ ID NO: 68351 - protein, 39 aa, Artificial Sequence; identical to SEQ ID NO: 33020
  GFR-binding peptide
  MOD_RES (4)..(5)..(37)..(39): Xaa is C or S

SEQ ID NO: 68352 - protein, 34 aa, Artificial Sequence; identical to SEQ ID NO: 33021
  GFR-binding peptide
  MOD_RES (1)..(2)..(33): Xaa is C or S

SEQ ID NO: 68353 - protein, 40 aa, Artificial Sequence; identical to SEQ ID NO: 9471
  GFR-binding peptide
  MOD_RES (4)..(5)..(40): Xaa is C or S
  MOD_RES (19)..(20)..(21)..(22)..(23): Xaa is A or G
  MOD_RES (24)..(25)..(26)..(27): Xaa is A or G or is absent

SEQ ID NO: 68354 - protein, 39 aa, Artificial Sequence
  GFR-binding peptide
  MOD_RES (1)..(2)..(36)..(38): Xaa is C or S
  MOD_RES (16)..(17)..(18)..(19)..(20): Xaa is A or G
  MOD_RES (21)..(22)..(23)..(24): Xaa is A or G or is absent
XXVPEKMSPINILYFXXXXXXXXXYGKIPNMTVESXAXR

SEQ ID NO: 68355 - protein, 42 aa, Artificial Sequence; identical to SEQ ID NO: 30876
  GFR-binding peptide
  MOD_RES (4)..(5)..(39)..(41): Xaa is C or S
  MOD_RES (19)..(20)..(21)..(22)..(23): Xaa is A or G
  MOD_RES (24)..(25)..(26)..(27): Xaa is A or G or is absent

SEQ ID NO: 68356 - protein, 38 aa, Artificial Sequence; identical to SEQ ID NO: 9478
  GFR-binding peptide
  MOD_RES (5)..(6): Xaa is C or S
  MOD_RES (20)..(21)..(22)..(23)..(24): Xaa is A or G
  MOD_RES (25)..(26)..(27)..(28): Xaa is A or G or is absent

SEQ ID NO: 68357 - protein, 37 aa, Artificial Sequence; identical to SEQ ID NO: 33032
  GFR-binding peptide
  MOD_RES (4)..(5): Xaa is C or S
  MOD_RES (19)..(20)..(21)..(22)..(23): Xaa is A or G
  MOD_RES (24)..(25)..(26)..(27): Xaa is A or G or is absent

SEQ ID NO: 68358 - protein, 38 aa, Artificial Sequence
  GFR-binding peptide
  MOD_RES (1)..(2)..(36)..(38): Xaa is C or S
  MOD_RES (16)..(17)..(18)..(19)..(20): Xaa is A or G
  MOD_RES (21)..(22)..(23)..(24): Xaa is A or G or is absent
XXVPEKMSPISILYKXXXXXXXXXLKYHYNMTVESXAX

SEQ ID NO: 68359 - protein, 35 aa, Artificial Sequence; identical to SEQ ID NO: 9484
  GFR-binding peptide
  MOD_RES (1)..(2)..(34): Xaa is C or S

SEQ ID NO: 68360 - protein, 37 aa, Artificial Sequence; identical to SEQ ID NO: 33036
  GFR-binding peptide
  MOD_RES (3)..(4)..(36): Xaa is C or S

SEQ ID NO: 68361 - protein, 35 aa, Artificial Sequence; identical to SEQ ID NO: 30887
  GFR-binding peptide
  MOD_RES (1)..(2)..(33)..(35): Xaa is C or S

SEQ ID NO: 68362 - protein, 41 aa, Artificial Sequence; identical to SEQ ID NO: 9485
  GFR-binding peptide
  MOD_RES (3)..(4)..(38)..(40): Xaa is C or S
  MOD_RES (18)..(19)..(20)..(21)..(22): Xaa is A or G
  MOD_RES (23)..(24)..(25)..(26): Xaa is A or G or is absent

SEQ ID NO: 68363 - protein, 36 aa, Artificial Sequence; identical to SEQ ID NO: 9491
  GFR-binding peptide
  MOD_RES (1)..(2)..(35): Xaa is C or S
  MOD_RES (16)..(17)..(18)..(19)..(20): Xaa is A or G
  MOD_RES (21)..(22)..(23)..(24): Xaa is A or G or is absent

SEQ ID NO: 68364 - protein, 38 aa, Artificial Sequence
  GFR-binding peptide
  MOD_RES (5)..(6): Xaa is C or S
  MOD_RES (20)..(21)..(22)..(23)..(24): Xaa is A or G
  MOD_RES (25)..(26)..(27)..(28): Xaa is A or G or is absent
IPEPXXVPEKMSATSILYYXXXXXXXXXLRKHRNMTVE

SEQ ID NO: 68365 - protein, 40 aa, Artificial Sequence; identical to SEQ ID NO: 30893
  GFR-binding peptide
  MOD_RES (5)..(6)..(40): Xaa is C or S
  MOD_RES (20)..(21)..(22)..(23)..(24): Xaa is A or G
  MOD_RES (25)..(26)..(27)..(28): Xaa is A or G or is absent

SEQ ID NO: 68366 - protein, 35 aa, Artificial Sequence
  GFR-binding peptide
  MOD_RES (3)..(4): Xaa is C or S
KAXXVPTKLSATSILYYDKGVVTYLRKHRGMAVSE

SEQ ID NO: 68367 - protein, 40 aa, Artificial Sequence; identical to SEQ ID NO: 9494
  GFR-binding peptide
  MOD_RES (6)..(7)..(39): Xaa is C or S

SEQ ID NO: 68368 - protein, 38 aa, Artificial Sequence; identical to SEQ ID NO: 33044
  GFR-binding peptide
  MOD_RES (1)..(2)..(36)..(38): Xaa is C or S
  MOD_RES (16)..(17)..(18)..(19)..(20): Xaa is A or G
  MOD_RES (21)..(22)..(23)..(24): Xaa is A or G or is absent

SEQ ID NO: 68369 - protein, 39 aa, Artificial Sequence
  GFR-binding peptide
  MOD_RES (4)..(5)..(38): Xaa is C or S
  MOD_RES (19)..(20)..(21)..(22)..(23): Xaa is A or G
  MOD_RES (24)..(25)..(26)..(27): Xaa is A or G or is absent
AAPXXVPQALSPINILYFXXXXXXXXXYGKIPMIVRSXK

SEQ ID NO: 68370 - protein, 36 aa, Artificial Sequence
  GFR-binding peptide
  MOD_RES (4)..(5)..(36): Xaa is C or S
ASPXXVSQDLSPINILYFIGKTPKIYGKIPMIVKSX

SEQ ID NO: 68371 - protein, 32 aa, Artificial Sequence
  GFR-binding peptide
  MOD_RES (1)..(1): Xaa is C or S
XVPTRLSPISILYKDSANNVVLKYHYDMVVES

SEQ ID NO: 68372 - protein, 35 aa, Artificial Sequence; identical to SEQ ID NO: 30899
  GFR-binding peptide
  MOD_RES (1)..(35): Xaa is C or S
  MOD_RES (15)..(16)..(17)..(18)..(19): Xaa is A or G
  MOD_RES (20)..(21)..(22)..(23): Xaa is A or G or is absent

SEQ ID NO: 68373 - protein, 34 aa, Artificial Sequence
  GFR-binding peptide
  MOD_RES (33)..(33): Xaa is C or S
  MOD_RES (14)..(15)..(16)..(17)..(18): Xaa is A or G
  MOD_RES (19)..(20)..(21)..(22): Xaa is A or G or is absent
APVKTEPISMLYLXXXXXXXXXKFKYEMIVEEXG

SEQ ID NO: 68374 - protein, 39 aa, Artificial Sequence; identical to SEQ ID NO: 9498
  GFR-binding peptide
  MOD_RES (1)..(2)..(37)..(39): Xaa is C or S
  MOD_RES (16)..(17)..(18)..(19)..(20): Xaa is A or G
  MOD_RES (21)..(22)..(23)..(24): Xaa is A or G or is absent

SEQ ID NO: 68375 - protein, 43 aa, Artificial Sequence; identical to SEQ ID NO: 9503
  GFR-binding peptide
  MOD_RES (6)..(7)..(40)..(42): Xaa is C or S
  MOD_RES (21)..(22)..(23)..(24)..(25): Xaa is A or G
  MOD_RES (26)..(27)..(28)..(29): Xaa is A or G or is absent

SEQ ID NO: 68376 - protein, 41 aa, Artificial Sequence; identical to SEQ ID NO: 9504
  GFR-binding peptide
  MOD_RES (6)..(7)..(38)..(40): Xaa is C or S

SEQ ID NO: 68377 - protein, 33 aa, Artificial Sequence
  GFR-binding peptide
  MOD_RES (2)..(3): Xaa is C or S
TXXAPVKTSATSMLYYDNGRVLLLRKHRMIVEE

SEQ ID NO: 68378 - protein, 35 aa, Artificial Sequence; identical to SEQ ID NO: 9506
  GFR-binding peptide
  MOD_RES (1)..(2)..(34): Xaa is C or S

SEQ ID NO: 68379 - protein, 32 aa, Artificial Sequence; identical to SEQ ID NO: 57942
  GFR-binding peptide
  MOD_RES (31)..(31): Xaa is C or S

SEQ ID NO: 68380 - protein, 42 aa, Artificial Sequence; identical to SEQ ID NO: 9508
  GFR-binding peptide
  MOD_RES (7)..(41): Xaa is C or S
  MOD_RES (21)..(22)..(23)..(24)..(25): Xaa is A or G
  MOD_RES (26)..(27)..(28)..(29): Xaa is A or G or is absent

SEQ ID NO: 68381 - protein, 38 aa, Artificial Sequence
  GFR-binding peptide
  MOD_RES (5)..(6): Xaa is C or S
  MOD_RES (20)..(21)..(22)..(23)..(24): Xaa is A or G
  MOD_RES (25)..(26)..(27)..(28): Xaa is A or G or is absent
SAGPXXTPTKMSATSMLYYXXXXXXXXXLRKHRGMVVD

SEQ ID NO: 68382 - protein, 35 aa, Artificial Sequence
  GFR-binding peptide
  MOD_RES (1)..(35): Xaa is C or S
  MOD_RES (15)..(16)..(17)..(18)..(19): Xaa is A or G
  MOD_RES (20)..(21)..(22)..(23): Xaa is A or G or is absent
XTPTKMSATSMLYYXXXXXXXXXLRKHRGMVVDRX

SEQ ID NO: 68383 - protein, 41 aa, Artificial Sequence; identical to SEQ ID NO: 30910
  GFR-binding peptide
  MOD_RES (6)..(7)..(40): Xaa is C or S
  MOD_RES (21)..(22)..(23)..(24)..(25): Xaa is A or G
  MOD_RES (26)..(27)..(28)..(29): Xaa is A or G or is absent

SEQ ID NO: 68384 - protein, 38 aa, Artificial Sequence; identical to SEQ ID NO: 30914
  GFR-binding peptide
  MOD_RES (6)..(38): Xaa is C or S

SEQ ID NO: 68385 - protein, 34 aa, Artificial Sequence; identical to SEQ ID NO: 9518
  GFR-binding peptide
  MOD_RES (33)..(33): Xaa is C or S
  MOD_RES (14)..(15)..(16)..(17)..(18): Xaa is A or G
  MOD_RES (19)..(20)..(21)..(22): Xaa is A or G or is absent

SEQ ID NO: 68386 - protein, 31 aa, Artificial Sequence; identical to SEQ ID NO: 9519
  GFR-binding peptide

SEQ ID NO: 68387 - protein, 40 aa, Artificial Sequence; identical to SEQ ID NO: 9521
  GFR-binding peptide
  MOD_RES (3)..(4)..(39): Xaa is C or S
  MOD_RES (18)..(19)..(20)..(21)..(22): Xaa is A or G
  MOD_RES (23)..(24)..(25)..(26): Xaa is A or G or is absent

SEQ ID NO: 68388 - protein, 37 aa, Artificial Sequence
  GFR-binding peptide
  MOD_RES (3)..(4): Xaa is C or S
  MOD_RES (18)..(19)..(20)..(21)..(22): Xaa is A or G
  MOD_RES (23)..(24)..(25)..(26): Xaa is A or G or is absent
EPXXVPEKMEPISILYLXXXXXXXXXKFKYENMTVES

SEQ ID NO: 68389 - protein, 37 aa, Artificial Sequence; identical to SEQ ID NO: 33070
  GFR-binding peptide
  MOD_RES (2)..(3)..(37): Xaa is C or S
  MOD_RES (17)..(18)..(19)..(20)..(21): Xaa is A or G
  MOD_RES (22)..(23)..(24)..(25): Xaa is A or G or is absent

SEQ ID NO: 68390 - protein, 34 aa, Artificial Sequence; identical to SEQ ID NO: 30920
  GFR-binding peptide
  MOD_RES (1)..(2)..(34): Xaa is C or S

SEQ ID NO: 68391 - protein, 33 aa, Artificial Sequence; identical to SEQ ID NO: 33072
  GFR-binding peptide
  MOD_RES (2)..(2): Xaa is C or S

SEQ ID NO: 68392 - protein, 39 aa, Artificial Sequence; identical to SEQ ID NO: 9525
  GFR-binding peptide
  MOD_RES (2)..(3)..(36)..(38): Xaa is C or S
  MOD_RES (17)..(18)..(19)..(20)..(21): Xaa is A or G
  MOD_RES (22)..(23)..(24)..(25): Xaa is A or G or is absent

SEQ ID NO: 68393 - protein, 36 aa, Artificial Sequence; identical to SEQ ID NO: 9528
  GFR-binding peptide
  MOD_RES (3)..(4)..(35): Xaa is C or S

SEQ ID NO: 68394 - protein, 39 aa, Artificial Sequence; identical to SEQ ID NO: 9531
  GFR-binding peptide
  MOD_RES (4)..(5)..(36)..(38): Xaa is C or S

SEQ ID NO: 68395 - protein, 36 aa, Artificial Sequence; identical to SEQ ID NO: 9533
  GFR-binding peptide
  MOD_RES (2)..(3): Xaa is C or S
  MOD_RES (17)..(18)..(19)..(20)..(21): Xaa is A or G
  MOD_RES (22)..(23)..(24)..(25): Xaa is A or G or is absent

SEQ ID NO: 68396 - protein, 38 aa, Artificial Sequence; identical to SEQ ID NO: 33078
  GFR-binding peptide
  MOD_RES (2)..(3)..(37): Xaa is C or S
  MOD_RES (17)..(18)..(19)..(20)..(21): Xaa is A or G
  MOD_RES (22)..(23)..(24)..(25): Xaa is A or G or is absent

SEQ ID NO: 68397 - protein, 30 aa, Artificial Sequence; identical to SEQ ID NO: 9534
  GFR-binding peptide

SEQ ID NO: 68398 - protein, 39 aa, Artificial Sequence; identical to SEQ ID NO: 33089
  GFR-binding peptide
  MOD_RES (4)..(5)..(39): Xaa is C or S
  MOD_RES (19)..(20)..(21)..(22)..(23): Xaa is A or G
  MOD_RES (24)..(25)..(26)..(27): Xaa is A or G or is absent

SEQ ID NO: 68399 - protein, 39 aa, Artificial Sequence
  GFR-binding peptide
  MOD_RES (5)..(6)..(38): Xaa is C or S
IPEPXXVPEKMNAISILYFDENKNVVLKKYRNMTVESXA

SEQ ID NO: 68400 - protein, 40 aa, Artificial Sequence
  GFR-binding peptide
  MOD_RES (6)..(7): Xaa is C or S
  MOD_RES (21)..(22)..(23)..(24)..(25): Xaa is A or G
  MOD_RES (26)..(27)..(28)..(29): Xaa is A or G or is absent
STPPTXXVPTRLSPISILYKXXXXXXXXXLKYHYDMVVES

SEQ ID NO: 68401 - protein, 40 aa, Artificial Sequence
  GFR-binding peptide
  MOD_RES (6)..(7): Xaa is C or S
  MOD_RES (21)..(22)..(23)..(24)..(25): Xaa is A or G
  MOD_RES (26)..(27)..(28)..(29): Xaa is A or G or is absent
GIPEPXXVPEKMSATSILYYXXXXXXXXXLRKHRNMTVES

SEQ ID NO: 68402 - protein, 37 aa, Artificial Sequence; identical to SEQ ID NO: 33098
  GFR-binding peptide
  MOD_RES (3)..(4)..(36): Xaa is C or S

SEQ ID NO: 68403 - protein, 37 aa, Artificial Sequence; identical to SEQ ID NO: 33101
  GFR-binding peptide
  MOD_RES (3)..(4): Xaa is C or S
  MOD_RES (18)..(19)..(20)..(21)..(22): Xaa is A or G
  MOD_RES (23)..(24)..(25)..(26): Xaa is A or G or is absent

SEQ ID NO: 68404 - protein, 33 aa, Artificial Sequence; identical to SEQ ID NO: 9544
  GFR-binding peptide
  MOD_RES (3)..(3): Xaa is C or S

SEQ ID NO: 68405 - protein, 41 aa, Artificial Sequence; identical to SEQ ID NO: 30936
  GFR-binding peptide
  MOD_RES (6)..(7)..(39)..(41): Xaa is C or S

SEQ ID NO: 68406 - protein, 35 aa, Artificial Sequence; identical to SEQ ID NO: 30937
  GFR-binding peptide
  MOD_RES (1)..(2)..(34): Xaa is C or S

SEQ ID NO: 68407 - protein, 37 aa, Artificial Sequence; identical to SEQ ID NO: 9548
  GFR-binding peptide
  MOD_RES (1)..(2)..(35)..(37): Xaa is C or S

SEQ ID NO: 68408 - protein, 37 aa, Artificial Sequence; identical to SEQ ID NO: 30942
  GFR-binding peptide
  MOD_RES (1)..(2)..(34)..(36): Xaa is C or S

SEQ ID NO: 68409 - protein, 36 aa, Artificial Sequence
  GFR-binding peptide
  MOD_RES (1)..(2)..(35): Xaa is C or S
  MOD_RES (16)..(17)..(18)..(19)..(20): Xaa is A or G
  MOD_RES (21)..(22)..(23)..(24): Xaa is A or G or is absent
XXAPVKTSPISMLYKXXXXXXXXXLKYHYMIVEEXG

SEQ ID NO: 68410 - protein, 38 aa, Artificial Sequence
  GFR-binding peptide
  MOD_RES (5)..(6)..(38): Xaa is C or S
TPPTXXVPTRLSPISILYKDSANNVVLKYHYDMVVESX

SEQ ID NO: 68411 - protein, 36 aa, Artificial Sequence
  GFR-binding peptide
  MOD_RES (1)..(35): Xaa is C or S
  MOD_RES (15)..(16)..(17)..(18)..(19): Xaa is A or G
  MOD_RES (20)..(21)..(22)..(23): Xaa is A or G or is absent
XVPEKMNAISILYFXXXXXXXXXLKKYRNMTVESXA

SEQ ID NO: 68412 - protein, 36 aa, Artificial Sequence; identical to SEQ ID NO: 16846
  GFR-binding peptide
  MOD_RES (3)..(4)..(36): Xaa is C or S

SEQ ID NO: 68413 - protein, 34 aa, Artificial Sequence; identical to SEQ ID NO: 30948
  GFR-binding peptide
  MOD_RES (33)..(33): Xaa is C or S
  MOD_RES (14)..(15)..(16)..(17)..(18): Xaa is A or G
  MOD_RES (19)..(20)..(21)..(22): Xaa is A or G or is absent

SEQ ID NO: 68414 - protein, 33 aa, Artificial Sequence
  GFR-binding peptide
  MOD_RES (1)..(32): Xaa is C or S
XVPQDLSPINILYFVGRTPKVYGKIPMVVKSXK

SEQ ID NO: 68415 - protein, 37 aa, Artificial Sequence; identical to SEQ ID NO: 9555
  GFR-binding peptide
  MOD_RES (1)..(2)..(37): Xaa is C or S
  MOD_RES (16)..(17)..(18)..(19)..(20): Xaa is A or G
  MOD_RES (21)..(22)..(23)..(24): Xaa is A or G or is absent

SEQ ID NO: 68416 - protein, 35 aa, Artificial Sequence
  GFR-binding peptide
  MOD_RES (34)..(34): Xaa is C or S
  MOD_RES (14)..(15)..(16)..(17)..(18): Xaa is A or G
  MOD_RES (19)..(20)..(21)..(22): Xaa is A or G or is absent
TPTKMSATSMLYYXXXXXXXXXLRKHRGMVVDRXG

SEQ ID NO: 68417 - protein, 36 aa, Artificial Sequence
  GFR-binding peptide
  MOD_RES (3)..(4)..(36): Xaa is C or S
PTXXVPTRLSPISILYKDSANNVVLKYHYDMVVESX

SEQ ID NO: 68418 - protein, 41 aa, Artificial Sequence
  GFR-binding peptide
  MOD_RES (6)..(7)..(38)..(40): Xaa is C or S
ASASPXXVPQDLSPINILYFVGRTPKVYGKIPMVVKSXKXS

SEQ ID NO: 68419 - protein, 34 aa, Artificial Sequence; identical to SEQ ID NO: 33117
  GFR-binding peptide
  MOD_RES (1)..(34): Xaa is C or S
  MOD_RES (15)..(16)..(17)..(18)..(19): Xaa is A or G
  MOD_RES (20)..(21)..(22)..(23): Xaa is A or G or is absent

SEQ ID NO: 68420 - protein, 36 aa, Artificial Sequence; identical to SEQ ID NO: 30955
  GFR-binding peptide
  MOD_RES (4)..(5): Xaa is C or S

SEQ ID NO: 68421 - protein, 37 aa, Artificial Sequence; identical to SEQ ID NO: 33118
  GFR-binding peptide
  MOD_RES (4)..(5)..(37): Xaa is C or S

SEQ ID NO: 68422 - protein, 34 aa, Artificial Sequence
  GFR-binding peptide
  MOD_RES (3)..(4): Xaa is C or S
STXXAPVKTEPISMLYLDNGRVLLKFKYEMIVEE

SEQ ID NO: 68423 - protein, 39 aa, Artificial Sequence; identical to SEQ ID NO: 33123
  GFR-binding peptide
  MOD_RES (4)..(5)..(39): Xaa is C or S
  MOD_RES (19)..(20)..(21)..(22)..(23): Xaa is A or G
  MOD_RES (24)..(25)..(26)..(27): Xaa is A or G or is absent

SEQ ID NO: 68424 - protein, 43 aa, Artificial Sequence; identical to SEQ ID NO: 16861
  GFR-binding peptide
  MOD_RES (5)..(6)..(40)..(42): Xaa is C or S
  MOD_RES (20)..(21)..(22)..(23)..(24): Xaa is A or G
  MOD_RES (25)..(26)..(27)..(28): Xaa is A or G or is absent

SEQ ID NO: 68425 - protein, 39 aa, Artificial Sequence
  GFR-binding peptide
  MOD_RES (5)..(6): Xaa is C or S
  MOD_RES (20)..(21)..(22)..(23)..(24): Xaa is A or G
  MOD_RES (25)..(26)..(27)..(28): Xaa is A or G or is absent
IPEPXXVPEKMSPISILYKXXXXXXXXXLKYHYNMTVES

SEQ ID NO: 68426 - protein, 39 aa, Artificial Sequence
  GFR-binding peptide
  MOD_RES (2)..(3)..(37)..(39): Xaa is C or S
  MOD_RES (17)..(18)..(19)..(20)..(21): Xaa is A or G
  MOD_RES (22)..(23)..(24)..(25): Xaa is A or G or is absent
TXXVPTRLEPISILYLXXXXXXXXXKFKYEDMVVESXGX

SEQ ID NO: 68427 - protein, 40 aa, Artificial Sequence
  GFR-binding peptide
  MOD_RES (5)..(6)..(38)..(40): Xaa is C or S
ASKAXXVPTKLSATSILYYDKGVVTYLRKHRGMAVSEXGX

SEQ ID NO: 68428 - protein, 38 aa, Artificial Sequence
  GFR-binding peptide
  MOD_RES (5)..(6)..(37): Xaa is C or S
SASPXXVSQDLSPINILYFIGKTPKIYGKIPMIVKSXK

SEQ ID NO: 68429 - protein, 37 aa, Artificial Sequence; identical to SEQ ID NO: 30960
  GFR-binding peptide
  MOD_RES (1)..(35)..(37): Xaa is C or S
  MOD_RES (15)..(16)..(17)..(18)..(19): Xaa is A or G
  MOD_RES (20)..(21)..(22)..(23): Xaa is A or G or is absent

SEQ ID NO: 68430 - protein, 37 aa, Artificial Sequence; identical to SEQ ID NO: 9568
  GFR-binding peptide
  MOD_RES (2)..(3)..(37): Xaa is C or S
  MOD_RES (17)..(18)..(19)..(20)..(21): Xaa is A or G
  MOD_RES (22)..(23)..(24)..(25): Xaa is A or G or is absent

SEQ ID NO: 68431 - protein, 36 aa, Artificial Sequence; identical to SEQ ID NO: 9569
  GFR-binding peptide
  MOD_RES (1)..(35): Xaa is C or S
  MOD_RES (15)..(16)..(17)..(18)..(19): Xaa is A or G
  MOD_RES (20)..(21)..(22)..(23): Xaa is A or G or is absent

SEQ ID NO: 68432 - protein, 39 aa, Artificial Sequence; identical to SEQ ID NO: 30964
  GFR-binding peptide
  MOD_RES (4)..(5)..(37)..(39): Xaa is C or S

SEQ ID NO: 68433 - protein, 32 aa, Artificial Sequence
  GFR-binding peptide
  MOD_RES (1)..(2): Xaa is C or S
XXTPTKMEPISMLYLNDKQQIIKFKYEGMVVD

SEQ ID NO: 68434 - protein, 34 aa, Artificial Sequence
  GFR-binding peptide
  MOD_RES (1)..(1): Xaa is C or S
  MOD_RES (15)..(16)..(17)..(18)..(19): Xaa is A or G
  MOD_RES (20)..(21)..(22)..(23): Xaa is A or G or is absent
XVPARLSATSILYYXXXXXXXXXLRKHRDMVVEA

SEQ ID NO: 68435 - protein, 33 aa, Artificial Sequence; identical to SEQ ID NO: 9572
  GFR-binding peptide
  MOD_RES (1)..(1): Xaa is C or S
  MOD_RES (15)..(16)..(17)..(18)..(19): Xaa is A or G
  MOD_RES (20)..(21)..(22)..(23): Xaa is A or G or is absent

SEQ ID NO: 68436 - protein, 38 aa, Artificial Sequence; identical to SEQ ID NO: 16870
  GFR-binding peptide
  MOD_RES (5)..(6)..(38): Xaa is C or S

SEQ ID NO: 68437 - protein, 42 aa, Artificial Sequence; identical to SEQ ID NO: 9573
  GFR-binding peptide
  MOD_RES (5)..(6)..(39)..(41): Xaa is C or S

SEQ ID NO: 68438 - protein, 37 aa, Artificial Sequence
  GFR-binding peptide
  MOD_RES (4)..(5)..(37): Xaa is C or S
PPTXXVPTRLSPISILYKDSANNVVLKYHYDMVVESX

SEQ ID NO: 68439 - protein, 38 aa, Artificial Sequence; identical to SEQ ID NO: 30971
  GFR-binding peptide
  MOD_RES (3)..(4)..(38): Xaa is C or S
  MOD_RES (18)..(19)..(20)..(21)..(22): Xaa is A or G
  MOD_RES (23)..(24)..(25)..(26): Xaa is A or G or is absent

SEQ ID NO: 68440 - protein, 34 aa, Artificial Sequence; identical to SEQ ID NO: 9579
  GFR-binding peptide
  MOD_RES (3)..(4): Xaa is C or S

SEQ ID NO: 68441 - protein, 41 aa, Artificial Sequence; identical to SEQ ID NO: 9580
  GFR-binding peptide
  MOD_RES (6)..(7)..(41): Xaa is C or S
  MOD_RES (21)..(22)..(23)..(24)..(25): Xaa is A or G
  MOD_RES (26)..(27)..(28)..(29): Xaa is A or G or is absent

SEQ ID NO: 68442 - protein, 33 aa, Artificial Sequence
  GFR-binding peptide
  MOD_RES (1)..(33): Xaa is C or S
XVPTRLSATSILYYDSANNVVLRKHRDMVVESX

SEQ ID NO: 68443 - protein, 39 aa, Artificial Sequence; identical to SEQ ID NO: 30978
  GFR-binding peptide
  MOD_RES (4)..(36)..(38): Xaa is C or S

SEQ ID NO: 68444 - protein, 32 aa, Artificial Sequence; identical to SEQ ID NO: 9584
  GFR-binding peptide
  MOD_RES (31)..(31): Xaa is C or S

SEQ ID NO: 68445 - protein, 39 aa, Artificial Sequence; identical to SEQ ID NO: 9585
  GFR-binding peptide
  MOD_RES (5)..(6)..(39): Xaa is C or S

SEQ ID NO: 68446 - protein, 36 aa, Artificial Sequence; identical to SEQ ID NO: 33150
  GFR-binding peptide
  MOD_RES (1)..(2)..(35): Xaa is C or S

SEQ ID NO: 68447 - protein, 42 aa, Artificial Sequence
  GFR-binding peptide
  MOD_RES (6)..(7)..(40)..(42): Xaa is C or S
  MOD_RES (21)..(22)..(23)..(24)..(25): Xaa is A or G
  MOD_RES (26)..(27)..(28)..(29): Xaa is A or G or is absent
ASASPXXVSQDLSPINILYFXXXXXXXXXYGKIPMIVKSXKX

SEQ ID NO: 68448 - protein, 34 aa, Artificial Sequence; identical to SEQ ID NO: 9587
  GFR-binding peptide
  MOD_RES (32)..(34): Xaa is C or S

SEQ ID NO: 68449 - protein, 36 aa, Artificial Sequence; identical to SEQ ID NO: 9592
  GFR-binding peptide
  MOD_RES (1)..(35): Xaa is C or S
  MOD_RES (15)..(16)..(17)..(18)..(19): Xaa is A or G
  MOD_RES (20)..(21)..(22)..(23): Xaa is A or G or is absent

SEQ ID NO: 68450 - protein, 40 aa, Artificial Sequence; identical to SEQ ID NO: 9593
  GFR-binding peptide
  MOD_RES (5)..(6)..(40): Xaa is C or S
  MOD_RES (20)..(21)..(22)..(23)..(24): Xaa is A or G
  MOD_RES (25)..(26)..(27)..(28): Xaa is A or G or is absent

SEQ ID NO: 68451 - protein, 32 aa, Artificial Sequence; identical to SEQ ID NO: 9595
  GFR-binding peptide
  MOD_RES (14)..(15)..(16)..(17)..(18): Xaa is A or G
  MOD_RES (19)..(20)..(21)..(22): Xaa is A or G or is absent

SEQ ID NO: 68452 - protein, 35 aa, Artificial Sequence; identical to SEQ ID NO: 30990
  GFR-binding peptide
  MOD_RES (3)..(3): Xaa is C or S
  MOD_RES (17)..(18)..(19)..(20)..(21): Xaa is A or G
  MOD_RES (22)..(23)..(24)..(25): Xaa is A or G or is absent

SEQ ID NO: 68453 - protein, 42 aa, Artificial Sequence; identical to SEQ ID NO: 9598
  GFR-binding peptide
  MOD_RES (6)..(7)..(40)..(42): Xaa is C or S
  MOD_RES (21)..(22)..(23)..(24)..(25): Xaa is A or G
  MOD_RES (26)..(27)..(28)..(29): Xaa is A or G or is absent

SEQ ID NO: 68454 - protein, 37 aa, Artificial Sequence; identical to SEQ ID NO: 30992
  GFR-binding peptide
  MOD_RES (2)..(3)..(35)..(37): Xaa is C or S

SEQ ID NO: 68455 - protein, 36 aa, Artificial Sequence
  GFR-binding peptide
  MOD_RES (34)..(36): Xaa is C or S
  MOD_RES (14)..(15)..(16)..(17)..(18): Xaa is A or G
  MOD_RES (19)..(20)..(21)..(22): Xaa is A or G or is absent
VPEKMSPISILYKXXXXXXXXXLKYHYNMTVESXAX

SEQ ID NO: 68456 - protein, 37 aa, Artificial Sequence; identical to SEQ ID NO: 33164
  GFR-binding peptide
  MOD_RES (34)..(36): Xaa is C or S
  MOD_RES (14)..(15)..(16)..(17)..(18): Xaa is A or G
  MOD_RES (19)..(20)..(21)..(22): Xaa is A or G or is absent

SEQ ID NO: 68457 - protein, 35 aa, Artificial Sequence; identical to SEQ ID NO: 9599
  GFR-binding peptide
  MOD_RES (1)..(35): Xaa is C or S
  MOD_RES (15)..(16)..(17)..(18)..(19): Xaa is A or G
  MOD_RES (20)..(21)..(22)..(23): Xaa is A or G or is absent

SEQ ID NO: 68458 - protein, 39 aa, Artificial Sequence; identical to SEQ ID NO: 33167
  GFR-binding peptide
  MOD_RES (1)..(2)..(36)..(38): Xaa is C or S
  MOD_RES (16)..(17)..(18)..(19)..(20): Xaa is A or G
  MOD_RES (21)..(22)..(23)..(24): Xaa is A or G or is absent

SEQ ID NO: 68459 - protein, 33 aa, Artificial Sequence; identical to SEQ ID NO: 9603
  GFR-binding peptide
  MOD_RES (1)..(2): Xaa is C or S

SEQ ID NO: 68460 - protein, 39 aa, Artificial Sequence; identical to SEQ ID NO: 9604
  GFR-binding peptide
  MOD_RES (4)..(5)..(37)..(39): Xaa is C or S

SEQ ID NO: 68461 - protein, 33 aa, Artificial Sequence; identical to SEQ ID NO: 30998
  GFR-binding peptide
  MOD_RES (32)..(32): Xaa is C or S

SEQ ID NO: 68462 - protein, 35 aa, Artificial Sequence; identical to SEQ ID NO: 9606
  GFR-binding peptide
  MOD_RES (2)..(3): Xaa is C or S
  MOD_RES (17)..(18)..(19)..(20)..(21): Xaa is A or G
  MOD_RES (22)..(23)..(24)..(25): Xaa is A or G or is absent

SEQ ID NO: 68463 - protein, 33 aa, Artificial Sequence; identical to SEQ ID NO: 33174
  GFR-binding peptide
  MOD_RES (32)..(32): Xaa is C or S

SEQ ID NO: 68464 - protein, 40 aa, Artificial Sequence; identical to SEQ ID NO: 33177
  GFR-binding peptide
  MOD_RES (6)..(7): Xaa is C or S
  MOD_RES (21)..(22)..(23)..(24)..(25): Xaa is A or G
  MOD_RES (26)..(27)..(28)..(29): Xaa is A or G or is absent

SEQ ID NO: 68465 - protein, 35 aa, Artificial Sequence; identical to SEQ ID NO: 33179
  GFR-binding peptide
  MOD_RES (3)..(4): Xaa is C or S

SEQ ID NO: 68466 - protein, 34 aa, Artificial Sequence; identical to SEQ ID NO: 31007
  GFR-binding peptide
  MOD_RES (1)..(2): Xaa is C or S
  MOD_RES (16)..(17)..(18)..(19)..(20): Xaa is A or G
  MOD_RES (21)..(22)..(23)..(24): Xaa is A or G or is absent

SEQ ID NO: 68467 - protein, 34 aa, Artificial Sequence
  GFR-binding peptide
  MOD_RES (1)..(2)..(34): Xaa is C or S
XXVPTRLSATSILYYDSANNVVLRKHRDMVVESX

SEQ ID NO: 68468 - protein, 39 aa, Artificial Sequence; identical to SEQ ID NO: 9613
  GFR-binding peptide
  MOD_RES (5)..(6)..(39): Xaa is C or S
  MOD_RES (20)..(21)..(22)..(23)..(24): Xaa is A or G
  MOD_RES (25)..(26)..(27)..(28): Xaa is A or G or is absent

SEQ ID NO: 68469 - protein, 30 aa, Artificial Sequence
  GFR-binding peptide
APVKTSPISMLYKDNGRVLLLKYHYMIVEE

SEQ ID NO: 68470 - protein, 40 aa, Artificial Sequence
  GFR-binding peptide
  MOD_RES (2)..(3)..(37)..(39): Xaa is C or S
  MOD_RES (17)..(18)..(19)..(20)..(21): Xaa is A or G
  MOD_RES (22)..(23)..(24)..(25): Xaa is A or G or is absent
AXXVPTKLSATSILYYXXXXXXXXXLRKHRGMAVSEXGXR

SEQ ID NO: 68471 - protein, 36 aa, Artificial Sequence
  GFR-binding peptide
  MOD_RES (3)..(4)..(36): Xaa is C or S
EPXXVPEKMEPISILYLDENKNVVKFKYENMTVESX

SEQ ID NO: 68472 - protein, 36 aa, Artificial Sequence; identical to SEQ ID NO: 9615
  GFR-binding peptide
  MOD_RES (4)..(5): Xaa is C or S

SEQ ID NO: 68473 - protein, 39 aa, Artificial Sequence; identical to SEQ ID NO: 31018
  GFR-binding peptide
  MOD_RES (4)..(5)..(37)..(39): Xaa is C or S

SEQ ID NO: 68474 - protein, 38 aa, Artificial Sequence; identical to SEQ ID NO: 31021
  GFR-binding peptide
  MOD_RES (3)..(4)..(36)..(38): Xaa is C or S

SEQ ID NO: 68475 - protein, 36 aa, Artificial Sequence; identical to SEQ ID NO: 9618
  GFR-binding peptide
  MOD_RES (2)..(3)..(35): Xaa is C or S

SEQ ID NO: 68476 - protein, 37 aa, Artificial Sequence; identical to SEQ ID NO: 9620
  GFR-binding peptide
  MOD_RES (3)..(4): Xaa is C or S
  MOD_RES (18)..(19)..(20)..(21)..(22): Xaa is A or G
  MOD_RES (23)..(24)..(25)..(26): Xaa is A or G or is absent

SEQ ID NO: 68477 - protein, 35 aa, Artificial Sequence; identical to SEQ ID NO: 33200
  GFR-binding peptide
  MOD_RES (1)..(33)..(35): Xaa is C or S

SEQ ID NO: 68478 - protein, 35 aa, Artificial Sequence; identical to SEQ ID NO: 9621
  GFR-binding peptide
  MOD_RES (1)..(2): Xaa is C or S
  MOD_RES (16)..(17)..(18)..(19)..(20): Xaa is A or G
  MOD_RES (21)..(22)..(23)..(24): Xaa is A or G or is absent

SEQ ID NO: 68479 - protein, 37 aa, Artificial Sequence
  GFR-binding peptide
  MOD_RES (3)..(4)..(35)..(37): Xaa is C or S
STXXAPVKTSPISMLYKDNGRVLLLKYHYMIVEEXGX

SEQ ID NO: 68480 - protein, 40 aa, Artificial Sequence; identical to SEQ ID NO: 9622
  GFR-binding peptide
  MOD_RES (4)..(5)..(38)..(40): Xaa is C or S
  MOD_RES (19)..(20)..(21)..(22)..(23): Xaa is A or G
  MOD_RES (24)..(25)..(26)..(27): Xaa is A or G or is absent

SEQ ID NO: 68481 - protein, 40 aa, Artificial Sequence; identical to SEQ ID NO: 31024
  GFR-binding peptide
  MOD_RES (6)..(7)..(39): Xaa is C or S

SEQ ID NO: 68482 - protein, 34 aa, Artificial Sequence; identical to SEQ ID NO: 31027
  GFR-binding peptide
  MOD_RES (1)..(1): Xaa is C or S
  MOD_RES (15)..(16)..(17)..(18)..(19): Xaa is A or G
  MOD_RES (20)..(21)..(22)..(23): Xaa is A or G or is absent

SEQ ID NO: 68483 - protein, 36 aa, Artificial Sequence; identical to SEQ ID NO: 31028
  GFR-binding peptide
  MOD_RES (2)..(3)..(35): Xaa is C or S

SEQ ID NO: 68484 - protein, 39 aa, Artificial Sequence; identical to SEQ ID NO: 16910
  GFR-binding peptide
  MOD_RES (4)..(5)..(39): Xaa is C or S
  MOD_RES (19)..(20)..(21)..(22)..(23): Xaa is A or G
  MOD_RES (24)..(25)..(26)..(27): Xaa is A or G or is absent

SEQ ID NO: 68485 - protein, 40 aa, Artificial Sequence
  GFR-binding peptide
  MOD_RES (4)..(5)..(38)..(40): Xaa is C or S
  MOD_RES (19)..(20)..(21)..(22)..(23): Xaa is A or G
  MOD_RES (24)..(25)..(26)..(27): Xaa is A or G or is absent
ASPXXVSQDLSPINILYFXXXXXXXXXYGKIPMIVKSXKX

SEQ ID NO: 68486 - protein, 39 aa, Artificial Sequence; identical to SEQ ID NO: 9626
  GFR-binding peptide
  MOD_RES (4)..(5)..(39): Xaa is C or S
  MOD_RES (19)..(20)..(21)..(22)..(23): Xaa is A or G
  MOD_RES (24)..(25)..(26)..(27): Xaa is A or G or is absent

SEQ ID NO: 68487 - protein, 33 aa, Artificial Sequence; identical to SEQ ID NO: 9627
  GFR-binding peptide
  MOD_RES (2)..(3): Xaa is C or S

SEQ ID NO: 68488 - protein, 36 aa, Artificial Sequence; identical to SEQ ID NO: 33208
  GFR-binding peptide
  MOD_RES (3)..(4)..(36): Xaa is C or S

SEQ ID NO: 68489 - protein, 40 aa, Artificial Sequence
  GFR-binding peptide
  MOD_RES (5)..(6)..(38)..(40): Xaa is C or S
IPEPXXVPEKMSATSILYYDENKNVVLRKHRNMTVESXAX

SEQ ID NO: 68490 - protein, 38 aa, Artificial Sequence
  GFR-binding peptide
  MOD_RES (4)..(5): Xaa is C or S
  MOD_RES (19)..(20)..(21)..(22)..(23): Xaa is A or G
  MOD_RES (24)..(25)..(26)..(27): Xaa is A or G or is absent
AGPXXTPTKMSATSMLYYXXXXXXXXXLRKHRGMVVDR

SEQ ID NO: 68491 - protein, 37 aa, Artificial Sequence; identical to SEQ ID NO: 31034
  GFR-binding peptide
  MOD_RES (1)..(2)..(36): Xaa is C or S
  MOD_RES (16)..(17)..(18)..(19)..(20): Xaa is A or G
  MOD_RES (21)..(22)..(23)..(24): Xaa is A or G or is absent

SEQ ID NO: 68492 - protein, 35 aa, Artificial Sequence; identical to SEQ ID NO: 31035
  GFR-binding peptide
  MOD_RES (1)..(34): Xaa is C or S

SEQ ID NO: 68493 - protein, 33 aa, Artificial Sequence
  GFR-binding peptide
  MOD_RES (1)..(33): Xaa is C or S
XVPTRLEPISILYLDSANNVVKFKYEDMVVESX

SEQ ID NO: 68494 - protein, 36 aa, Artificial Sequence; identical to SEQ ID NO: 9632
  GFR-binding peptide
  MOD_RES (4)..(5): Xaa is C or S

SEQ ID NO: 68495 - protein, 39 aa, Artificial Sequence; identical to SEQ ID NO: 9633
  GFR-binding peptide
  MOD_RES (3)..(37)..(39): Xaa is C or S
  MOD_RES (17)..(18)..(19)..(20)..(21): Xaa is A or G
  MOD_RES (22)..(23)..(24)..(25): Xaa is A or G or is absent

SEQ ID NO: 68496 - protein, 37 aa, Artificial Sequence; identical to SEQ ID NO: 33215
  GFR-binding peptide
  MOD_RES (7)..(7): Xaa is C or S

SEQ ID NO: 68497 - protein, 33 aa, Artificial Sequence; identical to SEQ ID NO: 9634
  GFR-binding peptide
  MOD_RES (32)..(32): Xaa is C or S

SEQ ID NO: 68498 - protein, 42 aa, Artificial Sequence
  GFR-binding peptide
  MOD_RES (5)..(6)..(39)..(41): Xaa is C or S
  MOD_RES (20)..(21)..(22)..(23)..(24): Xaa is A or G
  MOD_RES (25)..(26)..(27)..(28): Xaa is A or G or is absent
VPSTXXAPVKTSATSMLYYXXXXXXXXXLRKHRMIVEEXGXL

SEQ ID NO: 68499 - protein, 40 aa, Artificial Sequence; identical to SEQ ID NO: 9636
  GFR-binding peptide
  MOD_RES (6)..(7)..(39): Xaa is C or S

SEQ ID NO: 68500 - protein, 40 aa, Artificial Sequence; identical to SEQ ID NO: 9637
  GFR-binding peptide
  MOD_RES (7)..(39): Xaa is C or S

SEQ ID NO: 68501 - protein, 36 aa, Artificial Sequence; identical to SEQ ID NO: 31044
  GFR-binding peptide
  MOD_RES (3)..(4): Xaa is C or S
  MOD_RES (18)..(19)..(20)..(21)..(22): Xaa is A or G
  MOD_RES (23)..(24)..(25)..(26): Xaa is A or G or is absent

SEQ ID NO: 68502 - protein, 36 aa, Artificial Sequence; identical to SEQ ID NO: 31045
  GFR-binding peptide
  MOD_RES (2)..(3)..(35): Xaa is C or S

SEQ ID NO: 68503 - protein, 42 aa, Artificial Sequence; identical to SEQ ID NO: 9642
  GFR-binding peptide
  MOD_RES (4)..(5)..(40)..(42): Xaa is C or S
  MOD_RES (19)..(20)..(21)..(22)..(23): Xaa is A or G
  MOD_RES (24)..(25)..(26)..(27): Xaa is A or G or is absent

SEQ ID NO: 68504 - protein, 34 aa, Artificial Sequence; identical to SEQ ID NO: 9643
  GFR-binding peptide
  MOD_RES (1)..(1): Xaa is C or S
  MOD_RES (15)..(16)..(17)..(18)..(19): Xaa is A or G
  MOD_RES (20)..(21)..(22)..(23): Xaa is A or G or is absent

SEQ ID NO: 68505 - protein, 37 aa, Artificial Sequence; identical to SEQ ID NO: 9645
  GFR-binding peptide
  MOD_RES (34)..(36): Xaa is C or S
  MOD_RES (14)..(15)..(16)..(17)..(18): Xaa is A or G
  MOD_RES (19)..(20)..(21)..(22): Xaa is A or G or is absent

SEQ ID NO: 68506 - protein, 35 aa, Artificial Sequence; identical to SEQ ID NO: 33226
  GFR-binding peptide
  MOD_RES (1)..(2)..(34): Xaa is C or S

SEQ ID NO: 68507 - protein, 39 aa, Artificial Sequence; identical to SEQ ID NO: 9646
  GFR-binding peptide
  MOD_RES (2)..(3)..(37)..(39): Xaa is C or S
  MOD_RES (17)..(18)..(19)..(20)..(21): Xaa is A or G
  MOD_RES (22)..(23)..(24)..(25): Xaa is A or G or is absent

SEQ ID NO: 68508 - protein, 39 aa, Artificial Sequence
  GFR-binding peptide
  MOD_RES (3)..(4)..(38): Xaa is C or S
  MOD_RES (18)..(19)..(20)..(21)..(22): Xaa is A or G
  MOD_RES (23)..(24)..(25)..(26): Xaa is A or G or is absent
GPXXTPTKMSATSMLYYXXXXXXXXXLRKHRGMVVDRXG

SEQ ID NO: 68509 - protein, 35 aa, Artificial Sequence
  GFR-binding peptide
  MOD_RES (1)..(2): Xaa is C or S
  MOD_RES (16)..(17)..(18)..(19)..(20): Xaa is A or G
  MOD_RES (21)..(22)..(23)..(24): Xaa is A or G or is absent
XXVPARLSATSILYYXXXXXXXXXLRKHRDMVVEA

SEQ ID NO: 68510 - protein, 32 aa, Artificial Sequence; identical to SEQ ID NO: 9650
  GFR-binding peptide
  MOD_RES (31)..(31): Xaa is C or S

SEQ ID NO: 68511 - protein, 39 aa, Artificial Sequence
  GFR-binding peptide
  MOD_RES (5)..(6)..(38): Xaa is C or S
IPEPXXVPEKMSPINILYFDENKNVVYGKIPNMTVESXA

SEQ ID NO: 68512 - protein, 37 aa, Artificial Sequence; identical to SEQ ID NO: 16930
  GFR-binding peptide
  MOD_RES (4)..(5)..(37): Xaa is C or S

SEQ ID NO: 68513 - protein, 33 aa, Artificial Sequence
  GFR-binding peptide
  MOD_RES (31)..(33): Xaa is C or S
APVKTEPISMLYLDNGRVLLKFKYEMIVEEXGX

SEQ ID NO: 68514 - protein, 33 aa, Artificial Sequence; identical to SEQ ID NO: 31061
  GFR-binding peptide
  MOD_RES (1)..(2): Xaa is C or S

SEQ ID NO: 68515 - protein, 35 aa, Artificial Sequence; identical to SEQ ID NO: 31062
  GFR-binding peptide
  MOD_RES (1)..(2): Xaa is C or S
  MOD_RES (16)..(17)..(18)..(19)..(20): Xaa is A or G
  MOD_RES (21)..(22)..(23)..(24): Xaa is A or G or is absent

SEQ ID NO: 68516 - protein, 33 aa, Artificial Sequence
  GFR-binding peptide
  MOD_RES (31)..(33): Xaa is C or S
VPQALSPINILYFVGRKPKVYGKIPMIVRSXKX

SEQ ID NO: 68517 - protein, 37 aa, Artificial Sequence
  GFR-binding peptide
  MOD_RES (2)..(3)..(35)..(37): Xaa is C or S
PXXVPEKMNAISILYFDENKNVVLKKYRNMTVESXAX

SEQ ID NO: 68518 - protein, 34 aa, Artificial Sequence
  GFR-binding peptide
  MOD_RES (1)..(2)..(33): Xaa is C or S
XXVPQDLSPINILYFVGRTPKVYGKIPMVVKSXK

SEQ ID NO: 68519 - protein, 36 aa, Artificial Sequence
  GFR-binding peptide
  MOD_RES (1)..(2)..(35): Xaa is C or S
  MOD_RES (16)..(17)..(18)..(19)..(20): Xaa is A or G
  MOD_RES (21)..(22)..(23)..(24): Xaa is A or G or is absent
XXVPQALSPINILYFXXXXXXXXXYGKIPMIVRSXK

SEQ ID NO: 68520 - protein, 42 aa, Artificial Sequence
  GFR-binding peptide
  MOD_RES (6)..(7)..(40)..(42): Xaa is C or S
  MOD_RES (21)..(22)..(23)..(24)..(25): Xaa is A or G
  MOD_RES (26)..(27)..(28)..(29): Xaa is A or G or is absent
RVPSTXXAPVKTSATSMLYYXXXXXXXXXLRKHRMIVEEXGX

SEQ ID NO: 68521 - protein, 40 aa, Artificial Sequence; identical to SEQ ID NO: 31071
  GFR-binding peptide
  MOD_RES (7)..(39): Xaa is C or S

SEQ ID NO: 68522 - protein, 38 aa, Artificial Sequence; identical to SEQ ID NO: 9671
  GFR-binding peptide
  MOD_RES (3)..(4)..(36)..(38): Xaa is C or S

SEQ ID NO: 68523 - protein, 37 aa, Artificial Sequence; identical to SEQ ID NO: 9673
  GFR-binding peptide
  MOD_RES (34)..(36): Xaa is C or S
  MOD_RES (14)..(15)..(16)..(17)..(18): Xaa is A or G
  MOD_RES (19)..(20)..(21)..(22): Xaa is A or G or is absent

SEQ ID NO: 68524 - protein, 36 aa, Artificial Sequence; identical to SEQ ID NO: 31082
  GFR-binding peptide
  MOD_RES (2)..(3): Xaa is C or S
  MOD_RES (17)..(18)..(19)..(20)..(21): Xaa is A or G
  MOD_RES (22)..(23)..(24)..(25): Xaa is A or G or is absent

SEQ ID NO: 68525 - protein, 30 aa, Artificial Sequence
  GFR-binding peptide
VPARLSATSILYYDAANNVVLRKHRDMVVE

SEQ ID NO: 68526 - protein, 38 aa, Artificial Sequence
  GFR-binding peptide
  MOD_RES (6)..(7): Xaa is C or S
KASKAXXVPTKLSATSILYYDKGVVTYLRKHRGMAVSE

SEQ ID NO: 68527 - protein, 36 aa, Artificial Sequence; identical to SEQ ID NO: 9678
  GFR-binding peptide
  MOD_RES (1)..(35): Xaa is C or S
  MOD_RES (15)..(16)..(17)..(18)..(19): Xaa is A or G
  MOD_RES (20)..(21)..(22)..(23): Xaa is A or G or is absent

SEQ ID NO: 68528 - protein, 39 aa, Artificial Sequence; identical to SEQ ID NO: 9681
  GFR-binding peptide
  MOD_RES (6)..(7): Xaa is C or S
  MOD_RES (21)..(22)..(23)..(24)..(25): Xaa is A or G
  MOD_RES (26)..(27)..(28)..(29): Xaa is A or G or is absent

SEQ ID NO: 68529 - protein, 39 aa, Artificial Sequence
  GFR-binding peptide
  MOD_RES (6)..(7)..(38): Xaa is C or S
RVPSTXXAPVKTSPISMLYKDNGRVLLLKYHYMIVEEXG

SEQ ID NO: 68530 - protein, 41 aa, Artificial Sequence; identical to SEQ ID NO: 31088
  GFR-binding peptide
  MOD_RES (6)..(7)..(41): Xaa is C or S
  MOD_RES (21)..(22)..(23)..(24)..(25): Xaa is A or G
  MOD_RES (26)..(27)..(28)..(29): Xaa is A or G or is absent

SEQ ID NO: 68531 - protein, 36 aa, Artificial Sequence; identical to SEQ ID NO: 9683
  GFR-binding peptide
  MOD_RES (5)..(6): Xaa is C or S

SEQ ID NO: 68532 - protein, 37 aa, Artificial Sequence
  GFR-binding peptide
  MOD_RES (1)..(2)..(35)..(37): Xaa is C or S
  MOD_RES (16)..(17)..(18)..(19)..(20): Xaa is A or G
  MOD_RES (21)..(22)..(23)..(24): Xaa is A or G or is absent
XXAPVKTSATSMLYYXXXXXXXXXLRKHRMIVEEXGX

SEQ ID NO: 68533 - protein, 41 aa, Artificial Sequence
  GFR-binding peptide
  MOD_RES (5)..(6)..(40): Xaa is C or S
  MOD_RES (20)..(21)..(22)..(23)..(24): Xaa is A or G
  MOD_RES (25)..(26)..(27)..(28): Xaa is A or G or is absent
SAGPXXTPTKMEPISMLYLXXXXXXXXXKFKYEGMVVDRXG

SEQ ID NO: 68534 - protein, 39 aa, Artificial Sequence
  GFR-binding peptide
  MOD_RES (4)..(5)..(37)..(39): Xaa is C or S
SKAXXVPTKLSATSILYYDKGVVTYLRKHRGMAVSEXGX

SEQ ID NO: 68535 - protein, 30 aa, Artificial Sequence; identical to SEQ ID NO: 33257
  GFR-binding peptide

SEQ ID NO: 68536 - protein, 42 aa, Artificial Sequence; identical to SEQ ID NO: 33260
  GFR-binding peptide
  MOD_RES (6)..(7)..(41): Xaa is C or S
  MOD_RES (21)..(22)..(23)..(24)..(25): Xaa is A or G
  MOD_RES (26)..(27)..(28)..(29): Xaa is A or G or is absent

SEQ ID NO: 68537 - protein, 39 aa, Artificial Sequence
  GFR-binding peptide
  MOD_RES (2)..(3)..(37)..(39): Xaa is C or S
  MOD_RES (17)..(18)..(19)..(20)..(21): Xaa is A or G
  MOD_RES (22)..(23)..(24)..(25): Xaa is A or G or is absent
PXXVPEKMSPISILYKXXXXXXXXXLKYHYNMTVESXAX

SEQ ID NO: 68538 - protein, 34 aa, Artificial Sequence; identical to SEQ ID NO: 31095
  GFR-binding peptide
  MOD_RES (1)..(1): Xaa is C or S
  MOD_RES (15)..(16)..(17)..(18)..(19): Xaa is A or G
  MOD_RES (20)..(21)..(22)..(23): Xaa is A or G or is absent

SEQ ID NO: 68539 - protein, 44 aa, Artificial Sequence
  GFR-binding peptide
  MOD_RES (6)..(7)..(41)..(43): Xaa is C or S
  MOD_RES (21)..(22)..(23)..(24)..(25): Xaa is A or G
  MOD_RES (26)..(27)..(28)..(29): Xaa is A or G or is absent
GIPEPXXVPEKMSPINILYFXXXXXXXXXYGKIPNMTVESXAXR

SEQ ID NO: 68540 - protein, 37 aa, Artificial Sequence; identical to SEQ ID NO: 9690
  GFR-binding peptide
  MOD_RES (4)..(5): Xaa is C or S
  MOD_RES (19)..(20)..(21)..(22)..(23): Xaa is A or G
  MOD_RES (24)..(25)..(26)..(27): Xaa is A or G or is absent

SEQ ID NO: 68541 - protein, 40 aa, Artificial Sequence; identical to SEQ ID NO: 31097
  GFR-binding peptide
  MOD_RES (2)..(3)..(37)..(39): Xaa is C or S
  MOD_RES (17)..(18)..(19)..(20)..(21): Xaa is A or G
  MOD_RES (22)..(23)..(24)..(25): Xaa is A or G or is absent

SEQ ID NO: 68542 - protein, 40 aa, Artificial Sequence; identical to SEQ ID NO: 33271
  GFR-binding peptide
  MOD_RES (2)..(3)..(37)..(39): Xaa is C or S
  MOD_RES (17)..(18)..(19)..(20)..(21): Xaa is A or G
  MOD_RES (22)..(23)..(24)..(25): Xaa is A or G or is absent

SEQ ID NO: 68543 - protein, 36 aa, Artificial Sequence
  GFR-binding peptide
  MOD_RES (4)..(5): Xaa is C or S
PPTXXVPTRLSPISILYKDSANNVVLKYHYDMVVES

SEQ ID NO: 68544 - protein, 40 aa, Artificial Sequence; identical to SEQ ID NO: 9696
  GFR-binding peptide
  MOD_RES (6)..(7): Xaa is C or S
  MOD_RES (21)..(22)..(23)..(24)..(25): Xaa is A or G
  MOD_RES (26)..(27)..(28)..(29): Xaa is A or G or is absent

SEQ ID NO: 68545 - protein, 36 aa, Artificial Sequence; identical to SEQ ID NO: 33276
  GFR-binding peptide
  MOD_RES (3)..(4)..(36): Xaa is C or S

SEQ ID NO: 68546 - protein, 44 aa, Artificial Sequence; identical to SEQ ID NO: 9699
  GFR-binding peptide
  MOD_RES (6)..(7)..(41)..(43): Xaa is C or S
  MOD_RES (21)..(22)..(23)..(24)..(25): Xaa is A or G
  MOD_RES (26)..(27)..(28)..(29): Xaa is A or G or is absent

SEQ ID NO: 68547 - protein, 35 aa, Artificial Sequence; identical to SEQ ID NO: 9700
  GFR-binding peptide
  MOD_RES (2)..(3): Xaa is C or S
  MOD_RES (17)..(18)..(19)..(20)..(21): Xaa is A or G
  MOD_RES (22)..(23)..(24)..(25): Xaa is A or G or is absent

SEQ ID NO: 68548 - protein, 39 aa, Artificial Sequence; identical to SEQ ID NO: 9701
  GFR-binding peptide
  MOD_RES (5)..(6): Xaa is C or S
  MOD_RES (20)..(21)..(22)..(23)..(24): Xaa is A or G
  MOD_RES (25)..(26)..(27)..(28): Xaa is A or G or is absent

SEQ ID NO: 68549 - protein, 39 aa, Artificial Sequence; identical to SEQ ID NO: 31109
  GFR-binding peptide
  MOD_RES (2)..(3)..(37)..(39): Xaa is C or S
  MOD_RES (17)..(18)..(19)..(20)..(21): Xaa is A or G
  MOD_RES (22)..(23)..(24)..(25): Xaa is A or G or is absent

SEQ ID NO: 68550 - protein, 37 aa, Artificial Sequence; identical to SEQ ID NO: 9702
  GFR-binding peptide
  MOD_RES (4)..(5): Xaa is C or S
  MOD_RES (19)..(20)..(21)..(22)..(23): Xaa is A or G
  MOD_RES (24)..(25)..(26)..(27): Xaa is A or G or is absent

SEQ ID NO: 68551 - protein, 38 aa, Artificial Sequence; identical to SEQ ID NO: 31114
  GFR-binding peptide
  MOD_RES (2)..(3)..(35)..(37): Xaa is C or S

SEQ ID NO: 68552 - protein, 34 aa, Artificial Sequence
  GFR-binding peptide
  MOD_RES (1)..(32)..(34): Xaa is C or S
XAPVKTEPISMLYLDNGRVLLKFKYEMIVEEXGX

SEQ ID NO: 68553 - protein, 37 aa, Artificial Sequence; identical to SEQ ID NO: 31115
  GFR-binding peptide
  MOD_RES (2)..(3)..(34)..(36): Xaa is C or S

SEQ ID NO: 68554 - protein, 38 aa, Artificial Sequence; identical to SEQ ID NO: 33281
  GFR-binding peptide
  MOD_RES (2)..(3)..(35)..(37): Xaa is C or S

SEQ ID NO: 68555 - protein, 37 aa, Artificial Sequence; identical to SEQ ID NO: 9703
  GFR-binding peptide
  MOD_RES (2)..(3): Xaa is C or S
  MOD_RES (17)..(18)..(19)..(20)..(21): Xaa is A or G
  MOD_RES (22)..(23)..(24)..(25): Xaa is A or G or is absent

SEQ ID NO: 68556 - protein, 34 aa, Artificial Sequence; identical to SEQ ID NO: 31118
  GFR-binding peptide
  MOD_RES (1)..(2): Xaa is C or S
  MOD_RES (16)..(17)..(18)..(19)..(20): Xaa is A or G
  MOD_RES (21)..(22)..(23)..(24): Xaa is A or G or is absent

SEQ ID NO: 68557 - protein, 37 aa, Artificial Sequence; identical to SEQ ID NO: 9705
  GFR-binding peptide
  MOD_RES (4)..(36): Xaa is C or S

SEQ ID NO: 68558 - protein, 39 aa, Artificial Sequence; identical to SEQ ID NO: 9707
  GFR-binding peptide
  MOD_RES (5)..(6): Xaa is C or S
  MOD_RES (20)..(21)..(22)..(23)..(24): Xaa is A or G
  MOD_RES (25)..(26)..(27)..(28): Xaa is A or G or is absent

SEQ ID NO: 68559 - protein, 39 aa, Artificial Sequence
  GFR-binding peptide
  MOD_RES (1)..(2)..(36)..(38): Xaa is C or S
  MOD_RES (16)..(17)..(18)..(19)..(20): Xaa is A or G
  MOD_RES (21)..(22)..(23)..(24): Xaa is A or G or is absent
XXVPTKLSATSILYYXXXXXXXXXLRKHRGMAVSEXGXR

SEQ ID NO: 68560 - protein, 39 aa, Artificial Sequence; identical to SEQ ID NO: 9708
  GFR-binding peptide
  MOD_RES (6)..(7): Xaa is C or S
  MOD_RES (21)..(22)..(23)..(24)..(25): Xaa is A or G
  MOD_RES (26)..(27)..(28)..(29): Xaa is A or G or is absent

SEQ ID NO: 68561 - protein, 40 aa, Artificial Sequence; identical to SEQ ID NO: 9709
  GFR-binding peptide
  MOD_RES (5)..(6)..(39): Xaa is C or S
  MOD_RES (20)..(21)..(22)..(23)..(24): Xaa is A or G
  MOD_RES (25)..(26)..(27)..(28): Xaa is A or G or is absent

SEQ ID NO: 68562 - protein, 37 aa, Artificial Sequence; identical to SEQ ID NO: 9710
  GFR-binding peptide
  MOD_RES (2)..(3)..(36): Xaa is C or S

SEQ ID NO: 68563 - protein, 42 aa, Artificial Sequence
  GFR-binding peptide
  MOD_RES (6)..(7)..(39)..(41): Xaa is C or S
STPPTXXVPTRLSPISILYKDSANNVVLKYHYDMVVESXGXR

SEQ ID NO: 68564 - protein, 36 aa, Artificial Sequence
  GFR-binding peptide
  MOD_RES (1)..(33)..(35): Xaa is C or S
XVPEKMSATSILYYDENKNVVLRKHRNMTVESXAXR

SEQ ID NO: 68565 - protein, 42 aa, Artificial Sequence; identical to SEQ ID NO: 9715
  GFR-binding peptide
  MOD_RES (6)..(7)..(41): Xaa is C or S
  MOD_RES (21)..(22)..(23)..(24)..(25): Xaa is A or G
  MOD_RES (26)..(27)..(28)..(29): Xaa is A or G or is absent

SEQ ID NO: 68566 - protein, 35 aa, Artificial Sequence
  GFR-binding peptide
  MOD_RES (34)..(34): Xaa is C or S
  MOD_RES (14)..(15)..(16)..(17)..(18): Xaa is A or G
  MOD_RES (19)..(20)..(21)..(22): Xaa is A or G or is absent
VPTRLSATSILYYXXXXXXXXXLRKHRDMVVESXG

SEQ ID NO: 68567 - protein, 35 aa, Artificial Sequence
  GFR-binding peptide
  MOD_RES (1)..(33)..(35): Xaa is C or S
XVPTRLSATSILYYDSANNVVLRKHRDMVVESXGX

SEQ ID NO: 68568 - protein, 33 aa, Artificial Sequence; identical to SEQ ID NO: 31134
  GFR-binding peptide
  MOD_RES (2)..(3): Xaa is C or S

SEQ ID NO: 68569 - protein, 39 aa, Artificial Sequence
  GFR-binding peptide
  MOD_RES (5)..(6)..(38): Xaa is C or S
SAGPXXTPTKMSPISMLYKNDKQQIILKYHYGMVVDRXG

SEQ ID NO: 68570 - protein, 40 aa, Artificial Sequence; identical to SEQ ID NO: 33300
  GFR-binding peptide
  MOD_RES (5)..(6)..(39): Xaa is C or S
  MOD_RES (20)..(21)..(22)..(23)..(24): Xaa is A or G
  MOD_RES (25)..(26)..(27)..(28): Xaa is A or G or is absent

SEQ ID NO: 68571 - protein, 38 aa, Artificial Sequence; identical to SEQ ID NO: 9723
  GFR-binding peptide
  MOD_RES (3)..(4)..(36)..(38): Xaa is C or S

SEQ ID NO: 68572 - protein, 34 aa, Artificial Sequence; identical to SEQ ID NO: 9724
  GFR-binding peptide
  MOD_RES (1)..(2): Xaa is C or S
  MOD_RES (16)..(17)..(18)..(19)..(20): Xaa is A or G
  MOD_RES (21)..(22)..(23)..(24): Xaa is A or G or is absent

SEQ ID NO: 68573 - protein, 39 aa, Artificial Sequence; identical to SEQ ID NO: 31142
  GFR-binding peptide
  MOD_RES (6)..(6): Xaa is C or S
  MOD_RES (20)..(21)..(22)..(23)..(24): Xaa is A or G
  MOD_RES (25)..(26)..(27)..(28): Xaa is A or G or is absent

SEQ ID NO: 68574 - protein, 40 aa, Artificial Sequence
  GFR-binding peptide
  MOD_RES (5)..(6)..(38)..(40): Xaa is C or S
IPEPXXVPEKMSPINILYFDENKNVVYGKIPNMTVESXAX

SEQ ID NO: 68575 - protein, 36 aa, Artificial Sequence; identical to SEQ ID NO: 33304
  GFR-binding peptide
  MOD_RES (2)..(3): Xaa is C or S
  MOD_RES (17)..(18)..(19)..(20)..(21): Xaa is A or G
  MOD_RES (22)..(23)..(24)..(25): Xaa is A or G or is absent

SEQ ID NO: 68576 - protein, 39 aa, Artificial Sequence; identical to SEQ ID NO: 9730
  GFR-binding peptide
  MOD_RES (6)..(7): Xaa is C or S
  MOD_RES (21)..(22)..(23)..(24)..(25): Xaa is A or G
  MOD_RES (26)..(27)..(28)..(29): Xaa is A or G or is absent

SEQ ID NO: 68577 - protein, 41 aa, Artificial Sequence
  GFR-binding peptide
  MOD_RES (4)..(5)..(39)..(41): Xaa is C or S
  MOD_RES (19)..(20)..(21)..(22)..(23): Xaa is A or G
  MOD_RES (24)..(25)..(26)..(27): Xaa is A or G or is absent
PEPXXVPEKMEPISILYLXXXXXXXXXKFKYENMTVESXAX

SEQ ID NO: 68578 - protein, 40 aa, Artificial Sequence; identical to SEQ ID NO: 9731
  GFR-binding peptide
  MOD_RES (6)..(7)..(39): Xaa is C or S

SEQ ID NO: 68579 - protein, 36 aa, Artificial Sequence; identical to SEQ ID NO: 31147
  GFR-binding peptide
  MOD_RES (2)..(3): Xaa is C or S
  MOD_RES (17)..(18)..(19)..(20)..(21): Xaa is A or G
  MOD_RES (22)..(23)..(24)..(25): Xaa is A or G or is absent

SEQ ID NO: 68580 - protein, 41 aa, Artificial Sequence; identical to SEQ ID NO: 31149
  GFR-binding peptide
  MOD_RES (6)..(7)..(40): Xaa is C or S

SEQ ID NO: 68581 - protein, 35 aa, Artificial Sequence
  GFR-binding peptide
  MOD_RES (3)..(4): Xaa is C or S
GPXXTPTKMSPISMLYKNDKQQIILKYHYGMVVDR

SEQ ID NO: 68582 - protein, 40 aa, Artificial Sequence; identical to SEQ ID NO: 31151
  GFR-binding peptide
  MOD_RES (3)..(4)..(37)..(39): Xaa is C or S

SEQ ID NO: 68583 - protein, 38 aa, Artificial Sequence; identical to SEQ ID NO: 33313
  GFR-binding peptide
  MOD_RES (2)..(3)..(37): Xaa is C or S
  MOD_RES (17)..(18)..(19)..(20)..(21): Xaa is A or G
  MOD_RES (22)..(23)..(24)..(25): Xaa is A or G or is absent

SEQ ID NO: 68584 - protein, 41 aa, Artificial Sequence
  GFR-binding peptide
  MOD_RES (6)..(7)..(41): Xaa is C or S
  MOD_RES (21)..(22)..(23)..(24)..(25): Xaa is A or G
  MOD_RES (26)..(27)..(28)..(29): Xaa is A or G or is absent
GSAGPXXTPTKMSATSMLYYXXXXXXXXXLRKHRGMVVDRX

SEQ ID NO: 68585 - protein, 35 aa, Artificial Sequence; identical to SEQ ID NO: 31153
  GFR-binding peptide
  MOD_RES (1)..(34): Xaa is C or S
  MOD_RES (15)..(16)..(17)..(18)..(19): Xaa is A or G
  MOD_RES (20)..(21)..(22)..(23): Xaa is A or G or is absent

SEQ ID NO: 68586 - protein, 34 aa, Artificial Sequence
  GFR-binding peptide
  MOD_RES (34)..(34): Xaa is C or S
  MOD_RES (14)..(15)..(16)..(17)..(18): Xaa is A or G
  MOD_RES (19)..(20)..(21)..(22): Xaa is A or G or is absent
VPEKMNAISILYFXXXXXXXXXLKKYRNMTVESX

SEQ ID NO: 68587 - protein, 42 aa, Artificial Sequence; identical to SEQ ID NO: 33318
  GFR-binding peptide
  MOD_RES (6)..(7)..(41): Xaa is C or S
  MOD_RES (21)..(22)..(23)..(24)..(25): Xaa is A or G
  MOD_RES (26)..(27)..(28)..(29): Xaa is A or G or is absent

SEQ ID NO: 68588 - protein, 37 aa, Artificial Sequence; identical to SEQ ID NO: 31156
  GFR-binding peptide
  MOD_RES (6)..(7): Xaa is C or S

SEQ ID NO: 68589 - protein, 37 aa, Artificial Sequence; identical to SEQ ID NO: 9743
  GFR-binding peptide
  MOD_RES (4)..(5)..(36): Xaa is C or S

SEQ ID NO: 68590 - protein, 34 aa, Artificial Sequence; identical to SEQ ID NO: 9746
  GFR-binding peptide
  MOD_RES (1)..(1): Xaa is C or S
  MOD_RES (15)..(16)..(17)..(18)..(19): Xaa is A or G
  MOD_RES (20)..(21)..(22)..(23): Xaa is A or G or is absent

SEQ ID NO: 68591 - protein, 41 aa, Artificial Sequence; identical to SEQ ID NO: 31160
  GFR-binding peptide
  MOD_RES (6)..(7)..(39)..(41): Xaa is C or S

SEQ ID NO: 68592 - protein, 36 aa, Artificial Sequence; identical to SEQ ID NO: 31161
  GFR-binding peptide
  MOD_RES (34)..(36): Xaa is C or S
  MOD_RES (14)..(15)..(16)..(17)..(18): Xaa is A or G
  MOD_RES (19)..(20)..(21)..(22): Xaa is A or G or is absent

SEQ ID NO: 68593 - protein, 37 aa, Artificial Sequence; identical to SEQ ID NO: 9749
  GFR-binding peptide
  MOD_RES (3)..(4)..(37): Xaa is C or S
  MOD_RES (18)..(19)..(20)..(21)..(22): Xaa is A or G
  MOD_RES (23)..(24)..(25)..(26): Xaa is A or G or is absent

SEQ ID NO: 68594 - protein, 38 aa, Artificial Sequence; identical to SEQ ID NO: 9750
  GFR-binding peptide
  MOD_RES (6)..(38): Xaa is C or S

SEQ ID NO: 68595 - protein, 36 aa, Artificial Sequence; identical to SEQ ID NO: 9751
  GFR-binding peptide
  MOD_RES (34)..(36): Xaa is C or S
  MOD_RES (14)..(15)..(16)..(17)..(18): Xaa is A or G
  MOD_RES (19)..(20)..(21)..(22): Xaa is A or G or is absent

SEQ ID NO: 68596 - protein, 40 aa, Artificial Sequence; identical to SEQ ID NO: 31170
  GFR-binding peptide
  MOD_RES (4)..(5)..(37)..(39): Xaa is C or S

SEQ ID NO: 68597 - protein, 37 aa, Artificial Sequence
  GFR-binding peptide
  MOD_RES (2)..(3)..(36): Xaa is C or S
  MOD_RES (17)..(18)..(19)..(20)..(21): Xaa is A or G
  MOD_RES (22)..(23)..(24)..(25): Xaa is A or G or is absent
PXXVPQALSPINILYFXXXXXXXXXYGKIPMIVRSXK

SEQ ID NO: 68598 - protein, 38 aa, Artificial Sequence; identical to SEQ ID NO: 9756
  GFR-binding peptide
  MOD_RES (1)..(35)..(37): Xaa is C or S
  MOD_RES (15)..(16)..(17)..(18)..(19): Xaa is A or G
  MOD_RES (20)..(21)..(22)..(23): Xaa is A or G or is absent

SEQ ID NO: 68599 - protein, 39 aa, Artificial Sequence
  GFR-binding peptide
  MOD_RES (3)..(4)..(38): Xaa is C or S
  MOD_RES (18)..(19)..(20)..(21)..(22): Xaa is A or G
  MOD_RES (23)..(24)..(25)..(26): Xaa is A or G or is absent
PTXXVPTRLSATSILYYXXXXXXXXXLRKHRDMVVESXG

SEQ ID NO: 68600 - protein, 34 aa, Artificial Sequence
  GFR-binding peptide
  MOD_RES (1)..(34): Xaa is C or S
  MOD_RES (15)..(16)..(17)..(18)..(19): Xaa is A or G
  MOD_RES (20)..(21)..(22)..(23): Xaa is A or G or is absent
XAPVKTEPISMLYLXXXXXXXXXKFKYEMIVEEX

SEQ ID NO: 68601 - protein, 36 aa, Artificial Sequence
  GFR-binding peptide
  MOD_RES (3)..(4): Xaa is C or S
  MOD_RES (18)..(19)..(20)..(21)..(22): Xaa is A or G
  MOD_RES (23)..(24)..(25)..(26): Xaa is A or G or is absent
EPXXVPEKMEPISILYLXXXXXXXXXKFKYENMTVE

SEQ ID NO: 68602 - protein, 37 aa, Artificial Sequence; identical to SEQ ID NO: 9757
  GFR-binding peptide
  MOD_RES (1)..(34)..(36): Xaa is C or S
  MOD_RES (15)..(16)..(17)..(18)..(19): Xaa is A or G
  MOD_RES (20)..(21)..(22)..(23): Xaa is A or G or is absent

SEQ ID NO: 68603 - protein, 32 aa, Artificial Sequence
  GFR-binding peptide
  MOD_RES (1)..(2): Xaa is C or S
XXVPTRLSPISILYKDSANNVVLKYHYDMVVE

SEQ ID NO: 68604 - protein, 34 aa, Artificial Sequence; identical to SEQ ID NO: 33332
  GFR-binding peptide
  MOD_RES (1)..(2): Xaa is C or S
  MOD_RES (16)..(17)..(18)..(19)..(20): Xaa is A or G
  MOD_RES (21)..(22)..(23)..(24): Xaa is A or G or is absent

SEQ ID NO: 68605 - protein, 33 aa, Artificial Sequence; identical to SEQ ID NO: 58178
  GFR-binding peptide
  MOD_RES (1)..(2)..(33): Xaa is C or S

SEQ ID NO: 68606 - protein, 37 aa, Artificial Sequence
  GFR-binding peptide
  MOD_RES (1)..(2)..(35)..(37): Xaa is C or S
  MOD_RES (16)..(17)..(18)..(19)..(20): Xaa is A or G
  MOD_RES (21)..(22)..(23)..(24): Xaa is A or G or is absent
XXVPQDLSPINILYFXXXXXXXXXYGKIPMVVKSXKX

SEQ ID NO: 68607 - protein, 39 aa, Artificial Sequence; identical to SEQ ID NO: 31178
  GFR-binding peptide
  MOD_RES (1)..(2)..(36)..(38): Xaa is C or S
  MOD_RES (16)..(17)..(18)..(19)..(20): Xaa is A or G
  MOD_RES (21)..(22)..(23)..(24): Xaa is A or G or is absent

SEQ ID NO: 68608 - protein, 34 aa, Artificial Sequence; identical to SEQ ID NO: 9759
  GFR-binding peptide
  MOD_RES (34)..(34): Xaa is C or S
  MOD_RES (14)..(15)..(16)..(17)..(18): Xaa is A or G
  MOD_RES (19)..(20)..(21)..(22): Xaa is A or G or is absent

SEQ ID NO: 68609 - protein, 32 aa, Artificial Sequence
  GFR-binding peptide
  MOD_RES (1)..(2): Xaa is C or S
XXVPEKMNAISILYFDENKNVVLKKYRNMTVE

SEQ ID NO: 68610 - protein, 40 aa, Artificial Sequence; identical to SEQ ID NO: 9761
  GFR-binding peptide
  MOD_RES (4)..(5)..(37)..(39): Xaa is C or S

SEQ ID NO: 68611 - protein, 35 aa, Artificial Sequence; identical to SEQ ID NO: 9767
  GFR-binding peptide
  MOD_RES (1)..(2): Xaa is C or S
  MOD_RES (16)..(17)..(18)..(19)..(20): Xaa is A or G
  MOD_RES (21)..(22)..(23)..(24): Xaa is A or G or is absent

SEQ ID NO: 68612 - protein, 35 aa, Artificial Sequence
  GFR-binding peptide
  MOD_RES (1)..(35): Xaa is C or S
  MOD_RES (15)..(16)..(17)..(18)..(19): Xaa is A or G
  MOD_RES (20)..(21)..(22)..(23): Xaa is A or G or is absent
XVPEKMNAISILYFXXXXXXXXXLKKYRNMTVESX

SEQ ID NO: 68613 - protein, 31 aa, Artificial Sequence
  GFR-binding peptide
  MOD_RES (1)..(1): Xaa is C or S
XVPTRLSPISILYKDSANNVVLKYHYDMVVE

SEQ ID NO: 68614 - protein, 36 aa, Artificial Sequence; identical to SEQ ID NO: 9771
  GFR-binding peptide
  MOD_RES (2)..(3)..(36): Xaa is C or S
  MOD_RES (17)..(18)..(19)..(20)..(21): Xaa is A or G
  MOD_RES (22)..(23)..(24)..(25): Xaa is A or G or is absent

SEQ ID NO: 68615 - protein, 32 aa, Artificial Sequence
  GFR-binding peptide
  MOD_RES (1)..(32): Xaa is C or S
XVPQDLSPINILYFVGRTPKVYGKIPMVVKSX

SEQ ID NO: 68616 - protein, 31 aa, Artificial Sequence
  GFR-binding peptide
  MOD_RES (31)..(31): Xaa is C or S
VPQDLSPINILYFVGRTPKVYGKIPMVVKSX

SEQ ID NO: 68617 - protein, 39 aa, Artificial Sequence; identical to SEQ ID NO: 9773
  GFR-binding peptide
  MOD_RES (3)..(4)..(36)..(38): Xaa is C or S

SEQ ID NO: 68618 - protein, 40 aa, Artificial Sequence; identical to SEQ ID NO: 31194
  GFR-binding peptide
  MOD_RES (5)..(6)..(37)..(39): Xaa is C or S

SEQ ID NO: 68619 - protein, 38 aa, Artificial Sequence
  GFR-binding peptide
  MOD_RES (3)..(4)..(38): Xaa is C or S
  MOD_RES (18)..(19)..(20)..(21)..(22): Xaa is A or G
  MOD_RES (23)..(24)..(25)..(26): Xaa is A or G or is absent
PTXXVPTRLSATSILYYXXXXXXXXXLRKHRDMVVESX

SEQ ID NO: 68620 - protein, 38 aa, Artificial Sequence; identical to SEQ ID NO: 6181
  GFR-binding peptide
  MOD_RES (6)..(7): Xaa is C or S

SEQ ID NO: 68621 - protein, 36 aa, Artificial Sequence
  GFR-binding peptide
  MOD_RES (1)..(2)..(34)..(36): Xaa is C or S
XXVPEKMSPISILYKDENKNVVLKYHYNMTVESXAX

SEQ ID NO: 68622 - protein, 42 aa, Artificial Sequence; identical to SEQ ID NO: 6186
  GFR-binding peptide
  MOD_RES (4)..(5)..(40)..(42): Xaa is C or S
  MOD_RES (19)..(20)..(21)..(22)..(23): Xaa is A or G
  MOD_RES (24)..(25)..(26)..(27): Xaa is A or G or is absent

SEQ ID NO: 68623 - protein, 36 aa, Artificial Sequence
  GFR-binding peptide
  MOD_RES (34)..(36): Xaa is C or S
  MOD_RES (14)..(15)..(16)..(17)..(18): Xaa is A or G
  MOD_RES (19)..(20)..(21)..(22): Xaa is A or G or is absent
VPEKMSATSILYYXXXXXXXXXLRKHRNMTVESXAX

SEQ ID NO: 68624 - protein, 31 aa, Artificial Sequence
  GFR-binding peptide
  MOD_RES (1)..(1): Xaa is C or S
XVPEKMNAISILYFDENKNVVLKKYRNMTVE

SEQ ID NO: 68625 - protein, 38 aa, Artificial Sequence
  GFR-binding peptide
  MOD_RES (4)..(5)..(36)..(38): Xaa is C or S
PSTXXAPVKTSATSMLYYDNGRVLLLRKHRMIVEEXGX

SEQ ID NO: 68626 - protein, 38 aa, Artificial Sequence; identical to SEQ ID NO: 6188
  GFR-binding peptide
  MOD_RES (7)..(7): Xaa is C or S

SEQ ID NO: 68627 - protein, 33 aa, Artificial Sequence; identical to SEQ ID NO: 6189
  GFR-binding peptide
  MOD_RES (32)..(32): Xaa is C or S

SEQ ID NO: 68628 - protein, 42 aa, Artificial Sequence
  GFR-binding peptide
  MOD_RES (6)..(7)..(41): Xaa is C or S
  MOD_RES (21)..(22)..(23)..(24)..(25): Xaa is A or G
  MOD_RES (26)..(27)..(28)..(29): Xaa is A or G or is absent
GSAGPXXTPTKMEPISMLYLXXXXXXXXXKFKYEGMVVDRXG

SEQ ID NO: 68629 - protein, 34 aa, Artificial Sequence
  GFR-binding peptide
  MOD_RES (32)..(34): Xaa is C or S
VPEKMEPISILYLDENKNVVKFKYENMTVESXAX

SEQ ID NO: 68630 - protein, 44 aa, Artificial Sequence; identical to SEQ ID NO: 57242
  GFR-binding peptide
  MOD_RES (6)..(7)..(41)..(43): Xaa is C or S
  MOD_RES (21)..(22)..(23)..(24)..(25): Xaa is A or G
  MOD_RES (26)..(27)..(28)..(29): Xaa is A or G or is absent

SEQ ID NO: 68631 - protein, 38 aa, Artificial Sequence; identical to SEQ ID NO: 57243
  GFR-binding peptide
  MOD_RES (1)..(2)..(36)..(38): Xaa is C or S
  MOD_RES (16)..(17)..(18)..(19)..(20): Xaa is A or G
  MOD_RES (21)..(22)..(23)..(24): Xaa is A or G or is absent

SEQ ID NO: 68632 - protein, 40 aa, Artificial Sequence
  GFR-binding peptide
  MOD_RES (6)..(7)..(38)..(40): Xaa is C or S
ASASPXXVSQDLSPINILYFIGKTPKIYGKIPMIVKSXKX

SEQ ID NO: 68633 - protein, 33 aa, Artificial Sequence
  GFR-binding peptide
  MOD_RES (1)..(1): Xaa is C or S
  MOD_RES (15)..(16)..(17)..(18)..(19): Xaa is A or G
  MOD_RES (20)..(21)..(22)..(23): Xaa is A or G or is absent
XAPVKTSPISMLYKXXXXXXXXXLKYHYMIVEE

SEQ ID NO: 68634 - protein, 35 aa, Artificial Sequence; identical to SEQ ID NO: 32312
  GFR-binding peptide
  MOD_RES (1)..(2): Xaa is C or S
  MOD_RES (16)..(17)..(18)..(19)..(20): Xaa is A or G
  MOD_RES (21)..(22)..(23)..(24): Xaa is A or G or is absent

SEQ ID NO: 68635 - protein, 37 aa, Artificial Sequence
  GFR-binding peptide
  MOD_RES (1)..(2)..(34)..(36): Xaa is C or S
XXVPEKMSPISILYKDENKNVVLKYHYNMTVESXAXR

SEQ ID NO: 68636 - protein, 39 aa, Artificial Sequence
  GFR-binding peptide
  MOD_RES (5)..(6)..(37)..(39): Xaa is C or S
SASPXXVPQDLSPINILYFVGRTPKVYGKIPMVVKSXKX

SEQ ID NO: 68637 - protein, 33 aa, Artificial Sequence
  GFR-binding peptide
  MOD_RES (1)..(1): Xaa is C or S
  MOD_RES (15)..(16)..(17)..(18)..(19): Xaa is A or G
  MOD_RES (20)..(21)..(22)..(23): Xaa is A or G or is absent
XAPVKTEPISMLYLXXXXXXXXXKFKYEMIVEE

SEQ ID NO: 68638 - protein, 35 aa, Artificial Sequence; identical to SEQ ID NO: 32320
  GFR-binding peptide
  MOD_RES (3)..(4): Xaa is C or S

SEQ ID NO: 68639 - protein, 38 aa, Artificial Sequence; identical to SEQ ID NO: 6198
  GFR-binding peptide
  MOD_RES (6)..(7): Xaa is C or S

SEQ ID NO: 68640 - protein, 33 aa, Artificial Sequence; identical to SEQ ID NO: 27334
  GFR-binding peptide
  MOD_RES (2)..(3): Xaa is C or S

SEQ ID NO: 68641 - protein, 36 aa, Artificial Sequence; identical to SEQ ID NO: 57248
  GFR-binding peptide
  MOD_RES (3)..(4): Xaa is C or S
  MOD_RES (18)..(19)..(20)..(21)..(22): Xaa is A or G
  MOD_RES (23)..(24)..(25)..(26): Xaa is A or G or is absent

SEQ ID NO: 68642 - protein, 41 aa, Artificial Sequence; identical to SEQ ID NO: 57249
  GFR-binding peptide
  MOD_RES (5)..(6)..(40): Xaa is C or S
  MOD_RES (20)..(21)..(22)..(23)..(24): Xaa is A or G
  MOD_RES (25)..(26)..(27)..(28): Xaa is A or G or is absent

SEQ ID NO: 68643 - protein, 40 aa, Artificial Sequence
  GFR-binding peptide
  MOD_RES (3)..(4)..(37)..(39): Xaa is C or S
  MOD_RES (18)..(19)..(20)..(21)..(22): Xaa is A or G
  MOD_RES (23)..(24)..(25)..(26): Xaa is A or G or is absent
STXXAPVKTSPISMLYKXXXXXXXXXLKYHYMIVEEXGXL

SEQ ID NO: 68644 - protein, 42 aa, Artificial Sequence; identical to SEQ ID NO: 6200
  GFR-binding peptide
  MOD_RES (5)..(6)..(40)..(42): Xaa is C or S
  MOD_RES (20)..(21)..(22)..(23)..(24): Xaa is A or G
  MOD_RES (25)..(26)..(27)..(28): Xaa is A or G or is absent

SEQ ID NO: 68645 - protein, 40 aa, Artificial Sequence; identical to SEQ ID NO: 27337
  GFR-binding peptide
  MOD_RES (4)..(5)..(38)..(40): Xaa is C or S
  MOD_RES (19)..(20)..(21)..(22)..(23): Xaa is A or G
  MOD_RES (24)..(25)..(26)..(27): Xaa is A or G or is absent

SEQ ID NO: 68646 - protein, 39 aa, Artificial Sequence; identical to SEQ ID NO: 6201
  GFR-binding peptide
  MOD_RES (3)..(4)..(38): Xaa is C or S
  MOD_RES (18)..(19)..(20)..(21)..(22): Xaa is A or G
  MOD_RES (23)..(24)..(25)..(26): Xaa is A or G or is absent

SEQ ID NO: 68647 - protein, 38 aa, Artificial Sequence; identical to SEQ ID NO: 6203
  GFR-binding peptide
  MOD_RES (1)..(2)..(35)..(37): Xaa is C or S
  MOD_RES (16)..(17)..(18)..(19)..(20): Xaa is A or G
  MOD_RES (21)..(22)..(23)..(24): Xaa is A or G or is absent

SEQ ID NO: 68648 - protein, 34 aa, Artificial Sequence
  GFR-binding peptide
  MOD_RES (2)..(3): Xaa is C or S
SXXVPARLSATSILYYDAANNVVLRKHRDMVVEA

SEQ ID NO: 68649 - protein, 40 aa, Artificial Sequence; identical to SEQ ID NO: 27342
  GFR-binding peptide
  MOD_RES (4)..(5)..(37)..(39): Xaa is C or S

SEQ ID NO: 68650 - protein, 35 aa, Artificial Sequence; identical to SEQ ID NO: 27349
  GFR-binding peptide
  MOD_RES (1)..(35): Xaa is C or S
  MOD_RES (15)..(16)..(17)..(18)..(19): Xaa is A or G
  MOD_RES (20)..(21)..(22)..(23): Xaa is A or G or is absent

SEQ ID NO: 68651 - protein, 35 aa, Artificial Sequence; identical to SEQ ID NO: 27350
  GFR-binding peptide
  MOD_RES (2)..(3): Xaa is C or S
  MOD_RES (17)..(18)..(19)..(20)..(21): Xaa is A or G
  MOD_RES (22)..(23)..(24)..(25): Xaa is A or G or is absent

SEQ ID NO: 68652 - protein, 36 aa, Artificial Sequence; identical to SEQ ID NO: 27353
  GFR-binding peptide
  MOD_RES (1)..(2)..(36): Xaa is C or S
  MOD_RES (16)..(17)..(18)..(19)..(20): Xaa is A or G
  MOD_RES (21)..(22)..(23)..(24): Xaa is A or G or is absent

SEQ ID NO: 68653 - protein, 36 aa, Artificial Sequence; identical to SEQ ID NO: 32337
  GFR-binding peptide
  MOD_RES (34)..(36): Xaa is C or S
  MOD_RES (14)..(15)..(16)..(17)..(18): Xaa is A or G
  MOD_RES (19)..(20)..(21)..(22): Xaa is A or G or is absent

SEQ ID NO: 68654 - protein, 34 aa, Artificial Sequence; identical to SEQ ID NO: 6214
  GFR-binding peptide
  MOD_RES (2)..(3): Xaa is C or S

SEQ ID NO: 68655 - protein, 30 aa, Artificial Sequence; identical to SEQ ID NO: 6216
  GFR-binding peptide

SEQ ID NO: 68656 - protein, 32 aa, Artificial Sequence; identical to SEQ ID NO: 6220
  GFR-binding peptide
  MOD_RES (1)..(1): Xaa is C or S

SEQ ID NO: 68657 - protein, 35 aa, Artificial Sequence; identical to SEQ ID NO: 27358
  GFR-binding peptide
  MOD_RES (33)..(35): Xaa is C or S
  MOD_RES (14)..(15)..(16)..(17)..(18): Xaa is A or G
  MOD_RES (19)..(20)..(21)..(22): Xaa is A or G or is absent

SEQ ID NO: 68658 - protein, 43 aa, Artificial Sequence; identical to SEQ ID NO: 32342
  GFR-binding peptide
  MOD_RES (6)..(7)..(41)..(43): Xaa is C or S
  MOD_RES (21)..(22)..(23)..(24)..(25): Xaa is A or G
  MOD_RES (26)..(27)..(28)..(29): Xaa is A or G or is absent

SEQ ID NO: 68659 - protein, 35 aa, Artificial Sequence; identical to SEQ ID NO: 6222
  GFR-binding peptide
  MOD_RES (1)..(34): Xaa is C or S

SEQ ID NO: 68660 - protein, 35 aa, Artificial Sequence; identical to SEQ ID NO: 32345
  GFR-binding peptide
  MOD_RES (35)..(35): Xaa is C or S
  MOD_RES (14)..(15)..(16)..(17)..(18): Xaa is A or G
  MOD_RES (19)..(20)..(21)..(22): Xaa is A or G or is absent

SEQ ID NO: 68661 - protein, 40 aa, Artificial Sequence; identical to SEQ ID NO: 27360
  GFR-binding peptide
  MOD_RES (5)..(6)..(40): Xaa is C or S
  MOD_RES (20)..(21)..(22)..(23)..(24): Xaa is A or G
  MOD_RES (25)..(26)..(27)..(28): Xaa is A or G or is absent

SEQ ID NO: 68662 - protein, 41 aa, Artificial Sequence; identical to SEQ ID NO: 57280
  GFR-binding peptide
  MOD_RES (6)..(7)..(39)..(41): Xaa is C or S

SEQ ID NO: 68663 - protein, 40 aa, Artificial Sequence
  GFR-binding peptide
  MOD_RES (5)..(6)..(38)..(40): Xaa is C or S
IPEPXXVPEKMSPISILYKDENKNVVLKYHYNMTVESXAX

SEQ ID NO: 68664 - protein, 30 aa, Artificial Sequence; identical to SEQ ID NO: 27364
  GFR-binding peptide

SEQ ID NO: 68665 - protein, 34 aa, Artificial Sequence; identical to SEQ ID NO: 6233
  GFR-binding peptide
  MOD_RES (1)..(34): Xaa is C or S
  MOD_RES (15)..(16)..(17)..(18)..(19): Xaa is A or G
  MOD_RES (20)..(21)..(22)..(23): Xaa is A or G or is absent

SEQ ID NO: 68666 - protein, 40 aa, Artificial Sequence; identical to SEQ ID NO: 27369
  GFR-binding peptide
  MOD_RES (5)..(6): Xaa is C or S
  MOD_RES (20)..(21)..(22)..(23)..(24): Xaa is A or G
  MOD_RES (25)..(26)..(27)..(28): Xaa is A or G or is absent

SEQ ID NO: 68667 - protein, 42 aa, Artificial Sequence; identical to SEQ ID NO: 6234
  GFR-binding peptide
  MOD_RES (5)..(6)..(39)..(41): Xaa is C or S
  MOD_RES (20)..(21)..(22)..(23)..(24): Xaa is A or G
  MOD_RES (25)..(26)..(27)..(28): Xaa is A or G or is absent

SEQ ID NO: 68668 - protein, 40 aa, Artificial Sequence; identical to SEQ ID NO: 32354
  GFR-binding peptide
  MOD_RES (6)..(7)..(39): Xaa is C or S

SEQ ID NO: 68669 - protein, 33 aa, Artificial Sequence; identical to SEQ ID NO: 6236
  GFR-binding peptide
  MOD_RES (33)..(33): Xaa is C or S
  MOD_RES (14)..(15)..(16)..(17)..(18): Xaa is A or G
  MOD_RES (19)..(20)..(21)..(22): Xaa is A or G or is absent

SEQ ID NO: 68670 - protein, 38 aa, Artificial Sequence; identical to SEQ ID NO: 32361
  GFR-binding peptide
  MOD_RES (3)..(4)..(36)..(38): Xaa is C or S

SEQ ID NO: 68671 - protein, 37 aa, Artificial Sequence; identical to SEQ ID NO: 27379
  GFR-binding peptide
  MOD_RES (4)..(5)..(37): Xaa is C or S

SEQ ID NO: 68672 - protein, 41 aa, Artificial Sequence; identical to SEQ ID NO: 32363
  GFR-binding peptide
  MOD_RES (3)..(4)..(39)..(41): Xaa is C or S
  MOD_RES (18)..(19)..(20)..(21)..(22): Xaa is A or G
  MOD_RES (23)..(24)..(25)..(26): Xaa is A or G or is absent

SEQ ID NO: 68673 - protein, 42 aa, Artificial Sequence; identical to SEQ ID NO: 27382
  GFR-binding peptide
  MOD_RES (6)..(7)..(39)..(41): Xaa is C or S

SEQ ID NO: 68674 - protein, 37 aa, Artificial Sequence
  GFR-binding peptide
  MOD_RES (4)..(5)..(36): Xaa is C or S
ASPXXVSQDLSPINILYFIGKTPKIYGKIPMIVKSXK

SEQ ID NO: 68675 - protein, 39 aa, Artificial Sequence; identical to SEQ ID NO: 6246
  GFR-binding peptide
  MOD_RES (6)..(7): Xaa is C or S
  MOD_RES (21)..(22)..(23)..(24)..(25): Xaa is A or G
  MOD_RES (26)..(27)..(28)..(29): Xaa is A or G or is absent

SEQ ID NO: 68676 - protein, 33 aa, Artificial Sequence
  GFR-binding peptide
  MOD_RES (1)..(1): Xaa is C or S
  MOD_RES (15)..(16)..(17)..(18)..(19): Xaa is A or G
  MOD_RES (20)..(21)..(22)..(23): Xaa is A or G or is absent
XVPEKMSPISILYKXXXXXXXXXLKYHYNMTVE

SEQ ID NO: 68677 - protein, 35 aa, Artificial Sequence; identical to SEQ ID NO: 32382
  GFR-binding peptide
  MOD_RES (4)..(5): Xaa is C or S

SEQ ID NO: 68678 - protein, 37 aa, Artificial Sequence; identical to SEQ ID NO: 27390
  GFR-binding peptide
  MOD_RES (4)..(5)..(37): Xaa is C or S

SEQ ID NO: 68679 - protein, 39 aa, Artificial Sequence; identical to SEQ ID NO: 6251
  GFR-binding peptide
  MOD_RES (6)..(7): Xaa is C or S
  MOD_RES (21)..(22)..(23)..(24)..(25): Xaa is A or G
  MOD_RES (26)..(27)..(28)..(29): Xaa is A or G or is absent

SEQ ID NO: 68680 - protein, 32 aa, Artificial Sequence
  GFR-binding peptide
  MOD_RES (1)..(2): Xaa is C or S
XXAPVKTEPISMLYLDNGRVLLKFKYEMIVEE

SEQ ID NO: 68681 - protein, 33 aa, Artificial Sequence
  GFR-binding peptide
  MOD_RES (1)..(1): Xaa is C or S
  MOD_RES (15)..(16)..(17)..(18)..(19): Xaa is A or G
  MOD_RES (20)..(21)..(22)..(23): Xaa is A or G or is absent
XVPEKMEPISILYLXXXXXXXXXKFKYENMTVE

SEQ ID NO: 68682 - protein, 36 aa, Artificial Sequence; identical to SEQ ID NO: 27391
  GFR-binding peptide
  MOD_RES (1)..(34)..(36): Xaa is C or S
  MOD_RES (15)..(16)..(17)..(18)..(19): Xaa is A or G
  MOD_RES (20)..(21)..(22)..(23): Xaa is A or G or is absent

SEQ ID NO: 68683 - protein, 35 aa, Artificial Sequence; identical to SEQ ID NO: 6252
  GFR-binding peptide
  MOD_RES (34)..(34): Xaa is C or S
  MOD_RES (14)..(15)..(16)..(17)..(18): Xaa is A or G
  MOD_RES (19)..(20)..(21)..(22): Xaa is A or G or is absent

SEQ ID NO: 68684 - protein, 33 aa, Artificial Sequence; identical to SEQ ID NO: 6255
  GFR-binding peptide
  MOD_RES (1)..(32): Xaa is C or S

SEQ ID NO: 68685 - protein, 35 aa, Artificial Sequence; identical to SEQ ID NO: 27395
  GFR-binding peptide
  MOD_RES (3)..(4)..(35): Xaa is C or S

SEQ ID NO: 68686 - protein, 43 aa, Artificial Sequence; identical to SEQ ID NO: 6258
  GFR-binding peptide
  MOD_RES (5)..(6)..(40)..(42): Xaa is C or S
  MOD_RES (20)..(21)..(22)..(23)..(24): Xaa is A or G
  MOD_RES (25)..(26)..(27)..(28): Xaa is A or G or is absent

SEQ ID NO: 68687 - protein, 34 aa, Artificial Sequence; identical to SEQ ID NO: 6259
  GFR-binding peptide
  MOD_RES (1)..(34): Xaa is C or S
  MOD_RES (15)..(16)..(17)..(18)..(19): Xaa is A or G
  MOD_RES (20)..(21)..(22)..(23): Xaa is A or G or is absent

SEQ ID NO: 68688 - protein, 36 aa, Artificial Sequence; identical to SEQ ID NO: 27401
  GFR-binding peptide
  MOD_RES (1)..(2)..(36): Xaa is C or S
  MOD_RES (16)..(17)..(18)..(19)..(20): Xaa is A or G
  MOD_RES (21)..(22)..(23)..(24): Xaa is A or G or is absent

SEQ ID NO: 68689 - protein, 41 aa, Artificial Sequence; identical to SEQ ID NO: 27403
  GFR-binding peptide
  MOD_RES (5)..(6)..(38)..(40): Xaa is C or S

SEQ ID NO: 68690 - protein, 35 aa, Artificial Sequence
  GFR-binding peptide
  MOD_RES (1)..(2)..(34): Xaa is C or S
XXVPEKMSPINILYFDENKNVVYGKIPNMTVESXA

SEQ ID NO: 68691 - protein, 44 aa, Artificial Sequence
  GFR-binding peptide
  MOD_RES (6)..(7)..(41)..(43): Xaa is C or S
  MOD_RES (21)..(22)..(23)..(24)..(25): Xaa is A or G
  MOD_RES (26)..(27)..(28)..(29): Xaa is A or G or is absent
HVPKPXXAPTKLEPISVLYLXXXXXXXXXKFKYENMVVRSXGXH

SEQ ID NO: 68692 - protein, 37 aa, Artificial Sequence; identical to SEQ ID NO: 32408
  GFR-binding peptide
  MOD_RES (6)..(7): Xaa is C or S

SEQ ID NO: 68693 - protein, 33 aa, Artificial Sequence; identical to SEQ ID NO: 6271
  GFR-binding peptide
  MOD_RES (32)..(32): Xaa is C or S

SEQ ID NO: 68694 - protein, 38 aa, Artificial Sequence; identical to SEQ ID NO: 32418
  GFR-binding peptide
  MOD_RES (4)..(5)..(37): Xaa is C or S

SEQ ID NO: 68695 - protein, 38 aa, Artificial Sequence; identical to SEQ ID NO: 6281
  GFR-binding peptide
  MOD_RES (1)..(2)..(36)..(38): Xaa is C or S
  MOD_RES (16)..(17)..(18)..(19)..(20): Xaa is A or G
  MOD_RES (21)..(22)..(23)..(24): Xaa is A or G or is absent

SEQ ID NO: 68696 - protein, 39 aa, Artificial Sequence; identical to SEQ ID NO: 6282
  GFR-binding peptide
  MOD_RES (3)..(4)..(38): Xaa is C or S
  MOD_RES (18)..(19)..(20)..(21)..(22): Xaa is A or G
  MOD_RES (23)..(24)..(25)..(26): Xaa is A or G or is absent

SEQ ID NO: 68697 - protein, 42 aa, Artificial Sequence; identical to SEQ ID NO: 6284
  GFR-binding peptide
  MOD_RES (6)..(7)..(41): Xaa is C or S
  MOD_RES (21)..(22)..(23)..(24)..(25): Xaa is A or G
  MOD_RES (26)..(27)..(28)..(29): Xaa is A or G or is absent

SEQ ID NO: 68698 - protein, 40 aa, Artificial Sequence; identical to SEQ ID NO: 32422
  GFR-binding peptide
  MOD_RES (6)..(7): Xaa is C or S
  MOD_RES (21)..(22)..(23)..(24)..(25): Xaa is A or G
  MOD_RES (26)..(27)..(28)..(29): Xaa is A or G or is absent

SEQ ID NO: 68699 - protein, 38 aa, Artificial Sequence; identical to SEQ ID NO: 27414
  GFR-binding peptide
  MOD_RES (6)..(7): Xaa is C or S

SEQ ID NO: 68700 - protein, 36 aa, Artificial Sequence; identical to SEQ ID NO: 6286
  GFR-binding peptide
  MOD_RES (2)..(3)..(34)..(36): Xaa is C or S

SEQ ID NO: 68701 - protein, 38 aa, Artificial Sequence; identical to SEQ ID NO: 27417
  GFR-binding peptide
  MOD_RES (4)..(5): Xaa is C or S
  MOD_RES (19)..(20)..(21)..(22)..(23): Xaa is A or G
  MOD_RES (24)..(25)..(26)..(27): Xaa is A or G or is absent

SEQ ID NO: 68702 - protein, 39 aa, Artificial Sequence
  GFR-binding peptide
  MOD_RES (4)..(5)..(37)..(39): Xaa is C or S
PASXXVPARLSATSILYYDAANNVVLRKHRDMVVEAXGX

SEQ ID NO: 68703 - protein, 44 aa, Artificial Sequence; identical to SEQ ID NO: 32425
  GFR-binding peptide
  MOD_RES (6)..(7)..(41)..(43): Xaa is C or S
  MOD_RES (21)..(22)..(23)..(24)..(25): Xaa is A or G
  MOD_RES (26)..(27)..(28)..(29): Xaa is A or G or is absent

SEQ ID NO: 68704 - protein, 38 aa, Artificial Sequence; identical to SEQ ID NO: 27419
  GFR-binding peptide
  MOD_RES (3)..(4)..(36)..(38): Xaa is C or S

SEQ ID NO: 68705 - protein, 35 aa, Artificial Sequence; identical to SEQ ID NO: 6290
  GFR-binding peptide
  MOD_RES (3)..(4)..(35): Xaa is C or S

SEQ ID NO: 68706 - protein, 39 aa, Artificial Sequence
  GFR-binding peptide
  MOD_RES (1)..(2)..(36)..(38): Xaa is C or S
  MOD_RES (16)..(17)..(18)..(19)..(20): Xaa is A or G
  MOD_RES (21)..(22)..(23)..(24): Xaa is A or G or is absent
XXVPARLSATSILYYXXXXXXXXXLRKHRDMVVEAXGXR

SEQ ID NO: 68707 - protein, 38 aa, Artificial Sequence
  GFR-binding peptide
  MOD_RES (2)..(3)..(35)..(37): Xaa is C or S
PXXTPTKMSPISMLYKNDKQQIILKYHYGMVVDRXGXS

SEQ ID NO: 68708 - protein, 33 aa, Artificial Sequence; identical to SEQ ID NO: 32435
  GFR-binding peptide
  MOD_RES (1)..(1): Xaa is C or S
  MOD_RES (15)..(16)..(17)..(18)..(19): Xaa is A or G
  MOD_RES (20)..(21)..(22)..(23): Xaa is A or G or is absent

SEQ ID NO: 68709 - protein, 35 aa, Artificial Sequence; identical to SEQ ID NO: 27427
  GFR-binding peptide
  MOD_RES (1)..(33)..(35): Xaa is C or S

SEQ ID NO: 68710 - protein, 36 aa, Artificial Sequence; identical to SEQ ID NO: 27429
  GFR-binding peptide
  MOD_RES (3)..(4): Xaa is C or S
  MOD_RES (18)..(19)..(20)..(21)..(22): Xaa is A or G
  MOD_RES (23)..(24)..(25)..(26): Xaa is A or G or is absent

SEQ ID NO: 68711 - protein, 39 aa, Artificial Sequence
  GFR-binding peptide
  MOD_RES (3)..(4)..(38): Xaa is C or S
  MOD_RES (18)..(19)..(20)..(21)..(22): Xaa is A or G
  MOD_RES (23)..(24)..(25)..(26): Xaa is A or G or is absent
EPXXVPEKMNAISILYFXXXXXXXXXLKKYRNMTVESXA

SEQ ID NO: 68712 - protein, 35 aa, Artificial Sequence
  GFR-binding peptide
  MOD_RES (34)..(34): Xaa is C or S
  MOD_RES (14)..(15)..(16)..(17)..(18): Xaa is A or G
  MOD_RES (19)..(20)..(21)..(22): Xaa is A or G or is absent
VPEKMSPINILYFXXXXXXXXXYGKIPNMTVESXA

SEQ ID NO: 68713 - protein, 41 aa, Artificial Sequence; identical to SEQ ID NO: 6301
  GFR-binding peptide
  MOD_RES (6)..(7)..(39)..(41): Xaa is C or S

SEQ ID NO: 68714 - protein, 38 aa, Artificial Sequence; identical to SEQ ID NO: 6302
  GFR-binding peptide
  MOD_RES (2)..(3)..(35)..(37): Xaa is C or S

SEQ ID NO: 68715 - protein, 40 aa, Artificial Sequence
  GFR-binding peptide
  MOD_RES (4)..(5)..(39): Xaa is C or S
  MOD_RES (19)..(20)..(21)..(22)..(23): Xaa is A or G
  MOD_RES (24)..(25)..(26)..(27): Xaa is A or G or is absent
PPTXXVPTRLSPISILYKXXXXXXXXXLKYHYDMVVESXG

SEQ ID NO: 68716 - protein, 31 aa, Artificial Sequence
  GFR-binding peptide
  MOD_RES (1)..(1): Xaa is C or S
XVPTRLEPISILYLDSANNVVKFKYEDMVVE

SEQ ID NO: 68717 - protein, 31 aa, Artificial Sequence; identical to SEQ ID NO: 32456
  GFR-binding peptide
  MOD_RES (1)..(1): Xaa is C or S

SEQ ID NO: 68718 - protein, 36 aa, Artificial Sequence; identical to SEQ ID NO: 6304
  GFR-binding peptide
  MOD_RES (2)..(3)..(35): Xaa is C or S

SEQ ID NO: 68719 - protein, 41 aa, Artificial Sequence; identical to SEQ ID NO: 32457
  GFR-binding peptide
  MOD_RES (6)..(7)..(40): Xaa is C or S

SEQ ID NO: 68720 - protein, 37 aa, Artificial Sequence
  GFR-binding peptide
  MOD_RES (3)..(4)..(37): Xaa is C or S
  MOD_RES (18)..(19)..(20)..(21)..(22): Xaa is A or G
  MOD_RES (23)..(24)..(25)..(26): Xaa is A or G or is absent
STXXAPVKTSATSMLYYXXXXXXXXXLRKHRMIVEEX

SEQ ID NO: 68721 - protein, 34 aa, Artificial Sequence; identical to SEQ ID NO: 6310
  GFR-binding peptide
  MOD_RES (3)..(4): Xaa is C or S

SEQ ID NO: 68722 - protein, 38 aa, Artificial Sequence; identical to SEQ ID NO: 6311
  GFR-binding peptide
  MOD_RES (2)..(3)..(35)..(37): Xaa is C or S

SEQ ID NO: 68723 - protein, 34 aa, Artificial Sequence; identical to SEQ ID NO: 32461
  GFR-binding peptide
  MOD_RES (1)..(2): Xaa is C or S
  MOD_RES (16)..(17)..(18)..(19)..(20): Xaa is A or G
  MOD_RES (21)..(22)..(23)..(24): Xaa is A or G or is absent

SEQ ID NO: 68724 - protein, 36 aa, Artificial Sequence; identical to SEQ ID NO: 6312
  GFR-binding peptide
  MOD_RES (1)..(2)..(35): Xaa is C or S
  MOD_RES (16)..(17)..(18)..(19)..(20): Xaa is A or G
  MOD_RES (21)..(22)..(23)..(24): Xaa is A or G or is absent

SEQ ID NO: 68725 - protein, 39 aa, Artificial Sequence; identical to SEQ ID NO: 6314
  GFR-binding peptide
  MOD_RES (4)..(5)..(37)..(39): Xaa is C or S

SEQ ID NO: 68726 - protein, 40 aa, Artificial Sequence; identical to SEQ ID NO: 13695
  GFR-binding peptide
  MOD_RES (6)..(7)..(39): Xaa is C or S

SEQ ID NO: 68727 - protein, 34 aa, Artificial Sequence
  GFR-binding peptide
  MOD_RES (1)..(2): Xaa is C or S
  MOD_RES (16)..(17)..(18)..(19)..(20): Xaa is A or G
  MOD_RES (21)..(22)..(23)..(24): Xaa is A or G or is absent
XXVPQALSPINILYFXXXXXXXXXYGKIPMIVRS

SEQ ID NO: 68728 - protein, 37 aa, Artificial Sequence; identical to SEQ ID NO: 27455
  GFR-binding peptide
  MOD_RES (1)..(2)..(34)..(36): Xaa is C or S

SEQ ID NO: 68729 - protein, 36 aa, Artificial Sequence; identical to SEQ ID NO: 6317
  GFR-binding peptide
  MOD_RES (4)..(5)..(36): Xaa is C or S

SEQ ID NO: 68730 - protein, 40 aa, Artificial Sequence; identical to SEQ ID NO: 6319
  GFR-binding peptide
  MOD_RES (4)..(5)..(37)..(39): Xaa is C or S

SEQ ID NO: 68731 - protein, 35 aa, Artificial Sequence; identical to SEQ ID NO: 6324
  GFR-binding peptide
  MOD_RES (1)..(34): Xaa is C or S
  MOD_RES (15)..(16)..(17)..(18)..(19): Xaa is A or G
  MOD_RES (20)..(21)..(22)..(23): Xaa is A or G or is absent

SEQ ID NO: 68732 - protein, 41 aa, Artificial Sequence; identical to SEQ ID NO: 27462
  GFR-binding peptide
  MOD_RES (5)..(6)..(38)..(40): Xaa is C or S

SEQ ID NO: 68733 - protein, 41 aa, Artificial Sequence; identical to SEQ ID NO: 27463
  GFR-binding peptide
  MOD_RES (5)..(6)..(39)..(41): Xaa is C or S
  MOD_RES (20)..(21)..(22)..(23)..(24): Xaa is A or G
  MOD_RES (25)..(26)..(27)..(28): Xaa is A or G or is absent

SEQ ID NO: 68734 - protein, 33 aa, Artificial Sequence
  GFR-binding peptide
  MOD_RES (14)..(15)..(16)..(17)..(18): Xaa is A or G
  MOD_RES (19)..(20)..(21)..(22): Xaa is A or G or is absent
VPEKMNAISILYFXXXXXXXXXLKKYRNMTVES

SEQ ID NO: 68735 - protein, 37 aa, Artificial Sequence; identical to SEQ ID NO: 32471
  GFR-binding peptide
  MOD_RES (2)..(3)..(35)..(37): Xaa is C or S

SEQ ID NO: 68736 - protein, 38 aa, Artificial Sequence; identical to SEQ ID NO: 32472
  GFR-binding peptide
  MOD_RES (5)..(6): Xaa is C or S
  MOD_RES (20)..(21)..(22)..(23)..(24): Xaa is A or G
  MOD_RES (25)..(26)..(27)..(28): Xaa is A or G or is absent

SEQ ID NO: 68737 - protein, 33 aa, Artificial Sequence; identical to SEQ ID NO: 32474
  GFR-binding peptide
  MOD_RES (14)..(15)..(16)..(17)..(18): Xaa is A or G
  MOD_RES (19)..(20)..(21)..(22): Xaa is A or G or is absent

SEQ ID NO: 68738 - protein, 36 aa, Artificial Sequence; identical to SEQ ID NO: 32476
  GFR-binding peptide
  MOD_RES (3)..(4): Xaa is C or S
  MOD_RES (18)..(19)..(20)..(21)..(22): Xaa is A or G
  MOD_RES (23)..(24)..(25)..(26): Xaa is A or G or is absent

SEQ ID NO: 68739 - protein, 37 aa, Artificial Sequence; identical to SEQ ID NO: 6328
  GFR-binding peptide
  MOD_RES (1)..(2)..(34)..(36): Xaa is C or S

SEQ ID NO: 68740 - protein, 35 aa, Artificial Sequence; identical to SEQ ID NO: 27469
  GFR-binding peptide
  MOD_RES (1)..(34): Xaa is C or S
  MOD_RES (15)..(16)..(17)..(18)..(19): Xaa is A or G
  MOD_RES (20)..(21)..(22)..(23): Xaa is A or G or is absent

SEQ ID NO: 68741 - protein, 37 aa, Artificial Sequence; identical to SEQ ID NO: 32482
  GFR-binding peptide
  MOD_RES (3)..(4): Xaa is C or S
  MOD_RES (18)..(19)..(20)..(21)..(22): Xaa is A or G
  MOD_RES (23)..(24)..(25)..(26): Xaa is A or G or is absent

SEQ ID NO: 68742 - protein, 40 aa, Artificial Sequence; identical to SEQ ID NO: 6330
  GFR-binding peptide
  MOD_RES (6)..(7): Xaa is C or S
  MOD_RES (21)..(22)..(23)..(24)..(25): Xaa is A or G
  MOD_RES (26)..(27)..(28)..(29): Xaa is A or G or is absent

SEQ ID NO: 68743 - protein, 40 aa, Artificial Sequence; identical to SEQ ID NO: 27470
  GFR-binding peptide
  MOD_RES (4)..(5)..(39): Xaa is C or S
  MOD_RES (19)..(20)..(21)..(22)..(23): Xaa is A or G
  MOD_RES (24)..(25)..(26)..(27): Xaa is A or G or is absent

SEQ ID NO: 68744 - protein, 33 aa, Artificial Sequence; identical to SEQ ID NO: 27471
  GFR-binding peptide
  MOD_RES (2)..(3): Xaa is C or S

SEQ ID NO: 68745 - protein, 43 aa, Artificial Sequence; identical to SEQ ID NO: 27474
  GFR-binding peptide
  MOD_RES (6)..(7)..(41)..(43): Xaa is C or S
  MOD_RES (21)..(22)..(23)..(24)..(25): Xaa is A or G
  MOD_RES (26)..(27)..(28)..(29): Xaa is A or G or is absent

SEQ ID NO: 68746 - protein, 39 aa, Artificial Sequence
  GFR-binding peptide
  MOD_RES (4)..(5)..(37)..(39): Xaa is C or S
AGPXXTPTKMSPISMLYKNDKQQIILKYHYGMVVDRXGX

SEQ ID NO: 68747 - protein, 41 aa, Artificial Sequence; identical to SEQ ID NO: 6336
  GFR-binding peptide
  MOD_RES (5)..(6)..(40): Xaa is C or S
  MOD_RES (20)..(21)..(22)..(23)..(24): Xaa is A or G
  MOD_RES (25)..(26)..(27)..(28): Xaa is A or G or is absent

SEQ ID NO: 68748 - protein, 33 aa, Artificial Sequence; identical to SEQ ID NO: 32493
  GFR-binding peptide
  MOD_RES (32)..(32): Xaa is C or S

SEQ ID NO: 68749 - protein, 41 aa, Artificial Sequence
  GFR-binding peptide
  MOD_RES (6)..(7)..(40): Xaa is C or S
  MOD_RES (21)..(22)..(23)..(24)..(25): Xaa is A or G
  MOD_RES (26)..(27)..(28)..(29): Xaa is A or G or is absent
RVPSTXXAPVKTEPISMLYLXXXXXXXXXKFKYEMIVEEXG

SEQ ID NO: 68750 - protein, 36 aa, Artificial Sequence; identical to SEQ ID NO: 6339
  GFR-binding peptide
  MOD_RES (3)..(4): Xaa is C or S

SEQ ID NO: 68751 - protein, 35 aa, Artificial Sequence; identical to SEQ ID NO: 6341
  GFR-binding peptide
  MOD_RES (4)..(5): Xaa is C or S

SEQ ID NO: 68752 - protein, 38 aa, Artificial Sequence; identical to SEQ ID NO: 32504
  GFR-binding peptide
  MOD_RES (5)..(6): Xaa is C or S
  MOD_RES (20)..(21)..(22)..(23)..(24): Xaa is A or G
  MOD_RES (25)..(26)..(27)..(28): Xaa is A or G or is absent

SEQ ID NO: 68753 - protein, 39 aa, Artificial Sequence; identical to SEQ ID NO: 6345
  GFR-binding peptide
  MOD_RES (4)..(5)..(38): Xaa is C or S
  MOD_RES (19)..(20)..(21)..(22)..(23): Xaa is A or G
  MOD_RES (24)..(25)..(26)..(27): Xaa is A or G or is absent

SEQ ID NO: 68754 - protein, 31 aa, Artificial Sequence; identical to SEQ ID NO: 6347
  GFR-binding peptide
  MOD_RES (1)..(1): Xaa is C or S

SEQ ID NO: 68755 - protein, 33 aa, Artificial Sequence
  GFR-binding peptide
  MOD_RES (2)..(3): Xaa is C or S
TXXVPTRLSPISILYKDSANNVVLKYHYDMVVE

SEQ ID NO: 68756 - protein, 37 aa, Artificial Sequence
  GFR-binding peptide
  MOD_RES (34)..(36): Xaa is C or S
  MOD_RES (14)..(15)..(16)..(17)..(18): Xaa is A or G
  MOD_RES (19)..(20)..(21)..(22): Xaa is A or G or is absent
VPEKMSATSILYYXXXXXXXXXLRKHRNMTVESXAXR

SEQ ID NO: 68757 - protein, 35 aa, Artificial Sequence; identical to SEQ ID NO: 32508
  GFR-binding peptide
  MOD_RES (3)..(4): Xaa is C or S

SEQ ID NO: 68758 - protein, 39 aa, Artificial Sequence
  GFR-binding peptide
  MOD_RES (3)..(4)..(36)..(38): Xaa is C or S
PTXXVPTRLSATSILYYDSANNVVLRKHRDMVVESXGXR

SEQ ID NO: 68759 - protein, 39 aa, Artificial Sequence; identical to SEQ ID NO: 32512
  GFR-binding peptide
  MOD_RES (2)..(3)..(37)..(39): Xaa is C or S
  MOD_RES (17)..(18)..(19)..(20)..(21): Xaa is A or G
  MOD_RES (22)..(23)..(24)..(25): Xaa is A or G or is absent

SEQ ID NO: 68760 - protein, 33 aa, Artificial Sequence; identical to SEQ ID NO: 32513
  GFR-binding peptide
  MOD_RES (1)..(2): Xaa is C or S

SEQ ID NO: 68761 - protein, 35 aa, Artificial Sequence; identical to SEQ ID NO: 32515
  GFR-binding peptide
  MOD_RES (1)..(33)..(35): Xaa is C or S

SEQ ID NO: 68762 - protein, 39 aa, Artificial Sequence
  GFR-binding peptide
  MOD_RES (2)..(3)..(36)..(38): Xaa is C or S
  MOD_RES (17)..(18)..(19)..(20)..(21): Xaa is A or G
  MOD_RES (22)..(23)..(24)..(25): Xaa is A or G or is absent
TXXAPVKTEPISMLYLXXXXXXXXXKFKYEMIVEEXGXL

SEQ ID NO: 68763 - protein, 34 aa, Artificial Sequence; identical to SEQ ID NO: 6353
  GFR-binding peptide
  MOD_RES (32)..(34): Xaa is C or S

SEQ ID NO: 68764 - protein, 41 aa, Artificial Sequence; identical to SEQ ID NO: 32517
  GFR-binding peptide
  MOD_RES (6)..(7)..(39)..(41): Xaa is C or S

SEQ ID NO: 68765 - protein, 39 aa, Artificial Sequence
  GFR-binding peptide
  MOD_RES (2)..(3)..(37)..(39): Xaa is C or S
  MOD_RES (17)..(18)..(19)..(20)..(21): Xaa is A or G
  MOD_RES (22)..(23)..(24)..(25): Xaa is A or G or is absent
AXXVPTKLSATSILYYXXXXXXXXXLRKHRGMAVSEXGX

SEQ ID NO: 68766 - protein, 39 aa, Artificial Sequence; identical to SEQ ID NO: 6356
  GFR-binding peptide
  MOD_RES (6)..(7): Xaa is C or S
  MOD_RES (21)..(22)..(23)..(24)..(25): Xaa is A or G
  MOD_RES (26)..(27)..(28)..(29): Xaa is A or G or is absent

SEQ ID NO: 68767 - protein, 40 aa, Artificial Sequence; identical to SEQ ID NO: 27497
  GFR-binding peptide
  MOD_RES (5)..(6)..(40): Xaa is C or S
  MOD_RES (20)..(21)..(22)..(23)..(24): Xaa is A or G
  MOD_RES (25)..(26)..(27)..(28): Xaa is A or G or is absent

SEQ ID NO: 68768 - protein, 43 aa, Artificial Sequence
  GFR-binding peptide
  MOD_RES (6)..(7)..(41)..(43): Xaa is C or S
  MOD_RES (21)..(22)..(23)..(24)..(25): Xaa is A or G
  MOD_RES (26)..(27)..(28)..(29): Xaa is A or G or is absent
GIPEPXXVPEKMNAISILYFXXXXXXXXXLKKYRNMTVESXAX

SEQ ID NO: 68769 - protein, 42 aa, Artificial Sequence; identical to SEQ ID NO: 27499
  GFR-binding peptide
  MOD_RES (5)..(6)..(40)..(42): Xaa is C or S
  MOD_RES (20)..(21)..(22)..(23)..(24): Xaa is A or G
  MOD_RES (25)..(26)..(27)..(28): Xaa is A or G or is absent

SEQ ID NO: 68770 - protein, 41 aa, Artificial Sequence; identical to SEQ ID NO: 32523
  GFR-binding peptide
  MOD_RES (5)..(6)..(38)..(40): Xaa is C or S

SEQ ID NO: 68771 - protein, 42 aa, Artificial Sequence; identical to SEQ ID NO: 27500
  GFR-binding peptide
  MOD_RES (6)..(7)..(41): Xaa is C or S
  MOD_RES (21)..(22)..(23)..(24)..(25): Xaa is A or G
  MOD_RES (26)..(27)..(28)..(29): Xaa is A or G or is absent

SEQ ID NO: 68772 - protein, 37 aa, Artificial Sequence; identical to SEQ ID NO: 27501
  GFR-binding peptide
  MOD_RES (1)..(35)..(37): Xaa is C or S
  MOD_RES (15)..(16)..(17)..(18)..(19): Xaa is A or G
  MOD_RES (20)..(21)..(22)..(23): Xaa is A or G or is absent

SEQ ID NO: 68773 - protein, 40 aa, Artificial Sequence; identical to SEQ ID NO: 6366
  GFR-binding peptide
  MOD_RES (2)..(3)..(38)..(40): Xaa is C or S
  MOD_RES (17)..(18)..(19)..(20)..(21): Xaa is A or G
  MOD_RES (22)..(23)..(24)..(25): Xaa is A or G or is absent

SEQ ID NO: 68774 - protein, 43 aa, Artificial Sequence; identical to SEQ ID NO: 6370
  GFR-binding peptide
  MOD_RES (4)..(5)..(40)..(42): Xaa is C or S
  MOD_RES (19)..(20)..(21)..(22)..(23): Xaa is A or G
  MOD_RES (24)..(25)..(26)..(27): Xaa is A or G or is absent

SEQ ID NO: 68775 - protein, 43 aa, Artificial Sequence; identical to SEQ ID NO: 32530
  GFR-binding peptide
  MOD_RES (6)..(7)..(42): Xaa is C or S
  MOD_RES (21)..(22)..(23)..(24)..(25): Xaa is A or G
  MOD_RES (26)..(27)..(28)..(29): Xaa is A or G or is absent

SEQ ID NO: 68776 - protein, 35 aa, Artificial Sequence; identical to SEQ ID NO: 6375
  GFR-binding peptide
  MOD_RES (4)..(5): Xaa is C or S

SEQ ID NO: 68777 - protein, 39 aa, Artificial Sequence
  GFR-binding peptide
  MOD_RES (4)..(5)..(38): Xaa is C or S
  MOD_RES (19)..(20)..(21)..(22)..(23): Xaa is A or G
  MOD_RES (24)..(25)..(26)..(27): Xaa is A or G or is absent
PSTXXAPVKTEPISMLYLXXXXXXXXXKFKYEMIVEEXG

SEQ ID NO: 68778 - protein, 38 aa, Artificial Sequence; identical to SEQ ID NO: 27513
  GFR-binding peptide
  MOD_RES (2)..(3)..(37): Xaa is C or S
  MOD_RES (17)..(18)..(19)..(20)..(21): Xaa is A or G
  MOD_RES (22)..(23)..(24)..(25): Xaa is A or G or is absent

SEQ ID NO: 68779 - protein, 35 aa, Artificial Sequence; identical to SEQ ID NO: 27514
  GFR-binding peptide
  MOD_RES (1)..(35): Xaa is C or S
  MOD_RES (15)..(16)..(17)..(18)..(19): Xaa is A or G
  MOD_RES (20)..(21)..(22)..(23): Xaa is A or G or is absent

SEQ ID NO: 68780 - protein, 36 aa, Artificial Sequence; identical to SEQ ID NO: 6376
  GFR-binding peptide
  MOD_RES (3)..(4): Xaa is C or S
  MOD_RES (18)..(19)..(20)..(21)..(22): Xaa is A or G
  MOD_RES (23)..(24)..(25)..(26): Xaa is A or G or is absent

SEQ ID NO: 68781 - protein, 37 aa, Artificial Sequence
  GFR-binding peptide
  MOD_RES (3)..(4)..(36): Xaa is C or S
EPXXVPEKMSPISILYKDENKNVVLKYHYNMTVESXA

SEQ ID NO: 68782 - protein, 41 aa, Artificial Sequence; identical to SEQ ID NO: 32540
  GFR-binding peptide
  MOD_RES (6)..(7)..(41): Xaa is C or S
  MOD_RES (21)..(22)..(23)..(24)..(25): Xaa is A or G
  MOD_RES (26)..(27)..(28)..(29): Xaa is A or G or is absent

SEQ ID NO: 68783 - protein, 33 aa, Artificial Sequence; identical to SEQ ID NO: 27520
  GFR-binding peptide
  MOD_RES (32)..(32): Xaa is C or S

SEQ ID NO: 68784 - protein, 33 aa, Artificial Sequence; identical to SEQ ID NO: 32541
  GFR-binding peptide
  MOD_RES (1)..(33): Xaa is C or S

SEQ ID NO: 68785 - protein, 42 aa, Artificial Sequence; identical to SEQ ID NO: 32550
  GFR-binding peptide
  MOD_RES (5)..(6)..(40)..(42): Xaa is C or S
  MOD_RES (20)..(21)..(22)..(23)..(24): Xaa is A or G
  MOD_RES (25)..(26)..(27)..(28): Xaa is A or G or is absent

SEQ ID NO: 68786 - protein, 30 aa, Artificial Sequence; identical to SEQ ID NO: 27528
  GFR-binding peptide

SEQ ID NO: 68787 - protein, 34 aa, Artificial Sequence; identical to SEQ ID NO: 6389
  GFR-binding peptide
  MOD_RES (2)..(3)..(34): Xaa is C or S

SEQ ID NO: 68788 - protein, 41 aa, Artificial Sequence; identical to SEQ ID NO: 13777
  GFR-binding peptide
  MOD_RES (5)..(6)..(38)..(40): Xaa is C or S

SEQ ID NO: 68789 - protein, 38 aa, Artificial Sequence; identical to SEQ ID NO: 32558
  GFR-binding peptide
  MOD_RES (2)..(3)..(35)..(37): Xaa is C or S

SEQ ID NO: 68790 - protein, 34 aa, Artificial Sequence; identical to SEQ ID NO: 6396
  GFR-binding peptide
  MOD_RES (31)..(33): Xaa is C or S

SEQ ID NO: 68791 - protein, 34 aa, Artificial Sequence; identical to SEQ ID NO: 6397
  GFR-binding peptide
  MOD_RES (1)..(1): Xaa is C or S
  MOD_RES (15)..(16)..(17)..(18)..(19): Xaa is A or G
  MOD_RES (20)..(21)..(22)..(23): Xaa is A or G or is absent

SEQ ID NO: 68792 - protein, 35 aa, Artificial Sequence; identical to SEQ ID NO: 27540
  GFR-binding peptide
  MOD_RES (1)..(33)..(35): Xaa is C or S

SEQ ID NO: 68793 - protein, 36 aa, Artificial Sequence
  GFR-binding peptide
  MOD_RES (1)..(35): Xaa is C or S
  MOD_RES (15)..(16)..(17)..(18)..(19): Xaa is A or G
  MOD_RES (20)..(21)..(22)..(23): Xaa is A or G or is absent
XVPTRLSATSILYYXXXXXXXXXLRKHRDMVVESXG

SEQ ID NO: 68794 - protein, 41 aa, Artificial Sequence
  GFR-binding peptide
  MOD_RES (6)..(7)..(40): Xaa is C or S
  MOD_RES (21)..(22)..(23)..(24)..(25): Xaa is A or G
  MOD_RES (26)..(27)..(28)..(29): Xaa is A or G or is absent
ASASPXXVSQDLSPINILYFXXXXXXXXXYGKIPMIVKSXK

SEQ ID NO: 68795 - protein, 38 aa, Artificial Sequence; identical to SEQ ID NO: 27544
  GFR-binding peptide
  MOD_RES (3)..(4)..(37): Xaa is C or S
  MOD_RES (18)..(19)..(20)..(21)..(22): Xaa is A or G
  MOD_RES (23)..(24)..(25)..(26): Xaa is A or G or is absent

SEQ ID NO: 68796 - protein, 39 aa, Artificial Sequence; identical to SEQ ID NO: 27547
  GFR-binding peptide
  MOD_RES (1)..(2)..(36)..(38): Xaa is C or S
  MOD_RES (16)..(17)..(18)..(19)..(20): Xaa is A or G
  MOD_RES (21)..(22)..(23)..(24): Xaa is A or G or is absent

SEQ ID NO: 68797 - protein, 39 aa, Artificial Sequence; identical to SEQ ID NO: 32568
  GFR-binding peptide
  MOD_RES (1)..(2)..(36)..(38): Xaa is C or S
  MOD_RES (16)..(17)..(18)..(19)..(20): Xaa is A or G
  MOD_RES (21)..(22)..(23)..(24): Xaa is A or G or is absent

SEQ ID NO: 68798 - protein, 37 aa, Artificial Sequence
  GFR-binding peptide
  MOD_RES (5)..(6): Xaa is C or S
TPPTXXVPTRLSATSILYYDSANNVVLRKHRDMVVES

SEQ ID NO: 68799 - protein, 38 aa, Artificial Sequence; identical to SEQ ID NO: 6412
  GFR-binding peptide
  MOD_RES (4)..(5): Xaa is C or S
  MOD_RES (19)..(20)..(21)..(22)..(23): Xaa is A or G
  MOD_RES (24)..(25)..(26)..(27): Xaa is A or G or is absent

SEQ ID NO: 68800 - protein, 39 aa, Artificial Sequence
  GFR-binding peptide
  MOD_RES (5)..(6): Xaa is C or S
  MOD_RES (20)..(21)..(22)..(23)..(24): Xaa is A or G
  MOD_RES (25)..(26)..(27)..(28): Xaa is A or G or is absent
IPEPXXVPEKMEPISILYLXXXXXXXXXKFKYENMTVES

SEQ ID NO: 68801 - protein, 41 aa, Artificial Sequence
  GFR-binding peptide
  MOD_RES (6)..(7)..(41): Xaa is C or S
  MOD_RES (21)..(22)..(23)..(24)..(25): Xaa is A or G
  MOD_RES (26)..(27)..(28)..(29): Xaa is A or G or is absent
STPPTXXVPTRLSPISILYKXXXXXXXXXLKYHYDMVVESX

SEQ ID NO: 68802 - protein, 35 aa, Artificial Sequence
  GFR-binding peptide
  MOD_RES (2)..(3): Xaa is C or S
  MOD_RES (17)..(18)..(19)..(20)..(21): Xaa is A or G
  MOD_RES (22)..(23)..(24)..(25): Xaa is A or G or is absent
PXXVSQDLSPINILYFXXXXXXXXXYGKIPMIVKS

SEQ ID NO: 68803 - protein, 36 aa, Artificial Sequence; identical to SEQ ID NO: 6416
  GFR-binding peptide
  MOD_RES (1)..(35): Xaa is C or S
  MOD_RES (15)..(16)..(17)..(18)..(19): Xaa is A or G
  MOD_RES (20)..(21)..(22)..(23): Xaa is A or G or is absent

SEQ ID NO: 68804 - protein, 34 aa, Artificial Sequence; identical to SEQ ID NO: 13795
  GFR-binding peptide
  MOD_RES (32)..(34): Xaa is C or S

SEQ ID NO: 68805 - protein, 40 aa, Artificial Sequence
  GFR-binding peptide
  MOD_RES (5)..(6)..(40): Xaa is C or S
  MOD_RES (20)..(21)..(22)..(23)..(24): Xaa is A or G
  MOD_RES (25)..(26)..(27)..(28): Xaa is A or G or is absent
IPEPXXVPEKMSATSILYYXXXXXXXXXLRKHRNMTVESX

SEQ ID NO: 68806 - protein, 36 aa, Artificial Sequence; identical to SEQ ID NO: 32585
  GFR-binding peptide
  MOD_RES (1)..(35): Xaa is C or S
  MOD_RES (15)..(16)..(17)..(18)..(19): Xaa is A or G
  MOD_RES (20)..(21)..(22)..(23): Xaa is A or G or is absent

SEQ ID NO: 68807 - protein, 33 aa, Artificial Sequence; identical to SEQ ID NO: 27561
  GFR-binding peptide
  MOD_RES (33)..(33): Xaa is C or S
  MOD_RES (14)..(15)..(16)..(17)..(18): Xaa is A or G
  MOD_RES (19)..(20)..(21)..(22): Xaa is A or G or is absent

SEQ ID NO: 68808 - protein, 35 aa, Artificial Sequence
  GFR-binding peptide
  MOD_RES (32)..(34): Xaa is C or S
VPEKMEPISILYLDENKNVVKFKYENMTVESXAXR

SEQ ID NO: 68809 - protein, 38 aa, Artificial Sequence; identical to SEQ ID NO: 27562
  GFR-binding peptide
  MOD_RES (3)..(4)..(36)..(38): Xaa is C or S

SEQ ID NO: 68810 - protein, 37 aa, Artificial Sequence
  GFR-binding peptide
  MOD_RES (2)..(3)..(34)..(36): Xaa is C or S
TXXAPVKTEPISMLYLDNGRVLLKFKYEMIVEEXGXL

SEQ ID NO: 68811 - protein, 35 aa, Artificial Sequence
  GFR-binding peptide
  MOD_RES (32)..(34): Xaa is C or S
TPTKMSATSMLYYNDKQQIILRKHRGMVVDRXGXS

SEQ ID NO: 68812 - protein, 32 aa, Artificial Sequence; identical to SEQ ID NO: 32590
  GFR-binding peptide
  MOD_RES (14)..(15)..(16)..(17)..(18): Xaa is A or G
  MOD_RES (19)..(20)..(21)..(22): Xaa is A or G or is absent

SEQ ID NO: 68813 - protein, 41 aa, Artificial Sequence; identical to SEQ ID NO: 27567
  GFR-binding peptide
  MOD_RES (6)..(7)..(41): Xaa is C or S
  MOD_RES (21)..(22)..(23)..(24)..(25): Xaa is A or G
  MOD_RES (26)..(27)..(28)..(29): Xaa is A or G or is absent

SEQ ID NO: 68814 - protein, 38 aa, Artificial Sequence; identical to SEQ ID NO: 27570
  GFR-binding peptide
  MOD_RES (3)..(4)..(36)..(38): Xaa is C or S

SEQ ID NO: 68815 - protein, 39 aa, Artificial Sequence; identical to SEQ ID NO: 32594
  GFR-binding peptide
  MOD_RES (5)..(6)..(39): Xaa is C or S
  MOD_RES (20)..(21)..(22)..(23)..(24): Xaa is A or G
  MOD_RES (25)..(26)..(27)..(28): Xaa is A or G or is absent

SEQ ID NO: 68816 - protein, 41 aa, Artificial Sequence
  GFR-binding peptide
  MOD_RES (5)..(6)..(38)..(40): Xaa is C or S
SAGPXXTPTKMSATSMLYYNDKQQIILRKHRGMVVDRXGXS

SEQ ID NO: 68817 - protein, 43 aa, Artificial Sequence; identical to SEQ ID NO: 27572
  GFR-binding peptide
  MOD_RES (6)..(7)..(40)..(42): Xaa is C or S
  MOD_RES (21)..(22)..(23)..(24)..(25): Xaa is A or G
  MOD_RES (26)..(27)..(28)..(29): Xaa is A or G or is absent

SEQ ID NO: 68818 - protein, 34 aa, Artificial Sequence
  GFR-binding peptide
  MOD_RES (1)..(1): Xaa is C or S
  MOD_RES (15)..(16)..(17)..(18)..(19): Xaa is A or G
  MOD_RES (20)..(21)..(22)..(23): Xaa is A or G or is absent
XVPEKMSPINILYFXXXXXXXXXYGKIPNMTVES

SEQ ID NO: 68819 - protein, 41 aa, Artificial Sequence; identical to SEQ ID NO: 27574
  GFR-binding peptide
  MOD_RES (5)..(6)..(40): Xaa is C or S
  MOD_RES (20)..(21)..(22)..(23)..(24): Xaa is A or G
  MOD_RES (25)..(26)..(27)..(28): Xaa is A or G or is absent

SEQ ID NO: 68820 - protein, 36 aa, Artificial Sequence; identical to SEQ ID NO: 27578
  GFR-binding peptide
  MOD_RES (4)..(5)..(36): Xaa is C or S

SEQ ID NO: 68821 - protein, 32 aa, Artificial Sequence; identical to SEQ ID NO: 13813
  GFR-binding peptide
  MOD_RES (1)..(2): Xaa is C or S

SEQ ID NO: 68822 - protein, 37 aa, Artificial Sequence; identical to SEQ ID NO: 32603
  GFR-binding peptide
  MOD_RES (1)..(34)..(36): Xaa is C or S

SEQ ID NO: 68823 - protein, 41 aa, Artificial Sequence; identical to SEQ ID NO: 6435
  GFR-binding peptide
  MOD_RES (4)..(5)..(39)..(41): Xaa is C or S
  MOD_RES (19)..(20)..(21)..(22)..(23): Xaa is A or G
  MOD_RES (24)..(25)..(26)..(27): Xaa is A or G or is absent

SEQ ID NO: 68824 - protein, 40 aa, Artificial Sequence
  GFR-binding peptide
  MOD_RES (5)..(6)..(39): Xaa is C or S
  MOD_RES (20)..(21)..(22)..(23)..(24): Xaa is A or G
  MOD_RES (25)..(26)..(27)..(28): Xaa is A or G or is absent
SAAPXXVPQALSPINILYFXXXXXXXXXYGKIPMIVRSXK

SEQ ID NO: 68825 - protein, 41 aa, Artificial Sequence; identical to SEQ ID NO: 6436
  GFR-binding peptide
  MOD_RES (5)..(6)..(38)..(40): Xaa is C or S

SEQ ID NO: 68826 - protein, 35 aa, Artificial Sequence; identical to SEQ ID NO: 27582
  GFR-binding peptide
  MOD_RES (4)..(5): Xaa is C or S

SEQ ID NO: 68827 - protein, 40 aa, Artificial Sequence; identical to SEQ ID NO: 27583
  GFR-binding peptide
  MOD_RES (2)..(3)..(37)..(39): Xaa is C or S
  MOD_RES (17)..(18)..(19)..(20)..(21): Xaa is A or G
  MOD_RES (22)..(23)..(24)..(25): Xaa is A or G or is absent

SEQ ID NO: 68828 - protein, 35 aa, Artificial Sequence; identical to SEQ ID NO: 6439
  GFR-binding peptide
  MOD_RES (1)..(2)..(34): Xaa is C or S

SEQ ID NO: 68829 - protein, 35 aa, Artificial Sequence; identical to SEQ ID NO: 6440
  GFR-binding peptide
  MOD_RES (3)..(4): Xaa is C or S

SEQ ID NO: 68830 - protein, 40 aa, Artificial Sequence
  GFR-binding peptide
  MOD_RES (4)..(5)..(37)..(39): Xaa is C or S
PEPXXVPEKMEPISILYLDENKNVVKFKYENMTVESXAXR

SEQ ID NO: 68831 - protein, 33 aa, Artificial Sequence
  GFR-binding peptide
  MOD_RES (1)..(32): Xaa is C or S
XAPVKTEPISMLYLDNGRVLLKFKYEMIVEEXG

SEQ ID NO: 68832 - protein, 41 aa, Artificial Sequence; identical to SEQ ID NO: 32612
  GFR-binding peptide
  MOD_RES (5)..(39)..(41): Xaa is C or S
  MOD_RES (19)..(20)..(21)..(22)..(23): Xaa is A or G
  MOD_RES (24)..(25)..(26)..(27): Xaa is A or G or is absent

SEQ ID NO: 68833 - protein, 40 aa, Artificial Sequence; identical to SEQ ID NO: 27590
  GFR-binding peptide
  MOD_RES (6)..(40): Xaa is C or S
  MOD_RES (20)..(21)..(22)..(23)..(24): Xaa is A or G
  MOD_RES (25)..(26)..(27)..(28): Xaa is A or G or is absent

SEQ ID NO: 68834 - protein, 43 aa, Artificial Sequence
  GFR-binding peptide
  MOD_RES (6)..(7)..(41)..(43): Xaa is C or S
  MOD_RES (21)..(22)..(23)..(24)..(25): Xaa is A or G
  MOD_RES (26)..(27)..(28)..(29): Xaa is A or G or is absent
HVPKPXXAPTKLEPISVLYLXXXXXXXXXKFKYENMVVRSXGX

SEQ ID NO: 68835 - protein, 35 aa, Artificial Sequence; identical to SEQ ID NO: 6447
  GFR-binding peptide
  MOD_RES (33)..(35): Xaa is C or S
  MOD_RES (14)..(15)..(16)..(17)..(18): Xaa is A or G
  MOD_RES (19)..(20)..(21)..(22): Xaa is A or G or is absent

SEQ ID NO: 68836 - protein, 35 aa, Artificial Sequence
  GFR-binding peptide
  MOD_RES (2)..(3)..(35): Xaa is C or S
PXXVPEKMSATSILYYDENKNVVLRKHRNMTVESX

SEQ ID NO: 68837 - protein, 43 aa, Artificial Sequence; identical to SEQ ID NO: 32617
  GFR-binding peptide
  MOD_RES (6)..(40)..(42): Xaa is C or S
  MOD_RES (20)..(21)..(22)..(23)..(24): Xaa is A or G
  MOD_RES (25)..(26)..(27)..(28): Xaa is A or G or is absent

SEQ ID NO: 68838 - protein, 34 aa, Artificial Sequence; identical to SEQ ID NO: 6449
  GFR-binding peptide
  MOD_RES (31)..(33): Xaa is C or S

SEQ ID NO: 68839 - protein, 33 aa, Artificial Sequence; identical to SEQ ID NO: 32619
  GFR-binding peptide
  MOD_RES (1)..(1): Xaa is C or S
  MOD_RES (15)..(16)..(17)..(18)..(19): Xaa is A or G
  MOD_RES (20)..(21)..(22)..(23): Xaa is A or G or is absent

SEQ ID NO: 68840 - protein, 36 aa, Artificial Sequence; identical to SEQ ID NO: 6451
  GFR-binding peptide
  MOD_RES (1)..(34)..(36): Xaa is C or S
  MOD_RES (15)..(16)..(17)..(18)..(19): Xaa is A or G
  MOD_RES (20)..(21)..(22)..(23): Xaa is A or G or is absent

SEQ ID NO: 68841 - protein, 37 aa, Artificial Sequence; identical to SEQ ID NO: 27598
  GFR-binding peptide
  MOD_RES (4)..(36): Xaa is C or S

SEQ ID NO: 68842 - protein, 38 aa, Artificial Sequence; identical to SEQ ID NO: 6452
  GFR-binding peptide
  MOD_RES (3)..(4)..(36)..(38): Xaa is C or S

SEQ ID NO: 68843 - protein, 38 aa, Artificial Sequence
  GFR-binding peptide
  MOD_RES (3)..(4)..(35)..(37): Xaa is C or S
STXXAPVKTSPISMLYKDNGRVLLLKYHYMIVEEXGXL

SEQ ID NO: 68844 - protein, 41 aa, Artificial Sequence
  GFR-binding peptide
  MOD_RES (6)..(7)..(38)..(40): Xaa is C or S
ASASPXXVSQDLSPINILYFIGKTPKIYGKIPMIVKSXKXS

SEQ ID NO: 68845 - protein, 33 aa, Artificial Sequence; identical to SEQ ID NO: 32623
  GFR-binding peptide
  MOD_RES (1)..(1): Xaa is C or S
  MOD_RES (15)..(16)..(17)..(18)..(19): Xaa is A or G
  MOD_RES (20)..(21)..(22)..(23): Xaa is A or G or is absent

SEQ ID NO: 68846 - protein, 41 aa, Artificial Sequence; identical to SEQ ID NO: 32626
  GFR-binding peptide
  MOD_RES (5)..(6)..(40): Xaa is C or S
  MOD_RES (20)..(21)..(22)..(23)..(24): Xaa is A or G
  MOD_RES (25)..(26)..(27)..(28): Xaa is A or G or is absent

SEQ ID NO: 68847 - protein, 36 aa, Artificial Sequence
  GFR-binding peptide
  MOD_RES (4)..(5): Xaa is C or S
PASXXVPARLSATSILYYDAANNVVLRKHRDMVVEA

SEQ ID NO: 68848 - protein, 36 aa, Artificial Sequence; identical to SEQ ID NO: 6455
  GFR-binding peptide
  MOD_RES (1)..(34)..(36): Xaa is C or S
  MOD_RES (15)..(16)..(17)..(18)..(19): Xaa is A or G
  MOD_RES (20)..(21)..(22)..(23): Xaa is A or G or is absent

SEQ ID NO: 68849 - protein, 40 aa, Artificial Sequence; identical to SEQ ID NO: 27607
  GFR-binding peptide
  MOD_RES (2)..(3)..(37)..(39): Xaa is C or S
  MOD_RES (17)..(18)..(19)..(20)..(21): Xaa is A or G
  MOD_RES (22)..(23)..(24)..(25): Xaa is A or G or is absent

SEQ ID NO: 68850 - protein, 38 aa, Artificial Sequence
  GFR-binding peptide
  MOD_RES (6)..(7)..(38): Xaa is C or S
RVPSTXXAPVKTSPISMLYKDNGRVLLLKYHYMIVEEX

SEQ ID NO: 68851 - protein, 42 aa, Artificial Sequence
  GFR-binding peptide
  MOD_RES (6)..(7)..(41): Xaa is C or S
  MOD_RES (21)..(22)..(23)..(24)..(25): Xaa is A or G
  MOD_RES (26)..(27)..(28)..(29): Xaa is A or G or is absent
GIPEPXXVPEKMNAISILYFXXXXXXXXXLKKYRNMTVESXA

SEQ ID NO: 68852 - protein, 39 aa, Artificial Sequence; identical to SEQ ID NO: 27611
  GFR-binding peptide
  MOD_RES (3)..(4)..(36)..(38): Xaa is C or S

SEQ ID NO: 68853 - protein, 37 aa, Artificial Sequence; identical to SEQ ID NO: 27612
  GFR-binding peptide
  MOD_RES (1)..(35)..(37): Xaa is C or S
  MOD_RES (15)..(16)..(17)..(18)..(19): Xaa is A or G
  MOD_RES (20)..(21)..(22)..(23): Xaa is A or G or is absent

SEQ ID NO: 68854 - protein, 34 aa, Artificial Sequence; identical to SEQ ID NO: 6459
  GFR-binding peptide
  MOD_RES (33)..(33): Xaa is C or S
  MOD_RES (14)..(15)..(16)..(17)..(18): Xaa is A or G
  MOD_RES (19)..(20)..(21)..(22): Xaa is A or G or is absent

SEQ ID NO: 68855 - protein, 40 aa, Artificial Sequence
  GFR-binding peptide
  MOD_RES (5)..(6)..(38)..(40): Xaa is C or S
TPPTXXVPTRLEPISILYLDSANNVVKFKYEDMVVESXGX

SEQ ID NO: 68856 - protein, 35 aa, Artificial Sequence; identical to SEQ ID NO: 6462
  GFR-binding peptide
  MOD_RES (33)..(35): Xaa is C or S
  MOD_RES (14)..(15)..(16)..(17)..(18): Xaa is A or G
  MOD_RES (19)..(20)..(21)..(22): Xaa is A or G or is absent

SEQ ID NO: 68857 - protein, 32 aa, Artificial Sequence; identical to SEQ ID NO: 27617
  GFR-binding peptide
  MOD_RES (14)..(15)..(16)..(17)..(18): Xaa is A or G
  MOD_RES (19)..(20)..(21)..(22): Xaa is A or G or is absent

SEQ ID NO: 68858 - protein, 37 aa, Artificial Sequence; identical to SEQ ID NO: 27620
  GFR-binding peptide
  MOD_RES (3)..(4): Xaa is C or S
  MOD_RES (18)..(19)..(20)..(21)..(22): Xaa is A or G
  MOD_RES (23)..(24)..(25)..(26): Xaa is A or G or is absent

SEQ ID NO: 68859 - protein, 42 aa, Artificial Sequence; identical to SEQ ID NO: 6466
  GFR-binding peptide
  MOD_RES (4)..(5)..(39)..(41): Xaa is C or S
  MOD_RES (19)..(20)..(21)..(22)..(23): Xaa is A or G
  MOD_RES (24)..(25)..(26)..(27): Xaa is A or G or is absent

SEQ ID NO: 68860 - protein, 37 aa, Artificial Sequence
  GFR-binding peptide
  MOD_RES (3)..(4): Xaa is C or S
  MOD_RES (18)..(19)..(20)..(21)..(22): Xaa is A or G
  MOD_RES (23)..(24)..(25)..(26): Xaa is A or G or is absent
GPXXTPTKMSPISMLYKXXXXXXXXXLKYHYGMVVDR

SEQ ID NO: 68861 - protein, 38 aa, Artificial Sequence; identical to SEQ ID NO: 6467
  GFR-binding peptide
  MOD_RES (2)..(3)..(36)..(38): Xaa is C or S
  MOD_RES (17)..(18)..(19)..(20)..(21): Xaa is A or G
  MOD_RES (22)..(23)..(24)..(25): Xaa is A or G or is absent

SEQ ID NO: 68862 - protein, 41 aa, Artificial Sequence; identical to SEQ ID NO: 32648
  GFR-binding peptide
  MOD_RES (6)..(7): Xaa is C or S
  MOD_RES (21)..(22)..(23)..(24)..(25): Xaa is A or G
  MOD_RES (26)..(27)..(28)..(29): Xaa is A or G or is absent

SEQ ID NO: 68863 - protein, 38 aa, Artificial Sequence; identical to SEQ ID NO: 6474
  GFR-binding peptide
  MOD_RES (4)..(5)..(38): Xaa is C or S
  MOD_RES (19)..(20)..(21)..(22)..(23): Xaa is A or G
  MOD_RES (24)..(25)..(26)..(27): Xaa is A or G or is absent

SEQ ID NO: 68864 - protein, 38 aa, Artificial Sequence
  GFR-binding peptide
  MOD_RES (5)..(6): Xaa is C or S
  MOD_RES (20)..(21)..(22)..(23)..(24): Xaa is A or G
  MOD_RES (25)..(26)..(27)..(28): Xaa is A or G or is absent
IPEPXXVPEKMSPINILYFXXXXXXXXXYGKIPNMTVE

SEQ ID NO: 68865 - protein, 38 aa, Artificial Sequence
  GFR-binding peptide
  MOD_RES (6)..(7)..(38): Xaa is C or S
ASASPXXVSQDLSPINILYFIGKTPKIYGKIPMIVKSX

SEQ ID NO: 68866 - protein, 38 aa, Artificial Sequence; identical to SEQ ID NO: 27635
  GFR-binding peptide
  MOD_RES (4)..(5)..(37): Xaa is C or S

SEQ ID NO: 68867 - protein, 36 aa, Artificial Sequence
  GFR-binding peptide
  MOD_RES (1)..(2)..(36): Xaa is C or S
  MOD_RES (16)..(17)..(18)..(19)..(20): Xaa is A or G
  MOD_RES (21)..(22)..(23)..(24): Xaa is A or G or is absent
XXVPEKMSATSILYYXXXXXXXXXLRKHRNMTVESX

SEQ ID NO: 68868 - protein, 32 aa, Artificial Sequence
  GFR-binding peptide
  MOD_RES (32)..(32): Xaa is C or S
TPTKMSPISMLYKNDKQQIILKYHYGMVVDRX

SEQ ID NO: 68869 - protein, 40 aa, Artificial Sequence
  GFR-binding peptide
  MOD_RES (6)..(7)..(38)..(40): Xaa is C or S
RVPSTXXAPVKTSATSMLYYDNGRVLLLRKHRMIVEEXGX

SEQ ID NO: 68870 - protein, 36 aa, Artificial Sequence
  GFR-binding peptide
  MOD_RES (3)..(4)..(36): Xaa is C or S
GPXXTPTKMSPISMLYKNDKQQIILKYHYGMVVDRX

SEQ ID NO: 68871 - protein, 35 aa, Artificial Sequence; identical to SEQ ID NO: 27643
  GFR-binding peptide
  MOD_RES (3)..(4): Xaa is C or S

SEQ ID NO: 68872 - protein, 41 aa, Artificial Sequence; identical to SEQ ID NO: 6485
  GFR-binding peptide
  MOD_RES (5)..(6)..(40): Xaa is C or S
  MOD_RES (20)..(21)..(22)..(23)..(24): Xaa is A or G
  MOD_RES (25)..(26)..(27)..(28): Xaa is A or G or is absent

SEQ ID NO: 68873 - protein, 39 aa, Artificial Sequence; identical to SEQ ID NO: 27645
  GFR-binding peptide
  MOD_RES (5)..(6): Xaa is C or S
  MOD_RES (20)..(21)..(22)..(23)..(24): Xaa is A or G
  MOD_RES (25)..(26)..(27)..(28): Xaa is A or G or is absent

SEQ ID NO: 68874 - protein, 40 aa, Artificial Sequence; identical to SEQ ID NO: 32662
  GFR-binding peptide
  MOD_RES (3)..(4)..(38)..(40): Xaa is C or S
  MOD_RES (18)..(19)..(20)..(21)..(22): Xaa is A or G
  MOD_RES (23)..(24)..(25)..(26): Xaa is A or G or is absent

SEQ ID NO: 68875 - protein, 40 aa, Artificial Sequence; identical to SEQ ID NO: 32663
  GFR-binding peptide
  MOD_RES (5)..(6)..(39): Xaa is C or S

SEQ ID NO: 68876 - protein, 36 aa, Artificial Sequence; identical to SEQ ID NO: 6488
  GFR-binding peptide
  MOD_RES (4)..(5): Xaa is C or S

SEQ ID NO: 68877 - protein, 33 aa, Artificial Sequence
  GFR-binding peptide
  MOD_RES (1)..(1): Xaa is C or S
  MOD_RES (15)..(16)..(17)..(18)..(19): Xaa is A or G
  MOD_RES (20)..(21)..(22)..(23): Xaa is A or G or is absent
XVPEKMSATSILYYXXXXXXXXXLRKHRNMTVE

SEQ ID NO: 68878 - protein, 41 aa, Artificial Sequence
  GFR-binding peptide
  MOD_RES (6)..(7)..(41): Xaa is C or S
  MOD_RES (21)..(22)..(23)..(24)..(25): Xaa is A or G
  MOD_RES (26)..(27)..(28)..(29): Xaa is A or G or is absent
GIPEPXXVPEKMEPISILYLXXXXXXXXXKFKYENMTVESX

SEQ ID NO: 68879 - protein, 41 aa, Artificial Sequence; identical to SEQ ID NO: 27651
  GFR-binding peptide
  MOD_RES (5)..(6)..(38)..(40): Xaa is C or S

SEQ ID NO: 68880 - protein, 38 aa, Artificial Sequence; identical to SEQ ID NO: 27652
  GFR-binding peptide
  MOD_RES (2)..(3)..(36)..(38): Xaa is C or S

SEQ ID NO: 68881 - protein, 36 aa, Artificial Sequence; identical to SEQ ID NO: 27653
  GFR-binding peptide
  MOD_RES (1)..(2)..(35): Xaa is C or S
  MOD_RES (16)..(17)..(18)..(19)..(20): Xaa is A or G
  MOD_RES (21)..(22)..(23)..(24): Xaa is A or G or is absent

SEQ ID NO: 68882 - protein, 33 aa, Artificial Sequence; identical to SEQ ID NO: 32670
  GFR-binding peptide
  MOD_RES (2)..(3): Xaa is C or S

SEQ ID NO: 68883 - protein, 40 aa, Artificial Sequence; identical to SEQ ID NO: 27654
  GFR-binding peptide
  MOD_RES (4)..(5)..(37)..(39): Xaa is C or S

SEQ ID NO: 68884 - protein, 32 aa, Artificial Sequence; identical to SEQ ID NO: 6491
  GFR-binding peptide
  MOD_RES (14)..(15)..(16)..(17)..(18): Xaa is A or G
  MOD_RES (19)..(20)..(21)..(22): Xaa is A or G or is absent

SEQ ID NO: 68885 - protein, 38 aa, Artificial Sequence; identical to SEQ ID NO: 27659
  GFR-binding peptide
  MOD_RES (2)..(3)..(37): Xaa is C or S
  MOD_RES (17)..(18)..(19)..(20)..(21): Xaa is A or G
  MOD_RES (22)..(23)..(24)..(25): Xaa is A or G or is absent

SEQ ID NO: 68886 - protein, 35 aa, Artificial Sequence; identical to SEQ ID NO: 32672
  GFR-binding peptide
  MOD_RES (34)..(34): Xaa is C or S
  MOD_RES (14)..(15)..(16)..(17)..(18): Xaa is A or G
  MOD_RES (19)..(20)..(21)..(22): Xaa is A or G or is absent

SEQ ID NO: 68887 - protein, 40 aa, Artificial Sequence; identical to SEQ ID NO: 32675
  GFR-binding peptide
  MOD_RES (3)..(4)..(37)..(39): Xaa is C or S
  MOD_RES (18)..(19)..(20)..(21)..(22): Xaa is A or G
  MOD_RES (23)..(24)..(25)..(26): Xaa is A or G or is absent

SEQ ID NO: 68888 - protein, 37 aa, Artificial Sequence; identical to SEQ ID NO: 32676
  GFR-binding peptide
  MOD_RES (1)..(2)..(36): Xaa is C or S
  MOD_RES (16)..(17)..(18)..(19)..(20): Xaa is A or G
  MOD_RES (21)..(22)..(23)..(24): Xaa is A or G or is absent

SEQ ID NO: 68889 - protein, 41 aa, Artificial Sequence; identical to SEQ ID NO: 57579
  GFR-binding peptide
  MOD_RES (4)..(5)..(38)..(40): Xaa is C or S
  MOD_RES (19)..(20)..(21)..(22)..(23): Xaa is A or G
  MOD_RES (24)..(25)..(26)..(27): Xaa is A or G or is absent

SEQ ID NO: 68890 - protein, 35 aa, Artificial Sequence; identical to SEQ ID NO: 6494
  GFR-binding peptide
  MOD_RES (1)..(32)..(34): Xaa is C or S

SEQ ID NO: 68891 - protein, 42 aa, Artificial Sequence
  GFR-binding peptide
  MOD_RES (4)..(5)..(39)..(41): Xaa is C or S
  MOD_RES (19)..(20)..(21)..(22)..(23): Xaa is A or G
  MOD_RES (24)..(25)..(26)..(27): Xaa is A or G or is absent
PEPXXVPEKMSPINILYFXXXXXXXXXYGKIPNMTVESXAXR

SEQ ID NO: 68892 - protein, 36 aa, Artificial Sequence; identical to SEQ ID NO: 6495
  GFR-binding peptide
  MOD_RES (3)..(35): Xaa is C or S

SEQ ID NO: 68893 - protein, 32 aa, Artificial Sequence
  GFR-binding peptide
  MOD_RES (1)..(1): Xaa is C or S
XVPEKMNAISILYFDENKNVVLKKYRNMTVES

SEQ ID NO: 68894 - protein, 32 aa, Artificial Sequence; identical to SEQ ID NO: 6496
  GFR-binding peptide
  MOD_RES (14)..(15)..(16)..(17)..(18): Xaa is A or G
  MOD_RES (19)..(20)..(21)..(22): Xaa is A or G or is absent

SEQ ID NO: 68895 - protein, 39 aa, Artificial Sequence; identical to SEQ ID NO: 6497
  GFR-binding peptide
  MOD_RES (1)..(2)..(37)..(39): Xaa is C or S
  MOD_RES (16)..(17)..(18)..(19)..(20): Xaa is A or G
  MOD_RES (21)..(22)..(23)..(24): Xaa is A or G or is absent

SEQ ID NO: 68896 - protein, 33 aa, Artificial Sequence
  GFR-binding peptide
  MOD_RES (1)..(2)..(33): Xaa is C or S
XXVSQDLSPINILYFIGKTPKIYGKIPMIVKSX

SEQ ID NO: 68897 - protein, 32 aa, Artificial Sequence
  GFR-binding peptide
  MOD_RES (1)..(2): Xaa is C or S
XXVPQDLSPINILYFVGRTPKVYGKIPMVVKS

SEQ ID NO: 68898 - protein, 38 aa, Artificial Sequence
  GFR-binding peptide
  MOD_RES (1)..(2)..(35)..(37): Xaa is C or S
  MOD_RES (16)..(17)..(18)..(19)..(20): Xaa is A or G
  MOD_RES (21)..(22)..(23)..(24): Xaa is A or G or is absent
XXVPQDLSPINILYFXXXXXXXXXYGKIPMVVKSXKXS

SEQ ID NO: 68899 - protein, 43 aa, Artificial Sequence; identical to SEQ ID NO: 6499
  GFR-binding peptide
  MOD_RES (5)..(6)..(40)..(42): Xaa is C or S
  MOD_RES (20)..(21)..(22)..(23)..(24): Xaa is A or G
  MOD_RES (25)..(26)..(27)..(28): Xaa is A or G or is absent

SEQ ID NO: 68900 - protein, 35 aa, Artificial Sequence; identical to SEQ ID NO: 6500
  GFR-binding peptide
  MOD_RES (2)..(3): Xaa is C or S
  MOD_RES (17)..(18)..(19)..(20)..(21): Xaa is A or G
  MOD_RES (22)..(23)..(24)..(25): Xaa is A or G or is absent

SEQ ID NO: 68901 - protein, 36 aa, Artificial Sequence; identical to SEQ ID NO: 27666
  GFR-binding peptide
  MOD_RES (1)..(33)..(35): Xaa is C or S

SEQ ID NO: 68902 - protein, 30 aa, Artificial Sequence; identical to SEQ ID NO: 27667
  GFR-binding peptide

SEQ ID NO: 68903 - protein, 36 aa, Artificial Sequence
  GFR-binding peptide
  MOD_RES (2)..(3)..(35): Xaa is C or S
PXXVPEKMEPISILYLDENKNVVKFKYENMTVESXA

SEQ ID NO: 68904 - protein, 39 aa, Artificial Sequence; identical to SEQ ID NO: 32691
  GFR-binding peptide
  MOD_RES (4)..(5)..(39): Xaa is C or S
  MOD_RES (19)..(20)..(21)..(22)..(23): Xaa is A or G
  MOD_RES (24)..(25)..(26)..(27): Xaa is A or G or is absent

SEQ ID NO: 68905 - protein, 42 aa, Artificial Sequence; identical to SEQ ID NO: 6509
  GFR-binding peptide
  MOD_RES (5)..(6)..(39)..(41): Xaa is C or S
  MOD_RES (20)..(21)..(22)..(23)..(24): Xaa is A or G
  MOD_RES (25)..(26)..(27)..(28): Xaa is A or G or is absent

SEQ ID NO: 68906 - protein, 33 aa, Artificial Sequence; identical to SEQ ID NO: 6510
  GFR-binding peptide
  MOD_RES (2)..(3): Xaa is C or S

SEQ ID NO: 68907 - protein, 33 aa, Artificial Sequence; identical to SEQ ID NO: 27674
  GFR-binding peptide
  MOD_RES (1)..(2): Xaa is C or S

SEQ ID NO: 68908 - protein, 36 aa, Artificial Sequence; identical to SEQ ID NO: 6516
  GFR-binding peptide
  MOD_RES (3)..(4): Xaa is C or S
  MOD_RES (18)..(19)..(20)..(21)..(22): Xaa is A or G
  MOD_RES (23)..(24)..(25)..(26): Xaa is A or G or is absent

SEQ ID NO: 68909 - protein, 38 aa, Artificial Sequence
  GFR-binding peptide
  MOD_RES (1)..(35)..(37): Xaa is C or S
  MOD_RES (15)..(16)..(17)..(18)..(19): Xaa is A or G
  MOD_RES (20)..(21)..(22)..(23): Xaa is A or G or is absent
XVPEKMSPISILYKXXXXXXXXXLKYHYNMTVESXAXR

SEQ ID NO: 68910 - protein, 38 aa, Artificial Sequence
  GFR-binding peptide
  MOD_RES (2)..(3)..(35)..(37): Xaa is C or S
SXXVPARLSATSILYYDAANNVVLRKHRDMVVEAXGXR

SEQ ID NO: 68911 - protein, 40 aa, Artificial Sequence; identical to SEQ ID NO: 32697
  GFR-binding peptide
  MOD_RES (5)..(6)..(38)..(40): Xaa is C or S

SEQ ID NO: 68912 - protein, 37 aa, Artificial Sequence; identical to SEQ ID NO: 27679
  GFR-binding peptide
  MOD_RES (3)..(4): Xaa is C or S
  MOD_RES (18)..(19)..(20)..(21)..(22): Xaa is A or G
  MOD_RES (23)..(24)..(25)..(26): Xaa is A or G or is absent

SEQ ID NO: 68913 - protein, 39 aa, Artificial Sequence; identical to SEQ ID NO: 6521
  GFR-binding peptide
  MOD_RES (2)..(3)..(36)..(38): Xaa is C or S
  MOD_RES (17)..(18)..(19)..(20)..(21): Xaa is A or G
  MOD_RES (22)..(23)..(24)..(25): Xaa is A or G or is absent

SEQ ID NO: 68914 - protein, 34 aa, Artificial Sequence; identical to SEQ ID NO: 27683
  GFR-binding peptide
  MOD_RES (3)..(4): Xaa is C or S

SEQ ID NO: 68915 - protein, 39 aa, Artificial Sequence; identical to SEQ ID NO: 6524
  GFR-binding peptide
  MOD_RES (4)..(38): Xaa is C or S
  MOD_RES (18)..(19)..(20)..(21)..(22): Xaa is A or G
  MOD_RES (23)..(24)..(25)..(26): Xaa is A or G or is absent

SEQ ID NO: 68916 - protein, 37 aa, Artificial Sequence; identical to SEQ ID NO: 6525
  GFR-binding peptide
  MOD_RES (5)..(6): Xaa is C or S

SEQ ID NO: 68917 - protein, 38 aa, Artificial Sequence; identical to SEQ ID NO: 27685
  GFR-binding peptide
  MOD_RES (1)..(35)..(37): Xaa is C or S
  MOD_RES (15)..(16)..(17)..(18)..(19): Xaa is A or G
  MOD_RES (20)..(21)..(22)..(23): Xaa is A or G or is absent

SEQ ID NO: 68918 - protein, 37 aa, Artificial Sequence
  GFR-binding peptide
  MOD_RES (6)..(7): Xaa is C or S
GIPEPXXVPEKMSPINILYFDENKNVVYGKIPNMTVE

SEQ ID NO: 68919 - protein, 37 aa, Artificial Sequence; identical to SEQ ID NO: 6526
  GFR-binding peptide
  MOD_RES (6)..(7): Xaa is C or S

SEQ ID NO: 68920 - protein, 37 aa, Artificial Sequence; identical to SEQ ID NO: 27690
  GFR-binding peptide
  MOD_RES (4)..(5)..(37): Xaa is C or S

SEQ ID NO: 68921 - protein, 39 aa, Artificial Sequence; identical to SEQ ID NO: 27691
  GFR-binding peptide
  MOD_RES (4)..(5)..(39): Xaa is C or S
  MOD_RES (19)..(20)..(21)..(22)..(23): Xaa is A or G
  MOD_RES (24)..(25)..(26)..(27): Xaa is A or G or is absent

SEQ ID NO: 68922 - protein, 42 aa, Artificial Sequence
  GFR-binding peptide
  MOD_RES (5)..(6)..(39)..(41): Xaa is C or S
  MOD_RES (20)..(21)..(22)..(23)..(24): Xaa is A or G
  MOD_RES (25)..(26)..(27)..(28): Xaa is A or G or is absent
SASPXXVSQDLSPINILYFXXXXXXXXXYGKIPMIVKSXKXS

SEQ ID NO: 68923 - protein, 39 aa, Artificial Sequence; identical to SEQ ID NO: 6532
  GFR-binding peptide
  MOD_RES (5)..(6)..(38): Xaa is C or S

SEQ ID NO: 68924 - protein, 33 aa, Artificial Sequence
  GFR-binding peptide
  MOD_RES (1)..(2)..(33): Xaa is C or S
XXAPVKTEPISMLYLDNGRVLLKFKYEMIVEEX

SEQ ID NO: 68925 - protein, 39 aa, Artificial Sequence; identical to SEQ ID NO: 6533
  GFR-binding peptide
  MOD_RES (1)..(2)..(36)..(38): Xaa is C or S
  MOD_RES (16)..(17)..(18)..(19)..(20): Xaa is A or G
  MOD_RES (21)..(22)..(23)..(24): Xaa is A or G or is absent

SEQ ID NO: 68926 - protein, 35 aa, Artificial Sequence; identical to SEQ ID NO: 32711
  GFR-binding peptide
  MOD_RES (1)..(2)..(34): Xaa is C or S

SEQ ID NO: 68927 - protein, 42 aa, Artificial Sequence; identical to SEQ ID NO: 32713
  GFR-binding peptide
  MOD_RES (5)..(39)..(41): Xaa is C or S
  MOD_RES (19)..(20)..(21)..(22)..(23): Xaa is A or G
  MOD_RES (24)..(25)..(26)..(27): Xaa is A or G or is absent

SEQ ID NO: 68928 - protein, 38 aa, Artificial Sequence
  GFR-binding peptide
  MOD_RES (1)..(2)..(36)..(38): Xaa is C or S
  MOD_RES (16)..(17)..(18)..(19)..(20): Xaa is A or G
  MOD_RES (21)..(22)..(23)..(24): Xaa is A or G or is absent
XXVPEKMSATSILYYXXXXXXXXXLRKHRNMTVESXAX

SEQ ID NO: 68929 - protein, 39 aa, Artificial Sequence; identical to SEQ ID NO: 6537
  GFR-binding peptide
  MOD_RES (4)..(5)..(38): Xaa is C or S
  MOD_RES (19)..(20)..(21)..(22)..(23): Xaa is A or G
  MOD_RES (24)..(25)..(26)..(27): Xaa is A or G or is absent

SEQ ID NO: 68930 - protein, 35 aa, Artificial Sequence; identical to SEQ ID NO: 27698
  GFR-binding peptide
  MOD_RES (4)..(5): Xaa is C or S

SEQ ID NO: 68931 - protein, 40 aa, Artificial Sequence; identical to SEQ ID NO: 32720
  GFR-binding peptide
  MOD_RES (6)..(7): Xaa is C or S
  MOD_RES (21)..(22)..(23)..(24)..(25): Xaa is A or G
  MOD_RES (26)..(27)..(28)..(29): Xaa is A or G or is absent

SEQ ID NO: 68932 - protein, 38 aa, Artificial Sequence; identical to SEQ ID NO: 27700
  GFR-binding peptide
  MOD_RES (3)..(4)..(38): Xaa is C or S
  MOD_RES (18)..(19)..(20)..(21)..(22): Xaa is A or G
  MOD_RES (23)..(24)..(25)..(26): Xaa is A or G or is absent

SEQ ID NO: 68933 - protein, 36 aa, Artificial Sequence; identical to SEQ ID NO: 57619
  GFR-binding peptide
  MOD_RES (34)..(36): Xaa is C or S
  MOD_RES (14)..(15)..(16)..(17)..(18): Xaa is A or G
  MOD_RES (19)..(20)..(21)..(22): Xaa is A or G or is absent

SEQ ID NO: 68934 - protein, 41 aa, Artificial Sequence; identical to SEQ ID NO: 27704
  GFR-binding peptide
  MOD_RES (4)..(5)..(39)..(41): Xaa is C or S
  MOD_RES (19)..(20)..(21)..(22)..(23): Xaa is A or G
  MOD_RES (24)..(25)..(26)..(27): Xaa is A or G or is absent

SEQ ID NO: 68935 - protein, 37 aa, Artificial Sequence; identical to SEQ ID NO: 6546
  GFR-binding peptide
  MOD_RES (4)..(5): Xaa is C or S
  MOD_RES (19)..(20)..(21)..(22)..(23): Xaa is A or G
  MOD_RES (24)..(25)..(26)..(27): Xaa is A or G or is absent

SEQ ID NO: 68936 - protein, 36 aa, Artificial Sequence; identical to SEQ ID NO: 32727
  GFR-binding peptide
  MOD_RES (1)..(2)..(34)..(36): Xaa is C or S

SEQ ID NO: 68937 - protein, 35 aa, Artificial Sequence; identical to SEQ ID NO: 13917
  GFR-binding peptide
  MOD_RES (1)..(35): Xaa is C or S
  MOD_RES (15)..(16)..(17)..(18)..(19): Xaa is A or G
  MOD_RES (20)..(21)..(22)..(23): Xaa is A or G or is absent

SEQ ID NO: 68938 - protein, 38 aa, Artificial Sequence
  GFR-binding peptide
  MOD_RES (6)..(7): Xaa is C or S
GIPEPXXVPEKMSATSILYYDENKNVVLRKHRNMTVES

SEQ ID NO: 68939 - protein, 39 aa, Artificial Sequence
  GFR-binding peptide
  MOD_RES (4)..(5)..(36)..(38): Xaa is C or S
PSTXXAPVKTSATSMLYYDNGRVLLLRKHRMIVEEXGXL

SEQ ID NO: 68940 - protein, 39 aa, Artificial Sequence; identical to SEQ ID NO: 27710
  GFR-binding peptide
  MOD_RES (6)..(7): Xaa is C or S
  MOD_RES (21)..(22)..(23)..(24)..(25): Xaa is A or G
  MOD_RES (26)..(27)..(28)..(29): Xaa is A or G or is absent

SEQ ID NO: 68941 - protein, 31 aa, Artificial Sequence; identical to SEQ ID NO: 6553
  GFR-binding peptide
  MOD_RES (1)..(1): Xaa is C or S

SEQ ID NO: 68942 - protein, 35 aa, Artificial Sequence; identical to SEQ ID NO: 27712
  GFR-binding peptide
  MOD_RES (1)..(35): Xaa is C or S
  MOD_RES (15)..(16)..(17)..(18)..(19): Xaa is A or G
  MOD_RES (20)..(21)..(22)..(23): Xaa is A or G or is absent

SEQ ID NO: 68943 - protein, 38 aa, Artificial Sequence
  GFR-binding peptide
  MOD_RES (4)..(5)..(37): Xaa is C or S
PEPXXVPEKMSPISILYKDENKNVVLKYHYNMTVESXA

SEQ ID NO: 68944 - protein, 38 aa, Artificial Sequence
  GFR-binding peptide
  MOD_RES (2)..(3)..(36)..(38): Xaa is C or S
  MOD_RES (17)..(18)..(19)..(20)..(21): Xaa is A or G
  MOD_RES (22)..(23)..(24)..(25): Xaa is A or G or is absent
PXXVSQDLSPINILYFXXXXXXXXXYGKIPMIVKSXKX

SEQ ID NO: 68945 - protein, 42 aa, Artificial Sequence; identical to SEQ ID NO: 27714
  GFR-binding peptide
  MOD_RES (5)..(6)..(40)..(42): Xaa is C or S
  MOD_RES (20)..(21)..(22)..(23)..(24): Xaa is A or G
  MOD_RES (25)..(26)..(27)..(28): Xaa is A or G or is absent

SEQ ID NO: 68946 - protein, 38 aa, Artificial Sequence; identical to SEQ ID NO: 6555
  GFR-binding peptide
  MOD_RES (2)..(3)..(37): Xaa is C or S
  MOD_RES (17)..(18)..(19)..(20)..(21): Xaa is A or G
  MOD_RES (22)..(23)..(24)..(25): Xaa is A or G or is absent

SEQ ID NO: 68947 - protein, 38 aa, Artificial Sequence; identical to SEQ ID NO: 6556
  GFR-binding peptide
  MOD_RES (1)..(35)..(37): Xaa is C or S
  MOD_RES (15)..(16)..(17)..(18)..(19): Xaa is A or G
  MOD_RES (20)..(21)..(22)..(23): Xaa is A or G or is absent

SEQ ID NO: 68948 - protein, 35 aa, Artificial Sequence; identical to SEQ ID NO: 27717
  GFR-binding peptide
  MOD_RES (32)..(34): Xaa is C or S

SEQ ID NO: 68949 - protein, 39 aa, Artificial Sequence; identical to SEQ ID NO: 32735
  GFR-binding peptide
  MOD_RES (3)..(4)..(38): Xaa is C or S
  MOD_RES (18)..(19)..(20)..(21)..(22): Xaa is A or G
  MOD_RES (23)..(24)..(25)..(26): Xaa is A or G or is absent

SEQ ID NO: 68950 - protein, 38 aa, Artificial Sequence; identical to SEQ ID NO: 32736
  GFR-binding peptide
  MOD_RES (1)..(35)..(37): Xaa is C or S
  MOD_RES (15)..(16)..(17)..(18)..(19): Xaa is A or G
  MOD_RES (20)..(21)..(22)..(23): Xaa is A or G or is absent

SEQ ID NO: 68951 - protein, 40 aa, Artificial Sequence; identical to SEQ ID NO: 27718
  GFR-binding peptide
  MOD_RES (5)..(6)..(38)..(40): Xaa is C or S

SEQ ID NO: 68952 - protein, 35 aa, Artificial Sequence; identical to SEQ ID NO: 6560
  GFR-binding peptide
  MOD_RES (35)..(35): Xaa is C or S
  MOD_RES (14)..(15)..(16)..(17)..(18): Xaa is A or G
  MOD_RES (19)..(20)..(21)..(22): Xaa is A or G or is absent

SEQ ID NO: 68953 - protein, 41 aa, Artificial Sequence; identical to SEQ ID NO: 32741
  GFR-binding peptide
  MOD_RES (4)..(5)..(39)..(41): Xaa is C or S
  MOD_RES (19)..(20)..(21)..(22)..(23): Xaa is A or G
  MOD_RES (24)..(25)..(26)..(27): Xaa is A or G or is absent

SEQ ID NO: 68954 - protein, 34 aa, Artificial Sequence; identical to SEQ ID NO: 57651
  GFR-binding peptide
  MOD_RES (1)..(1): Xaa is C or S
  MOD_RES (15)..(16)..(17)..(18)..(19): Xaa is A or G
  MOD_RES (20)..(21)..(22)..(23): Xaa is A or G or is absent

SEQ ID NO: 68955 - protein, 39 aa, Artificial Sequence
  GFR-binding peptide
  MOD_RES (4)..(5)..(36)..(38): Xaa is C or S
AAPXXVPQALSPINILYFVGRKPKVYGKIPMIVRSXKXS

SEQ ID NO: 68956 - protein, 42 aa, Artificial Sequence; identical to SEQ ID NO: 6563
  GFR-binding peptide
  MOD_RES (7)..(41): Xaa is C or S
  MOD_RES (21)..(22)..(23)..(24)..(25): Xaa is A or G
  MOD_RES (26)..(27)..(28)..(29): Xaa is A or G or is absent

SEQ ID NO: 68957 - protein, 36 aa, Artificial Sequence; identical to SEQ ID NO: 6564
  GFR-binding peptide
  MOD_RES (2)..(34)..(36): Xaa is C or S

SEQ ID NO: 68958 - protein, 38 aa, Artificial Sequence; identical to SEQ ID NO: 6566
  GFR-binding peptide
  MOD_RES (4)..(5): Xaa is C or S
  MOD_RES (19)..(20)..(21)..(22)..(23): Xaa is A or G
  MOD_RES (24)..(25)..(26)..(27): Xaa is A or G or is absent

SEQ ID NO: 68959 - protein, 37 aa, Artificial Sequence
  GFR-binding peptide
  MOD_RES (4)..(5)..(37): Xaa is C or S
SKAXXVPTKLSATSILYYDKGVVTYLRKHRGMAVSEX

SEQ ID NO: 68960 - protein, 38 aa, Artificial Sequence; identical to SEQ ID NO: 6568
  GFR-binding peptide
  MOD_RES (1)..(2)..(35)..(37): Xaa is C or S
  MOD_RES (16)..(17)..(18)..(19)..(20): Xaa is A or G
  MOD_RES (21)..(22)..(23)..(24): Xaa is A or G or is absent

SEQ ID NO: 68961 - protein, 35 aa, Artificial Sequence; identical to SEQ ID NO: 27726
  GFR-binding peptide
  MOD_RES (3)..(4): Xaa is C or S

SEQ ID NO: 68962 - protein, 33 aa, Artificial Sequence; identical to SEQ ID NO: 27727
  GFR-binding peptide
  MOD_RES (1)..(1): Xaa is C or S
  MOD_RES (15)..(16)..(17)..(18)..(19): Xaa is A or G
  MOD_RES (20)..(21)..(22)..(23): Xaa is A or G or is absent

SEQ ID NO: 68963 - protein, 34 aa, Artificial Sequence; identical to SEQ ID NO: 6570
  GFR-binding peptide
  MOD_RES (1)..(1): Xaa is C or S
  MOD_RES (15)..(16)..(17)..(18)..(19): Xaa is A or G
  MOD_RES (20)..(21)..(22)..(23): Xaa is A or G or is absent

SEQ ID NO: 68964 - protein, 34 aa, Artificial Sequence; identical to SEQ ID NO: 27732
  GFR-binding peptide
  MOD_RES (1)..(34): Xaa is C or S
  MOD_RES (15)..(16)..(17)..(18)..(19): Xaa is A or G
  MOD_RES (20)..(21)..(22)..(23): Xaa is A or G or is absent

SEQ ID NO: 68965 - protein, 38 aa, Artificial Sequence; identical to SEQ ID NO: 27733
  GFR-binding peptide
  MOD_RES (2)..(3)..(35)..(37): Xaa is C or S

SEQ ID NO: 68966 - protein, 41 aa, Artificial Sequence; identical to SEQ ID NO: 27734
  GFR-binding peptide
  MOD_RES (2)..(3)..(38)..(40): Xaa is C or S
  MOD_RES (17)..(18)..(19)..(20)..(21): Xaa is A or G
  MOD_RES (22)..(23)..(24)..(25): Xaa is A or G or is absent

SEQ ID NO: 68967 - protein, 36 aa, Artificial Sequence
  GFR-binding peptide
  MOD_RES (2)..(3)..(35): Xaa is C or S
PXXTPTKMEPISMLYLNDKQQIIKFKYEGMVVDRXG

SEQ ID NO: 68968 - protein, 43 aa, Artificial Sequence; identical to SEQ ID NO: 27735
  GFR-binding peptide
  MOD_RES (5)..(6)..(40)..(42): Xaa is C or S
  MOD_RES (20)..(21)..(22)..(23)..(24): Xaa is A or G
  MOD_RES (25)..(26)..(27)..(28): Xaa is A or G or is absent

SEQ ID NO: 68969 - protein, 36 aa, Artificial Sequence; identical to SEQ ID NO: 6572
  GFR-binding peptide
  MOD_RES (4)..(5): Xaa is C or S

SEQ ID NO: 68970 - protein, 36 aa, Artificial Sequence
  GFR-binding peptide
  MOD_RES (2)..(3): Xaa is C or S
  MOD_RES (17)..(18)..(19)..(20)..(21): Xaa is A or G
  MOD_RES (22)..(23)..(24)..(25): Xaa is A or G or is absent
AXXVPTKLSATSILYYXXXXXXXXXLRKHRGMAVSE

SEQ ID NO: 68971 - protein, 41 aa, Artificial Sequence; identical to SEQ ID NO: 27738
  GFR-binding peptide
  MOD_RES (4)..(5)..(38)..(40): Xaa is C or S

SEQ ID NO: 68972 - protein, 36 aa, Artificial Sequence; identical to SEQ ID NO: 32754
  GFR-binding peptide
  MOD_RES (3)..(4): Xaa is C or S
  MOD_RES (18)..(19)..(20)..(21)..(22): Xaa is A or G
  MOD_RES (23)..(24)..(25)..(26): Xaa is A or G or is absent

SEQ ID NO: 68973 - protein, 34 aa, Artificial Sequence
  GFR-binding peptide
  MOD_RES (1)..(33): Xaa is C or S
XVPEKMSPISILYKDENKNVVLKYHYNMTVESXA

SEQ ID NO: 68974 - protein, 36 aa, Artificial Sequence; identical to SEQ ID NO: 6576
  GFR-binding peptide
  MOD_RES (1)..(2)..(35): Xaa is C or S
  MOD_RES (16)..(17)..(18)..(19)..(20): Xaa is A or G
  MOD_RES (21)..(22)..(23)..(24): Xaa is A or G or is absent

SEQ ID NO: 68975 - protein, 42 aa, Artificial Sequence; identical to SEQ ID NO: 27741
  GFR-binding peptide
  MOD_RES (4)..(5)..(40)..(42): Xaa is C or S
  MOD_RES (19)..(20)..(21)..(22)..(23): Xaa is A or G
  MOD_RES (24)..(25)..(26)..(27): Xaa is A or G or is absent

SEQ ID NO: 68976 - protein, 34 aa, Artificial Sequence; identical to SEQ ID NO: 6579
  GFR-binding peptide
  MOD_RES (1)..(2)..(33): Xaa is C or S

SEQ ID NO: 68977 - protein, 31 aa, Artificial Sequence
  GFR-binding peptide
  MOD_RES (1)..(1): Xaa is C or S
XVPTRLSATSILYYDSANNVVLRKHRDMVVE

SEQ ID NO: 68978 - protein, 40 aa, Artificial Sequence; identical to SEQ ID NO: 27747
  GFR-binding peptide
  MOD_RES (3)..(4)..(38)..(40): Xaa is C or S
  MOD_RES (18)..(19)..(20)..(21)..(22): Xaa is A or G
  MOD_RES (23)..(24)..(25)..(26): Xaa is A or G or is absent

SEQ ID NO: 68979 - protein, 37 aa, Artificial Sequence; identical to SEQ ID NO: 6583
  GFR-binding peptide
  MOD_RES (4)..(5): Xaa is C or S
  MOD_RES (19)..(20)..(21)..(22)..(23): Xaa is A or G
  MOD_RES (24)..(25)..(26)..(27): Xaa is A or G or is absent

SEQ ID NO: 68980 - protein, 33 aa, Artificial Sequence; identical to SEQ ID NO: 6586
  GFR-binding peptide
  MOD_RES (1)..(1): Xaa is C or S
  MOD_RES (15)..(16)..(17)..(18)..(19): Xaa is A or G
  MOD_RES (20)..(21)..(22)..(23): Xaa is A or G or is absent

SEQ ID NO: 68981 - protein, 43 aa, Artificial Sequence; identical to SEQ ID NO: 27749
  GFR-binding peptide
  MOD_RES (5)..(6)..(40)..(42): Xaa is C or S
  MOD_RES (20)..(21)..(22)..(23)..(24): Xaa is A or G
  MOD_RES (25)..(26)..(27)..(28): Xaa is A or G or is absent

SEQ ID NO: 68982 - protein, 32 aa, Artificial Sequence; identical to SEQ ID NO: 6588
  GFR-binding peptide
  MOD_RES (14)..(15)..(16)..(17)..(18): Xaa is A or G
  MOD_RES (19)..(20)..(21)..(22): Xaa is A or G or is absent

SEQ ID NO: 68983 - protein, 33 aa, Artificial Sequence
  GFR-binding peptide
  MOD_RES (14)..(15)..(16)..(17)..(18): Xaa is A or G
  MOD_RES (19)..(20)..(21)..(22): Xaa is A or G or is absent
TPTKMSPISMLYKXXXXXXXXXLKYHYGMVVDR

SEQ ID NO: 68984 - protein, 35 aa, Artificial Sequence; identical to SEQ ID NO: 32769
  GFR-binding peptide
  MOD_RES (4)..(5): Xaa is C or S

SEQ ID NO: 68985 - protein, 38 aa, Artificial Sequence
  GFR-binding peptide
  MOD_RES (5)..(6): Xaa is C or S
  MOD_RES (20)..(21)..(22)..(23)..(24): Xaa is A or G
  MOD_RES (25)..(26)..(27)..(28): Xaa is A or G or is absent
TPPTXXVPTRLSATSILYYXXXXXXXXXLRKHRDMVVE

SEQ ID NO: 68986 - protein, 34 aa, Artificial Sequence
  GFR-binding peptide
  MOD_RES (34)..(34): Xaa is C or S
  MOD_RES (14)..(15)..(16)..(17)..(18): Xaa is A or G
  MOD_RES (19)..(20)..(21)..(22): Xaa is A or G or is absent
VPEKMSPISILYKXXXXXXXXXLKYHYNMTVESX

SEQ ID NO: 68987 - protein, 40 aa, Artificial Sequence
  GFR-binding peptide
  MOD_RES (3)..(4)..(38)..(40): Xaa is C or S
  MOD_RES (18)..(19)..(20)..(21)..(22): Xaa is A or G
  MOD_RES (23)..(24)..(25)..(26): Xaa is A or G or is absent
KAXXVPTKLSATSILYYXXXXXXXXXLRKHRGMAVSEXGX

SEQ ID NO: 68988 - protein, 41 aa, Artificial Sequence
  GFR-binding peptide
  MOD_RES (4)..(5)..(39)..(41): Xaa is C or S
  MOD_RES (19)..(20)..(21)..(22)..(23): Xaa is A or G
  MOD_RES (24)..(25)..(26)..(27): Xaa is A or G or is absent
PPTXXVPTRLSPISILYKXXXXXXXXXLKYHYDMVVESXGX

SEQ ID NO: 68989 - protein, 39 aa, Artificial Sequence; identical to SEQ ID NO: 32773
  GFR-binding peptide
  MOD_RES (5)..(6)..(38): Xaa is C or S

SEQ ID NO: 68990 - protein, 35 aa, Artificial Sequence; identical to SEQ ID NO: 6596
  GFR-binding peptide
  MOD_RES (1)..(34): Xaa is C or S
  MOD_RES (15)..(16)..(17)..(18)..(19): Xaa is A or G
  MOD_RES (20)..(21)..(22)..(23): Xaa is A or G or is absent

SEQ ID NO: 68991 - protein, 39 aa, Artificial Sequence; identical to SEQ ID NO: 32777
  GFR-binding peptide
  MOD_RES (2)..(3)..(38): Xaa is C or S
  MOD_RES (17)..(18)..(19)..(20)..(21): Xaa is A or G
  MOD_RES (22)..(23)..(24)..(25): Xaa is A or G or is absent

SEQ ID NO: 68992 - protein, 34 aa, Artificial Sequence; identical to SEQ ID NO: 32779
  GFR-binding peptide
  MOD_RES (33)..(33): Xaa is C or S
  MOD_RES (14)..(15)..(16)..(17)..(18): Xaa is A or G
  MOD_RES (19)..(20)..(21)..(22): Xaa is A or G or is absent

SEQ ID NO: 68993 - protein, 37 aa, Artificial Sequence; identical to SEQ ID NO: 6597
  GFR-binding peptide
  MOD_RES (2)..(3)..(37): Xaa is C or S
  MOD_RES (17)..(18)..(19)..(20)..(21): Xaa is A or G
  MOD_RES (22)..(23)..(24)..(25): Xaa is A or G or is absent

SEQ ID NO: 68994 - protein, 43 aa, Artificial Sequence; identical to SEQ ID NO: 27756
  GFR-binding peptide
  MOD_RES (6)..(7)..(41)..(43): Xaa is C or S
  MOD_RES (21)..(22)..(23)..(24)..(25): Xaa is A or G
  MOD_RES (26)..(27)..(28)..(29): Xaa is A or G or is absent

SEQ ID NO: 68995 - protein, 39 aa, Artificial Sequence; identical to SEQ ID NO: 6601
  GFR-binding peptide
  MOD_RES (5)..(37)..(39): Xaa is C or S

SEQ ID NO: 68996 - protein, 39 aa, Artificial Sequence; identical to SEQ ID NO: 27758
  GFR-binding peptide
  MOD_RES (6)..(7): Xaa is C or S
  MOD_RES (21)..(22)..(23)..(24)..(25): Xaa is A or G
  MOD_RES (26)..(27)..(28)..(29): Xaa is A or G or is absent

SEQ ID NO: 68997 - protein, 40 aa, Artificial Sequence; identical to SEQ ID NO: 27759
  GFR-binding peptide
  MOD_RES (6)..(7)..(38)..(40): Xaa is C or S

SEQ ID NO: 68998 - protein, 34 aa, Artificial Sequence; identical to SEQ ID NO: 6604
  GFR-binding peptide
  MOD_RES (1)..(1): Xaa is C or S
  MOD_RES (15)..(16)..(17)..(18)..(19): Xaa is A or G
  MOD_RES (20)..(21)..(22)..(23): Xaa is A or G or is absent

SEQ ID NO: 68999 - protein, 38 aa, Artificial Sequence
  GFR-binding peptide
  MOD_RES (6)..(7): Xaa is C or S
GSAGPXXTPTKMSATSMLYYNDKQQIILRKHRGMVVDR

SEQ ID NO: 69000 - protein, 35 aa, Artificial Sequence; identical to SEQ ID NO: 27762
  GFR-binding peptide
  MOD_RES (1)..(33)..(35): Xaa is C or S

SEQ ID NO: 69001 - protein, 37 aa, Artificial Sequence; identical to SEQ ID NO: 6607
  GFR-binding peptide
  MOD_RES (4)..(5): Xaa is C or S
  MOD_RES (19)..(20)..(21)..(22)..(23): Xaa is A or G
  MOD_RES (24)..(25)..(26)..(27): Xaa is A or G or is absent

SEQ ID NO: 69002 - protein, 39 aa, Artificial Sequence
  GFR-binding peptide
  MOD_RES (3)..(4)..(36)..(38): Xaa is C or S
EPXXVPEKMSATSILYYDENKNVVLRKHRNMTVESXAXR

SEQ ID NO: 69003 - protein, 32 aa, Artificial Sequence; identical to SEQ ID NO: 13978
  GFR-binding peptide
  MOD_RES (14)..(15)..(16)..(17)..(18): Xaa is A or G
  MOD_RES (19)..(20)..(21)..(22): Xaa is A or G or is absent

SEQ ID NO: 69004 - protein, 36 aa, Artificial Sequence; identical to SEQ ID NO: 27765
  GFR-binding peptide
  MOD_RES (5)..(6): Xaa is C or S

SEQ ID NO: 69005 - protein, 35 aa, Artificial Sequence
  GFR-binding peptide
  MOD_RES (1)..(35): Xaa is C or S
  MOD_RES (15)..(16)..(17)..(18)..(19): Xaa is A or G
  MOD_RES (20)..(21)..(22)..(23): Xaa is A or G or is absent
XVPEKMSPISILYKXXXXXXXXXLKYHYNMTVESX

SEQ ID NO: 69006 - protein, 35 aa, Artificial Sequence; identical to SEQ ID NO: 27766
  GFR-binding peptide
  MOD_RES (34)..(34): Xaa is C or S
  MOD_RES (14)..(15)..(16)..(17)..(18): Xaa is A or G
  MOD_RES (19)..(20)..(21)..(22): Xaa is A or G or is absent

SEQ ID NO: 69007 - protein, 31 aa, Artificial Sequence; identical to SEQ ID NO: 6616
  GFR-binding peptide
  MOD_RES (31)..(31): Xaa is C or S

SEQ ID NO: 69008 - protein, 38 aa, Artificial Sequence; identical to SEQ ID NO: 27769
  GFR-binding peptide
  MOD_RES (2)..(36)..(38): Xaa is C or S
  MOD_RES (16)..(17)..(18)..(19)..(20): Xaa is A or G
  MOD_RES (21)..(22)..(23)..(24): Xaa is A or G or is absent

SEQ ID NO: 69009 - protein, 38 aa, Artificial Sequence
  GFR-binding peptide
  MOD_RES (3)..(4)..(35)..(37): Xaa is C or S
SPXXVSQDLSPINILYFIGKTPKIYGKIPMIVKSXKXS

SEQ ID NO: 69010 - protein, 35 aa, Artificial Sequence
  GFR-binding peptide
  MOD_RES (1)..(2): Xaa is C or S
  MOD_RES (16)..(17)..(18)..(19)..(20): Xaa is A or G
  MOD_RES (21)..(22)..(23)..(24): Xaa is A or G or is absent
XXVPTRLEPISILYLXXXXXXXXXKFKYEDMVVES

SEQ ID NO: 69011 - protein, 38 aa, Artificial Sequence
  GFR-binding peptide
  MOD_RES (4)..(5)..(38): Xaa is C or S
  MOD_RES (19)..(20)..(21)..(22)..(23): Xaa is A or G
  MOD_RES (24)..(25)..(26)..(27): Xaa is A or G or is absent
PSTXXAPVKTSATSMLYYXXXXXXXXXLRKHRMIVEEX

SEQ ID NO: 69012 - protein, 40 aa, Artificial Sequence
  GFR-binding peptide
  MOD_RES (3)..(4)..(37)..(39): Xaa is C or S
  MOD_RES (18)..(19)..(20)..(21)..(22): Xaa is A or G
  MOD_RES (23)..(24)..(25)..(26): Xaa is A or G or is absent
APXXVPQALSPINILYFXXXXXXXXXYGKIPMIVRSXKXS

SEQ ID NO: 69013 - protein, 36 aa, Artificial Sequence; identical to SEQ ID NO: 6618
  GFR-binding peptide
  MOD_RES (2)..(3)..(34)..(36): Xaa is C or S

SEQ ID NO: 69014 - protein, 41 aa, Artificial Sequence; identical to SEQ ID NO: 32815
  GFR-binding peptide
  MOD_RES (4)..(5)..(38)..(40): Xaa is C or S

SEQ ID NO: 69015 - protein, 36 aa, Artificial Sequence
  GFR-binding peptide
  MOD_RES (1)..(2)..(33)..(35): Xaa is C or S
XXAPVKTSATSMLYYDNGRVLLLRKHRMIVEEXGXL

SEQ ID NO: 69016 - protein, 39 aa, Artificial Sequence; identical to SEQ ID NO: 57721
  GFR-binding peptide
  MOD_RES (1)..(2)..(36)..(38): Xaa is C or S
  MOD_RES (16)..(17)..(18)..(19)..(20): Xaa is A or G
  MOD_RES (21)..(22)..(23)..(24): Xaa is A or G or is absent

SEQ ID NO: 69017 - protein, 33 aa, Artificial Sequence; identical to SEQ ID NO: 6619
  GFR-binding peptide
  MOD_RES (1)..(1): Xaa is C or S
  MOD_RES (15)..(16)..(17)..(18)..(19): Xaa is A or G
  MOD_RES (20)..(21)..(22)..(23): Xaa is A or G or is absent

SEQ ID NO: 69018 - protein, 41 aa, Artificial Sequence; identical to SEQ ID NO: 6621
  GFR-binding peptide
  MOD_RES (4)..(5)..(38)..(40): Xaa is C or S
  MOD_RES (19)..(20)..(21)..(22)..(23): Xaa is A or G
  MOD_RES (24)..(25)..(26)..(27): Xaa is A or G or is absent

SEQ ID NO: 69019 - protein, 41 aa, Artificial Sequence; identical to SEQ ID NO: 32817
  GFR-binding peptide
  MOD_RES (5)..(6)..(38)..(40): Xaa is C or S

SEQ ID NO: 69020 - protein, 38 aa, Artificial Sequence
  GFR-binding peptide
  MOD_RES (1)..(2)..(35)..(37): Xaa is C or S
  MOD_RES (16)..(17)..(18)..(19)..(20): Xaa is A or G
  MOD_RES (21)..(22)..(23)..(24): Xaa is A or G or is absent
XXVPQALSPINILYFXXXXXXXXXYGKIPMIVRSXKXS

SEQ ID NO: 69021 - protein, 37 aa, Artificial Sequence; identical to SEQ ID NO: 6625
  GFR-binding peptide
  MOD_RES (2)..(3)..(36): Xaa is C or S

SEQ ID NO: 69022 - protein, 35 aa, Artificial Sequence; identical to SEQ ID NO: 27780
  GFR-binding peptide
  MOD_RES (4)..(5): Xaa is C or S

SEQ ID NO: 69023 - protein, 43 aa, Artificial Sequence; identical to SEQ ID NO: 27781
  GFR-binding peptide
  MOD_RES (6)..(7)..(41)..(43): Xaa is C or S
  MOD_RES (21)..(22)..(23)..(24)..(25): Xaa is A or G
  MOD_RES (26)..(27)..(28)..(29): Xaa is A or G or is absent

SEQ ID NO: 69024 - protein, 40 aa, Artificial Sequence; identical to SEQ ID NO: 6626
  GFR-binding peptide
  MOD_RES (3)..(4)..(38)..(40): Xaa is C or S
  MOD_RES (18)..(19)..(20)..(21)..(22): Xaa is A or G
  MOD_RES (23)..(24)..(25)..(26): Xaa is A or G or is absent

SEQ ID NO: 69025 - protein, 39 aa, Artificial Sequence
  GFR-binding peptide
  MOD_RES (1)..(2)..(36)..(38): Xaa is C or S
  MOD_RES (16)..(17)..(18)..(19)..(20): Xaa is A or G
  MOD_RES (21)..(22)..(23)..(24): Xaa is A or G or is absent
XXTPTKMEPISMLYLXXXXXXXXXKFKYEGMVVDRXGXS

SEQ ID NO: 69026 - protein, 34 aa, Artificial Sequence
  GFR-binding peptide
  MOD_RES (2)..(3): Xaa is C or S
PXXVPEKMSPISILYKDENKNVVLKYHYNMTVES

SEQ ID NO: 69027 - protein, 35 aa, Artificial Sequence; identical to SEQ ID NO: 32823
  GFR-binding peptide
  MOD_RES (4)..(5): Xaa is C or S

SEQ ID NO: 69028 - protein, 42 aa, Artificial Sequence; identical to SEQ ID NO: 32825
  GFR-binding peptide
  MOD_RES (3)..(4)..(39)..(41): Xaa is C or S
  MOD_RES (18)..(19)..(20)..(21)..(22): Xaa is A or G
  MOD_RES (23)..(24)..(25)..(26): Xaa is A or G or is absent

SEQ ID NO: 69029 - protein, 39 aa, Artificial Sequence
  GFR-binding peptide
  MOD_RES (6)..(7)..(39): Xaa is C or S
GIPEPXXVPEKMSPINILYFDENKNVVYGKIPNMTVESX

SEQ ID NO: 69030 - protein, 37 aa, Artificial Sequence; identical to SEQ ID NO: 6628
  GFR-binding peptide
  MOD_RES (2)..(3)..(37): Xaa is C or S
  MOD_RES (17)..(18)..(19)..(20)..(21): Xaa is A or G
  MOD_RES (22)..(23)..(24)..(25): Xaa is A or G or is absent

SEQ ID NO: 69031 - protein, 40 aa, Artificial Sequence
  GFR-binding peptide
  MOD_RES (5)..(6)..(38)..(40): Xaa is C or S
APASXXVPARLSATSILYYDAANNVVLRKHRDMVVEAXGX

SEQ ID NO: 69032 - protein, 34 aa, Artificial Sequence
  GFR-binding peptide
  MOD_RES (1)..(33): Xaa is C or S
XTPTKMSPISMLYKNDKQQIILKYHYGMVVDRXG

SEQ ID NO: 69033 - protein, 32 aa, Artificial Sequence
  GFR-binding peptide
  MOD_RES (1)..(2): Xaa is C or S
XXVPTKLSATSILYYDKGVVTYLRKHRGMAVS

SEQ ID NO: 69034 - protein, 41 aa, Artificial Sequence; identical to SEQ ID NO: 27793
  GFR-binding peptide
  MOD_RES (6)..(7)..(41): Xaa is C or S
  MOD_RES (21)..(22)..(23)..(24)..(25): Xaa is A or G
  MOD_RES (26)..(27)..(28)..(29): Xaa is A or G or is absent

SEQ ID NO: 69035 - protein, 35 aa, Artificial Sequence; identical to SEQ ID NO: 57738
  GFR-binding peptide
  MOD_RES (4)..(5): Xaa is C or S

SEQ ID NO: 69036 - protein, 34 aa, Artificial Sequence; identical to SEQ ID NO: 32838
  GFR-binding peptide
  MOD_RES (1)..(2): Xaa is C or S

SEQ ID NO: 69037 - protein, 35 aa, Artificial Sequence; identical to SEQ ID NO: 32840
  GFR-binding peptide
  MOD_RES (2)..(3)..(35): Xaa is C or S

SEQ ID NO: 69038 - protein, 39 aa, Artificial Sequence; identical to SEQ ID NO: 27798
  GFR-binding peptide
  MOD_RES (3)..(4)..(36)..(38): Xaa is C or S

SEQ ID NO: 69039 - protein, 33 aa, Artificial Sequence; identical to SEQ ID NO: 57746
  GFR-binding peptide
  MOD_RES (1)..(32): Xaa is C or S

SEQ ID NO: 69040 - protein, 35 aa, Artificial Sequence
  GFR-binding peptide
  MOD_RES (2)..(3)..(35): Xaa is C or S
PXXTPTKMEPISMLYLNDKQQIIKFKYEGMVVDRX

SEQ ID NO: 69041 - protein, 37 aa, Artificial Sequence; identical to SEQ ID NO: 6633
  GFR-binding peptide
  MOD_RES (34)..(36): Xaa is C or S
  MOD_RES (14)..(15)..(16)..(17)..(18): Xaa is A or G
  MOD_RES (19)..(20)..(21)..(22): Xaa is A or G or is absent

SEQ ID NO: 69042 - protein, 41 aa, Artificial Sequence; identical to SEQ ID NO: 6634
  GFR-binding peptide
  MOD_RES (6)..(7)..(39)..(41): Xaa is C or S

SEQ ID NO: 69043 - protein, 39 aa, Artificial Sequence
  GFR-binding peptide
  MOD_RES (5)..(6)..(38): Xaa is C or S
IPEPXXVPEKMEPISILYLDENKNVVKFKYENMTVESXA

SEQ ID NO: 69044 - protein, 33 aa, Artificial Sequence; identical to SEQ ID NO: 27803
  GFR-binding peptide
  MOD_RES (14)..(15)..(16)..(17)..(18): Xaa is A or G
  MOD_RES (19)..(20)..(21)..(22): Xaa is A or G or is absent

SEQ ID NO: 69045 - protein, 37 aa, Artificial Sequence; identical to SEQ ID NO: 6638
  GFR-binding peptide
  MOD_RES (4)..(5)..(37): Xaa is C or S

SEQ ID NO: 69046 - protein, 44 aa, Artificial Sequence; identical to SEQ ID NO: 6639
  GFR-binding peptide
  MOD_RES (6)..(7)..(41)..(43): Xaa is C or S
  MOD_RES (21)..(22)..(23)..(24)..(25): Xaa is A or G
  MOD_RES (26)..(27)..(28)..(29): Xaa is A or G or is absent

SEQ ID NO: 69047 - protein, 33 aa, Artificial Sequence; identical to SEQ ID NO: 6640
  GFR-binding peptide
  MOD_RES (31)..(33): Xaa is C or S

SEQ ID NO: 69048 - protein, 34 aa, Artificial Sequence; identical to SEQ ID NO: 27806
  GFR-binding peptide
  MOD_RES (3)..(4): Xaa is C or S

SEQ ID NO: 69049 - protein, 40 aa, Artificial Sequence; identical to SEQ ID NO: 57756
  GFR-binding peptide
  MOD_RES (4)..(5)..(38)..(40): Xaa is C or S
  MOD_RES (19)..(20)..(21)..(22)..(23): Xaa is A or G
  MOD_RES (24)..(25)..(26)..(27): Xaa is A or G or is absent

SEQ ID NO: 69050 - protein, 34 aa, Artificial Sequence
  GFR-binding peptide
  MOD_RES (3)..(4): Xaa is C or S
STXXAPVKTSATSMLYYDNGRVLLLRKHRMIVEE

SEQ ID NO: 69051 - protein, 37 aa, Artificial Sequence; identical to SEQ ID NO: 6645
  GFR-binding peptide
  MOD_RES (3)..(4)..(37): Xaa is C or S
  MOD_RES (18)..(19)..(20)..(21)..(22): Xaa is A or G
  MOD_RES (23)..(24)..(25)..(26): Xaa is A or G or is absent

SEQ ID NO: 69052 - protein, 32 aa, Artificial Sequence; identical to SEQ ID NO: 32851
  GFR-binding peptide

SEQ ID NO: 69053 - protein, 32 aa, Artificial Sequence
  GFR-binding peptide
  MOD_RES (31)..(31): Xaa is C or S
VPQALSPINILYFVGRKPKVYGKIPMIVRSXK

SEQ ID NO: 69054 - protein, 37 aa, Artificial Sequence; identical to SEQ ID NO: 27812
  GFR-binding peptide
  MOD_RES (34)..(36): Xaa is C or S
  MOD_RES (14)..(15)..(16)..(17)..(18): Xaa is A or G
  MOD_RES (19)..(20)..(21)..(22): Xaa is A or G or is absent

SEQ ID NO: 69055 - protein, 39 aa, Artificial Sequence; identical to SEQ ID NO: 27813
  GFR-binding peptide
  MOD_RES (5)..(6): Xaa is C or S
  MOD_RES (20)..(21)..(22)..(23)..(24): Xaa is A or G
  MOD_RES (25)..(26)..(27)..(28): Xaa is A or G or is absent

SEQ ID NO: 69056 - protein, 32 aa, Artificial Sequence
  GFR-binding peptide
  MOD_RES (1)..(2): Xaa is C or S
XXAPVKTSPISMLYKDNGRVLLLKYHYMIVEE

SEQ ID NO: 69057 - protein, 35 aa, Artificial Sequence; identical to SEQ ID NO: 32855
  GFR-binding peptide
  MOD_RES (1)..(2)..(34): Xaa is C or S

SEQ ID NO: 69058 - protein, 42 aa, Artificial Sequence; identical to SEQ ID NO: 6648
  GFR-binding peptide
  MOD_RES (5)..(6)..(41): Xaa is C or S
  MOD_RES (20)..(21)..(22)..(23)..(24): Xaa is A or G
  MOD_RES (25)..(26)..(27)..(28): Xaa is A or G or is absent

SEQ ID NO: 69059 - protein, 33 aa, Artificial Sequence; identical to SEQ ID NO: 6650
  GFR-binding peptide
  MOD_RES (1)..(2): Xaa is C or S

SEQ ID NO: 69060 - protein, 38 aa, Artificial Sequence
  GFR-binding peptide
  MOD_RES (3)..(4)..(38): Xaa is C or S
  MOD_RES (18)..(19)..(20)..(21)..(22): Xaa is A or G
  MOD_RES (23)..(24)..(25)..(26): Xaa is A or G or is absent
PTXXVPTRLEPISILYLXXXXXXXXXKFKYEDMVVESX

SEQ ID NO: 69061 - protein, 36 aa, Artificial Sequence; identical to SEQ ID NO: 6655
  GFR-binding peptide
  MOD_RES (4)..(5): Xaa is C or S

SEQ ID NO: 69062 - protein, 34 aa, Artificial Sequence; identical to SEQ ID NO: 6659
  GFR-binding peptide
  MOD_RES (3)..(4): Xaa is C or S

SEQ ID NO: 69063 - protein, 39 aa, Artificial Sequence; identical to SEQ ID NO: 6661
  GFR-binding peptide
  MOD_RES (6)..(7)..(39): Xaa is C or S

SEQ ID NO: 69064 - protein, 42 aa, Artificial Sequence; identical to SEQ ID NO: 6662
  GFR-binding peptide
  MOD_RES (5)..(6)..(40)..(42): Xaa is C or S
  MOD_RES (20)..(21)..(22)..(23)..(24): Xaa is A or G
  MOD_RES (25)..(26)..(27)..(28): Xaa is A or G or is absent

SEQ ID NO: 69065 - protein, 40 aa, Artificial Sequence; identical to SEQ ID NO: 6663
  GFR-binding peptide
  MOD_RES (3)..(4)..(37)..(39): Xaa is C or S
  MOD_RES (18)..(19)..(20)..(21)..(22): Xaa is A or G
  MOD_RES (23)..(24)..(25)..(26): Xaa is A or G or is absent

SEQ ID NO: 69066 - protein, 35 aa, Artificial Sequence
  GFR-binding peptide
  MOD_RES (1)..(2): Xaa is C or S
  MOD_RES (16)..(17)..(18)..(19)..(20): Xaa is A or G
  MOD_RES (21)..(22)..(23)..(24): Xaa is A or G or is absent
XXVPTRLSPISILYKXXXXXXXXXLKYHYDMVVES

SEQ ID NO: 69067 - protein, 32 aa, Artificial Sequence
  GFR-binding peptide
  MOD_RES (14)..(15)..(16)..(17)..(18): Xaa is A or G
  MOD_RES (19)..(20)..(21)..(22): Xaa is A or G or is absent
VPQALSPINILYFXXXXXXXXXYGKIPMIVRS

SEQ ID NO: 69068 - protein, 37 aa, Artificial Sequence; identical to SEQ ID NO: 32871
  GFR-binding peptide
  MOD_RES (2)..(3)..(35)..(37): Xaa is C or S

SEQ ID NO: 69069 - protein, 37 aa, Artificial Sequence; identical to SEQ ID NO: 6664
  GFR-binding peptide
  MOD_RES (4)..(5): Xaa is C or S

SEQ ID NO: 69070 - protein, 34 aa, Artificial Sequence; identical to SEQ ID NO: 6665
  GFR-binding peptide
  MOD_RES (1)..(2)..(34): Xaa is C or S

SEQ ID NO: 69071 - protein, 36 aa, Artificial Sequence; identical to SEQ ID NO: 6666
  GFR-binding peptide
  MOD_RES (3)..(4)..(35): Xaa is C or S

SEQ ID NO: 69072 - protein, 32 aa, Artificial Sequence; identical to SEQ ID NO: 27829
  GFR-binding peptide
  MOD_RES (1)..(2): Xaa is C or S

SEQ ID NO: 69073 - protein, 41 aa, Artificial Sequence; identical to SEQ ID NO: 6667
  GFR-binding peptide
  MOD_RES (5)..(39)..(41): Xaa is C or S
  MOD_RES (19)..(20)..(21)..(22)..(23): Xaa is A or G
  MOD_RES (24)..(25)..(26)..(27): Xaa is A or G or is absent

SEQ ID NO: 69074 - protein, 36 aa, Artificial Sequence; identical to SEQ ID NO: 6668
  GFR-binding peptide
  MOD_RES (4)..(36): Xaa is C or S

SEQ ID NO: 69075 - protein, 41 aa, Artificial Sequence
  GFR-binding peptide
  MOD_RES (5)..(6)..(38)..(40): Xaa is C or S
IPEPXXVPEKMSPISILYKDENKNVVLKYHYNMTVESXAXR

SEQ ID NO: 69076 - protein, 33 aa, Artificial Sequence; identical to SEQ ID NO: 27836
  GFR-binding peptide
  MOD_RES (1)..(2): Xaa is C or S

SEQ ID NO: 69077 - protein, 40 aa, Artificial Sequence; identical to SEQ ID NO: 6669
  GFR-binding peptide
  MOD_RES (5)..(6)..(40): Xaa is C or S
  MOD_RES (20)..(21)..(22)..(23)..(24): Xaa is A or G
  MOD_RES (25)..(26)..(27)..(28): Xaa is A or G or is absent

SEQ ID NO: 69078 - protein, 45 aa, Artificial Sequence; identical to SEQ ID NO: 32877
  GFR-binding peptide
  MOD_RES (6)..(7)..(42)..(44): Xaa is C or S
  MOD_RES (21)..(22)..(23)..(24)..(25): Xaa is A or G
  MOD_RES (26)..(27)..(28)..(29): Xaa is A or G or is absent

SEQ ID NO: 69079 - protein, 35 aa, Artificial Sequence; identical to SEQ ID NO: 6670
  GFR-binding peptide
  MOD_RES (3)..(4): Xaa is C or S

SEQ ID NO: 69080 - protein, 35 aa, Artificial Sequence
  GFR-binding peptide
  MOD_RES (1)..(32)..(34): Xaa is C or S
XVPQALSPINILYFVGRKPKVYGKIPMIVRSXKXS

SEQ ID NO: 69081 - protein, 36 aa, Artificial Sequence; identical to SEQ ID NO: 6671
  GFR-binding peptide
  MOD_RES (1)..(35): Xaa is C or S
  MOD_RES (15)..(16)..(17)..(18)..(19): Xaa is A or G
  MOD_RES (20)..(21)..(22)..(23): Xaa is A or G or is absent

SEQ ID NO: 69082 - protein, 33 aa, Artificial Sequence; identical to SEQ ID NO: 6672
  GFR-binding peptide
  MOD_RES (33)..(33): Xaa is C or S
  MOD_RES (14)..(15)..(16)..(17)..(18): Xaa is A or G
  MOD_RES (19)..(20)..(21)..(22): Xaa is A or G or is absent

SEQ ID NO: 69083 - protein, 34 aa, Artificial Sequence; identical to SEQ ID NO: 6673
  GFR-binding peptide
  MOD_RES (1)..(2): Xaa is C or S
  MOD_RES (16)..(17)..(18)..(19)..(20): Xaa is A or G
  MOD_RES (21)..(22)..(23)..(24): Xaa is A or G or is absent

SEQ ID NO: 69084 - protein, 36 aa, Artificial Sequence; identical to SEQ ID NO: 32879
  GFR-binding peptide
  MOD_RES (1)..(33)..(35): Xaa is C or S

SEQ ID NO: 69085 - protein, 39 aa, Artificial Sequence; identical to SEQ ID NO: 27841
  GFR-binding peptide
  MOD_RES (4)..(5)..(39): Xaa is C or S
  MOD_RES (19)..(20)..(21)..(22)..(23): Xaa is A or G
  MOD_RES (24)..(25)..(26)..(27): Xaa is A or G or is absent

SEQ ID NO: 69086 - protein, 32 aa, Artificial Sequence; identical to SEQ ID NO: 32885
  GFR-binding peptide
  MOD_RES (14)..(15)..(16)..(17)..(18): Xaa is A or G
  MOD_RES (19)..(20)..(21)..(22): Xaa is A or G or is absent

SEQ ID NO: 69087 - protein, 34 aa, Artificial Sequence
  GFR-binding peptide
  MOD_RES (1)..(34): Xaa is C or S
  MOD_RES (15)..(16)..(17)..(18)..(19): Xaa is A or G
  MOD_RES (20)..(21)..(22)..(23): Xaa is A or G or is absent
XAPVKTSPISMLYKXXXXXXXXXLKYHYMIVEEX

SEQ ID NO: 69088 - protein, 40 aa, Artificial Sequence; identical to SEQ ID NO: 27842
  GFR-binding peptide
  MOD_RES (4)..(5)..(39): Xaa is C or S
  MOD_RES (19)..(20)..(21)..(22)..(23): Xaa is A or G
  MOD_RES (24)..(25)..(26)..(27): Xaa is A or G or is absent

SEQ ID NO: 69089 - protein, 34 aa, Artificial Sequence; identical to SEQ ID NO: 6676
  GFR-binding peptide
  MOD_RES (1)..(32)..(34): Xaa is C or S

SEQ ID NO: 69090 - protein, 36 aa, Artificial Sequence; identical to SEQ ID NO: 32886
  GFR-binding peptide
  MOD_RES (1)..(33)..(35): Xaa is C or S

SEQ ID NO: 69091 - protein, 36 aa, Artificial Sequence; identical to SEQ ID NO: 57806
  GFR-binding peptide
  MOD_RES (2)..(3): Xaa is C or S
  MOD_RES (17)..(18)..(19)..(20)..(21): Xaa is A or G
  MOD_RES (22)..(23)..(24)..(25): Xaa is A or G or is absent

SEQ ID NO: 69092 - protein, 39 aa, Artificial Sequence
  GFR-binding peptide
  MOD_RES (3)..(4)..(36)..(38): Xaa is C or S
GPXXTPTKMEPISMLYLNDKQQIIKFKYEGMVVDRXGXS

SEQ ID NO: 69093 - protein, 33 aa, Artificial Sequence; identical to SEQ ID NO: 6679
  GFR-binding peptide
  MOD_RES (1)..(2): Xaa is C or S

SEQ ID NO: 69094 - protein, 41 aa, Artificial Sequence; identical to SEQ ID NO: 6680
  GFR-binding peptide
  MOD_RES (3)..(4)..(38)..(40): Xaa is C or S
  MOD_RES (18)..(19)..(20)..(21)..(22): Xaa is A or G
  MOD_RES (23)..(24)..(25)..(26): Xaa is A or G or is absent

SEQ ID NO: 69095 - protein, 42 aa, Artificial Sequence; identical to SEQ ID NO: 27844
  GFR-binding peptide
  MOD_RES (6)..(7)..(40)..(42): Xaa is C or S

SEQ ID NO: 69096 - protein, 40 aa, Artificial Sequence; identical to SEQ ID NO: 32893
  GFR-binding peptide
  MOD_RES (6)..(7)..(39): Xaa is C or S

SEQ ID NO: 69097 - protein, 36 aa, Artificial Sequence; identical to SEQ ID NO: 6682
  GFR-binding peptide
  MOD_RES (2)..(3)..(34)..(36): Xaa is C or S

SEQ ID NO: 69098 - protein, 33 aa, Artificial Sequence; identical to SEQ ID NO: 6684
  GFR-binding peptide
  MOD_RES (2)..(3): Xaa is C or S

SEQ ID NO: 69099 - protein, 35 aa, Artificial Sequence
  GFR-binding peptide
  MOD_RES (1)..(33)..(35): Xaa is C or S
XTPTKMSATSMLYYNDKQQIILRKHRGMVVDRXGX

SEQ ID NO: 69100 - protein, 32 aa, Artificial Sequence; identical to SEQ ID NO: 6687
  GFR-binding peptide
  MOD_RES (1)..(32): Xaa is C or S

SEQ ID NO: 69101 - protein, 32 aa, Artificial Sequence; identical to SEQ ID NO: 6688
  GFR-binding peptide
  MOD_RES (1)..(2): Xaa is C or S

SEQ ID NO: 69102 - protein, 34 aa, Artificial Sequence; identical to SEQ ID NO: 27860
  GFR-binding peptide
  MOD_RES (1)..(33): Xaa is C or S

SEQ ID NO: 69103 - protein, 38 aa, Artificial Sequence; identical to SEQ ID NO: 27861
  GFR-binding peptide
  MOD_RES (3)..(4)..(37): Xaa is C or S
  MOD_RES (18)..(19)..(20)..(21)..(22): Xaa is A or G
  MOD_RES (23)..(24)..(25)..(26): Xaa is A or G or is absent

SEQ ID NO: 69104 - protein, 42 aa, Artificial Sequence; identical to SEQ ID NO: 6696
  GFR-binding peptide
  MOD_RES (5)..(6)..(40)..(42): Xaa is C or S
  MOD_RES (20)..(21)..(22)..(23)..(24): Xaa is A or G
  MOD_RES (25)..(26)..(27)..(28): Xaa is A or G or is absent

SEQ ID NO: 69105 - protein, 39 aa, Artificial Sequence; identical to SEQ ID NO: 6698
  GFR-binding peptide
  MOD_RES (1)..(36)..(38): Xaa is C or S
  MOD_RES (15)..(16)..(17)..(18)..(19): Xaa is A or G
  MOD_RES (20)..(21)..(22)..(23): Xaa is A or G or is absent

SEQ ID NO: 69106 - protein, 43 aa, Artificial Sequence; identical to SEQ ID NO: 32908
  GFR-binding peptide
  MOD_RES (4)..(5)..(40)..(42): Xaa is C or S
  MOD_RES (19)..(20)..(21)..(22)..(23): Xaa is A or G
  MOD_RES (24)..(25)..(26)..(27): Xaa is A or G or is absent

SEQ ID NO: 69107 - protein, 35 aa, Artificial Sequence; identical to SEQ ID NO: 32913
  GFR-binding peptide
  MOD_RES (1)..(2)..(34): Xaa is C or S

SEQ ID NO: 69108 - protein, 36 aa, Artificial Sequence
  GFR-binding peptide
  MOD_RES (3)..(4)..(36): Xaa is C or S
EPXXVPEKMNAISILYFDENKNVVLKKYRNMTVESX

SEQ ID NO: 69109 - protein, 35 aa, Artificial Sequence; identical to SEQ ID NO: 6700
  GFR-binding peptide
  MOD_RES (1)..(2): Xaa is C or S
  MOD_RES (16)..(17)..(18)..(19)..(20): Xaa is A or G
  MOD_RES (21)..(22)..(23)..(24): Xaa is A or G or is absent

SEQ ID NO: 69110 - protein, 33 aa, Artificial Sequence
  GFR-binding peptide
  MOD_RES (32)..(32): Xaa is C or S
VPEKMEPISILYLDENKNVVKFKYENMTVESXA

SEQ ID NO: 69111 - protein, 33 aa, Artificial Sequence; identical to SEQ ID NO: 27866
  GFR-binding peptide
  MOD_RES (1)..(1): Xaa is C or S
  MOD_RES (15)..(16)..(17)..(18)..(19): Xaa is A or G
  MOD_RES (20)..(21)..(22)..(23): Xaa is A or G or is absent

SEQ ID NO: 69112 - protein, 34 aa, Artificial Sequence; identical to SEQ ID NO: 6701
  GFR-binding peptide
  MOD_RES (1)..(2): Xaa is C or S
  MOD_RES (16)..(17)..(18)..(19)..(20): Xaa is A or G
  MOD_RES (21)..(22)..(23)..(24): Xaa is A or G or is absent

SEQ ID NO: 69113 - protein, 37 aa, Artificial Sequence; identical to SEQ ID NO: 27869
  GFR-binding peptide
  MOD_RES (4)..(5)..(37): Xaa is C or S

SEQ ID NO: 69114 - protein, 41 aa, Artificial Sequence
  GFR-binding peptide
  MOD_RES (3)..(4)..(38)..(40): Xaa is C or S
  MOD_RES (18)..(19)..(20)..(21)..(22): Xaa is A or G
  MOD_RES (23)..(24)..(25)..(26): Xaa is A or G or is absent
PTXXVPTRLSATSILYYXXXXXXXXXLRKHRDMVVESXGXR

SEQ ID NO: 69115 - protein, 34 aa, Artificial Sequence; identical to SEQ ID NO: 6707
  GFR-binding peptide
  MOD_RES (34)..(34): Xaa is C or S
  MOD_RES (14)..(15)..(16)..(17)..(18): Xaa is A or G
  MOD_RES (19)..(20)..(21)..(22): Xaa is A or G or is absent

SEQ ID NO: 69116 - protein, 38 aa, Artificial Sequence; identical to SEQ ID NO: 32924
  GFR-binding peptide
  MOD_RES (4)..(5)..(37): Xaa is C or S

SEQ ID NO: 69117 - protein, 40 aa, Artificial Sequence; identical to SEQ ID NO: 32927
  GFR-binding peptide
  MOD_RES (5)..(6)..(37)..(39): Xaa is C or S

SEQ ID NO: 69118 - protein, 38 aa, Artificial Sequence; identical to SEQ ID NO: 6713
  GFR-binding peptide
  MOD_RES (2)..(3)..(35)..(37): Xaa is C or S

SEQ ID NO: 69119 - protein, 38 aa, Artificial Sequence
  GFR-binding peptide
  MOD_RES (1)..(2)..(36)..(38): Xaa is C or S
  MOD_RES (16)..(17)..(18)..(19)..(20): Xaa is A or G
  MOD_RES (21)..(22)..(23)..(24): Xaa is A or G or is absent
XXVPTRLSATSILYYXXXXXXXXXLRKHRDMVVESXGX

SEQ ID NO: 69120 - protein, 41 aa, Artificial Sequence; identical to SEQ ID NO: 32933
  GFR-binding peptide
  MOD_RES (5)..(6)..(40): Xaa is C or S
  MOD_RES (20)..(21)..(22)..(23)..(24): Xaa is A or G
  MOD_RES (25)..(26)..(27)..(28): Xaa is A or G or is absent

SEQ ID NO: 69121 - protein, 40 aa, Artificial Sequence
  GFR-binding peptide
  MOD_RES (5)..(6)..(39): Xaa is C or S
  MOD_RES (20)..(21)..(22)..(23)..(24): Xaa is A or G
  MOD_RES (25)..(26)..(27)..(28): Xaa is A or G or is absent
SASPXXVSQDLSPINILYFXXXXXXXXXYGKIPMIVKSXK

SEQ ID NO: 69122 - protein, 37 aa, Artificial Sequence
  GFR-binding peptide
  MOD_RES (34)..(36): Xaa is C or S
  MOD_RES (14)..(15)..(16)..(17)..(18): Xaa is A or G
  MOD_RES (19)..(20)..(21)..(22): Xaa is A or G or is absent
TPTKMSPISMLYKXXXXXXXXXLKYHYGMVVDRXGXS

SEQ ID NO: 69123 - protein, 39 aa, Artificial Sequence; identical to SEQ ID NO: 6724
  GFR-binding peptide
  MOD_RES (6)..(7): Xaa is C or S
  MOD_RES (21)..(22)..(23)..(24)..(25): Xaa is A or G
  MOD_RES (26)..(27)..(28)..(29): Xaa is A or G or is absent

SEQ ID NO: 69124 - protein, 38 aa, Artificial Sequence; identical to SEQ ID NO: 6725
  GFR-binding peptide
  MOD_RES (2)..(3)..(38): Xaa is C or S
  MOD_RES (17)..(18)..(19)..(20)..(21): Xaa is A or G
  MOD_RES (22)..(23)..(24)..(25): Xaa is A or G or is absent

SEQ ID NO: 69125 - protein, 31 aa, Artificial Sequence; identical to SEQ ID NO: 27887
  GFR-binding peptide
  MOD_RES (1)..(1): Xaa is C or S

SEQ ID NO: 69126 - protein, 39 aa, Artificial Sequence; identical to SEQ ID NO: 6726
  GFR-binding peptide
  MOD_RES (5)..(6)..(39): Xaa is C or S
  MOD_RES (20)..(21)..(22)..(23)..(24): Xaa is A or G
  MOD_RES (25)..(26)..(27)..(28): Xaa is A or G or is absent

SEQ ID NO: 69127 - protein, 33 aa, Artificial Sequence; identical to SEQ ID NO: 6728
  GFR-binding peptide
  MOD_RES (1)..(1): Xaa is C or S
  MOD_RES (15)..(16)..(17)..(18)..(19): Xaa is A or G
  MOD_RES (20)..(21)..(22)..(23): Xaa is A or G or is absent

SEQ ID NO: 69128 - protein, 39 aa, Artificial Sequence; identical to SEQ ID NO: 6730
  GFR-binding peptide
  MOD_RES (5)..(6)..(39): Xaa is C or S
  MOD_RES (20)..(21)..(22)..(23)..(24): Xaa is A or G
  MOD_RES (25)..(26)..(27)..(28): Xaa is A or G or is absent

SEQ ID NO: 69129 - protein, 34 aa, Artificial Sequence; identical to SEQ ID NO: 6731
  GFR-binding peptide
  MOD_RES (2)..(3)..(34): Xaa is C or S

SEQ ID NO: 69130 - protein, 34 aa, Artificial Sequence; identical to SEQ ID NO: 6732
  GFR-binding peptide
  MOD_RES (2)..(3): Xaa is C or S

SEQ ID NO: 69131 - protein, 35 aa, Artificial Sequence; identical to SEQ ID NO: 32951
  GFR-binding peptide
  MOD_RES (5)..(5): Xaa is C or S

SEQ ID NO: 69132 - protein, 33 aa, Artificial Sequence; identical to SEQ ID NO: 6734
  GFR-binding peptide
  MOD_RES (32)..(32): Xaa is C or S

SEQ ID NO: 69133 - protein, 33 aa, Artificial Sequence
  GFR-binding peptide
  MOD_RES (2)..(3): Xaa is C or S
TXXVPTRLSATSILYYDSANNVVLRKHRDMVVE

SEQ ID NO: 69134 - protein, 33 aa, Artificial Sequence
  GFR-binding peptide
  MOD_RES (1)..(2): Xaa is C or S
XXVPTKLSATSILYYDKGVVTYLRKHRGMAVSE

SEQ ID NO: 69135 - protein, 33 aa, Artificial Sequence; identical to SEQ ID NO: 27900
  GFR-binding peptide
  MOD_RES (1)..(2): Xaa is C or S

SEQ ID NO: 69136 - protein, 39 aa, Artificial Sequence; identical to SEQ ID NO: 27901
  GFR-binding peptide
  MOD_RES (5)..(6)..(37)..(39): Xaa is C or S

SEQ ID NO: 69137 - protein, 35 aa, Artificial Sequence; identical to SEQ ID NO: 32954
  GFR-binding peptide
  MOD_RES (32)..(34): Xaa is C or S

SEQ ID NO: 69138 - protein, 34 aa, Artificial Sequence
  GFR-binding peptide
  MOD_RES (3)..(4): Xaa is C or S
EPXXVPEKMEPISILYLDENKNVVKFKYENMTVE

SEQ ID NO: 69139 - protein, 37 aa, Artificial Sequence; identical to SEQ ID NO: 6738
  GFR-binding peptide
  MOD_RES (4)..(5)..(36): Xaa is C or S

SEQ ID NO: 69140 - protein, 35 aa, Artificial Sequence; identical to SEQ ID NO: 32957
  GFR-binding peptide
  MOD_RES (2)..(3)..(35): Xaa is C or S

SEQ ID NO: 69141 - protein, 43 aa, Artificial Sequence
  GFR-binding peptide
  MOD_RES (6)..(7)..(41)..(43): Xaa is C or S
  MOD_RES (21)..(22)..(23)..(24)..(25): Xaa is A or G
  MOD_RES (26)..(27)..(28)..(29): Xaa is A or G or is absent
GSAGPXXTPTKMEPISMLYLXXXXXXXXXKFKYEGMVVDRXGX

SEQ ID NO: 69142 - protein, 39 aa, Artificial Sequence; identical to SEQ ID NO: 32960
  GFR-binding peptide
  MOD_RES (4)..(38): Xaa is C or S
  MOD_RES (18)..(19)..(20)..(21)..(22): Xaa is A or G
  MOD_RES (23)..(24)..(25)..(26): Xaa is A or G or is absent

SEQ ID NO: 69143 - protein, 43 aa, Artificial Sequence; identical to SEQ ID NO: 6740
  GFR-binding peptide
  MOD_RES (6)..(7)..(40)..(42): Xaa is C or S
  MOD_RES (21)..(22)..(23)..(24)..(25): Xaa is A or G
  MOD_RES (26)..(27)..(28)..(29): Xaa is A or G or is absent

SEQ ID NO: 69144 - protein, 37 aa, Artificial Sequence; identical to SEQ ID NO: 27905
  GFR-binding peptide
  MOD_RES (6)..(7): Xaa is C or S

SEQ ID NO: 69145 - protein, 40 aa, Artificial Sequence; identical to SEQ ID NO: 32961
  GFR-binding peptide
  MOD_RES (5)..(6)..(38)..(40): Xaa is C or S

SEQ ID NO: 69146 - protein, 38 aa, Artificial Sequence; identical to SEQ ID NO: 32966
  GFR-binding peptide
  MOD_RES (6)..(7): Xaa is C or S

SEQ ID NO: 69147 - protein, 36 aa, Artificial Sequence; identical to SEQ ID NO: 32967
  GFR-binding peptide
  MOD_RES (1)..(33)..(35): Xaa is C or S

SEQ ID NO: 69148 - protein, 40 aa, Artificial Sequence; identical to SEQ ID NO: 6742
  GFR-binding peptide
  MOD_RES (2)..(3)..(37)..(39): Xaa is C or S
  MOD_RES (17)..(18)..(19)..(20)..(21): Xaa is A or G
  MOD_RES (22)..(23)..(24)..(25): Xaa is A or G or is absent

SEQ ID NO: 69149 - protein, 34 aa, Artificial Sequence; identical to SEQ ID NO: 27909
  GFR-binding peptide
  MOD_RES (34)..(34): Xaa is C or S
  MOD_RES (14)..(15)..(16)..(17)..(18): Xaa is A or G
  MOD_RES (19)..(20)..(21)..(22): Xaa is A or G or is absent

SEQ ID NO: 69150 - protein, 34 aa, Artificial Sequence; identical to SEQ ID NO: 6743
  GFR-binding peptide
  MOD_RES (32)..(34): Xaa is C or S

SEQ ID NO: 69151 - protein, 38 aa, Artificial Sequence; identical to SEQ ID NO: 27911
  GFR-binding peptide
  MOD_RES (3)..(35)..(37): Xaa is C or S

SEQ ID NO: 69152 - protein, 38 aa, Artificial Sequence
  GFR-binding peptide
  MOD_RES (6)..(7)..(38): Xaa is C or S
RVPSTXXAPVKTEPISMLYLDNGRVLLKFKYEMIVEEX

SEQ ID NO: 69153 - protein, 39 aa, Artificial Sequence; identical to SEQ ID NO: 32968
  GFR-binding peptide
  MOD_RES (3)..(4)..(38): Xaa is C or S
  MOD_RES (18)..(19)..(20)..(21)..(22): Xaa is A or G
  MOD_RES (23)..(24)..(25)..(26): Xaa is A or G or is absent

SEQ ID NO: 69154 - protein, 37 aa, Artificial Sequence; identical to SEQ ID NO: 27913
  GFR-binding peptide
  MOD_RES (1)..(35)..(37): Xaa is C or S
  MOD_RES (15)..(16)..(17)..(18)..(19): Xaa is A or G
  MOD_RES (20)..(21)..(22)..(23): Xaa is A or G or is absent

SEQ ID NO: 69155 - protein, 33 aa, Artificial Sequence
  GFR-binding peptide
  MOD_RES (32)..(32): Xaa is C or S
VPTKLSATSILYYDKGVVTYLRKHRGMAVSEXG

SEQ ID NO: 69156 - protein, 39 aa, Artificial Sequence; identical to SEQ ID NO: 6747
  GFR-binding peptide
  MOD_RES (4)..(5)..(38): Xaa is C or S
  MOD_RES (19)..(20)..(21)..(22)..(23): Xaa is A or G
  MOD_RES (24)..(25)..(26)..(27): Xaa is A or G or is absent

SEQ ID NO: 69157 - protein, 37 aa, Artificial Sequence; identical to SEQ ID NO: 6748
  GFR-binding peptide
  MOD_RES (2)..(3)..(36): Xaa is C or S
  MOD_RES (17)..(18)..(19)..(20)..(21): Xaa is A or G
  MOD_RES (22)..(23)..(24)..(25): Xaa is A or G or is absent

SEQ ID NO: 69158 - protein, 39 aa, Artificial Sequence; identical to SEQ ID NO: 6749
  GFR-binding peptide
  MOD_RES (3)..(4)..(39): Xaa is C or S
  MOD_RES (18)..(19)..(20)..(21)..(22): Xaa is A or G
  MOD_RES (23)..(24)..(25)..(26): Xaa is A or G or is absent

SEQ ID NO: 69159 - protein, 35 aa, Artificial Sequence; identical to SEQ ID NO: 32978
  GFR-binding peptide
  MOD_RES (3)..(4): Xaa is C or S

SEQ ID NO: 69160 - protein, 33 aa, Artificial Sequence
  GFR-binding peptide
  MOD_RES (14)..(15)..(16)..(17)..(18): Xaa is A or G
  MOD_RES (19)..(20)..(21)..(22): Xaa is A or G or is absent
VPTRLSATSILYYXXXXXXXXXLRKHRDMVVES

SEQ ID NO: 69161 - protein, 37 aa, Artificial Sequence
  GFR-binding peptide
  MOD_RES (4)..(5)..(36): Xaa is C or S
PSTXXAPVKTEPISMLYLDNGRVLLKFKYEMIVEEXG

SEQ ID NO: 69162 - protein, 36 aa, Artificial Sequence; identical to SEQ ID NO: 6751
  GFR-binding peptide
  MOD_RES (1)..(2)..(36): Xaa is C or S
  MOD_RES (16)..(17)..(18)..(19)..(20): Xaa is A or G
  MOD_RES (21)..(22)..(23)..(24): Xaa is A or G or is absent

SEQ ID NO: 69163 - protein, 34 aa, Artificial Sequence; identical to SEQ ID NO: 6752
  GFR-binding peptide
  MOD_RES (34)..(34): Xaa is C or S
  MOD_RES (14)..(15)..(16)..(17)..(18): Xaa is A or G
  MOD_RES (19)..(20)..(21)..(22): Xaa is A or G or is absent

SEQ ID NO: 69164 - protein, 35 aa, Artificial Sequence; identical to SEQ ID NO: 27925
  GFR-binding peptide
  MOD_RES (3)..(4): Xaa is C or S

SEQ ID NO: 69165 - protein, 40 aa, Artificial Sequence
  GFR-binding peptide
  MOD_RES (3)..(4)..(38)..(40): Xaa is C or S
  MOD_RES (18)..(19)..(20)..(21)..(22): Xaa is A or G
  MOD_RES (23)..(24)..(25)..(26): Xaa is A or G or is absent
EPXXVPEKMNAISILYFXXXXXXXXXLKKYRNMTVESXAX

SEQ ID NO: 69166 - protein, 38 aa, Artificial Sequence
  GFR-binding peptide
  MOD_RES (1)..(2)..(35)..(37): Xaa is C or S
  MOD_RES (16)..(17)..(18)..(19)..(20): Xaa is A or G
  MOD_RES (21)..(22)..(23)..(24): Xaa is A or G or is absent
XXAPVKTSATSMLYYXXXXXXXXXLRKHRMIVEEXGXL

SEQ ID NO: 69167 - protein, 31 aa, Artificial Sequence
  GFR-binding peptide
  MOD_RES (31)..(31): Xaa is C or S
APVKTEPISMLYLDNGRVLLKFKYEMIVEEX

SEQ ID NO: 69168 - protein, 42 aa, Artificial Sequence; identical to SEQ ID NO: 27933
  GFR-binding peptide
  MOD_RES (4)..(5)..(39)..(41): Xaa is C or S
  MOD_RES (19)..(20)..(21)..(22)..(23): Xaa is A or G
  MOD_RES (24)..(25)..(26)..(27): Xaa is A or G or is absent

SEQ ID NO: 69169 - protein, 36 aa, Artificial Sequence; identical to SEQ ID NO: 32990
  GFR-binding peptide
  MOD_RES (4)..(5): Xaa is C or S

SEQ ID NO: 69170 - protein, 38 aa, Artificial Sequence; identical to SEQ ID NO: 27934
  GFR-binding peptide
  MOD_RES (5)..(6): Xaa is C or S
  MOD_RES (20)..(21)..(22)..(23)..(24): Xaa is A or G
  MOD_RES (25)..(26)..(27)..(28): Xaa is A or G or is absent

SEQ ID NO: 69171 - protein, 31 aa, Artificial Sequence; identical to SEQ ID NO: 6759
  GFR-binding peptide
  MOD_RES (1)..(1): Xaa is C or S

SEQ ID NO: 69172 - protein, 34 aa, Artificial Sequence; identical to SEQ ID NO: 27937
  GFR-binding peptide
  MOD_RES (2)..(34): Xaa is C or S

SEQ ID NO: 69173 - protein, 35 aa, Artificial Sequence
  GFR-binding peptide
  MOD_RES (4)..(5): Xaa is C or S
ASPXXVSQDLSPINILYFIGKTPKIYGKIPMIVKS

SEQ ID NO: 69174 - protein, 36 aa, Artificial Sequence; identical to SEQ ID NO: 6762
  GFR-binding peptide
  MOD_RES (33)..(35): Xaa is C or S
  MOD_RES (14)..(15)..(16)..(17)..(18): Xaa is A or G
  MOD_RES (19)..(20)..(21)..(22): Xaa is A or G or is absent

SEQ ID NO: 69175 - protein, 39 aa, Artificial Sequence; identical to SEQ ID NO: 27939
  GFR-binding peptide
  MOD_RES (3)..(4)..(38): Xaa is C or S
  MOD_RES (18)..(19)..(20)..(21)..(22): Xaa is A or G
  MOD_RES (23)..(24)..(25)..(26): Xaa is A or G or is absent

SEQ ID NO: 69176 - protein, 36 aa, Artificial Sequence; identical to SEQ ID NO: 32995
  GFR-binding peptide
  MOD_RES (1)..(2)..(36): Xaa is C or S
  MOD_RES (16)..(17)..(18)..(19)..(20): Xaa is A or G
  MOD_RES (21)..(22)..(23)..(24): Xaa is A or G or is absent

SEQ ID NO: 69177 - protein, 32 aa, Artificial Sequence
  GFR-binding peptide
  MOD_RES (1)..(1): Xaa is C or S
XVPEKMSPINILYFDENKNVVYGKIPNMTVES

SEQ ID NO: 69178 - protein, 35 aa, Artificial Sequence; identical to SEQ ID NO: 14123
  GFR-binding peptide
  MOD_RES (34)..(34): Xaa is C or S
  MOD_RES (14)..(15)..(16)..(17)..(18): Xaa is A or G
  MOD_RES (19)..(20)..(21)..(22): Xaa is A or G or is absent

SEQ ID NO: 69179 - protein, 39 aa, Artificial Sequence; identical to SEQ ID NO: 27946
  GFR-binding peptide
  MOD_RES (5)..(6)..(38): Xaa is C or S

SEQ ID NO: 69180 - protein, 35 aa, Artificial Sequence; identical to SEQ ID NO: 6770
  GFR-binding peptide
  MOD_RES (2)..(3): Xaa is C or S
  MOD_RES (17)..(18)..(19)..(20)..(21): Xaa is A or G
  MOD_RES (22)..(23)..(24)..(25): Xaa is A or G or is absent

SEQ ID NO: 69181 - protein, 40 aa, Artificial Sequence; identical to SEQ ID NO: 27949
  GFR-binding peptide
  MOD_RES (4)..(5)..(37)..(39): Xaa is C or S

SEQ ID NO: 69182 - protein, 38 aa, Artificial Sequence; identical to SEQ ID NO: 32999
  GFR-binding peptide
  MOD_RES (5)..(6)..(38): Xaa is C or S

SEQ ID NO: 69183 - protein, 39 aa, Artificial Sequence; identical to SEQ ID NO: 6773
  GFR-binding peptide
  MOD_RES (1)..(2)..(36)..(38): Xaa is C or S
  MOD_RES (16)..(17)..(18)..(19)..(20): Xaa is A or G
  MOD_RES (21)..(22)..(23)..(24): Xaa is A or G or is absent

SEQ ID NO: 69184 - protein, 39 aa, Artificial Sequence; identical to SEQ ID NO: 27951
  GFR-binding peptide
  MOD_RES (5)..(6): Xaa is C or S
  MOD_RES (20)..(21)..(22)..(23)..(24): Xaa is A or G
  MOD_RES (25)..(26)..(27)..(28): Xaa is A or G or is absent

SEQ ID NO: 69185 - protein, 36 aa, Artificial Sequence; identical to SEQ ID NO: 33003
  GFR-binding peptide
  MOD_RES (1)..(2)..(34)..(36): Xaa is C or S

SEQ ID NO: 69186 - protein, 39 aa, Artificial Sequence; identical to SEQ ID NO: 6777
  GFR-binding peptide
  MOD_RES (3)..(4)..(38): Xaa is C or S
  MOD_RES (18)..(19)..(20)..(21)..(22): Xaa is A or G
  MOD_RES (23)..(24)..(25)..(26): Xaa is A or G or is absent

SEQ ID NO: 69187 - protein, 36 aa, Artificial Sequence; identical to SEQ ID NO: 27958
  GFR-binding peptide
  MOD_RES (1)..(2)..(34)..(36): Xaa is C or S

SEQ ID NO: 69188 - protein, 40 aa, Artificial Sequence; identical to SEQ ID NO: 6779
  GFR-binding peptide
  MOD_RES (5)..(6)..(37)..(39): Xaa is C or S

SEQ ID NO: 69189 - protein, 41 aa, Artificial Sequence; identical to SEQ ID NO: 27961
  GFR-binding peptide
  MOD_RES (5)..(6)..(40): Xaa is C or S
  MOD_RES (20)..(21)..(22)..(23)..(24): Xaa is A or G
  MOD_RES (25)..(26)..(27)..(28): Xaa is A or G or is absent

SEQ ID NO: 69190 - protein, 40 aa, Artificial Sequence
  GFR-binding peptide
  MOD_RES (6)..(7): Xaa is C or S
  MOD_RES (21)..(22)..(23)..(24)..(25): Xaa is A or G
  MOD_RES (26)..(27)..(28)..(29): Xaa is A or G or is absent
KASKAXXVPTKLSATSILYYXXXXXXXXXLRKHRGMAVSE

SEQ ID NO: 69191 - protein, 40 aa, Artificial Sequence
  GFR-binding peptide
  MOD_RES (6)..(7): Xaa is C or S
  MOD_RES (21)..(22)..(23)..(24)..(25): Xaa is A or G
  MOD_RES (26)..(27)..(28)..(29): Xaa is A or G or is absent
STPPTXXVPTRLEPISILYLXXXXXXXXXKFKYEDMVVES

SEQ ID NO: 69192 - protein, 38 aa, Artificial Sequence; identical to SEQ ID NO: 6785
  GFR-binding peptide
  MOD_RES (4)..(5)..(37): Xaa is C or S

SEQ ID NO: 69193 - protein, 36 aa, Artificial Sequence; identical to SEQ ID NO: 6787
  GFR-binding peptide
  MOD_RES (2)..(3): Xaa is C or S
  MOD_RES (17)..(18)..(19)..(20)..(21): Xaa is A or G
  MOD_RES (22)..(23)..(24)..(25): Xaa is A or G or is absent

SEQ ID NO: 69194 - protein, 41 aa, Artificial Sequence; identical to SEQ ID NO: 6788
  GFR-binding peptide
  MOD_RES (6)..(7)..(39)..(41): Xaa is C or S

SEQ ID NO: 69195 - protein, 36 aa, Artificial Sequence
  GFR-binding peptide
  MOD_RES (2)..(3): Xaa is C or S
  MOD_RES (17)..(18)..(19)..(20)..(21): Xaa is A or G
  MOD_RES (22)..(23)..(24)..(25): Xaa is A or G or is absent
PXXVPEKMSPINILYFXXXXXXXXXYGKIPNMTVES

SEQ ID NO: 69196 - protein, 38 aa, Artificial Sequence
  GFR-binding peptide
  MOD_RES (2)..(3)..(37): Xaa is C or S
  MOD_RES (17)..(18)..(19)..(20)..(21): Xaa is A or G
  MOD_RES (22)..(23)..(24)..(25): Xaa is A or G or is absent
TXXVPTRLEPISILYLXXXXXXXXXKFKYEDMVVESXG

SEQ ID NO: 69197 - protein, 37 aa, Artificial Sequence; identical to SEQ ID NO: 6789
  GFR-binding peptide
  MOD_RES (4)..(5)..(37): Xaa is C or S

SEQ ID NO: 69198 - protein, 36 aa, Artificial Sequence
  GFR-binding peptide
  MOD_RES (1)..(33)..(35): Xaa is C or S
XVPTRLSPISILYKDSANNVVLKYHYDMVVESXGXR

SEQ ID NO: 69199 - protein, 35 aa, Artificial Sequence; identical to SEQ ID NO: 6790
  GFR-binding peptide
  MOD_RES (1)..(2)..(33)..(35): Xaa is C or S

SEQ ID NO: 69200 - protein, 38 aa, Artificial Sequence
  GFR-binding peptide
  MOD_RES (5)..(6): Xaa is C or S
  MOD_RES (20)..(21)..(22)..(23)..(24): Xaa is A or G
  MOD_RES (25)..(26)..(27)..(28): Xaa is A or G or is absent
TPPTXXVPTRLEPISILYLXXXXXXXXXKFKYEDMVVE

SEQ ID NO: 69201 - protein, 38 aa, Artificial Sequence; identical to SEQ ID NO: 6791
  GFR-binding peptide
  MOD_RES (4)..(5)..(37): Xaa is C or S

SEQ ID NO: 69202 - protein, 38 aa, Artificial Sequence; identical to SEQ ID NO: 6792
  GFR-binding peptide
  MOD_RES (4)..(5): Xaa is C or S
  MOD_RES (19)..(20)..(21)..(22)..(23): Xaa is A or G
  MOD_RES (24)..(25)..(26)..(27): Xaa is A or G or is absent

SEQ ID NO: 69203 - protein, 40 aa, Artificial Sequence; identical to SEQ ID NO: 6793
  GFR-binding peptide
  MOD_RES (2)..(3)..(37)..(39): Xaa is C or S
  MOD_RES (17)..(18)..(19)..(20)..(21): Xaa is A or G
  MOD_RES (22)..(23)..(24)..(25): Xaa is A or G or is absent

SEQ ID NO: 69204 - protein, 38 aa, Artificial Sequence; identical to SEQ ID NO: 6796
  GFR-binding peptide
  MOD_RES (35)..(37): Xaa is C or S
  MOD_RES (14)..(15)..(16)..(17)..(18): Xaa is A or G
  MOD_RES (19)..(20)..(21)..(22): Xaa is A or G or is absent

SEQ ID NO: 69205 - protein, 33 aa, Artificial Sequence
  GFR-binding peptide
  MOD_RES (32)..(32): Xaa is C or S
VPEKMNAISILYFDENKNVVLKKYRNMTVESXA

SEQ ID NO: 69206 - protein, 39 aa, Artificial Sequence; identical to SEQ ID NO: 27979
  GFR-binding peptide
  MOD_RES (3)..(4)..(37)..(39): Xaa is C or S
  MOD_RES (18)..(19)..(20)..(21)..(22): Xaa is A or G
  MOD_RES (23)..(24)..(25)..(26): Xaa is A or G or is absent

SEQ ID NO: 69207 - protein, 42 aa, Artificial Sequence; identical to SEQ ID NO: 33031
  GFR-binding peptide
  MOD_RES (4)..(5)..(39)..(41): Xaa is C or S
  MOD_RES (19)..(20)..(21)..(22)..(23): Xaa is A or G
  MOD_RES (24)..(25)..(26)..(27): Xaa is A or G or is absent

SEQ ID NO: 69208 - protein, 38 aa, Artificial Sequence; identical to SEQ ID NO: 6799
  GFR-binding peptide
  MOD_RES (3)..(4)..(35)..(37): Xaa is C or S

SEQ ID NO: 69209 - protein, 41 aa, Artificial Sequence
  GFR-binding peptide
  MOD_RES (6)..(7)..(40): Xaa is C or S
  MOD_RES (21)..(22)..(23)..(24)..(25): Xaa is A or G
  MOD_RES (26)..(27)..(28)..(29): Xaa is A or G or is absent
ASAAPXXVPQALSPINILYFXXXXXXXXXYGKIPMIVRSXK

SEQ ID NO: 69210 - protein, 38 aa, Artificial Sequence; identical to SEQ ID NO: 6801
  GFR-binding peptide
  MOD_RES (4)..(5)..(38): Xaa is C or S
  MOD_RES (19)..(20)..(21)..(22)..(23): Xaa is A or G
  MOD_RES (24)..(25)..(26)..(27): Xaa is A or G or is absent

SEQ ID NO: 69211 - protein, 41 aa, Artificial Sequence; identical to SEQ ID NO: 6803
  GFR-binding peptide
  MOD_RES (7)..(39)..(41): Xaa is C or S

SEQ ID NO: 69212 - protein, 41 aa, Artificial Sequence; identical to SEQ ID NO: 6806
  GFR-binding peptide
  MOD_RES (6)..(7)..(39)..(41): Xaa is C or S

SEQ ID NO: 69213 - protein, 38 aa, Artificial Sequence; identical to SEQ ID NO: 27989
  GFR-binding peptide
  MOD_RES (4)..(36)..(38): Xaa is C or S

SEQ ID NO: 69214 - protein, 41 aa, Artificial Sequence; identical to SEQ ID NO: 6809
  GFR-binding peptide
  MOD_RES (6)..(38)..(40): Xaa is C or S

SEQ ID NO: 69215 - protein, 35 aa, Artificial Sequence; identical to SEQ ID NO: 6810
  GFR-binding peptide
  MOD_RES (4)..(5): Xaa is C or S

SEQ ID NO: 69216 - protein, 37 aa, Artificial Sequence; identical to SEQ ID NO: 6812
  GFR-binding peptide
  MOD_RES (3)..(37): Xaa is C or S
  MOD_RES (17)..(18)..(19)..(20)..(21): Xaa is A or G
  MOD_RES (22)..(23)..(24)..(25): Xaa is A or G or is absent

SEQ ID NO: 69217 - protein, 36 aa, Artificial Sequence; identical to SEQ ID NO: 6814
  GFR-binding peptide
  MOD_RES (34)..(36): Xaa is C or S
  MOD_RES (14)..(15)..(16)..(17)..(18): Xaa is A or G
  MOD_RES (19)..(20)..(21)..(22): Xaa is A or G or is absent

SEQ ID NO: 69218 - protein, 42 aa, Artificial Sequence
  GFR-binding peptide
  MOD_RES (6)..(7)..(40)..(42): Xaa is C or S
  MOD_RES (21)..(22)..(23)..(24)..(25): Xaa is A or G
  MOD_RES (26)..(27)..(28)..(29): Xaa is A or G or is absent
RVPSTXXAPVKTEPISMLYLXXXXXXXXXKFKYEMIVEEXGX

SEQ ID NO: 69219 - protein, 31 aa, Artificial Sequence
  GFR-binding peptide
VPEKMEPISILYLDENKNVVKFKYENMTVES

SEQ ID NO: 69220 - protein, 36 aa, Artificial Sequence
  GFR-binding peptide
  MOD_RES (33)..(35): Xaa is C or S
  MOD_RES (14)..(15)..(16)..(17)..(18): Xaa is A or G
  MOD_RES (19)..(20)..(21)..(22): Xaa is A or G or is absent
VPQDLSPINILYFXXXXXXXXXYGKIPMVVKSXKXS

SEQ ID NO: 69221 - protein, 38 aa, Artificial Sequence
  GFR-binding peptide
  MOD_RES (2)..(3)..(35)..(37): Xaa is C or S
TXXVPTRLEPISILYLDSANNVVKFKYEDMVVESXGXR

SEQ ID NO: 69222 - protein, 38 aa, Artificial Sequence
  GFR-binding peptide
  MOD_RES (5)..(6): Xaa is C or S
  MOD_RES (20)..(21)..(22)..(23)..(24): Xaa is A or G
  MOD_RES (25)..(26)..(27)..(28): Xaa is A or G or is absent
TPPTXXVPTRLSPISILYKXXXXXXXXXLKYHYDMVVE

SEQ ID NO: 69223 - protein, 43 aa, Artificial Sequence
  GFR-binding peptide
  MOD_RES (5)..(6)..(40)..(42): Xaa is C or S
  MOD_RES (20)..(21)..(22)..(23)..(24): Xaa is A or G
  MOD_RES (25)..(26)..(27)..(28): Xaa is A or G or is absent
SAGPXXTPTKMEPISMLYLXXXXXXXXXKFKYEGMVVDRXGXS

SEQ ID NO: 69224 - protein, 32 aa, Artificial Sequence; identical to SEQ ID NO: 6822
  GFR-binding peptide
  MOD_RES (1)..(2): Xaa is C or S

SEQ ID NO: 69225 - protein, 40 aa, Artificial Sequence; identical to SEQ ID NO: 33057
  GFR-binding peptide
  MOD_RES (6)..(7): Xaa is C or S
  MOD_RES (21)..(22)..(23)..(24)..(25): Xaa is A or G
  MOD_RES (26)..(27)..(28)..(29): Xaa is A or G or is absent

SEQ ID NO: 69226 - protein, 37 aa, Artificial Sequence
  GFR-binding peptide
  MOD_RES (3)..(4)..(37): Xaa is C or S
  MOD_RES (18)..(19)..(20)..(21)..(22): Xaa is A or G
  MOD_RES (23)..(24)..(25)..(26): Xaa is A or G or is absent
APXXVPQALSPINILYFXXXXXXXXXYGKIPMIVRSX

SEQ ID NO: 69227 - protein, 36 aa, Artificial Sequence; identical to SEQ ID NO: 28000
  GFR-binding peptide
  MOD_RES (2)..(3): Xaa is C or S
  MOD_RES (17)..(18)..(19)..(20)..(21): Xaa is A or G
  MOD_RES (22)..(23)..(24)..(25): Xaa is A or G or is absent

SEQ ID NO: 69228 - protein, 33 aa, Artificial Sequence; identical to SEQ ID NO: 6824
  GFR-binding peptide
  MOD_RES (1)..(1): Xaa is C or S
  MOD_RES (15)..(16)..(17)..(18)..(19): Xaa is A or G
  MOD_RES (20)..(21)..(22)..(23): Xaa is A or G or is absent

SEQ ID NO: 69229 - protein, 37 aa, Artificial Sequence
  GFR-binding peptide
  MOD_RES (1)..(2)..(34)..(36): Xaa is C or S
XXVPTRLEPISILYLDSANNVVKFKYEDMVVESXGXR

SEQ ID NO: 69230 - protein, 31 aa, Artificial Sequence
  GFR-binding peptide
VPARLSATSILYYDAANNVVLRKHRDMVVEA

SEQ ID NO: 69231 - protein, 37 aa, Artificial Sequence
  GFR-binding peptide
  MOD_RES (34)..(36): Xaa is C or S
  MOD_RES (14)..(15)..(16)..(17)..(18): Xaa is A or G
  MOD_RES (19)..(20)..(21)..(22): Xaa is A or G or is absent
VPTRLEPISILYLXXXXXXXXXKFKYEDMVVESXGXR

SEQ ID NO: 69232 - protein, 39 aa, Artificial Sequence; identical to SEQ ID NO: 6830
  GFR-binding peptide
  MOD_RES (3)..(4)..(37)..(39): Xaa is C or S
  MOD_RES (18)..(19)..(20)..(21)..(22): Xaa is A or G
  MOD_RES (23)..(24)..(25)..(26): Xaa is A or G or is absent

SEQ ID NO: 69233 - protein, 35 aa, Artificial Sequence
  GFR-binding peptide
  MOD_RES (4)..(5): Xaa is C or S
PEPXXVPEKMSPISILYKDENKNVVLKYHYNMTVE

SEQ ID NO: 69234 - protein, 36 aa, Artificial Sequence; identical to SEQ ID NO: 6833
  GFR-binding peptide
  MOD_RES (4)..(5)..(36): Xaa is C or S

SEQ ID NO: 69235 - protein, 36 aa, Artificial Sequence; identical to SEQ ID NO: 14179
  GFR-binding peptide
  MOD_RES (1)..(2)..(36): Xaa is C or S
  MOD_RES (16)..(17)..(18)..(19)..(20): Xaa is A or G
  MOD_RES (21)..(22)..(23)..(24): Xaa is A or G or is absent

SEQ ID NO: 69236 - protein, 36 aa, Artificial Sequence; identical to SEQ ID NO: 57961
  GFR-binding peptide
  MOD_RES (2)..(3)..(35): Xaa is C or S

SEQ ID NO: 69237 - protein, 37 aa, Artificial Sequence; identical to SEQ ID NO: 6837
  GFR-binding peptide
  MOD_RES (1)..(2)..(36): Xaa is C or S
  MOD_RES (16)..(17)..(18)..(19)..(20): Xaa is A or G
  MOD_RES (21)..(22)..(23)..(24): Xaa is A or G or is absent

SEQ ID NO: 69238 - protein, 34 aa, Artificial Sequence; identical to SEQ ID NO: 14180
  GFR-binding peptide
  MOD_RES (1)..(2): Xaa is C or S
  MOD_RES (16)..(17)..(18)..(19)..(20): Xaa is A or G
  MOD_RES (21)..(22)..(23)..(24): Xaa is A or G or is absent

SEQ ID NO: 69239 - protein, 36 aa, Artificial Sequence; identical to SEQ ID NO: 28018
  GFR-binding peptide
  MOD_RES (3)..(4): Xaa is C or S

SEQ ID NO: 69240 - protein, 33 aa, Artificial Sequence; identical to SEQ ID NO: 6840
  GFR-binding peptide
  MOD_RES (1)..(2)..(33): Xaa is C or S

SEQ ID NO: 69241 - protein, 34 aa, Artificial Sequence
  GFR-binding peptide
  MOD_RES (3)..(4): Xaa is C or S
EPXXVPEKMSATSILYYDENKNVVLRKHRNMTVE

SEQ ID NO: 69242 - protein, 38 aa, Artificial Sequence; identical to SEQ ID NO: 6841
  GFR-binding peptide
  MOD_RES (5)..(6): Xaa is C or S
  MOD_RES (20)..(21)..(22)..(23)..(24): Xaa is A or G
  MOD_RES (25)..(26)..(27)..(28): Xaa is A or G or is absent

SEQ ID NO: 69243 - protein, 36 aa, Artificial Sequence
  GFR-binding peptide
  MOD_RES (2)..(3)..(36): Xaa is C or S
  MOD_RES (17)..(18)..(19)..(20)..(21): Xaa is A or G
  MOD_RES (22)..(23)..(24)..(25): Xaa is A or G or is absent
TXXAPVKTSPISMLYKXXXXXXXXXLKYHYMIVEEX

SEQ ID NO: 69244 - protein, 36 aa, Artificial Sequence; identical to SEQ ID NO: 33077
  GFR-binding peptide
  MOD_RES (2)..(3)..(35): Xaa is C or S

SEQ ID NO: 69245 - protein, 35 aa, Artificial Sequence; identical to SEQ ID NO: 33082
  GFR-binding peptide
  MOD_RES (4)..(5): Xaa is C or S

SEQ ID NO: 69246 - protein, 37 aa, Artificial Sequence; identical to SEQ ID NO: 6847
  GFR-binding peptide
  MOD_RES (3)..(4)..(36): Xaa is C or S

SEQ ID NO: 69247 - protein, 39 aa, Artificial Sequence; identical to SEQ ID NO: 6848
  GFR-binding peptide
  MOD_RES (5)..(6)..(38): Xaa is C or S

SEQ ID NO: 69248 - protein, 35 aa, Artificial Sequence; identical to SEQ ID NO: 6849
  GFR-binding peptide
  MOD_RES (1)..(2)..(35): Xaa is C or S
  MOD_RES (16)..(17)..(18)..(19)..(20): Xaa is A or G
  MOD_RES (21)..(22)..(23)..(24): Xaa is A or G or is absent

SEQ ID NO: 69249 - protein, 38 aa, Artificial Sequence; identical to SEQ ID NO: 57976
  GFR-binding peptide
  MOD_RES (1)..(35)..(37): Xaa is C or S
  MOD_RES (15)..(16)..(17)..(18)..(19): Xaa is A or G
  MOD_RES (20)..(21)..(22)..(23): Xaa is A or G or is absent

SEQ ID NO: 69250 - protein, 36 aa, Artificial Sequence; identical to SEQ ID NO: 33093
  GFR-binding peptide
  MOD_RES (2)..(3)..(35): Xaa is C or S

SEQ ID NO: 69251 - protein, 36 aa, Artificial Sequence; identical to SEQ ID NO: 6851
  GFR-binding peptide
  MOD_RES (1)..(33)..(35): Xaa is C or S

SEQ ID NO: 69252 - protein, 39 aa, Artificial Sequence; identical to SEQ ID NO: 6852
  GFR-binding peptide
  MOD_RES (4)..(5)..(37)..(39): Xaa is C or S

SEQ ID NO: 69253 - protein, 41 aa, Artificial Sequence; identical to SEQ ID NO: 28029
  GFR-binding peptide
  MOD_RES (6)..(40): Xaa is C or S
  MOD_RES (20)..(21)..(22)..(23)..(24): Xaa is A or G
  MOD_RES (25)..(26)..(27)..(28): Xaa is A or G or is absent

SEQ ID NO: 69254 - protein, 41 aa, Artificial Sequence; identical to SEQ ID NO: 28030
  GFR-binding peptide
  MOD_RES (3)..(4)..(38)..(40): Xaa is C or S
  MOD_RES (18)..(19)..(20)..(21)..(22): Xaa is A or G
  MOD_RES (23)..(24)..(25)..(26): Xaa is A or G or is absent

SEQ ID NO: 69255 - protein, 41 aa, Artificial Sequence; identical to SEQ ID NO: 6854
  GFR-binding peptide
  MOD_RES (4)..(5)..(39)..(41): Xaa is C or S
  MOD_RES (19)..(20)..(21)..(22)..(23): Xaa is A or G
  MOD_RES (24)..(25)..(26)..(27): Xaa is A or G or is absent

SEQ ID NO: 69256 - protein, 36 aa, Artificial Sequence
  GFR-binding peptide
  MOD_RES (1)..(2)..(36): Xaa is C or S
  MOD_RES (16)..(17)..(18)..(19)..(20): Xaa is A or G
  MOD_RES (21)..(22)..(23)..(24): Xaa is A or G or is absent
XXVPEKMSPISILYKXXXXXXXXXLKYHYNMTVESX

SEQ ID NO: 69257 - protein, 34 aa, Artificial Sequence; identical to SEQ ID NO: 6855
  GFR-binding peptide
  MOD_RES (33)..(33): Xaa is C or S

SEQ ID NO: 69258 - protein, 38 aa, Artificial Sequence; identical to SEQ ID NO: 28031
  GFR-binding peptide
  MOD_RES (4)..(5)..(38): Xaa is C or S
  MOD_RES (19)..(20)..(21)..(22)..(23): Xaa is A or G
  MOD_RES (24)..(25)..(26)..(27): Xaa is A or G or is absent

SEQ ID NO: 69259 - protein, 33 aa, Artificial Sequence; identical to SEQ ID NO: 28032
  GFR-binding peptide
  MOD_RES (1)..(1): Xaa is C or S
  MOD_RES (15)..(16)..(17)..(18)..(19): Xaa is A or G
  MOD_RES (20)..(21)..(22)..(23): Xaa is A or G or is absent

SEQ ID NO: 69260 - protein, 41 aa, Artificial Sequence
  GFR-binding peptide
  MOD_RES (3)..(4)..(38)..(40): Xaa is C or S
  MOD_RES (18)..(19)..(20)..(21)..(22): Xaa is A or G
  MOD_RES (23)..(24)..(25)..(26): Xaa is A or G or is absent
PTXXVPTRLEPISILYLXXXXXXXXXKFKYEDMVVESXGXR

SEQ ID NO: 69261 - protein, 40 aa, Artificial Sequence
  GFR-binding peptide
  MOD_RES (4)..(5)..(37)..(39): Xaa is C or S
PPTXXVPTRLSATSILYYDSANNVVLRKHRDMVVESXGXR

SEQ ID NO: 69262 - protein, 41 aa, Artificial Sequence; identical to SEQ ID NO: 33105
  GFR-binding peptide
  MOD_RES (7)..(41): Xaa is C or S
  MOD_RES (21)..(22)..(23)..(24)..(25): Xaa is A or G
  MOD_RES (26)..(27)..(28)..(29): Xaa is A or G or is absent

SEQ ID NO: 69263 - protein, 39 aa, Artificial Sequence; identical to SEQ ID NO: 33109
  GFR-binding peptide
  MOD_RES (4)..(5)..(37)..(39): Xaa is C or S

SEQ ID NO: 69264 - protein, 35 aa, Artificial Sequence; identical to SEQ ID NO: 6860
  GFR-binding peptide
  MOD_RES (3)..(4)..(35): Xaa is C or S

SEQ ID NO: 69265 - protein, 34 aa, Artificial Sequence; identical to SEQ ID NO: 6861
  GFR-binding peptide
  MOD_RES (2)..(3): Xaa is C or S

SEQ ID NO: 69266 - protein, 40 aa, Artificial Sequence
  GFR-binding peptide
  MOD_RES (5)..(6)..(37)..(39): Xaa is C or S
SASPXXVPQDLSPINILYFVGRTPKVYGKIPMVVKSXKXS

SEQ ID NO: 69267 - protein, 36 aa, Artificial Sequence; identical to SEQ ID NO: 28040
  GFR-binding peptide
  MOD_RES (4)..(5): Xaa is C or S

SEQ ID NO: 69268 - protein, 37 aa, Artificial Sequence; identical to SEQ ID NO: 6863
  GFR-binding peptide
  MOD_RES (4)..(5): Xaa is C or S
  MOD_RES (19)..(20)..(21)..(22)..(23): Xaa is A or G
  MOD_RES (24)..(25)..(26)..(27): Xaa is A or G or is absent

SEQ ID NO: 69269 - protein, 34 aa, Artificial Sequence; identical to SEQ ID NO: 28042
  GFR-binding peptide
  MOD_RES (33)..(33): Xaa is C or S
  MOD_RES (14)..(15)..(16)..(17)..(18): Xaa is A or G
  MOD_RES (19)..(20)..(21)..(22): Xaa is A or G or is absent

SEQ ID NO: 69270 - protein, 32 aa, Artificial Sequence; identical to SEQ ID NO: 28043
  GFR-binding peptide
  MOD_RES (1)..(2): Xaa is C or S

SEQ ID NO: 69271 - protein, 35 aa, Artificial Sequence; identical to SEQ ID NO: 6865
  GFR-binding peptide
  MOD_RES (1)..(2)..(35): Xaa is C or S
  MOD_RES (16)..(17)..(18)..(19)..(20): Xaa is A or G
  MOD_RES (21)..(22)..(23)..(24): Xaa is A or G or is absent

SEQ ID NO: 69272 - protein, 40 aa, Artificial Sequence
  GFR-binding peptide
  MOD_RES (2)..(3)..(37)..(39): Xaa is C or S
  MOD_RES (17)..(18)..(19)..(20)..(21): Xaa is A or G
  MOD_RES (22)..(23)..(24)..(25): Xaa is A or G or is absent
PXXVPEKMSPISILYKXXXXXXXXXLKYHYNMTVESXAXR

SEQ ID NO: 69273 - protein, 37 aa, Artificial Sequence; identical to SEQ ID NO: 6868
  GFR-binding peptide
  MOD_RES (6)..(6): Xaa is C or S

SEQ ID NO: 69274 - protein, 36 aa, Artificial Sequence; identical to SEQ ID NO: 28046
  GFR-binding peptide
  MOD_RES (5)..(6): Xaa is C or S

SEQ ID NO: 69275 - protein, 40 aa, Artificial Sequence; identical to SEQ ID NO: 6869
  GFR-binding peptide
  MOD_RES (3)..(4)..(37)..(39): Xaa is C or S
  MOD_RES (18)..(19)..(20)..(21)..(22): Xaa is A or G
  MOD_RES (23)..(24)..(25)..(26): Xaa is A or G or is absent

SEQ ID NO: 69276 - protein, 35 aa, Artificial Sequence; identical to SEQ ID NO: 6871
  GFR-binding peptide
  MOD_RES (1)..(2): Xaa is C or S
  MOD_RES (16)..(17)..(18)..(19)..(20): Xaa is A or G
  MOD_RES (21)..(22)..(23)..(24): Xaa is A or G or is absent

SEQ ID NO: 69277 - protein, 37 aa, Artificial Sequence; identical to SEQ ID NO: 28050
  GFR-binding peptide
  MOD_RES (4)..(5): Xaa is C or S
  MOD_RES (19)..(20)..(21)..(22)..(23): Xaa is A or G
  MOD_RES (24)..(25)..(26)..(27): Xaa is A or G or is absent

SEQ ID NO: 69278 - protein, 34 aa, Artificial Sequence; identical to SEQ ID NO: 33119
  GFR-binding peptide
  MOD_RES (1)..(2)..(34): Xaa is C or S

SEQ ID NO: 69279 - protein, 40 aa, Artificial Sequence; identical to SEQ ID NO: 33121
  GFR-binding peptide
  MOD_RES (5)..(6)..(40): Xaa is C or S
  MOD_RES (20)..(21)..(22)..(23)..(24): Xaa is A or G
  MOD_RES (25)..(26)..(27)..(28): Xaa is A or G or is absent

SEQ ID NO: 69280 - protein, 34 aa, Artificial Sequence
  GFR-binding peptide
  MOD_RES (34)..(34): Xaa is C or S
  MOD_RES (14)..(15)..(16)..(17)..(18): Xaa is A or G
  MOD_RES (19)..(20)..(21)..(22): Xaa is A or G or is absent
VPEKMSATSILYYXXXXXXXXXLRKHRNMTVESX

SEQ ID NO: 69281 - protein, 38 aa, Artificial Sequence; identical to SEQ ID NO: 6878
  GFR-binding peptide
  MOD_RES (3)..(4): Xaa is C or S
  MOD_RES (18)..(19)..(20)..(21)..(22): Xaa is A or G
  MOD_RES (23)..(24)..(25)..(26): Xaa is A or G or is absent

SEQ ID NO: 69282 - protein, 40 aa, Artificial Sequence; identical to SEQ ID NO: 33136
  GFR-binding peptide
  MOD_RES (4)..(5)..(37)..(39): Xaa is C or S

SEQ ID NO: 69283 - protein, 32 aa, Artificial Sequence
  GFR-binding peptide
  MOD_RES (1)..(1): Xaa is C or S
XVPEKMEPISILYLDENKNVVKFKYENMTVES

SEQ ID NO: 69284 - protein, 40 aa, Artificial Sequence
  GFR-binding peptide
  MOD_RES (4)..(5)..(39): Xaa is C or S
  MOD_RES (19)..(20)..(21)..(22)..(23): Xaa is A or G
  MOD_RES (24)..(25)..(26)..(27): Xaa is A or G or is absent
AGPXXTPTKMSPISMLYKXXXXXXXXXLKYHYGMVVDRXG

SEQ ID NO: 69285 - protein, 35 aa, Artificial Sequence; identical to SEQ ID NO: 28057
  GFR-binding peptide
  MOD_RES (34)..(34): Xaa is C or S
  MOD_RES (14)..(15)..(16)..(17)..(18): Xaa is A or G
  MOD_RES (19)..(20)..(21)..(22): Xaa is A or G or is absent

SEQ ID NO: 69286 - protein, 42 aa, Artificial Sequence; identical to SEQ ID NO: 28061
  GFR-binding peptide
  MOD_RES (5)..(6)..(39)..(41): Xaa is C or S

SEQ ID NO: 69287 - protein, 35 aa, Artificial Sequence; identical to SEQ ID NO: 28062
  GFR-binding peptide
  MOD_RES (32)..(34): Xaa is C or S

SEQ ID NO: 69288 - protein, 37 aa, Artificial Sequence
  GFR-binding peptide
  MOD_RES (3)..(4): Xaa is C or S
  MOD_RES (18)..(19)..(20)..(21)..(22): Xaa is A or G
  MOD_RES (23)..(24)..(25)..(26): Xaa is A or G or is absent
EPXXVPEKMSPINILYFXXXXXXXXXYGKIPNMTVES

SEQ ID NO: 69289 - protein, 42 aa, Artificial Sequence; identical to SEQ ID NO: 6881
  GFR-binding peptide
  MOD_RES (6)..(7)..(39)..(41): Xaa is C or S

SEQ ID NO: 69290 - protein, 36 aa, Artificial Sequence; identical to SEQ ID NO: 6882
  GFR-binding peptide
  MOD_RES (2)..(3)..(36): Xaa is C or S
  MOD_RES (17)..(18)..(19)..(20)..(21): Xaa is A or G
  MOD_RES (22)..(23)..(24)..(25): Xaa is A or G or is absent

SEQ ID NO: 69291 - protein, 33 aa, Artificial Sequence
  GFR-binding peptide
  MOD_RES (32)..(32): Xaa is C or S
VPARLSATSILYYDAANNVVLRKHRDMVVEAXG

SEQ ID NO: 69292 - protein, 37 aa, Artificial Sequence; identical to SEQ ID NO: 6888
  GFR-binding peptide
  MOD_RES (4)..(5)..(36): Xaa is C or S

SEQ ID NO: 69293 - protein, 34 aa, Artificial Sequence; identical to SEQ ID NO: 28067
  GFR-binding peptide
  MOD_RES (2)..(3)..(34): Xaa is C or S

SEQ ID NO: 69294 - protein, 44 aa, Artificial Sequence; identical to SEQ ID NO: 33144
  GFR-binding peptide
  MOD_RES (6)..(7)..(41)..(43): Xaa is C or S
  MOD_RES (21)..(22)..(23)..(24)..(25): Xaa is A or G
  MOD_RES (26)..(27)..(28)..(29): Xaa is A or G or is absent

SEQ ID NO: 69295 - protein, 35 aa, Artificial Sequence; identical to SEQ ID NO: 6891
  GFR-binding peptide
  MOD_RES (1)..(1): Xaa is C or S
  MOD_RES (15)..(16)..(17)..(18)..(19): Xaa is A or G
  MOD_RES (20)..(21)..(22)..(23): Xaa is A or G or is absent

SEQ ID NO: 69296 - protein, 33 aa, Artificial Sequence; identical to SEQ ID NO: 28071
  GFR-binding peptide
  MOD_RES (1)..(1): Xaa is C or S
  MOD_RES (15)..(16)..(17)..(18)..(19): Xaa is A or G
  MOD_RES (20)..(21)..(22)..(23): Xaa is A or G or is absent

SEQ ID NO: 69297 - protein, 32 aa, Artificial Sequence; identical to SEQ ID NO: 58016
  GFR-binding peptide
  MOD_RES (1)..(32): Xaa is C or S

SEQ ID NO: 69298 - protein, 38 aa, Artificial Sequence
  GFR-binding peptide
  MOD_RES (4)..(5): Xaa is C or S
  MOD_RES (19)..(20)..(21)..(22)..(23): Xaa is A or G
  MOD_RES (24)..(25)..(26)..(27): Xaa is A or G or is absent
PEPXXVPEKMSPINILYFXXXXXXXXXYGKIPNMTVES

SEQ ID NO: 69299 - protein, 37 aa, Artificial Sequence; identical to SEQ ID NO: 28074
  GFR-binding peptide
  MOD_RES (1)..(2)..(36): Xaa is C or S
  MOD_RES (16)..(17)..(18)..(19)..(20): Xaa is A or G
  MOD_RES (21)..(22)..(23)..(24): Xaa is A or G or is absent

SEQ ID NO: 69300 - protein, 38 aa, Artificial Sequence; identical to SEQ ID NO: 6898
  GFR-binding peptide
  MOD_RES (2)..(3)..(36)..(38): Xaa is C or S
  MOD_RES (17)..(18)..(19)..(20)..(21): Xaa is A or G
  MOD_RES (22)..(23)..(24)..(25): Xaa is A or G or is absent

SEQ ID NO: 69301 - protein, 35 aa, Artificial Sequence; identical to SEQ ID NO: 28082
  GFR-binding peptide
  MOD_RES (3)..(4): Xaa is C or S

SEQ ID NO: 69302 - protein, 33 aa, Artificial Sequence; identical to SEQ ID NO: 6899
  GFR-binding peptide
  MOD_RES (1)..(2): Xaa is C or S

SEQ ID NO: 69303 - protein, 37 aa, Artificial Sequence
  GFR-binding peptide
  MOD_RES (2)..(3)..(35)..(37): Xaa is C or S
PXXVPEKMSPISILYKDENKNVVLKYHYNMTVESXAX

SEQ ID NO: 69304 - protein, 33 aa, Artificial Sequence
  GFR-binding peptide
  MOD_RES (1)..(2)..(33): Xaa is C or S
XXAPVKTSATSMLYYDNGRVLLLRKHRMIVEEX

SEQ ID NO: 69305 - protein, 40 aa, Artificial Sequence; identical to SEQ ID NO: 6902
  GFR-binding peptide
  MOD_RES (2)..(3)..(37)..(39): Xaa is C or S
  MOD_RES (17)..(18)..(19)..(20)..(21): Xaa is A or G
  MOD_RES (22)..(23)..(24)..(25): Xaa is A or G or is absent

SEQ ID NO: 69306 - protein, 31 aa, Artificial Sequence; identical to SEQ ID NO: 33166
  GFR-binding peptide
  MOD_RES (1)..(1): Xaa is C or S

SEQ ID NO: 69307 - protein, 36 aa, Artificial Sequence
  GFR-binding peptide
  MOD_RES (1)..(33)..(35): Xaa is C or S
XVPEKMEPISILYLDENKNVVKFKYENMTVESXAXR

SEQ ID NO: 69308 - protein, 36 aa, Artificial Sequence; identical to SEQ ID NO: 33169
  GFR-binding peptide
  MOD_RES (2)..(36): Xaa is C or S
  MOD_RES (16)..(17)..(18)..(19)..(20): Xaa is A or G
  MOD_RES (21)..(22)..(23)..(24): Xaa is A or G or is absent

SEQ ID NO: 69309 - protein, 32 aa, Artificial Sequence; identical to SEQ ID NO: 6905
  GFR-binding peptide
  MOD_RES (14)..(15)..(16)..(17)..(18): Xaa is A or G
  MOD_RES (19)..(20)..(21)..(22): Xaa is A or G or is absent

SEQ ID NO: 69310 - protein, 34 aa, Artificial Sequence; identical to SEQ ID NO: 28093
  GFR-binding peptide
  MOD_RES (1)..(1): Xaa is C or S
  MOD_RES (15)..(16)..(17)..(18)..(19): Xaa is A or G
  MOD_RES (20)..(21)..(22)..(23): Xaa is A or G or is absent

SEQ ID NO: 69311 - protein, 35 aa, Artificial Sequence; identical to SEQ ID NO: 58037
  GFR-binding peptide
  MOD_RES (1)..(32)..(34): Xaa is C or S

SEQ ID NO: 69312 - protein, 41 aa, Artificial Sequence
  GFR-binding peptide
  MOD_RES (6)..(7)..(41): Xaa is C or S
  MOD_RES (21)..(22)..(23)..(24)..(25): Xaa is A or G
  MOD_RES (26)..(27)..(28)..(29): Xaa is A or G or is absent
STPPTXXVPTRLSATSILYYXXXXXXXXXLRKHRDMVVESX

SEQ ID NO: 69313 - protein, 40 aa, Artificial Sequence; identical to SEQ ID NO: 6908
  GFR-binding peptide
  MOD_RES (6)..(7)..(39): Xaa is C or S

SEQ ID NO: 69314 - protein, 41 aa, Artificial Sequence; identical to SEQ ID NO: 58039
  GFR-binding peptide
  MOD_RES (4)..(5)..(39)..(41): Xaa is C or S
  MOD_RES (19)..(20)..(21)..(22)..(23): Xaa is A or G
  MOD_RES (24)..(25)..(26)..(27): Xaa is A or G or is absent

SEQ ID NO: 69315 - protein, 42 aa, Artificial Sequence; identical to SEQ ID NO: 28097
  GFR-binding peptide
  MOD_RES (6)..(7)..(39)..(41): Xaa is C or S

SEQ ID NO: 69316 - protein, 36 aa, Artificial Sequence; identical to SEQ ID NO: 6912
  GFR-binding peptide
  MOD_RES (34)..(36): Xaa is C or S
  MOD_RES (14)..(15)..(16)..(17)..(18): Xaa is A or G
  MOD_RES (19)..(20)..(21)..(22): Xaa is A or G or is absent

SEQ ID NO: 69317 - protein, 37 aa, Artificial Sequence
  GFR-binding peptide
  MOD_RES (2)..(3)..(37): Xaa is C or S
  MOD_RES (17)..(18)..(19)..(20)..(21): Xaa is A or G
  MOD_RES (22)..(23)..(24)..(25): Xaa is A or G or is absent
TXXVPTRLEPISILYLXXXXXXXXXKFKYEDMVVESX

SEQ ID NO: 69318 - protein, 36 aa, Artificial Sequence
  GFR-binding peptide
  MOD_RES (1)..(2)..(33)..(35): Xaa is C or S
XXAPVKTEPISMLYLDNGRVLLKFKYEMIVEEXGXL

SEQ ID NO: 69319 - protein, 39 aa, Artificial Sequence; identical to SEQ ID NO: 6914
  GFR-binding peptide
  MOD_RES (6)..(7)..(39): Xaa is C or S

SEQ ID NO: 69320 - protein, 35 aa, Artificial Sequence; identical to SEQ ID NO: 6915
  GFR-binding peptide
  MOD_RES (34)..(34): Xaa is C or S
  MOD_RES (14)..(15)..(16)..(17)..(18): Xaa is A or G
  MOD_RES (19)..(20)..(21)..(22): Xaa is A or G or is absent

SEQ ID NO: 69321 - protein, 31 aa, Artificial Sequence; identical to SEQ ID NO: 6916
  GFR-binding peptide
  MOD_RES (1)..(1): Xaa is C or S

SEQ ID NO: 69322 - protein, 40 aa, Artificial Sequence; identical to SEQ ID NO: 33183
  GFR-binding peptide
  MOD_RES (5)..(6)..(40): Xaa is C or S
  MOD_RES (20)..(21)..(22)..(23)..(24): Xaa is A or G
  MOD_RES (25)..(26)..(27)..(28): Xaa is A or G or is absent

SEQ ID NO: 69323 - protein, 37 aa, Artificial Sequence; identical to SEQ ID NO: 14258
  GFR-binding peptide
  MOD_RES (3)..(4): Xaa is C or S
  MOD_RES (18)..(19)..(20)..(21)..(22): Xaa is A or G
  MOD_RES (23)..(24)..(25)..(26): Xaa is A or G or is absent

SEQ ID NO: 69324 - protein, 35 aa, Artificial Sequence
  GFR-binding peptide
  MOD_RES (1)..(2)..(34): Xaa is C or S
XXVPTRLSPISILYKDSANNVVLKYHYDMVVESXG

SEQ ID NO: 69325 - protein, 40 aa, Artificial Sequence; identical to SEQ ID NO: 6918
  GFR-binding peptide
  MOD_RES (4)..(5)..(38)..(40): Xaa is C or S
  MOD_RES (19)..(20)..(21)..(22)..(23): Xaa is A or G
  MOD_RES (24)..(25)..(26)..(27): Xaa is A or G or is absent

SEQ ID NO: 69326 - protein, 35 aa, Artificial Sequence
  GFR-binding peptide
  MOD_RES (4)..(5): Xaa is C or S
PSTXXAPVKTSPISMLYKDNGRVLLLKYHYMIVEE

SEQ ID NO: 69327 - protein, 38 aa, Artificial Sequence; identical to SEQ ID NO: 33191
  GFR-binding peptide
  MOD_RES (1)..(2)..(35)..(37): Xaa is C or S

SEQ ID NO: 69328 - protein, 39 aa, Artificial Sequence; identical to SEQ ID NO: 28107
  GFR-binding peptide
  MOD_RES (6)..(7): Xaa is C or S
  MOD_RES (21)..(22)..(23)..(24)..(25): Xaa is A or G
  MOD_RES (26)..(27)..(28)..(29): Xaa is A or G or is absent

SEQ ID NO: 69329 - protein, 37 aa, Artificial Sequence
  GFR-binding peptide
  MOD_RES (1)..(34)..(36): Xaa is C or S
  MOD_RES (15)..(16)..(17)..(18)..(19): Xaa is A or G
  MOD_RES (20)..(21)..(22)..(23): Xaa is A or G or is absent
XVPQALSPINILYFXXXXXXXXXYGKIPMIVRSXKXS

SEQ ID NO: 69330 - protein, 40 aa, Artificial Sequence; identical to SEQ ID NO: 6925
  GFR-binding peptide
  MOD_RES (2)..(3)..(37)..(39): Xaa is C or S
  MOD_RES (17)..(18)..(19)..(20)..(21): Xaa is A or G
  MOD_RES (22)..(23)..(24)..(25): Xaa is A or G or is absent

SEQ ID NO: 69331 - protein, 38 aa, Artificial Sequence; identical to SEQ ID NO: 28112
  GFR-binding peptide
  MOD_RES (4)..(5): Xaa is C or S
  MOD_RES (19)..(20)..(21)..(22)..(23): Xaa is A or G
  MOD_RES (24)..(25)..(26)..(27): Xaa is A or G or is absent

SEQ ID NO: 69332 - protein, 38 aa, Artificial Sequence; identical to SEQ ID NO: 6930
  GFR-binding peptide
  MOD_RES (6)..(7)..(38): Xaa is C or S

SEQ ID NO: 69333 - protein, 32 aa, Artificial Sequence
  GFR-binding peptide
  MOD_RES (1)..(2): Xaa is C or S
XXAPVKTSATSMLYYDNGRVLLLRKHRMIVEE

SEQ ID NO: 69334 - protein, 38 aa, Artificial Sequence; identical to SEQ ID NO: 6932
  GFR-binding peptide
  MOD_RES (1)..(35)..(37): Xaa is C or S
  MOD_RES (15)..(16)..(17)..(18)..(19): Xaa is A or G
  MOD_RES (20)..(21)..(22)..(23): Xaa is A or G or is absent

SEQ ID NO: 69335 - protein, 35 aa, Artificial Sequence
  GFR-binding peptide
  MOD_RES (4)..(5): Xaa is C or S
PEPXXVPEKMSPINILYFDENKNVVYGKIPNMTVE

SEQ ID NO: 69336 - protein, 36 aa, Artificial Sequence
  GFR-binding peptide
  MOD_RES (1)..(33)..(35): Xaa is C or S
XTPTKMSATSMLYYNDKQQIILRKHRGMVVDRXGXS

SEQ ID NO: 69337 - protein, 35 aa, Artificial Sequence; identical to SEQ ID NO: 33209
  GFR-binding peptide
  MOD_RES (2)..(3): Xaa is C or S
  MOD_RES (17)..(18)..(19)..(20)..(21): Xaa is A or G
  MOD_RES (22)..(23)..(24)..(25): Xaa is A or G or is absent

SEQ ID NO: 69338 - protein, 32 aa, Artificial Sequence; identical to SEQ ID NO: 6938
  GFR-binding peptide
  MOD_RES (14)..(15)..(16)..(17)..(18): Xaa is A or G
  MOD_RES (19)..(20)..(21)..(22): Xaa is A or G or is absent

SEQ ID NO: 69339 - protein, 40 aa, Artificial Sequence; identical to SEQ ID NO: 28121
  GFR-binding peptide
  MOD_RES (6)..(7)..(40): Xaa is C or S

SEQ ID NO: 69340 - protein, 39 aa, Artificial Sequence; identical to SEQ ID NO: 6939
  GFR-binding peptide
  MOD_RES (4)..(5)..(38): Xaa is C or S
  MOD_RES (19)..(20)..(21)..(22)..(23): Xaa is A or G
  MOD_RES (24)..(25)..(26)..(27): Xaa is A or G or is absent

SEQ ID NO: 69341 - protein, 42 aa, Artificial Sequence; identical to SEQ ID NO: 58061
  GFR-binding peptide
  MOD_RES (5)..(6)..(39)..(41): Xaa is C or S
  MOD_RES (20)..(21)..(22)..(23)..(24): Xaa is A or G
  MOD_RES (25)..(26)..(27)..(28): Xaa is A or G or is absent

SEQ ID NO: 69342 - protein, 39 aa, Artificial Sequence; identical to SEQ ID NO: 28123
  GFR-binding peptide
  MOD_RES (3)..(4)..(36)..(38): Xaa is C or S

SEQ ID NO: 69343 - protein, 38 aa, Artificial Sequence; identical to SEQ ID NO: 28124
  GFR-binding peptide
  MOD_RES (1)..(2)..(37): Xaa is C or S
  MOD_RES (16)..(17)..(18)..(19)..(20): Xaa is A or G
  MOD_RES (21)..(22)..(23)..(24): Xaa is A or G or is absent

SEQ ID NO: 69344 - protein, 37 aa, Artificial Sequence; identical to SEQ ID NO: 6941
  GFR-binding peptide
  MOD_RES (2)..(3)..(35)..(37): Xaa is C or S

SEQ ID NO: 69345 - protein, 38 aa, Artificial Sequence; identical to SEQ ID NO: 28126
  GFR-binding peptide
  MOD_RES (3)..(4)..(37): Xaa is C or S
  MOD_RES (18)..(19)..(20)..(21)..(22): Xaa is A or G
  MOD_RES (23)..(24)..(25)..(26): Xaa is A or G or is absent

SEQ ID NO: 69346 - protein, 39 aa, Artificial Sequence
  GFR-binding peptide
  MOD_RES (5)..(6)..(39): Xaa is C or S
  MOD_RES (20)..(21)..(22)..(23)..(24): Xaa is A or G
  MOD_RES (25)..(26)..(27)..(28): Xaa is A or G or is absent
SAAPXXVPQALSPINILYFXXXXXXXXXYGKIPMIVRSX

SEQ ID NO: 69347 - protein, 41 aa, Artificial Sequence; identical to SEQ ID NO: 33217
  GFR-binding peptide
  MOD_RES (6)..(7)..(41): Xaa is C or S
  MOD_RES (21)..(22)..(23)..(24)..(25): Xaa is A or G
  MOD_RES (26)..(27)..(28)..(29): Xaa is A or G or is absent

SEQ ID NO: 69348 - protein, 42 aa, Artificial Sequence; identical to SEQ ID NO: 33218
  GFR-binding peptide
  MOD_RES (5)..(6)..(40)..(42): Xaa is C or S
  MOD_RES (20)..(21)..(22)..(23)..(24): Xaa is A or G
  MOD_RES (25)..(26)..(27)..(28): Xaa is A or G or is absent

SEQ ID NO: 69349 - protein, 40 aa, Artificial Sequence; identical to SEQ ID NO: 6948
  GFR-binding peptide
  MOD_RES (6)..(7)..(40): Xaa is C or S
  MOD_RES (21)..(22)..(23)..(24)..(25): Xaa is A or G
  MOD_RES (26)..(27)..(28)..(29): Xaa is A or G or is absent

SEQ ID NO: 69350 - protein, 35 aa, Artificial Sequence; identical to SEQ ID NO: 6950
  GFR-binding peptide
  MOD_RES (33)..(35): Xaa is C or S
  MOD_RES (14)..(15)..(16)..(17)..(18): Xaa is A or G
  MOD_RES (19)..(20)..(21)..(22): Xaa is A or G or is absent

SEQ ID NO: 69351 - protein, 40 aa, Artificial Sequence
  GFR-binding peptide
  MOD_RES (5)..(6)..(39): Xaa is C or S
  MOD_RES (20)..(21)..(22)..(23)..(24): Xaa is A or G
  MOD_RES (25)..(26)..(27)..(28): Xaa is A or G or is absent
SASPXXVPQDLSPINILYFXXXXXXXXXYGKIPMVVKSXK

SEQ ID NO: 69352 - protein, 41 aa, Artificial Sequence; identical to SEQ ID NO: 6953
  GFR-binding peptide
  MOD_RES (5)..(6)..(40): Xaa is C or S
  MOD_RES (20)..(21)..(22)..(23)..(24): Xaa is A or G
  MOD_RES (25)..(26)..(27)..(28): Xaa is A or G or is absent

SEQ ID NO: 69353 - protein, 34 aa, Artificial Sequence; identical to SEQ ID NO: 6956
  GFR-binding peptide
  MOD_RES (3)..(4): Xaa is C or S

SEQ ID NO: 69354 - protein, 37 aa, Artificial Sequence; identical to SEQ ID NO: 28140
  GFR-binding peptide
  MOD_RES (4)..(5)..(37): Xaa is C or S

SEQ ID NO: 69355 - protein, 33 aa, Artificial Sequence; identical to SEQ ID NO: 33227
  GFR-binding peptide
  MOD_RES (33)..(33): Xaa is C or S

SEQ ID NO: 69356 - protein, 34 aa, Artificial Sequence; identical to SEQ ID NO: 6959
  GFR-binding peptide
  MOD_RES (3)..(3): Xaa is C or S

SEQ ID NO: 69357 - protein, 37 aa, Artificial Sequence; identical to SEQ ID NO: 6961
  GFR-binding peptide
  MOD_RES (1)..(34)..(36): Xaa is C or S
  MOD_RES (15)..(16)..(17)..(18)..(19): Xaa is A or G
  MOD_RES (20)..(21)..(22)..(23): Xaa is A or G or is absent

SEQ ID NO: 69358 - protein, 43 aa, Artificial Sequence; identical to SEQ ID NO: 28146
  GFR-binding peptide
  MOD_RES (6)..(7)..(41)..(43): Xaa is C or S
  MOD_RES (21)..(22)..(23)..(24)..(25): Xaa is A or G
  MOD_RES (26)..(27)..(28)..(29): Xaa is A or G or is absent

SEQ ID NO: 69359 - protein, 41 aa, Artificial Sequence; identical to SEQ ID NO: 6964
  GFR-binding peptide
  MOD_RES (6)..(40): Xaa is C or S
  MOD_RES (20)..(21)..(22)..(23)..(24): Xaa is A or G
  MOD_RES (25)..(26)..(27)..(28): Xaa is A or G or is absent

SEQ ID NO: 69360 - protein, 40 aa, Artificial Sequence; identical to SEQ ID NO: 6967
  GFR-binding peptide
  MOD_RES (4)..(5)..(38)..(40): Xaa is C or S
  MOD_RES (19)..(20)..(21)..(22)..(23): Xaa is A or G
  MOD_RES (24)..(25)..(26)..(27): Xaa is A or G or is absent

SEQ ID NO: 69361 - protein, 37 aa, Artificial Sequence; identical to SEQ ID NO: 6968
  GFR-binding peptide
  MOD_RES (3)..(4)..(36): Xaa is C or S

SEQ ID NO: 69362 - protein, 37 aa, Artificial Sequence
  GFR-binding peptide
  MOD_RES (4)..(5): Xaa is C or S
  MOD_RES (19)..(20)..(21)..(22)..(23): Xaa is A or G
  MOD_RES (24)..(25)..(26)..(27): Xaa is A or G or is absent
AAPXXVPQALSPINILYFXXXXXXXXXYGKIPMIVRS

SEQ ID NO: 69363 - protein, 34 aa, Artificial Sequence; identical to SEQ ID NO: 33232
  GFR-binding peptide
  MOD_RES (1)..(33): Xaa is C or S

SEQ ID NO: 69364 - protein, 38 aa, Artificial Sequence; identical to SEQ ID NO: 6977
  GFR-binding peptide
  MOD_RES (5)..(6)..(37): Xaa is C or S

SEQ ID NO: 69365 - protein, 37 aa, Artificial Sequence; identical to SEQ ID NO: 33237
  GFR-binding peptide
  MOD_RES (4)..(5)..(37): Xaa is C or S

SEQ ID NO: 69366 - protein, 33 aa, Artificial Sequence
  GFR-binding peptide
  MOD_RES (1)..(1): Xaa is C or S
  MOD_RES (15)..(16)..(17)..(18)..(19): Xaa is A or G
  MOD_RES (20)..(21)..(22)..(23): Xaa is A or G or is absent
XAPVKTSATSMLYYXXXXXXXXXLRKHRMIVEE

SEQ ID NO: 69367 - protein, 37 aa, Artificial Sequence
  GFR-binding peptide
  MOD_RES (2)..(3)..(35)..(37): Xaa is C or S
AXXVPTKLSATSILYYDKGVVTYLRKHRGMAVSEXGX

SEQ ID NO: 69368 - protein, 33 aa, Artificial Sequence; identical to SEQ ID NO: 6985
  GFR-binding peptide
  MOD_RES (31)..(33): Xaa is C or S

SEQ ID NO: 69369 - protein, 35 aa, Artificial Sequence
  GFR-binding peptide
  MOD_RES (1)..(2)..(34): Xaa is C or S
XXVPEKMSATSILYYDENKNVVLRKHRNMTVESXA

SEQ ID NO: 69370 - protein, 42 aa, Artificial Sequence
  GFR-binding peptide
  MOD_RES (6)..(7)..(40)..(42): Xaa is C or S
  MOD_RES (21)..(22)..(23)..(24)..(25): Xaa is A or G
  MOD_RES (26)..(27)..(28)..(29): Xaa is A or G or is absent
RVPSTXXAPVKTSPISMLYKXXXXXXXXXLKYHYMIVEEXGX

SEQ ID NO: 69371 - protein, 31 aa, Artificial Sequence; identical to SEQ ID NO: 6986
  GFR-binding peptide
  MOD_RES (1)..(1): Xaa is C or S

SEQ ID NO: 69372 - protein, 35 aa, Artificial Sequence
  GFR-binding peptide
  MOD_RES (32)..(34): Xaa is C or S
VPTRLSPISILYKDSANNVVLKYHYDMVVESXGXR

SEQ ID NO: 69373 - protein, 33 aa, Artificial Sequence; identical to SEQ ID NO: 28166
  GFR-binding peptide
  MOD_RES (32)..(32): Xaa is C or S

SEQ ID NO: 69374 - protein, 36 aa, Artificial Sequence
  GFR-binding peptide
  MOD_RES (3)..(4): Xaa is C or S
  MOD_RES (18)..(19)..(20)..(21)..(22): Xaa is A or G
  MOD_RES (23)..(24)..(25)..(26): Xaa is A or G or is absent
EPXXVPEKMNAISILYFXXXXXXXXXLKKYRNMTVE

SEQ ID NO: 69375 - protein, 38 aa, Artificial Sequence; identical to SEQ ID NO: 6989
  GFR-binding peptide
  MOD_RES (4)..(5)..(37): Xaa is C or S

SEQ ID NO: 69376 - protein, 40 aa, Artificial Sequence; identical to SEQ ID NO: 28170
  GFR-binding peptide
  MOD_RES (4)..(5)..(39): Xaa is C or S
  MOD_RES (19)..(20)..(21)..(22)..(23): Xaa is A or G
  MOD_RES (24)..(25)..(26)..(27): Xaa is A or G or is absent

SEQ ID NO: 69377 - protein, 41 aa, Artificial Sequence; identical to SEQ ID NO: 33256
  GFR-binding peptide
  MOD_RES (6)..(7)..(41): Xaa is C or S
  MOD_RES (21)..(22)..(23)..(24)..(25): Xaa is A or G
  MOD_RES (26)..(27)..(28)..(29): Xaa is A or G or is absent

SEQ ID NO: 69378 - protein, 34 aa, Artificial Sequence; identical to SEQ ID NO: 7001
  GFR-binding peptide
  MOD_RES (1)..(32)..(34): Xaa is C or S

SEQ ID NO: 69379 - protein, 37 aa, Artificial Sequence; identical to SEQ ID NO: 7003
  GFR-binding peptide
  MOD_RES (3)..(4)..(36): Xaa is C or S

SEQ ID NO: 69380 - protein, 38 aa, Artificial Sequence; identical to SEQ ID NO: 28180
  GFR-binding peptide
  MOD_RES (2)..(3)..(37): Xaa is C or S
  MOD_RES (17)..(18)..(19)..(20)..(21): Xaa is A or G
  MOD_RES (22)..(23)..(24)..(25): Xaa is A or G or is absent

SEQ ID NO: 69381 - protein, 35 aa, Artificial Sequence
  GFR-binding peptide
  MOD_RES (4)..(5): Xaa is C or S
PPTXXVPTRLSPISILYKDSANNVVLKYHYDMVVE

SEQ ID NO: 69382 - protein, 36 aa, Artificial Sequence; identical to SEQ ID NO: 33264
  GFR-binding peptide
  MOD_RES (4)..(5)..(36): Xaa is C or S

SEQ ID NO: 69383 - protein, 36 aa, Artificial Sequence
  GFR-binding peptide
  MOD_RES (4)..(5): Xaa is C or S
SKAXXVPTKLSATSILYYDKGVVTYLRKHRGMAVSE

SEQ ID NO: 69384 - protein, 35 aa, Artificial Sequence; identical to SEQ ID NO: 33265
  GFR-binding peptide
  MOD_RES (2)..(3)..(35): Xaa is C or S

SEQ ID NO: 69385 - protein, 33 aa, Artificial Sequence
  GFR-binding peptide
  MOD_RES (1)..(2)..(33): Xaa is C or S
XXAPVKTSPISMLYKDNGRVLLLKYHYMIVEEX

SEQ ID NO: 69386 - protein, 31 aa, Artificial Sequence; identical to SEQ ID NO: 33267
  GFR-binding peptide
  MOD_RES (1)..(1): Xaa is C or S

SEQ ID NO: 69387 - protein, 38 aa, Artificial Sequence; identical to SEQ ID NO: 7004
  GFR-binding peptide
  MOD_RES (5)..(6): Xaa is C or S
  MOD_RES (20)..(21)..(22)..(23)..(24): Xaa is A or G
  MOD_RES (25)..(26)..(27)..(28): Xaa is A or G or is absent

SEQ ID NO: 69388 - protein, 33 aa, Artificial Sequence; identical to SEQ ID NO: 33269
  GFR-binding peptide
  MOD_RES (1)..(33): Xaa is C or S

SEQ ID NO: 69389 - protein, 37 aa, Artificial Sequence; identical to SEQ ID NO: 28189
  GFR-binding peptide
  MOD_RES (4)..(5)..(36): Xaa is C or S

SEQ ID NO: 69390 - protein, 37 aa, Artificial Sequence
  GFR-binding peptide
  MOD_RES (1)..(2)..(36): Xaa is C or S
  MOD_RES (16)..(17)..(18)..(19)..(20): Xaa is A or G
  MOD_RES (21)..(22)..(23)..(24): Xaa is A or G or is absent
XXVPTRLSPISILYKXXXXXXXXXLKYHYDMVVESXG

SEQ ID NO: 69391 - protein, 34 aa, Artificial Sequence; identical to SEQ ID NO: 33270
  GFR-binding peptide
  MOD_RES (1)..(1): Xaa is C or S
  MOD_RES (15)..(16)..(17)..(18)..(19): Xaa is A or G
  MOD_RES (20)..(21)..(22)..(23): Xaa is A or G or is absent

SEQ ID NO: 69392 - protein, 38 aa, Artificial Sequence; identical to SEQ ID NO: 7012
  GFR-binding peptide
  MOD_RES (3)..(4)..(35)..(37): Xaa is C or S

SEQ ID NO: 69393 - protein, 34 aa, Artificial Sequence; identical to SEQ ID NO: 28191
  GFR-binding peptide
  MOD_RES (1)..(2)..(34): Xaa is C or S

SEQ ID NO: 69394 - protein, 34 aa, Artificial Sequence; identical to SEQ ID NO: 7014
  GFR-binding peptide
  MOD_RES (1)..(34): Xaa is C or S
  MOD_RES (15)..(16)..(17)..(18)..(19): Xaa is A or G
  MOD_RES (20)..(21)..(22)..(23): Xaa is A or G or is absent

SEQ ID NO: 69395 - protein, 32 aa, Artificial Sequence
  GFR-binding peptide
  MOD_RES (1)..(1): Xaa is C or S
XVPARLSATSILYYDAANNVVLRKHRDMVVEA

SEQ ID NO: 69396 - protein, 34 aa, Artificial Sequence; identical to SEQ ID NO: 7016
  GFR-binding peptide
  MOD_RES (1)..(33): Xaa is C or S

SEQ ID NO: 69397 - protein, 35 aa, Artificial Sequence
  GFR-binding peptide
  MOD_RES (1)..(35): Xaa is C or S
  MOD_RES (15)..(16)..(17)..(18)..(19): Xaa is A or G
  MOD_RES (20)..(21)..(22)..(23): Xaa is A or G or is absent
XVPEKMSATSILYYXXXXXXXXXLRKHRNMTVESX

SEQ ID NO: 69398 - protein, 35 aa, Artificial Sequence; identical to SEQ ID NO: 33278
  GFR-binding peptide
  MOD_RES (32)..(34): Xaa is C or S

SEQ ID NO: 69399 - protein, 34 aa, Artificial Sequence; identical to SEQ ID NO: 28197
  GFR-binding peptide
  MOD_RES (1)..(33): Xaa is C or S

SEQ ID NO: 69400 - protein, 34 aa, Artificial Sequence; identical to SEQ ID NO: 7020
  GFR-binding peptide
  MOD_RES (34)..(34): Xaa is C or S
  MOD_RES (14)..(15)..(16)..(17)..(18): Xaa is A or G
  MOD_RES (19)..(20)..(21)..(22): Xaa is A or G or is absent

SEQ ID NO: 69401 - protein, 36 aa, Artificial Sequence; identical to SEQ ID NO: 7023
  GFR-binding peptide
  MOD_RES (1)..(35): Xaa is C or S
  MOD_RES (15)..(16)..(17)..(18)..(19): Xaa is A or G
  MOD_RES (20)..(21)..(22)..(23): Xaa is A or G or is absent

SEQ ID NO: 69402 - protein, 34 aa, Artificial Sequence
  GFR-binding peptide
  MOD_RES (3)..(4): Xaa is C or S
PTXXVPTRLSATSILYYDSANNVVLRKHRDMVVE

SEQ ID NO: 69403 - protein, 36 aa, Artificial Sequence; identical to SEQ ID NO: 7024
  GFR-binding peptide
  MOD_RES (2)..(3): Xaa is C or S
  MOD_RES (17)..(18)..(19)..(20)..(21): Xaa is A or G
  MOD_RES (22)..(23)..(24)..(25): Xaa is A or G or is absent

SEQ ID NO: 69404 - protein, 36 aa, Artificial Sequence; identical to SEQ ID NO: 7025
  GFR-binding peptide
  MOD_RES (1)..(2)..(34)..(36): Xaa is C or S

SEQ ID NO: 69405 - protein, 42 aa, Artificial Sequence; identical to SEQ ID NO: 7026
  GFR-binding peptide
  MOD_RES (4)..(5)..(39)..(41): Xaa is C or S
  MOD_RES (19)..(20)..(21)..(22)..(23): Xaa is A or G
  MOD_RES (24)..(25)..(26)..(27): Xaa is A or G or is absent

SEQ ID NO: 69406 - protein, 38 aa, Artificial Sequence
  GFR-binding peptide
  MOD_RES (4)..(5): Xaa is C or S
  MOD_RES (19)..(20)..(21)..(22)..(23): Xaa is A or G
  MOD_RES (24)..(25)..(26)..(27): Xaa is A or G or is absent
PEPXXVPEKMSATSILYYXXXXXXXXXLRKHRNMTVES

SEQ ID NO: 69407 - protein, 36 aa, Artificial Sequence
  GFR-binding peptide
  MOD_RES (1)..(35): Xaa is C or S
  MOD_RES (15)..(16)..(17)..(18)..(19): Xaa is A or G
  MOD_RES (20)..(21)..(22)..(23): Xaa is A or G or is absent
XVPTKLSATSILYYXXXXXXXXXLRKHRGMAVSEXG

SEQ ID NO: 69408 - protein, 39 aa, Artificial Sequence; identical to SEQ ID NO: 7027
  GFR-binding peptide
  MOD_RES (6)..(6): Xaa is C or S
  MOD_RES (20)..(21)..(22)..(23)..(24): Xaa is A or G
  MOD_RES (25)..(26)..(27)..(28): Xaa is A or G or is absent

SEQ ID NO: 69409 - protein, 38 aa, Artificial Sequence
  GFR-binding peptide
  MOD_RES (2)..(3)..(37): Xaa is C or S
  MOD_RES (17)..(18)..(19)..(20)..(21): Xaa is A or G
  MOD_RES (22)..(23)..(24)..(25): Xaa is A or G or is absent
TXXVPTRLSPISILYKXXXXXXXXXLKYHYDMVVESXG

SEQ ID NO: 69410 - protein, 41 aa, Artificial Sequence; identical to SEQ ID NO: 7031
  GFR-binding peptide
  MOD_RES (5)..(6)..(39)..(41): Xaa is C or S
  MOD_RES (20)..(21)..(22)..(23)..(24): Xaa is A or G
  MOD_RES (25)..(26)..(27)..(28): Xaa is A or G or is absent

SEQ ID NO: 69411 - protein, 34 aa, Artificial Sequence; identical to SEQ ID NO: 28205
  GFR-binding peptide
  MOD_RES (32)..(34): Xaa is C or S

SEQ ID NO: 69412 - protein, 37 aa, Artificial Sequence; identical to SEQ ID NO: 7034
  GFR-binding peptide
  MOD_RES (2)..(3)..(35)..(37): Xaa is C or S

SEQ ID NO: 69413 - protein, 34 aa, Artificial Sequence; identical to SEQ ID NO: 28207
  GFR-binding peptide
  MOD_RES (32)..(34): Xaa is C or S

SEQ ID NO: 69414 - protein, 38 aa, Artificial Sequence; identical to SEQ ID NO: 7035
  GFR-binding peptide
  MOD_RES (1)..(2)..(37): Xaa is C or S
  MOD_RES (16)..(17)..(18)..(19)..(20): Xaa is A or G
  MOD_RES (21)..(22)..(23)..(24): Xaa is A or G or is absent

SEQ ID NO: 69415 - protein, 38 aa, Artificial Sequence; identical to SEQ ID NO: 33294
  GFR-binding peptide
  MOD_RES (3)..(4)..(38): Xaa is C or S
  MOD_RES (18)..(19)..(20)..(21)..(22): Xaa is A or G
  MOD_RES (23)..(24)..(25)..(26): Xaa is A or G or is absent

SEQ ID NO: 69416 - protein, 32 aa, Artificial Sequence; identical to SEQ ID NO: 28214
  GFR-binding peptide
  MOD_RES (1)..(2): Xaa is C or S

SEQ ID NO: 69417 - protein, 40 aa, Artificial Sequence; identical to SEQ ID NO: 7041
  GFR-binding peptide
  MOD_RES (4)..(5)..(37)..(39): Xaa is C or S

SEQ ID NO: 69418 - protein, 33 aa, Artificial Sequence; identical to SEQ ID NO: 7042
  GFR-binding peptide
  MOD_RES (1)..(32): Xaa is C or S

SEQ ID NO: 69419 - protein, 38 aa, Artificial Sequence
  GFR-binding peptide
  MOD_RES (3)..(4)..(38): Xaa is C or S
  MOD_RES (18)..(19)..(20)..(21)..(22): Xaa is A or G
  MOD_RES (23)..(24)..(25)..(26): Xaa is A or G or is absent
GPXXTPTKMSPISMLYKXXXXXXXXXLKYHYGMVVDRX

SEQ ID NO: 69420 - protein, 41 aa, Artificial Sequence; identical to SEQ ID NO: 28223
  GFR-binding peptide
  MOD_RES (3)..(4)..(38)..(40): Xaa is C or S
  MOD_RES (18)..(19)..(20)..(21)..(22): Xaa is A or G
  MOD_RES (23)..(24)..(25)..(26): Xaa is A or G or is absent

SEQ ID NO: 69421 - protein, 37 aa, Artificial Sequence
  GFR-binding peptide
  MOD_RES (5)..(6): Xaa is C or S
ASKAXXVPTKLSATSILYYDKGVVTYLRKHRGMAVSE

SEQ ID NO: 69422 - protein, 31 aa, Artificial Sequence
  GFR-binding peptide
VPEKMSPINILYFDENKNVVYGKIPNMTVES

SEQ ID NO: 69423 - protein, 37 aa, Artificial Sequence
  GFR-binding peptide
  MOD_RES (4)..(5): Xaa is C or S
  MOD_RES (19)..(20)..(21)..(22)..(23): Xaa is A or G
  MOD_RES (24)..(25)..(26)..(27): Xaa is A or G or is absent
SKAXXVPTKLSATSILYYXXXXXXXXXLRKHRGMAVS

SEQ ID NO: 69424 - protein, 36 aa, Artificial Sequence
  GFR-binding peptide
  MOD_RES (1)..(2)..(34)..(36): Xaa is C or S
XXTPTKMEPISMLYLNDKQQIIKFKYEGMVVDRXGX

SEQ ID NO: 69425 - protein, 43 aa, Artificial Sequence; identical to SEQ ID NO: 7049
  GFR-binding peptide
  MOD_RES (6)..(7)..(40)..(42): Xaa is C or S
  MOD_RES (21)..(22)..(23)..(24)..(25): Xaa is A or G
  MOD_RES (26)..(27)..(28)..(29): Xaa is A or G or is absent

SEQ ID NO: 69426 - protein, 36 aa, Artificial Sequence
  GFR-binding peptide
  MOD_RES (34)..(36): Xaa is C or S
  MOD_RES (14)..(15)..(16)..(17)..(18): Xaa is A or G
  MOD_RES (19)..(20)..(21)..(22): Xaa is A or G or is absent
VPTRLSATSILYYXXXXXXXXXLRKHRDMVVESXGX

SEQ ID NO: 69427 - protein, 39 aa, Artificial Sequence; identical to SEQ ID NO: 14375
  GFR-binding peptide
  MOD_RES (6)..(7): Xaa is C or S
  MOD_RES (21)..(22)..(23)..(24)..(25): Xaa is A or G
  MOD_RES (26)..(27)..(28)..(29): Xaa is A or G or is absent

SEQ ID NO: 69428 - protein, 33 aa, Artificial Sequence
  GFR-binding peptide
  MOD_RES (1)..(33): Xaa is C or S
XVPEKMNAISILYFDENKNVVLKKYRNMTVESX

SEQ ID NO: 69429 - protein, 39 aa, Artificial Sequence; identical to SEQ ID NO: 7057
  GFR-binding peptide
  MOD_RES (4)..(5)..(38): Xaa is C or S
  MOD_RES (19)..(20)..(21)..(22)..(23): Xaa is A or G
  MOD_RES (24)..(25)..(26)..(27): Xaa is A or G or is absent

SEQ ID NO: 69430 - protein, 35 aa, Artificial Sequence; identical to SEQ ID NO: 7058
  GFR-binding peptide
  MOD_RES (34)..(34): Xaa is C or S
  MOD_RES (14)..(15)..(16)..(17)..(18): Xaa is A or G
  MOD_RES (19)..(20)..(21)..(22): Xaa is A or G or is absent

SEQ ID NO: 69431 - protein, 34 aa, Artificial Sequence; identical to SEQ ID NO: 28239
  GFR-binding peptide
  MOD_RES (1)..(34): Xaa is C or S

SEQ ID NO: 69432 - protein, 41 aa, Artificial Sequence; identical to SEQ ID NO: 7059
  GFR-binding peptide
  MOD_RES (6)..(7)..(38)..(40): Xaa is C or S

SEQ ID NO: 69433 - protein, 34 aa, Artificial Sequence
  GFR-binding peptide
  MOD_RES (1)..(2)..(34): Xaa is C or S
XXVPEKMNAISILYFDENKNVVLKKYRNMTVESX

SEQ ID NO: 69434 - protein, 36 aa, Artificial Sequence; identical to SEQ ID NO: 7060
  GFR-binding peptide
  MOD_RES (1)..(2)..(35): Xaa is C or S

SEQ ID NO: 69435 - protein, 36 aa, Artificial Sequence
  GFR-binding peptide
  MOD_RES (3)..(4): Xaa is C or S
  MOD_RES (18)..(19)..(20)..(21)..(22): Xaa is A or G
  MOD_RES (23)..(24)..(25)..(26): Xaa is A or G or is absent
APXXVPQALSPINILYFXXXXXXXXXYGKIPMIVRS

SEQ ID NO: 69436 - protein, 39 aa, Artificial Sequence; identical to SEQ ID NO: 7064
  GFR-binding peptide
  MOD_RES (6)..(7)..(39): Xaa is C or S

SEQ ID NO: 69437 - protein, 34 aa, Artificial Sequence; identical to SEQ ID NO: 7065
  GFR-binding peptide
  MOD_RES (1)..(2): Xaa is C or S
  MOD_RES (16)..(17)..(18)..(19)..(20): Xaa is A or G
  MOD_RES (21)..(22)..(23)..(24): Xaa is A or G or is absent

SEQ ID NO: 69438 - protein, 39 aa, Artificial Sequence; identical to SEQ ID NO: 7067
  GFR-binding peptide
  MOD_RES (3)..(4)..(37)..(39): Xaa is C or S
  MOD_RES (18)..(19)..(20)..(21)..(22): Xaa is A or G
  MOD_RES (23)..(24)..(25)..(26): Xaa is A or G or is absent

SEQ ID NO: 69439 - protein, 39 aa, Artificial Sequence; identical to SEQ ID NO: 7068
  GFR-binding peptide
  MOD_RES (2)..(36)..(38): Xaa is C or S
  MOD_RES (16)..(17)..(18)..(19)..(20): Xaa is A or G
  MOD_RES (21)..(22)..(23)..(24): Xaa is A or G or is absent

SEQ ID NO: 69440 - protein, 33 aa, Artificial Sequence; identical to SEQ ID NO: 7069
  GFR-binding peptide
  MOD_RES (1)..(2): Xaa is C or S

SEQ ID NO: 69441 - protein, 36 aa, Artificial Sequence
  GFR-binding peptide
  MOD_RES (1)..(2)..(34)..(36): Xaa is C or S
XXVPTKLSATSILYYDKGVVTYLRKHRGMAVSEXGX

SEQ ID NO: 69442 - protein, 31 aa, Artificial Sequence; identical to SEQ ID NO: 7074
  GFR-binding peptide
  MOD_RES (31)..(31): Xaa is C or S

SEQ ID NO: 69443 - protein, 42 aa, Artificial Sequence
  GFR-binding peptide
  MOD_RES (6)..(7)..(41): Xaa is C or S
  MOD_RES (21)..(22)..(23)..(24)..(25): Xaa is A or G
  MOD_RES (26)..(27)..(28)..(29): Xaa is A or G or is absent
GSAGPXXTPTKMSPISMLYKXXXXXXXXXLKYHYGMVVDRXG

SEQ ID NO: 69444 - protein, 39 aa, Artificial Sequence; identical to SEQ ID NO: 28253
  GFR-binding peptide
  MOD_RES (3)..(4)..(38): Xaa is C or S
  MOD_RES (18)..(19)..(20)..(21)..(22): Xaa is A or G
  MOD_RES (23)..(24)..(25)..(26): Xaa is A or G or is absent

SEQ ID NO: 69445 - protein, 39 aa, Artificial Sequence
  GFR-binding peptide
  MOD_RES (5)..(6): Xaa is C or S
  MOD_RES (20)..(21)..(22)..(23)..(24): Xaa is A or G
  MOD_RES (25)..(26)..(27)..(28): Xaa is A or G or is absent
SAGPXXTPTKMSATSMLYYXXXXXXXXXLRKHRGMVVDR

SEQ ID NO: 69446 - protein, 36 aa, Artificial Sequence; identical to SEQ ID NO: 7077
  GFR-binding peptide
  MOD_RES (2)..(3)..(34)..(36): Xaa is C or S

SEQ ID NO: 69447 - protein, 36 aa, Artificial Sequence; identical to SEQ ID NO: 28255
  GFR-binding peptide
  MOD_RES (1)..(33)..(35): Xaa is C or S

SEQ ID NO: 69448 - protein, 41 aa, Artificial Sequence; identical to SEQ ID NO: 28256
  GFR-binding peptide
  MOD_RES (5)..(6)..(40): Xaa is C or S
  MOD_RES (20)..(21)..(22)..(23)..(24): Xaa is A or G
  MOD_RES (25)..(26)..(27)..(28): Xaa is A or G or is absent

SEQ ID NO: 69449 - protein, 34 aa, Artificial Sequence; identical to SEQ ID NO: 7081
  GFR-binding peptide
  MOD_RES (1)..(2)..(33): Xaa is C or S

SEQ ID NO: 69450 - protein, 36 aa, Artificial Sequence; identical to SEQ ID NO: 7083
  GFR-binding peptide
  MOD_RES (2)..(3): Xaa is C or S
  MOD_RES (17)..(18)..(19)..(20)..(21): Xaa is A or G
  MOD_RES (22)..(23)..(24)..(25): Xaa is A or G or is absent

SEQ ID NO: 69451 - protein, 41 aa, Artificial Sequence
  GFR-binding peptide
  MOD_RES (6)..(7)..(40): Xaa is C or S
  MOD_RES (21)..(22)..(23)..(24)..(25): Xaa is A or G
  MOD_RES (26)..(27)..(28)..(29): Xaa is A or G or is absent
ASASPXXVPQDLSPINILYFXXXXXXXXXYGKIPMVVKSXK

SEQ ID NO: 69452 - protein, 33 aa, Artificial Sequence
  GFR-binding peptide
  MOD_RES (1)..(2): Xaa is C or S
XXVPTRLSATSILYYDSANNVVLRKHRDMVVES

SEQ ID NO: 69453 - protein, 41 aa, Artificial Sequence
  GFR-binding peptide
  MOD_RES (4)..(5)..(39)..(41): Xaa is C or S
  MOD_RES (19)..(20)..(21)..(22)..(23): Xaa is A or G
  MOD_RES (24)..(25)..(26)..(27): Xaa is A or G or is absent
PEPXXVPEKMSATSILYYXXXXXXXXXLRKHRNMTVESXAX

SEQ ID NO: 69454 - protein, 37 aa, Artificial Sequence; identical to SEQ ID NO: 33336
  GFR-binding peptide
  MOD_RES (1)..(2)..(36): Xaa is C or S
  MOD_RES (16)..(17)..(18)..(19)..(20): Xaa is A or G
  MOD_RES (21)..(22)..(23)..(24): Xaa is A or G or is absent

SEQ ID NO: 69455 - protein, 35 aa, Artificial Sequence; identical to SEQ ID NO: 7088
  GFR-binding peptide
  MOD_RES (1)..(35): Xaa is C or S
  MOD_RES (15)..(16)..(17)..(18)..(19): Xaa is A or G
  MOD_RES (20)..(21)..(22)..(23): Xaa is A or G or is absent

SEQ ID NO: 69456 - protein, 37 aa, Artificial Sequence; identical to SEQ ID NO: 7089
  GFR-binding peptide
  MOD_RES (1)..(34)..(36): Xaa is C or S
  MOD_RES (15)..(16)..(17)..(18)..(19): Xaa is A or G
  MOD_RES (20)..(21)..(22)..(23): Xaa is A or G or is absent

SEQ ID NO: 69457 - protein, 34 aa, Artificial Sequence; identical to SEQ ID NO: 33340
  GFR-binding peptide
  MOD_RES (1)..(33): Xaa is C or S

SEQ ID NO: 69458 - protein, 30 aa, Artificial Sequence; identical to SEQ ID NO: 33343
  GFR-binding peptide

SEQ ID NO: 69459 - protein, 40 aa, Artificial Sequence
  GFR-binding peptide
  MOD_RES (3)..(4)..(38)..(40): Xaa is C or S
  MOD_RES (18)..(19)..(20)..(21)..(22): Xaa is A or G
  MOD_RES (23)..(24)..(25)..(26): Xaa is A or G or is absent
PTXXVPTRLEPISILYLXXXXXXXXXKFKYEDMVVESXGX

SEQ ID NO: 69460 - protein, 39 aa, Artificial Sequence; identical to SEQ ID NO: 28271
  GFR-binding peptide
  MOD_RES (1)..(2)..(36)..(38): Xaa is C or S
  MOD_RES (16)..(17)..(18)..(19)..(20): Xaa is A or G
  MOD_RES (21)..(22)..(23)..(24): Xaa is A or G or is absent

SEQ ID NO: 69461 - protein, 30 aa, Artificial Sequence; identical to SEQ ID NO: 7098
  GFR-binding peptide

SEQ ID NO: 69462 - protein, 35 aa, Artificial Sequence; identical to SEQ ID NO: 7100
  GFR-binding peptide
  MOD_RES (32)..(34): Xaa is C or S

SEQ ID NO: 69463 - protein, 32 aa, Artificial Sequence; identical to SEQ ID NO: 28280
  GFR-binding peptide
  MOD_RES (14)..(15)..(16)..(17)..(18): Xaa is A or G
  MOD_RES (19)..(20)..(21)..(22): Xaa is A or G or is absent

SEQ ID NO: 69464 - protein, 38 aa, Artificial Sequence
  GFR-binding peptide
  MOD_RES (3)..(4)..(38): Xaa is C or S
  MOD_RES (18)..(19)..(20)..(21)..(22): Xaa is A or G
  MOD_RES (23)..(24)..(25)..(26): Xaa is A or G or is absent
EPXXVPEKMSATSILYYXXXXXXXXXLRKHRNMTVESX

SEQ ID NO: 69465 - protein, 42 aa, Artificial Sequence; identical to SEQ ID NO: 7102
  GFR-binding peptide
  MOD_RES (6)..(7)..(39)..(41): Xaa is C or S

SEQ ID NO: 69466 - protein, 33 aa, Artificial Sequence; identical to SEQ ID NO: 28283
  GFR-binding peptide
  MOD_RES (1)..(33): Xaa is C or S

SEQ ID NO: 69467 - protein, 38 aa, Artificial Sequence; identical to SEQ ID NO: 28284
  GFR-binding peptide
  MOD_RES (1)..(35)..(37): Xaa is C or S
  MOD_RES (15)..(16)..(17)..(18)..(19): Xaa is A or G
  MOD_RES (20)..(21)..(22)..(23): Xaa is A or G or is absent

SEQ ID NO: 69468 - protein, 37 aa, Artificial Sequence
  GFR-binding peptide
  MOD_RES (4)..(5): Xaa is C or S
  MOD_RES (19)..(20)..(21)..(22)..(23): Xaa is A or G
  MOD_RES (24)..(25)..(26)..(27): Xaa is A or G or is absent
PPTXXVPTRLEPISILYLXXXXXXXXXKFKYEDMVVE

SEQ ID NO: 69469 - protein, 41 aa, Artificial Sequence
  GFR-binding peptide
  MOD_RES (4)..(5)..(39)..(41): Xaa is C or S
  MOD_RES (19)..(20)..(21)..(22)..(23): Xaa is A or G
  MOD_RES (24)..(25)..(26)..(27): Xaa is A or G or is absent
PPTXXVPTRLEPISILYLXXXXXXXXXKFKYEDMVVESXGX

SEQ ID NO: 69470 - protein, 37 aa, Artificial Sequence; identical to SEQ ID NO: 7103
  GFR-binding peptide
  MOD_RES (5)..(5): Xaa is C or S
  MOD_RES (19)..(20)..(21)..(22)..(23): Xaa is A or G
  MOD_RES (24)..(25)..(26)..(27): Xaa is A or G or is absent

SEQ ID NO: 69471 - protein, 41 aa, Artificial Sequence
  GFR-binding peptide
  MOD_RES (6)..(7)..(39)..(41): Xaa is C or S
HVPKPXXAPTKLSPISVLYKDDSSNVILKYHYNMVVRSXGX

SEQ ID NO: 69472 - protein, 37 aa, Artificial Sequence; identical to SEQ ID NO: 32304
  GFR-binding peptide
  MOD_RES (5)..(6): Xaa is C or S

SEQ ID NO: 69473 - protein, 44 aa, Artificial Sequence
  GFR-binding peptide
  MOD_RES (6)..(7)..(41)..(43): Xaa is C or S
  MOD_RES (21)..(22)..(23)..(24)..(25): Xaa is A or G
  MOD_RES (26)..(27)..(28)..(29): Xaa is A or G or is absent
STPPTXXVPTRLEPISILYLXXXXXXXXXKFKYEDMVVESXGXR

SEQ ID NO: 69474 - protein, 41 aa, Artificial Sequence; identical to SEQ ID NO: 7108
  GFR-binding peptide
  MOD_RES (6)..(7)..(40): Xaa is C or S

SEQ ID NO: 69475 - protein, 40 aa, Artificial Sequence; identical to SEQ ID NO: 7109
  GFR-binding peptide
  MOD_RES (4)..(5)..(39): Xaa is C or S
  MOD_RES (19)..(20)..(21)..(22)..(23): Xaa is A or G
  MOD_RES (24)..(25)..(26)..(27): Xaa is A or G or is absent

SEQ ID NO: 69476 - protein, 39 aa, Artificial Sequence; identical to SEQ ID NO: 28288
  GFR-binding peptide
  MOD_RES (4)..(5)..(38): Xaa is C or S

SEQ ID NO: 69477 - protein, 33 aa, Artificial Sequence; identical to SEQ ID NO: 7110
  GFR-binding peptide
  MOD_RES (1)..(32): Xaa is C or S

SEQ ID NO: 69478 - protein, 35 aa, Artificial Sequence; identical to SEQ ID NO: 28292
  GFR-binding peptide
  MOD_RES (4)..(5): Xaa is C or S

SEQ ID NO: 69479 - protein, 38 aa, Artificial Sequence; identical to SEQ ID NO: 57245
  GFR-binding peptide
  MOD_RES (6)..(7): Xaa is C or S

SEQ ID NO: 69480 - protein, 37 aa, Artificial Sequence; identical to SEQ ID NO: 28293
  GFR-binding peptide
  MOD_RES (1)..(2)..(36): Xaa is C or S
  MOD_RES (16)..(17)..(18)..(19)..(20): Xaa is A or G
  MOD_RES (21)..(22)..(23)..(24): Xaa is A or G or is absent

SEQ ID NO: 69481 - protein, 38 aa, Artificial Sequence; identical to SEQ ID NO: 28295
  GFR-binding peptide
  MOD_RES (7)..(7): Xaa is C or S

SEQ ID NO: 69482 - protein, 39 aa, Artificial Sequence
  GFR-binding peptide
  MOD_RES (6)..(7): Xaa is C or S
  MOD_RES (21)..(22)..(23)..(24)..(25): Xaa is A or G
  MOD_RES (26)..(27)..(28)..(29): Xaa is A or G or is absent
KASKAXXVPTKLSATSILYYXXXXXXXXXLRKHRGMAVS

SEQ ID NO: 69483 - protein, 37 aa, Artificial Sequence; identical to SEQ ID NO: 7118
  GFR-binding peptide
  MOD_RES (4)..(5)..(37): Xaa is C or S

SEQ ID NO: 69484 - protein, 37 aa, Artificial Sequence; identical to SEQ ID NO: 28297
  GFR-binding peptide
  MOD_RES (5)..(5): Xaa is C or S
  MOD_RES (19)..(20)..(21)..(22)..(23): Xaa is A or G
  MOD_RES (24)..(25)..(26)..(27): Xaa is A or G or is absent

SEQ ID NO: 69485 - protein, 42 aa, Artificial Sequence; identical to SEQ ID NO: 7119
  GFR-binding peptide
  MOD_RES (6)..(7)..(41): Xaa is C or S
  MOD_RES (21)..(22)..(23)..(24)..(25): Xaa is A or G
  MOD_RES (26)..(27)..(28)..(29): Xaa is A or G or is absent

SEQ ID NO: 69486 - protein, 36 aa, Artificial Sequence
  GFR-binding peptide
  MOD_RES (34)..(36): Xaa is C or S
  MOD_RES (14)..(15)..(16)..(17)..(18): Xaa is A or G
  MOD_RES (19)..(20)..(21)..(22): Xaa is A or G or is absent
TPTKMSPISMLYKXXXXXXXXXLKYHYGMVVDRXGX

SEQ ID NO: 69487 - protein, 34 aa, Artificial Sequence; identical to SEQ ID NO: 28298
  GFR-binding peptide
  MOD_RES (1)..(1): Xaa is C or S
  MOD_RES (15)..(16)..(17)..(18)..(19): Xaa is A or G
  MOD_RES (20)..(21)..(22)..(23): Xaa is A or G or is absent

SEQ ID NO: 69488 - protein, 36 aa, Artificial Sequence
  GFR-binding peptide
  MOD_RES (5)..(6): Xaa is C or S
APASXXVPARLSATSILYYDAANNVVLRKHRDMVVE

SEQ ID NO: 69489 - protein, 41 aa, Artificial Sequence; identical to SEQ ID NO: 7121
  GFR-binding peptide
  MOD_RES (5)..(6)..(39)..(41): Xaa is C or S
  MOD_RES (20)..(21)..(22)..(23)..(24): Xaa is A or G
  MOD_RES (25)..(26)..(27)..(28): Xaa is A or G or is absent

SEQ ID NO: 69490 - protein, 39 aa, Artificial Sequence; identical to SEQ ID NO: 57250
  GFR-binding peptide
  MOD_RES (3)..(4)..(37)..(39): Xaa is C or S
  MOD_RES (18)..(19)..(20)..(21)..(22): Xaa is A or G
  MOD_RES (23)..(24)..(25)..(26): Xaa is A or G or is absent

SEQ ID NO: 69491 - protein, 33 aa, Artificial Sequence; identical to SEQ ID NO: 7123
  GFR-binding peptide
  MOD_RES (1)..(32): Xaa is C or S

SEQ ID NO: 69492 - protein, 37 aa, Artificial Sequence; identical to SEQ ID NO: 28305
  GFR-binding peptide
  MOD_RES (1)..(2)..(36): Xaa is C or S
  MOD_RES (16)..(17)..(18)..(19)..(20): Xaa is A or G
  MOD_RES (21)..(22)..(23)..(24): Xaa is A or G or is absent

SEQ ID NO: 69493 - protein, 42 aa, Artificial Sequence; identical to SEQ ID NO: 32329
  GFR-binding peptide
  MOD_RES (5)..(6)..(39)..(41): Xaa is C or S

SEQ ID NO: 69494 - protein, 40 aa, Artificial Sequence; identical to SEQ ID NO: 28306
  GFR-binding peptide
  MOD_RES (6)..(7): Xaa is C or S
  MOD_RES (21)..(22)..(23)..(24)..(25): Xaa is A or G
  MOD_RES (26)..(27)..(28)..(29): Xaa is A or G or is absent

SEQ ID NO: 69495 - protein, 37 aa, Artificial Sequence
  GFR-binding peptide
  MOD_RES (3)..(4)..(36): Xaa is C or S
PTXXVPTRLSPISILYKDSANNVVLKYHYDMVVESXG

SEQ ID NO: 69496 - protein, 35 aa, Artificial Sequence; identical to SEQ ID NO: 28307
  GFR-binding peptide
  MOD_RES (1)..(2)..(35): Xaa is C or S
  MOD_RES (16)..(17)..(18)..(19)..(20): Xaa is A or G
  MOD_RES (21)..(22)..(23)..(24): Xaa is A or G or is absent

SEQ ID NO: 69497 - protein, 38 aa, Artificial Sequence; identical to SEQ ID NO: 28309
  GFR-binding peptide
  MOD_RES (5)..(6): Xaa is C or S
  MOD_RES (20)..(21)..(22)..(23)..(24): Xaa is A or G
  MOD_RES (25)..(26)..(27)..(28): Xaa is A or G or is absent

SEQ ID NO: 69498 - protein, 40 aa, Artificial Sequence; identical to SEQ ID NO: 28310
  GFR-binding peptide
  MOD_RES (4)..(5)..(39): Xaa is C or S
  MOD_RES (19)..(20)..(21)..(22)..(23): Xaa is A or G
  MOD_RES (24)..(25)..(26)..(27): Xaa is A or G or is absent

SEQ ID NO: 69499 - protein, 39 aa, Artificial Sequence; identical to SEQ ID NO: 57264
  GFR-binding peptide
  MOD_RES (4)..(5)..(38): Xaa is C or S
  MOD_RES (19)..(20)..(21)..(22)..(23): Xaa is A or G
  MOD_RES (24)..(25)..(26)..(27): Xaa is A or G or is absent

SEQ ID NO: 69500 - protein, 38 aa, Artificial Sequence; identical to SEQ ID NO: 28315
  GFR-binding peptide
  MOD_RES (1)..(2)..(35)..(37): Xaa is C or S
  MOD_RES (16)..(17)..(18)..(19)..(20): Xaa is A or G
  MOD_RES (21)..(22)..(23)..(24): Xaa is A or G or is absent

SEQ ID NO: 69501 - protein, 31 aa, Artificial Sequence; identical to SEQ ID NO: 7134
  GFR-binding peptide
  MOD_RES (1)..(1): Xaa is C or S

SEQ ID NO: 69502 - protein, 36 aa, Artificial Sequence; identical to SEQ ID NO: 7135
  GFR-binding peptide
  MOD_RES (2)..(3)..(34)..(36): Xaa is C or S

SEQ ID NO: 69503 - protein, 36 aa, Artificial Sequence
  GFR-binding peptide
  MOD_RES (3)..(4): Xaa is C or S
  MOD_RES (18)..(19)..(20)..(21)..(22): Xaa is A or G
  MOD_RES (23)..(24)..(25)..(26): Xaa is A or G or is absent
SPXXVPQDLSPINILYFXXXXXXXXXYGKIPMVVKS

SEQ ID NO: 69504 - protein, 34 aa, Artificial Sequence; identical to SEQ ID NO: 7138
  GFR-binding peptide
  MOD_RES (1)..(34): Xaa is C or S

SEQ ID NO: 69505 - protein, 37 aa, Artificial Sequence
  GFR-binding peptide
  MOD_RES (6)..(7): Xaa is C or S
GIPEPXXVPEKMSPISILYKDENKNVVLKYHYNMTVE

SEQ ID NO: 69506 - protein, 37 aa, Artificial Sequence; identical to SEQ ID NO: 7140
  GFR-binding peptide
  MOD_RES (6)..(7): Xaa is C or S

SEQ ID NO: 69507 - protein, 36 aa, Artificial Sequence
  GFR-binding peptide
  MOD_RES (1)..(33)..(35): Xaa is C or S
XTPTKMEPISMLYLNDKQQIIKFKYEGMVVDRXGXS

SEQ ID NO: 69508 - protein, 41 aa, Artificial Sequence
  GFR-binding peptide
  MOD_RES (5)..(6)..(39)..(41): Xaa is C or S
  MOD_RES (20)..(21)..(22)..(23)..(24): Xaa is A or G
  MOD_RES (25)..(26)..(27)..(28): Xaa is A or G or is absent
SASPXXVSQDLSPINILYFXXXXXXXXXYGKIPMIVKSXKX

SEQ ID NO: 69509 - protein, 40 aa, Artificial Sequence; identical to SEQ ID NO: 7141
  GFR-binding peptide
  MOD_RES (5)..(6)..(40): Xaa is C or S
  MOD_RES (20)..(21)..(22)..(23)..(24): Xaa is A or G
  MOD_RES (25)..(26)..(27)..(28): Xaa is A or G or is absent

SEQ ID NO: 69510 - protein, 34 aa, Artificial Sequence; identical to SEQ ID NO: 7145
  GFR-binding peptide
  MOD_RES (33)..(33): Xaa is C or S

SEQ ID NO: 69511 - protein, 37 aa, Artificial Sequence
  GFR-binding peptide
  MOD_RES (34)..(36): Xaa is C or S
  MOD_RES (14)..(15)..(16)..(17)..(18): Xaa is A or G
  MOD_RES (19)..(20)..(21)..(22): Xaa is A or G or is absent
VPEKMNAISILYFXXXXXXXXXLKKYRNMTVESXAXR

SEQ ID NO: 69512 - protein, 40 aa, Artificial Sequence; identical to SEQ ID NO: 57277
  GFR-binding peptide
  MOD_RES (4)..(5)..(37)..(39): Xaa is C or S

SEQ ID NO: 69513 - protein, 37 aa, Artificial Sequence; identical to SEQ ID NO: 28324
  GFR-binding peptide
  MOD_RES (3)..(4)..(35)..(37): Xaa is C or S

SEQ ID NO: 69514 - protein, 33 aa, Artificial Sequence; identical to SEQ ID NO: 7148
  GFR-binding peptide
  MOD_RES (33)..(33): Xaa is C or S

SEQ ID NO: 69515 - protein, 35 aa, Artificial Sequence; identical to SEQ ID NO: 28326
  GFR-binding peptide
  MOD_RES (2)..(3): Xaa is C or S
  MOD_RES (17)..(18)..(19)..(20)..(21): Xaa is A or G
  MOD_RES (22)..(23)..(24)..(25): Xaa is A or G or is absent

SEQ ID NO: 69516 - protein, 40 aa, Artificial Sequence; identical to SEQ ID NO: 28329
  GFR-binding peptide
  MOD_RES (5)..(37)..(39): Xaa is C or S

SEQ ID NO: 69517 - protein, 40 aa, Artificial Sequence; identical to SEQ ID NO: 7150
  GFR-binding peptide
  MOD_RES (3)..(4)..(38)..(40): Xaa is C or S
  MOD_RES (18)..(19)..(20)..(21)..(22): Xaa is A or G
  MOD_RES (23)..(24)..(25)..(26): Xaa is A or G or is absent

SEQ ID NO: 69518 - protein, 40 aa, Artificial Sequence
  GFR-binding peptide
  MOD_RES (5)..(6)..(38)..(40): Xaa is C or S
SAGPXXTPTKMEPISMLYLNDKQQIIKFKYEGMVVDRXGX

SEQ ID NO: 69519 - protein, 38 aa, Artificial Sequence; identical to SEQ ID NO: 7157
  GFR-binding peptide
  MOD_RES (5)..(5): Xaa is C or S
  MOD_RES (19)..(20)..(21)..(22)..(23): Xaa is A or G
  MOD_RES (24)..(25)..(26)..(27): Xaa is A or G or is absent

SEQ ID NO: 69520 - protein, 35 aa, Artificial Sequence; identical to SEQ ID NO: 7158
  GFR-binding peptide
  MOD_RES (32)..(34): Xaa is C or S

SEQ ID NO: 69521 - protein, 39 aa, Artificial Sequence; identical to SEQ ID NO: 7159
  GFR-binding peptide
  MOD_RES (6)..(7)..(39): Xaa is C or S

SEQ ID NO: 69522 - protein, 42 aa, Artificial Sequence
  GFR-binding peptide
  MOD_RES (5)..(6)..(40)..(42): Xaa is C or S
  MOD_RES (20)..(21)..(22)..(23)..(24): Xaa is A or G
  MOD_RES (25)..(26)..(27)..(28): Xaa is A or G or is absent
IPEPXXVPEKMNAISILYFXXXXXXXXXLKKYRNMTVESXAX

SEQ ID NO: 69523 - protein, 40 aa, Artificial Sequence
  GFR-binding peptide
  MOD_RES (6)..(7)..(39): Xaa is C or S
GSAGPXXTPTKMSATSMLYYNDKQQIILRKHRGMVVDRXG

SEQ ID NO: 69524 - protein, 40 aa, Artificial Sequence
  GFR-binding peptide
  MOD_RES (3)..(4)..(38)..(40): Xaa is C or S
  MOD_RES (18)..(19)..(20)..(21)..(22): Xaa is A or G
  MOD_RES (23)..(24)..(25)..(26): Xaa is A or G or is absent
EPXXVPEKMSPISILYKXXXXXXXXXLKYHYNMTVESXAX

SEQ ID NO: 69525 - protein, 37 aa, Artificial Sequence
  GFR-binding peptide
  MOD_RES (4)..(5)..(37): Xaa is C or S
PEPXXVPEKMNAISILYFDENKNVVLKKYRNMTVESX

SEQ ID NO: 69526 - protein, 35 aa, Artificial Sequence
  GFR-binding peptide
  MOD_RES (1)..(32)..(34): Xaa is C or S
XAPVKTSATSMLYYDNGRVLLLRKHRMIVEEXGXL

SEQ ID NO: 69527 - protein, 39 aa, Artificial Sequence; identical to SEQ ID NO: 7163
  GFR-binding peptide
  MOD_RES (6)..(7)..(38): Xaa is C or S

SEQ ID NO: 69528 - protein, 36 aa, Artificial Sequence
  GFR-binding peptide
  MOD_RES (33)..(35): Xaa is C or S
  MOD_RES (14)..(15)..(16)..(17)..(18): Xaa is A or G
  MOD_RES (19)..(20)..(21)..(22): Xaa is A or G or is absent
APVKTSATSMLYYXXXXXXXXXLRKHRMIVEEXGXL

SEQ ID NO: 69529 - protein, 37 aa, Artificial Sequence; identical to SEQ ID NO: 7169
  GFR-binding peptide
  MOD_RES (1)..(34)..(36): Xaa is C or S
  MOD_RES (15)..(16)..(17)..(18)..(19): Xaa is A or G
  MOD_RES (20)..(21)..(22)..(23): Xaa is A or G or is absent

SEQ ID NO: 69530 - protein, 34 aa, Artificial Sequence
  GFR-binding peptide
  MOD_RES (1)..(1): Xaa is C or S
  MOD_RES (15)..(16)..(17)..(18)..(19): Xaa is A or G
  MOD_RES (20)..(21)..(22)..(23): Xaa is A or G or is absent
XVPTRLSPISILYKXXXXXXXXXLKYHYDMVVES

SEQ ID NO: 69531 - protein, 40 aa, Artificial Sequence; identical to SEQ ID NO: 7172
  GFR-binding peptide
  MOD_RES (4)..(5)..(37)..(39): Xaa is C or S

SEQ ID NO: 69532 - protein, 37 aa, Artificial Sequence; identical to SEQ ID NO: 32377
  GFR-binding peptide
  MOD_RES (5)..(6): Xaa is C or S

SEQ ID NO: 69533 - protein, 41 aa, Artificial Sequence
  GFR-binding peptide
  MOD_RES (6)..(7)..(39)..(41): Xaa is C or S
GSAGPXXTPTKMSPISMLYKNDKQQIILKYHYGMVVDRXGX

SEQ ID NO: 69534 - protein, 35 aa, Artificial Sequence; identical to SEQ ID NO: 7178
  GFR-binding peptide
  MOD_RES (1)..(2)..(33)..(35): Xaa is C or S

SEQ ID NO: 69535 - protein, 40 aa, Artificial Sequence; identical to SEQ ID NO: 7180
  GFR-binding peptide
  MOD_RES (6)..(7): Xaa is C or S
  MOD_RES (21)..(22)..(23)..(24)..(25): Xaa is A or G
  MOD_RES (26)..(27)..(28)..(29): Xaa is A or G or is absent

SEQ ID NO: 69536 - protein, 34 aa, Artificial Sequence
  GFR-binding peptide
  MOD_RES (3)..(4): Xaa is C or S
KAXXVPTKLSATSILYYDKGVVTYLRKHRGMAVS

SEQ ID NO: 69537 - protein, 33 aa, Artificial Sequence; identical to SEQ ID NO: 7181
  GFR-binding peptide
  MOD_RES (1)..(1): Xaa is C or S
  MOD_RES (15)..(16)..(17)..(18)..(19): Xaa is A or G
  MOD_RES (20)..(21)..(22)..(23): Xaa is A or G or is absent

SEQ ID NO: 69538 - protein, 38 aa, Artificial Sequence; identical to SEQ ID NO: 28347
  GFR-binding peptide
  MOD_RES (4)..(5): Xaa is C or S
  MOD_RES (19)..(20)..(21)..(22)..(23): Xaa is A or G
  MOD_RES (24)..(25)..(26)..(27): Xaa is A or G or is absent

SEQ ID NO: 69539 - protein, 43 aa, Artificial Sequence; identical to SEQ ID NO: 7185
  GFR-binding peptide
  MOD_RES (6)..(7)..(41)..(43): Xaa is C or S
  MOD_RES (21)..(22)..(23)..(24)..(25): Xaa is A or G
  MOD_RES (26)..(27)..(28)..(29): Xaa is A or G or is absent

SEQ ID NO: 69540 - protein, 35 aa, Artificial Sequence
  GFR-binding peptide
  MOD_RES (2)..(3)..(35): Xaa is C or S
PXXTPTKMSATSMLYYNDKQQIILRKHRGMVVDRX

SEQ ID NO: 69541 - protein, 31 aa, Artificial Sequence; identical to SEQ ID NO: 32391
  GFR-binding peptide

SEQ ID NO: 69542 - protein, 34 aa, Artificial Sequence; identical to SEQ ID NO: 28354
  GFR-binding peptide
  MOD_RES (3)..(4): Xaa is C or S

SEQ ID NO: 69543 - protein, 40 aa, Artificial Sequence
  GFR-binding peptide
  MOD_RES (5)..(6)..(38)..(40): Xaa is C or S
SAGPXXTPTKMSPISMLYKNDKQQIILKYHYGMVVDRXGX

SEQ ID NO: 69544 - protein, 34 aa, Artificial Sequence; identical to SEQ ID NO: 7189
  GFR-binding peptide
  MOD_RES (2)..(3)..(34): Xaa is C or S

SEQ ID NO: 69545 - protein, 39 aa, Artificial Sequence; identical to SEQ ID NO: 28356
  GFR-binding peptide
  MOD_RES (6)..(7)..(39): Xaa is C or S

SEQ ID NO: 69546 - protein, 36 aa, Artificial Sequence; identical to SEQ ID NO: 28357
  GFR-binding peptide
  MOD_RES (33)..(35): Xaa is C or S

SEQ ID NO: 69547 - protein, 33 aa, Artificial Sequence; identical to SEQ ID NO: 7193
  GFR-binding peptide
  MOD_RES (2)..(3): Xaa is C or S

SEQ ID NO: 69548 - protein, 36 aa, Artificial Sequence
  GFR-binding peptide
  MOD_RES (2)..(3)..(35): Xaa is C or S
PXXTPTKMSATSMLYYNDKQQIILRKHRGMVVDRXG

SEQ ID NO: 69549 - protein, 35 aa, Artificial Sequence; identical to SEQ ID NO: 32400
  GFR-binding peptide
  MOD_RES (1)..(2)..(34): Xaa is C or S

SEQ ID NO: 69550 - protein, 40 aa, Artificial Sequence; identical to SEQ ID NO: 28362
  GFR-binding peptide
  MOD_RES (4)..(5)..(39): Xaa is C or S
  MOD_RES (19)..(20)..(21)..(22)..(23): Xaa is A or G
  MOD_RES (24)..(25)..(26)..(27): Xaa is A or G or is absent

SEQ ID NO: 69551 - protein, 37 aa, Artificial Sequence; identical to SEQ ID NO: 7196
  GFR-binding peptide
  MOD_RES (1)..(2)..(34)..(36): Xaa is C or S

SEQ ID NO: 69552 - protein, 35 aa, Artificial Sequence; identical to SEQ ID NO: 32414
  GFR-binding peptide
  MOD_RES (3)..(4)..(35): Xaa is C or S

SEQ ID NO: 69553 - protein, 39 aa, Artificial Sequence; identical to SEQ ID NO: 28375
  GFR-binding peptide
  MOD_RES (5)..(6)..(38): Xaa is C or S

SEQ ID NO: 69554 - protein, 37 aa, Artificial Sequence; identical to SEQ ID NO: 7206
  GFR-binding peptide
  MOD_RES (4)..(5)..(37): Xaa is C or S

SEQ ID NO: 69555 - protein, 36 aa, Artificial Sequence; identical to SEQ ID NO: 7208
  GFR-binding peptide
  MOD_RES (1)..(2)..(36): Xaa is C or S
  MOD_RES (16)..(17)..(18)..(19)..(20): Xaa is A or G
  MOD_RES (21)..(22)..(23)..(24): Xaa is A or G or is absent

SEQ ID NO: 69556 - protein, 38 aa, Artificial Sequence; identical to SEQ ID NO: 32428
  GFR-binding peptide
  MOD_RES (5)..(6): Xaa is C or S
  MOD_RES (20)..(21)..(22)..(23)..(24): Xaa is A or G
  MOD_RES (25)..(26)..(27)..(28): Xaa is A or G or is absent

SEQ ID NO: 69557 - protein, 40 aa, Artificial Sequence
  GFR-binding peptide
  MOD_RES (5)..(6)..(38)..(40): Xaa is C or S
IPEPXXVPEKMNAISILYFDENKNVVLKKYRNMTVESXAX

SEQ ID NO: 69558 - protein, 33 aa, Artificial Sequence; identical to SEQ ID NO: 28382
  GFR-binding peptide
  MOD_RES (1)..(1): Xaa is C or S

SEQ ID NO: 69559 - protein, 33 aa, Artificial Sequence
  GFR-binding peptide
  MOD_RES (32)..(32): Xaa is C or S
VPEKMSATSILYYDENKNVVLRKHRNMTVESXA

SEQ ID NO: 69560 - protein, 39 aa, Artificial Sequence
  GFR-binding peptide
  MOD_RES (6)..(7): Xaa is C or S
  MOD_RES (21)..(22)..(23)..(24)..(25): Xaa is A or G
  MOD_RES (26)..(27)..(28)..(29): Xaa is A or G or is absent
ASASPXXVSQDLSPINILYFXXXXXXXXXYGKIPMIVKS

SEQ ID NO: 69561 - protein, 33 aa, Artificial Sequence; identical to SEQ ID NO: 32431
  GFR-binding peptide
  MOD_RES (1)..(2): Xaa is C or S

SEQ ID NO: 69562 - protein, 36 aa, Artificial Sequence; identical to SEQ ID NO: 7216
  GFR-binding peptide
  MOD_RES (5)..(6): Xaa is C or S

SEQ ID NO: 69563 - protein, 35 aa, Artificial Sequence; identical to SEQ ID NO: 32440
  GFR-binding peptide
  MOD_RES (1)..(1): Xaa is C or S
  MOD_RES (15)..(16)..(17)..(18)..(19): Xaa is A or G
  MOD_RES (20)..(21)..(22)..(23): Xaa is A or G or is absent

SEQ ID NO: 69564 - protein, 41 aa, Artificial Sequence; identical to SEQ ID NO: 7220
  GFR-binding peptide
  MOD_RES (3)..(4)..(38)..(40): Xaa is C or S
  MOD_RES (18)..(19)..(20)..(21)..(22): Xaa is A or G
  MOD_RES (23)..(24)..(25)..(26): Xaa is A or G or is absent

SEQ ID NO: 69565 - protein, 37 aa, Artificial Sequence
  GFR-binding peptide
  MOD_RES (4)..(5)..(37): Xaa is C or S
PEPXXVPEKMSPISILYKDENKNVVLKYHYNMTVESX

SEQ ID NO: 69566 - protein, 40 aa, Artificial Sequence; identical to SEQ ID NO: 7222
  GFR-binding peptide
  MOD_RES (4)..(5)..(39): Xaa is C or S
  MOD_RES (19)..(20)..(21)..(22)..(23): Xaa is A or G
  MOD_RES (24)..(25)..(26)..(27): Xaa is A or G or is absent

SEQ ID NO: 69567 - protein, 39 aa, Artificial Sequence
  GFR-binding peptide
  MOD_RES (5)..(6)..(38): Xaa is C or S
TPPTXXVPTRLSPISILYKDSANNVVLKYHYDMVVESXG

SEQ ID NO: 69568 - protein, 40 aa, Artificial Sequence; identical to SEQ ID NO: 28389
  GFR-binding peptide
  MOD_RES (5)..(6)..(40): Xaa is C or S
  MOD_RES (20)..(21)..(22)..(23)..(24): Xaa is A or G
  MOD_RES (25)..(26)..(27)..(28): Xaa is A or G or is absent

SEQ ID NO: 69569 - protein, 42 aa, Artificial Sequence; identical to SEQ ID NO: 28390
  GFR-binding peptide
  MOD_RES (6)..(7)..(39)..(41): Xaa is C or S

SEQ ID NO: 69570 - protein, 38 aa, Artificial Sequence; identical to SEQ ID NO: 28393
  GFR-binding peptide
  MOD_RES (4)..(5): Xaa is C or S
  MOD_RES (19)..(20)..(21)..(22)..(23): Xaa is A or G
  MOD_RES (24)..(25)..(26)..(27): Xaa is A or G or is absent

SEQ ID NO: 69571 - protein, 38 aa, Artificial Sequence; identical to SEQ ID NO: 28394
  GFR-binding peptide
  MOD_RES (4)..(5): Xaa is C or S
  MOD_RES (19)..(20)..(21)..(22)..(23): Xaa is A or G
  MOD_RES (24)..(25)..(26)..(27): Xaa is A or G or is absent

SEQ ID NO: 69572 - protein, 36 aa, Artificial Sequence
  GFR-binding peptide
  MOD_RES (1)..(2)..(33)..(35): Xaa is C or S
XXVPQALSPINILYFVGRKPKVYGKIPMIVRSXKXS

SEQ ID NO: 69573 - protein, 36 aa, Artificial Sequence
  GFR-binding peptide
  MOD_RES (2)..(3)..(35): Xaa is C or S
PXXVPEKMSATSILYYDENKNVVLRKHRNMTVESXA

SEQ ID NO: 69574 - protein, 41 aa, Artificial Sequence; identical to SEQ ID NO: 7230
  GFR-binding peptide
  MOD_RES (5)..(6)..(38)..(40): Xaa is C or S

SEQ ID NO: 69575 - protein, 34 aa, Artificial Sequence; identical to SEQ ID NO: 57364
  GFR-binding peptide
  MOD_RES (3)..(4): Xaa is C or S

SEQ ID NO: 69576 - protein, 40 aa, Artificial Sequence
  GFR-binding peptide
  MOD_RES (4)..(5)..(37)..(39): Xaa is C or S
AGPXXTPTKMEPISMLYLNDKQQIIKFKYEGMVVDRXGXS

SEQ ID NO: 69577 - protein, 36 aa, Artificial Sequence; identical to SEQ ID NO: 32463
  GFR-binding peptide
  MOD_RES (2)..(3)..(35): Xaa is C or S

SEQ ID NO: 69578 - protein, 35 aa, Artificial Sequence
  GFR-binding peptide
  MOD_RES (4)..(5): Xaa is C or S
PEPXXVPEKMSATSILYYDENKNVVLRKHRNMTVE

SEQ ID NO: 69579 - protein, 40 aa, Artificial Sequence; identical to SEQ ID NO: 7234
  GFR-binding peptide
  MOD_RES (6)..(7)..(40): Xaa is C or S
  MOD_RES (21)..(22)..(23)..(24)..(25): Xaa is A or G
  MOD_RES (26)..(27)..(28)..(29): Xaa is A or G or is absent

SEQ ID NO: 69580 - protein, 39 aa, Artificial Sequence
  GFR-binding peptide
  MOD_RES (3)..(4)..(38): Xaa is C or S
  MOD_RES (18)..(19)..(20)..(21)..(22): Xaa is A or G
  MOD_RES (23)..(24)..(25)..(26): Xaa is A or G or is absent
PTXXVPTRLSPISILYKXXXXXXXXXLKYHYDMVVESXG

SEQ ID NO: 69581 - protein, 41 aa, Artificial Sequence
  GFR-binding peptide
  MOD_RES (4)..(5)..(38)..(40): Xaa is C or S
  MOD_RES (19)..(20)..(21)..(22)..(23): Xaa is A or G
  MOD_RES (24)..(25)..(26)..(27): Xaa is A or G or is absent
ASPXXVSQDLSPINILYFXXXXXXXXXYGKIPMIVKSXKXS

SEQ ID NO: 69582 - protein, 31 aa, Artificial Sequence
  GFR-binding peptide
  MOD_RES (31)..(31): Xaa is C or S
APVKTSATSMLYYDNGRVLLLRKHRMIVEEX

SEQ ID NO: 69583 - protein, 42 aa, Artificial Sequence; identical to SEQ ID NO: 7235
  GFR-binding peptide
  MOD_RES (6)..(7)..(41): Xaa is C or S
  MOD_RES (21)..(22)..(23)..(24)..(25): Xaa is A or G
  MOD_RES (26)..(27)..(28)..(29): Xaa is A or G or is absent

SEQ ID NO: 69584 - protein, 39 aa, Artificial Sequence; identical to SEQ ID NO: 7236
  GFR-binding peptide
  MOD_RES (6)..(7): Xaa is C or S
  MOD_RES (21)..(22)..(23)..(24)..(25): Xaa is A or G
  MOD_RES (26)..(27)..(28)..(29): Xaa is A or G or is absent

SEQ ID NO: 69585 - protein, 34 aa, Artificial Sequence; identical to SEQ ID NO: 28409
  GFR-binding peptide
  MOD_RES (1)..(33): Xaa is C or S

SEQ ID NO: 69586 - protein, 31 aa, Artificial Sequence; identical to SEQ ID NO: 7238
  GFR-binding peptide

SEQ ID NO: 69587 - protein, 36 aa, Artificial Sequence; identical to SEQ ID NO: 32467
  GFR-binding peptide
  MOD_RES (1)..(2)..(34)..(36): Xaa is C or S

SEQ ID NO: 69588 - protein, 36 aa, Artificial Sequence; identical to SEQ ID NO: 7239
  GFR-binding peptide
  MOD_RES (3)..(4): Xaa is C or S
  MOD_RES (18)..(19)..(20)..(21)..(22): Xaa is A or G
  MOD_RES (23)..(24)..(25)..(26): Xaa is A or G or is absent

SEQ ID NO: 69589 - protein, 39 aa, Artificial Sequence; identical to SEQ ID NO: 7240
  GFR-binding peptide
  MOD_RES (4)..(5)..(39): Xaa is C or S
  MOD_RES (19)..(20)..(21)..(22)..(23): Xaa is A or G
  MOD_RES (24)..(25)..(26)..(27): Xaa is A or G or is absent

SEQ ID NO: 69590 - protein, 41 aa, Artificial Sequence
  GFR-binding peptide
  MOD_RES (5)..(6)..(38)..(40): Xaa is C or S
ASKAXXVPTKLSATSILYYDKGVVTYLRKHRGMAVSEXGXR

SEQ ID NO: 69591 - protein, 40 aa, Artificial Sequence; identical to SEQ ID NO: 32477
  GFR-binding peptide
  MOD_RES (5)..(37)..(39): Xaa is C or S

SEQ ID NO: 69592 - protein, 31 aa, Artificial Sequence; identical to SEQ ID NO: 7242
  GFR-binding peptide

SEQ ID NO: 69593 - protein, 39 aa, Artificial Sequence; identical to SEQ ID NO: 32480
  GFR-binding peptide
  MOD_RES (5)..(6): Xaa is C or S
  MOD_RES (20)..(21)..(22)..(23)..(24): Xaa is A or G
  MOD_RES (25)..(26)..(27)..(28): Xaa is A or G or is absent

SEQ ID NO: 69594 - protein, 39 aa, Artificial Sequence
  GFR-binding peptide
  MOD_RES (3)..(4)..(38): Xaa is C or S
  MOD_RES (18)..(19)..(20)..(21)..(22): Xaa is A or G
  MOD_RES (23)..(24)..(25)..(26): Xaa is A or G or is absent
PTXXVPTRLEPISILYLXXXXXXXXXKFKYEDMVVESXG

SEQ ID NO: 69595 - protein, 40 aa, Artificial Sequence
  GFR-binding peptide
  MOD_RES (5)..(6)..(40): Xaa is C or S
  MOD_RES (20)..(21)..(22)..(23)..(24): Xaa is A or G
  MOD_RES (25)..(26)..(27)..(28): Xaa is A or G or is absent
IPEPXXVPEKMSPISILYKXXXXXXXXXLKYHYNMTVESX

SEQ ID NO: 69596 - protein, 33 aa, Artificial Sequence; identical to SEQ ID NO: 7245
  GFR-binding peptide
  MOD_RES (14)..(15)..(16)..(17)..(18): Xaa is A or G
  MOD_RES (19)..(20)..(21)..(22): Xaa is A or G or is absent

SEQ ID NO: 69597 - protein, 36 aa, Artificial Sequence; identical to SEQ ID NO: 57390
  GFR-binding peptide
  MOD_RES (33)..(35): Xaa is C or S
  MOD_RES (14)..(15)..(16)..(17)..(18): Xaa is A or G
  MOD_RES (19)..(20)..(21)..(22): Xaa is A or G or is absent

SEQ ID NO: 69598 - protein, 32 aa, Artificial Sequence; identical to SEQ ID NO: 28430
  GFR-binding peptide
  MOD_RES (1)..(2): Xaa is C or S

SEQ ID NO: 69599 - protein, 35 aa, Artificial Sequence
  GFR-binding peptide
  MOD_RES (1)..(2): Xaa is C or S
  MOD_RES (16)..(17)..(18)..(19)..(20): Xaa is A or G
  MOD_RES (21)..(22)..(23)..(24): Xaa is A or G or is absent
XXTPTKMSATSMLYYXXXXXXXXXLRKHRGMVVDR

SEQ ID NO: 69600 - protein, 39 aa, Artificial Sequence; identical to SEQ ID NO: 32492
  GFR-binding peptide
  MOD_RES (4)..(5)..(37)..(39): Xaa is C or S

SEQ ID NO: 69601 - protein, 34 aa, Artificial Sequence; identical to SEQ ID NO: 7249
  GFR-binding peptide
  MOD_RES (1)..(1): Xaa is C or S
  MOD_RES (15)..(16)..(17)..(18)..(19): Xaa is A or G
  MOD_RES (20)..(21)..(22)..(23): Xaa is A or G or is absent

SEQ ID NO: 69602 - protein, 35 aa, Artificial Sequence; identical to SEQ ID NO: 28435
  GFR-binding peptide
  MOD_RES (2)..(3)..(35): Xaa is C or S

SEQ ID NO: 69603 - protein, 33 aa, Artificial Sequence; identical to SEQ ID NO: 32495
  GFR-binding peptide
  MOD_RES (32)..(32): Xaa is C or S

SEQ ID NO: 69604 - protein, 39 aa, Artificial Sequence; identical to SEQ ID NO: 32496
  GFR-binding peptide
  MOD_RES (2)..(3)..(37)..(39): Xaa is C or S
  MOD_RES (17)..(18)..(19)..(20)..(21): Xaa is A or G
  MOD_RES (22)..(23)..(24)..(25): Xaa is A or G or is absent

SEQ ID NO: 69605 - protein, 38 aa, Artificial Sequence; identical to SEQ ID NO: 7253
  GFR-binding peptide
  MOD_RES (1)..(2)..(36)..(38): Xaa is C or S
  MOD_RES (16)..(17)..(18)..(19)..(20): Xaa is A or G
  MOD_RES (21)..(22)..(23)..(24): Xaa is A or G or is absent

SEQ ID NO: 69606 - protein, 39 aa, Artificial Sequence
  GFR-binding peptide
  MOD_RES (4)..(5)..(37)..(39): Xaa is C or S
AGPXXTPTKMSATSMLYYNDKQQIILRKHRGMVVDRXGX

SEQ ID NO: 69607 - protein, 36 aa, Artificial Sequence; identical to SEQ ID NO: 57397
  GFR-binding peptide
  MOD_RES (5)..(6): Xaa is C or S

SEQ ID NO: 69608 - protein, 39 aa, Artificial Sequence
  GFR-binding peptide
  MOD_RES (5)..(6)..(38): Xaa is C or S
IPEPXXVPEKMSPISILYKDENKNVVLKYHYNMTVESXA

SEQ ID NO: 69609 - protein, 44 aa, Artificial Sequence; identical to SEQ ID NO: 14555
  GFR-binding peptide
  MOD_RES (6)..(7)..(41)..(43): Xaa is C or S
  MOD_RES (21)..(22)..(23)..(24)..(25): Xaa is A or G
  MOD_RES (26)..(27)..(28)..(29): Xaa is A or G or is absent

SEQ ID NO: 69610 - protein, 43 aa, Artificial Sequence
  GFR-binding peptide
  MOD_RES (5)..(6)..(40)..(42): Xaa is C or S
  MOD_RES (20)..(21)..(22)..(23)..(24): Xaa is A or G
  MOD_RES (25)..(26)..(27)..(28): Xaa is A or G or is absent
TPPTXXVPTRLEPISILYLXXXXXXXXXKFKYEDMVVESXGXR

SEQ ID NO: 69611 - protein, 33 aa, Artificial Sequence
  GFR-binding peptide
  MOD_RES (2)..(3): Xaa is C or S
PXXTPTKMSPISMLYKNDKQQIILKYHYGMVVD

SEQ ID NO: 69612 - protein, 35 aa, Artificial Sequence; identical to SEQ ID NO: 32511
  GFR-binding peptide
  MOD_RES (2)..(3): Xaa is C or S
  MOD_RES (17)..(18)..(19)..(20)..(21): Xaa is A or G
  MOD_RES (22)..(23)..(24)..(25): Xaa is A or G or is absent

SEQ ID NO: 69613 - protein, 42 aa, Artificial Sequence; identical to SEQ ID NO: 7260
  GFR-binding peptide
  MOD_RES (4)..(5)..(40)..(42): Xaa is C or S
  MOD_RES (19)..(20)..(21)..(22)..(23): Xaa is A or G
  MOD_RES (24)..(25)..(26)..(27): Xaa is A or G or is absent

SEQ ID NO: 69614 - protein, 37 aa, Artificial Sequence
  GFR-binding peptide
  MOD_RES (1)..(34)..(36): Xaa is C or S
  MOD_RES (15)..(16)..(17)..(18)..(19): Xaa is A or G
  MOD_RES (20)..(21)..(22)..(23): Xaa is A or G or is absent
XVPQDLSPINILYFXXXXXXXXXYGKIPMVVKSXKXS

SEQ ID NO: 69615 - protein, 38 aa, Artificial Sequence; identical to SEQ ID NO: 28445
  GFR-binding peptide
  MOD_RES (5)..(6)..(37): Xaa is C or S

SEQ ID NO: 69616 - protein, 38 aa, Artificial Sequence; identical to SEQ ID NO: 32514
  GFR-binding peptide
  MOD_RES (4)..(5): Xaa is C or S
  MOD_RES (19)..(20)..(21)..(22)..(23): Xaa is A or G
  MOD_RES (24)..(25)..(26)..(27): Xaa is A or G or is absent

SEQ ID NO: 69617 - protein, 40 aa, Artificial Sequence; identical to SEQ ID NO: 7265
  GFR-binding peptide
  MOD_RES (4)..(5)..(38)..(40): Xaa is C or S

SEQ ID NO: 69618 - protein, 40 aa, Artificial Sequence
  GFR-binding peptide
  MOD_RES (5)..(6)..(40): Xaa is C or S
  MOD_RES (20)..(21)..(22)..(23)..(24): Xaa is A or G
  MOD_RES (25)..(26)..(27)..(28): Xaa is A or G or is absent
TPPTXXVPTRLSPISILYKXXXXXXXXXLKYHYDMVVESX

SEQ ID NO: 69619 - protein, 36 aa, Artificial Sequence
  GFR-binding peptide
  MOD_RES (2)..(3): Xaa is C or S
  MOD_RES (17)..(18)..(19)..(20)..(21): Xaa is A or G
  MOD_RES (22)..(23)..(24)..(25): Xaa is A or G or is absent
TXXVPTRLSPISILYKXXXXXXXXXLKYHYDMVVES

SEQ ID NO: 69620 - protein, 33 aa, Artificial Sequence; identical to SEQ ID NO: 7267
  GFR-binding peptide
  MOD_RES (1)..(2): Xaa is C or S

SEQ ID NO: 69621 - protein, 43 aa, Artificial Sequence; identical to SEQ ID NO: 28448
  GFR-binding peptide
  MOD_RES (5)..(6)..(40)..(42): Xaa is C or S
  MOD_RES (20)..(21)..(22)..(23)..(24): Xaa is A or G
  MOD_RES (25)..(26)..(27)..(28): Xaa is A or G or is absent

SEQ ID NO: 69622 - protein, 40 aa, Artificial Sequence; identical to SEQ ID NO: 7273
  GFR-binding peptide
  MOD_RES (4)..(38)..(40): Xaa is C or S
  MOD_RES (18)..(19)..(20)..(21)..(22): Xaa is A or G
  MOD_RES (23)..(24)..(25)..(26): Xaa is A or G or is absent

SEQ ID NO: 69623 - protein, 40 aa, Artificial Sequence; identical to SEQ ID NO: 28451
  GFR-binding peptide
  MOD_RES (4)..(5)..(39): Xaa is C or S
  MOD_RES (19)..(20)..(21)..(22)..(23): Xaa is A or G
  MOD_RES (24)..(25)..(26)..(27): Xaa is A or G or is absent

SEQ ID NO: 69624 - protein, 38 aa, Artificial Sequence
  GFR-binding peptide
  MOD_RES (4)..(5)..(36)..(38): Xaa is C or S
PSTXXAPVKTSPISMLYKDNGRVLLLKYHYMIVEEXGX

SEQ ID NO: 69625 - protein, 33 aa, Artificial Sequence
  GFR-binding peptide
  MOD_RES (33)..(33): Xaa is C or S
  MOD_RES (14)..(15)..(16)..(17)..(18): Xaa is A or G
  MOD_RES (19)..(20)..(21)..(22): Xaa is A or G or is absent
VPQDLSPINILYFXXXXXXXXXYGKIPMVVKSX

SEQ ID NO: 69626 - protein, 33 aa, Artificial Sequence; identical to SEQ ID NO: 28454
  GFR-binding peptide
  MOD_RES (1)..(1): Xaa is C or S
  MOD_RES (15)..(16)..(17)..(18)..(19): Xaa is A or G
  MOD_RES (20)..(21)..(22)..(23): Xaa is A or G or is absent

SEQ ID NO: 69627 - protein, 36 aa, Artificial Sequence; identical to SEQ ID NO: 32524
  GFR-binding peptide
  MOD_RES (33)..(35): Xaa is C or S

SEQ ID NO: 69628 - protein, 41 aa, Artificial Sequence; identical to SEQ ID NO: 7278
  GFR-binding peptide
  MOD_RES (4)..(5)..(38)..(40): Xaa is C or S
  MOD_RES (19)..(20)..(21)..(22)..(23): Xaa is A or G
  MOD_RES (24)..(25)..(26)..(27): Xaa is A or G or is absent

SEQ ID NO: 69629 - protein, 34 aa, Artificial Sequence; identical to SEQ ID NO: 7279
  GFR-binding peptide
  MOD_RES (3)..(4): Xaa is C or S

SEQ ID NO: 69630 - protein, 39 aa, Artificial Sequence; identical to SEQ ID NO: 7281
  GFR-binding peptide
  MOD_RES (5)..(6)..(38): Xaa is C or S

SEQ ID NO: 69631 - protein, 36 aa, Artificial Sequence
  GFR-binding peptide
  MOD_RES (3)..(4)..(35): Xaa is C or S
SPXXVSQDLSPINILYFIGKTPKIYGKIPMIVKSXK

SEQ ID NO: 69632 - protein, 37 aa, Artificial Sequence
  GFR-binding peptide
  MOD_RES (4)..(5)..(37): Xaa is C or S
AGPXXTPTKMSPISMLYKNDKQQIILKYHYGMVVDRX

SEQ ID NO: 69633 - protein, 36 aa, Artificial Sequence; identical to SEQ ID NO: 32533
  GFR-binding peptide
  MOD_RES (34)..(36): Xaa is C or S
  MOD_RES (14)..(15)..(16)..(17)..(18): Xaa is A or G
  MOD_RES (19)..(20)..(21)..(22): Xaa is A or G or is absent

SEQ ID NO: 69634 - protein, 34 aa, Artificial Sequence; identical to SEQ ID NO: 28462
  GFR-binding peptide
  MOD_RES (2)..(3): Xaa is C or S

SEQ ID NO: 69635 - protein, 39 aa, Artificial Sequence; identical to SEQ ID NO: 28464
  GFR-binding peptide
  MOD_RES (4)..(5)..(37)..(39): Xaa is C or S

SEQ ID NO: 69636 - protein, 42 aa, Artificial Sequence; identical to SEQ ID NO: 7288
  GFR-binding peptide
  MOD_RES (5)..(6)..(40)..(42): Xaa is C or S
  MOD_RES (20)..(21)..(22)..(23)..(24): Xaa is A or G
  MOD_RES (25)..(26)..(27)..(28): Xaa is A or G or is absent

SEQ ID NO: 69637 - protein, 37 aa, Artificial Sequence; identical to SEQ ID NO: 28468
  GFR-binding peptide
  MOD_RES (4)..(5): Xaa is C or S
  MOD_RES (19)..(20)..(21)..(22)..(23): Xaa is A or G
  MOD_RES (24)..(25)..(26)..(27): Xaa is A or G or is absent

SEQ ID NO: 69638 - protein, 34 aa, Artificial Sequence; identical to SEQ ID NO: 7289
  GFR-binding peptide
  MOD_RES (31)..(33): Xaa is C or S

SEQ ID NO: 69639 - protein, 39 aa, Artificial Sequence; identical to SEQ ID NO: 7290
  GFR-binding peptide
  MOD_RES (4)..(5)..(37)..(39): Xaa is C or S

SEQ ID NO: 69640 - protein, 35 aa, Artificial Sequence; identical to SEQ ID NO: 7292
  GFR-binding peptide
  MOD_RES (2)..(3): Xaa is C or S
  MOD_RES (17)..(18)..(19)..(20)..(21): Xaa is A or G
  MOD_RES (22)..(23)..(24)..(25): Xaa is A or G or is absent

SEQ ID NO: 69641 - protein, 39 aa, Artificial Sequence; identical to SEQ ID NO: 32545
  GFR-binding peptide
  MOD_RES (3)..(4)..(37)..(39): Xaa is C or S

SEQ ID NO: 69642 - protein, 34 aa, Artificial Sequence; identical to SEQ ID NO: 32546
  GFR-binding peptide
  MOD_RES (2)..(3): Xaa is C or S

SEQ ID NO: 69643 - protein, 35 aa, Artificial Sequence; identical to SEQ ID NO: 7293
  GFR-binding peptide
  MOD_RES (4)..(5): Xaa is C or S

SEQ ID NO: 69644 - protein, 41 aa, Artificial Sequence; identical to SEQ ID NO: 57455
  GFR-binding peptide
  MOD_RES (6)..(7)..(40): Xaa is C or S
  MOD_RES (21)..(22)..(23)..(24)..(25): Xaa is A or G
  MOD_RES (26)..(27)..(28)..(29): Xaa is A or G or is absent

SEQ ID NO: 69645 - protein, 32 aa, Artificial Sequence
  GFR-binding peptide
  MOD_RES (32)..(32): Xaa is C or S
VPTRLSPISILYKDSANNVVLKYHYDMVVESX

SEQ ID NO: 69646 - protein, 39 aa, Artificial Sequence; identical to SEQ ID NO: 32548
  GFR-binding peptide
  MOD_RES (4)..(5)..(37)..(39): Xaa is C or S

SEQ ID NO: 69647 - protein, 35 aa, Artificial Sequence; identical to SEQ ID NO: 7296
  GFR-binding peptide
  MOD_RES (2)..(34): Xaa is C or S

SEQ ID NO: 69648 - protein, 35 aa, Artificial Sequence; identical to SEQ ID NO: 7297
  GFR-binding peptide
  MOD_RES (1)..(2): Xaa is C or S
  MOD_RES (16)..(17)..(18)..(19)..(20): Xaa is A or G
  MOD_RES (21)..(22)..(23)..(24): Xaa is A or G or is absent

SEQ ID NO: 69649 - protein, 40 aa, Artificial Sequence; identical to SEQ ID NO: 7298
  GFR-binding peptide
  MOD_RES (4)..(5)..(38)..(40): Xaa is C or S
  MOD_RES (19)..(20)..(21)..(22)..(23): Xaa is A or G
  MOD_RES (24)..(25)..(26)..(27): Xaa is A or G or is absent

SEQ ID NO: 69650 - protein, 32 aa, Artificial Sequence; identical to SEQ ID NO: 14597
  GFR-binding peptide
  MOD_RES (32)..(32): Xaa is C or S

SEQ ID NO: 69651 - protein, 41 aa, Artificial Sequence; identical to SEQ ID NO: 32553
  GFR-binding peptide
  MOD_RES (5)..(6)..(41): Xaa is C or S
  MOD_RES (20)..(21)..(22)..(23)..(24): Xaa is A or G
  MOD_RES (25)..(26)..(27)..(28): Xaa is A or G or is absent

SEQ ID NO: 69652 - protein, 34 aa, Artificial Sequence; identical to SEQ ID NO: 32554
  GFR-binding peptide
  MOD_RES (1)..(2): Xaa is C or S
  MOD_RES (16)..(17)..(18)..(19)..(20): Xaa is A or G
  MOD_RES (21)..(22)..(23)..(24): Xaa is A or G or is absent

SEQ ID NO: 69653 - protein, 38 aa, Artificial Sequence; identical to SEQ ID NO: 7301
  GFR-binding peptide
  MOD_RES (2)..(3)..(36)..(38): Xaa is C or S
  MOD_RES (17)..(18)..(19)..(20)..(21): Xaa is A or G
  MOD_RES (22)..(23)..(24)..(25): Xaa is A or G or is absent

SEQ ID NO: 69654 - protein, 36 aa, Artificial Sequence; identical to SEQ ID NO: 28482
  GFR-binding peptide
  MOD_RES (34)..(36): Xaa is C or S
  MOD_RES (14)..(15)..(16)..(17)..(18): Xaa is A or G
  MOD_RES (19)..(20)..(21)..(22): Xaa is A or G or is absent

SEQ ID NO: 69655 - protein, 30 aa, Artificial Sequence; identical to SEQ ID NO: 7304
  GFR-binding peptide

SEQ ID NO: 69656 - protein, 32 aa, Artificial Sequence; identical to SEQ ID NO: 7306
  GFR-binding peptide
  MOD_RES (14)..(15)..(16)..(17)..(18): Xaa is A or G
  MOD_RES (19)..(20)..(21)..(22): Xaa is A or G or is absent

SEQ ID NO: 69657 - protein, 33 aa, Artificial Sequence; identical to SEQ ID NO: 7307
  GFR-binding peptide
  MOD_RES (1)..(1): Xaa is C or S
  MOD_RES (15)..(16)..(17)..(18)..(19): Xaa is A or G
  MOD_RES (20)..(21)..(22)..(23): Xaa is A or G or is absent

SEQ ID NO: 69658 - protein, 35 aa, Artificial Sequence
  GFR-binding peptide
  MOD_RES (3)..(4): Xaa is C or S
ASXXVPARLSATSILYYDAANNVVLRKHRDMVVEA

SEQ ID NO: 69659 - protein, 36 aa, Artificial Sequence
  GFR-binding peptide
  MOD_RES (5)..(6): Xaa is C or S
SAGPXXTPTKMEPISMLYLNDKQQIIKFKYEGMVVD

SEQ ID NO: 69660 - protein, 40 aa, Artificial Sequence; identical to SEQ ID NO: 28493
  GFR-binding peptide
  MOD_RES (6)..(38)..(40): Xaa is C or S

SEQ ID NO: 69661 - protein, 40 aa, Artificial Sequence; identical to SEQ ID NO: 7311
  GFR-binding peptide
  MOD_RES (5)..(6)..(37)..(39): Xaa is C or S

SEQ ID NO: 69662 - protein, 35 aa, Artificial Sequence
  GFR-binding peptide
  MOD_RES (4)..(5): Xaa is C or S
PSTXXAPVKTSATSMLYYDNGRVLLLRKHRMIVEE

SEQ ID NO: 69663 - protein, 37 aa, Artificial Sequence; identical to SEQ ID NO: 28496
  GFR-binding peptide
  MOD_RES (3)..(4)..(37): Xaa is C or S
  MOD_RES (18)..(19)..(20)..(21)..(22): Xaa is A or G
  MOD_RES (23)..(24)..(25)..(26): Xaa is A or G or is absent

SEQ ID NO: 69664 - protein, 38 aa, Artificial Sequence; identical to SEQ ID NO: 7312
  GFR-binding peptide
  MOD_RES (4)..(5)..(36)..(38): Xaa is C or S

SEQ ID NO: 69665 - protein, 39 aa, Artificial Sequence
  GFR-binding peptide
  MOD_RES (2)..(3)..(37)..(39): Xaa is C or S
  MOD_RES (17)..(18)..(19)..(20)..(21): Xaa is A or G
  MOD_RES (22)..(23)..(24)..(25): Xaa is A or G or is absent
TXXVPTRLSPISILYKXXXXXXXXXLKYHYDMVVESXGX

SEQ ID NO: 69666 - protein, 36 aa, Artificial Sequence; identical to SEQ ID NO: 32578
  GFR-binding peptide
  MOD_RES (1)..(2)..(35): Xaa is C or S
  MOD_RES (16)..(17)..(18)..(19)..(20): Xaa is A or G
  MOD_RES (21)..(22)..(23)..(24): Xaa is A or G or is absent

SEQ ID NO: 69667 - protein, 35 aa, Artificial Sequence; identical to SEQ ID NO: 7316
  GFR-binding peptide
  MOD_RES (34)..(34): Xaa is C or S
  MOD_RES (14)..(15)..(16)..(17)..(18): Xaa is A or G
  MOD_RES (19)..(20)..(21)..(22): Xaa is A or G or is absent

SEQ ID NO: 69668 - protein, 43 aa, Artificial Sequence; identical to SEQ ID NO: 7317
  GFR-binding peptide
  MOD_RES (5)..(6)..(41)..(43): Xaa is C or S
  MOD_RES (20)..(21)..(22)..(23)..(24): Xaa is A or G
  MOD_RES (25)..(26)..(27)..(28): Xaa is A or G or is absent

SEQ ID NO: 69669 - protein, 39 aa, Artificial Sequence; identical to SEQ ID NO: 7318
  GFR-binding peptide
  MOD_RES (5)..(39): Xaa is C or S
  MOD_RES (19)..(20)..(21)..(22)..(23): Xaa is A or G
  MOD_RES (24)..(25)..(26)..(27): Xaa is A or G or is absent

SEQ ID NO: 69670 - protein, 36 aa, Artificial Sequence; identical to SEQ ID NO: 28506
  GFR-binding peptide
  MOD_RES (34)..(36): Xaa is C or S
  MOD_RES (14)..(15)..(16)..(17)..(18): Xaa is A or G
  MOD_RES (19)..(20)..(21)..(22): Xaa is A or G or is absent

SEQ ID NO: 69671 - protein, 34 aa, Artificial Sequence; identical to SEQ ID NO: 7321
  GFR-binding peptide
  MOD_RES (1)..(1): Xaa is C or S
  MOD_RES (15)..(16)..(17)..(18)..(19): Xaa is A or G
  MOD_RES (20)..(21)..(22)..(23): Xaa is A or G or is absent

SEQ ID NO: 69672 - protein, 37 aa, Artificial Sequence; identical to SEQ ID NO: 7322
  GFR-binding peptide
  MOD_RES (2)..(3)..(34)..(36): Xaa is C or S

SEQ ID NO: 69673 - protein, 33 aa, Artificial Sequence
  GFR-binding peptide
  MOD_RES (1)..(1): Xaa is C or S
  MOD_RES (15)..(16)..(17)..(18)..(19): Xaa is A or G
  MOD_RES (20)..(21)..(22)..(23): Xaa is A or G or is absent
XTPTKMSATSMLYYXXXXXXXXXLRKHRGMVVD

SEQ ID NO: 69674 - protein, 35 aa, Artificial Sequence; identical to SEQ ID NO: 28511
  GFR-binding peptide
  MOD_RES (1)..(2)..(34): Xaa is C or S

SEQ ID NO: 69675 - protein, 34 aa, Artificial Sequence
  GFR-binding peptide
  MOD_RES (34)..(34): Xaa is C or S
  MOD_RES (14)..(15)..(16)..(17)..(18): Xaa is A or G
  MOD_RES (19)..(20)..(21)..(22): Xaa is A or G or is absent
VPTKLSATSILYYXXXXXXXXXLRKHRGMAVSEX

SEQ ID NO: 69676 - protein, 35 aa, Artificial Sequence; identical to SEQ ID NO: 28513
  GFR-binding peptide
  MOD_RES (34)..(34): Xaa is C or S
  MOD_RES (14)..(15)..(16)..(17)..(18): Xaa is A or G
  MOD_RES (19)..(20)..(21)..(22): Xaa is A or G or is absent

SEQ ID NO: 69677 - protein, 40 aa, Artificial Sequence; identical to SEQ ID NO: 7328
  GFR-binding peptide
  MOD_RES (6)..(7)..(39): Xaa is C or S

SEQ ID NO: 69678 - protein, 32 aa, Artificial Sequence; identical to SEQ ID NO: 32588
  GFR-binding peptide
  MOD_RES (1)..(2): Xaa is C or S

SEQ ID NO: 69679 - protein, 37 aa, Artificial Sequence
  GFR-binding peptide
  MOD_RES (5)..(6): Xaa is C or S
TPPTXXVPTRLEPISILYLDSANNVVKFKYEDMVVES

SEQ ID NO: 69680 - protein, 35 aa, Artificial Sequence; identical to SEQ ID NO: 28517
  GFR-binding peptide
  MOD_RES (2)..(3)..(34): Xaa is C or S

SEQ ID NO: 69681 - protein, 32 aa, Artificial Sequence; identical to SEQ ID NO: 28521
  GFR-binding peptide
  MOD_RES (32)..(32): Xaa is C or S

SEQ ID NO: 69682 - protein, 36 aa, Artificial Sequence; identical to SEQ ID NO: 7332
  GFR-binding peptide
  MOD_RES (2)..(3)..(34)..(36): Xaa is C or S

SEQ ID NO: 69683 - protein, 38 aa, Artificial Sequence; identical to SEQ ID NO: 32592
  GFR-binding peptide
  MOD_RES (4)..(5): Xaa is C or S
  MOD_RES (19)..(20)..(21)..(22)..(23): Xaa is A or G
  MOD_RES (24)..(25)..(26)..(27): Xaa is A or G or is absent

SEQ ID NO: 69684 - protein, 34 aa, Artificial Sequence
  GFR-binding peptide
  MOD_RES (1)..(1): Xaa is C or S
  MOD_RES (15)..(16)..(17)..(18)..(19): Xaa is A or G
  MOD_RES (20)..(21)..(22)..(23): Xaa is A or G or is absent
XVPTRLEPISILYLXXXXXXXXXKFKYEDMVVES

SEQ ID NO: 69685 - protein, 35 aa, Artificial Sequence
  GFR-binding peptide
  MOD_RES (1)..(33)..(35): Xaa is C or S
XTPTKMEPISMLYLNDKQQIIKFKYEGMVVDRXGX

SEQ ID NO: 69686 - protein, 35 aa, Artificial Sequence; identical to SEQ ID NO: 7338
  GFR-binding peptide
  MOD_RES (1)..(2)..(35): Xaa is C or S
  MOD_RES (16)..(17)..(18)..(19)..(20): Xaa is A or G
  MOD_RES (21)..(22)..(23)..(24): Xaa is A or G or is absent

SEQ ID NO: 69687 - protein, 34 aa, Artificial Sequence; identical to SEQ ID NO: 28529
  GFR-binding peptide
  MOD_RES (3)..(4): Xaa is C or S

SEQ ID NO: 69688 - protein, 36 aa, Artificial Sequence; identical to SEQ ID NO: 7339
  GFR-binding peptide
  MOD_RES (1)..(34)..(36): Xaa is C or S
  MOD_RES (15)..(16)..(17)..(18)..(19): Xaa is A or G
  MOD_RES (20)..(21)..(22)..(23): Xaa is A or G or is absent

SEQ ID NO: 69689 - protein, 38 aa, Artificial Sequence; identical to SEQ ID NO: 28532
  GFR-binding peptide
  MOD_RES (4)..(5)..(37): Xaa is C or S

SEQ ID NO: 69690 - protein, 34 aa, Artificial Sequence
  GFR-binding peptide
  MOD_RES (3)..(4): Xaa is C or S
ASXXVPARLSATSILYYDAANNVVLRKHRDMVVE

SEQ ID NO: 69691 - protein, 39 aa, Artificial Sequence; identical to SEQ ID NO: 28533
  GFR-binding peptide
  MOD_RES (6)..(7)..(39): Xaa is C or S

SEQ ID NO: 69692 - protein, 38 aa, Artificial Sequence; identical to SEQ ID NO: 28537
  GFR-binding peptide
  MOD_RES (1)..(2)..(36)..(38): Xaa is C or S
  MOD_RES (16)..(17)..(18)..(19)..(20): Xaa is A or G
  MOD_RES (21)..(22)..(23)..(24): Xaa is A or G or is absent

SEQ ID NO: 69693 - protein, 38 aa, Artificial Sequence; identical to SEQ ID NO: 28538
  GFR-binding peptide
  MOD_RES (5)..(6): Xaa is C or S
  MOD_RES (20)..(21)..(22)..(23)..(24): Xaa is A or G
  MOD_RES (25)..(26)..(27)..(28): Xaa is A or G or is absent

SEQ ID NO: 69694 - protein, 43 aa, Artificial Sequence; identical to SEQ ID NO: 14637
  GFR-binding peptide
  MOD_RES (6)..(7)..(41)..(43): Xaa is C or S
  MOD_RES (21)..(22)..(23)..(24)..(25): Xaa is A or G
  MOD_RES (26)..(27)..(28)..(29): Xaa is A or G or is absent

SEQ ID NO: 69695 - protein, 35 aa, Artificial Sequence; identical to SEQ ID NO: 7342
  GFR-binding peptide
  MOD_RES (2)..(3)..(34): Xaa is C or S

SEQ ID NO: 69696 - protein, 42 aa, Artificial Sequence
  GFR-binding peptide
  MOD_RES (6)..(7)..(41): Xaa is C or S
  MOD_RES (21)..(22)..(23)..(24)..(25): Xaa is A or G
  MOD_RES (26)..(27)..(28)..(29): Xaa is A or G or is absent
STPPTXXVPTRLEPISILYLXXXXXXXXXKFKYEDMVVESXG

SEQ ID NO: 69697 - protein, 37 aa, Artificial Sequence; identical to SEQ ID NO: 28539
  GFR-binding peptide
  MOD_RES (6)..(7): Xaa is C or S

SEQ ID NO: 69698 - protein, 41 aa, Artificial Sequence
  GFR-binding peptide
  MOD_RES (3)..(4)..(38)..(40): Xaa is C or S
  MOD_RES (18)..(19)..(20)..(21)..(22): Xaa is A or G
  MOD_RES (23)..(24)..(25)..(26): Xaa is A or G or is absent
EPXXVPEKMSPINILYFXXXXXXXXXYGKIPNMTVESXAXR

SEQ ID NO: 69699 - protein, 38 aa, Artificial Sequence; identical to SEQ ID NO: 7346
  GFR-binding peptide
  MOD_RES (1)..(35)..(37): Xaa is C or S
  MOD_RES (15)..(16)..(17)..(18)..(19): Xaa is A or G
  MOD_RES (20)..(21)..(22)..(23): Xaa is A or G or is absent

SEQ ID NO: 69700 - protein, 38 aa, Artificial Sequence; identical to SEQ ID NO: 7347
  GFR-binding peptide
  MOD_RES (3)..(4)..(36)..(38): Xaa is C or S

SEQ ID NO: 69701 - protein, 38 aa, Artificial Sequence; identical to SEQ ID NO: 28544
  GFR-binding peptide
  MOD_RES (3)..(4)..(38): Xaa is C or S
  MOD_RES (18)..(19)..(20)..(21)..(22): Xaa is A or G
  MOD_RES (23)..(24)..(25)..(26): Xaa is A or G or is absent

SEQ ID NO: 69702 - protein, 35 aa, Artificial Sequence; identical to SEQ ID NO: 7349
  GFR-binding peptide
  MOD_RES (1)..(35): Xaa is C or S
  MOD_RES (15)..(16)..(17)..(18)..(19): Xaa is A or G
  MOD_RES (20)..(21)..(22)..(23): Xaa is A or G or is absent

SEQ ID NO: 69703 - protein, 33 aa, Artificial Sequence; identical to SEQ ID NO: 32618
  GFR-binding peptide
  MOD_RES (1)..(33): Xaa is C or S

SEQ ID NO: 69704 - protein, 37 aa, Artificial Sequence
  GFR-binding peptide
  MOD_RES (4)..(5): Xaa is C or S
  MOD_RES (19)..(20)..(21)..(22)..(23): Xaa is A or G
  MOD_RES (24)..(25)..(26)..(27): Xaa is A or G or is absent
AGPXXTPTKMSATSMLYYXXXXXXXXXLRKHRGMVVD

SEQ ID NO: 69705 - protein, 37 aa, Artificial Sequence; identical to SEQ ID NO: 28546
  GFR-binding peptide
  MOD_RES (1)..(2)..(34)..(36): Xaa is C or S

SEQ ID NO: 69706 - protein, 38 aa, Artificial Sequence; identical to SEQ ID NO: 57529
  GFR-binding peptide
  MOD_RES (1)..(2)..(35)..(37): Xaa is C or S
  MOD_RES (16)..(17)..(18)..(19)..(20): Xaa is A or G
  MOD_RES (21)..(22)..(23)..(24): Xaa is A or G or is absent

SEQ ID NO: 69707 - protein, 36 aa, Artificial Sequence; identical to SEQ ID NO: 32620
  GFR-binding peptide
  MOD_RES (2)..(3)..(35): Xaa is C or S

SEQ ID NO: 69708 - protein, 33 aa, Artificial Sequence
  GFR-binding peptide
  MOD_RES (2)..(3): Xaa is C or S
PXXVPQDLSPINILYFVGRTPKVYGKIPMVVKS

SEQ ID NO: 69709 - protein, 40 aa, Artificial Sequence
  GFR-binding peptide
  MOD_RES (2)..(3)..(37)..(39): Xaa is C or S
  MOD_RES (17)..(18)..(19)..(20)..(21): Xaa is A or G
  MOD_RES (22)..(23)..(24)..(25): Xaa is A or G or is absent
TXXVPTRLEPISILYLXXXXXXXXXKFKYEDMVVESXGXR

SEQ ID NO: 69710 - protein, 34 aa, Artificial Sequence; identical to SEQ ID NO: 7352
  GFR-binding peptide
  MOD_RES (33)..(33): Xaa is C or S
  MOD_RES (14)..(15)..(16)..(17)..(18): Xaa is A or G
  MOD_RES (19)..(20)..(21)..(22): Xaa is A or G or is absent

SEQ ID NO: 69711 - protein, 35 aa, Artificial Sequence
  GFR-binding peptide
  MOD_RES (1)..(35): Xaa is C or S
  MOD_RES (15)..(16)..(17)..(18)..(19): Xaa is A or G
  MOD_RES (20)..(21)..(22)..(23): Xaa is A or G or is absent
XVPTKLSATSILYYXXXXXXXXXLRKHRGMAVSEX

SEQ ID NO: 69712 - protein, 40 aa, Artificial Sequence; identical to SEQ ID NO: 28555
  GFR-binding peptide
  MOD_RES (6)..(7): Xaa is C or S
  MOD_RES (21)..(22)..(23)..(24)..(25): Xaa is A or G
  MOD_RES (26)..(27)..(28)..(29): Xaa is A or G or is absent

SEQ ID NO: 69713 - protein, 37 aa, Artificial Sequence
  GFR-binding peptide
  MOD_RES (5)..(6)..(37): Xaa is C or S
SAAPXXVPQALSPINILYFVGRKPKVYGKIPMIVRSX

SEQ ID NO: 69714 - protein, 36 aa, Artificial Sequence
  GFR-binding peptide
  MOD_RES (3)..(4): Xaa is C or S
  MOD_RES (18)..(19)..(20)..(21)..(22): Xaa is A or G
  MOD_RES (23)..(24)..(25)..(26): Xaa is A or G or is absent
GPXXTPTKMEPISMLYLXXXXXXXXXKFKYEGMVVD

SEQ ID NO: 69715 - protein, 39 aa, Artificial Sequence
  GFR-binding peptide
  MOD_RES (5)..(6)..(38): Xaa is C or S
ASKAXXVPTKLSATSILYYDKGVVTYLRKHRGMAVSEXG

SEQ ID NO: 69716 - protein, 39 aa, Artificial Sequence; identical to SEQ ID NO: 7357
  GFR-binding peptide
  MOD_RES (6)..(7)..(39): Xaa is C or S

SEQ ID NO: 69717 - protein, 42 aa, Artificial Sequence; identical to SEQ ID NO: 28563
  GFR-binding peptide
  MOD_RES (5)..(6)..(40)..(42): Xaa is C or S
  MOD_RES (20)..(21)..(22)..(23)..(24): Xaa is A or G
  MOD_RES (25)..(26)..(27)..(28): Xaa is A or G or is absent

SEQ ID NO: 69718 - protein, 40 aa, Artificial Sequence; identical to SEQ ID NO: 28565
  GFR-binding peptide
  MOD_RES (6)..(7)..(39): Xaa is C or S

SEQ ID NO: 69719 - protein, 38 aa, Artificial Sequence
  GFR-binding peptide
  MOD_RES (4)..(5)..(37): Xaa is C or S
PPTXXVPTRLSPISILYKDSANNVVLKYHYDMVVESXG

SEQ ID NO: 69720 - protein, 39 aa, Artificial Sequence; identical to SEQ ID NO: 7359
  GFR-binding peptide
  MOD_RES (6)..(7)..(38): Xaa is C or S

SEQ ID NO: 69721 - protein, 39 aa, Artificial Sequence; identical to SEQ ID NO: 28568
  GFR-binding peptide
  MOD_RES (4)..(5)..(37)..(39): Xaa is C or S

SEQ ID NO: 69722 - protein, 42 aa, Artificial Sequence; identical to SEQ ID NO: 28570
  GFR-binding peptide
  MOD_RES (5)..(6)..(40)..(42): Xaa is C or S
  MOD_RES (20)..(21)..(22)..(23)..(24): Xaa is A or G
  MOD_RES (25)..(26)..(27)..(28): Xaa is A or G or is absent

SEQ ID NO: 69723 - protein, 33 aa, Artificial Sequence; identical to SEQ ID NO: 7361
  GFR-binding peptide
  MOD_RES (14)..(15)..(16)..(17)..(18): Xaa is A or G
  MOD_RES (19)..(20)..(21)..(22): Xaa is A or G or is absent

SEQ ID NO: 69724 - protein, 35 aa, Artificial Sequence; identical to SEQ ID NO: 28572
  GFR-binding peptide
  MOD_RES (1)..(2): Xaa is C or S
  MOD_RES (16)..(17)..(18)..(19)..(20): Xaa is A or G
  MOD_RES (21)..(22)..(23)..(24): Xaa is A or G or is absent

SEQ ID NO: 69725 - protein, 34 aa, Artificial Sequence
  GFR-binding peptide
  MOD_RES (1)..(2)..(33): Xaa is C or S
XXAPVKTSATSMLYYDNGRVLLLRKHRMIVEEXG

SEQ ID NO: 69726 - protein, 33 aa, Artificial Sequence; identical to SEQ ID NO: 7364
  GFR-binding peptide
  MOD_RES (1)..(33): Xaa is C or S

SEQ ID NO: 69727 - protein, 35 aa, Artificial Sequence; identical to SEQ ID NO: 7365
  GFR-binding peptide
  MOD_RES (32)..(34): Xaa is C or S

SEQ ID NO: 69728 - protein, 33 aa, Artificial Sequence; identical to SEQ ID NO: 14670
  GFR-binding peptide
  MOD_RES (1)..(2): Xaa is C or S

SEQ ID NO: 69729 - protein, 32 aa, Artificial Sequence; identical to SEQ ID NO: 7367
  GFR-binding peptide
  MOD_RES (14)..(15)..(16)..(17)..(18): Xaa is A or G
  MOD_RES (19)..(20)..(21)..(22): Xaa is A or G or is absent

SEQ ID NO: 69730 - protein, 38 aa, Artificial Sequence; identical to SEQ ID NO: 57557
  GFR-binding peptide
  MOD_RES (5)..(6): Xaa is C or S
  MOD_RES (20)..(21)..(22)..(23)..(24): Xaa is A or G
  MOD_RES (25)..(26)..(27)..(28): Xaa is A or G or is absent

SEQ ID NO: 69731 - protein, 36 aa, Artificial Sequence
  GFR-binding peptide
  MOD_RES (1)..(2)..(34)..(36): Xaa is C or S
XXVPEKMSATSILYYDENKNVVLRKHRNMTVESXAX

SEQ ID NO: 69732 - protein, 35 aa, Artificial Sequence; identical to SEQ ID NO: 7372
  GFR-binding peptide
  MOD_RES (1)..(2)..(34): Xaa is C or S

SEQ ID NO: 69733 - protein, 35 aa, Artificial Sequence
  GFR-binding peptide
  MOD_RES (4)..(5): Xaa is C or S
PPTXXVPTRLSATSILYYDSANNVVLRKHRDMVVE

SEQ ID NO: 69734 - protein, 30 aa, Artificial Sequence; identical to SEQ ID NO: 7373
  GFR-binding peptide

SEQ ID NO: 69735 - protein, 38 aa, Artificial Sequence; identical to SEQ ID NO: 7374
  GFR-binding peptide
  MOD_RES (1)..(35)..(37): Xaa is C or S
  MOD_RES (15)..(16)..(17)..(18)..(19): Xaa is A or G
  MOD_RES (20)..(21)..(22)..(23): Xaa is A or G or is absent

SEQ ID NO: 69736 - protein, 40 aa, Artificial Sequence; identical to SEQ ID NO: 32661
  GFR-binding peptide
  MOD_RES (6)..(7): Xaa is C or S
  MOD_RES (21)..(22)..(23)..(24)..(25): Xaa is A or G
  MOD_RES (26)..(27)..(28)..(29): Xaa is A or G or is absent

SEQ ID NO: 69737 - protein, 32 aa, Artificial Sequence; identical to SEQ ID NO: 7379
  GFR-binding peptide
  MOD_RES (32)..(32): Xaa is C or S

SEQ ID NO: 69738 - protein, 37 aa, Artificial Sequence; identical to SEQ ID NO: 7381
  GFR-binding peptide
  MOD_RES (1)..(2)..(36): Xaa is C or S
  MOD_RES (16)..(17)..(18)..(19)..(20): Xaa is A or G
  MOD_RES (21)..(22)..(23)..(24): Xaa is A or G or is absent

SEQ ID NO: 69739 - protein, 34 aa, Artificial Sequence; identical to SEQ ID NO: 28588
  GFR-binding peptide
  MOD_RES (3)..(4): Xaa is C or S

SEQ ID NO: 69740 - protein, 42 aa, Artificial Sequence; identical to SEQ ID NO: 7382
  GFR-binding peptide
  MOD_RES (6)..(7)..(42): Xaa is C or S
  MOD_RES (21)..(22)..(23)..(24)..(25): Xaa is A or G
  MOD_RES (26)..(27)..(28)..(29): Xaa is A or G or is absent

SEQ ID NO: 69741 - protein, 33 aa, Artificial Sequence; identical to SEQ ID NO: 28591
  GFR-binding peptide
  MOD_RES (1)..(1): Xaa is C or S
  MOD_RES (15)..(16)..(17)..(18)..(19): Xaa is A or G
  MOD_RES (20)..(21)..(22)..(23): Xaa is A or G or is absent

SEQ ID NO: 69742 - protein, 37 aa, Artificial Sequence; identical to SEQ ID NO: 7383
  GFR-binding peptide
  MOD_RES (3)..(4): Xaa is C or S
  MOD_RES (18)..(19)..(20)..(21)..(22): Xaa is A or G
  MOD_RES (23)..(24)..(25)..(26): Xaa is A or G or is absent

SEQ ID NO: 69743 - protein, 38 aa, Artificial Sequence; identical to SEQ ID NO: 7384
  GFR-binding peptide
  MOD_RES (6)..(7): Xaa is C or S

SEQ ID NO: 69744 - protein, 41 aa, Artificial Sequence; identical to SEQ ID NO: 28596
  GFR-binding peptide
  MOD_RES (6)..(7)..(41): Xaa is C or S
  MOD_RES (21)..(22)..(23)..(24)..(25): Xaa is A or G
  MOD_RES (26)..(27)..(28)..(29): Xaa is A or G or is absent

SEQ ID NO: 69745 - protein, 35 aa, Artificial Sequence
  GFR-binding peptide
  MOD_RES (1)..(35): Xaa is C or S
  MOD_RES (15)..(16)..(17)..(18)..(19): Xaa is A or G
  MOD_RES (20)..(21)..(22)..(23): Xaa is A or G or is absent
XVPTRLSATSILYYXXXXXXXXXLRKHRDMVVESX

SEQ ID NO: 69746 - protein, 34 aa, Artificial Sequence; identical to SEQ ID NO: 7386
  GFR-binding peptide
  MOD_RES (1)..(2)..(34): Xaa is C or S

SEQ ID NO: 69747 - protein, 39 aa, Artificial Sequence; identical to SEQ ID NO: 7387
  GFR-binding peptide
  MOD_RES (3)..(4)..(36)..(38): Xaa is C or S

SEQ ID NO: 69748 - protein, 36 aa, Artificial Sequence; identical to SEQ ID NO: 7390
  GFR-binding peptide
  MOD_RES (1)..(34)..(36): Xaa is C or S
  MOD_RES (15)..(16)..(17)..(18)..(19): Xaa is A or G
  MOD_RES (20)..(21)..(22)..(23): Xaa is A or G or is absent

SEQ ID NO: 69749 - protein, 41 aa, Artificial Sequence; identical to SEQ ID NO: 28601
  GFR-binding peptide
  MOD_RES (6)..(7)..(41): Xaa is C or S
  MOD_RES (21)..(22)..(23)..(24)..(25): Xaa is A or G
  MOD_RES (26)..(27)..(28)..(29): Xaa is A or G or is absent

SEQ ID NO: 69750 - protein, 40 aa, Artificial Sequence; identical to SEQ ID NO: 7392
  GFR-binding peptide
  MOD_RES (3)..(4)..(38)..(40): Xaa is C or S
  MOD_RES (18)..(19)..(20)..(21)..(22): Xaa is A or G
  MOD_RES (23)..(24)..(25)..(26): Xaa is A or G or is absent

SEQ ID NO: 69751 - protein, 40 aa, Artificial Sequence; identical to SEQ ID NO: 7393
  GFR-binding peptide
  MOD_RES (6)..(7)..(38)..(40): Xaa is C or S

SEQ ID NO: 69752 - protein, 41 aa, Artificial Sequence; identical to SEQ ID NO: 7394
  GFR-binding peptide
  MOD_RES (5)..(6)..(39)..(41): Xaa is C or S

SEQ ID NO: 69753 - protein, 40 aa, Artificial Sequence; identical to SEQ ID NO: 28606
  GFR-binding peptide
  MOD_RES (2)..(3)..(38)..(40): Xaa is C or S
  MOD_RES (17)..(18)..(19)..(20)..(21): Xaa is A or G
  MOD_RES (22)..(23)..(24)..(25): Xaa is A or G or is absent

SEQ ID NO: 69754 - protein, 42 aa, Artificial Sequence
  GFR-binding peptide
  MOD_RES (6)..(7)..(41): Xaa is C or S
  MOD_RES (21)..(22)..(23)..(24)..(25): Xaa is A or G
  MOD_RES (26)..(27)..(28)..(29): Xaa is A or G or is absent
STPPTXXVPTRLSPISILYKXXXXXXXXXLKYHYDMVVESXG

SEQ ID NO: 69755 - protein, 37 aa, Artificial Sequence
  GFR-binding peptide
  MOD_RES (1)..(2)..(35)..(37): Xaa is C or S
  MOD_RES (16)..(17)..(18)..(19)..(20): Xaa is A or G
  MOD_RES (21)..(22)..(23)..(24): Xaa is A or G or is absent
XXAPVKTEPISMLYLXXXXXXXXXKFKYEMIVEEXGX

SEQ ID NO: 69756 - protein, 33 aa, Artificial Sequence
  GFR-binding peptide
  MOD_RES (1)..(32): Xaa is C or S
XAPVKTSATSMLYYDNGRVLLLRKHRMIVEEXG

SEQ ID NO: 69757 - protein, 37 aa, Artificial Sequence
  GFR-binding peptide
  MOD_RES (4)..(5)..(36): Xaa is C or S
PSTXXAPVKTSATSMLYYDNGRVLLLRKHRMIVEEXG

SEQ ID NO: 69758 - protein, 34 aa, Artificial Sequence; identical to SEQ ID NO: 32678
  GFR-binding peptide
  MOD_RES (1)..(2)..(34): Xaa is C or S

SEQ ID NO: 69759 - protein, 38 aa, Artificial Sequence; identical to SEQ ID NO: 32680
  GFR-binding peptide
  MOD_RES (1)..(2)..(36)..(38): Xaa is C or S
  MOD_RES (16)..(17)..(18)..(19)..(20): Xaa is A or G
  MOD_RES (21)..(22)..(23)..(24): Xaa is A or G or is absent

SEQ ID NO: 69760 - protein, 36 aa, Artificial Sequence; identical to SEQ ID NO: 28609
  GFR-binding peptide
  MOD_RES (4)..(5): Xaa is C or S

SEQ ID NO: 69761 - protein, 38 aa, Artificial Sequence; identical to SEQ ID NO: 28611
  GFR-binding peptide
  MOD_RES (1)..(2)..(36)..(38): Xaa is C or S
  MOD_RES (16)..(17)..(18)..(19)..(20): Xaa is A or G
  MOD_RES (21)..(22)..(23)..(24): Xaa is A or G or is absent

SEQ ID NO: 69762 - protein, 37 aa, Artificial Sequence; identical to SEQ ID NO: 28613
  GFR-binding peptide
  MOD_RES (3)..(4)..(35)..(37): Xaa is C or S

SEQ ID NO: 69763 - protein, 38 aa, Artificial Sequence; identical to SEQ ID NO: 7400
  GFR-binding peptide
  MOD_RES (2)..(3)..(36)..(38): Xaa is C or S

SEQ ID NO: 69764 - protein, 35 aa, Artificial Sequence; identical to SEQ ID NO: 7403
  GFR-binding peptide
  MOD_RES (33)..(35): Xaa is C or S
  MOD_RES (14)..(15)..(16)..(17)..(18): Xaa is A or G
  MOD_RES (19)..(20)..(21)..(22): Xaa is A or G or is absent

SEQ ID NO: 69765 - protein, 39 aa, Artificial Sequence; identical to SEQ ID NO: 7404
  GFR-binding peptide
  MOD_RES (3)..(4)..(38): Xaa is C or S
  MOD_RES (18)..(19)..(20)..(21)..(22): Xaa is A or G
  MOD_RES (23)..(24)..(25)..(26): Xaa is A or G or is absent

SEQ ID NO: 69766 - protein, 35 aa, Artificial Sequence
  GFR-binding peptide
  MOD_RES (2)..(3)..(35): Xaa is C or S
PXXVPEKMEPISILYLDENKNVVKFKYENMTVESX

SEQ ID NO: 69767 - protein, 33 aa, Artificial Sequence; identical to SEQ ID NO: 28620
  GFR-binding peptide
  MOD_RES (14)..(15)..(16)..(17)..(18): Xaa is A or G
  MOD_RES (19)..(20)..(21)..(22): Xaa is A or G or is absent

SEQ ID NO: 69768 - protein, 38 aa, Artificial Sequence; identical to SEQ ID NO: 28621
  GFR-binding peptide
  MOD_RES (2)..(3)..(35)..(37): Xaa is C or S

SEQ ID NO: 69769 - protein, 39 aa, Artificial Sequence
  GFR-binding peptide
  MOD_RES (4)..(5)..(39): Xaa is C or S
  MOD_RES (19)..(20)..(21)..(22)..(23): Xaa is A or G
  MOD_RES (24)..(25)..(26)..(27): Xaa is A or G or is absent
PPTXXVPTRLEPISILYLXXXXXXXXXKFKYEDMVVESX

SEQ ID NO: 69770 - protein, 40 aa, Artificial Sequence; identical to SEQ ID NO: 7411
  GFR-binding peptide
  MOD_RES (2)..(3)..(37)..(39): Xaa is C or S
  MOD_RES (17)..(18)..(19)..(20)..(21): Xaa is A or G
  MOD_RES (22)..(23)..(24)..(25): Xaa is A or G or is absent

SEQ ID NO: 69771 - protein, 34 aa, Artificial Sequence; identical to SEQ ID NO: 32695
  GFR-binding peptide
  MOD_RES (32)..(34): Xaa is C or S

SEQ ID NO: 69772 - protein, 34 aa, Artificial Sequence; identical to SEQ ID NO: 7413
  GFR-binding peptide
  MOD_RES (3)..(4): Xaa is C or S

SEQ ID NO: 69773 - protein, 35 aa, Artificial Sequence; identical to SEQ ID NO: 28625
  GFR-binding peptide
  MOD_RES (34)..(34): Xaa is C or S
  MOD_RES (14)..(15)..(16)..(17)..(18): Xaa is A or G
  MOD_RES (19)..(20)..(21)..(22): Xaa is A or G or is absent

SEQ ID NO: 69774 - protein, 38 aa, Artificial Sequence; identical to SEQ ID NO: 28627
  GFR-binding peptide
  MOD_RES (1)..(2)..(36)..(38): Xaa is C or S
  MOD_RES (16)..(17)..(18)..(19)..(20): Xaa is A or G
  MOD_RES (21)..(22)..(23)..(24): Xaa is A or G or is absent

SEQ ID NO: 69775 - protein, 40 aa, Artificial Sequence
  GFR-binding peptide
  MOD_RES (3)..(4)..(37)..(39): Xaa is C or S
  MOD_RES (18)..(19)..(20)..(21)..(22): Xaa is A or G
  MOD_RES (23)..(24)..(25)..(26): Xaa is A or G or is absent
STXXAPVKTEPISMLYLXXXXXXXXXKFKYEMIVEEXGXL

SEQ ID NO: 69776 - protein, 37 aa, Artificial Sequence; identical to SEQ ID NO: 14715
  GFR-binding peptide
  MOD_RES (2)..(3)..(37): Xaa is C or S
  MOD_RES (17)..(18)..(19)..(20)..(21): Xaa is A or G
  MOD_RES (22)..(23)..(24)..(25): Xaa is A or G or is absent

SEQ ID NO: 69777 - protein, 39 aa, Artificial Sequence; identical to SEQ ID NO: 7418
  GFR-binding peptide
  MOD_RES (3)..(4)..(36)..(38): Xaa is C or S

SEQ ID NO: 69778 - protein, 36 aa, Artificial Sequence; identical to SEQ ID NO: 28631
  GFR-binding peptide
  MOD_RES (5)..(6): Xaa is C or S

SEQ ID NO: 69779 - protein, 35 aa, Artificial Sequence; identical to SEQ ID NO: 7420
  GFR-binding peptide
  MOD_RES (1)..(34): Xaa is C or S

SEQ ID NO: 69780 - protein, 37 aa, Artificial Sequence
  GFR-binding peptide
  MOD_RES (2)..(3)..(37): Xaa is C or S
  MOD_RES (17)..(18)..(19)..(20)..(21): Xaa is A or G
  MOD_RES (22)..(23)..(24)..(25): Xaa is A or G or is absent
PXXVPEKMSPISILYKXXXXXXXXXLKYHYNMTVESX

SEQ ID NO: 69781 - protein, 37 aa, Artificial Sequence; identical to SEQ ID NO: 28634
  GFR-binding peptide
  MOD_RES (4)..(5): Xaa is C or S
  MOD_RES (19)..(20)..(21)..(22)..(23): Xaa is A or G
  MOD_RES (24)..(25)..(26)..(27): Xaa is A or G or is absent

SEQ ID NO: 69782 - protein, 38 aa, Artificial Sequence; identical to SEQ ID NO: 32710
  GFR-binding peptide
  MOD_RES (2)..(3)..(38): Xaa is C or S
  MOD_RES (17)..(18)..(19)..(20)..(21): Xaa is A or G
  MOD_RES (22)..(23)..(24)..(25): Xaa is A or G or is absent

SEQ ID NO: 69783 - protein, 38 aa, Artificial Sequence; identical to SEQ ID NO: 32714
  GFR-binding peptide
  MOD_RES (3)..(4)..(36)..(38): Xaa is C or S

SEQ ID NO: 69784 - protein, 37 aa, Artificial Sequence
  GFR-binding peptide
  MOD_RES (5)..(6)..(37): Xaa is C or S
SASPXXVSQDLSPINILYFIGKTPKIYGKIPMIVKSX

SEQ ID NO: 69785 - protein, 42 aa, Artificial Sequence; identical to SEQ ID NO: 32719
  GFR-binding peptide
  MOD_RES (6)..(7)..(41): Xaa is C or S
  MOD_RES (21)..(22)..(23)..(24)..(25): Xaa is A or G
  MOD_RES (26)..(27)..(28)..(29): Xaa is A or G or is absent

SEQ ID NO: 69786 - protein, 37 aa, Artificial Sequence; identical to SEQ ID NO: 7426
  GFR-binding peptide
  MOD_RES (3)..(4)..(37): Xaa is C or S
  MOD_RES (18)..(19)..(20)..(21)..(22): Xaa is A or G
  MOD_RES (23)..(24)..(25)..(26): Xaa is A or G or is absent

SEQ ID NO: 69787 - protein, 39 aa, Artificial Sequence; identical to SEQ ID NO: 7429
  GFR-binding peptide
  MOD_RES (6)..(7): Xaa is C or S

SEQ ID NO: 69788 - protein, 35 aa, Artificial Sequence; identical to SEQ ID NO: 7430
  GFR-binding peptide
  MOD_RES (1)..(2)..(34): Xaa is C or S

SEQ ID NO: 69789 - protein, 37 aa, Artificial Sequence; identical to SEQ ID NO: 28646
  GFR-binding peptide
  MOD_RES (1)..(35)..(37): Xaa is C or S
  MOD_RES (15)..(16)..(17)..(18)..(19): Xaa is A or G
  MOD_RES (20)..(21)..(22)..(23): Xaa is A or G or is absent

SEQ ID NO: 69790 - protein, 32 aa, Artificial Sequence; identical to SEQ ID NO: 28647
  GFR-binding peptide
  MOD_RES (14)..(15)..(16)..(17)..(18): Xaa is A or G
  MOD_RES (19)..(20)..(21)..(22): Xaa is A or G or is absent

SEQ ID NO: 69791 - protein, 37 aa, Artificial Sequence; identical to SEQ ID NO: 32726
  GFR-binding peptide
  MOD_RES (1)..(35)..(37): Xaa is C or S
  MOD_RES (15)..(16)..(17)..(18)..(19): Xaa is A or G
  MOD_RES (20)..(21)..(22)..(23): Xaa is A or G or is absent

SEQ ID NO: 69792 - protein, 41 aa, Artificial Sequence; identical to SEQ ID NO: 28650
  GFR-binding peptide
  MOD_RES (6)..(7)..(40): Xaa is C or S
  MOD_RES (21)..(22)..(23)..(24)..(25): Xaa is A or G
  MOD_RES (26)..(27)..(28)..(29): Xaa is A or G or is absent

SEQ ID NO: 69793 - protein, 37 aa, Artificial Sequence; identical to SEQ ID NO: 7432
  GFR-binding peptide
  MOD_RES (2)..(3)..(36): Xaa is C or S
  MOD_RES (17)..(18)..(19)..(20)..(21): Xaa is A or G
  MOD_RES (22)..(23)..(24)..(25): Xaa is A or G or is absent

SEQ ID NO: 69794 - protein, 40 aa, Artificial Sequence; identical to SEQ ID NO: 7433
  GFR-binding peptide
  MOD_RES (6)..(7)..(40): Xaa is C or S
  MOD_RES (21)..(22)..(23)..(24)..(25): Xaa is A or G
  MOD_RES (26)..(27)..(28)..(29): Xaa is A or G or is absent

SEQ ID NO: 69795 - protein, 35 aa, Artificial Sequence; identical to SEQ ID NO: 7434
  GFR-binding peptide
  MOD_RES (1)..(34): Xaa is C or S
  MOD_RES (15)..(16)..(17)..(18)..(19): Xaa is A or G
  MOD_RES (20)..(21)..(22)..(23): Xaa is A or G or is absent

SEQ ID NO: 69796 - protein, 34 aa, Artificial Sequence; identical to SEQ ID NO: 7435
  GFR-binding peptide
  MOD_RES (1)..(2)..(34): Xaa is C or S

SEQ ID NO: 69797 - protein, 36 aa, Artificial Sequence; identical to SEQ ID NO: 7436
  GFR-binding peptide
  MOD_RES (1)..(2)..(33)..(35): Xaa is C or S

SEQ ID NO: 69798 - protein, 40 aa, Artificial Sequence; identical to SEQ ID NO: 57635
  GFR-binding peptide
  MOD_RES (4)..(5)..(39): Xaa is C or S
  MOD_RES (19)..(20)..(21)..(22)..(23): Xaa is A or G
  MOD_RES (24)..(25)..(26)..(27): Xaa is A or G or is absent

SEQ ID NO: 69799 - protein, 36 aa, Artificial Sequence; identical to SEQ ID NO: 7437
  GFR-binding peptide
  MOD_RES (1)..(2)..(36): Xaa is C or S
  MOD_RES (16)..(17)..(18)..(19)..(20): Xaa is A or G
  MOD_RES (21)..(22)..(23)..(24): Xaa is A or G or is absent

SEQ ID NO: 69800 - protein, 42 aa, Artificial Sequence; identical to SEQ ID NO: 7439
  GFR-binding peptide
  MOD_RES (4)..(5)..(39)..(41): Xaa is C or S
  MOD_RES (19)..(20)..(21)..(22)..(23): Xaa is A or G
  MOD_RES (24)..(25)..(26)..(27): Xaa is A or G or is absent

SEQ ID NO: 69801 - protein, 33 aa, Artificial Sequence
  GFR-binding peptide
  MOD_RES (2)..(3): Xaa is C or S
TXXVPTRLEPISILYLDSANNVVKFKYEDMVVE

SEQ ID NO: 69802 - protein, 37 aa, Artificial Sequence; identical to SEQ ID NO: 32731
  GFR-binding peptide
  MOD_RES (6)..(7): Xaa is C or S

SEQ ID NO: 69803 - protein, 42 aa, Artificial Sequence; identical to SEQ ID NO: 7443
  GFR-binding peptide
  MOD_RES (6)..(7)..(41): Xaa is C or S
  MOD_RES (21)..(22)..(23)..(24)..(25): Xaa is A or G
  MOD_RES (26)..(27)..(28)..(29): Xaa is A or G or is absent

SEQ ID NO: 69804 - protein, 43 aa, Artificial Sequence; identical to SEQ ID NO: 7444
  GFR-binding peptide
  MOD_RES (5)..(6)..(40)..(42): Xaa is C or S
  MOD_RES (20)..(21)..(22)..(23)..(24): Xaa is A or G
  MOD_RES (25)..(26)..(27)..(28): Xaa is A or G or is absent

SEQ ID NO: 69805 - protein, 40 aa, Artificial Sequence
  GFR-binding peptide
  MOD_RES (6)..(7)..(38)..(40): Xaa is C or S
RVPSTXXAPVKTSPISMLYKDNGRVLLLKYHYMIVEEXGX

SEQ ID NO: 69806 - protein, 38 aa, Artificial Sequence
  GFR-binding peptide
  MOD_RES (1)..(2)..(36)..(38): Xaa is C or S
  MOD_RES (16)..(17)..(18)..(19)..(20): Xaa is A or G
  MOD_RES (21)..(22)..(23)..(24): Xaa is A or G or is absent
XXTPTKMSPISMLYKXXXXXXXXXLKYHYGMVVDRXGX

SEQ ID NO: 69807 - protein, 36 aa, Artificial Sequence; identical to SEQ ID NO: 32733
  GFR-binding peptide
  MOD_RES (3)..(4)..(36): Xaa is C or S

SEQ ID NO: 69808 - protein, 37 aa, Artificial Sequence; identical to SEQ ID NO: 57644
  GFR-binding peptide
  MOD_RES (4)..(5)..(36): Xaa is C or S

SEQ ID NO: 69809 - protein, 39 aa, Artificial Sequence; identical to SEQ ID NO: 7447
  GFR-binding peptide
  MOD_RES (5)..(37)..(39): Xaa is C or S

SEQ ID NO: 69810 - protein, 35 aa, Artificial Sequence; identical to SEQ ID NO: 7448
  GFR-binding peptide
  MOD_RES (33)..(35): Xaa is C or S
  MOD_RES (14)..(15)..(16)..(17)..(18): Xaa is A or G
  MOD_RES (19)..(20)..(21)..(22): Xaa is A or G or is absent

SEQ ID NO: 69811 - protein, 44 aa, Artificial Sequence; identical to SEQ ID NO: 7449
  GFR-binding peptide
  MOD_RES (6)..(7)..(42)..(44): Xaa is C or S
  MOD_RES (21)..(22)..(23)..(24)..(25): Xaa is A or G
  MOD_RES (26)..(27)..(28)..(29): Xaa is A or G or is absent

SEQ ID NO: 69812 - protein, 36 aa, Artificial Sequence; identical to SEQ ID NO: 28674
  GFR-binding peptide
  MOD_RES (2)..(3): Xaa is C or S
  MOD_RES (17)..(18)..(19)..(20)..(21): Xaa is A or G
  MOD_RES (22)..(23)..(24)..(25): Xaa is A or G or is absent

SEQ ID NO: 69813 - protein, 39 aa, Artificial Sequence; identical to SEQ ID NO: 7450
  GFR-binding peptide
  MOD_RES (1)..(36)..(38): Xaa is C or S
  MOD_RES (15)..(16)..(17)..(18)..(19): Xaa is A or G
  MOD_RES (20)..(21)..(22)..(23): Xaa is A or G or is absent

SEQ ID NO: 69814 - protein, 33 aa, Artificial Sequence
  GFR-binding peptide
  MOD_RES (1)..(1): Xaa is C or S
  MOD_RES (15)..(16)..(17)..(18)..(19): Xaa is A or G
  MOD_RES (20)..(21)..(22)..(23): Xaa is A or G or is absent
XTPTKMSPISMLYKXXXXXXXXXLKYHYGMVVD

SEQ ID NO: 69815 - protein, 37 aa, Artificial Sequence
  GFR-binding peptide
  MOD_RES (4)..(5): Xaa is C or S
  MOD_RES (19)..(20)..(21)..(22)..(23): Xaa is A or G
  MOD_RES (24)..(25)..(26)..(27): Xaa is A or G or is absent
PEPXXVPEKMNAISILYFXXXXXXXXXLKKYRNMTVE

SEQ ID NO: 69816 - protein, 35 aa, Artificial Sequence; identical to SEQ ID NO: 7451
  GFR-binding peptide
  MOD_RES (3)..(4): Xaa is C or S

SEQ ID NO: 69817 - protein, 39 aa, Artificial Sequence; identical to SEQ ID NO: 7453
  GFR-binding peptide
  MOD_RES (5)..(6)..(37)..(39): Xaa is C or S

SEQ ID NO: 69818 - protein, 38 aa, Artificial Sequence
  GFR-binding peptide
  MOD_RES (3)..(4)..(38): Xaa is C or S
  MOD_RES (18)..(19)..(20)..(21)..(22): Xaa is A or G
  MOD_RES (23)..(24)..(25)..(26): Xaa is A or G or is absent
EPXXVPEKMSPISILYKXXXXXXXXXLKYHYNMTVESX

SEQ ID NO: 69819 - protein, 34 aa, Artificial Sequence; identical to SEQ ID NO: 7456
  GFR-binding peptide
  MOD_RES (1)..(2): Xaa is C or S
  MOD_RES (16)..(17)..(18)..(19)..(20): Xaa is A or G
  MOD_RES (21)..(22)..(23)..(24): Xaa is A or G or is absent

SEQ ID NO: 69820 - protein, 36 aa, Artificial Sequence
  GFR-binding peptide
  MOD_RES (1)..(2)..(36): Xaa is C or S
  MOD_RES (16)..(17)..(18)..(19)..(20): Xaa is A or G
  MOD_RES (21)..(22)..(23)..(24): Xaa is A or G or is absent
XXTPTKMSPISMLYKXXXXXXXXXLKYHYGMVVDRX

SEQ ID NO: 69821 - protein, 39 aa, Artificial Sequence; identical to SEQ ID NO: 7461
  GFR-binding peptide
  MOD_RES (5)..(6): Xaa is C or S
  MOD_RES (20)..(21)..(22)..(23)..(24): Xaa is A or G
  MOD_RES (25)..(26)..(27)..(28): Xaa is A or G or is absent

SEQ ID NO: 69822 - protein, 41 aa, Artificial Sequence; identical to SEQ ID NO: 7462
  GFR-binding peptide
  MOD_RES (6)..(7)..(39)..(41): Xaa is C or S

SEQ ID NO: 69823 - protein, 34 aa, Artificial Sequence; identical to SEQ ID NO: 7463
  GFR-binding peptide
  MOD_RES (1)..(2): Xaa is C or S
  MOD_RES (16)..(17)..(18)..(19)..(20): Xaa is A or G
  MOD_RES (21)..(22)..(23)..(24): Xaa is A or G or is absent

SEQ ID NO: 69824 - protein, 34 aa, Artificial Sequence
  GFR-binding peptide
  MOD_RES (34)..(34): Xaa is C or S
  MOD_RES (14)..(15)..(16)..(17)..(18): Xaa is A or G
  MOD_RES (19)..(20)..(21)..(22): Xaa is A or G or is absent
VPTRLSATSILYYXXXXXXXXXLRKHRDMVVESX

SEQ ID NO: 69825 - protein, 34 aa, Artificial Sequence
  GFR-binding peptide
  MOD_RES (2)..(3)..(34): Xaa is C or S
TXXAPVKTEPISMLYLDNGRVLLKFKYEMIVEEX

SEQ ID NO: 69826 - protein, 37 aa, Artificial Sequence; identical to SEQ ID NO: 7466
  GFR-binding peptide
  MOD_RES (1)..(35)..(37): Xaa is C or S
  MOD_RES (15)..(16)..(17)..(18)..(19): Xaa is A or G
  MOD_RES (20)..(21)..(22)..(23): Xaa is A or G or is absent

SEQ ID NO: 69827 - protein, 41 aa, Artificial Sequence; identical to SEQ ID NO: 7471
  GFR-binding peptide
  MOD_RES (4)..(5)..(39)..(41): Xaa is C or S
  MOD_RES (19)..(20)..(21)..(22)..(23): Xaa is A or G
  MOD_RES (24)..(25)..(26)..(27): Xaa is A or G or is absent

SEQ ID NO: 69828 - protein, 37 aa, Artificial Sequence; identical to SEQ ID NO: 32762
  GFR-binding peptide
  MOD_RES (1)..(2)..(34)..(36): Xaa is C or S

SEQ ID NO: 69829 - protein, 34 aa, Artificial Sequence; identical to SEQ ID NO: 7475
  GFR-binding peptide
  MOD_RES (2)..(3)..(34): Xaa is C or S

SEQ ID NO: 69830 - protein, 37 aa, Artificial Sequence; identical to SEQ ID NO: 28700
  GFR-binding peptide
  MOD_RES (4)..(5): Xaa is C or S
  MOD_RES (19)..(20)..(21)..(22)..(23): Xaa is A or G
  MOD_RES (24)..(25)..(26)..(27): Xaa is A or G or is absent

SEQ ID NO: 69831 - protein, 33 aa, Artificial Sequence; identical to SEQ ID NO: 57670
  GFR-binding peptide
  MOD_RES (1)..(33): Xaa is C or S

SEQ ID NO: 69832 - protein, 35 aa, Artificial Sequence; identical to SEQ ID NO: 7476
  GFR-binding peptide
  MOD_RES (2)..(3): Xaa is C or S
  MOD_RES (17)..(18)..(19)..(20)..(21): Xaa is A or G
  MOD_RES (22)..(23)..(24)..(25): Xaa is A or G or is absent

SEQ ID NO: 69833 - protein, 38 aa, Artificial Sequence; identical to SEQ ID NO: 7477
  GFR-binding peptide
  MOD_RES (5)..(6)..(37): Xaa is C or S

SEQ ID NO: 69834 - protein, 41 aa, Artificial Sequence; identical to SEQ ID NO: 28703
  GFR-binding peptide
  MOD_RES (4)..(5)..(40): Xaa is C or S
  MOD_RES (19)..(20)..(21)..(22)..(23): Xaa is A or G
  MOD_RES (24)..(25)..(26)..(27): Xaa is A or G or is absent

SEQ ID NO: 69835 - protein, 38 aa, Artificial Sequence
  GFR-binding peptide
  MOD_RES (6)..(7)..(38): Xaa is C or S
RVPSTXXAPVKTSATSMLYYDNGRVLLLRKHRMIVEEX

SEQ ID NO: 69836 - protein, 39 aa, Artificial Sequence; identical to SEQ ID NO: 57678
  GFR-binding peptide
  MOD_RES (3)..(4)..(36)..(38): Xaa is C or S

SEQ ID NO: 69837 - protein, 34 aa, Artificial Sequence; identical to SEQ ID NO: 32770
  GFR-binding peptide
  MOD_RES (1)..(2)..(34): Xaa is C or S

SEQ ID NO: 69838 - protein, 40 aa, Artificial Sequence
  GFR-binding peptide
  MOD_RES (4)..(5)..(37)..(39): Xaa is C or S
PEPXXVPEKMSATSILYYDENKNVVLRKHRNMTVESXAXR

SEQ ID NO: 69839 - protein, 34 aa, Artificial Sequence; identical to SEQ ID NO: 7485
  GFR-binding peptide
  MOD_RES (1)..(33): Xaa is C or S

SEQ ID NO: 69840 - protein, 38 aa, Artificial Sequence; identical to SEQ ID NO: 7486
  GFR-binding peptide
  MOD_RES (1)..(2)..(36)..(38): Xaa is C or S
  MOD_RES (16)..(17)..(18)..(19)..(20): Xaa is A or G
  MOD_RES (21)..(22)..(23)..(24): Xaa is A or G or is absent

SEQ ID NO: 69841 - protein, 41 aa, Artificial Sequence; identical to SEQ ID NO: 28712
  GFR-binding peptide
  MOD_RES (5)..(6)..(40): Xaa is C or S
  MOD_RES (20)..(21)..(22)..(23)..(24): Xaa is A or G
  MOD_RES (25)..(26)..(27)..(28): Xaa is A or G or is absent

SEQ ID NO: 69842 - protein, 40 aa, Artificial Sequence
  GFR-binding peptide
  MOD_RES (2)..(3)..(37)..(39): Xaa is C or S
  MOD_RES (17)..(18)..(19)..(20)..(21): Xaa is A or G
  MOD_RES (22)..(23)..(24)..(25): Xaa is A or G or is absent
SXXVPARLSATSILYYXXXXXXXXXLRKHRDMVVEAXGXR

SEQ ID NO: 69843 - protein, 39 aa, Artificial Sequence; identical to SEQ ID NO: 32781
  GFR-binding peptide
  MOD_RES (4)..(5)..(39): Xaa is C or S
  MOD_RES (19)..(20)..(21)..(22)..(23): Xaa is A or G
  MOD_RES (24)..(25)..(26)..(27): Xaa is A or G or is absent

SEQ ID NO: 69844 - protein, 39 aa, Artificial Sequence
  GFR-binding peptide
  MOD_RES (5)..(6)..(39): Xaa is C or S
  MOD_RES (20)..(21)..(22)..(23)..(24): Xaa is A or G
  MOD_RES (25)..(26)..(27)..(28): Xaa is A or G or is absent
VPSTXXAPVKTSPISMLYKXXXXXXXXXLKYHYMIVEEX

SEQ ID NO: 69845 - protein, 36 aa, Artificial Sequence; identical to SEQ ID NO: 7490
  GFR-binding peptide
  MOD_RES (1)..(36): Xaa is C or S
  MOD_RES (15)..(16)..(17)..(18)..(19): Xaa is A or G
  MOD_RES (20)..(21)..(22)..(23): Xaa is A or G or is absent

SEQ ID NO: 69846 - protein, 35 aa, Artificial Sequence; identical to SEQ ID NO: 32784
  GFR-binding peptide
  MOD_RES (4)..(5): Xaa is C or S

SEQ ID NO: 69847 - protein, 38 aa, Artificial Sequence
  GFR-binding peptide
  MOD_RES (3)..(4)..(36)..(38): Xaa is C or S
ASXXVPARLSATSILYYDAANNVVLRKHRDMVVEAXGX

SEQ ID NO: 69848 - protein, 38 aa, Artificial Sequence; identical to SEQ ID NO: 28720
  GFR-binding peptide
  MOD_RES (1)..(2)..(36)..(38): Xaa is C or S
  MOD_RES (16)..(17)..(18)..(19)..(20): Xaa is A or G
  MOD_RES (21)..(22)..(23)..(24): Xaa is A or G or is absent

SEQ ID NO: 69849 - protein, 40 aa, Artificial Sequence; identical to SEQ ID NO: 14802
  GFR-binding peptide
  MOD_RES (2)..(3)..(37)..(39): Xaa is C or S
  MOD_RES (17)..(18)..(19)..(20)..(21): Xaa is A or G
  MOD_RES (22)..(23)..(24)..(25): Xaa is A or G or is absent

SEQ ID NO: 69850 - protein, 38 aa, Artificial Sequence; identical to SEQ ID NO: 28726
  GFR-binding peptide
  MOD_RES (4)..(5): Xaa is C or S
  MOD_RES (19)..(20)..(21)..(22)..(23): Xaa is A or G
  MOD_RES (24)..(25)..(26)..(27): Xaa is A or G or is absent

SEQ ID NO: 69851 - protein, 42 aa, Artificial Sequence
  GFR-binding peptide
  MOD_RES (6)..(7)..(39)..(41): Xaa is C or S
GSAGPXXTPTKMEPISMLYLNDKQQIIKFKYEGMVVDRXGXS

SEQ ID NO: 69852 - protein, 38 aa, Artificial Sequence; identical to SEQ ID NO: 32793
  GFR-binding peptide
  MOD_RES (5)..(6): Xaa is C or S
  MOD_RES (20)..(21)..(22)..(23)..(24): Xaa is A or G
  MOD_RES (25)..(26)..(27)..(28): Xaa is A or G or is absent

SEQ ID NO: 69853 - protein, 37 aa, Artificial Sequence; identical to SEQ ID NO: 7501
  GFR-binding peptide
  MOD_RES (1)..(2)..(34)..(36): Xaa is C or S

SEQ ID NO: 69854 - protein, 35 aa, Artificial Sequence; identical to SEQ ID NO: 28730
  GFR-binding peptide
  MOD_RES (3)..(4)..(35): Xaa is C or S

SEQ ID NO: 69855 - protein, 38 aa, Artificial Sequence; identical to SEQ ID NO: 7503
  GFR-binding peptide
  MOD_RES (2)..(3)..(35)..(37): Xaa is C or S

SEQ ID NO: 69856 - protein, 35 aa, Artificial Sequence; identical to SEQ ID NO: 7505
  GFR-binding peptide
  MOD_RES (1)..(2): Xaa is C or S
  MOD_RES (16)..(17)..(18)..(19)..(20): Xaa is A or G
  MOD_RES (21)..(22)..(23)..(24): Xaa is A or G or is absent

SEQ ID NO: 69857 - protein, 37 aa, Artificial Sequence; identical to SEQ ID NO: 32799
  GFR-binding peptide
  MOD_RES (6)..(7): Xaa is C or S

SEQ ID NO: 69858 - protein, 36 aa, Artificial Sequence; identical to SEQ ID NO: 7507
  GFR-binding peptide
  MOD_RES (5)..(6): Xaa is C or S

SEQ ID NO: 69859 - protein, 40 aa, Artificial Sequence; identical to SEQ ID NO: 32801
  GFR-binding peptide
  MOD_RES (2)..(3)..(37)..(39): Xaa is C or S
  MOD_RES (17)..(18)..(19)..(20)..(21): Xaa is A or G
  MOD_RES (22)..(23)..(24)..(25): Xaa is A or G or is absent

SEQ ID NO: 69860 - protein, 34 aa, Artificial Sequence
  GFR-binding peptide
  MOD_RES (1)..(33): Xaa is C or S
XVPEKMNAISILYFDENKNVVLKKYRNMTVESXA

SEQ ID NO: 69861 - protein, 38 aa, Artificial Sequence; identical to SEQ ID NO: 32809
  GFR-binding peptide
  MOD_RES (1)..(35)..(37): Xaa is C or S
  MOD_RES (15)..(16)..(17)..(18)..(19): Xaa is A or G
  MOD_RES (20)..(21)..(22)..(23): Xaa is A or G or is absent

SEQ ID NO: 69862 - protein, 39 aa, Artificial Sequence; identical to SEQ ID NO: 7512
  GFR-binding peptide
  MOD_RES (5)..(6)..(37)..(39): Xaa is C or S

SEQ ID NO: 69863 - protein, 39 aa, Artificial Sequence; identical to SEQ ID NO: 7515
  GFR-binding peptide
  MOD_RES (6)..(7)..(38): Xaa is C or S

SEQ ID NO: 69864 - protein, 37 aa, Artificial Sequence
  GFR-binding peptide
  MOD_RES (4)..(5): Xaa is C or S
  MOD_RES (19)..(20)..(21)..(22)..(23): Xaa is A or G
  MOD_RES (24)..(25)..(26)..(27): Xaa is A or G or is absent
ASPXXVSQDLSPINILYFXXXXXXXXXYGKIPMIVKS

SEQ ID NO: 69865 - protein, 35 aa, Artificial Sequence; identical to SEQ ID NO: 32814
  GFR-binding peptide
  MOD_RES (32)..(34): Xaa is C or S

SEQ ID NO: 69866 - protein, 44 aa, Artificial Sequence
  GFR-binding peptide
  MOD_RES (6)..(7)..(41)..(43): Xaa is C or S
  MOD_RES (21)..(22)..(23)..(24)..(25): Xaa is A or G
  MOD_RES (26)..(27)..(28)..(29): Xaa is A or G or is absent
GSAGPXXTPTKMSPISMLYKXXXXXXXXXLKYHYGMVVDRXGXS

SEQ ID NO: 69867 - protein, 39 aa, Artificial Sequence; identical to SEQ ID NO: 7516
  GFR-binding peptide
  MOD_RES (4)..(5)..(38): Xaa is C or S
  MOD_RES (19)..(20)..(21)..(22)..(23): Xaa is A or G
  MOD_RES (24)..(25)..(26)..(27): Xaa is A or G or is absent

SEQ ID NO: 69868 - protein, 34 aa, Artificial Sequence; identical to SEQ ID NO: 7517
  GFR-binding peptide
  MOD_RES (33)..(33): Xaa is C or S
  MOD_RES (14)..(15)..(16)..(17)..(18): Xaa is A or G
  MOD_RES (19)..(20)..(21)..(22): Xaa is A or G or is absent

SEQ ID NO: 69869 - protein, 38 aa, Artificial Sequence; identical to SEQ ID NO: 28748
  GFR-binding peptide
  MOD_RES (6)..(7): Xaa is C or S

SEQ ID NO: 69870 - protein, 38 aa, Artificial Sequence
  GFR-binding peptide
  MOD_RES (3)..(4)..(35)..(37): Xaa is C or S
STXXAPVKTSATSMLYYDNGRVLLLRKHRMIVEEXGXL

SEQ ID NO: 69871 - protein, 42 aa, Artificial Sequence; identical to SEQ ID NO: 7519
  GFR-binding peptide
  MOD_RES (5)..(6)..(41): Xaa is C or S
  MOD_RES (20)..(21)..(22)..(23)..(24): Xaa is A or G
  MOD_RES (25)..(26)..(27)..(28): Xaa is A or G or is absent

SEQ ID NO: 69872 - protein, 34 aa, Artificial Sequence; identical to SEQ ID NO: 28751
  GFR-binding peptide
  MOD_RES (34)..(34): Xaa is C or S
  MOD_RES (14)..(15)..(16)..(17)..(18): Xaa is A or G
  MOD_RES (19)..(20)..(21)..(22): Xaa is A or G or is absent

SEQ ID NO: 69873 - protein, 36 aa, Artificial Sequence
  GFR-binding peptide
  MOD_RES (5)..(6): Xaa is C or S
SAGPXXTPTKMSPISMLYKNDKQQIILKYHYGMVVD

SEQ ID NO: 69874 - protein, 39 aa, Artificial Sequence; identical to SEQ ID NO: 28755
  GFR-binding peptide
  MOD_RES (4)..(5)..(37)..(39): Xaa is C or S

SEQ ID NO: 69875 - protein, 39 aa, Artificial Sequence; identical to SEQ ID NO: 7522
  GFR-binding peptide
  MOD_RES (6)..(7): Xaa is C or S
  MOD_RES (21)..(22)..(23)..(24)..(25): Xaa is A or G
  MOD_RES (26)..(27)..(28)..(29): Xaa is A or G or is absent

SEQ ID NO: 69876 - protein, 40 aa, Artificial Sequence; identical to SEQ ID NO: 7524
  GFR-binding peptide
  MOD_RES (4)..(5)..(39): Xaa is C or S
  MOD_RES (19)..(20)..(21)..(22)..(23): Xaa is A or G
  MOD_RES (24)..(25)..(26)..(27): Xaa is A or G or is absent

SEQ ID NO: 69877 - protein, 39 aa, Artificial Sequence; identical to SEQ ID NO: 28759
  GFR-binding peptide
  MOD_RES (1)..(2)..(37)..(39): Xaa is C or S
  MOD_RES (16)..(17)..(18)..(19)..(20): Xaa is A or G
  MOD_RES (21)..(22)..(23)..(24): Xaa is A or G or is absent

SEQ ID NO: 69878 - protein, 39 aa, Artificial Sequence; identical to SEQ ID NO: 7527
  GFR-binding peptide
  MOD_RES (5)..(6): Xaa is C or S
  MOD_RES (20)..(21)..(22)..(23)..(24): Xaa is A or G
  MOD_RES (25)..(26)..(27)..(28): Xaa is A or G or is absent

SEQ ID NO: 69879 - protein, 35 aa, Artificial Sequence; identical to SEQ ID NO: 32831
  GFR-binding peptide
  MOD_RES (2)..(3)..(35): Xaa is C or S

SEQ ID NO: 69880 - protein, 37 aa, Artificial Sequence; identical to SEQ ID NO: 28764
  GFR-binding peptide
  MOD_RES (2)..(3)..(35)..(37): Xaa is C or S

SEQ ID NO: 69881 - protein, 37 aa, Artificial Sequence
  GFR-binding peptide
  MOD_RES (1)..(35)..(37): Xaa is C or S
  MOD_RES (15)..(16)..(17)..(18)..(19): Xaa is A or G
  MOD_RES (20)..(21)..(22)..(23): Xaa is A or G or is absent
XVPTRLSATSILYYXXXXXXXXXLRKHRDMVVESXGX

SEQ ID NO: 69882 - protein, 43 aa, Artificial Sequence
  GFR-binding peptide
  MOD_RES (6)..(7)..(41)..(43): Xaa is C or S
  MOD_RES (21)..(22)..(23)..(24)..(25): Xaa is A or G
  MOD_RES (26)..(27)..(28)..(29): Xaa is A or G or is absent
HVPKPXXAPTKLSPISVLYKXXXXXXXXXLKYHYNMVVRSXGX

SEQ ID NO: 69883 - protein, 41 aa, Artificial Sequence
  GFR-binding peptide
  MOD_RES (6)..(7)..(41): Xaa is C or S
  MOD_RES (21)..(22)..(23)..(24)..(25): Xaa is A or G
  MOD_RES (26)..(27)..(28)..(29): Xaa is A or G or is absent
GSAGPXXTPTKMEPISMLYLXXXXXXXXXKFKYEGMVVDRX

SEQ ID NO: 69884 - protein, 41 aa, Artificial Sequence; identical to SEQ ID NO: 32833
  GFR-binding peptide
  MOD_RES (4)..(5)..(39)..(41): Xaa is C or S
  MOD_RES (19)..(20)..(21)..(22)..(23): Xaa is A or G
  MOD_RES (24)..(25)..(26)..(27): Xaa is A or G or is absent

SEQ ID NO: 69885 - protein, 37 aa, Artificial Sequence; identical to SEQ ID NO: 7532
  GFR-binding peptide
  MOD_RES (6)..(7): Xaa is C or S

SEQ ID NO: 69886 - protein, 32 aa, Artificial Sequence; identical to SEQ ID NO: 7533
  GFR-binding peptide
  MOD_RES (31)..(31): Xaa is C or S

SEQ ID NO: 69887 - protein, 37 aa, Artificial Sequence; identical to SEQ ID NO: 28767
  GFR-binding peptide
  MOD_RES (6)..(7): Xaa is C or S

SEQ ID NO: 69888 - protein, 38 aa, Artificial Sequence; identical to SEQ ID NO: 7534
  GFR-binding peptide
  MOD_RES (6)..(7): Xaa is C or S

SEQ ID NO: 69889 - protein, 41 aa, Artificial Sequence; identical to SEQ ID NO: 28769
  GFR-binding peptide
  MOD_RES (4)..(5)..(39)..(41): Xaa is C or S
  MOD_RES (19)..(20)..(21)..(22)..(23): Xaa is A or G
  MOD_RES (24)..(25)..(26)..(27): Xaa is A or G or is absent

SEQ ID NO: 69890 - protein, 31 aa, Artificial Sequence; identical to SEQ ID NO: 28771
  GFR-binding peptide

SEQ ID NO: 69891 - protein, 38 aa, Artificial Sequence; identical to SEQ ID NO: 7536
  GFR-binding peptide
  MOD_RES (3)..(4): Xaa is C or S
  MOD_RES (18)..(19)..(20)..(21)..(22): Xaa is A or G
  MOD_RES (23)..(24)..(25)..(26): Xaa is A or G or is absent

SEQ ID NO: 69892 - protein, 38 aa, Artificial Sequence; identical to SEQ ID NO: 28773
  GFR-binding peptide
  MOD_RES (2)..(3)..(35)..(37): Xaa is C or S

SEQ ID NO: 69893 - protein, 40 aa, Artificial Sequence; identical to SEQ ID NO: 32844
  GFR-binding peptide
  MOD_RES (4)..(5)..(37)..(39): Xaa is C or S

SEQ ID NO: 69894 - protein, 38 aa, Artificial Sequence; identical to SEQ ID NO: 28775
  GFR-binding peptide
  MOD_RES (3)..(4)..(38): Xaa is C or S
  MOD_RES (18)..(19)..(20)..(21)..(22): Xaa is A or G
  MOD_RES (23)..(24)..(25)..(26): Xaa is A or G or is absent

SEQ ID NO: 69895 - protein, 37 aa, Artificial Sequence; identical to SEQ ID NO: 7537
  GFR-binding peptide
  MOD_RES (1)..(34)..(36): Xaa is C or S
  MOD_RES (15)..(16)..(17)..(18)..(19): Xaa is A or G
  MOD_RES (20)..(21)..(22)..(23): Xaa is A or G or is absent

SEQ ID NO: 69896 - protein, 35 aa, Artificial Sequence; identical to SEQ ID NO: 28777
  GFR-binding peptide
  MOD_RES (2)..(3): Xaa is C or S
  MOD_RES (17)..(18)..(19)..(20)..(21): Xaa is A or G
  MOD_RES (22)..(23)..(24)..(25): Xaa is A or G or is absent

SEQ ID NO: 69897 - protein, 39 aa, Artificial Sequence; identical to SEQ ID NO: 7538
  GFR-binding peptide
  MOD_RES (5)..(6)..(37)..(39): Xaa is C or S

SEQ ID NO: 69898 - protein, 40 aa, Artificial Sequence; identical to SEQ ID NO: 7545
  GFR-binding peptide
  MOD_RES (3)..(4)..(38)..(40): Xaa is C or S
  MOD_RES (18)..(19)..(20)..(21)..(22): Xaa is A or G
  MOD_RES (23)..(24)..(25)..(26): Xaa is A or G or is absent

SEQ ID NO: 69899 - protein, 37 aa, Artificial Sequence; identical to SEQ ID NO: 28785
  GFR-binding peptide
  MOD_RES (5)..(6): Xaa is C or S

SEQ ID NO: 69900 - protein, 37 aa, Artificial Sequence; identical to SEQ ID NO: 7550
  GFR-binding peptide
  MOD_RES (3)..(4): Xaa is C or S
  MOD_RES (18)..(19)..(20)..(21)..(22): Xaa is A or G
  MOD_RES (23)..(24)..(25)..(26): Xaa is A or G or is absent

SEQ ID NO: 69901 - protein, 38 aa, Artificial Sequence; identical to SEQ ID NO: 32852
  GFR-binding peptide
  MOD_RES (2)..(3)..(36)..(38): Xaa is C or S
  MOD_RES (17)..(18)..(19)..(20)..(21): Xaa is A or G
  MOD_RES (22)..(23)..(24)..(25): Xaa is A or G or is absent

SEQ ID NO: 69902 - protein, 35 aa, Artificial Sequence; identical to SEQ ID NO: 7551
  GFR-binding peptide
  MOD_RES (32)..(34): Xaa is C or S

SEQ ID NO: 69903 - protein, 40 aa, Artificial Sequence; identical to SEQ ID NO: 57764
  GFR-binding peptide
  MOD_RES (5)..(6)..(40): Xaa is C or S
  MOD_RES (20)..(21)..(22)..(23)..(24): Xaa is A or G
  MOD_RES (25)..(26)..(27)..(28): Xaa is A or G or is absent

SEQ ID NO: 69904 - protein, 39 aa, Artificial Sequence
  GFR-binding peptide
  MOD_RES (5)..(6)..(39): Xaa is C or S
  MOD_RES (20)..(21)..(22)..(23)..(24): Xaa is A or G
  MOD_RES (25)..(26)..(27)..(28): Xaa is A or G or is absent
VPSTXXAPVKTEPISMLYLXXXXXXXXXKFKYEMIVEEX

SEQ ID NO: 69905 - protein, 38 aa, Artificial Sequence; identical to SEQ ID NO: 32853
  GFR-binding peptide
  MOD_RES (3)..(4)..(38): Xaa is C or S
  MOD_RES (18)..(19)..(20)..(21)..(22): Xaa is A or G
  MOD_RES (23)..(24)..(25)..(26): Xaa is A or G or is absent

SEQ ID NO: 69906 - protein, 33 aa, Artificial Sequence
  GFR-binding peptide
  MOD_RES (1)..(1): Xaa is C or S
  MOD_RES (15)..(16)..(17)..(18)..(19): Xaa is A or G
  MOD_RES (20)..(21)..(22)..(23): Xaa is A or G or is absent
XVPTKLSATSILYYXXXXXXXXXLRKHRGMAVS

SEQ ID NO: 69907 - protein, 38 aa, Artificial Sequence; identical to SEQ ID NO: 7554
  GFR-binding peptide
  MOD_RES (35)..(37): Xaa is C or S
  MOD_RES (14)..(15)..(16)..(17)..(18): Xaa is A or G
  MOD_RES (19)..(20)..(21)..(22): Xaa is A or G or is absent

SEQ ID NO: 69908 - protein, 34 aa, Artificial Sequence
  GFR-binding peptide
  MOD_RES (1)..(33): Xaa is C or S
XVPEKMEPISILYLDENKNVVKFKYENMTVESXA

SEQ ID NO: 69909 - protein, 35 aa, Artificial Sequence; identical to SEQ ID NO: 7555
  GFR-binding peptide
  MOD_RES (1)..(34): Xaa is C or S
  MOD_RES (15)..(16)..(17)..(18)..(19): Xaa is A or G
  MOD_RES (20)..(21)..(22)..(23): Xaa is A or G or is absent

SEQ ID NO: 69910 - protein, 39 aa, Artificial Sequence; identical to SEQ ID NO: 28797
  GFR-binding peptide
  MOD_RES (5)..(6): Xaa is C or S
  MOD_RES (20)..(21)..(22)..(23)..(24): Xaa is A or G
  MOD_RES (25)..(26)..(27)..(28): Xaa is A or G or is absent

SEQ ID NO: 69911 - protein, 41 aa, Artificial Sequence; identical to SEQ ID NO: 32862
  GFR-binding peptide
  MOD_RES (6)..(7)..(39)..(41): Xaa is C or S

SEQ ID NO: 69912 - protein, 34 aa, Artificial Sequence
  GFR-binding peptide
  MOD_RES (1)..(2): Xaa is C or S
  MOD_RES (16)..(17)..(18)..(19)..(20): Xaa is A or G
  MOD_RES (21)..(22)..(23)..(24): Xaa is A or G or is absent
XXVSQDLSPINILYFXXXXXXXXXYGKIPMIVKS

SEQ ID NO: 69913 - protein, 39 aa, Artificial Sequence; identical to SEQ ID NO: 28801
  GFR-binding peptide
  MOD_RES (4)..(5)..(39): Xaa is C or S
  MOD_RES (19)..(20)..(21)..(22)..(23): Xaa is A or G
  MOD_RES (24)..(25)..(26)..(27): Xaa is A or G or is absent

SEQ ID NO: 69914 - protein, 36 aa, Artificial Sequence; identical to SEQ ID NO: 28803
  GFR-binding peptide
  MOD_RES (1)..(2)..(33)..(35): Xaa is C or S

SEQ ID NO: 69915 - protein, 42 aa, Artificial Sequence; identical to SEQ ID NO: 7568
  GFR-binding peptide
  MOD_RES (6)..(7)..(41): Xaa is C or S
  MOD_RES (21)..(22)..(23)..(24)..(25): Xaa is A or G
  MOD_RES (26)..(27)..(28)..(29): Xaa is A or G or is absent

SEQ ID NO: 69916 - protein, 34 aa, Artificial Sequence; identical to SEQ ID NO: 7569
  GFR-binding peptide
  MOD_RES (1)..(34): Xaa is C or S

SEQ ID NO: 69917 - protein, 39 aa, Artificial Sequence
  GFR-binding peptide
  MOD_RES (5)..(6)..(39): Xaa is C or S
  MOD_RES (20)..(21)..(22)..(23)..(24): Xaa is A or G
  MOD_RES (25)..(26)..(27)..(28): Xaa is A or G or is absent
SASPXXVSQDLSPINILYFXXXXXXXXXYGKIPMIVKSX

SEQ ID NO: 69918 - protein, 35 aa, Artificial Sequence; identical to SEQ ID NO: 7571
  GFR-binding peptide
  MOD_RES (1)..(33)..(35): Xaa is C or S

SEQ ID NO: 69919 - protein, 40 aa, Artificial Sequence; identical to SEQ ID NO: 28810
  GFR-binding peptide
  MOD_RES (6)..(7): Xaa is C or S
  MOD_RES (21)..(22)..(23)..(24)..(25): Xaa is A or G
  MOD_RES (26)..(27)..(28)..(29): Xaa is A or G or is absent

SEQ ID NO: 69920 - protein, 37 aa, Artificial Sequence; identical to SEQ ID NO: 28811
  GFR-binding peptide
  MOD_RES (3)..(4)..(37): Xaa is C or S
  MOD_RES (18)..(19)..(20)..(21)..(22): Xaa is A or G
  MOD_RES (23)..(24)..(25)..(26): Xaa is A or G or is absent

SEQ ID NO: 69921 - protein, 35 aa, Artificial Sequence; identical to SEQ ID NO: 28812
  GFR-binding peptide
  MOD_RES (1)..(32)..(34): Xaa is C or S

SEQ ID NO: 69922 - protein, 40 aa, Artificial Sequence; identical to SEQ ID NO: 7580
  GFR-binding peptide
  MOD_RES (4)..(5)..(39): Xaa is C or S
  MOD_RES (19)..(20)..(21)..(22)..(23): Xaa is A or G
  MOD_RES (24)..(25)..(26)..(27): Xaa is A or G or is absent

SEQ ID NO: 69923 - protein, 39 aa, Artificial Sequence; identical to SEQ ID NO: 32880
  GFR-binding peptide
  MOD_RES (6)..(7): Xaa is C or S
  MOD_RES (21)..(22)..(23)..(24)..(25): Xaa is A or G
  MOD_RES (26)..(27)..(28)..(29): Xaa is A or G or is absent

SEQ ID NO: 69924 - protein, 38 aa, Artificial Sequence
  GFR-binding peptide
  MOD_RES (2)..(3)..(35)..(37): Xaa is C or S
PXXVPEKMSATSILYYDENKNVVLRKHRNMTVESXAXR

SEQ ID NO: 69925 - protein, 31 aa, Artificial Sequence; identical to SEQ ID NO: 32887
  GFR-binding peptide
  MOD_RES (1)..(1): Xaa is C or S

SEQ ID NO: 69926 - protein, 38 aa, Artificial Sequence
  GFR-binding peptide
  MOD_RES (3)..(4)..(38): Xaa is C or S
  MOD_RES (18)..(19)..(20)..(21)..(22): Xaa is A or G
  MOD_RES (23)..(24)..(25)..(26): Xaa is A or G or is absent
EPXXVPEKMNAISILYFXXXXXXXXXLKKYRNMTVESX

SEQ ID NO: 69927 - protein, 34 aa, Artificial Sequence; identical to SEQ ID NO: 28826
  GFR-binding peptide
  MOD_RES (34)..(34): Xaa is C or S
  MOD_RES (14)..(15)..(16)..(17)..(18): Xaa is A or G
  MOD_RES (19)..(20)..(21)..(22): Xaa is A or G or is absent

SEQ ID NO: 69928 - protein, 40 aa, Artificial Sequence; identical to SEQ ID NO: 32896
  GFR-binding peptide
  MOD_RES (6)..(7)..(39): Xaa is C or S

SEQ ID NO: 69929 - protein, 35 aa, Artificial Sequence; identical to SEQ ID NO: 7590
  GFR-binding peptide
  MOD_RES (3)..(4)..(35): Xaa is C or S

SEQ ID NO: 69930 - protein, 36 aa, Artificial Sequence; identical to SEQ ID NO: 7591
  GFR-binding peptide
  MOD_RES (2)..(3)..(34)..(36): Xaa is C or S

SEQ ID NO: 69931 - protein, 39 aa, Artificial Sequence; identical to SEQ ID NO: 28833
  GFR-binding peptide
  MOD_RES (3)..(4)..(36)..(38): Xaa is C or S

SEQ ID NO: 69932 - protein, 42 aa, Artificial Sequence; identical to SEQ ID NO: 32902
  GFR-binding peptide
  MOD_RES (6)..(7)..(41): Xaa is C or S
  MOD_RES (21)..(22)..(23)..(24)..(25): Xaa is A or G
  MOD_RES (26)..(27)..(28)..(29): Xaa is A or G or is absent

SEQ ID NO: 69933 - protein, 33 aa, Artificial Sequence; identical to SEQ ID NO: 7593
  GFR-binding peptide
  MOD_RES (32)..(32): Xaa is C or S

SEQ ID NO: 69934 - protein, 40 aa, Artificial Sequence
  GFR-binding peptide
  MOD_RES (5)..(6)..(40): Xaa is C or S
  MOD_RES (20)..(21)..(22)..(23)..(24): Xaa is A or G
  MOD_RES (25)..(26)..(27)..(28): Xaa is A or G or is absent
IPEPXXVPEKMNAISILYFXXXXXXXXXLKKYRNMTVESX

SEQ ID NO: 69935 - protein, 39 aa, Artificial Sequence; identical to SEQ ID NO: 7595
  GFR-binding peptide
  MOD_RES (5)..(39): Xaa is C or S
  MOD_RES (19)..(20)..(21)..(22)..(23): Xaa is A or G
  MOD_RES (24)..(25)..(26)..(27): Xaa is A or G or is absent

SEQ ID NO: 69936 - protein, 37 aa, Artificial Sequence; identical to SEQ ID NO: 7598
  GFR-binding peptide
  MOD_RES (3)..(4): Xaa is C or S
  MOD_RES (18)..(19)..(20)..(21)..(22): Xaa is A or G
  MOD_RES (23)..(24)..(25)..(26): Xaa is A or G or is absent

SEQ ID NO: 69937 - protein, 36 aa, Artificial Sequence; identical to SEQ ID NO: 32911
  GFR-binding peptide
  MOD_RES (34)..(36): Xaa is C or S
  MOD_RES (14)..(15)..(16)..(17)..(18): Xaa is A or G
  MOD_RES (19)..(20)..(21)..(22): Xaa is A or G or is absent

SEQ ID NO: 69938 - protein, 34 aa, Artificial Sequence; identical to SEQ ID NO: 32917
  GFR-binding peptide
  MOD_RES (3)..(4): Xaa is C or S

SEQ ID NO: 69939 - protein, 40 aa, Artificial Sequence; identical to SEQ ID NO: 28843
  GFR-binding peptide
  MOD_RES (5)..(6)..(38)..(40): Xaa is C or S

SEQ ID NO: 69940 - protein, 37 aa, Artificial Sequence; identical to SEQ ID NO: 28846
  GFR-binding peptide
  MOD_RES (2)..(3)..(37): Xaa is C or S
  MOD_RES (17)..(18)..(19)..(20)..(21): Xaa is A or G
  MOD_RES (22)..(23)..(24)..(25): Xaa is A or G or is absent

SEQ ID NO: 69941 - protein, 35 aa, Artificial Sequence; identical to SEQ ID NO: 7603
  GFR-binding peptide
  MOD_RES (2)..(3)..(34): Xaa is C or S

SEQ ID NO: 69942 - protein, 41 aa, Artificial Sequence; identical to SEQ ID NO: 32921
  GFR-binding peptide
  MOD_RES (6)..(7)..(39)..(41): Xaa is C or S

SEQ ID NO: 69943 - protein, 31 aa, Artificial Sequence; identical to SEQ ID NO: 7604
  GFR-binding peptide

SEQ ID NO: 69944 - protein, 34 aa, Artificial Sequence; identical to SEQ ID NO: 7606
  GFR-binding peptide
  MOD_RES (32)..(34): Xaa is C or S

SEQ ID NO: 69945 - protein, 35 aa, Artificial Sequence; identical to SEQ ID NO: 7608
  GFR-binding peptide
  MOD_RES (2)..(3)..(34): Xaa is C or S

SEQ ID NO: 69946 - protein, 35 aa, Artificial Sequence; identical to SEQ ID NO: 32923
  GFR-binding peptide
  MOD_RES (3)..(3): Xaa is C or S
  MOD_RES (17)..(18)..(19)..(20)..(21): Xaa is A or G
  MOD_RES (22)..(23)..(24)..(25): Xaa is A or G or is absent

SEQ ID NO: 69947 - protein, 36 aa, Artificial Sequence; identical to SEQ ID NO: 57825
  GFR-binding peptide
  MOD_RES (1)..(34)..(36): Xaa is C or S
  MOD_RES (15)..(16)..(17)..(18)..(19): Xaa is A or G
  MOD_RES (20)..(21)..(22)..(23): Xaa is A or G or is absent

SEQ ID NO: 69948 - protein, 35 aa, Artificial Sequence; identical to SEQ ID NO: 28854
  GFR-binding peptide
  MOD_RES (4)..(5): Xaa is C or S

SEQ ID NO: 69949 - protein, 37 aa, Artificial Sequence; identical to SEQ ID NO: 28855
  GFR-binding peptide
  MOD_RES (5)..(37): Xaa is C or S

SEQ ID NO: 69950 - protein, 37 aa, Artificial Sequence; identical to SEQ ID NO: 28858
  GFR-binding peptide
  MOD_RES (2)..(3)..(35)..(37): Xaa is C or S

SEQ ID NO: 69951 - protein, 37 aa, Artificial Sequence; identical to SEQ ID NO: 7610
  GFR-binding peptide
  MOD_RES (4)..(5): Xaa is C or S
  MOD_RES (19)..(20)..(21)..(22)..(23): Xaa is A or G
  MOD_RES (24)..(25)..(26)..(27): Xaa is A or G or is absent

SEQ ID NO: 69952 - protein, 32 aa, Artificial Sequence; identical to SEQ ID NO: 7611
  GFR-binding peptide
  MOD_RES (32)..(32): Xaa is C or S

SEQ ID NO: 69953 - protein, 35 aa, Artificial Sequence; identical to SEQ ID NO: 7612
  GFR-binding peptide
  MOD_RES (1)..(2): Xaa is C or S
  MOD_RES (16)..(17)..(18)..(19)..(20): Xaa is A or G
  MOD_RES (21)..(22)..(23)..(24): Xaa is A or G or is absent

SEQ ID NO: 69954 - protein, 35 aa, Artificial Sequence; identical to SEQ ID NO: 7613
  GFR-binding peptide
  MOD_RES (1)..(2)..(34): Xaa is C or S

SEQ ID NO: 69955 - protein, 38 aa, Artificial Sequence; identical to SEQ ID NO: 28866
  GFR-binding peptide
  MOD_RES (5)..(6): Xaa is C or S
  MOD_RES (20)..(21)..(22)..(23)..(24): Xaa is A or G
  MOD_RES (25)..(26)..(27)..(28): Xaa is A or G or is absent

SEQ ID NO: 69956 - protein, 35 aa, Artificial Sequence
  GFR-binding peptide
  MOD_RES (1)..(32)..(34): Xaa is C or S
XVSQDLSPINILYFIGKTPKIYGKIPMIVKSXKXS

SEQ ID NO: 69957 - protein, 42 aa, Artificial Sequence
  GFR-binding peptide
  MOD_RES (5)..(6)..(39)..(41): Xaa is C or S
  MOD_RES (20)..(21)..(22)..(23)..(24): Xaa is A or G
  MOD_RES (25)..(26)..(27)..(28): Xaa is A or G or is absent
VPSTXXAPVKTSPISMLYKXXXXXXXXXLKYHYMIVEEXGXL

SEQ ID NO: 69958 - protein, 36 aa, Artificial Sequence; identical to SEQ ID NO: 32937
  GFR-binding peptide
  MOD_RES (1)..(34)..(36): Xaa is C or S

SEQ ID NO: 69959 - protein, 31 aa, Artificial Sequence; identical to SEQ ID NO: 32938
  GFR-binding peptide
  MOD_RES (1)..(1): Xaa is C or S

SEQ ID NO: 69960 - protein, 40 aa, Artificial Sequence; identical to SEQ ID NO: 28868
  GFR-binding peptide
  MOD_RES (5)..(6)..(40): Xaa is C or S
  MOD_RES (20)..(21)..(22)..(23)..(24): Xaa is A or G
  MOD_RES (25)..(26)..(27)..(28): Xaa is A or G or is absent

SEQ ID NO: 69961 - protein, 40 aa, Artificial Sequence; identical to SEQ ID NO: 28869
  GFR-binding peptide
  MOD_RES (5)..(6)..(38)..(40): Xaa is C or S

SEQ ID NO: 69962 - protein, 36 aa, Artificial Sequence; identical to SEQ ID NO: 7618
  GFR-binding peptide
  MOD_RES (4)..(5): Xaa is C or S

SEQ ID NO: 69963 - protein, 37 aa, Artificial Sequence
  GFR-binding peptide
  MOD_RES (2)..(3)..(35)..(37): Xaa is C or S
PXXVPEKMSATSILYYDENKNVVLRKHRNMTVESXAX

SEQ ID NO: 69964 - protein, 42 aa, Artificial Sequence; identical to SEQ ID NO: 28875
  GFR-binding peptide
  MOD_RES (6)..(7)..(39)..(41): Xaa is C or S

SEQ ID NO: 69965 - protein, 33 aa, Artificial Sequence
  GFR-binding peptide
  MOD_RES (32)..(32): Xaa is C or S
VPTRLSPISILYKDSANNVVLKYHYDMVVESXG

SEQ ID NO: 69966 - protein, 32 aa, Artificial Sequence; identical to SEQ ID NO: 28878
  GFR-binding peptide
  MOD_RES (32)..(32): Xaa is C or S

SEQ ID NO: 69967 - protein, 39 aa, Artificial Sequence; identical to SEQ ID NO: 28879
  GFR-binding peptide
  MOD_RES (2)..(3)..(37)..(39): Xaa is C or S
  MOD_RES (17)..(18)..(19)..(20)..(21): Xaa is A or G
  MOD_RES (22)..(23)..(24)..(25): Xaa is A or G or is absent

SEQ ID NO: 69968 - protein, 38 aa, Artificial Sequence; identical to SEQ ID NO: 28880
  GFR-binding peptide
  MOD_RES (1)..(2)..(36)..(38): Xaa is C or S
  MOD_RES (16)..(17)..(18)..(19)..(20): Xaa is A or G
  MOD_RES (21)..(22)..(23)..(24): Xaa is A or G or is absent

SEQ ID NO: 69969 - protein, 42 aa, Artificial Sequence; identical to SEQ ID NO: 7623
  GFR-binding peptide
  MOD_RES (6)..(7)..(40)..(42): Xaa is C or S
  MOD_RES (21)..(22)..(23)..(24)..(25): Xaa is A or G
  MOD_RES (26)..(27)..(28)..(29): Xaa is A or G or is absent

SEQ ID NO: 69970 - protein, 38 aa, Artificial Sequence; identical to SEQ ID NO: 28885
  GFR-binding peptide
  MOD_RES (35)..(37): Xaa is C or S
  MOD_RES (14)..(15)..(16)..(17)..(18): Xaa is A or G
  MOD_RES (19)..(20)..(21)..(22): Xaa is A or G or is absent

SEQ ID NO: 69971 - protein, 41 aa, Artificial Sequence; identical to SEQ ID NO: 28886
  GFR-binding peptide
  MOD_RES (6)..(7)..(41): Xaa is C or S
  MOD_RES (21)..(22)..(23)..(24)..(25): Xaa is A or G
  MOD_RES (26)..(27)..(28)..(29): Xaa is A or G or is absent

SEQ ID NO: 69972 - protein, 37 aa, Artificial Sequence
  GFR-binding peptide
  MOD_RES (1)..(2)..(34)..(36): Xaa is C or S
XXVPTKLSATSILYYDKGVVTYLRKHRGMAVSEXGXR

SEQ ID NO: 69973 - protein, 38 aa, Artificial Sequence; identical to SEQ ID NO: 28887
  GFR-binding peptide
  MOD_RES (5)..(6): Xaa is C or S
  MOD_RES (20)..(21)..(22)..(23)..(24): Xaa is A or G
  MOD_RES (25)..(26)..(27)..(28): Xaa is A or G or is absent

SEQ ID NO: 69974 - protein, 39 aa, Artificial Sequence; identical to SEQ ID NO: 28889
  GFR-binding peptide
  MOD_RES (6)..(7)..(38): Xaa is C or S

SEQ ID NO: 69975 - protein, 38 aa, Artificial Sequence; identical to SEQ ID NO: 28892
  GFR-binding peptide
  MOD_RES (3)..(4)..(38): Xaa is C or S
  MOD_RES (18)..(19)..(20)..(21)..(22): Xaa is A or G
  MOD_RES (23)..(24)..(25)..(26): Xaa is A or G or is absent

SEQ ID NO: 69976 - protein, 34 aa, Artificial Sequence; identical to SEQ ID NO: 7626
  GFR-binding peptide
  MOD_RES (1)..(2)..(33): Xaa is C or S

SEQ ID NO: 69977 - protein, 34 aa, Artificial Sequence; identical to SEQ ID NO: 28894
  GFR-binding peptide
  MOD_RES (3)..(4): Xaa is C or S

SEQ ID NO: 69978 - protein, 39 aa, Artificial Sequence; identical to SEQ ID NO: 7627
  GFR-binding peptide
  MOD_RES (3)..(4)..(37)..(39): Xaa is C or S
  MOD_RES (18)..(19)..(20)..(21)..(22): Xaa is A or G
  MOD_RES (23)..(24)..(25)..(26): Xaa is A or G or is absent

SEQ ID NO: 69979 - protein, 36 aa, Artificial Sequence; identical to SEQ ID NO: 28897
  GFR-binding peptide
  MOD_RES (1)..(35): Xaa is C or S
  MOD_RES (15)..(16)..(17)..(18)..(19): Xaa is A or G
  MOD_RES (20)..(21)..(22)..(23): Xaa is A or G or is absent

SEQ ID NO: 69980 - protein, 35 aa, Artificial Sequence; identical to SEQ ID NO: 28898
  GFR-binding peptide
  MOD_RES (1)..(2): Xaa is C or S
  MOD_RES (16)..(17)..(18)..(19)..(20): Xaa is A or G
  MOD_RES (21)..(22)..(23)..(24): Xaa is A or G or is absent

SEQ ID NO: 69981 - protein, 42 aa, Artificial Sequence; identical to SEQ ID NO: 7628
  GFR-binding peptide
  MOD_RES (5)..(6)..(40)..(42): Xaa is C or S
  MOD_RES (20)..(21)..(22)..(23)..(24): Xaa is A or G
  MOD_RES (25)..(26)..(27)..(28): Xaa is A or G or is absent

SEQ ID NO: 69982 - protein, 33 aa, Artificial Sequence; identical to SEQ ID NO: 32962
  GFR-binding peptide
  MOD_RES (1)..(33): Xaa is C or S

SEQ ID NO: 69983 - protein, 38 aa, Artificial Sequence; identical to SEQ ID NO: 28903
  GFR-binding peptide
  MOD_RES (4)..(5): Xaa is C or S
  MOD_RES (19)..(20)..(21)..(22)..(23): Xaa is A or G
  MOD_RES (24)..(25)..(26)..(27): Xaa is A or G or is absent

SEQ ID NO: 69984 - protein, 38 aa, Artificial Sequence; identical to SEQ ID NO: 14940
  GFR-binding peptide
  MOD_RES (2)..(3)..(37): Xaa is C or S
  MOD_RES (17)..(18)..(19)..(20)..(21): Xaa is A or G
  MOD_RES (22)..(23)..(24)..(25): Xaa is A or G or is absent

SEQ ID NO: 69985 - protein, 35 aa, Artificial Sequence
  GFR-binding peptide
  MOD_RES (1)..(33)..(35): Xaa is C or S
XVPEKMNAISILYFDENKNVVLKKYRNMTVESXAX

SEQ ID NO: 69986 - protein, 36 aa, Artificial Sequence; identical to SEQ ID NO: 28906
  GFR-binding peptide
  MOD_RES (1)..(2)..(34)..(36): Xaa is C or S

SEQ ID NO: 69987 - protein, 38 aa, Artificial Sequence
  GFR-binding peptide
  MOD_RES (1)..(35)..(37): Xaa is C or S
  MOD_RES (15)..(16)..(17)..(18)..(19): Xaa is A or G
  MOD_RES (20)..(21)..(22)..(23): Xaa is A or G or is absent
XTPTKMSATSMLYYXXXXXXXXXLRKHRGMVVDRXGXS

SEQ ID NO: 69988 - protein, 31 aa, Artificial Sequence; identical to SEQ ID NO: 7633
  GFR-binding peptide
  MOD_RES (1)..(1): Xaa is C or S

SEQ ID NO: 69989 - protein, 37 aa, Artificial Sequence; identical to SEQ ID NO: 7634
  GFR-binding peptide
  MOD_RES (2)..(3)..(37): Xaa is C or S
  MOD_RES (17)..(18)..(19)..(20)..(21): Xaa is A or G
  MOD_RES (22)..(23)..(24)..(25): Xaa is A or G or is absent

SEQ ID NO: 69990 - protein, 36 aa, Artificial Sequence; identical to SEQ ID NO: 7635
  GFR-binding peptide
  MOD_RES (2)..(3)..(34)..(36): Xaa is C or S

SEQ ID NO: 69991 - protein, 42 aa, Artificial Sequence; identical to SEQ ID NO: 32974
  GFR-binding peptide
  MOD_RES (5)..(6)..(39)..(41): Xaa is C or S
  MOD_RES (20)..(21)..(22)..(23)..(24): Xaa is A or G
  MOD_RES (25)..(26)..(27)..(28): Xaa is A or G or is absent

SEQ ID NO: 69992 - protein, 39 aa, Artificial Sequence
  GFR-binding peptide
  MOD_RES (6)..(7)..(39): Xaa is C or S
HVPKPXXAPTKLSPISVLYKDDSSNVILKYHYNMVVRSX

SEQ ID NO: 69993 - protein, 39 aa, Artificial Sequence
  GFR-binding peptide
  MOD_RES (5)..(6)..(37)..(39): Xaa is C or S
SASPXXVSQDLSPINILYFIGKTPKIYGKIPMIVKSXKX

SEQ ID NO: 69994 - protein, 34 aa, Artificial Sequence
  GFR-binding peptide
  MOD_RES (32)..(34): Xaa is C or S
VPTKLSATSILYYDKGVVTYLRKHRGMAVSEXGX

SEQ ID NO: 69995 - protein, 38 aa, Artificial Sequence
  GFR-binding peptide
  MOD_RES (6)..(7): Xaa is C or S
GIPEPXXVPEKMEPISILYLDENKNVVKFKYENMTVES

SEQ ID NO: 69996 - protein, 36 aa, Artificial Sequence
  GFR-binding peptide
  MOD_RES (2)..(3)..(35): Xaa is C or S
AXXVPTKLSATSILYYDKGVVTYLRKHRGMAVSEXG

SEQ ID NO: 69997 - protein, 34 aa, Artificial Sequence; identical to SEQ ID NO: 32979
  GFR-binding peptide
  MOD_RES (32)..(34): Xaa is C or S

SEQ ID NO: 69998 - protein, 38 aa, Artificial Sequence; identical to SEQ ID NO: 7639
  GFR-binding peptide
  MOD_RES (4)..(5): Xaa is C or S
  MOD_RES (19)..(20)..(21)..(22)..(23): Xaa is A or G
  MOD_RES (24)..(25)..(26)..(27): Xaa is A or G or is absent

SEQ ID NO: 69999 - protein, 41 aa, Artificial Sequence; identical to SEQ ID NO: 7640
  GFR-binding peptide
  MOD_RES (3)..(4)..(38)..(40): Xaa is C or S
  MOD_RES (18)..(19)..(20)..(21)..(22): Xaa is A or G
  MOD_RES (23)..(24)..(25)..(26): Xaa is A or G or is absent

SEQ ID NO: 70000 - protein, 36 aa, Artificial Sequence
  GFR-binding peptide
  MOD_RES (2)..(3)..(34)..(36): Xaa is C or S
PXXVSQDLSPINILYFIGKTPKIYGKIPMIVKSXKX

SEQ ID NO: 70001 - protein, 34 aa, Artificial Sequence; identical to SEQ ID NO: 7642
  GFR-binding peptide
  MOD_RES (3)..(4): Xaa is C or S

SEQ ID NO: 70002 - protein, 42 aa, Artificial Sequence; identical to SEQ ID NO: 7643
  GFR-binding peptide
  MOD_RES (6)..(7)..(41): Xaa is C or S
  MOD_RES (21)..(22)..(23)..(24)..(25): Xaa is A or G
  MOD_RES (26)..(27)..(28)..(29): Xaa is A or G or is absent

SEQ ID NO: 70003 - protein, 43 aa, Artificial Sequence; identical to SEQ ID NO: 28924
  GFR-binding peptide
  MOD_RES (6)..(7)..(41)..(43): Xaa is C or S
  MOD_RES (21)..(22)..(23)..(24)..(25): Xaa is A or G
  MOD_RES (26)..(27)..(28)..(29): Xaa is A or G or is absent

SEQ ID NO: 70004 - protein, 35 aa, Artificial Sequence
  GFR-binding peptide
  MOD_RES (2)..(3): Xaa is C or S
  MOD_RES (17)..(18)..(19)..(20)..(21): Xaa is A or G
  MOD_RES (22)..(23)..(24)..(25): Xaa is A or G or is absent
PXXVPQALSPINILYFXXXXXXXXXYGKIPMIVRS

SEQ ID NO: 70005 - protein, 38 aa, Artificial Sequence; identical to SEQ ID NO: 7644
  GFR-binding peptide
  MOD_RES (5)..(6): Xaa is C or S
  MOD_RES (20)..(21)..(22)..(23)..(24): Xaa is A or G
  MOD_RES (25)..(26)..(27)..(28): Xaa is A or G or is absent

SEQ ID NO: 70006 - protein, 39 aa, Artificial Sequence
  GFR-binding peptide
  MOD_RES (2)..(3)..(37)..(39): Xaa is C or S
  MOD_RES (17)..(18)..(19)..(20)..(21): Xaa is A or G
  MOD_RES (22)..(23)..(24)..(25): Xaa is A or G or is absent
PXXVPEKMSATSILYYXXXXXXXXXLRKHRNMTVESXAX

SEQ ID NO: 70007 - protein, 36 aa, Artificial Sequence; identical to SEQ ID NO: 28930
  GFR-binding peptide
  MOD_RES (5)..(6): Xaa is C or S

SEQ ID NO: 70008 - protein, 31 aa, Artificial Sequence
  GFR-binding peptide
VPEKMNAISILYFDENKNVVLKKYRNMTVES

SEQ ID NO: 70009 - protein, 38 aa, Artificial Sequence; identical to SEQ ID NO: 28931
  GFR-binding peptide
  MOD_RES (3)..(4)..(38): Xaa is C or S
  MOD_RES (18)..(19)..(20)..(21)..(22): Xaa is A or G
  MOD_RES (23)..(24)..(25)..(26): Xaa is A or G or is absent

SEQ ID NO: 70010 - protein, 34 aa, Artificial Sequence; identical to SEQ ID NO: 28934
  GFR-binding peptide
  MOD_RES (1)..(33): Xaa is C or S

SEQ ID NO: 70011 - protein, 36 aa, Artificial Sequence
  GFR-binding peptide
  MOD_RES (2)..(3)..(35): Xaa is C or S
SXXVPARLSATSILYYDAANNVVLRKHRDMVVEAXG

SEQ ID NO: 70012 - protein, 36 aa, Artificial Sequence; identical to SEQ ID NO: 28938
  GFR-binding peptide
  MOD_RES (4)..(5): Xaa is C or S

SEQ ID NO: 70013 - protein, 37 aa, Artificial Sequence; identical to SEQ ID NO: 28939
  GFR-binding peptide
  MOD_RES (3)..(4): Xaa is C or S
  MOD_RES (18)..(19)..(20)..(21)..(22): Xaa is A or G
  MOD_RES (23)..(24)..(25)..(26): Xaa is A or G or is absent

SEQ ID NO: 70014 - protein, 34 aa, Artificial Sequence; identical to SEQ ID NO: 32993
  GFR-binding peptide
  MOD_RES (2)..(3): Xaa is C or S

SEQ ID NO: 70015 - protein, 36 aa, Artificial Sequence
  GFR-binding peptide
  MOD_RES (2)..(3)..(35): Xaa is C or S
PXXVPEKMNAISILYFDENKNVVLKKYRNMTVESXA

SEQ ID NO: 70016 - protein, 33 aa, Artificial Sequence; identical to SEQ ID NO: 28941
  GFR-binding peptide
  MOD_RES (1)..(1): Xaa is C or S
  MOD_RES (15)..(16)..(17)..(18)..(19): Xaa is A or G
  MOD_RES (20)..(21)..(22)..(23): Xaa is A or G or is absent

SEQ ID NO: 70017 - protein, 39 aa, Artificial Sequence; identical to SEQ ID NO: 32998
  GFR-binding peptide
  MOD_RES (3)..(4)..(38): Xaa is C or S
  MOD_RES (18)..(19)..(20)..(21)..(22): Xaa is A or G
  MOD_RES (23)..(24)..(25)..(26): Xaa is A or G or is absent

SEQ ID NO: 70018 - protein, 36 aa, Artificial Sequence; identical to SEQ ID NO: 28943
  GFR-binding peptide
  MOD_RES (33)..(35): Xaa is C or S
  MOD_RES (14)..(15)..(16)..(17)..(18): Xaa is A or G
  MOD_RES (19)..(20)..(21)..(22): Xaa is A or G or is absent

SEQ ID NO: 70019 - protein, 38 aa, Artificial Sequence; identical to SEQ ID NO: 33000
  GFR-binding peptide
  MOD_RES (4)..(5): Xaa is C or S
  MOD_RES (19)..(20)..(21)..(22)..(23): Xaa is A or G
  MOD_RES (24)..(25)..(26)..(27): Xaa is A or G or is absent

SEQ ID NO: 70020 - protein, 41 aa, Artificial Sequence; identical to SEQ ID NO: 33001
  GFR-binding peptide
  MOD_RES (5)..(6)..(40): Xaa is C or S
  MOD_RES (20)..(21)..(22)..(23)..(24): Xaa is A or G
  MOD_RES (25)..(26)..(27)..(28): Xaa is A or G or is absent

SEQ ID NO: 70021 - protein, 38 aa, Artificial Sequence; identical to SEQ ID NO: 7661
  GFR-binding peptide
  MOD_RES (3)..(4)..(36)..(38): Xaa is C or S

SEQ ID NO: 70022 - protein, 39 aa, Artificial Sequence; identical to SEQ ID NO: 28947
  GFR-binding peptide
  MOD_RES (3)..(4)..(39): Xaa is C or S
  MOD_RES (18)..(19)..(20)..(21)..(22): Xaa is A or G
  MOD_RES (23)..(24)..(25)..(26): Xaa is A or G or is absent

SEQ ID NO: 70023 - protein, 40 aa, Artificial Sequence; identical to SEQ ID NO: 7662
  GFR-binding peptide
  MOD_RES (5)..(6): Xaa is C or S
  MOD_RES (20)..(21)..(22)..(23)..(24): Xaa is A or G
  MOD_RES (25)..(26)..(27)..(28): Xaa is A or G or is absent

SEQ ID NO: 70024 - protein, 38 aa, Artificial Sequence; identical to SEQ ID NO: 7663
  GFR-binding peptide
  MOD_RES (4)..(5)..(36)..(38): Xaa is C or S

SEQ ID NO: 70025 - protein, 35 aa, Artificial Sequence; identical to SEQ ID NO: 33008
  GFR-binding peptide
  MOD_RES (32)..(34): Xaa is C or S

SEQ ID NO: 70026 - protein, 42 aa, Artificial Sequence; identical to SEQ ID NO: 28951
  GFR-binding peptide
  MOD_RES (6)..(7)..(40)..(42): Xaa is C or S
  MOD_RES (21)..(22)..(23)..(24)..(25): Xaa is A or G
  MOD_RES (26)..(27)..(28)..(29): Xaa is A or G or is absent

SEQ ID NO: 70027 - protein, 33 aa, Artificial Sequence
  GFR-binding peptide
  MOD_RES (1)..(2): Xaa is C or S
XXVPEKMSPISILYKDENKNVVLKYHYNMTVES

SEQ ID NO: 70028 - protein, 38 aa, Artificial Sequence; identical to SEQ ID NO: 33011
  GFR-binding peptide
  MOD_RES (6)..(38): Xaa is C or S

SEQ ID NO: 70029 - protein, 34 aa, Artificial Sequence; identical to SEQ ID NO: 7669
  GFR-binding peptide
  MOD_RES (1)..(2): Xaa is C or S
  MOD_RES (16)..(17)..(18)..(19)..(20): Xaa is A or G
  MOD_RES (21)..(22)..(23)..(24): Xaa is A or G or is absent

SEQ ID NO: 70030 - protein, 38 aa, Artificial Sequence; identical to SEQ ID NO: 57907
  GFR-binding peptide
  MOD_RES (4)..(5)..(36)..(38): Xaa is C or S

SEQ ID NO: 70031 - protein, 34 aa, Artificial Sequence
  GFR-binding peptide
  MOD_RES (1)..(2)..(33): Xaa is C or S
XXAPVKTEPISMLYLDNGRVLLKFKYEMIVEEXG

SEQ ID NO: 70032 - protein, 35 aa, Artificial Sequence
  GFR-binding peptide
  MOD_RES (2)..(3): Xaa is C or S
  MOD_RES (17)..(18)..(19)..(20)..(21): Xaa is A or G
  MOD_RES (22)..(23)..(24)..(25): Xaa is A or G or is absent
TXXVPTRLSATSILYYXXXXXXXXXLRKHRDMVVE

SEQ ID NO: 70033 - protein, 34 aa, Artificial Sequence; identical to SEQ ID NO: 7671
  GFR-binding peptide
  MOD_RES (32)..(34): Xaa is C or S

SEQ ID NO: 70034 - protein, 37 aa, Artificial Sequence; identical to SEQ ID NO: 7672
  GFR-binding peptide
  MOD_RES (5)..(6): Xaa is C or S

SEQ ID NO: 70035 - protein, 38 aa, Artificial Sequence; identical to SEQ ID NO: 28963
  GFR-binding peptide
  MOD_RES (1)..(2)..(35)..(37): Xaa is C or S

SEQ ID NO: 70036 - protein, 36 aa, Artificial Sequence
  GFR-binding peptide
  MOD_RES (4)..(5): Xaa is C or S
PEPXXVPEKMSPINILYFDENKNVVYGKIPNMTVES

SEQ ID NO: 70037 - protein, 32 aa, Artificial Sequence; identical to SEQ ID NO: 28968
  GFR-binding peptide
  MOD_RES (14)..(15)..(16)..(17)..(18): Xaa is A or G
  MOD_RES (19)..(20)..(21)..(22): Xaa is A or G or is absent

SEQ ID NO: 70038 - protein, 35 aa, Artificial Sequence; identical to SEQ ID NO: 33025
  GFR-binding peptide
  MOD_RES (3)..(4): Xaa is C or S

SEQ ID NO: 70039 - protein, 35 aa, Artificial Sequence
  GFR-binding peptide
  MOD_RES (32)..(34): Xaa is C or S
VPEKMSATSILYYDENKNVVLRKHRNMTVESXAXR

SEQ ID NO: 70040 - protein, 37 aa, Artificial Sequence; identical to SEQ ID NO: 57918
  GFR-binding peptide
  MOD_RES (5)..(6)..(37): Xaa is C or S

SEQ ID NO: 70041 - protein, 36 aa, Artificial Sequence; identical to SEQ ID NO: 7676
  GFR-binding peptide
  MOD_RES (5)..(6): Xaa is C or S

SEQ ID NO: 70042 - protein, 32 aa, Artificial Sequence; identical to SEQ ID NO: 28970
  GFR-binding peptide
  MOD_RES (32)..(32): Xaa is C or S

SEQ ID NO: 70043 - protein, 40 aa, Artificial Sequence; identical to SEQ ID NO: 28971
  GFR-binding peptide
  MOD_RES (3)..(4)..(37)..(39): Xaa is C or S
  MOD_RES (18)..(19)..(20)..(21)..(22): Xaa is A or G
  MOD_RES (23)..(24)..(25)..(26): Xaa is A or G or is absent

SEQ ID NO: 70044 - protein, 40 aa, Artificial Sequence
  GFR-binding peptide
  MOD_RES (6)..(7)..(38)..(40): Xaa is C or S
ASASPXXVPQDLSPINILYFVGRTPKVYGKIPMVVKSXKX

SEQ ID NO: 70045 - protein, 34 aa, Artificial Sequence; identical to SEQ ID NO: 7677
  GFR-binding peptide
  MOD_RES (1)..(2)..(34): Xaa is C or S

SEQ ID NO: 70046 - protein, 37 aa, Artificial Sequence; identical to SEQ ID NO: 28973
  GFR-binding peptide
  MOD_RES (5)..(6): Xaa is C or S

SEQ ID NO: 70047 - protein, 37 aa, Artificial Sequence; identical to SEQ ID NO: 7680
  GFR-binding peptide
  MOD_RES (1)..(35)..(37): Xaa is C or S
  MOD_RES (15)..(16)..(17)..(18)..(19): Xaa is A or G
  MOD_RES (20)..(21)..(22)..(23): Xaa is A or G or is absent

SEQ ID NO: 70048 - protein, 37 aa, Artificial Sequence; identical to SEQ ID NO: 7681
  GFR-binding peptide
  MOD_RES (2)..(3)..(36): Xaa is C or S
  MOD_RES (17)..(18)..(19)..(20)..(21): Xaa is A or G
  MOD_RES (22)..(23)..(24)..(25): Xaa is A or G or is absent

SEQ ID NO: 70049 - protein, 36 aa, Artificial Sequence
  GFR-binding peptide
  MOD_RES (4)..(5): Xaa is C or S
PEPXXVPEKMSPISILYKDENKNVVLKYHYNMTVES

SEQ ID NO: 70050 - protein, 41 aa, Artificial Sequence; identical to SEQ ID NO: 14986
  GFR-binding peptide
  MOD_RES (3)..(4)..(38)..(40): Xaa is C or S
  MOD_RES (18)..(19)..(20)..(21)..(22): Xaa is A or G
  MOD_RES (23)..(24)..(25)..(26): Xaa is A or G or is absent

SEQ ID NO: 70051 - protein, 36 aa, Artificial Sequence; identical to SEQ ID NO: 33043
  GFR-binding peptide
  MOD_RES (1)..(35): Xaa is C or S
  MOD_RES (15)..(16)..(17)..(18)..(19): Xaa is A or G
  MOD_RES (20)..(21)..(22)..(23): Xaa is A or G or is absent

SEQ ID NO: 70052 - protein, 40 aa, Artificial Sequence; identical to SEQ ID NO: 7686
  GFR-binding peptide
  MOD_RES (5)..(6)..(39): Xaa is C or S

SEQ ID NO: 70053 - protein, 34 aa, Artificial Sequence; identical to SEQ ID NO: 7691
  GFR-binding peptide
  MOD_RES (1)..(2)..(33): Xaa is C or S

SEQ ID NO: 70054 - protein, 34 aa, Artificial Sequence; identical to SEQ ID NO: 28987
  GFR-binding peptide
  MOD_RES (1)..(2): Xaa is C or S
  MOD_RES (16)..(17)..(18)..(19)..(20): Xaa is A or G
  MOD_RES (21)..(22)..(23)..(24): Xaa is A or G or is absent

SEQ ID NO: 70055 - protein, 41 aa, Artificial Sequence; identical to SEQ ID NO: 7692
  GFR-binding peptide
  MOD_RES (5)..(6)..(41): Xaa is C or S
  MOD_RES (20)..(21)..(22)..(23)..(24): Xaa is A or G
  MOD_RES (25)..(26)..(27)..(28): Xaa is A or G or is absent

SEQ ID NO: 70056 - protein, 34 aa, Artificial Sequence
  GFR-binding peptide
  MOD_RES (31)..(33): Xaa is C or S
VPQDLSPINILYFVGRTPKVYGKIPMVVKSXKXS

SEQ ID NO: 70057 - protein, 37 aa, Artificial Sequence; identical to SEQ ID NO: 33053
  GFR-binding peptide
  MOD_RES (2)..(3)..(35)..(37): Xaa is C or S

SEQ ID NO: 70058 - protein, 39 aa, Artificial Sequence; identical to SEQ ID NO: 28991
  GFR-binding peptide
  MOD_RES (1)..(2)..(36)..(38): Xaa is C or S
  MOD_RES (16)..(17)..(18)..(19)..(20): Xaa is A or G
  MOD_RES (21)..(22)..(23)..(24): Xaa is A or G or is absent

SEQ ID NO: 70059 - protein, 42 aa, Artificial Sequence; identical to SEQ ID NO: 7700
  GFR-binding peptide
  MOD_RES (5)..(39)..(41): Xaa is C or S
  MOD_RES (19)..(20)..(21)..(22)..(23): Xaa is A or G
  MOD_RES (24)..(25)..(26)..(27): Xaa is A or G or is absent

SEQ ID NO: 70060 - protein, 36 aa, Artificial Sequence; identical to SEQ ID NO: 28997
  GFR-binding peptide
  MOD_RES (1)..(33)..(35): Xaa is C or S

SEQ ID NO: 70061 - protein, 30 aa, Artificial Sequence
  GFR-binding peptide
VPTKLSATSILYYDKGVVTYLRKHRGMAVS

SEQ ID NO: 70062 - protein, 42 aa, Artificial Sequence
  GFR-binding peptide
  MOD_RES (6)..(7)..(39)..(41): Xaa is C or S
GIPEPXXVPEKMSATSILYYDENKNVVLRKHRNMTVESXAXR

SEQ ID NO: 70063 - protein, 32 aa, Artificial Sequence; identical to SEQ ID NO: 7707
  GFR-binding peptide
  MOD_RES (1)..(2): Xaa is C or S

SEQ ID NO: 70064 - protein, 33 aa, Artificial Sequence; identical to SEQ ID NO: 29007
  GFR-binding peptide
  MOD_RES (14)..(15)..(16)..(17)..(18): Xaa is A or G
  MOD_RES (19)..(20)..(21)..(22): Xaa is A or G or is absent

SEQ ID NO: 70065 - protein, 34 aa, Artificial Sequence; identical to SEQ ID NO: 33063
  GFR-binding peptide
  MOD_RES (3)..(3): Xaa is C or S

SEQ ID NO: 70066 - protein, 33 aa, Artificial Sequence; identical to SEQ ID NO: 7711
  GFR-binding peptide
  MOD_RES (1)..(2)..(33): Xaa is C or S

SEQ ID NO: 70067 - protein, 40 aa, Artificial Sequence; identical to SEQ ID NO: 7715
  GFR-binding peptide
  MOD_RES (5)..(6)..(40): Xaa is C or S
  MOD_RES (20)..(21)..(22)..(23)..(24): Xaa is A or G
  MOD_RES (25)..(26)..(27)..(28): Xaa is A or G or is absent

SEQ ID NO: 70068 - protein, 38 aa, Artificial Sequence
  GFR-binding peptide
  MOD_RES (1)..(35)..(37): Xaa is C or S
  MOD_RES (15)..(16)..(17)..(18)..(19): Xaa is A or G
  MOD_RES (20)..(21)..(22)..(23): Xaa is A or G or is absent
XTPTKMEPISMLYLXXXXXXXXXKFKYEGMVVDRXGXS

SEQ ID NO: 70069 - protein, 40 aa, Artificial Sequence; identical to SEQ ID NO: 7717
  GFR-binding peptide
  MOD_RES (4)..(5)..(38)..(40): Xaa is C or S
  MOD_RES (19)..(20)..(21)..(22)..(23): Xaa is A or G
  MOD_RES (24)..(25)..(26)..(27): Xaa is A or G or is absent

SEQ ID NO: 70070 - protein, 44 aa, Artificial Sequence; identical to SEQ ID NO: 33071
  GFR-binding peptide
  MOD_RES (7)..(41)..(43): Xaa is C or S
  MOD_RES (21)..(22)..(23)..(24)..(25): Xaa is A or G
  MOD_RES (26)..(27)..(28)..(29): Xaa is A or G or is absent

SEQ ID NO: 70071 - protein, 39 aa, Artificial Sequence; identical to SEQ ID NO: 7720
  GFR-binding peptide
  MOD_RES (3)..(4)..(38): Xaa is C or S
  MOD_RES (18)..(19)..(20)..(21)..(22): Xaa is A or G
  MOD_RES (23)..(24)..(25)..(26): Xaa is A or G or is absent

SEQ ID NO: 70072 - protein, 35 aa, Artificial Sequence
  GFR-binding peptide
  MOD_RES (34)..(34): Xaa is C or S
  MOD_RES (14)..(15)..(16)..(17)..(18): Xaa is A or G
  MOD_RES (19)..(20)..(21)..(22): Xaa is A or G or is absent
VPTRLSPISILYKXXXXXXXXXLKYHYDMVVESXG

SEQ ID NO: 70073 - protein, 36 aa, Artificial Sequence; identical to SEQ ID NO: 7722
  GFR-binding peptide
  MOD_RES (2)..(3): Xaa is C or S
  MOD_RES (17)..(18)..(19)..(20)..(21): Xaa is A or G
  MOD_RES (22)..(23)..(24)..(25): Xaa is A or G or is absent

SEQ ID NO: 70074 - protein, 41 aa, Artificial Sequence; identical to SEQ ID NO: 33079
  GFR-binding peptide
  MOD_RES (6)..(7)..(41): Xaa is C or S
  MOD_RES (21)..(22)..(23)..(24)..(25): Xaa is A or G
  MOD_RES (26)..(27)..(28)..(29): Xaa is A or G or is absent

SEQ ID NO: 70075 - protein, 34 aa, Artificial Sequence
  GFR-binding peptide
  MOD_RES (3)..(4): Xaa is C or S
APXXVPQALSPINILYFVGRKPKVYGKIPMIVRS

SEQ ID NO: 70076 - protein, 34 aa, Artificial Sequence; identical to SEQ ID NO: 7724
  GFR-binding peptide
  MOD_RES (3)..(4): Xaa is C or S

SEQ ID NO: 70077 - protein, 37 aa, Artificial Sequence; identical to SEQ ID NO: 7728
  GFR-binding peptide
  MOD_RES (34)..(36): Xaa is C or S
  MOD_RES (14)..(15)..(16)..(17)..(18): Xaa is A or G
  MOD_RES (19)..(20)..(21)..(22): Xaa is A or G or is absent

SEQ ID NO: 70078 - protein, 37 aa, Artificial Sequence; identical to SEQ ID NO: 15027
  GFR-binding peptide
  MOD_RES (34)..(36): Xaa is C or S
  MOD_RES (14)..(15)..(16)..(17)..(18): Xaa is A or G
  MOD_RES (19)..(20)..(21)..(22): Xaa is A or G or is absent

SEQ ID NO: 70079 - protein, 35 aa, Artificial Sequence; identical to SEQ ID NO: 33088
  GFR-binding peptide
  MOD_RES (2)..(3)..(35): Xaa is C or S

SEQ ID NO: 70080 - protein, 35 aa, Artificial Sequence; identical to SEQ ID NO: 29024
  GFR-binding peptide
  MOD_RES (2)..(3): Xaa is C or S
  MOD_RES (17)..(18)..(19)..(20)..(21): Xaa is A or G
  MOD_RES (22)..(23)..(24)..(25): Xaa is A or G or is absent

SEQ ID NO: 70081 - protein, 41 aa, Artificial Sequence; identical to SEQ ID NO: 7729
  GFR-binding peptide
  MOD_RES (6)..(7)..(39)..(41): Xaa is C or S

SEQ ID NO: 70082 - protein, 34 aa, Artificial Sequence; identical to SEQ ID NO: 33091
  GFR-binding peptide
  MOD_RES (1)..(2)..(34): Xaa is C or S

SEQ ID NO: 70083 - protein, 35 aa, Artificial Sequence
  GFR-binding peptide
  MOD_RES (3)..(4): Xaa is C or S
EPXXVPEKMSPISILYKDENKNVVLKYHYNMTVES

SEQ ID NO: 70084 - protein, 39 aa, Artificial Sequence; identical to SEQ ID NO: 29027
  GFR-binding peptide
  MOD_RES (4)..(5)..(39): Xaa is C or S
  MOD_RES (19)..(20)..(21)..(22)..(23): Xaa is A or G
  MOD_RES (24)..(25)..(26)..(27): Xaa is A or G or is absent

SEQ ID NO: 70085 - protein, 34 aa, Artificial Sequence
  GFR-binding peptide
  MOD_RES (2)..(3): Xaa is C or S
PXXVPEKMNAISILYFDENKNVVLKKYRNMTVES

SEQ ID NO: 70086 - protein, 32 aa, Artificial Sequence; identical to SEQ ID NO: 29030
  GFR-binding peptide
  MOD_RES (31)..(31): Xaa is C or S

SEQ ID NO: 70087 - protein, 36 aa, Artificial Sequence; identical to SEQ ID NO: 29036
  GFR-binding peptide
  MOD_RES (3)..(4): Xaa is C or S
  MOD_RES (18)..(19)..(20)..(21)..(22): Xaa is A or G
  MOD_RES (23)..(24)..(25)..(26): Xaa is A or G or is absent

SEQ ID NO: 70088 - protein, 39 aa, Artificial Sequence; identical to SEQ ID NO: 7738
  GFR-binding peptide
  MOD_RES (2)..(3)..(37)..(39): Xaa is C or S
  MOD_RES (17)..(18)..(19)..(20)..(21): Xaa is A or G
  MOD_RES (22)..(23)..(24)..(25): Xaa is A or G or is absent

SEQ ID NO: 70089 - protein, 36 aa, Artificial Sequence
  GFR-binding peptide
  MOD_RES (2)..(3)..(34)..(36): Xaa is C or S
PXXVPQDLSPINILYFVGRTPKVYGKIPMVVKSXKX

SEQ ID NO: 70090 - protein, 39 aa, Artificial Sequence; identical to SEQ ID NO: 33106
  GFR-binding peptide
  MOD_RES (3)..(4)..(36)..(38): Xaa is C or S

SEQ ID NO: 70091 - protein, 41 aa, Artificial Sequence; identical to SEQ ID NO: 7739
  GFR-binding peptide
  MOD_RES (4)..(5)..(38)..(40): Xaa is C or S
  MOD_RES (19)..(20)..(21)..(22)..(23): Xaa is A or G
  MOD_RES (24)..(25)..(26)..(27): Xaa is A or G or is absent

SEQ ID NO: 70092 - protein, 37 aa, Artificial Sequence; identical to SEQ ID NO: 7742
  GFR-binding peptide
  MOD_RES (1)..(34)..(36): Xaa is C or S
  MOD_RES (15)..(16)..(17)..(18)..(19): Xaa is A or G
  MOD_RES (20)..(21)..(22)..(23): Xaa is A or G or is absent

SEQ ID NO: 70093 - protein, 36 aa, Artificial Sequence; identical to SEQ ID NO: 7745
  GFR-binding peptide
  MOD_RES (2)..(3)..(34)..(36): Xaa is C or S

SEQ ID NO: 70094 - protein, 39 aa, Artificial Sequence; identical to SEQ ID NO: 57991
  GFR-binding peptide
  MOD_RES (5)..(6)..(38): Xaa is C or S

SEQ ID NO: 70095 - protein, 39 aa, Artificial Sequence; identical to SEQ ID NO: 7749
  GFR-binding peptide
  MOD_RES (4)..(5)..(38): Xaa is C or S
  MOD_RES (19)..(20)..(21)..(22)..(23): Xaa is A or G
  MOD_RES (24)..(25)..(26)..(27): Xaa is A or G or is absent

SEQ ID NO: 70096 - protein, 38 aa, Artificial Sequence; identical to SEQ ID NO: 7751
  GFR-binding peptide
  MOD_RES (5)..(6): Xaa is C or S
  MOD_RES (20)..(21)..(22)..(23)..(24): Xaa is A or G
  MOD_RES (25)..(26)..(27)..(28): Xaa is A or G or is absent

SEQ ID NO: 70097 - protein, 36 aa, Artificial Sequence; identical to SEQ ID NO: 7752
  GFR-binding peptide
  MOD_RES (2)..(3)..(36): Xaa is C or S
  MOD_RES (17)..(18)..(19)..(20)..(21): Xaa is A or G
  MOD_RES (22)..(23)..(24)..(25): Xaa is A or G or is absent

SEQ ID NO: 70098 - protein, 40 aa, Artificial Sequence; identical to SEQ ID NO: 7754
  GFR-binding peptide
  MOD_RES (3)..(4)..(38)..(40): Xaa is C or S
  MOD_RES (18)..(19)..(20)..(21)..(22): Xaa is A or G
  MOD_RES (23)..(24)..(25)..(26): Xaa is A or G or is absent

SEQ ID NO: 70099 - protein, 36 aa, Artificial Sequence
  GFR-binding peptide
  MOD_RES (2)..(3)..(34)..(36): Xaa is C or S
TXXAPVKTEPISMLYLDNGRVLLKFKYEMIVEEXGX

SEQ ID NO: 70100 - protein, 38 aa, Artificial Sequence; identical to SEQ ID NO: 33130
  GFR-binding peptide
  MOD_RES (3)..(4)..(38): Xaa is C or S
  MOD_RES (18)..(19)..(20)..(21)..(22): Xaa is A or G
  MOD_RES (23)..(24)..(25)..(26): Xaa is A or G or is absent

SEQ ID NO: 70101 - protein, 38 aa, Artificial Sequence; identical to SEQ ID NO: 7757
  GFR-binding peptide
  MOD_RES (3)..(4)..(35)..(37): Xaa is C or S

SEQ ID NO: 70102 - protein, 37 aa, Artificial Sequence; identical to SEQ ID NO: 33133
  GFR-binding peptide
  MOD_RES (2)..(3)..(37): Xaa is C or S
  MOD_RES (17)..(18)..(19)..(20)..(21): Xaa is A or G
  MOD_RES (22)..(23)..(24)..(25): Xaa is A or G or is absent

SEQ ID NO: 70103 - protein, 41 aa, Artificial Sequence; identical to SEQ ID NO: 29059
  GFR-binding peptide
  MOD_RES (6)..(38)..(40): Xaa is C or S

SEQ ID NO: 70104 - protein, 35 aa, Artificial Sequence; identical to SEQ ID NO: 58002
  GFR-binding peptide
  MOD_RES (2)..(3)..(35): Xaa is C or S

SEQ ID NO: 70105 - protein, 41 aa, Artificial Sequence
  GFR-binding peptide
  MOD_RES (4)..(5)..(38)..(40): Xaa is C or S
  MOD_RES (19)..(20)..(21)..(22)..(23): Xaa is A or G
  MOD_RES (24)..(25)..(26)..(27): Xaa is A or G or is absent
PSTXXAPVKTSPISMLYKXXXXXXXXXLKYHYMIVEEXGXL

SEQ ID NO: 70106 - protein, 36 aa, Artificial Sequence; identical to SEQ ID NO: 29063
  GFR-binding peptide
  MOD_RES (34)..(36): Xaa is C or S
  MOD_RES (14)..(15)..(16)..(17)..(18): Xaa is A or G
  MOD_RES (19)..(20)..(21)..(22): Xaa is A or G or is absent

SEQ ID NO: 70107 - protein, 35 aa, Artificial Sequence
  GFR-binding peptide
  MOD_RES (1)..(32)..(34): Xaa is C or S
XAPVKTSPISMLYKDNGRVLLLKYHYMIVEEXGXL

SEQ ID NO: 70108 - protein, 32 aa, Artificial Sequence
  GFR-binding peptide
  MOD_RES (14)..(15)..(16)..(17)..(18): Xaa is A or G
  MOD_RES (19)..(20)..(21)..(22): Xaa is A or G or is absent
VPTKLSATSILYYXXXXXXXXXLRKHRGMAVS

SEQ ID NO: 70109 - protein, 38 aa, Artificial Sequence; identical to SEQ ID NO: 7764
  GFR-binding peptide
  MOD_RES (4)..(5)..(36)..(38): Xaa is C or S

SEQ ID NO: 70110 - protein, 34 aa, Artificial Sequence
  GFR-binding peptide
  MOD_RES (1)..(2)..(34): Xaa is C or S
XXVPEKMSATSILYYDENKNVVLRKHRNMTVESX

SEQ ID NO: 70111 - protein, 41 aa, Artificial Sequence; identical to SEQ ID NO: 7765
  GFR-binding peptide
  MOD_RES (6)..(7)..(38)..(40): Xaa is C or S

SEQ ID NO: 70112 - protein, 37 aa, Artificial Sequence; identical to SEQ ID NO: 7766
  GFR-binding peptide
  MOD_RES (34)..(36): Xaa is C or S
  MOD_RES (14)..(15)..(16)..(17)..(18): Xaa is A or G
  MOD_RES (19)..(20)..(21)..(22): Xaa is A or G or is absent

SEQ ID NO: 70113 - protein, 37 aa, Artificial Sequence; identical to SEQ ID NO: 7769
  GFR-binding peptide
  MOD_RES (4)..(5): Xaa is C or S
  MOD_RES (19)..(20)..(21)..(22)..(23): Xaa is A or G
  MOD_RES (24)..(25)..(26)..(27): Xaa is A or G or is absent

SEQ ID NO: 70114 - protein, 31 aa, Artificial Sequence
  GFR-binding peptide
  MOD_RES (31)..(31): Xaa is C or S
APVKTSPISMLYKDNGRVLLLKYHYMIVEEX

SEQ ID NO: 70115 - protein, 35 aa, Artificial Sequence; identical to SEQ ID NO: 33141
  GFR-binding peptide
  MOD_RES (1)..(35): Xaa is C or S
  MOD_RES (15)..(16)..(17)..(18)..(19): Xaa is A or G
  MOD_RES (20)..(21)..(22)..(23): Xaa is A or G or is absent

SEQ ID NO: 70116 - protein, 43 aa, Artificial Sequence
  GFR-binding peptide
  MOD_RES (6)..(7)..(41)..(43): Xaa is C or S
  MOD_RES (21)..(22)..(23)..(24)..(25): Xaa is A or G
  MOD_RES (26)..(27)..(28)..(29): Xaa is A or G or is absent
GIPEPXXVPEKMSATSILYYXXXXXXXXXLRKHRNMTVESXAX

SEQ ID NO: 70117 - protein, 39 aa, Artificial Sequence; identical to SEQ ID NO: 29068
  GFR-binding peptide
  MOD_RES (3)..(4)..(37)..(39): Xaa is C or S

SEQ ID NO: 70118 - protein, 41 aa, Artificial Sequence; identical to SEQ ID NO: 33145
  GFR-binding peptide
  MOD_RES (4)..(5)..(39)..(41): Xaa is C or S
  MOD_RES (19)..(20)..(21)..(22)..(23): Xaa is A or G
  MOD_RES (24)..(25)..(26)..(27): Xaa is A or G or is absent

SEQ ID NO: 70119 - protein, 42 aa, Artificial Sequence; identical to SEQ ID NO: 33147
  GFR-binding peptide
  MOD_RES (6)..(7)..(39)..(41): Xaa is C or S

SEQ ID NO: 70120 - protein, 42 aa, Artificial Sequence; identical to SEQ ID NO: 33148
  GFR-binding peptide
  MOD_RES (7)..(41): Xaa is C or S
  MOD_RES (21)..(22)..(23)..(24)..(25): Xaa is A or G
  MOD_RES (26)..(27)..(28)..(29): Xaa is A or G or is absent

SEQ ID NO: 70121 - protein, 36 aa, Artificial Sequence; identical to SEQ ID NO: 7771
  GFR-binding peptide
  MOD_RES (4)..(5)..(36): Xaa is C or S

SEQ ID NO: 70122 - protein, 38 aa, Artificial Sequence
  GFR-binding peptide
  MOD_RES (3)..(4)..(37): Xaa is C or S
  MOD_RES (18)..(19)..(20)..(21)..(22): Xaa is A or G
  MOD_RES (23)..(24)..(25)..(26): Xaa is A or G or is absent
SPXXVPQDLSPINILYFXXXXXXXXXYGKIPMVVKSXK

SEQ ID NO: 70123 - protein, 42 aa, Artificial Sequence; identical to SEQ ID NO: 7772
  GFR-binding peptide
  MOD_RES (6)..(7)..(40)..(42): Xaa is C or S

SEQ ID NO: 70124 - protein, 35 aa, Artificial Sequence; identical to SEQ ID NO: 33149
  GFR-binding peptide
  MOD_RES (1)..(33)..(35): Xaa is C or S

SEQ ID NO: 70125 - protein, 40 aa, Artificial Sequence
  GFR-binding peptide
  MOD_RES (6)..(7): Xaa is C or S
  MOD_RES (21)..(22)..(23)..(24)..(25): Xaa is A or G
  MOD_RES (26)..(27)..(28)..(29): Xaa is A or G or is absent
GSAGPXXTPTKMSATSMLYYXXXXXXXXXLRKHRGMVVDR

SEQ ID NO: 70126 - protein, 39 aa, Artificial Sequence
  GFR-binding peptide
  MOD_RES (6)..(7): Xaa is C or S
  MOD_RES (21)..(22)..(23)..(24)..(25): Xaa is A or G
  MOD_RES (26)..(27)..(28)..(29): Xaa is A or G or is absent
RVPSTXXAPVKTEPISMLYLXXXXXXXXXKFKYEMIVEE

SEQ ID NO: 70127 - protein, 38 aa, Artificial Sequence
  GFR-binding peptide
  MOD_RES (3)..(4)..(36)..(38): Xaa is C or S
EPXXVPEKMNAISILYFDENKNVVLKKYRNMTVESXAX

SEQ ID NO: 70128 - protein, 34 aa, Artificial Sequence; identical to SEQ ID NO: 33159
  GFR-binding peptide
  MOD_RES (34)..(34): Xaa is C or S
  MOD_RES (14)..(15)..(16)..(17)..(18): Xaa is A or G
  MOD_RES (19)..(20)..(21)..(22): Xaa is A or G or is absent

SEQ ID NO: 70129 - protein, 32 aa, Artificial Sequence; identical to SEQ ID NO: 33161
  GFR-binding peptide
  MOD_RES (32)..(32): Xaa is C or S

SEQ ID NO: 70130 - protein, 33 aa, Artificial Sequence; identical to SEQ ID NO: 33162
  GFR-binding peptide
  MOD_RES (32)..(32): Xaa is C or S

SEQ ID NO: 70131 - protein, 41 aa, Artificial Sequence; identical to SEQ ID NO: 29077
  GFR-binding peptide
  MOD_RES (3)..(4)..(38)..(40): Xaa is C or S
  MOD_RES (18)..(19)..(20)..(21)..(22): Xaa is A or G
  MOD_RES (23)..(24)..(25)..(26): Xaa is A or G or is absent

SEQ ID NO: 70132 - protein, 39 aa, Artificial Sequence; identical to SEQ ID NO: 7779
  GFR-binding peptide
  MOD_RES (6)..(7): Xaa is C or S
  MOD_RES (21)..(22)..(23)..(24)..(25): Xaa is A or G
  MOD_RES (26)..(27)..(28)..(29): Xaa is A or G or is absent

SEQ ID NO: 70133 - protein, 35 aa, Artificial Sequence
  GFR-binding peptide
  MOD_RES (1)..(2)..(35): Xaa is C or S
  MOD_RES (16)..(17)..(18)..(19)..(20): Xaa is A or G
  MOD_RES (21)..(22)..(23)..(24): Xaa is A or G or is absent
XXVPQALSPINILYFXXXXXXXXXYGKIPMIVRSX

SEQ ID NO: 70134 - protein, 42 aa, Artificial Sequence; identical to SEQ ID NO: 33165
  GFR-binding peptide
  MOD_RES (6)..(7)..(41): Xaa is C or S
  MOD_RES (21)..(22)..(23)..(24)..(25): Xaa is A or G
  MOD_RES (26)..(27)..(28)..(29): Xaa is A or G or is absent

SEQ ID NO: 70135 - protein, 40 aa, Artificial Sequence
  GFR-binding peptide
  MOD_RES (6)..(7): Xaa is C or S
  MOD_RES (21)..(22)..(23)..(24)..(25): Xaa is A or G
  MOD_RES (26)..(27)..(28)..(29): Xaa is A or G or is absent
GIPEPXXVPEKMNAISILYFXXXXXXXXXLKKYRNMTVES

SEQ ID NO: 70136 - protein, 37 aa, Artificial Sequence; identical to SEQ ID NO: 33170
  GFR-binding peptide
  MOD_RES (34)..(36): Xaa is C or S
  MOD_RES (14)..(15)..(16)..(17)..(18): Xaa is A or G
  MOD_RES (19)..(20)..(21)..(22): Xaa is A or G or is absent

SEQ ID NO: 70137 - protein, 36 aa, Artificial Sequence; identical to SEQ ID NO: 7786
  GFR-binding peptide
  MOD_RES (1)..(2)..(36): Xaa is C or S
  MOD_RES (16)..(17)..(18)..(19)..(20): Xaa is A or G
  MOD_RES (21)..(22)..(23)..(24): Xaa is A or G or is absent

SEQ ID NO: 70138 - protein, 37 aa, Artificial Sequence
  GFR-binding peptide
  MOD_RES (3)..(4)..(37): Xaa is C or S
  MOD_RES (18)..(19)..(20)..(21)..(22): Xaa is A or G
  MOD_RES (23)..(24)..(25)..(26): Xaa is A or G or is absent
SPXXVSQDLSPINILYFXXXXXXXXXYGKIPMIVKSX

SEQ ID NO: 70139 - protein, 36 aa, Artificial Sequence; identical to SEQ ID NO: 29080
  GFR-binding peptide
  MOD_RES (1)..(34)..(36): Xaa is C or S

SEQ ID NO: 70140 - protein, 36 aa, Artificial Sequence
  GFR-binding peptide
  MOD_RES (1)..(33)..(35): Xaa is C or S
XVPEKMNAISILYFDENKNVVLKKYRNMTVESXAXR

SEQ ID NO: 70141 - protein, 44 aa, Artificial Sequence; identical to SEQ ID NO: 33173
  GFR-binding peptide
  MOD_RES (6)..(7)..(41)..(43): Xaa is C or S
  MOD_RES (21)..(22)..(23)..(24)..(25): Xaa is A or G
  MOD_RES (26)..(27)..(28)..(29): Xaa is A or G or is absent

SEQ ID NO: 70142 - protein, 36 aa, Artificial Sequence; identical to SEQ ID NO: 29084
  GFR-binding peptide
  MOD_RES (5)..(6): Xaa is C or S

SEQ ID NO: 70143 - protein, 39 aa, Artificial Sequence; identical to SEQ ID NO: 29086
  GFR-binding peptide
  MOD_RES (2)..(3)..(37)..(39): Xaa is C or S
  MOD_RES (17)..(18)..(19)..(20)..(21): Xaa is A or G
  MOD_RES (22)..(23)..(24)..(25): Xaa is A or G or is absent

SEQ ID NO: 70144 - protein, 32 aa, Artificial Sequence
  GFR-binding peptide
  MOD_RES (1)..(1): Xaa is C or S
XTPTKMSPISMLYKNDKQQIILKYHYGMVVDR

SEQ ID NO: 70145 - protein, 34 aa, Artificial Sequence; identical to SEQ ID NO: 7792
  GFR-binding peptide
  MOD_RES (1)..(33): Xaa is C or S

SEQ ID NO: 70146 - protein, 32 aa, Artificial Sequence
  GFR-binding peptide
  MOD_RES (1)..(1): Xaa is C or S
XVPEKMSPISILYKDENKNVVLKYHYNMTVES

SEQ ID NO: 70147 - protein, 34 aa, Artificial Sequence; identical to SEQ ID NO: 33189
  GFR-binding peptide
  MOD_RES (34)..(34): Xaa is C or S
  MOD_RES (14)..(15)..(16)..(17)..(18): Xaa is A or G
  MOD_RES (19)..(20)..(21)..(22): Xaa is A or G or is absent

SEQ ID NO: 70148 - protein, 41 aa, Artificial Sequence; identical to SEQ ID NO: 33195
  GFR-binding peptide
  MOD_RES (5)..(6)..(39)..(41): Xaa is C or S
  MOD_RES (20)..(21)..(22)..(23)..(24): Xaa is A or G
  MOD_RES (25)..(26)..(27)..(28): Xaa is A or G or is absent

SEQ ID NO: 70149 - protein, 37 aa, Artificial Sequence; identical to SEQ ID NO: 7796
  GFR-binding peptide
  MOD_RES (2)..(3)..(36): Xaa is C or S
  MOD_RES (17)..(18)..(19)..(20)..(21): Xaa is A or G
  MOD_RES (22)..(23)..(24)..(25): Xaa is A or G or is absent

SEQ ID NO: 70150 - protein, 39 aa, Artificial Sequence; identical to SEQ ID NO: 29093
  GFR-binding peptide
  MOD_RES (5)..(6)..(39): Xaa is C or S
  MOD_RES (20)..(21)..(22)..(23)..(24): Xaa is A or G
  MOD_RES (25)..(26)..(27)..(28): Xaa is A or G or is absent

SEQ ID NO: 70151 - protein, 37 aa, Artificial Sequence
  GFR-binding peptide
  MOD_RES (6)..(7): Xaa is C or S
GIPEPXXVPEKMSATSILYYDENKNVVLRKHRNMTVE

SEQ ID NO: 70152 - protein, 44 aa, Artificial Sequence; identical to SEQ ID NO: 7797
  GFR-binding peptide
  MOD_RES (6)..(7)..(41)..(43): Xaa is C or S
  MOD_RES (21)..(22)..(23)..(24)..(25): Xaa is A or G
  MOD_RES (26)..(27)..(28)..(29): Xaa is A or G or is absent

SEQ ID NO: 70153 - protein, 35 aa, Artificial Sequence
  GFR-binding peptide
  MOD_RES (1)..(33)..(35): Xaa is C or S
XTPTKMSPISMLYKNDKQQIILKYHYGMVVDRXGX

SEQ ID NO: 70154 - protein, 39 aa, Artificial Sequence
  GFR-binding peptide
  MOD_RES (4)..(5)..(37)..(39): Xaa is C or S
PEPXXVPEKMNAISILYFDENKNVVLKKYRNMTVESXAX

SEQ ID NO: 70155 - protein, 33 aa, Artificial Sequence; identical to SEQ ID NO: 7803
  GFR-binding peptide
  MOD_RES (1)..(2)..(33): Xaa is C or S

SEQ ID NO: 70156 - protein, 34 aa, Artificial Sequence
  GFR-binding peptide
  MOD_RES (1)..(2)..(34): Xaa is C or S
XXVPEKMEPISILYLDENKNVVKFKYENMTVESX

SEQ ID NO: 70157 - protein, 33 aa, Artificial Sequence
  GFR-binding peptide
  MOD_RES (2)..(3): Xaa is C or S
PXXTPTKMEPISMLYLNDKQQIIKFKYEGMVVD

SEQ ID NO: 70158 - protein, 36 aa, Artificial Sequence
  GFR-binding peptide
  MOD_RES (3)..(4): Xaa is C or S
  MOD_RES (18)..(19)..(20)..(21)..(22): Xaa is A or G
  MOD_RES (23)..(24)..(25)..(26): Xaa is A or G or is absent
EPXXVPEKMSPINILYFXXXXXXXXXYGKIPNMTVE

SEQ ID NO: 70159 - protein, 42 aa, Artificial Sequence; identical to SEQ ID NO: 7814
  GFR-binding peptide
  MOD_RES (6)..(7)..(42): Xaa is C or S
  MOD_RES (21)..(22)..(23)..(24)..(25): Xaa is A or G
  MOD_RES (26)..(27)..(28)..(29): Xaa is A or G or is absent

SEQ ID NO: 70160 - protein, 40 aa, Artificial Sequence; identical to SEQ ID NO: 7815
  GFR-binding peptide
  MOD_RES (6)..(7)..(40): Xaa is C or S
  MOD_RES (21)..(22)..(23)..(24)..(25): Xaa is A or G
  MOD_RES (26)..(27)..(28)..(29): Xaa is A or G or is absent

SEQ ID NO: 70161 - protein, 39 aa, Artificial Sequence
  GFR-binding peptide
  MOD_RES (1)..(2)..(36)..(38): Xaa is C or S
  MOD_RES (16)..(17)..(18)..(19)..(20): Xaa is A or G
  MOD_RES (21)..(22)..(23)..(24): Xaa is A or G or is absent
XXVPEKMSPISILYKXXXXXXXXXLKYHYNMTVESXAXR

SEQ ID NO: 70162 - protein, 37 aa, Artificial Sequence; identical to SEQ ID NO: 7822
  GFR-binding peptide
  MOD_RES (3)..(4)..(37): Xaa is C or S
  MOD_RES (18)..(19)..(20)..(21)..(22): Xaa is A or G
  MOD_RES (23)..(24)..(25)..(26): Xaa is A or G or is absent

SEQ ID NO: 70163 - protein, 35 aa, Artificial Sequence
  GFR-binding peptide
  MOD_RES (1)..(34): Xaa is C or S
  MOD_RES (15)..(16)..(17)..(18)..(19): Xaa is A or G
  MOD_RES (20)..(21)..(22)..(23): Xaa is A or G or is absent
XVPQALSPINILYFXXXXXXXXXYGKIPMIVRSXK

SEQ ID NO: 70164 - protein, 35 aa, Artificial Sequence; identical to SEQ ID NO: 7828
  GFR-binding peptide
  MOD_RES (2)..(3): Xaa is C or S
  MOD_RES (17)..(18)..(19)..(20)..(21): Xaa is A or G
  MOD_RES (22)..(23)..(24)..(25): Xaa is A or G or is absent

SEQ ID NO: 70165 - protein, 35 aa, Artificial Sequence; identical to SEQ ID NO: 7830
  GFR-binding peptide
  MOD_RES (3)..(4): Xaa is C or S

SEQ ID NO: 70166 - protein, 37 aa, Artificial Sequence
  GFR-binding peptide
  MOD_RES (1)..(35)..(37): Xaa is C or S
  MOD_RES (15)..(16)..(17)..(18)..(19): Xaa is A or G
  MOD_RES (20)..(21)..(22)..(23): Xaa is A or G or is absent
XTPTKMSATSMLYYXXXXXXXXXLRKHRGMVVDRXGX

SEQ ID NO: 70167 - protein, 38 aa, Artificial Sequence; identical to SEQ ID NO: 29120
  GFR-binding peptide
  MOD_RES (5)..(5): Xaa is C or S
  MOD_RES (19)..(20)..(21)..(22)..(23): Xaa is A or G
  MOD_RES (24)..(25)..(26)..(27): Xaa is A or G or is absent

SEQ ID NO: 70168 - protein, 39 aa, Artificial Sequence; identical to SEQ ID NO: 7832
  GFR-binding peptide
  MOD_RES (4)..(5)..(39): Xaa is C or S
  MOD_RES (19)..(20)..(21)..(22)..(23): Xaa is A or G
  MOD_RES (24)..(25)..(26)..(27): Xaa is A or G or is absent

SEQ ID NO: 70169 - protein, 40 aa, Artificial Sequence
  GFR-binding peptide
  MOD_RES (5)..(6)..(38)..(40): Xaa is C or S
SAGPXXTPTKMSATSMLYYNDKQQIILRKHRGMVVDRXGX

SEQ ID NO: 70170 - protein, 35 aa, Artificial Sequence
  GFR-binding peptide
  MOD_RES (34)..(34): Xaa is C or S
  MOD_RES (14)..(15)..(16)..(17)..(18): Xaa is A or G
  MOD_RES (19)..(20)..(21)..(22): Xaa is A or G or is absent
VPTRLEPISILYLXXXXXXXXXKFKYEDMVVESXG

SEQ ID NO: 70171 - protein, 34 aa, Artificial Sequence; identical to SEQ ID NO: 33229
  GFR-binding peptide
  MOD_RES (1)..(34): Xaa is C or S

SEQ ID NO: 70172 - protein, 33 aa, Artificial Sequence
  GFR-binding peptide
  MOD_RES (1)..(33): Xaa is C or S
XVPEKMSATSILYYDENKNVVLRKHRNMTVESX

SEQ ID NO: 70173 - protein, 36 aa, Artificial Sequence; identical to SEQ ID NO: 29127
  GFR-binding peptide
  MOD_RES (4)..(5): Xaa is C or S

SEQ ID NO: 70174 - protein, 38 aa, Artificial Sequence; identical to SEQ ID NO: 29129
  GFR-binding peptide
  MOD_RES (3)..(4)..(35)..(37): Xaa is C or S

SEQ ID NO: 70175 - protein, 39 aa, Artificial Sequence; identical to SEQ ID NO: 7836
  GFR-binding peptide
  MOD_RES (3)..(4)..(37)..(39): Xaa is C or S
  MOD_RES (18)..(19)..(20)..(21)..(22): Xaa is A or G
  MOD_RES (23)..(24)..(25)..(26): Xaa is A or G or is absent

SEQ ID NO: 70176 - protein, 38 aa, Artificial Sequence; identical to SEQ ID NO: 29130
  GFR-binding peptide
  MOD_RES (2)..(3)..(37): Xaa is C or S
  MOD_RES (17)..(18)..(19)..(20)..(21): Xaa is A or G
  MOD_RES (22)..(23)..(24)..(25): Xaa is A or G or is absent

SEQ ID NO: 70177 - protein, 39 aa, Artificial Sequence; identical to SEQ ID NO: 33230
  GFR-binding peptide
  MOD_RES (6)..(7)..(39): Xaa is C or S

SEQ ID NO: 70178 - protein, 39 aa, Artificial Sequence; identical to SEQ ID NO: 29131
  GFR-binding peptide
  MOD_RES (5)..(37)..(39): Xaa is C or S

SEQ ID NO: 70179 - protein, 41 aa, Artificial Sequence; identical to SEQ ID NO: 29133
  GFR-binding peptide
  MOD_RES (5)..(6)..(40): Xaa is C or S
  MOD_RES (20)..(21)..(22)..(23)..(24): Xaa is A or G
  MOD_RES (25)..(26)..(27)..(28): Xaa is A or G or is absent

SEQ ID NO: 70180 - protein, 41 aa, Artificial Sequence; identical to SEQ ID NO: 7838
  GFR-binding peptide
  MOD_RES (6)..(7): Xaa is C or S
  MOD_RES (21)..(22)..(23)..(24)..(25): Xaa is A or G
  MOD_RES (26)..(27)..(28)..(29): Xaa is A or G or is absent

SEQ ID NO: 70181 - protein, 33 aa, Artificial Sequence
  GFR-binding peptide
  MOD_RES (1)..(33): Xaa is C or S
XVPEKMEPISILYLDENKNVVKFKYENMTVESX

SEQ ID NO: 70182 - protein, 41 aa, Artificial Sequence; identical to SEQ ID NO: 33234
  GFR-binding peptide
  MOD_RES (6)..(7)..(41): Xaa is C or S
  MOD_RES (21)..(22)..(23)..(24)..(25): Xaa is A or G
  MOD_RES (26)..(27)..(28)..(29): Xaa is A or G or is absent

SEQ ID NO: 70183 - protein, 38 aa, Artificial Sequence; identical to SEQ ID NO: 7840
  GFR-binding peptide
  MOD_RES (4)..(5)..(36)..(38): Xaa is C or S

SEQ ID NO: 70184 - protein, 37 aa, Artificial Sequence; identical to SEQ ID NO: 7841
  GFR-binding peptide
  MOD_RES (34)..(36): Xaa is C or S
  MOD_RES (14)..(15)..(16)..(17)..(18): Xaa is A or G
  MOD_RES (19)..(20)..(21)..(22): Xaa is A or G or is absent

SEQ ID NO: 70185 - protein, 33 aa, Artificial Sequence; identical to SEQ ID NO: 7842
  GFR-binding peptide
  MOD_RES (14)..(15)..(16)..(17)..(18): Xaa is A or G
  MOD_RES (19)..(20)..(21)..(22): Xaa is A or G or is absent

SEQ ID NO: 70186 - protein, 39 aa, Artificial Sequence; identical to SEQ ID NO: 7848
  GFR-binding peptide
  MOD_RES (6)..(38): Xaa is C or S

SEQ ID NO: 70187 - protein, 38 aa, Artificial Sequence; identical to SEQ ID NO: 7850
  GFR-binding peptide
  MOD_RES (2)..(3)..(35)..(37): Xaa is C or S

SEQ ID NO: 70188 - protein, 40 aa, Artificial Sequence; identical to SEQ ID NO: 7852
  GFR-binding peptide
  MOD_RES (4)..(5)..(40): Xaa is C or S
  MOD_RES (19)..(20)..(21)..(22)..(23): Xaa is A or G
  MOD_RES (24)..(25)..(26)..(27): Xaa is A or G or is absent

SEQ ID NO: 70189 - protein, 40 aa, Artificial Sequence; identical to SEQ ID NO: 7854
  GFR-binding peptide
  MOD_RES (6)..(7)..(38)..(40): Xaa is C or S

SEQ ID NO: 70190 - protein, 36 aa, Artificial Sequence
  GFR-binding peptide
  MOD_RES (1)..(2)..(36): Xaa is C or S
  MOD_RES (16)..(17)..(18)..(19)..(20): Xaa is A or G
  MOD_RES (21)..(22)..(23)..(24): Xaa is A or G or is absent
XXTPTKMSATSMLYYXXXXXXXXXLRKHRGMVVDRX

SEQ ID NO: 70191 - protein, 38 aa, Artificial Sequence; identical to SEQ ID NO: 7857
  GFR-binding peptide
  MOD_RES (6)..(7)..(38): Xaa is C or S

SEQ ID NO: 70192 - protein, 40 aa, Artificial Sequence; identical to SEQ ID NO: 33244
  GFR-binding peptide
  MOD_RES (5)..(6)..(40): Xaa is C or S
  MOD_RES (20)..(21)..(22)..(23)..(24): Xaa is A or G
  MOD_RES (25)..(26)..(27)..(28): Xaa is A or G or is absent

SEQ ID NO: 70193 - protein, 37 aa, Artificial Sequence; identical to SEQ ID NO: 7858
  GFR-binding peptide
  MOD_RES (1)..(36): Xaa is C or S
  MOD_RES (15)..(16)..(17)..(18)..(19): Xaa is A or G
  MOD_RES (20)..(21)..(22)..(23): Xaa is A or G or is absent

SEQ ID NO: 70194 - protein, 39 aa, Artificial Sequence; identical to SEQ ID NO: 7860
  GFR-binding peptide
  MOD_RES (5)..(6)..(37)..(39): Xaa is C or S

SEQ ID NO: 70195 - protein, 38 aa, Artificial Sequence; identical to SEQ ID NO: 29147
  GFR-binding peptide
  MOD_RES (1)..(2)..(36)..(38): Xaa is C or S
  MOD_RES (16)..(17)..(18)..(19)..(20): Xaa is A or G
  MOD_RES (21)..(22)..(23)..(24): Xaa is A or G or is absent

SEQ ID NO: 70196 - protein, 36 aa, Artificial Sequence; identical to SEQ ID NO: 29148
  GFR-binding peptide
  MOD_RES (1)..(2)..(36): Xaa is C or S
  MOD_RES (16)..(17)..(18)..(19)..(20): Xaa is A or G
  MOD_RES (21)..(22)..(23)..(24): Xaa is A or G or is absent

SEQ ID NO: 70197 - protein, 39 aa, Artificial Sequence; identical to SEQ ID NO: 33247
  GFR-binding peptide
  MOD_RES (6)..(7)..(39): Xaa is C or S

SEQ ID NO: 70198 - protein, 41 aa, Artificial Sequence; identical to SEQ ID NO: 7866
  GFR-binding peptide
  MOD_RES (5)..(6)..(40): Xaa is C or S
  MOD_RES (20)..(21)..(22)..(23)..(24): Xaa is A or G
  MOD_RES (25)..(26)..(27)..(28): Xaa is A or G or is absent

SEQ ID NO: 70199 - protein, 38 aa, Artificial Sequence; identical to SEQ ID NO: 7867
  GFR-binding peptide
  MOD_RES (4)..(5)..(36)..(38): Xaa is C or S

SEQ ID NO: 70200 - protein, 37 aa, Artificial Sequence; identical to SEQ ID NO: 33250
  GFR-binding peptide
  MOD_RES (1)..(36): Xaa is C or S
  MOD_RES (15)..(16)..(17)..(18)..(19): Xaa is A or G
  MOD_RES (20)..(21)..(22)..(23): Xaa is A or G or is absent

SEQ ID NO: 70201 - protein, 37 aa, Artificial Sequence; identical to SEQ ID NO: 7872
  GFR-binding peptide
  MOD_RES (5)..(5): Xaa is C or S
  MOD_RES (19)..(20)..(21)..(22)..(23): Xaa is A or G
  MOD_RES (24)..(25)..(26)..(27): Xaa is A or G or is absent

SEQ ID NO: 70202 - protein, 42 aa, Artificial Sequence; identical to SEQ ID NO: 33252
  GFR-binding peptide
  MOD_RES (5)..(6)..(40)..(42): Xaa is C or S
  MOD_RES (20)..(21)..(22)..(23)..(24): Xaa is A or G
  MOD_RES (25)..(26)..(27)..(28): Xaa is A or G or is absent

SEQ ID NO: 70203 - protein, 37 aa, Artificial Sequence; identical to SEQ ID NO: 7873
  GFR-binding peptide
  MOD_RES (5)..(37): Xaa is C or S

SEQ ID NO: 70204 - protein, 36 aa, Artificial Sequence; identical to SEQ ID NO: 33253
  GFR-binding peptide
  MOD_RES (3)..(4): Xaa is C or S
  MOD_RES (18)..(19)..(20)..(21)..(22): Xaa is A or G
  MOD_RES (23)..(24)..(25)..(26): Xaa is A or G or is absent

SEQ ID NO: 70205 - protein, 35 aa, Artificial Sequence
  GFR-binding peptide
  MOD_RES (33)..(35): Xaa is C or S
  MOD_RES (14)..(15)..(16)..(17)..(18): Xaa is A or G
  MOD_RES (19)..(20)..(21)..(22): Xaa is A or G or is absent
APVKTSPISMLYKXXXXXXXXXLKYHYMIVEEXGX

SEQ ID NO: 70206 - protein, 40 aa, Artificial Sequence; identical to SEQ ID NO: 33261
  GFR-binding peptide
  MOD_RES (3)..(4)..(39): Xaa is C or S
  MOD_RES (18)..(19)..(20)..(21)..(22): Xaa is A or G
  MOD_RES (23)..(24)..(25)..(26): Xaa is A or G or is absent

SEQ ID NO: 70207 - protein, 35 aa, Artificial Sequence; identical to SEQ ID NO: 7880
  GFR-binding peptide
  MOD_RES (3)..(4)..(35): Xaa is C or S

SEQ ID NO: 70208 - protein, 38 aa, Artificial Sequence; identical to SEQ ID NO: 7883
  GFR-binding peptide
  MOD_RES (4)..(5): Xaa is C or S
  MOD_RES (19)..(20)..(21)..(22)..(23): Xaa is A or G
  MOD_RES (24)..(25)..(26)..(27): Xaa is A or G or is absent

SEQ ID NO: 70209 - protein, 37 aa, Artificial Sequence; identical to SEQ ID NO: 7884
  GFR-binding peptide
  MOD_RES (5)..(6)..(37): Xaa is C or S

SEQ ID NO: 70210 - protein, 40 aa, Artificial Sequence; identical to SEQ ID NO: 7887
  GFR-binding peptide
  MOD_RES (3)..(4)..(37)..(39): Xaa is C or S
  MOD_RES (18)..(19)..(20)..(21)..(22): Xaa is A or G
  MOD_RES (23)..(24)..(25)..(26): Xaa is A or G or is absent

SEQ ID NO: 70211 - protein, 37 aa, Artificial Sequence; identical to SEQ ID NO: 7888
  GFR-binding peptide
  MOD_RES (4)..(5)..(37): Xaa is C or S

SEQ ID NO: 70212 - protein, 38 aa, Artificial Sequence; identical to SEQ ID NO: 33268
  GFR-binding peptide
  MOD_RES (1)..(2)..(36)..(38): Xaa is C or S
  MOD_RES (16)..(17)..(18)..(19)..(20): Xaa is A or G
  MOD_RES (21)..(22)..(23)..(24): Xaa is A or G or is absent

SEQ ID NO: 70213 - protein, 31 aa, Artificial Sequence; identical to SEQ ID NO: 29169
  GFR-binding peptide
  MOD_RES (1)..(1): Xaa is C or S

SEQ ID NO: 70214 - protein, 37 aa, Artificial Sequence; identical to SEQ ID NO: 29170
  GFR-binding peptide
  MOD_RES (2)..(3)..(37): Xaa is C or S
  MOD_RES (17)..(18)..(19)..(20)..(21): Xaa is A or G
  MOD_RES (22)..(23)..(24)..(25): Xaa is A or G or is absent

SEQ ID NO: 70215 - protein, 40 aa, Artificial Sequence; identical to SEQ ID NO: 7894
  GFR-binding peptide
  MOD_RES (3)..(4)..(39): Xaa is C or S
  MOD_RES (18)..(19)..(20)..(21)..(22): Xaa is A or G
  MOD_RES (23)..(24)..(25)..(26): Xaa is A or G or is absent

SEQ ID NO: 70216 - protein, 40 aa, Artificial Sequence; identical to SEQ ID NO: 33272
  GFR-binding peptide
  MOD_RES (4)..(5)..(37)..(39): Xaa is C or S

SEQ ID NO: 70217 - protein, 38 aa, Artificial Sequence; identical to SEQ ID NO: 7896
  GFR-binding peptide
  MOD_RES (4)..(5)..(36)..(38): Xaa is C or S

SEQ ID NO: 70218 - protein, 36 aa, Artificial Sequence; identical to SEQ ID NO: 29173
  GFR-binding peptide
  MOD_RES (1)..(34)..(36): Xaa is C or S
  MOD_RES (15)..(16)..(17)..(18)..(19): Xaa is A or G
  MOD_RES (20)..(21)..(22)..(23): Xaa is A or G or is absent

SEQ ID NO: 70219 - protein, 38 aa, Artificial Sequence; identical to SEQ ID NO: 7900
  GFR-binding peptide
  MOD_RES (4)..(5): Xaa is C or S
  MOD_RES (19)..(20)..(21)..(22)..(23): Xaa is A or G
  MOD_RES (24)..(25)..(26)..(27): Xaa is A or G or is absent

SEQ ID NO: 70220 - protein, 36 aa, Artificial Sequence
  GFR-binding peptide
  MOD_RES (5)..(6): Xaa is C or S
SAGPXXTPTKMSATSMLYYNDKQQIILRKHRGMVVD

SEQ ID NO: 70221 - protein, 37 aa, Artificial Sequence
  GFR-binding peptide
  MOD_RES (1)..(2)..(36): Xaa is C or S
  MOD_RES (16)..(17)..(18)..(19)..(20): Xaa is A or G
  MOD_RES (21)..(22)..(23)..(24): Xaa is A or G or is absent
XXVPARLSATSILYYXXXXXXXXXLRKHRDMVVEAXG

SEQ ID NO: 70222 - protein, 41 aa, Artificial Sequence
  GFR-binding peptide
  MOD_RES (6)..(7)..(41): Xaa is C or S
  MOD_RES (21)..(22)..(23)..(24)..(25): Xaa is A or G
  MOD_RES (26)..(27)..(28)..(29): Xaa is A or G or is absent
GIPEPXXVPEKMSPINILYFXXXXXXXXXYGKIPNMTVESX

SEQ ID NO: 70223 - protein, 32 aa, Artificial Sequence; identical to SEQ ID NO: 29181
  GFR-binding peptide
  MOD_RES (1)..(2): Xaa is C or S

SEQ ID NO: 70224 - protein, 33 aa, Artificial Sequence
  GFR-binding peptide
  MOD_RES (1)..(1): Xaa is C or S
  MOD_RES (15)..(16)..(17)..(18)..(19): Xaa is A or G
  MOD_RES (20)..(21)..(22)..(23): Xaa is A or G or is absent
XVPARLSATSILYYXXXXXXXXXLRKHRDMVVE

SEQ ID NO: 70225 - protein, 34 aa, Artificial Sequence; identical to SEQ ID NO: 7906
  GFR-binding peptide
  MOD_RES (33)..(33): Xaa is C or S
  MOD_RES (14)..(15)..(16)..(17)..(18): Xaa is A or G
  MOD_RES (19)..(20)..(21)..(22): Xaa is A or G or is absent

SEQ ID NO: 70226 - protein, 37 aa, Artificial Sequence; identical to SEQ ID NO: 29186
  GFR-binding peptide
  MOD_RES (4)..(5)..(37): Xaa is C or S

SEQ ID NO: 70227 - protein, 34 aa, Artificial Sequence; identical to SEQ ID NO: 29187
  GFR-binding peptide
  MOD_RES (1)..(33): Xaa is C or S

SEQ ID NO: 70228 - protein, 34 aa, Artificial Sequence; identical to SEQ ID NO: 29188
  GFR-binding peptide
  MOD_RES (1)..(2): Xaa is C or S
  MOD_RES (16)..(17)..(18)..(19)..(20): Xaa is A or G
  MOD_RES (21)..(22)..(23)..(24): Xaa is A or G or is absent

SEQ ID NO: 70229 - protein, 40 aa, Artificial Sequence; identical to SEQ ID NO: 33284
  GFR-binding peptide
  MOD_RES (4)..(5)..(39): Xaa is C or S
  MOD_RES (19)..(20)..(21)..(22)..(23): Xaa is A or G
  MOD_RES (24)..(25)..(26)..(27): Xaa is A or G or is absent

SEQ ID NO: 70230 - protein, 36 aa, Artificial Sequence; identical to SEQ ID NO: 29189
  GFR-binding peptide
  MOD_RES (1)..(2)..(34)..(36): Xaa is C or S

SEQ ID NO: 70231 - protein, 38 aa, Artificial Sequence; identical to SEQ ID NO: 33285
  GFR-binding peptide
  MOD_RES (5)..(6): Xaa is C or S
  MOD_RES (20)..(21)..(22)..(23)..(24): Xaa is A or G
  MOD_RES (25)..(26)..(27)..(28): Xaa is A or G or is absent

SEQ ID NO: 70232 - protein, 36 aa, Artificial Sequence; identical to SEQ ID NO: 29190
  GFR-binding peptide
  MOD_RES (3)..(4)..(36): Xaa is C or S

SEQ ID NO: 70233 - protein, 39 aa, Artificial Sequence
  GFR-binding peptide
  MOD_RES (1)..(2)..(36)..(38): Xaa is C or S
  MOD_RES (16)..(17)..(18)..(19)..(20): Xaa is A or G
  MOD_RES (21)..(22)..(23)..(24): Xaa is A or G or is absent
XXVPTRLSPISILYKXXXXXXXXXLKYHYDMVVESXGXR

SEQ ID NO: 70234 - protein, 43 aa, Artificial Sequence; identical to SEQ ID NO: 33288
  GFR-binding peptide
  MOD_RES (5)..(6)..(40)..(42): Xaa is C or S
  MOD_RES (20)..(21)..(22)..(23)..(24): Xaa is A or G
  MOD_RES (25)..(26)..(27)..(28): Xaa is A or G or is absent

SEQ ID NO: 70235 - protein, 36 aa, Artificial Sequence; identical to SEQ ID NO: 29193
  GFR-binding peptide
  MOD_RES (1)..(2)..(34)..(36): Xaa is C or S

SEQ ID NO: 70236 - protein, 34 aa, Artificial Sequence; identical to SEQ ID NO: 33289
  GFR-binding peptide
  MOD_RES (1)..(2): Xaa is C or S
  MOD_RES (16)..(17)..(18)..(19)..(20): Xaa is A or G
  MOD_RES (21)..(22)..(23)..(24): Xaa is A or G or is absent

SEQ ID NO: 70237 - protein, 40 aa, Artificial Sequence
  GFR-binding peptide
  MOD_RES (4)..(5)..(39): Xaa is C or S
  MOD_RES (19)..(20)..(21)..(22)..(23): Xaa is A or G
  MOD_RES (24)..(25)..(26)..(27): Xaa is A or G or is absent
PPTXXVPTRLEPISILYLXXXXXXXXXKFKYEDMVVESXG

SEQ ID NO: 70238 - protein, 40 aa, Artificial Sequence; identical to SEQ ID NO: 7913
  GFR-binding peptide
  MOD_RES (6)..(7)..(39): Xaa is C or S

SEQ ID NO: 70239 - protein, 35 aa, Artificial Sequence; identical to SEQ ID NO: 7915
  GFR-binding peptide
  MOD_RES (4)..(5): Xaa is C or S

SEQ ID NO: 70240 - protein, 37 aa, Artificial Sequence
  GFR-binding peptide
  MOD_RES (5)..(6): Xaa is C or S
SAGPXXTPTKMSPISMLYKNDKQQIILKYHYGMVVDR

SEQ ID NO: 70241 - protein, 38 aa, Artificial Sequence; identical to SEQ ID NO: 33298
  GFR-binding peptide
  MOD_RES (1)..(2)..(36)..(38): Xaa is C or S
  MOD_RES (16)..(17)..(18)..(19)..(20): Xaa is A or G
  MOD_RES (21)..(22)..(23)..(24): Xaa is A or G or is absent

SEQ ID NO: 70242 - protein, 41 aa, Artificial Sequence; identical to SEQ ID NO: 29199
  GFR-binding peptide
  MOD_RES (6)..(7)..(39)..(41): Xaa is C or S

SEQ ID NO: 70243 - protein, 35 aa, Artificial Sequence; identical to SEQ ID NO: 7923
  GFR-binding peptide
  MOD_RES (3)..(4): Xaa is C or S

SEQ ID NO: 70244 - protein, 37 aa, Artificial Sequence; identical to SEQ ID NO: 33301
  GFR-binding peptide
  MOD_RES (6)..(7): Xaa is C or S

SEQ ID NO: 70245 - protein, 35 aa, Artificial Sequence; identical to SEQ ID NO: 33302
  GFR-binding peptide
  MOD_RES (1)..(35): Xaa is C or S
  MOD_RES (15)..(16)..(17)..(18)..(19): Xaa is A or G
  MOD_RES (20)..(21)..(22)..(23): Xaa is A or G or is absent

SEQ ID NO: 70246 - protein, 40 aa, Artificial Sequence
  GFR-binding peptide
  MOD_RES (6)..(7)..(39): Xaa is C or S
STPPTXXVPTRLEPISILYLDSANNVVKFKYEDMVVESXG

SEQ ID NO: 70247 - protein, 42 aa, Artificial Sequence; identical to SEQ ID NO: 33303
  GFR-binding peptide
  MOD_RES (4)..(5)..(39)..(41): Xaa is C or S
  MOD_RES (19)..(20)..(21)..(22)..(23): Xaa is A or G
  MOD_RES (24)..(25)..(26)..(27): Xaa is A or G or is absent

SEQ ID NO: 70248 - protein, 34 aa, Artificial Sequence
  GFR-binding peptide
  MOD_RES (32)..(34): Xaa is C or S
VPARLSATSILYYDAANNVVLRKHRDMVVEAXGX

SEQ ID NO: 70249 - protein, 37 aa, Artificial Sequence; identical to SEQ ID NO: 7927
  GFR-binding peptide
  MOD_RES (2)..(3)..(37): Xaa is C or S
  MOD_RES (17)..(18)..(19)..(20)..(21): Xaa is A or G
  MOD_RES (22)..(23)..(24)..(25): Xaa is A or G or is absent

SEQ ID NO: 70250 - protein, 43 aa, Artificial Sequence; identical to SEQ ID NO: 7929
  GFR-binding peptide
  MOD_RES (5)..(6)..(40)..(42): Xaa is C or S
  MOD_RES (20)..(21)..(22)..(23)..(24): Xaa is A or G
  MOD_RES (25)..(26)..(27)..(28): Xaa is A or G or is absent

SEQ ID NO: 70251 - protein, 41 aa, Artificial Sequence; identical to SEQ ID NO: 7930
  GFR-binding peptide
  MOD_RES (6)..(7)..(41): Xaa is C or S
  MOD_RES (21)..(22)..(23)..(24)..(25): Xaa is A or G
  MOD_RES (26)..(27)..(28)..(29): Xaa is A or G or is absent

SEQ ID NO: 70252 - protein, 39 aa, Artificial Sequence; identical to SEQ ID NO: 7931
  GFR-binding peptide
  MOD_RES (5)..(6)..(39): Xaa is C or S
  MOD_RES (20)..(21)..(22)..(23)..(24): Xaa is A or G
  MOD_RES (25)..(26)..(27)..(28): Xaa is A or G or is absent

SEQ ID NO: 70253 - protein, 40 aa, Artificial Sequence
  GFR-binding peptide
  MOD_RES (3)..(4)..(38)..(40): Xaa is C or S
  MOD_RES (18)..(19)..(20)..(21)..(22): Xaa is A or G
  MOD_RES (23)..(24)..(25)..(26): Xaa is A or G or is absent
EPXXVPEKMSPINILYFXXXXXXXXXYGKIPNMTVESXAX

SEQ ID NO: 70254 - protein, 38 aa, Artificial Sequence; identical to SEQ ID NO: 33311
  GFR-binding peptide
  MOD_RES (4)..(5)..(38): Xaa is C or S

SEQ ID NO: 70255 - protein, 38 aa, Artificial Sequence; identical to SEQ ID NO: 7934
  GFR-binding peptide
  MOD_RES (6)..(7)..(38): Xaa is C or S

SEQ ID NO: 70256 - protein, 33 aa, Artificial Sequence; identical to SEQ ID NO: 29209
  GFR-binding peptide
  MOD_RES (1)..(2): Xaa is C or S

SEQ ID NO: 70257 - protein, 44 aa, Artificial Sequence; identical to SEQ ID NO: 33314
  GFR-binding peptide
  MOD_RES (5)..(6)..(41)..(43): Xaa is C or S
  MOD_RES (20)..(21)..(22)..(23)..(24): Xaa is A or G
  MOD_RES (25)..(26)..(27)..(28): Xaa is A or G or is absent

SEQ ID NO: 70258 - protein, 41 aa, Artificial Sequence; identical to SEQ ID NO: 29210
  GFR-binding peptide
  MOD_RES (6)..(7)..(41): Xaa is C or S
  MOD_RES (21)..(22)..(23)..(24)..(25): Xaa is A or G
  MOD_RES (26)..(27)..(28)..(29): Xaa is A or G or is absent

SEQ ID NO: 70259 - protein, 41 aa, Artificial Sequence
  GFR-binding peptide
  MOD_RES (6)..(7)..(38)..(40): Xaa is C or S
RVPSTXXAPVKTEPISMLYLDNGRVLLKFKYEMIVEEXGXL

SEQ ID NO: 70260 - protein, 34 aa, Artificial Sequence; identical to SEQ ID NO: 7937
  GFR-binding peptide
  MOD_RES (2)..(3): Xaa is C or S

SEQ ID NO: 70261 - protein, 35 aa, Artificial Sequence; identical to SEQ ID NO: 33315
  GFR-binding peptide
  MOD_RES (1)..(33)..(35): Xaa is C or S

SEQ ID NO: 70262 - protein, 36 aa, Artificial Sequence; identical to SEQ ID NO: 7939
  GFR-binding peptide
  MOD_RES (5)..(6): Xaa is C or S

SEQ ID NO: 70263 - protein, 40 aa, Artificial Sequence
  GFR-binding peptide
  MOD_RES (6)..(7)..(39): Xaa is C or S
HVPKPXXAPTKLSATSVLYYDDSSNVILRKHRNMVVRSXG

SEQ ID NO: 70264 - protein, 41 aa, Artificial Sequence; identical to SEQ ID NO: 7941
  GFR-binding peptide
  MOD_RES (4)..(5)..(39)..(41): Xaa is C or S
  MOD_RES (19)..(20)..(21)..(22)..(23): Xaa is A or G
  MOD_RES (24)..(25)..(26)..(27): Xaa is A or G or is absent

SEQ ID NO: 70265 - protein, 42 aa, Artificial Sequence
  GFR-binding peptide
  MOD_RES (5)..(6)..(40)..(42): Xaa is C or S
  MOD_RES (20)..(21)..(22)..(23)..(24): Xaa is A or G
  MOD_RES (25)..(26)..(27)..(28): Xaa is A or G or is absent
SAGPXXTPTKMSPISMLYKXXXXXXXXXLKYHYGMVVDRXGX

SEQ ID NO: 70266 - protein, 38 aa, Artificial Sequence; identical to SEQ ID NO: 7944
  GFR-binding peptide
  MOD_RES (4)..(36)..(38): Xaa is C or S

SEQ ID NO: 70267 - protein, 38 aa, Artificial Sequence; identical to SEQ ID NO: 29220
  GFR-binding peptide
  MOD_RES (4)..(5)..(38): Xaa is C or S
  MOD_RES (19)..(20)..(21)..(22)..(23): Xaa is A or G
  MOD_RES (24)..(25)..(26)..(27): Xaa is A or G or is absent

SEQ ID NO: 70268 - protein, 35 aa, Artificial Sequence
  GFR-binding peptide
  MOD_RES (4)..(5): Xaa is C or S
PASXXVPARLSATSILYYDAANNVVLRKHRDMVVE

SEQ ID NO: 70269 - protein, 41 aa, Artificial Sequence; identical to SEQ ID NO: 33327
  GFR-binding peptide
  MOD_RES (4)..(5)..(38)..(40): Xaa is C or S
  MOD_RES (19)..(20)..(21)..(22)..(23): Xaa is A or G
  MOD_RES (24)..(25)..(26)..(27): Xaa is A or G or is absent

SEQ ID NO: 70270 - protein, 41 aa, Artificial Sequence; identical to SEQ ID NO: 7948
  GFR-binding peptide
  MOD_RES (6)..(7)..(38)..(40): Xaa is C or S

SEQ ID NO: 70271 - protein, 33 aa, Artificial Sequence
  GFR-binding peptide
  MOD_RES (14)..(15)..(16)..(17)..(18): Xaa is A or G
  MOD_RES (19)..(20)..(21)..(22): Xaa is A or G or is absent
TPTKMEPISMLYLXXXXXXXXXKFKYEGMVVDR

SEQ ID NO: 70272 - protein, 38 aa, Artificial Sequence; identical to SEQ ID NO: 7950
  GFR-binding peptide
  MOD_RES (5)..(6): Xaa is C or S

SEQ ID NO: 70273 - protein, 44 aa, Artificial Sequence; identical to SEQ ID NO: 29228
  GFR-binding peptide
  MOD_RES (6)..(7)..(41)..(43): Xaa is C or S
  MOD_RES (21)..(22)..(23)..(24)..(25): Xaa is A or G
  MOD_RES (26)..(27)..(28)..(29): Xaa is A or G or is absent

SEQ ID NO: 70274 - protein, 37 aa, Artificial Sequence; identical to SEQ ID NO: 29229
  GFR-binding peptide
  MOD_RES (2)..(3)..(34)..(36): Xaa is C or S

SEQ ID NO: 70275 - protein, 36 aa, Artificial Sequence; identical to SEQ ID NO: 29230
  GFR-binding peptide
  MOD_RES (4)..(5): Xaa is C or S

SEQ ID NO: 70276 - protein, 39 aa, Artificial Sequence; identical to SEQ ID NO: 33334
  GFR-binding peptide
  MOD_RES (3)..(4)..(37)..(39): Xaa is C or S
  MOD_RES (18)..(19)..(20)..(21)..(22): Xaa is A or G
  MOD_RES (23)..(24)..(25)..(26): Xaa is A or G or is absent

SEQ ID NO: 70277 - protein, 35 aa, Artificial Sequence; identical to SEQ ID NO: 7953
  GFR-binding peptide
  MOD_RES (33)..(35): Xaa is C or S
  MOD_RES (14)..(15)..(16)..(17)..(18): Xaa is A or G
  MOD_RES (19)..(20)..(21)..(22): Xaa is A or G or is absent

SEQ ID NO: 70278 - protein, 38 aa, Artificial Sequence; identical to SEQ ID NO: 7954
  GFR-binding peptide
  MOD_RES (2)..(3)..(37): Xaa is C or S
  MOD_RES (17)..(18)..(19)..(20)..(21): Xaa is A or G
  MOD_RES (22)..(23)..(24)..(25): Xaa is A or G or is absent

SEQ ID NO: 70279 - protein, 38 aa, Artificial Sequence
  GFR-binding peptide
  MOD_RES (4)..(5)..(36)..(38): Xaa is C or S
AAPXXVPQALSPINILYFVGRKPKVYGKIPMIVRSXKX

SEQ ID NO: 70280 - protein, 36 aa, Artificial Sequence; identical to SEQ ID NO: 7955
  GFR-binding peptide
  MOD_RES (1)..(2): Xaa is C or S
  MOD_RES (16)..(17)..(18)..(19)..(20): Xaa is A or G
  MOD_RES (21)..(22)..(23)..(24): Xaa is A or G or is absent

SEQ ID NO: 70281 - protein, 36 aa, Artificial Sequence; identical to SEQ ID NO: 33337
  GFR-binding peptide
  MOD_RES (3)..(4): Xaa is C or S
  MOD_RES (18)..(19)..(20)..(21)..(22): Xaa is A or G
  MOD_RES (23)..(24)..(25)..(26): Xaa is A or G or is absent

SEQ ID NO: 70282 - protein, 32 aa, Artificial Sequence; identical to SEQ ID NO: 29237
  GFR-binding peptide
  MOD_RES (1)..(32): Xaa is C or S

SEQ ID NO: 70283 - protein, 41 aa, Artificial Sequence
  GFR-binding peptide
  MOD_RES (4)..(5)..(39)..(41): Xaa is C or S
  MOD_RES (19)..(20)..(21)..(22)..(23): Xaa is A or G
  MOD_RES (24)..(25)..(26)..(27): Xaa is A or G or is absent
PEPXXVPEKMNAISILYFXXXXXXXXXLKKYRNMTVESXAX

SEQ ID NO: 70284 - protein, 33 aa, Artificial Sequence; identical to SEQ ID NO: 7958
  GFR-binding peptide
  MOD_RES (1)..(1): Xaa is C or S
  MOD_RES (15)..(16)..(17)..(18)..(19): Xaa is A or G
  MOD_RES (20)..(21)..(22)..(23): Xaa is A or G or is absent

SEQ ID NO: 70285 - protein, 35 aa, Artificial Sequence
  GFR-binding peptide
  MOD_RES (34)..(34): Xaa is C or S
  MOD_RES (14)..(15)..(16)..(17)..(18): Xaa is A or G
  MOD_RES (19)..(20)..(21)..(22): Xaa is A or G or is absent
VPEKMEPISILYLXXXXXXXXXKFKYENMTVESXA

SEQ ID NO: 70286 - protein, 33 aa, Artificial Sequence; identical to SEQ ID NO: 29241
  GFR-binding peptide
  MOD_RES (1)..(32): Xaa is C or S

SEQ ID NO: 70287 - protein, 36 aa, Artificial Sequence; identical to SEQ ID NO: 7960
  GFR-binding peptide
  MOD_RES (1)..(2)..(35): Xaa is C or S
  MOD_RES (16)..(17)..(18)..(19)..(20): Xaa is A or G
  MOD_RES (21)..(22)..(23)..(24): Xaa is A or G or is absent

SEQ ID NO: 70288 - protein, 40 aa, Artificial Sequence
  GFR-binding peptide
  MOD_RES (6)..(7)..(39): Xaa is C or S
STPPTXXVPTRLSATSILYYDSANNVVLRKHRDMVVESXG

SEQ ID NO: 70289 - protein, 33 aa, Artificial Sequence
  GFR-binding peptide
  MOD_RES (1)..(1): Xaa is C or S
  MOD_RES (15)..(16)..(17)..(18)..(19): Xaa is A or G
  MOD_RES (20)..(21)..(22)..(23): Xaa is A or G or is absent
XTPTKMEPISMLYLXXXXXXXXXKFKYEGMVVD

SEQ ID NO: 70290 - protein, 32 aa, Artificial Sequence; identical to SEQ ID NO: 7966
  GFR-binding peptide
  MOD_RES (1)..(32): Xaa is C or S

SEQ ID NO: 70291 - protein, 31 aa, Artificial Sequence; identical to SEQ ID NO: 7967
  GFR-binding peptide
  MOD_RES (31)..(31): Xaa is C or S

SEQ ID NO: 70292 - protein, 36 aa, Artificial Sequence; identical to SEQ ID NO: 29250
  GFR-binding peptide
  MOD_RES (34)..(36): Xaa is C or S
  MOD_RES (14)..(15)..(16)..(17)..(18): Xaa is A or G
  MOD_RES (19)..(20)..(21)..(22): Xaa is A or G or is absent

SEQ ID NO: 70293 - protein, 40 aa, Artificial Sequence; identical to SEQ ID NO: 7972
  GFR-binding peptide
  MOD_RES (6)..(7)..(38)..(40): Xaa is C or S

SEQ ID NO: 70294 - protein, 39 aa, Artificial Sequence; identical to SEQ ID NO: 32301
  GFR-binding peptide
  MOD_RES (6)..(7)..(39): Xaa is C or S

SEQ ID NO: 70295 - protein, 37 aa, Artificial Sequence; identical to SEQ ID NO: 29256
  GFR-binding peptide
  MOD_RES (34)..(36): Xaa is C or S
  MOD_RES (14)..(15)..(16)..(17)..(18): Xaa is A or G
  MOD_RES (19)..(20)..(21)..(22): Xaa is A or G or is absent

SEQ ID NO: 70296 - protein, 41 aa, Artificial Sequence
  GFR-binding peptide
  MOD_RES (4)..(5)..(38)..(40): Xaa is C or S
  MOD_RES (19)..(20)..(21)..(22)..(23): Xaa is A or G
  MOD_RES (24)..(25)..(26)..(27): Xaa is A or G or is absent
PSTXXAPVKTSATSMLYYXXXXXXXXXLRKHRMIVEEXGXL

SEQ ID NO: 70297 - protein, 38 aa, Artificial Sequence; identical to SEQ ID NO: 29257
  GFR-binding peptide
  MOD_RES (1)..(35)..(37): Xaa is C or S
  MOD_RES (15)..(16)..(17)..(18)..(19): Xaa is A or G
  MOD_RES (20)..(21)..(22)..(23): Xaa is A or G or is absent

SEQ ID NO: 70298 - protein, 39 aa, Artificial Sequence; identical to SEQ ID NO: 29260
  GFR-binding peptide
  MOD_RES (5)..(6)..(39): Xaa is C or S
  MOD_RES (20)..(21)..(22)..(23)..(24): Xaa is A or G
  MOD_RES (25)..(26)..(27)..(28): Xaa is A or G or is absent

SEQ ID NO: 70299 - protein, 34 aa, Artificial Sequence
  GFR-binding peptide
  MOD_RES (32)..(34): Xaa is C or S
VPEKMSPINILYFDENKNVVYGKIPNMTVESXAX

SEQ ID NO: 70300 - protein, 37 aa, Artificial Sequence; identical to SEQ ID NO: 32316
  GFR-binding peptide
  MOD_RES (3)..(4): Xaa is C or S
  MOD_RES (18)..(19)..(20)..(21)..(22): Xaa is A or G
  MOD_RES (23)..(24)..(25)..(26): Xaa is A or G or is absent

SEQ ID NO: 70301 - protein, 34 aa, Artificial Sequence
  GFR-binding peptide
  MOD_RES (1)..(2): Xaa is C or S
  MOD_RES (16)..(17)..(18)..(19)..(20): Xaa is A or G
  MOD_RES (21)..(22)..(23)..(24): Xaa is A or G or is absent
XXVPEKMSPISILYKXXXXXXXXXLKYHYNMTVE

SEQ ID NO: 70302 - protein, 36 aa, Artificial Sequence; identical to SEQ ID NO: 7978
  GFR-binding peptide
  MOD_RES (1)..(33)..(35): Xaa is C or S

SEQ ID NO: 70303 - protein, 39 aa, Artificial Sequence; identical to SEQ ID NO: 7980
  GFR-binding peptide
  MOD_RES (3)..(37)..(39): Xaa is C or S
  MOD_RES (17)..(18)..(19)..(20)..(21): Xaa is A or G
  MOD_RES (22)..(23)..(24)..(25): Xaa is A or G or is absent

SEQ ID NO: 70304 - protein, 42 aa, Artificial Sequence
  GFR-binding peptide
  MOD_RES (4)..(5)..(39)..(41): Xaa is C or S
  MOD_RES (19)..(20)..(21)..(22)..(23): Xaa is A or G
  MOD_RES (24)..(25)..(26)..(27): Xaa is A or G or is absent
PPTXXVPTRLSATSILYYXXXXXXXXXLRKHRDMVVESXGXR

SEQ ID NO: 70305 - protein, 39 aa, Artificial Sequence; identical to SEQ ID NO: 32322
  GFR-binding peptide
  MOD_RES (1)..(2)..(36)..(38): Xaa is C or S
  MOD_RES (16)..(17)..(18)..(19)..(20): Xaa is A or G
  MOD_RES (21)..(22)..(23)..(24): Xaa is A or G or is absent

SEQ ID NO: 70306 - protein, 38 aa, Artificial Sequence
  GFR-binding peptide
  MOD_RES (6)..(7): Xaa is C or S
STPPTXXVPTRLSPISILYKDSANNVVLKYHYDMVVES

SEQ ID NO: 70307 - protein, 34 aa, Artificial Sequence
  GFR-binding peptide
  MOD_RES (1)..(2): Xaa is C or S
  MOD_RES (16)..(17)..(18)..(19)..(20): Xaa is A or G
  MOD_RES (21)..(22)..(23)..(24): Xaa is A or G or is absent
XXVPEKMEPISILYLXXXXXXXXXKFKYENMTVE

SEQ ID NO: 70308 - protein, 41 aa, Artificial Sequence; identical to SEQ ID NO: 7987
  GFR-binding peptide
  MOD_RES (3)..(4)..(39)..(41): Xaa is C or S
  MOD_RES (18)..(19)..(20)..(21)..(22): Xaa is A or G
  MOD_RES (23)..(24)..(25)..(26): Xaa is A or G or is absent

SEQ ID NO: 70309 - protein, 35 aa, Artificial Sequence; identical to SEQ ID NO: 32331
  GFR-binding peptide
  MOD_RES (1)..(33)..(35): Xaa is C or S

SEQ ID NO: 70310 - protein, 31 aa, Artificial Sequence; identical to SEQ ID NO: 7991
  GFR-binding peptide
  MOD_RES (1)..(1): Xaa is C or S

SEQ ID NO: 70311 - protein, 35 aa, Artificial Sequence; identical to SEQ ID NO: 32333
  GFR-binding peptide
  MOD_RES (1)..(2)..(35): Xaa is C or S

SEQ ID NO: 70312 - protein, 39 aa, Artificial Sequence
  GFR-binding peptide
  MOD_RES (5)..(6): Xaa is C or S
  MOD_RES (20)..(21)..(22)..(23)..(24): Xaa is A or G
  MOD_RES (25)..(26)..(27)..(28): Xaa is A or G or is absent
IPEPXXVPEKMSPINILYFXXXXXXXXXYGKIPNMTVES

SEQ ID NO: 70313 - protein, 38 aa, Artificial Sequence; identical to SEQ ID NO: 7992
  GFR-binding peptide
  MOD_RES (6)..(38): Xaa is C or S

SEQ ID NO: 70314 - protein, 35 aa, Artificial Sequence; identical to SEQ ID NO: 29269
  GFR-binding peptide
  MOD_RES (1)..(33)..(35): Xaa is C or S

SEQ ID NO: 70315 - protein, 38 aa, Artificial Sequence; identical to SEQ ID NO: 32334
  GFR-binding peptide
  MOD_RES (5)..(6)..(37): Xaa is C or S

SEQ ID NO: 70316 - protein, 34 aa, Artificial Sequence; identical to SEQ ID NO: 29271
  GFR-binding peptide
  MOD_RES (1)..(2)..(34): Xaa is C or S

SEQ ID NO: 70317 - protein, 35 aa, Artificial Sequence; identical to SEQ ID NO: 7995
  GFR-binding peptide
  MOD_RES (1)..(33)..(35): Xaa is C or S

SEQ ID NO: 70318 - protein, 33 aa, Artificial Sequence
  GFR-binding peptide
  MOD_RES (33)..(33): Xaa is C or S
  MOD_RES (14)..(15)..(16)..(17)..(18): Xaa is A or G
  MOD_RES (19)..(20)..(21)..(22): Xaa is A or G or is absent
APVKTSATSMLYYXXXXXXXXXLRKHRMIVEEX

SEQ ID NO: 70319 - protein, 39 aa, Artificial Sequence; identical to SEQ ID NO: 29273
  GFR-binding peptide
  MOD_RES (2)..(3)..(37)..(39): Xaa is C or S
  MOD_RES (17)..(18)..(19)..(20)..(21): Xaa is A or G
  MOD_RES (22)..(23)..(24)..(25): Xaa is A or G or is absent

SEQ ID NO: 70320 - protein, 33 aa, Artificial Sequence; identical to SEQ ID NO: 29274
  GFR-binding peptide
  MOD_RES (14)..(15)..(16)..(17)..(18): Xaa is A or G
  MOD_RES (19)..(20)..(21)..(22): Xaa is A or G or is absent

SEQ ID NO: 70321 - protein, 37 aa, Artificial Sequence
  GFR-binding peptide
  MOD_RES (2)..(3)..(36): Xaa is C or S
  MOD_RES (17)..(18)..(19)..(20)..(21): Xaa is A or G
  MOD_RES (22)..(23)..(24)..(25): Xaa is A or G or is absent
PXXVPQDLSPINILYFXXXXXXXXXYGKIPMVVKSXK

SEQ ID NO: 70322 - protein, 41 aa, Artificial Sequence; identical to SEQ ID NO: 7999
  GFR-binding peptide
  MOD_RES (5)..(6)..(38)..(40): Xaa is C or S

SEQ ID NO: 70323 - protein, 41 aa, Artificial Sequence
  GFR-binding peptide
  MOD_RES (4)..(5)..(39)..(41): Xaa is C or S
  MOD_RES (19)..(20)..(21)..(22)..(23): Xaa is A or G
  MOD_RES (24)..(25)..(26)..(27): Xaa is A or G or is absent
AGPXXTPTKMSATSMLYYXXXXXXXXXLRKHRGMVVDRXGX

SEQ ID NO: 70324 - protein, 32 aa, Artificial Sequence; identical to SEQ ID NO: 29279
  GFR-binding peptide
  MOD_RES (14)..(15)..(16)..(17)..(18): Xaa is A or G
  MOD_RES (19)..(20)..(21)..(22): Xaa is A or G or is absent

SEQ ID NO: 70325 - protein, 42 aa, Artificial Sequence
  GFR-binding peptide
  MOD_RES (6)..(7)..(41): Xaa is C or S
  MOD_RES (21)..(22)..(23)..(24)..(25): Xaa is A or G
  MOD_RES (26)..(27)..(28)..(29): Xaa is A or G or is absent
AAPASXXVPARLSATSILYYXXXXXXXXXLRKHRDMVVEAXG

SEQ ID NO: 70326 - protein, 44 aa, Artificial Sequence
  GFR-binding peptide
  MOD_RES (6)..(7)..(41)..(43): Xaa is C or S
  MOD_RES (21)..(22)..(23)..(24)..(25): Xaa is A or G
  MOD_RES (26)..(27)..(28)..(29): Xaa is A or G or is absent
STPPTXXVPTRLSATSILYYXXXXXXXXXLRKHRDMVVESXGXR

SEQ ID NO: 70327 - protein, 33 aa, Artificial Sequence; identical to SEQ ID NO: 15294
  GFR-binding peptide
  MOD_RES (1)..(33): Xaa is C or S

SEQ ID NO: 70328 - protein, 40 aa, Artificial Sequence; identical to SEQ ID NO: 29283
  GFR-binding peptide
  MOD_RES (2)..(3)..(37)..(39): Xaa is C or S
  MOD_RES (17)..(18)..(19)..(20)..(21): Xaa is A or G
  MOD_RES (22)..(23)..(24)..(25): Xaa is A or G or is absent

SEQ ID NO: 70329 - protein, 39 aa, Artificial Sequence; identical to SEQ ID NO: 8004
  GFR-binding peptide
  MOD_RES (7)..(7): Xaa is C or S
  MOD_RES (21)..(22)..(23)..(24)..(25): Xaa is A or G
  MOD_RES (26)..(27)..(28)..(29): Xaa is A or G or is absent

SEQ ID NO: 70330 - protein, 34 aa, Artificial Sequence; identical to SEQ ID NO: 8006
  GFR-binding peptide
  MOD_RES (1)..(32)..(34): Xaa is C or S

SEQ ID NO: 70331 - protein, 40 aa, Artificial Sequence; identical to SEQ ID NO: 29289
  GFR-binding peptide
  MOD_RES (2)..(3)..(37)..(39): Xaa is C or S
  MOD_RES (17)..(18)..(19)..(20)..(21): Xaa is A or G
  MOD_RES (22)..(23)..(24)..(25): Xaa is A or G or is absent

SEQ ID NO: 70332 - protein, 41 aa, Artificial Sequence
  GFR-binding peptide
  MOD_RES (4)..(5)..(39)..(41): Xaa is C or S
  MOD_RES (19)..(20)..(21)..(22)..(23): Xaa is A or G
  MOD_RES (24)..(25)..(26)..(27): Xaa is A or G or is absent
SKAXXVPTKLSATSILYYXXXXXXXXXLRKHRGMAVSEXGX

SEQ ID NO: 70333 - protein, 35 aa, Artificial Sequence; identical to SEQ ID NO: 57292
  GFR-binding peptide
  MOD_RES (1)..(2)..(34): Xaa is C or S

SEQ ID NO: 70334 - protein, 36 aa, Artificial Sequence; identical to SEQ ID NO: 32360
  GFR-binding peptide
  MOD_RES (5)..(6): Xaa is C or S

SEQ ID NO: 70335 - protein, 31 aa, Artificial Sequence; identical to SEQ ID NO: 15316
  GFR-binding peptide
  MOD_RES (1)..(1): Xaa is C or S

SEQ ID NO: 70336 - protein, 37 aa, Artificial Sequence; identical to SEQ ID NO: 8021
  GFR-binding peptide
  MOD_RES (2)..(34)..(36): Xaa is C or S

SEQ ID NO: 70337 - protein, 36 aa, Artificial Sequence
  GFR-binding peptide
  MOD_RES (1)..(35): Xaa is C or S
  MOD_RES (15)..(16)..(17)..(18)..(19): Xaa is A or G
  MOD_RES (20)..(21)..(22)..(23): Xaa is A or G or is absent
XVPTRLEPISILYLXXXXXXXXXKFKYEDMVVESXG

SEQ ID NO: 70338 - protein, 38 aa, Artificial Sequence
  GFR-binding peptide
  MOD_RES (4)..(5)..(38): Xaa is C or S
  MOD_RES (19)..(20)..(21)..(22)..(23): Xaa is A or G
  MOD_RES (24)..(25)..(26)..(27): Xaa is A or G or is absent
PSTXXAPVKTEPISMLYLXXXXXXXXXKFKYEMIVEEX

SEQ ID NO: 70339 - protein, 36 aa, Artificial Sequence
  GFR-binding peptide
  MOD_RES (5)..(6): Xaa is C or S
TPPTXXVPTRLSATSILYYDSANNVVLRKHRDMVVE

SEQ ID NO: 70340 - protein, 37 aa, Artificial Sequence
  GFR-binding peptide
  MOD_RES (6)..(7): Xaa is C or S
ASAAPXXVPQALSPINILYFVGRKPKVYGKIPMIVRS

SEQ ID NO: 70341 - protein, 37 aa, Artificial Sequence
  GFR-binding peptide
  MOD_RES (3)..(4): Xaa is C or S
  MOD_RES (18)..(19)..(20)..(21)..(22): Xaa is A or G
  MOD_RES (23)..(24)..(25)..(26): Xaa is A or G or is absent
PTXXVPTRLSATSILYYXXXXXXXXXLRKHRDMVVES

SEQ ID NO: 70342 - protein, 34 aa, Artificial Sequence; identical to SEQ ID NO: 32380
  GFR-binding peptide
  MOD_RES (3)..(4): Xaa is C or S

SEQ ID NO: 70343 - protein, 41 aa, Artificial Sequence
  GFR-binding peptide
  MOD_RES (4)..(5)..(39)..(41): Xaa is C or S
  MOD_RES (19)..(20)..(21)..(22)..(23): Xaa is A or G
  MOD_RES (24)..(25)..(26)..(27): Xaa is A or G or is absent
PEPXXVPEKMSPINILYFXXXXXXXXXYGKIPNMTVESXAX

SEQ ID NO: 70344 - protein, 35 aa, Artificial Sequence; identical to SEQ ID NO: 8026
  GFR-binding peptide
  MOD_RES (1)..(2)..(33)..(35): Xaa is C or S

SEQ ID NO: 70345 - protein, 42 aa, Artificial Sequence; identical to SEQ ID NO: 32394
  GFR-binding peptide
  MOD_RES (6)..(7)..(41): Xaa is C or S
  MOD_RES (21)..(22)..(23)..(24)..(25): Xaa is A or G
  MOD_RES (26)..(27)..(28)..(29): Xaa is A or G or is absent

SEQ ID NO: 70346 - protein, 41 aa, Artificial Sequence
  GFR-binding peptide
  MOD_RES (6)..(7)..(38)..(40): Xaa is C or S
RVPSTXXAPVKTSATSMLYYDNGRVLLLRKHRMIVEEXGXL

SEQ ID NO: 70347 - protein, 44 aa, Artificial Sequence; identical to SEQ ID NO: 8027
  GFR-binding peptide
  MOD_RES (6)..(7)..(41)..(43): Xaa is C or S
  MOD_RES (21)..(22)..(23)..(24)..(25): Xaa is A or G
  MOD_RES (26)..(27)..(28)..(29): Xaa is A or G or is absent

SEQ ID NO: 70348 - protein, 39 aa, Artificial Sequence; identical to SEQ ID NO: 29300
  GFR-binding peptide
  MOD_RES (6)..(7)..(39): Xaa is C or S

SEQ ID NO: 70349 - protein, 40 aa, Artificial Sequence
  GFR-binding peptide
  MOD_RES (4)..(5)..(37)..(39): Xaa is C or S
AGPXXTPTKMSATSMLYYNDKQQIILRKHRGMVVDRXGXS

SEQ ID NO: 70350 - protein, 36 aa, Artificial Sequence
  GFR-binding peptide
  MOD_RES (1)..(34)..(36): Xaa is C or S
  MOD_RES (15)..(16)..(17)..(18)..(19): Xaa is A or G
  MOD_RES (20)..(21)..(22)..(23): Xaa is A or G or is absent
XAPVKTSPISMLYKXXXXXXXXXLKYHYMIVEEXGX

SEQ ID NO: 70351 - protein, 36 aa, Artificial Sequence
  GFR-binding peptide
  MOD_RES (2)..(3): Xaa is C or S
  MOD_RES (17)..(18)..(19)..(20)..(21): Xaa is A or G
  MOD_RES (22)..(23)..(24)..(25): Xaa is A or G or is absent
PXXTPTKMSATSMLYYXXXXXXXXXLRKHRGMVVDR

SEQ ID NO: 70352 - protein, 42 aa, Artificial Sequence; identical to SEQ ID NO: 57318
  GFR-binding peptide
  MOD_RES (6)..(7)..(41): Xaa is C or S
  MOD_RES (21)..(22)..(23)..(24)..(25): Xaa is A or G
  MOD_RES (26)..(27)..(28)..(29): Xaa is A or G or is absent

SEQ ID NO: 70353 - protein, 35 aa, Artificial Sequence
  GFR-binding peptide
  MOD_RES (4)..(5): Xaa is C or S
AGPXXTPTKMSATSMLYYNDKQQIILRKHRGMVVD

SEQ ID NO: 70354 - protein, 40 aa, Artificial Sequence; identical to SEQ ID NO: 8032
  GFR-binding peptide
  MOD_RES (5)..(6)..(39): Xaa is C or S
  MOD_RES (20)..(21)..(22)..(23)..(24): Xaa is A or G
  MOD_RES (25)..(26)..(27)..(28): Xaa is A or G or is absent

SEQ ID NO: 70355 - protein, 35 aa, Artificial Sequence; identical to SEQ ID NO: 29308
  GFR-binding peptide
  MOD_RES (4)..(5): Xaa is C or S

SEQ ID NO: 70356 - protein, 37 aa, Artificial Sequence; identical to SEQ ID NO: 8034
  GFR-binding peptide
  MOD_RES (3)..(4): Xaa is C or S
  MOD_RES (18)..(19)..(20)..(21)..(22): Xaa is A or G
  MOD_RES (23)..(24)..(25)..(26): Xaa is A or G or is absent

SEQ ID NO: 70357 - protein, 38 aa, Artificial Sequence; identical to SEQ ID NO: 32402
  GFR-binding peptide
  MOD_RES (2)..(3)..(35)..(37): Xaa is C or S

SEQ ID NO: 70358 - protein, 39 aa, Artificial Sequence; identical to SEQ ID NO: 8038
  GFR-binding peptide
  MOD_RES (1)..(2)..(36)..(38): Xaa is C or S
  MOD_RES (16)..(17)..(18)..(19)..(20): Xaa is A or G
  MOD_RES (21)..(22)..(23)..(24): Xaa is A or G or is absent

SEQ ID NO: 70359 - protein, 43 aa, Artificial Sequence; identical to SEQ ID NO: 29315
  GFR-binding peptide
  MOD_RES (5)..(6)..(40)..(42): Xaa is C or S
  MOD_RES (20)..(21)..(22)..(23)..(24): Xaa is A or G
  MOD_RES (25)..(26)..(27)..(28): Xaa is A or G or is absent

SEQ ID NO: 70360 - protein, 35 aa, Artificial Sequence; identical to SEQ ID NO: 32411
  GFR-binding peptide
  MOD_RES (1)..(33)..(35): Xaa is C or S

SEQ ID NO: 70361 - protein, 37 aa, Artificial Sequence; identical to SEQ ID NO: 29317
  GFR-binding peptide
  MOD_RES (1)..(2)..(35)..(37): Xaa is C or S
  MOD_RES (16)..(17)..(18)..(19)..(20): Xaa is A or G
  MOD_RES (21)..(22)..(23)..(24): Xaa is A or G or is absent

SEQ ID NO: 70362 - protein, 33 aa, Artificial Sequence; identical to SEQ ID NO: 29321
  GFR-binding peptide
  MOD_RES (2)..(3): Xaa is C or S

SEQ ID NO: 70363 - protein, 36 aa, Artificial Sequence; identical to SEQ ID NO: 8041
  GFR-binding peptide
  MOD_RES (3)..(4)..(35): Xaa is C or S

SEQ ID NO: 70364 - protein, 40 aa, Artificial Sequence; identical to SEQ ID NO: 8042
  GFR-binding peptide
  MOD_RES (7)..(39): Xaa is C or S

SEQ ID NO: 70365 - protein, 36 aa, Artificial Sequence; identical to SEQ ID NO: 32415
  GFR-binding peptide
  MOD_RES (6)..(6): Xaa is C or S

SEQ ID NO: 70366 - protein, 36 aa, Artificial Sequence; identical to SEQ ID NO: 8043
  GFR-binding peptide
  MOD_RES (2)..(3): Xaa is C or S
  MOD_RES (17)..(18)..(19)..(20)..(21): Xaa is A or G
  MOD_RES (22)..(23)..(24)..(25): Xaa is A or G or is absent

SEQ ID NO: 70367 - protein, 39 aa, Artificial Sequence; identical to SEQ ID NO: 32416
  GFR-binding peptide
  MOD_RES (6)..(7)..(39): Xaa is C or S

SEQ ID NO: 70368 - protein, 40 aa, Artificial Sequence; identical to SEQ ID NO: 8045
  GFR-binding peptide
  MOD_RES (4)..(5)..(37)..(39): Xaa is C or S

SEQ ID NO: 70369 - protein, 32 aa, Artificial Sequence; identical to SEQ ID NO: 8048
  GFR-binding peptide
  MOD_RES (1)..(2): Xaa is C or S

SEQ ID NO: 70370 - protein, 36 aa, Artificial Sequence; identical to SEQ ID NO: 32420
  GFR-binding peptide
  MOD_RES (2)..(3): Xaa is C or S
  MOD_RES (17)..(18)..(19)..(20)..(21): Xaa is A or G
  MOD_RES (22)..(23)..(24)..(25): Xaa is A or G or is absent

SEQ ID NO: 70371 - protein, 36 aa, Artificial Sequence; identical to SEQ ID NO: 32421
  GFR-binding peptide
  MOD_RES (3)..(4)..(35): Xaa is C or S

SEQ ID NO: 70372 - protein, 36 aa, Artificial Sequence; identical to SEQ ID NO: 8052
  GFR-binding peptide
  MOD_RES (2)..(3)..(36): Xaa is C or S

SEQ ID NO: 70373 - protein, 32 aa, Artificial Sequence; identical to SEQ ID NO: 8053
  GFR-binding peptide
  MOD_RES (32)..(32): Xaa is C or S

SEQ ID NO: 70374 - protein, 38 aa, Artificial Sequence
  GFR-binding peptide
  MOD_RES (2)..(3)..(36)..(38): Xaa is C or S
  MOD_RES (17)..(18)..(19)..(20)..(21): Xaa is A or G
  MOD_RES (22)..(23)..(24)..(25): Xaa is A or G or is absent
TXXAPVKTSPISMLYKXXXXXXXXXLKYHYMIVEEXGX

SEQ ID NO: 70375 - protein, 35 aa, Artificial Sequence; identical to SEQ ID NO: 32424
  GFR-binding peptide
  MOD_RES (1)..(35): Xaa is C or S
  MOD_RES (15)..(16)..(17)..(18)..(19): Xaa is A or G
  MOD_RES (20)..(21)..(22)..(23): Xaa is A or G or is absent

SEQ ID NO: 70376 - protein, 39 aa, Artificial Sequence; identical to SEQ ID NO: 29330
  GFR-binding peptide
  MOD_RES (1)..(2)..(36)..(38): Xaa is C or S
  MOD_RES (16)..(17)..(18)..(19)..(20): Xaa is A or G
  MOD_RES (21)..(22)..(23)..(24): Xaa is A or G or is absent

SEQ ID NO: 70377 - protein, 38 aa, Artificial Sequence; identical to SEQ ID NO: 8055
  GFR-binding peptide
  MOD_RES (3)..(4)..(36)..(38): Xaa is C or S

SEQ ID NO: 70378 - protein, 42 aa, Artificial Sequence; identical to SEQ ID NO: 29332
  GFR-binding peptide
  MOD_RES (4)..(5)..(39)..(41): Xaa is C or S
  MOD_RES (19)..(20)..(21)..(22)..(23): Xaa is A or G
  MOD_RES (24)..(25)..(26)..(27): Xaa is A or G or is absent

SEQ ID NO: 70379 - protein, 41 aa, Artificial Sequence; identical to SEQ ID NO: 8057
  GFR-binding peptide
  MOD_RES (7)..(41): Xaa is C or S
  MOD_RES (21)..(22)..(23)..(24)..(25): Xaa is A or G
  MOD_RES (26)..(27)..(28)..(29): Xaa is A or G or is absent

SEQ ID NO: 70380 - protein, 38 aa, Artificial Sequence; identical to SEQ ID NO: 29337
  GFR-binding peptide
  MOD_RES (3)..(4)..(38): Xaa is C or S
  MOD_RES (18)..(19)..(20)..(21)..(22): Xaa is A or G
  MOD_RES (23)..(24)..(25)..(26): Xaa is A or G or is absent

SEQ ID NO: 70381 - protein, 37 aa, Artificial Sequence; identical to SEQ ID NO: 32434
  GFR-binding peptide
  MOD_RES (1)..(2)..(37): Xaa is C or S
  MOD_RES (16)..(17)..(18)..(19)..(20): Xaa is A or G
  MOD_RES (21)..(22)..(23)..(24): Xaa is A or G or is absent

SEQ ID NO: 70382 - protein, 36 aa, Artificial Sequence; identical to SEQ ID NO: 8059
  GFR-binding peptide
  MOD_RES (1)..(35): Xaa is C or S
  MOD_RES (15)..(16)..(17)..(18)..(19): Xaa is A or G
  MOD_RES (20)..(21)..(22)..(23): Xaa is A or G or is absent

SEQ ID NO: 70383 - protein, 32 aa, Artificial Sequence; identical to SEQ ID NO: 29340
  GFR-binding peptide
  MOD_RES (1)..(2): Xaa is C or S

SEQ ID NO: 70384 - protein, 38 aa, Artificial Sequence; identical to SEQ ID NO: 8060
  GFR-binding peptide
  MOD_RES (4)..(38): Xaa is C or S
  MOD_RES (18)..(19)..(20)..(21)..(22): Xaa is A or G
  MOD_RES (23)..(24)..(25)..(26): Xaa is A or G or is absent

SEQ ID NO: 70385 - protein, 39 aa, Artificial Sequence; identical to SEQ ID NO: 29343
  GFR-binding peptide
  MOD_RES (5)..(6): Xaa is C or S
  MOD_RES (20)..(21)..(22)..(23)..(24): Xaa is A or G
  MOD_RES (25)..(26)..(27)..(28): Xaa is A or G or is absent

SEQ ID NO: 70386 - protein, 34 aa, Artificial Sequence; identical to SEQ ID NO: 8062
  GFR-binding peptide
  MOD_RES (1)..(33): Xaa is C or S

SEQ ID NO: 70387 - protein, 37 aa, Artificial Sequence; identical to SEQ ID NO: 29347
  GFR-binding peptide
  MOD_RES (4)..(5)..(37): Xaa is C or S

SEQ ID NO: 70388 - protein, 35 aa, Artificial Sequence
  GFR-binding peptide
  MOD_RES (34)..(34): Xaa is C or S
  MOD_RES (14)..(15)..(16)..(17)..(18): Xaa is A or G
  MOD_RES (19)..(20)..(21)..(22): Xaa is A or G or is absent
VPEKMSPISILYKXXXXXXXXXLKYHYNMTVESXA

SEQ ID NO: 70389 - protein, 35 aa, Artificial Sequence
  GFR-binding peptide
  MOD_RES (1)..(33)..(35): Xaa is C or S
XVPEKMSATSILYYDENKNVVLRKHRNMTVESXAX

SEQ ID NO: 70390 - protein, 37 aa, Artificial Sequence
  GFR-binding peptide
  MOD_RES (4)..(5): Xaa is C or S
  MOD_RES (19)..(20)..(21)..(22)..(23): Xaa is A or G
  MOD_RES (24)..(25)..(26)..(27): Xaa is A or G or is absent
PSTXXAPVKTSPISMLYKXXXXXXXXXLKYHYMIVEE

SEQ ID NO: 70391 - protein, 39 aa, Artificial Sequence; identical to SEQ ID NO: 29356
  GFR-binding peptide
  MOD_RES (5)..(6): Xaa is C or S
  MOD_RES (20)..(21)..(22)..(23)..(24): Xaa is A or G
  MOD_RES (25)..(26)..(27)..(28): Xaa is A or G or is absent

SEQ ID NO: 70392 - protein, 37 aa, Artificial Sequence; identical to SEQ ID NO: 29358
  GFR-binding peptide
  MOD_RES (3)..(4): Xaa is C or S
  MOD_RES (18)..(19)..(20)..(21)..(22): Xaa is A or G
  MOD_RES (23)..(24)..(25)..(26): Xaa is A or G or is absent

SEQ ID NO: 70393 - protein, 34 aa, Artificial Sequence; identical to SEQ ID NO: 32454
  GFR-binding peptide
  MOD_RES (2)..(3)..(34): Xaa is C or S

SEQ ID NO: 70394 - protein, 33 aa, Artificial Sequence; identical to SEQ ID NO: 8073
  GFR-binding peptide
  MOD_RES (33)..(33): Xaa is C or S
  MOD_RES (14)..(15)..(16)..(17)..(18): Xaa is A or G
  MOD_RES (19)..(20)..(21)..(22): Xaa is A or G or is absent

SEQ ID NO: 70395 - protein, 36 aa, Artificial Sequence; identical to SEQ ID NO: 29361
  GFR-binding peptide
  MOD_RES (3)..(4)..(36): Xaa is C or S

SEQ ID NO: 70396 - protein, 34 aa, Artificial Sequence; identical to SEQ ID NO: 8076
  GFR-binding peptide
  MOD_RES (1)..(34): Xaa is C or S
  MOD_RES (15)..(16)..(17)..(18)..(19): Xaa is A or G
  MOD_RES (20)..(21)..(22)..(23): Xaa is A or G or is absent

SEQ ID NO: 70397 - protein, 36 aa, Artificial Sequence; identical to SEQ ID NO: 8077
  GFR-binding peptide
  MOD_RES (4)..(5): Xaa is C or S

SEQ ID NO: 70398 - protein, 36 aa, Artificial Sequence; identical to SEQ ID NO: 8080
  GFR-binding peptide
  MOD_RES (2)..(3)..(35): Xaa is C or S

SEQ ID NO: 70399 - protein, 34 aa, Artificial Sequence; identical to SEQ ID NO: 32464
  GFR-binding peptide
  MOD_RES (3)..(4): Xaa is C or S

SEQ ID NO: 70400 - protein, 35 aa, Artificial Sequence
  GFR-binding peptide
  MOD_RES (1)..(2)..(34): Xaa is C or S
XXVPEKMNAISILYFDENKNVVLKKYRNMTVESXA

SEQ ID NO: 70401 - protein, 31 aa, Artificial Sequence; identical to SEQ ID NO: 29369
  GFR-binding peptide
  MOD_RES (1)..(1): Xaa is C or S

SEQ ID NO: 70402 - protein, 38 aa, Artificial Sequence
  GFR-binding peptide
  MOD_RES (3)..(4)..(36)..(38): Xaa is C or S
EPXXVPEKMSPINILYFDENKNVVYGKIPNMTVESXAX

SEQ ID NO: 70403 - protein, 32 aa, Artificial Sequence; identical to SEQ ID NO: 32466
  GFR-binding peptide
  MOD_RES (1)..(2): Xaa is C or S

SEQ ID NO: 70404 - protein, 40 aa, Artificial Sequence
  GFR-binding peptide
  MOD_RES (5)..(6)..(38)..(40): Xaa is C or S
TPPTXXVPTRLSPISILYKDSANNVVLKYHYDMVVESXGX

SEQ ID NO: 70405 - protein, 39 aa, Artificial Sequence
  GFR-binding peptide
  MOD_RES (4)..(5)..(39): Xaa is C or S
  MOD_RES (19)..(20)..(21)..(22)..(23): Xaa is A or G
  MOD_RES (24)..(25)..(26)..(27): Xaa is A or G or is absent
PPTXXVPTRLSATSILYYXXXXXXXXXLRKHRDMVVESX

SEQ ID NO: 70406 - protein, 37 aa, Artificial Sequence; identical to SEQ ID NO: 8094
  GFR-binding peptide
  MOD_RES (34)..(36): Xaa is C or S
  MOD_RES (14)..(15)..(16)..(17)..(18): Xaa is A or G
  MOD_RES (19)..(20)..(21)..(22): Xaa is A or G or is absent

SEQ ID NO: 70407 - protein, 39 aa, Artificial Sequence
  GFR-binding peptide
  MOD_RES (6)..(7)..(39): Xaa is C or S
HVPKPXXAPTKLEPISVLYLDDSSNVIKFKYENMVVRSX

SEQ ID NO: 70408 - protein, 40 aa, Artificial Sequence
  GFR-binding peptide
  MOD_RES (6)..(7): Xaa is C or S
  MOD_RES (21)..(22)..(23)..(24)..(25): Xaa is A or G
  MOD_RES (26)..(27)..(28)..(29): Xaa is A or G or is absent
GIPEPXXVPEKMEPISILYLXXXXXXXXXKFKYENMTVES

SEQ ID NO: 70409 - protein, 40 aa, Artificial Sequence; identical to SEQ ID NO: 8100
  GFR-binding peptide
  MOD_RES (5)..(6)..(38)..(40): Xaa is C or S

SEQ ID NO: 70410 - protein, 36 aa, Artificial Sequence; identical to SEQ ID NO: 57379
  GFR-binding peptide
  MOD_RES (5)..(6): Xaa is C or S

SEQ ID NO: 70411 - protein, 36 aa, Artificial Sequence; identical to SEQ ID NO: 29383
  GFR-binding peptide
  MOD_RES (2)..(3)..(35): Xaa is C or S

SEQ ID NO: 70412 - protein, 35 aa, Artificial Sequence
  GFR-binding peptide
  MOD_RES (3)..(4)..(35): Xaa is C or S
STXXAPVKTEPISMLYLDNGRVLLKFKYEMIVEEX

SEQ ID NO: 70413 - protein, 41 aa, Artificial Sequence; identical to SEQ ID NO: 29385
  GFR-binding peptide
  MOD_RES (5)..(6)..(40): Xaa is C or S
  MOD_RES (20)..(21)..(22)..(23)..(24): Xaa is A or G
  MOD_RES (25)..(26)..(27)..(28): Xaa is A or G or is absent

SEQ ID NO: 70414 - protein, 38 aa, Artificial Sequence; identical to SEQ ID NO: 32484
  GFR-binding peptide
  MOD_RES (2)..(3)..(35)..(37): Xaa is C or S

SEQ ID NO: 70415 - protein, 38 aa, Artificial Sequence
  GFR-binding peptide
  MOD_RES (3)..(4)..(35)..(37): Xaa is C or S
STXXAPVKTEPISMLYLDNGRVLLKFKYEMIVEEXGXL

SEQ ID NO: 70416 - protein, 37 aa, Artificial Sequence; identical to SEQ ID NO: 32488
  GFR-binding peptide
  MOD_RES (2)..(3)..(37): Xaa is C or S
  MOD_RES (17)..(18)..(19)..(20)..(21): Xaa is A or G
  MOD_RES (22)..(23)..(24)..(25): Xaa is A or G or is absent

SEQ ID NO: 70417 - protein, 33 aa, Artificial Sequence
  GFR-binding peptide
  MOD_RES (2)..(3): Xaa is C or S
PXXVPEKMSPINILYFDENKNVVYGKIPNMTVE

SEQ ID NO: 70418 - protein, 37 aa, Artificial Sequence
  GFR-binding peptide
  MOD_RES (2)..(3)..(37): Xaa is C or S
  MOD_RES (17)..(18)..(19)..(20)..(21): Xaa is A or G
  MOD_RES (22)..(23)..(24)..(25): Xaa is A or G or is absent
PXXVPEKMSATSILYYXXXXXXXXXLRKHRNMTVESX

SEQ ID NO: 70419 - protein, 35 aa, Artificial Sequence; identical to SEQ ID NO: 8106
  GFR-binding peptide
  MOD_RES (2)..(3): Xaa is C or S
  MOD_RES (17)..(18)..(19)..(20)..(21): Xaa is A or G
  MOD_RES (22)..(23)..(24)..(25): Xaa is A or G or is absent

SEQ ID NO: 70420 - protein, 35 aa, Artificial Sequence; identical to SEQ ID NO: 29394
  GFR-binding peptide
  MOD_RES (1)..(2): Xaa is C or S
  MOD_RES (16)..(17)..(18)..(19)..(20): Xaa is A or G
  MOD_RES (21)..(22)..(23)..(24): Xaa is A or G or is absent

SEQ ID NO: 70421 - protein, 37 aa, Artificial Sequence
  GFR-binding peptide
  MOD_RES (34)..(36): Xaa is C or S
  MOD_RES (14)..(15)..(16)..(17)..(18): Xaa is A or G
  MOD_RES (19)..(20)..(21)..(22): Xaa is A or G or is absent
VPEKMSPINILYFXXXXXXXXXYGKIPNMTVESXAXR

SEQ ID NO: 70422 - protein, 41 aa, Artificial Sequence; identical to SEQ ID NO: 29396
  GFR-binding peptide
  MOD_RES (3)..(4)..(38)..(40): Xaa is C or S
  MOD_RES (18)..(19)..(20)..(21)..(22): Xaa is A or G
  MOD_RES (23)..(24)..(25)..(26): Xaa is A or G or is absent

SEQ ID NO: 70423 - protein, 36 aa, Artificial Sequence
  GFR-binding peptide
  MOD_RES (34)..(36): Xaa is C or S
  MOD_RES (14)..(15)..(16)..(17)..(18): Xaa is A or G
  MOD_RES (19)..(20)..(21)..(22): Xaa is A or G or is absent
VPEKMNAISILYFXXXXXXXXXLKKYRNMTVESXAX

SEQ ID NO: 70424 - protein, 37 aa, Artificial Sequence
  GFR-binding peptide
  MOD_RES (2)..(3)..(35)..(37): Xaa is C or S
PXXTPTKMSATSMLYYNDKQQIILRKHRGMVVDRXGX

SEQ ID NO: 70425 - protein, 35 aa, Artificial Sequence; identical to SEQ ID NO: 15410
  GFR-binding peptide
  MOD_RES (32)..(34): Xaa is C or S

SEQ ID NO: 70426 - protein, 35 aa, Artificial Sequence; identical to SEQ ID NO: 8109
  GFR-binding peptide
  MOD_RES (1)..(1): Xaa is C or S
  MOD_RES (15)..(16)..(17)..(18)..(19): Xaa is A or G
  MOD_RES (20)..(21)..(22)..(23): Xaa is A or G or is absent

SEQ ID NO: 70427 - protein, 39 aa, Artificial Sequence
  GFR-binding peptide
  MOD_RES (3)..(4)..(38): Xaa is C or S
  MOD_RES (18)..(19)..(20)..(21)..(22): Xaa is A or G
  MOD_RES (23)..(24)..(25)..(26): Xaa is A or G or is absent
EPXXVPEKMSPISILYKXXXXXXXXXLKYHYNMTVESXA

SEQ ID NO: 70428 - protein, 35 aa, Artificial Sequence; identical to SEQ ID NO: 29400
  GFR-binding peptide
  MOD_RES (35)..(35): Xaa is C or S
  MOD_RES (14)..(15)..(16)..(17)..(18): Xaa is A or G
  MOD_RES (19)..(20)..(21)..(22): Xaa is A or G or is absent

SEQ ID NO: 70429 - protein, 39 aa, Artificial Sequence; identical to SEQ ID NO: 8113
  GFR-binding peptide
  MOD_RES (3)..(4)..(37)..(39): Xaa is C or S

SEQ ID NO: 70430 - protein, 39 aa, Artificial Sequence; identical to SEQ ID NO: 8115
  GFR-binding peptide
  MOD_RES (4)..(5)..(36)..(38): Xaa is C or S

SEQ ID NO: 70431 - protein, 40 aa, Artificial Sequence; identical to SEQ ID NO: 29402
  GFR-binding peptide
  MOD_RES (6)..(7)..(38)..(40): Xaa is C or S

SEQ ID NO: 70432 - protein, 35 aa, Artificial Sequence
  GFR-binding peptide
  MOD_RES (2)..(3)..(34): Xaa is C or S
PXXVPQALSPINILYFVGRKPKVYGKIPMIVRSXK

SEQ ID NO: 70433 - protein, 30 aa, Artificial Sequence; identical to SEQ ID NO: 29405
  GFR-binding peptide

SEQ ID NO: 70434 - protein, 39 aa, Artificial Sequence
  GFR-binding peptide
  MOD_RES (5)..(6)..(38): Xaa is C or S
APASXXVPARLSATSILYYDAANNVVLRKHRDMVVEAXG

SEQ ID NO: 70435 - protein, 32 aa, Artificial Sequence; identical to SEQ ID NO: 32518
  GFR-binding peptide
  MOD_RES (1)..(2): Xaa is C or S

SEQ ID NO: 70436 - protein, 42 aa, Artificial Sequence; identical to SEQ ID NO: 8123
  GFR-binding peptide
  MOD_RES (4)..(5)..(39)..(41): Xaa is C or S
  MOD_RES (19)..(20)..(21)..(22)..(23): Xaa is A or G
  MOD_RES (24)..(25)..(26)..(27): Xaa is A or G or is absent

SEQ ID NO: 70437 - protein, 38 aa, Artificial Sequence; identical to SEQ ID NO: 29411
  GFR-binding peptide
  MOD_RES (3)..(4)..(36)..(38): Xaa is C or S

SEQ ID NO: 70438 - protein, 37 aa, Artificial Sequence; identical to SEQ ID NO: 29412
  GFR-binding peptide
  MOD_RES (1)..(2)..(36): Xaa is C or S
  MOD_RES (16)..(17)..(18)..(19)..(20): Xaa is A or G
  MOD_RES (21)..(22)..(23)..(24): Xaa is A or G or is absent

SEQ ID NO: 70439 - protein, 39 aa, Artificial Sequence
  GFR-binding peptide
  MOD_RES (6)..(7)..(38): Xaa is C or S
RVPSTXXAPVKTSATSMLYYDNGRVLLLRKHRMIVEEXG

SEQ ID NO: 70440 - protein, 43 aa, Artificial Sequence; identical to SEQ ID NO: 32519
  GFR-binding peptide
  MOD_RES (6)..(7)..(41)..(43): Xaa is C or S
  MOD_RES (21)..(22)..(23)..(24)..(25): Xaa is A or G
  MOD_RES (26)..(27)..(28)..(29): Xaa is A or G or is absent

SEQ ID NO: 70441 - protein, 40 aa, Artificial Sequence
  GFR-binding peptide
  MOD_RES (3)..(4)..(37)..(39): Xaa is C or S
  MOD_RES (18)..(19)..(20)..(21)..(22): Xaa is A or G
  MOD_RES (23)..(24)..(25)..(26): Xaa is A or G or is absent
SPXXVPQDLSPINILYFXXXXXXXXXYGKIPMVVKSXKXS

SEQ ID NO: 70442 - protein, 41 aa, Artificial Sequence; identical to SEQ ID NO: 8133
  GFR-binding peptide
  MOD_RES (5)..(6)..(38)..(40): Xaa is C or S

SEQ ID NO: 70443 - protein, 36 aa, Artificial Sequence
  GFR-binding peptide
  MOD_RES (2)..(3): Xaa is C or S
  MOD_RES (17)..(18)..(19)..(20)..(21): Xaa is A or G
  MOD_RES (22)..(23)..(24)..(25): Xaa is A or G or is absent
SXXVPARLSATSILYYXXXXXXXXXLRKHRDMVVEA

SEQ ID NO: 70444 - protein, 38 aa, Artificial Sequence; identical to SEQ ID NO: 8136
  GFR-binding peptide
  MOD_RES (4)..(5)..(36)..(38): Xaa is C or S

SEQ ID NO: 70445 - protein, 39 aa, Artificial Sequence; identical to SEQ ID NO: 29422
  GFR-binding peptide
  MOD_RES (5)..(6): Xaa is C or S
  MOD_RES (20)..(21)..(22)..(23)..(24): Xaa is A or G
  MOD_RES (25)..(26)..(27)..(28): Xaa is A or G or is absent

SEQ ID NO: 70446 - protein, 35 aa, Artificial Sequence; identical to SEQ ID NO: 32527
  GFR-binding peptide
  MOD_RES (2)..(3)..(34): Xaa is C or S

SEQ ID NO: 70447 - protein, 34 aa, Artificial Sequence; identical to SEQ ID NO: 32528
  GFR-binding peptide
  MOD_RES (1)..(2)..(34): Xaa is C or S

SEQ ID NO: 70448 - protein, 35 aa, Artificial Sequence; identical to SEQ ID NO: 32529
  GFR-binding peptide
  MOD_RES (3)..(4): Xaa is C or S

SEQ ID NO: 70449 - protein, 39 aa, Artificial Sequence; identical to SEQ ID NO: 29424
  GFR-binding peptide
  MOD_RES (2)..(3)..(36)..(38): Xaa is C or S
  MOD_RES (17)..(18)..(19)..(20)..(21): Xaa is A or G
  MOD_RES (22)..(23)..(24)..(25): Xaa is A or G or is absent

SEQ ID NO: 70450 - protein, 43 aa, Artificial Sequence; identical to SEQ ID NO: 8140
  GFR-binding peptide
  MOD_RES (6)..(7)..(42): Xaa is C or S
  MOD_RES (21)..(22)..(23)..(24)..(25): Xaa is A or G
  MOD_RES (26)..(27)..(28)..(29): Xaa is A or G or is absent

SEQ ID NO: 70451 - protein, 33 aa, Artificial Sequence; identical to SEQ ID NO: 32534
  GFR-binding peptide
  MOD_RES (1)..(1): Xaa is C or S

SEQ ID NO: 70452 - protein, 42 aa, Artificial Sequence; identical to SEQ ID NO: 29427
  GFR-binding peptide
  MOD_RES (5)..(6)..(41): Xaa is C or S
  MOD_RES (20)..(21)..(22)..(23)..(24): Xaa is A or G
  MOD_RES (25)..(26)..(27)..(28): Xaa is A or G or is absent

SEQ ID NO: 70453 - protein, 35 aa, Artificial Sequence; identical to SEQ ID NO: 29428
  GFR-binding peptide
  MOD_RES (2)..(3)..(34): Xaa is C or S

SEQ ID NO: 70454 - protein, 40 aa, Artificial Sequence
  GFR-binding peptide
  MOD_RES (5)..(6)..(38)..(40): Xaa is C or S
IPEPXXVPEKMEPISILYLDENKNVVKFKYENMTVESXAX

SEQ ID NO: 70455 - protein, 39 aa, Artificial Sequence
  GFR-binding peptide
  MOD_RES (6)..(7): Xaa is C or S
  MOD_RES (21)..(22)..(23)..(24)..(25): Xaa is A or G
  MOD_RES (26)..(27)..(28)..(29): Xaa is A or G or is absent
GIPEPXXVPEKMSPINILYFXXXXXXXXXYGKIPNMTVE

SEQ ID NO: 70456 - protein, 38 aa, Artificial Sequence
  GFR-binding peptide
  MOD_RES (5)..(6)..(38): Xaa is C or S
SAGPXXTPTKMSATSMLYYNDKQQIILRKHRGMVVDRX

SEQ ID NO: 70457 - protein, 41 aa, Artificial Sequence; identical to SEQ ID NO: 32539
  GFR-binding peptide
  MOD_RES (6)..(7)..(41): Xaa is C or S
  MOD_RES (21)..(22)..(23)..(24)..(25): Xaa is A or G
  MOD_RES (26)..(27)..(28)..(29): Xaa is A or G or is absent

SEQ ID NO: 70458 - protein, 41 aa, Artificial Sequence; identical to SEQ ID NO: 29433
  GFR-binding peptide
  MOD_RES (5)..(6)..(38)..(40): Xaa is C or S

SEQ ID NO: 70459 - protein, 35 aa, Artificial Sequence; identical to SEQ ID NO: 8147
  GFR-binding peptide
  MOD_RES (1)..(2)..(33)..(35): Xaa is C or S

SEQ ID NO: 70460 - protein, 35 aa, Artificial Sequence; identical to SEQ ID NO: 29435
  GFR-binding peptide
  MOD_RES (34)..(34): Xaa is C or S
  MOD_RES (14)..(15)..(16)..(17)..(18): Xaa is A or G
  MOD_RES (19)..(20)..(21)..(22): Xaa is A or G or is absent

SEQ ID NO: 70461 - protein, 40 aa, Artificial Sequence
  GFR-binding peptide
  MOD_RES (3)..(4)..(38)..(40): Xaa is C or S
  MOD_RES (18)..(19)..(20)..(21)..(22): Xaa is A or G
  MOD_RES (23)..(24)..(25)..(26): Xaa is A or G or is absent
EPXXVPEKMEPISILYLXXXXXXXXXKFKYENMTVESXAX

SEQ ID NO: 70462 - protein, 37 aa, Artificial Sequence; identical to SEQ ID NO: 29438
  GFR-binding peptide
  MOD_RES (1)..(34)..(36): Xaa is C or S
  MOD_RES (15)..(16)..(17)..(18)..(19): Xaa is A or G
  MOD_RES (20)..(21)..(22)..(23): Xaa is A or G or is absent

SEQ ID NO: 70463 - protein, 37 aa, Artificial Sequence
  GFR-binding peptide
  MOD_RES (1)..(2)..(36): Xaa is C or S
  MOD_RES (16)..(17)..(18)..(19)..(20): Xaa is A or G
  MOD_RES (21)..(22)..(23)..(24): Xaa is A or G or is absent
XXTPTKMSATSMLYYXXXXXXXXXLRKHRGMVVDRXG

SEQ ID NO: 70464 - protein, 40 aa, Artificial Sequence; identical to SEQ ID NO: 8149
  GFR-binding peptide
  MOD_RES (5)..(6): Xaa is C or S
  MOD_RES (20)..(21)..(22)..(23)..(24): Xaa is A or G
  MOD_RES (25)..(26)..(27)..(28): Xaa is A or G or is absent

SEQ ID NO: 70465 - protein, 34 aa, Artificial Sequence; identical to SEQ ID NO: 57452
  GFR-binding peptide
  MOD_RES (3)..(4): Xaa is C or S

SEQ ID NO: 70466 - protein, 36 aa, Artificial Sequence; identical to SEQ ID NO: 8151
  GFR-binding peptide
  MOD_RES (1)..(2)..(35): Xaa is C or S
  MOD_RES (16)..(17)..(18)..(19)..(20): Xaa is A or G
  MOD_RES (21)..(22)..(23)..(24): Xaa is A or G or is absent

SEQ ID NO: 70467 - protein, 34 aa, Artificial Sequence; identical to SEQ ID NO: 8154
  GFR-binding peptide
  MOD_RES (31)..(33): Xaa is C or S

SEQ ID NO: 70468 - protein, 39 aa, Artificial Sequence; identical to SEQ ID NO: 29445
  GFR-binding peptide
  MOD_RES (6)..(7): Xaa is C or S
  MOD_RES (21)..(22)..(23)..(24)..(25): Xaa is A or G
  MOD_RES (26)..(27)..(28)..(29): Xaa is A or G or is absent

SEQ ID NO: 70469 - protein, 36 aa, Artificial Sequence
  GFR-binding peptide
  MOD_RES (3)..(4)..(35): Xaa is C or S
STXXAPVKTEPISMLYLDNGRVLLKFKYEMIVEEXG

SEQ ID NO: 70470 - protein, 41 aa, Artificial Sequence; identical to SEQ ID NO: 8157
  GFR-binding peptide
  MOD_RES (4)..(5)..(39)..(41): Xaa is C or S
  MOD_RES (19)..(20)..(21)..(22)..(23): Xaa is A or G
  MOD_RES (24)..(25)..(26)..(27): Xaa is A or G or is absent

SEQ ID NO: 70471 - protein, 37 aa, Artificial Sequence
  GFR-binding peptide
  MOD_RES (6)..(7): Xaa is C or S
ASASPXXVPQDLSPINILYFVGRTPKVYGKIPMVVKS

SEQ ID NO: 70472 - protein, 34 aa, Artificial Sequence; identical to SEQ ID NO: 29451
  GFR-binding peptide
  MOD_RES (3)..(4): Xaa is C or S

SEQ ID NO: 70473 - protein, 38 aa, Artificial Sequence; identical to SEQ ID NO: 29452
  GFR-binding peptide
  MOD_RES (3)..(4)..(35)..(37): Xaa is C or S

SEQ ID NO: 70474 - protein, 36 aa, Artificial Sequence; identical to SEQ ID NO: 8162
  GFR-binding peptide
  MOD_RES (2)..(3)..(36): Xaa is C or S
  MOD_RES (17)..(18)..(19)..(20)..(21): Xaa is A or G
  MOD_RES (22)..(23)..(24)..(25): Xaa is A or G or is absent

SEQ ID NO: 70475 - protein, 38 aa, Artificial Sequence
  GFR-binding peptide
  MOD_RES (1)..(2)..(36)..(38): Xaa is C or S
  MOD_RES (16)..(17)..(18)..(19)..(20): Xaa is A or G
  MOD_RES (21)..(22)..(23)..(24): Xaa is A or G or is absent
XXTPTKMSATSMLYYXXXXXXXXXLRKHRGMVVDRXGX

SEQ ID NO: 70476 - protein, 35 aa, Artificial Sequence; identical to SEQ ID NO: 8164
  GFR-binding peptide
  MOD_RES (32)..(34): Xaa is C or S

SEQ ID NO: 70477 - protein, 39 aa, Artificial Sequence
  GFR-binding peptide
  MOD_RES (4)..(5)..(37)..(39): Xaa is C or S
PPTXXVPTRLSPISILYKDSANNVVLKYHYDMVVESXGX

SEQ ID NO: 70478 - protein, 39 aa, Artificial Sequence; identical to SEQ ID NO: 57465
  GFR-binding peptide
  MOD_RES (4)..(5)..(39): Xaa is C or S
  MOD_RES (19)..(20)..(21)..(22)..(23): Xaa is A or G
  MOD_RES (24)..(25)..(26)..(27): Xaa is A or G or is absent

SEQ ID NO: 70479 - protein, 34 aa, Artificial Sequence; identical to SEQ ID NO: 8165
  GFR-binding peptide
  MOD_RES (33)..(33): Xaa is C or S
  MOD_RES (14)..(15)..(16)..(17)..(18): Xaa is A or G
  MOD_RES (19)..(20)..(21)..(22): Xaa is A or G or is absent

SEQ ID NO: 70480 - protein, 43 aa, Artificial Sequence; identical to SEQ ID NO: 29461
  GFR-binding peptide
  MOD_RES (6)..(7)..(40)..(42): Xaa is C or S

SEQ ID NO: 70481 - protein, 33 aa, Artificial Sequence; identical to SEQ ID NO: 8168
  GFR-binding peptide
  MOD_RES (1)..(2)..(33): Xaa is C or S

SEQ ID NO: 70482 - protein, 40 aa, Artificial Sequence; identical to SEQ ID NO: 32563
  GFR-binding peptide
  MOD_RES (3)..(4)..(38)..(40): Xaa is C or S
  MOD_RES (18)..(19)..(20)..(21)..(22): Xaa is A or G
  MOD_RES (23)..(24)..(25)..(26): Xaa is A or G or is absent

SEQ ID NO: 70483 - protein, 38 aa, Artificial Sequence; identical to SEQ ID NO: 8170
  GFR-binding peptide
  MOD_RES (2)..(3)..(36)..(38): Xaa is C or S

SEQ ID NO: 70484 - protein, 36 aa, Artificial Sequence; identical to SEQ ID NO: 8172
  GFR-binding peptide
  MOD_RES (4)..(5): Xaa is C or S

SEQ ID NO: 70485 - protein, 39 aa, Artificial Sequence; identical to SEQ ID NO: 8173
  GFR-binding peptide
  MOD_RES (5)..(6)..(38): Xaa is C or S

SEQ ID NO: 70486 - protein, 35 aa, Artificial Sequence; identical to SEQ ID NO: 8174
  GFR-binding peptide
  MOD_RES (2)..(3): Xaa is C or S
  MOD_RES (17)..(18)..(19)..(20)..(21): Xaa is A or G
  MOD_RES (22)..(23)..(24)..(25): Xaa is A or G or is absent

SEQ ID NO: 70487 - protein, 40 aa, Artificial Sequence; identical to SEQ ID NO: 29477
  GFR-binding peptide
  MOD_RES (5)..(6)..(38)..(40): Xaa is C or S

SEQ ID NO: 70488 - protein, 35 aa, Artificial Sequence
  GFR-binding peptide
  MOD_RES (1)..(32)..(34): Xaa is C or S
XAPVKTEPISMLYLDNGRVLLKFKYEMIVEEXGXL

SEQ ID NO: 70489 - protein, 38 aa, Artificial Sequence; identical to SEQ ID NO: 8178
  GFR-binding peptide
  MOD_RES (4)..(5): Xaa is C or S
  MOD_RES (19)..(20)..(21)..(22)..(23): Xaa is A or G
  MOD_RES (24)..(25)..(26)..(27): Xaa is A or G or is absent

SEQ ID NO: 70490 - protein, 35 aa, Artificial Sequence; identical to SEQ ID NO: 29483
  GFR-binding peptide
  MOD_RES (33)..(35): Xaa is C or S
  MOD_RES (14)..(15)..(16)..(17)..(18): Xaa is A or G
  MOD_RES (19)..(20)..(21)..(22): Xaa is A or G or is absent

SEQ ID NO: 70491 - protein, 43 aa, Artificial Sequence; identical to SEQ ID NO: 32582
  GFR-binding peptide
  MOD_RES (6)..(7)..(41)..(43): Xaa is C or S
  MOD_RES (21)..(22)..(23)..(24)..(25): Xaa is A or G
  MOD_RES (26)..(27)..(28)..(29): Xaa is A or G or is absent

SEQ ID NO: 70492 - protein, 36 aa, Artificial Sequence; identical to SEQ ID NO: 29484
  GFR-binding peptide
  MOD_RES (2)..(3)..(36): Xaa is C or S
  MOD_RES (17)..(18)..(19)..(20)..(21): Xaa is A or G
  MOD_RES (22)..(23)..(24)..(25): Xaa is A or G or is absent

SEQ ID NO: 70493 - protein, 33 aa, Artificial Sequence; identical to SEQ ID NO: 8184
  GFR-binding peptide
  MOD_RES (2)..(3): Xaa is C or S

SEQ ID NO: 70494 - protein, 32 aa, Artificial Sequence; identical to SEQ ID NO: 8185
  GFR-binding peptide
  MOD_RES (14)..(15)..(16)..(17)..(18): Xaa is A or G
  MOD_RES (19)..(20)..(21)..(22): Xaa is A or G or is absent

SEQ ID NO: 70495 - protein, 42 aa, Artificial Sequence
  GFR-binding peptide
  MOD_RES (6)..(7)..(41): Xaa is C or S
  MOD_RES (21)..(22)..(23)..(24)..(25): Xaa is A or G
  MOD_RES (26)..(27)..(28)..(29): Xaa is A or G or is absent
GIPEPXXVPEKMEPISILYLXXXXXXXXXKFKYENMTVESXA

SEQ ID NO: 70496 - protein, 36 aa, Artificial Sequence
  GFR-binding peptide
  MOD_RES (1)..(2)..(34)..(36): Xaa is C or S
XXVPEKMEPISILYLDENKNVVKFKYENMTVESXAX

SEQ ID NO: 70497 - protein, 40 aa, Artificial Sequence; identical to SEQ ID NO: 32589
  GFR-binding peptide
  MOD_RES (4)..(5)..(40): Xaa is C or S
  MOD_RES (19)..(20)..(21)..(22)..(23): Xaa is A or G
  MOD_RES (24)..(25)..(26)..(27): Xaa is A or G or is absent

SEQ ID NO: 70498 - protein, 35 aa, Artificial Sequence; identical to SEQ ID NO: 29492
  GFR-binding peptide
  MOD_RES (4)..(5): Xaa is C or S

SEQ ID NO: 70499 - protein, 31 aa, Artificial Sequence; identical to SEQ ID NO: 29495
  GFR-binding peptide
  MOD_RES (1)..(1): Xaa is C or S

SEQ ID NO: 70500 - protein, 32 aa, Artificial Sequence; identical to SEQ ID NO: 29496
  GFR-binding peptide
  MOD_RES (14)..(15)..(16)..(17)..(18): Xaa is A or G
  MOD_RES (19)..(20)..(21)..(22): Xaa is A or G or is absent

SEQ ID NO: 70501 - protein, 31 aa, Artificial Sequence
  GFR-binding peptide
  MOD_RES (1)..(1): Xaa is C or S
XAPVKTEPISMLYLDNGRVLLKFKYEMIVEE

SEQ ID NO: 70502 - protein, 36 aa, Artificial Sequence; identical to SEQ ID NO: 29498
  GFR-binding peptide
  MOD_RES (3)..(4): Xaa is C or S
  MOD_RES (18)..(19)..(20)..(21)..(22): Xaa is A or G
  MOD_RES (23)..(24)..(25)..(26): Xaa is A or G or is absent

SEQ ID NO: 70503 - protein, 33 aa, Artificial Sequence; identical to SEQ ID NO: 29499
  GFR-binding peptide
  MOD_RES (1)..(2): Xaa is C or S

SEQ ID NO: 70504 - protein, 37 aa, Artificial Sequence; identical to SEQ ID NO: 29500
  GFR-binding peptide
  MOD_RES (5)..(6): Xaa is C or S

SEQ ID NO: 70505 - protein, 34 aa, Artificial Sequence; identical to SEQ ID NO: 8193
  GFR-binding peptide
  MOD_RES (1)..(32)..(34): Xaa is C or S

SEQ ID NO: 70506 - protein, 37 aa, Artificial Sequence; identical to SEQ ID NO: 29502
  GFR-binding peptide
  MOD_RES (1)..(2)..(34)..(36): Xaa is C or S

SEQ ID NO: 70507 - protein, 38 aa, Artificial Sequence; identical to SEQ ID NO: 29504
  GFR-binding peptide
  MOD_RES (6)..(7): Xaa is C or S

SEQ ID NO: 70508 - protein, 41 aa, Artificial Sequence; identical to SEQ ID NO: 29505
  GFR-binding peptide
  MOD_RES (4)..(5)..(38)..(40): Xaa is C or S
  MOD_RES (19)..(20)..(21)..(22)..(23): Xaa is A or G
  MOD_RES (24)..(25)..(26)..(27): Xaa is A or G or is absent

SEQ ID NO: 70509 - protein, 43 aa, Artificial Sequence; identical to SEQ ID NO: 32595
  GFR-binding peptide
  MOD_RES (6)..(7)..(41)..(43): Xaa is C or S
  MOD_RES (21)..(22)..(23)..(24)..(25): Xaa is A or G
  MOD_RES (26)..(27)..(28)..(29): Xaa is A or G or is absent

SEQ ID NO: 70510 - protein, 35 aa, Artificial Sequence; identical to SEQ ID NO: 32598
  GFR-binding peptide
  MOD_RES (1)..(2): Xaa is C or S
  MOD_RES (16)..(17)..(18)..(19)..(20): Xaa is A or G
  MOD_RES (21)..(22)..(23)..(24): Xaa is A or G or is absent

SEQ ID NO: 70511 - protein, 37 aa, Artificial Sequence; identical to SEQ ID NO: 32601
  GFR-binding peptide
  MOD_RES (6)..(7): Xaa is C or S

SEQ ID NO: 70512 - protein, 35 aa, Artificial Sequence; identical to SEQ ID NO: 8196
  GFR-binding peptide
  MOD_RES (2)..(3)..(35): Xaa is C or S

SEQ ID NO: 70513 - protein, 34 aa, Artificial Sequence
  GFR-binding peptide
  MOD_RES (2)..(3): Xaa is C or S
PXXTPTKMSPISMLYKNDKQQIILKYHYGMVVDR

SEQ ID NO: 70514 - protein, 39 aa, Artificial Sequence; identical to SEQ ID NO: 29509
  GFR-binding peptide
  MOD_RES (3)..(4)..(37)..(39): Xaa is C or S
  MOD_RES (18)..(19)..(20)..(21)..(22): Xaa is A or G
  MOD_RES (23)..(24)..(25)..(26): Xaa is A or G or is absent

SEQ ID NO: 70515 - protein, 35 aa, Artificial Sequence; identical to SEQ ID NO: 29510
  GFR-binding peptide
  MOD_RES (1)..(2)..(35): Xaa is C or S
  MOD_RES (16)..(17)..(18)..(19)..(20): Xaa is A or G
  MOD_RES (21)..(22)..(23)..(24): Xaa is A or G or is absent

SEQ ID NO: 70516 - protein, 39 aa, Artificial Sequence; identical to SEQ ID NO: 57510
  GFR-binding peptide
  MOD_RES (4)..(5)..(36)..(38): Xaa is C or S

SEQ ID NO: 70517 - protein, 34 aa, Artificial Sequence; identical to SEQ ID NO: 8198
  GFR-binding peptide
  MOD_RES (14)..(15)..(16)..(17)..(18): Xaa is A or G
  MOD_RES (19)..(20)..(21)..(22): Xaa is A or G or is absent

SEQ ID NO: 70518 - protein, 38 aa, Artificial Sequence; identical to SEQ ID NO: 8199
  GFR-binding peptide
  MOD_RES (3)..(4)..(37): Xaa is C or S
  MOD_RES (18)..(19)..(20)..(21)..(22): Xaa is A or G
  MOD_RES (23)..(24)..(25)..(26): Xaa is A or G or is absent

SEQ ID NO: 70519 - protein, 39 aa, Artificial Sequence; identical to SEQ ID NO: 8200
  GFR-binding peptide
  MOD_RES (5)..(6): Xaa is C or S
  MOD_RES (20)..(21)..(22)..(23)..(24): Xaa is A or G
  MOD_RES (25)..(26)..(27)..(28): Xaa is A or G or is absent

SEQ ID NO: 70520 - protein, 40 aa, Artificial Sequence; identical to SEQ ID NO: 8203
  GFR-binding peptide
  MOD_RES (1)..(2)..(37)..(39): Xaa is C or S
  MOD_RES (16)..(17)..(18)..(19)..(20): Xaa is A or G
  MOD_RES (21)..(22)..(23)..(24): Xaa is A or G or is absent

SEQ ID NO: 70521 - protein, 42 aa, Artificial Sequence; identical to SEQ ID NO: 29515
  GFR-binding peptide
  MOD_RES (4)..(5)..(39)..(41): Xaa is C or S
  MOD_RES (19)..(20)..(21)..(22)..(23): Xaa is A or G
  MOD_RES (24)..(25)..(26)..(27): Xaa is A or G or is absent

SEQ ID NO: 70522 - protein, 38 aa, Artificial Sequence; identical to SEQ ID NO: 29516
  GFR-binding peptide
  MOD_RES (4)..(5)..(37): Xaa is C or S

SEQ ID NO: 70523 - protein, 39 aa, Artificial Sequence; identical to SEQ ID NO: 8204
  GFR-binding peptide
  MOD_RES (5)..(6)..(39): Xaa is C or S
  MOD_RES (20)..(21)..(22)..(23)..(24): Xaa is A or G
  MOD_RES (25)..(26)..(27)..(28): Xaa is A or G or is absent

SEQ ID NO: 70524 - protein, 32 aa, Artificial Sequence; identical to SEQ ID NO: 29518
  GFR-binding peptide
  MOD_RES (1)..(2): Xaa is C or S

SEQ ID NO: 70525 - protein, 36 aa, Artificial Sequence; identical to SEQ ID NO: 8205
  GFR-binding peptide
  MOD_RES (3)..(4): Xaa is C or S
  MOD_RES (18)..(19)..(20)..(21)..(22): Xaa is A or G
  MOD_RES (23)..(24)..(25)..(26): Xaa is A or G or is absent

SEQ ID NO: 70526 - protein, 40 aa, Artificial Sequence; identical to SEQ ID NO: 29521
  GFR-binding peptide
  MOD_RES (5)..(6)..(40): Xaa is C or S
  MOD_RES (20)..(21)..(22)..(23)..(24): Xaa is A or G
  MOD_RES (25)..(26)..(27)..(28): Xaa is A or G or is absent

SEQ ID NO: 70527 - protein, 40 aa, Artificial Sequence
  GFR-binding peptide
  MOD_RES (6)..(7): Xaa is C or S
  MOD_RES (21)..(22)..(23)..(24)..(25): Xaa is A or G
  MOD_RES (26)..(27)..(28)..(29): Xaa is A or G or is absent
AAPASXXVPARLSATSILYYXXXXXXXXXLRKHRDMVVEA

SEQ ID NO: 70528 - protein, 35 aa, Artificial Sequence
  GFR-binding peptide
  MOD_RES (2)..(3)..(35): Xaa is C or S
TXXVPTRLSPISILYKDSANNVVLKYHYDMVVESX

SEQ ID NO: 70529 - protein, 36 aa, Artificial Sequence; identical to SEQ ID NO: 57526
  GFR-binding peptide
  MOD_RES (3)..(4): Xaa is C or S
  MOD_RES (18)..(19)..(20)..(21)..(22): Xaa is A or G
  MOD_RES (23)..(24)..(25)..(26): Xaa is A or G or is absent

SEQ ID NO: 70530 - protein, 38 aa, Artificial Sequence; identical to SEQ ID NO: 8206
  GFR-binding peptide
  MOD_RES (1)..(35)..(37): Xaa is C or S
  MOD_RES (15)..(16)..(17)..(18)..(19): Xaa is A or G
  MOD_RES (20)..(21)..(22)..(23): Xaa is A or G or is absent

SEQ ID NO: 70531 - protein, 42 aa, Artificial Sequence
  GFR-binding peptide
  MOD_RES (5)..(6)..(40)..(42): Xaa is C or S
  MOD_RES (20)..(21)..(22)..(23)..(24): Xaa is A or G
  MOD_RES (25)..(26)..(27)..(28): Xaa is A or G or is absent
ASKAXXVPTKLSATSILYYXXXXXXXXXLRKHRGMAVSEXGX

SEQ ID NO: 70532 - protein, 37 aa, Artificial Sequence; identical to SEQ ID NO: 32614
  GFR-binding peptide
  MOD_RES (2)..(3)..(34)..(36): Xaa is C or S

SEQ ID NO: 70533 - protein, 39 aa, Artificial Sequence; identical to SEQ ID NO: 32615
  GFR-binding peptide
  MOD_RES (3)..(4)..(36)..(38): Xaa is C or S

SEQ ID NO: 70534 - protein, 38 aa, Artificial Sequence; identical to SEQ ID NO: 15515
  GFR-binding peptide
  MOD_RES (3)..(4)..(36)..(38): Xaa is C or S

SEQ ID NO: 70535 - protein, 39 aa, Artificial Sequence; identical to SEQ ID NO: 29524
  GFR-binding peptide
  MOD_RES (5)..(6): Xaa is C or S
  MOD_RES (20)..(21)..(22)..(23)..(24): Xaa is A or G
  MOD_RES (25)..(26)..(27)..(28): Xaa is A or G or is absent

SEQ ID NO: 70536 - protein, 40 aa, Artificial Sequence
  GFR-binding peptide
  MOD_RES (3)..(4)..(38)..(40): Xaa is C or S
  MOD_RES (18)..(19)..(20)..(21)..(22): Xaa is A or G
  MOD_RES (23)..(24)..(25)..(26): Xaa is A or G or is absent
EPXXVPEKMSATSILYYXXXXXXXXXLRKHRNMTVESXAX

SEQ ID NO: 70537 - protein, 32 aa, Artificial Sequence
  GFR-binding peptide
  MOD_RES (14)..(15)..(16)..(17)..(18): Xaa is A or G
  MOD_RES (19)..(20)..(21)..(22): Xaa is A or G or is absent
APVKTEPISMLYLXXXXXXXXXKFKYEMIVEE

SEQ ID NO: 70538 - protein, 42 aa, Artificial Sequence; identical to SEQ ID NO: 29526
  GFR-binding peptide
  MOD_RES (4)..(5)..(39)..(41): Xaa is C or S
  MOD_RES (19)..(20)..(21)..(22)..(23): Xaa is A or G
  MOD_RES (24)..(25)..(26)..(27): Xaa is A or G or is absent

SEQ ID NO: 70539 - protein, 40 aa, Artificial Sequence; identical to SEQ ID NO: 8211
  GFR-binding peptide
  MOD_RES (5)..(6)..(39): Xaa is C or S
  MOD_RES (20)..(21)..(22)..(23)..(24): Xaa is A or G
  MOD_RES (25)..(26)..(27)..(28): Xaa is A or G or is absent

SEQ ID NO: 70540 - protein, 39 aa, Artificial Sequence; identical to SEQ ID NO: 8213
  GFR-binding peptide
  MOD_RES (6)..(7): Xaa is C or S
  MOD_RES (21)..(22)..(23)..(24)..(25): Xaa is A or G
  MOD_RES (26)..(27)..(28)..(29): Xaa is A or G or is absent

SEQ ID NO: 70541 - protein, 40 aa, Artificial Sequence; identical to SEQ ID NO: 29531
  GFR-binding peptide
  MOD_RES (5)..(6)..(37)..(39): Xaa is C or S

SEQ ID NO: 70542 - protein, 36 aa, Artificial Sequence; identical to SEQ ID NO: 8216
  GFR-binding peptide
  MOD_RES (3)..(4): Xaa is C or S
  MOD_RES (18)..(19)..(20)..(21)..(22): Xaa is A or G
  MOD_RES (23)..(24)..(25)..(26): Xaa is A or G or is absent

SEQ ID NO: 70543 - protein, 39 aa, Artificial Sequence
  GFR-binding peptide
  MOD_RES (5)..(6)..(37)..(39): Xaa is C or S
SAAPXXVPQALSPINILYFVGRKPKVYGKIPMIVRSXKX

SEQ ID NO: 70544 - protein, 36 aa, Artificial Sequence; identical to SEQ ID NO: 57533
  GFR-binding peptide
  MOD_RES (3)..(4)..(36): Xaa is C or S

SEQ ID NO: 70545 - protein, 38 aa, Artificial Sequence; identical to SEQ ID NO: 32629
  GFR-binding peptide
  MOD_RES (5)..(6)..(38): Xaa is C or S

SEQ ID NO: 70546 - protein, 39 aa, Artificial Sequence
  GFR-binding peptide
  MOD_RES (6)..(7): Xaa is C or S
  MOD_RES (21)..(22)..(23)..(24)..(25): Xaa is A or G
  MOD_RES (26)..(27)..(28)..(29): Xaa is A or G or is absent
RVPSTXXAPVKTSPISMLYKXXXXXXXXXLKYHYMIVEE

SEQ ID NO: 70547 - protein, 42 aa, Artificial Sequence; identical to SEQ ID NO: 32631
  GFR-binding peptide
  MOD_RES (5)..(6)..(40)..(42): Xaa is C or S
  MOD_RES (20)..(21)..(22)..(23)..(24): Xaa is A or G
  MOD_RES (25)..(26)..(27)..(28): Xaa is A or G or is absent

SEQ ID NO: 70548 - protein, 36 aa, Artificial Sequence; identical to SEQ ID NO: 32632
  GFR-binding peptide
  MOD_RES (1)..(35): Xaa is C or S
  MOD_RES (15)..(16)..(17)..(18)..(19): Xaa is A or G
  MOD_RES (20)..(21)..(22)..(23): Xaa is A or G or is absent

SEQ ID NO: 70549 - protein, 42 aa, Artificial Sequence
  GFR-binding peptide
  MOD_RES (4)..(5)..(39)..(41): Xaa is C or S
  MOD_RES (19)..(20)..(21)..(22)..(23): Xaa is A or G
  MOD_RES (24)..(25)..(26)..(27): Xaa is A or G or is absent
AGPXXTPTKMEPISMLYLXXXXXXXXXKFKYEGMVVDRXGXS

SEQ ID NO: 70550 - protein, 41 aa, Artificial Sequence; identical to SEQ ID NO: 29538
  GFR-binding peptide
  MOD_RES (5)..(6)..(39)..(41): Xaa is C or S
  MOD_RES (20)..(21)..(22)..(23)..(24): Xaa is A or G
  MOD_RES (25)..(26)..(27)..(28): Xaa is A or G or is absent

SEQ ID NO: 70551 - protein, 41 aa, Artificial Sequence
  GFR-binding peptide
  MOD_RES (5)..(6)..(38)..(40): Xaa is C or S
IPEPXXVPEKMNAISILYFDENKNVVLKKYRNMTVESXAXR

SEQ ID NO: 70552 - protein, 36 aa, Artificial Sequence; identical to SEQ ID NO: 29542
  GFR-binding peptide
  MOD_RES (2)..(3): Xaa is C or S
  MOD_RES (17)..(18)..(19)..(20)..(21): Xaa is A or G
  MOD_RES (22)..(23)..(24)..(25): Xaa is A or G or is absent

SEQ ID NO: 70553 - protein, 34 aa, Artificial Sequence; identical to SEQ ID NO: 29545
  GFR-binding peptide
  MOD_RES (2)..(3): Xaa is C or S

SEQ ID NO: 70554 - protein, 36 aa, Artificial Sequence
  GFR-binding peptide
  MOD_RES (34)..(36): Xaa is C or S
  MOD_RES (14)..(15)..(16)..(17)..(18): Xaa is A or G
  MOD_RES (19)..(20)..(21)..(22): Xaa is A or G or is absent
TPTKMEPISMLYLXXXXXXXXXKFKYEGMVVDRXGX

SEQ ID NO: 70555 - protein, 37 aa, Artificial Sequence; identical to SEQ ID NO: 8227
  GFR-binding peptide
  MOD_RES (3)..(4)..(36): Xaa is C or S

SEQ ID NO: 70556 - protein, 38 aa, Artificial Sequence
  GFR-binding peptide
  MOD_RES (1)..(2)..(36)..(38): Xaa is C or S
  MOD_RES (16)..(17)..(18)..(19)..(20): Xaa is A or G
  MOD_RES (21)..(22)..(23)..(24): Xaa is A or G or is absent
XXVPEKMNAISILYFXXXXXXXXXLKKYRNMTVESXAX

SEQ ID NO: 70557 - protein, 38 aa, Artificial Sequence; identical to SEQ ID NO: 32645
  GFR-binding peptide
  MOD_RES (2)..(3)..(37): Xaa is C or S
  MOD_RES (17)..(18)..(19)..(20)..(21): Xaa is A or G
  MOD_RES (22)..(23)..(24)..(25): Xaa is A or G or is absent

SEQ ID NO: 70558 - protein, 34 aa, Artificial Sequence; identical to SEQ ID NO: 8229
  GFR-binding peptide
  MOD_RES (33)..(33): Xaa is C or S
  MOD_RES (14)..(15)..(16)..(17)..(18): Xaa is A or G
  MOD_RES (19)..(20)..(21)..(22): Xaa is A or G or is absent

SEQ ID NO: 70559 - protein, 39 aa, Artificial Sequence
  GFR-binding peptide
  MOD_RES (5)..(6)..(38): Xaa is C or S
SAGPXXTPTKMEPISMLYLNDKQQIIKFKYEGMVVDRXG

SEQ ID NO: 70560 - protein, 36 aa, Artificial Sequence; identical to SEQ ID NO: 32647
  GFR-binding peptide
  MOD_RES (2)..(3)..(36): Xaa is C or S

SEQ ID NO: 70561 - protein, 40 aa, Artificial Sequence; identical to SEQ ID NO: 29553
  GFR-binding peptide
  MOD_RES (4)..(5)..(37)..(39): Xaa is C or S

SEQ ID NO: 70562 - protein, 39 aa, Artificial Sequence; identical to SEQ ID NO: 32650
  GFR-binding peptide
  MOD_RES (2)..(3)..(37)..(39): Xaa is C or S
  MOD_RES (17)..(18)..(19)..(20)..(21): Xaa is A or G
  MOD_RES (22)..(23)..(24)..(25): Xaa is A or G or is absent

SEQ ID NO: 70563 - protein, 37 aa, Artificial Sequence
  GFR-binding peptide
  MOD_RES (2)..(3)..(37): Xaa is C or S
  MOD_RES (17)..(18)..(19)..(20)..(21): Xaa is A or G
  MOD_RES (22)..(23)..(24)..(25): Xaa is A or G or is absent
PXXTPTKMEPISMLYLXXXXXXXXXKFKYEGMVVDRX

SEQ ID NO: 70564 - protein, 34 aa, Artificial Sequence; identical to SEQ ID NO: 32652
  GFR-binding peptide
  MOD_RES (1)..(33): Xaa is C or S

SEQ ID NO: 70565 - protein, 35 aa, Artificial Sequence
  GFR-binding peptide
  MOD_RES (1)..(33)..(35): Xaa is C or S
XVPTRLEPISILYLDSANNVVKFKYEDMVVESXGX

SEQ ID NO: 70566 - protein, 41 aa, Artificial Sequence; identical to SEQ ID NO: 8234
  GFR-binding peptide
  MOD_RES (6)..(7)..(39)..(41): Xaa is C or S

SEQ ID NO: 70567 - protein, 36 aa, Artificial Sequence; identical to SEQ ID NO: 32653
  GFR-binding peptide
  MOD_RES (3)..(4)..(36): Xaa is C or S

SEQ ID NO: 70568 - protein, 42 aa, Artificial Sequence; identical to SEQ ID NO: 8235
  GFR-binding peptide
  MOD_RES (5)..(6)..(40)..(42): Xaa is C or S
  MOD_RES (20)..(21)..(22)..(23)..(24): Xaa is A or G
  MOD_RES (25)..(26)..(27)..(28): Xaa is A or G or is absent

SEQ ID NO: 70569 - protein, 38 aa, Artificial Sequence; identical to SEQ ID NO: 32654
  GFR-binding peptide
  MOD_RES (4)..(5): Xaa is C or S
  MOD_RES (19)..(20)..(21)..(22)..(23): Xaa is A or G
  MOD_RES (24)..(25)..(26)..(27): Xaa is A or G or is absent

SEQ ID NO: 70570 - protein, 35 aa, Artificial Sequence; identical to SEQ ID NO: 8240
  GFR-binding peptide
  MOD_RES (1)..(2): Xaa is C or S
  MOD_RES (16)..(17)..(18)..(19)..(20): Xaa is A or G
  MOD_RES (21)..(22)..(23)..(24): Xaa is A or G or is absent

SEQ ID NO: 70571 - protein, 37 aa, Artificial Sequence; identical to SEQ ID NO: 8242
  GFR-binding peptide
  MOD_RES (4)..(36): Xaa is C or S

SEQ ID NO: 70572 - protein, 37 aa, Artificial Sequence; identical to SEQ ID NO: 8243
  GFR-binding peptide
  MOD_RES (4)..(5): Xaa is C or S
  MOD_RES (19)..(20)..(21)..(22)..(23): Xaa is A or G
  MOD_RES (24)..(25)..(26)..(27): Xaa is A or G or is absent

SEQ ID NO: 70573 - protein, 43 aa, Artificial Sequence; identical to SEQ ID NO: 8244
  GFR-binding peptide
  MOD_RES (6)..(40)..(42): Xaa is C or S
  MOD_RES (20)..(21)..(22)..(23)..(24): Xaa is A or G
  MOD_RES (25)..(26)..(27)..(28): Xaa is A or G or is absent

SEQ ID NO: 70574 - protein, 37 aa, Artificial Sequence; identical to SEQ ID NO: 8245
  GFR-binding peptide
  MOD_RES (2)..(3)..(35)..(37): Xaa is C or S

SEQ ID NO: 70575 - protein, 36 aa, Artificial Sequence; identical to SEQ ID NO: 29565
  GFR-binding peptide
  MOD_RES (34)..(36): Xaa is C or S
  MOD_RES (14)..(15)..(16)..(17)..(18): Xaa is A or G
  MOD_RES (19)..(20)..(21)..(22): Xaa is A or G or is absent

SEQ ID NO: 70576 - protein, 36 aa, Artificial Sequence; identical to SEQ ID NO: 32668
  GFR-binding peptide
  MOD_RES (2)..(3): Xaa is C or S
  MOD_RES (17)..(18)..(19)..(20)..(21): Xaa is A or G
  MOD_RES (22)..(23)..(24)..(25): Xaa is A or G or is absent

SEQ ID NO: 70577 - protein, 38 aa, Artificial Sequence
  GFR-binding peptide
  MOD_RES (2)..(3)..(37): Xaa is C or S
  MOD_RES (17)..(18)..(19)..(20)..(21): Xaa is A or G
  MOD_RES (22)..(23)..(24)..(25): Xaa is A or G or is absent
PXXVPEKMSPINILYFXXXXXXXXXYGKIPNMTVESXA

SEQ ID NO: 70578 - protein, 33 aa, Artificial Sequence
  GFR-binding peptide
  MOD_RES (32)..(32): Xaa is C or S
VPEKMSPISILYKDENKNVVLKYHYNMTVESXA

SEQ ID NO: 70579 - protein, 35 aa, Artificial Sequence; identical to SEQ ID NO: 8252
  GFR-binding peptide
  MOD_RES (3)..(4): Xaa is C or S

SEQ ID NO: 70580 - protein, 37 aa, Artificial Sequence; identical to SEQ ID NO: 8253
  GFR-binding peptide
  MOD_RES (1)..(35)..(37): Xaa is C or S
  MOD_RES (15)..(16)..(17)..(18)..(19): Xaa is A or G
  MOD_RES (20)..(21)..(22)..(23): Xaa is A or G or is absent

SEQ ID NO: 70581 - protein, 36 aa, Artificial Sequence; identical to SEQ ID NO: 29570
  GFR-binding peptide
  MOD_RES (1)..(35): Xaa is C or S
  MOD_RES (15)..(16)..(17)..(18)..(19): Xaa is A or G
  MOD_RES (20)..(21)..(22)..(23): Xaa is A or G or is absent

SEQ ID NO: 70582 - protein, 37 aa, Artificial Sequence
  GFR-binding peptide
  MOD_RES (2)..(3)..(34)..(36): Xaa is C or S
PXXVSQDLSPINILYFIGKTPKIYGKIPMIVKSXKXS

SEQ ID NO: 70583 - protein, 36 aa, Artificial Sequence; identical to SEQ ID NO: 29572
  GFR-binding peptide
  MOD_RES (5)..(6): Xaa is C or S

SEQ ID NO: 70584 - protein, 36 aa, Artificial Sequence
  GFR-binding peptide
  MOD_RES (34)..(36): Xaa is C or S
  MOD_RES (14)..(15)..(16)..(17)..(18): Xaa is A or G
  MOD_RES (19)..(20)..(21)..(22): Xaa is A or G or is absent
TPTKMSATSMLYYXXXXXXXXXLRKHRGMVVDRXGX

SEQ ID NO: 70585 - protein, 38 aa, Artificial Sequence; identical to SEQ ID NO: 32679
  GFR-binding peptide
  MOD_RES (6)..(7): Xaa is C or S

SEQ ID NO: 70586 - protein, 38 aa, Artificial Sequence; identical to SEQ ID NO: 8254
  GFR-binding peptide
  MOD_RES (2)..(3)..(35)..(37): Xaa is C or S

SEQ ID NO: 70587 - protein, 34 aa, Artificial Sequence; identical to SEQ ID NO: 32681
  GFR-binding peptide
  MOD_RES (1)..(2): Xaa is C or S
  MOD_RES (16)..(17)..(18)..(19)..(20): Xaa is A or G
  MOD_RES (21)..(22)..(23)..(24): Xaa is A or G or is absent

SEQ ID NO: 70588 - protein, 34 aa, Artificial Sequence; identical to SEQ ID NO: 32682
  GFR-binding peptide
  MOD_RES (1)..(2): Xaa is C or S
  MOD_RES (16)..(17)..(18)..(19)..(20): Xaa is A or G
  MOD_RES (21)..(22)..(23)..(24): Xaa is A or G or is absent

SEQ ID NO: 70589 - protein, 35 aa, Artificial Sequence; identical to SEQ ID NO: 29576
  GFR-binding peptide
  MOD_RES (1)..(1): Xaa is C or S
  MOD_RES (15)..(16)..(17)..(18)..(19): Xaa is A or G
  MOD_RES (20)..(21)..(22)..(23): Xaa is A or G or is absent

SEQ ID NO: 70590 - protein, 39 aa, Artificial Sequence; identical to SEQ ID NO: 29577
  GFR-binding peptide
  MOD_RES (2)..(3)..(36)..(38): Xaa is C or S
  MOD_RES (17)..(18)..(19)..(20)..(21): Xaa is A or G
  MOD_RES (22)..(23)..(24)..(25): Xaa is A or G or is absent

SEQ ID NO: 70591 - protein, 41 aa, Artificial Sequence; identical to SEQ ID NO: 29578
  GFR-binding peptide
  MOD_RES (5)..(39)..(41): Xaa is C or S
  MOD_RES (19)..(20)..(21)..(22)..(23): Xaa is A or G
  MOD_RES (24)..(25)..(26)..(27): Xaa is A or G or is absent

SEQ ID NO: 70592 - protein, 38 aa, Artificial Sequence; identical to SEQ ID NO: 29582
  GFR-binding peptide
  MOD_RES (3)..(4)..(36)..(38): Xaa is C or S

SEQ ID NO: 70593 - protein, 35 aa, Artificial Sequence; identical to SEQ ID NO: 8261
  GFR-binding peptide
  MOD_RES (32)..(34): Xaa is C or S

SEQ ID NO: 70594 - protein, 34 aa, Artificial Sequence; identical to SEQ ID NO: 8263
  GFR-binding peptide
  MOD_RES (2)..(3): Xaa is C or S

SEQ ID NO: 70595 - protein, 37 aa, Artificial Sequence; identical to SEQ ID NO: 8265
  GFR-binding peptide
  MOD_RES (4)..(4): Xaa is C or S
  MOD_RES (18)..(19)..(20)..(21)..(22): Xaa is A or G
  MOD_RES (23)..(24)..(25)..(26): Xaa is A or G or is absent

SEQ ID NO: 70596 - protein, 34 aa, Artificial Sequence
  GFR-binding peptide
  MOD_RES (2)..(3): Xaa is C or S
PXXVPEKMEPISILYLDENKNVVKFKYENMTVES

SEQ ID NO: 70597 - protein, 38 aa, Artificial Sequence; identical to SEQ ID NO: 29589
  GFR-binding peptide
  MOD_RES (2)..(3)..(35)..(37): Xaa is C or S

SEQ ID NO: 70598 - protein, 38 aa, Artificial Sequence; identical to SEQ ID NO: 29592
  GFR-binding peptide
  MOD_RES (1)..(2)..(36)..(38): Xaa is C or S
  MOD_RES (16)..(17)..(18)..(19)..(20): Xaa is A or G
  MOD_RES (21)..(22)..(23)..(24): Xaa is A or G or is absent

SEQ ID NO: 70599 - protein, 39 aa, Artificial Sequence; identical to SEQ ID NO: 29595
  GFR-binding peptide
  MOD_RES (4)..(5)..(37)..(39): Xaa is C or S

SEQ ID NO: 70600 - protein, 38 aa, Artificial Sequence; identical to SEQ ID NO: 8272
  GFR-binding peptide
  MOD_RES (3)..(4)..(38): Xaa is C or S
  MOD_RES (18)..(19)..(20)..(21)..(22): Xaa is A or G
  MOD_RES (23)..(24)..(25)..(26): Xaa is A or G or is absent

SEQ ID NO: 70601 - protein, 34 aa, Artificial Sequence; identical to SEQ ID NO: 8274
  GFR-binding peptide
  MOD_RES (3)..(4): Xaa is C or S

SEQ ID NO: 70602 - protein, 40 aa, Artificial Sequence; identical to SEQ ID NO: 8275
  GFR-binding peptide
  MOD_RES (6)..(7): Xaa is C or S
  MOD_RES (21)..(22)..(23)..(24)..(25): Xaa is A or G
  MOD_RES (26)..(27)..(28)..(29): Xaa is A or G or is absent

SEQ ID NO: 70603 - protein, 36 aa, Artificial Sequence
  GFR-binding peptide
  MOD_RES (2)..(3)..(36): Xaa is C or S
  MOD_RES (17)..(18)..(19)..(20)..(21): Xaa is A or G
  MOD_RES (22)..(23)..(24)..(25): Xaa is A or G or is absent
PXXVPQALSPINILYFXXXXXXXXXYGKIPMIVRSX

SEQ ID NO: 70604 - protein, 38 aa, Artificial Sequence; identical to SEQ ID NO: 8279
  GFR-binding peptide
  MOD_RES (2)..(3)..(36)..(38): Xaa is C or S
  MOD_RES (17)..(18)..(19)..(20)..(21): Xaa is A or G
  MOD_RES (22)..(23)..(24)..(25): Xaa is A or G or is absent

SEQ ID NO: 70605 - protein, 39 aa, Artificial Sequence; identical to SEQ ID NO: 8280
  GFR-binding peptide
  MOD_RES (2)..(3)..(36)..(38): Xaa is C or S
  MOD_RES (17)..(18)..(19)..(20)..(21): Xaa is A or G
  MOD_RES (22)..(23)..(24)..(25): Xaa is A or G or is absent

SEQ ID NO: 70606 - protein, 41 aa, Artificial Sequence
  GFR-binding peptide
  MOD_RES (5)..(6)..(38)..(40): Xaa is C or S
TPPTXXVPTRLEPISILYLDSANNVVKFKYEDMVVESXGXR

SEQ ID NO: 70607 - protein, 36 aa, Artificial Sequence
  GFR-binding peptide
  MOD_RES (33)..(35): Xaa is C or S
  MOD_RES (14)..(15)..(16)..(17)..(18): Xaa is A or G
  MOD_RES (19)..(20)..(21)..(22): Xaa is A or G or is absent
VSQDLSPINILYFXXXXXXXXXYGKIPMIVKSXKXS

SEQ ID NO: 70608 - protein, 41 aa, Artificial Sequence; identical to SEQ ID NO: 29603
  GFR-binding peptide
  MOD_RES (6)..(7)..(41): Xaa is C or S
  MOD_RES (21)..(22)..(23)..(24)..(25): Xaa is A or G
  MOD_RES (26)..(27)..(28)..(29): Xaa is A or G or is absent

SEQ ID NO: 70609 - protein, 36 aa, Artificial Sequence; identical to SEQ ID NO: 32701
  GFR-binding peptide
  MOD_RES (34)..(36): Xaa is C or S
  MOD_RES (14)..(15)..(16)..(17)..(18): Xaa is A or G
  MOD_RES (19)..(20)..(21)..(22): Xaa is A or G or is absent

SEQ ID NO: 70610 - protein, 38 aa, Artificial Sequence; identical to SEQ ID NO: 8281
  GFR-binding peptide
  MOD_RES (5)..(6)..(38): Xaa is C or S

SEQ ID NO: 70611 - protein, 36 aa, Artificial Sequence; identical to SEQ ID NO: 8285
  GFR-binding peptide
  MOD_RES (3)..(3): Xaa is C or S
  MOD_RES (17)..(18)..(19)..(20)..(21): Xaa is A or G
  MOD_RES (22)..(23)..(24)..(25): Xaa is A or G or is absent

SEQ ID NO: 70612 - protein, 33 aa, Artificial Sequence
  GFR-binding peptide
  MOD_RES (2)..(3): Xaa is C or S
PXXVSQDLSPINILYFIGKTPKIYGKIPMIVKS

SEQ ID NO: 70613 - protein, 37 aa, Artificial Sequence; identical to SEQ ID NO: 32706
  GFR-binding peptide
  MOD_RES (3)..(4)..(36): Xaa is C or S

SEQ ID NO: 70614 - protein, 36 aa, Artificial Sequence; identical to SEQ ID NO: 8288
  GFR-binding peptide
  MOD_RES (3)..(4)..(35): Xaa is C or S

SEQ ID NO: 70615 - protein, 36 aa, Artificial Sequence; identical to SEQ ID NO: 32709
  GFR-binding peptide
  MOD_RES (4)..(5): Xaa is C or S

SEQ ID NO: 70616 - protein, 37 aa, Artificial Sequence; identical to SEQ ID NO: 8292
  GFR-binding peptide
  MOD_RES (34)..(36): Xaa is C or S
  MOD_RES (14)..(15)..(16)..(17)..(18): Xaa is A or G
  MOD_RES (19)..(20)..(21)..(22): Xaa is A or G or is absent

SEQ ID NO: 70617 - protein, 36 aa, Artificial Sequence; identical to SEQ ID NO: 29614
  GFR-binding peptide
  MOD_RES (5)..(6): Xaa is C or S

SEQ ID NO: 70618 - protein, 32 aa, Artificial Sequence; identical to SEQ ID NO: 8300
  GFR-binding peptide
  MOD_RES (14)..(15)..(16)..(17)..(18): Xaa is A or G
  MOD_RES (19)..(20)..(21)..(22): Xaa is A or G or is absent

SEQ ID NO: 70619 - protein, 38 aa, Artificial Sequence; identical to SEQ ID NO: 29616
  GFR-binding peptide
  MOD_RES (5)..(6)..(38): Xaa is C or S

SEQ ID NO: 70620 - protein, 40 aa, Artificial Sequence
  GFR-binding peptide
  MOD_RES (4)..(5)..(37)..(39): Xaa is C or S
PEPXXVPEKMNAISILYFDENKNVVLKKYRNMTVESXAXR

SEQ ID NO: 70621 - protein, 42 aa, Artificial Sequence; identical to SEQ ID NO: 29618
  GFR-binding peptide
  MOD_RES (4)..(5)..(39)..(41): Xaa is C or S
  MOD_RES (19)..(20)..(21)..(22)..(23): Xaa is A or G
  MOD_RES (24)..(25)..(26)..(27): Xaa is A or G or is absent

SEQ ID NO: 70622 - protein, 43 aa, Artificial Sequence; identical to SEQ ID NO: 32725
  GFR-binding peptide
  MOD_RES (5)..(6)..(40)..(42): Xaa is C or S
  MOD_RES (20)..(21)..(22)..(23)..(24): Xaa is A or G
  MOD_RES (25)..(26)..(27)..(28): Xaa is A or G or is absent

SEQ ID NO: 70623 - protein, 41 aa, Artificial Sequence; identical to SEQ ID NO: 29619
  GFR-binding peptide
  MOD_RES (5)..(6)..(38)..(40): Xaa is C or S

SEQ ID NO: 70624 - protein, 39 aa, Artificial Sequence; identical to SEQ ID NO: 32728
  GFR-binding peptide
  MOD_RES (1)..(36)..(38): Xaa is C or S
  MOD_RES (15)..(16)..(17)..(18)..(19): Xaa is A or G
  MOD_RES (20)..(21)..(22)..(23): Xaa is A or G or is absent

SEQ ID NO: 70625 - protein, 36 aa, Artificial Sequence; identical to SEQ ID NO: 29625
  GFR-binding peptide
  MOD_RES (1)..(2)..(36): Xaa is C or S
  MOD_RES (16)..(17)..(18)..(19)..(20): Xaa is A or G
  MOD_RES (21)..(22)..(23)..(24): Xaa is A or G or is absent

SEQ ID NO: 70626 - protein, 38 aa, Artificial Sequence; identical to SEQ ID NO: 8307
  GFR-binding peptide
  MOD_RES (1)..(35)..(37): Xaa is C or S
  MOD_RES (15)..(16)..(17)..(18)..(19): Xaa is A or G
  MOD_RES (20)..(21)..(22)..(23): Xaa is A or G or is absent

SEQ ID NO: 70627 - protein, 35 aa, Artificial Sequence; identical to SEQ ID NO: 8308
  GFR-binding peptide
  MOD_RES (1)..(34): Xaa is C or S
  MOD_RES (15)..(16)..(17)..(18)..(19): Xaa is A or G
  MOD_RES (20)..(21)..(22)..(23): Xaa is A or G or is absent

SEQ ID NO: 70628 - protein, 39 aa, Artificial Sequence
  GFR-binding peptide
  MOD_RES (6)..(7): Xaa is C or S
  MOD_RES (21)..(22)..(23)..(24)..(25): Xaa is A or G
  MOD_RES (26)..(27)..(28)..(29): Xaa is A or G or is absent
HVPKPXXAPTKLSPISVLYKXXXXXXXXXLKYHYNMVVR

SEQ ID NO: 70629 - protein, 44 aa, Artificial Sequence
  GFR-binding peptide
  MOD_RES (6)..(7)..(41)..(43): Xaa is C or S
  MOD_RES (21)..(22)..(23)..(24)..(25): Xaa is A or G
  MOD_RES (26)..(27)..(28)..(29): Xaa is A or G or is absent
STPPTXXVPTRLSPISILYKXXXXXXXXXLKYHYDMVVESXGXR

SEQ ID NO: 70630 - protein, 37 aa, Artificial Sequence; identical to SEQ ID NO: 8309
  GFR-binding peptide
  MOD_RES (2)..(3)..(37): Xaa is C or S
  MOD_RES (17)..(18)..(19)..(20)..(21): Xaa is A or G
  MOD_RES (22)..(23)..(24)..(25): Xaa is A or G or is absent

SEQ ID NO: 70631 - protein, 35 aa, Artificial Sequence
  GFR-binding peptide
  MOD_RES (3)..(4)..(35): Xaa is C or S
SPXXVSQDLSPINILYFIGKTPKIYGKIPMIVKSX

SEQ ID NO: 70632 - protein, 38 aa, Artificial Sequence
  GFR-binding peptide
  MOD_RES (5)..(6)..(38): Xaa is C or S
SAGPXXTPTKMEPISMLYLNDKQQIIKFKYEGMVVDRX

SEQ ID NO: 70633 - protein, 37 aa, Artificial Sequence; identical to SEQ ID NO: 8313
  GFR-binding peptide
  MOD_RES (1)..(2)..(36): Xaa is C or S
  MOD_RES (16)..(17)..(18)..(19)..(20): Xaa is A or G
  MOD_RES (21)..(22)..(23)..(24): Xaa is A or G or is absent

SEQ ID NO: 70634 - protein, 42 aa, Artificial Sequence; identical to SEQ ID NO: 57645
  GFR-binding peptide
  MOD_RES (4)..(5)..(39)..(41): Xaa is C or S
  MOD_RES (19)..(20)..(21)..(22)..(23): Xaa is A or G
  MOD_RES (24)..(25)..(26)..(27): Xaa is A or G or is absent

SEQ ID NO: 70635 - protein, 41 aa, Artificial Sequence
  GFR-binding peptide
  MOD_RES (5)..(6)..(40): Xaa is C or S
  MOD_RES (20)..(21)..(22)..(23)..(24): Xaa is A or G
  MOD_RES (25)..(26)..(27)..(28): Xaa is A or G or is absent
SAGPXXTPTKMSPISMLYKXXXXXXXXXLKYHYGMVVDRXG

SEQ ID NO: 70636 - protein, 37 aa, Artificial Sequence; identical to SEQ ID NO: 57646
  GFR-binding peptide
  MOD_RES (1)..(2)..(36): Xaa is C or S
  MOD_RES (16)..(17)..(18)..(19)..(20): Xaa is A or G
  MOD_RES (21)..(22)..(23)..(24): Xaa is A or G or is absent

SEQ ID NO: 70637 - protein, 36 aa, Artificial Sequence; identical to SEQ ID NO: 8317
  GFR-binding peptide
  MOD_RES (3)..(4): Xaa is C or S
  MOD_RES (18)..(19)..(20)..(21)..(22): Xaa is A or G
  MOD_RES (23)..(24)..(25)..(26): Xaa is A or G or is absent

SEQ ID NO: 70638 - protein, 40 aa, Artificial Sequence; identical to SEQ ID NO: 29637
  GFR-binding peptide
  MOD_RES (6)..(7)..(40): Xaa is C or S
  MOD_RES (21)..(22)..(23)..(24)..(25): Xaa is A or G
  MOD_RES (26)..(27)..(28)..(29): Xaa is A or G or is absent

SEQ ID NO: 70639 - protein, 36 aa, Artificial Sequence; identical to SEQ ID NO: 32740
  GFR-binding peptide
  MOD_RES (1)..(33)..(35): Xaa is C or S

SEQ ID NO: 70640 - protein, 35 aa, Artificial Sequence
  GFR-binding peptide
  MOD_RES (3)..(4): Xaa is C or S
GPXXTPTKMSATSMLYYNDKQQIILRKHRGMVVDR

SEQ ID NO: 70641 - protein, 38 aa, Artificial Sequence; identical to SEQ ID NO: 8321
  GFR-binding peptide
  MOD_RES (3)..(4)..(38): Xaa is C or S
  MOD_RES (18)..(19)..(20)..(21)..(22): Xaa is A or G
  MOD_RES (23)..(24)..(25)..(26): Xaa is A or G or is absent

SEQ ID NO: 70642 - protein, 36 aa, Artificial Sequence; identical to SEQ ID NO: 8325
  GFR-binding peptide
  MOD_RES (1)..(2)..(33)..(35): Xaa is C or S

SEQ ID NO: 70643 - protein, 34 aa, Artificial Sequence; identical to SEQ ID NO: 8327
  GFR-binding peptide
  MOD_RES (3)..(4): Xaa is C or S

SEQ ID NO: 70644 - protein, 40 aa, Artificial Sequence; identical to SEQ ID NO: 8330
  GFR-binding peptide
  MOD_RES (6)..(38)..(40): Xaa is C or S

SEQ ID NO: 70645 - protein, 35 aa, Artificial Sequence; identical to SEQ ID NO: 29649
  GFR-binding peptide
  MOD_RES (1)..(2)..(34): Xaa is C or S

SEQ ID NO: 70646 - protein, 33 aa, Artificial Sequence; identical to SEQ ID NO: 15627
  GFR-binding peptide
  MOD_RES (1)..(1): Xaa is C or S
  MOD_RES (15)..(16)..(17)..(18)..(19): Xaa is A or G
  MOD_RES (20)..(21)..(22)..(23): Xaa is A or G or is absent

SEQ ID NO: 70647 - protein, 43 aa, Artificial Sequence; identical to SEQ ID NO: 8332
  GFR-binding peptide
  MOD_RES (7)..(41)..(43): Xaa is C or S
  MOD_RES (21)..(22)..(23)..(24)..(25): Xaa is A or G
  MOD_RES (26)..(27)..(28)..(29): Xaa is A or G or is absent

SEQ ID NO: 70648 - protein, 37 aa, Artificial Sequence
  GFR-binding peptide
  MOD_RES (4)..(5): Xaa is C or S
  MOD_RES (19)..(20)..(21)..(22)..(23): Xaa is A or G
  MOD_RES (24)..(25)..(26)..(27): Xaa is A or G or is absent
PEPXXVPEKMEPISILYLXXXXXXXXXKFKYENMTVE

SEQ ID NO: 70649 - protein, 37 aa, Artificial Sequence; identical to SEQ ID NO: 29652
  GFR-binding peptide
  MOD_RES (34)..(36): Xaa is C or S
  MOD_RES (14)..(15)..(16)..(17)..(18): Xaa is A or G
  MOD_RES (19)..(20)..(21)..(22): Xaa is A or G or is absent

SEQ ID NO: 70650 - protein, 40 aa, Artificial Sequence; identical to SEQ ID NO: 8335
  GFR-binding peptide
  MOD_RES (5)..(6)..(40): Xaa is C or S
  MOD_RES (20)..(21)..(22)..(23)..(24): Xaa is A or G
  MOD_RES (25)..(26)..(27)..(28): Xaa is A or G or is absent

SEQ ID NO: 70651 - protein, 33 aa, Artificial Sequence; identical to SEQ ID NO: 8336
  GFR-binding peptide
  MOD_RES (1)..(33): Xaa is C or S

SEQ ID NO: 70652 - protein, 31 aa, Artificial Sequence; identical to SEQ ID NO: 8338
  GFR-binding peptide
  MOD_RES (31)..(31): Xaa is C or S

SEQ ID NO: 70653 - protein, 41 aa, Artificial Sequence
  GFR-binding peptide
  MOD_RES (6)..(7)..(39)..(41): Xaa is C or S
GIPEPXXVPEKMSPINILYFDENKNVVYGKIPNMTVESXAX

SEQ ID NO: 70654 - protein, 34 aa, Artificial Sequence
  GFR-binding peptide
  MOD_RES (1)..(1): Xaa is C or S
  MOD_RES (15)..(16)..(17)..(18)..(19): Xaa is A or G
  MOD_RES (20)..(21)..(22)..(23): Xaa is A or G or is absent
XVPEKMEPISILYLXXXXXXXXXKFKYENMTVES

SEQ ID NO: 70655 - protein, 41 aa, Artificial Sequence; identical to SEQ ID NO: 8340
  GFR-binding peptide
  MOD_RES (3)..(4)..(38)..(40): Xaa is C or S
  MOD_RES (18)..(19)..(20)..(21)..(22): Xaa is A or G
  MOD_RES (23)..(24)..(25)..(26): Xaa is A or G or is absent

SEQ ID NO: 70656 - protein, 38 aa, Artificial Sequence; identical to SEQ ID NO: 32758
  GFR-binding peptide
  MOD_RES (5)..(6): Xaa is C or S

SEQ ID NO: 70657 - protein, 43 aa, Artificial Sequence; identical to SEQ ID NO: 32759
  GFR-binding peptide
  MOD_RES (6)..(7)..(41)..(43): Xaa is C or S
  MOD_RES (21)..(22)..(23)..(24)..(25): Xaa is A or G
  MOD_RES (26)..(27)..(28)..(29): Xaa is A or G or is absent

SEQ ID NO: 70658 - protein, 38 aa, Artificial Sequence; identical to SEQ ID NO: 57669
  GFR-binding peptide
  MOD_RES (4)..(5)..(38): Xaa is C or S
  MOD_RES (19)..(20)..(21)..(22)..(23): Xaa is A or G
  MOD_RES (24)..(25)..(26)..(27): Xaa is A or G or is absent

SEQ ID NO: 70659 - protein, 33 aa, Artificial Sequence; identical to SEQ ID NO: 8344
  GFR-binding peptide
  MOD_RES (31)..(33): Xaa is C or S

SEQ ID NO: 70660 - protein, 33 aa, Artificial Sequence
  GFR-binding peptide
  MOD_RES (1)..(33): Xaa is C or S
XTPTKMSATSMLYYNDKQQIILRKHRGMVVDRX

SEQ ID NO: 70661 - protein, 37 aa, Artificial Sequence
  GFR-binding peptide
  MOD_RES (3)..(4)..(36): Xaa is C or S
KAXXVPTKLSATSILYYDKGVVTYLRKHRGMAVSEXG

SEQ ID NO: 70662 - protein, 38 aa, Artificial Sequence
  GFR-binding peptide
  MOD_RES (6)..(7)..(38): Xaa is C or S
ASAAPXXVPQALSPINILYFVGRKPKVYGKIPMIVRSX

SEQ ID NO: 70663 - protein, 42 aa, Artificial Sequence; identical to SEQ ID NO: 8349
  GFR-binding peptide
  MOD_RES (5)..(6)..(40)..(42): Xaa is C or S
  MOD_RES (20)..(21)..(22)..(23)..(24): Xaa is A or G
  MOD_RES (25)..(26)..(27)..(28): Xaa is A or G or is absent

SEQ ID NO: 70664 - protein, 34 aa, Artificial Sequence; identical to SEQ ID NO: 29666
  GFR-binding peptide
  MOD_RES (1)..(2): Xaa is C or S
  MOD_RES (16)..(17)..(18)..(19)..(20): Xaa is A or G
  MOD_RES (21)..(22)..(23)..(24): Xaa is A or G or is absent

SEQ ID NO: 70665 - protein, 41 aa, Artificial Sequence
  GFR-binding peptide
  MOD_RES (6)..(7)..(39)..(41): Xaa is C or S
GSAGPXXTPTKMSATSMLYYNDKQQIILRKHRGMVVDRXGX

SEQ ID NO: 70666 - protein, 35 aa, Artificial Sequence; identical to SEQ ID NO: 8352
  GFR-binding peptide
  MOD_RES (3)..(4): Xaa is C or S

SEQ ID NO: 70667 - protein, 39 aa, Artificial Sequence
  GFR-binding peptide
  MOD_RES (3)..(4)..(36)..(38): Xaa is C or S
GPXXTPTKMSATSMLYYNDKQQIILRKHRGMVVDRXGXS

SEQ ID NO: 70668 - protein, 38 aa, Artificial Sequence; identical to SEQ ID NO: 8353
  GFR-binding peptide
  MOD_RES (6)..(6): Xaa is C or S
  MOD_RES (20)..(21)..(22)..(23)..(24): Xaa is A or G
  MOD_RES (25)..(26)..(27)..(28): Xaa is A or G or is absent

SEQ ID NO: 70669 - protein, 35 aa, Artificial Sequence; identical to SEQ ID NO: 29671
  GFR-binding peptide
  MOD_RES (2)..(3): Xaa is C or S
  MOD_RES (17)..(18)..(19)..(20)..(21): Xaa is A or G
  MOD_RES (22)..(23)..(24)..(25): Xaa is A or G or is absent

SEQ ID NO: 70670 - protein, 41 aa, Artificial Sequence
  GFR-binding peptide
  MOD_RES (6)..(7)..(39)..(41): Xaa is C or S
HVPKPXXAPTKLSATSVLYYDDSSNVILRKHRNMVVRSXGX

SEQ ID NO: 70671 - protein, 34 aa, Artificial Sequence
  GFR-binding peptide
  MOD_RES (1)..(1): Xaa is C or S
  MOD_RES (15)..(16)..(17)..(18)..(19): Xaa is A or G
  MOD_RES (20)..(21)..(22)..(23): Xaa is A or G or is absent
XVPEKMSATSILYYXXXXXXXXXLRKHRNMTVES

SEQ ID NO: 70672 - protein, 41 aa, Artificial Sequence; identical to SEQ ID NO: 8355
  GFR-binding peptide
  MOD_RES (5)..(6)..(38)..(40): Xaa is C or S

SEQ ID NO: 70673 - protein, 33 aa, Artificial Sequence; identical to SEQ ID NO: 8356
  GFR-binding peptide
  MOD_RES (32)..(32): Xaa is C or S

SEQ ID NO: 70674 - protein, 35 aa, Artificial Sequence; identical to SEQ ID NO: 32778
  GFR-binding peptide
  MOD_RES (4)..(5): Xaa is C or S

SEQ ID NO: 70675 - protein, 38 aa, Artificial Sequence; identical to SEQ ID NO: 8357
  GFR-binding peptide
  MOD_RES (4)..(5)..(36)..(38): Xaa is C or S

SEQ ID NO: 70676 - protein, 41 aa, Artificial Sequence; identical to SEQ ID NO: 32782
  GFR-binding peptide
  MOD_RES (6)..(7)..(39)..(41): Xaa is C or S

SEQ ID NO: 70677 - protein, 38 aa, Artificial Sequence; identical to SEQ ID NO: 57687
  GFR-binding peptide
  MOD_RES (5)..(6)..(37): Xaa is C or S

SEQ ID NO: 70678 - protein, 34 aa, Artificial Sequence
  GFR-binding peptide
  MOD_RES (1)..(2)..(34): Xaa is C or S
XXTPTKMSATSMLYYNDKQQIILRKHRGMVVDRX

SEQ ID NO: 70679 - protein, 34 aa, Artificial Sequence; identical to SEQ ID NO: 29678
  GFR-binding peptide
  MOD_RES (3)..(4): Xaa is C or S

SEQ ID NO: 70680 - protein, 40 aa, Artificial Sequence; identical to SEQ ID NO: 8360
  GFR-binding peptide
  MOD_RES (5)..(6)..(38)..(40): Xaa is C or S

SEQ ID NO: 70681 - protein, 33 aa, Artificial Sequence; identical to SEQ ID NO: 29680
  GFR-binding peptide
  MOD_RES (1)..(32): Xaa is C or S

SEQ ID NO: 70682 - protein, 37 aa, Artificial Sequence; identical to SEQ ID NO: 29681
  GFR-binding peptide
  MOD_RES (4)..(5): Xaa is C or S

SEQ ID NO: 70683 - protein, 33 aa, Artificial Sequence; identical to SEQ ID NO: 29682
  GFR-binding peptide
  MOD_RES (1)..(33): Xaa is C or S

SEQ ID NO: 70684 - protein, 36 aa, Artificial Sequence; identical to SEQ ID NO: 8362
  GFR-binding peptide
  MOD_RES (3)..(4)..(36): Xaa is C or S

SEQ ID NO: 70685 - protein, 31 aa, Artificial Sequence
  GFR-binding peptide
  MOD_RES (1)..(1): Xaa is C or S
XVPEKMEPISILYLDENKNVVKFKYENMTVE

SEQ ID NO: 70686 - protein, 41 aa, Artificial Sequence; identical to SEQ ID NO: 8364
  GFR-binding peptide
  MOD_RES (4)..(5)..(38)..(40): Xaa is C or S
  MOD_RES (19)..(20)..(21)..(22)..(23): Xaa is A or G
  MOD_RES (24)..(25)..(26)..(27): Xaa is A or G or is absent

SEQ ID NO: 70687 - protein, 40 aa, Artificial Sequence
  GFR-binding peptide
  MOD_RES (3)..(4)..(38)..(40): Xaa is C or S
  MOD_RES (18)..(19)..(20)..(21)..(22): Xaa is A or G
  MOD_RES (23)..(24)..(25)..(26): Xaa is A or G or is absent
GPXXTPTKMSATSMLYYXXXXXXXXXLRKHRGMVVDRXGX

SEQ ID NO: 70688 - protein, 37 aa, Artificial Sequence; identical to SEQ ID NO: 8366
  GFR-binding peptide
  MOD_RES (4)..(5)..(36): Xaa is C or S

SEQ ID NO: 70689 - protein, 37 aa, Artificial Sequence; identical to SEQ ID NO: 8367
  GFR-binding peptide
  MOD_RES (6)..(6): Xaa is C or S

SEQ ID NO: 70690 - protein, 37 aa, Artificial Sequence; identical to SEQ ID NO: 29686
  GFR-binding peptide
  MOD_RES (3)..(4): Xaa is C or S
  MOD_RES (18)..(19)..(20)..(21)..(22): Xaa is A or G
  MOD_RES (23)..(24)..(25)..(26): Xaa is A or G or is absent

SEQ ID NO: 70691 - protein, 39 aa, Artificial Sequence; identical to SEQ ID NO: 8369
  GFR-binding peptide
  MOD_RES (5)..(6)..(37)..(39): Xaa is C or S

SEQ ID NO: 70692 - protein, 37 aa, Artificial Sequence; identical to SEQ ID NO: 8370
  GFR-binding peptide
  MOD_RES (3)..(35)..(37): Xaa is C or S

SEQ ID NO: 70693 - protein, 36 aa, Artificial Sequence; identical to SEQ ID NO: 29693
  GFR-binding peptide
  MOD_RES (1)..(2)..(36): Xaa is C or S
  MOD_RES (16)..(17)..(18)..(19)..(20): Xaa is A or G
  MOD_RES (21)..(22)..(23)..(24): Xaa is A or G or is absent

SEQ ID NO: 70694 - protein, 37 aa, Artificial Sequence; identical to SEQ ID NO: 29694
  GFR-binding peptide
  MOD_RES (3)..(4): Xaa is C or S
  MOD_RES (18)..(19)..(20)..(21)..(22): Xaa is A or G
  MOD_RES (23)..(24)..(25)..(26): Xaa is A or G or is absent

SEQ ID NO: 70695 - protein, 38 aa, Artificial Sequence; identical to SEQ ID NO: 8372
  GFR-binding peptide
  MOD_RES (4)..(5)..(38): Xaa is C or S
  MOD_RES (19)..(20)..(21)..(22)..(23): Xaa is A or G
  MOD_RES (24)..(25)..(26)..(27): Xaa is A or G or is absent

SEQ ID NO: 70696 - protein, 43 aa, Artificial Sequence
  GFR-binding peptide
  MOD_RES (5)..(6)..(40)..(42): Xaa is C or S
  MOD_RES (20)..(21)..(22)..(23)..(24): Xaa is A or G
  MOD_RES (25)..(26)..(27)..(28): Xaa is A or G or is absent
TPPTXXVPTRLSPISILYKXXXXXXXXXLKYHYDMVVESXGXR

SEQ ID NO: 70697 - protein, 34 aa, Artificial Sequence; identical to SEQ ID NO: 8374
  GFR-binding peptide
  MOD_RES (1)..(1): Xaa is C or S
  MOD_RES (15)..(16)..(17)..(18)..(19): Xaa is A or G
  MOD_RES (20)..(21)..(22)..(23): Xaa is A or G or is absent

SEQ ID NO: 70698 - protein, 39 aa, Artificial Sequence; identical to SEQ ID NO: 8375
  GFR-binding peptide
  MOD_RES (2)..(3)..(38): Xaa is C or S
  MOD_RES (17)..(18)..(19)..(20)..(21): Xaa is A or G
  MOD_RES (22)..(23)..(24)..(25): Xaa is A or G or is absent

SEQ ID NO: 70699 - protein, 43 aa, Artificial Sequence; identical to SEQ ID NO: 8377
  GFR-binding peptide
  MOD_RES (6)..(40)..(42): Xaa is C or S
  MOD_RES (20)..(21)..(22)..(23)..(24): Xaa is A or G
  MOD_RES (25)..(26)..(27)..(28): Xaa is A or G or is absent

SEQ ID NO: 70700 - protein, 32 aa, Artificial Sequence
  GFR-binding peptide
  MOD_RES (32)..(32): Xaa is C or S
TPTKMEPISMLYLNDKQQIIKFKYEGMVVDRX

SEQ ID NO: 70701 - protein, 38 aa, Artificial Sequence; identical to SEQ ID NO: 8380
  GFR-binding peptide
  MOD_RES (2)..(3)..(37): Xaa is C or S
  MOD_RES (17)..(18)..(19)..(20)..(21): Xaa is A or G
  MOD_RES (22)..(23)..(24)..(25): Xaa is A or G or is absent

SEQ ID NO: 70702 - protein, 40 aa, Artificial Sequence; identical to SEQ ID NO: 8381
  GFR-binding peptide
  MOD_RES (6)..(7): Xaa is C or S
  MOD_RES (21)..(22)..(23)..(24)..(25): Xaa is A or G
  MOD_RES (26)..(27)..(28)..(29): Xaa is A or G or is absent

SEQ ID NO: 70703 - protein, 34 aa, Artificial Sequence
  GFR-binding peptide
  MOD_RES (3)..(4): Xaa is C or S
EPXXVPEKMSPINILYFDENKNVVYGKIPNMTVE

SEQ ID NO: 70704 - protein, 36 aa, Artificial Sequence
  GFR-binding peptide
  MOD_RES (5)..(6): Xaa is C or S
TPPTXXVPTRLSPISILYKDSANNVVLKYHYDMVVE

SEQ ID NO: 70705 - protein, 34 aa, Artificial Sequence; identical to SEQ ID NO: 29706
  GFR-binding peptide
  MOD_RES (1)..(2)..(33): Xaa is C or S

SEQ ID NO: 70706 - protein, 36 aa, Artificial Sequence; identical to SEQ ID NO: 32811
  GFR-binding peptide
  MOD_RES (1)..(2)..(36): Xaa is C or S
  MOD_RES (16)..(17)..(18)..(19)..(20): Xaa is A or G
  MOD_RES (21)..(22)..(23)..(24): Xaa is A or G or is absent

SEQ ID NO: 70707 - protein, 39 aa, Artificial Sequence; identical to SEQ ID NO: 32813
  GFR-binding peptide
  MOD_RES (5)..(39): Xaa is C or S
  MOD_RES (19)..(20)..(21)..(22)..(23): Xaa is A or G
  MOD_RES (24)..(25)..(26)..(27): Xaa is A or G or is absent

SEQ ID NO: 70708 - protein, 35 aa, Artificial Sequence
  GFR-binding peptide
  MOD_RES (1)..(33)..(35): Xaa is C or S
XVPTKLSATSILYYDKGVVTYLRKHRGMAVSEXGX

SEQ ID NO: 70709 - protein, 38 aa, Artificial Sequence
  GFR-binding peptide
  MOD_RES (2)..(3)..(37): Xaa is C or S
  MOD_RES (17)..(18)..(19)..(20)..(21): Xaa is A or G
  MOD_RES (22)..(23)..(24)..(25): Xaa is A or G or is absent
AXXVPTKLSATSILYYXXXXXXXXXLRKHRGMAVSEXG

SEQ ID NO: 70710 - protein, 36 aa, Artificial Sequence; identical to SEQ ID NO: 29709
  GFR-binding peptide
  MOD_RES (3)..(4)..(36): Xaa is C or S

SEQ ID NO: 70711 - protein, 38 aa, Artificial Sequence
  GFR-binding peptide
  MOD_RES (5)..(6): Xaa is C or S
  MOD_RES (20)..(21)..(22)..(23)..(24): Xaa is A or G
  MOD_RES (25)..(26)..(27)..(28): Xaa is A or G or is absent
IPEPXXVPEKMNAISILYFXXXXXXXXXLKKYRNMTVE

SEQ ID NO: 70712 - protein, 35 aa, Artificial Sequence
  GFR-binding peptide
  MOD_RES (1)..(2): Xaa is C or S
  MOD_RES (16)..(17)..(18)..(19)..(20): Xaa is A or G
  MOD_RES (21)..(22)..(23)..(24): Xaa is A or G or is absent
XXVPEKMSATSILYYXXXXXXXXXLRKHRNMTVES

SEQ ID NO: 70713 - protein, 38 aa, Artificial Sequence; identical to SEQ ID NO: 32820
  GFR-binding peptide
  MOD_RES (5)..(6)..(38): Xaa is C or S

SEQ ID NO: 70714 - protein, 35 aa, Artificial Sequence; identical to SEQ ID NO: 32828
  GFR-binding peptide
  MOD_RES (2)..(3)..(35): Xaa is C or S

SEQ ID NO: 70715 - protein, 37 aa, Artificial Sequence; identical to SEQ ID NO: 15702
  GFR-binding peptide
  MOD_RES (1)..(35)..(37): Xaa is C or S
  MOD_RES (15)..(16)..(17)..(18)..(19): Xaa is A or G
  MOD_RES (20)..(21)..(22)..(23): Xaa is A or G or is absent

SEQ ID NO: 70716 - protein, 41 aa, Artificial Sequence; identical to SEQ ID NO: 29720
  GFR-binding peptide
  MOD_RES (6)..(7)..(40): Xaa is C or S
  MOD_RES (21)..(22)..(23)..(24)..(25): Xaa is A or G
  MOD_RES (26)..(27)..(28)..(29): Xaa is A or G or is absent

SEQ ID NO: 70717 - protein, 36 aa, Artificial Sequence; identical to SEQ ID NO: 8403
  GFR-binding peptide
  MOD_RES (1)..(35): Xaa is C or S
  MOD_RES (15)..(16)..(17)..(18)..(19): Xaa is A or G
  MOD_RES (20)..(21)..(22)..(23): Xaa is A or G or is absent

SEQ ID NO: 70718 - protein, 40 aa, Artificial Sequence; identical to SEQ ID NO: 29723
  GFR-binding peptide
  MOD_RES (4)..(5)..(38)..(40): Xaa is C or S
  MOD_RES (19)..(20)..(21)..(22)..(23): Xaa is A or G
  MOD_RES (24)..(25)..(26)..(27): Xaa is A or G or is absent

SEQ ID NO: 70719 - protein, 39 aa, Artificial Sequence; identical to SEQ ID NO: 32841
  GFR-binding peptide
  MOD_RES (2)..(36)..(38): Xaa is C or S
  MOD_RES (16)..(17)..(18)..(19)..(20): Xaa is A or G
  MOD_RES (21)..(22)..(23)..(24): Xaa is A or G or is absent

SEQ ID NO: 70720 - protein, 40 aa, Artificial Sequence; identical to SEQ ID NO: 32842
  GFR-binding peptide
  MOD_RES (4)..(5)..(37)..(39): Xaa is C or S

SEQ ID NO: 70721 - protein, 34 aa, Artificial Sequence; identical to SEQ ID NO: 8407
  GFR-binding peptide
  MOD_RES (1)..(2): Xaa is C or S
  MOD_RES (16)..(17)..(18)..(19)..(20): Xaa is A or G
  MOD_RES (21)..(22)..(23)..(24): Xaa is A or G or is absent

SEQ ID NO: 70722 - protein, 36 aa, Artificial Sequence
  GFR-binding peptide
  MOD_RES (1)..(2)..(33)..(35): Xaa is C or S
XXVPQDLSPINILYFVGRTPKVYGKIPMVVKSXKXS

SEQ ID NO: 70723 - protein, 33 aa, Artificial Sequence; identical to SEQ ID NO: 8409
  GFR-binding peptide
  MOD_RES (1)..(1): Xaa is C or S
  MOD_RES (15)..(16)..(17)..(18)..(19): Xaa is A or G
  MOD_RES (20)..(21)..(22)..(23): Xaa is A or G or is absent

SEQ ID NO: 70724 - protein, 39 aa, Artificial Sequence; identical to SEQ ID NO: 8410
  GFR-binding peptide
  MOD_RES (6)..(7)..(39): Xaa is C or S

SEQ ID NO: 70725 - protein, 36 aa, Artificial Sequence
  GFR-binding peptide
  MOD_RES (1)..(33)..(35): Xaa is C or S
XVPTKLSATSILYYDKGVVTYLRKHRGMAVSEXGXR

SEQ ID NO: 70726 - protein, 37 aa, Artificial Sequence
  GFR-binding peptide
  MOD_RES (6)..(7): Xaa is C or S
RVPSTXXAPVKTSATSMLYYDNGRVLLLRKHRMIVEE

SEQ ID NO: 70727 - protein, 36 aa, Artificial Sequence
  GFR-binding peptide
  MOD_RES (3)..(4): Xaa is C or S
  MOD_RES (18)..(19)..(20)..(21)..(22): Xaa is A or G
  MOD_RES (23)..(24)..(25)..(26): Xaa is A or G or is absent
PTXXVPTRLSPISILYKXXXXXXXXXLKYHYDMVVE

SEQ ID NO: 70728 - protein, 38 aa, Artificial Sequence
  GFR-binding peptide
  MOD_RES (5)..(6)..(38): Xaa is C or S
IPEPXXVPEKMSPINILYFDENKNVVYGKIPNMTVESX

SEQ ID NO: 70729 - protein, 39 aa, Artificial Sequence; identical to SEQ ID NO: 29730
  GFR-binding peptide
  MOD_RES (3)..(4)..(38): Xaa is C or S
  MOD_RES (18)..(19)..(20)..(21)..(22): Xaa is A or G
  MOD_RES (23)..(24)..(25)..(26): Xaa is A or G or is absent

SEQ ID NO: 70730 - protein, 36 aa, Artificial Sequence; identical to SEQ ID NO: 8417
  GFR-binding peptide
  MOD_RES (1)..(2)..(36): Xaa is C or S
  MOD_RES (16)..(17)..(18)..(19)..(20): Xaa is A or G
  MOD_RES (21)..(22)..(23)..(24): Xaa is A or G or is absent

SEQ ID NO: 70731 - protein, 40 aa, Artificial Sequence
  GFR-binding peptide
  MOD_RES (2)..(3)..(37)..(39): Xaa is C or S
  MOD_RES (17)..(18)..(19)..(20)..(21): Xaa is A or G
  MOD_RES (22)..(23)..(24)..(25): Xaa is A or G or is absent
PXXTPTKMSPISMLYKXXXXXXXXXLKYHYGMVVDRXGXS

SEQ ID NO: 70732 - protein, 38 aa, Artificial Sequence; identical to SEQ ID NO: 8420
  GFR-binding peptide
  MOD_RES (3)..(4)..(35)..(37): Xaa is C or S

SEQ ID NO: 70733 - protein, 40 aa, Artificial Sequence; identical to SEQ ID NO: 32854
  GFR-binding peptide
  MOD_RES (4)..(5)..(38)..(40): Xaa is C or S
  MOD_RES (19)..(20)..(21)..(22)..(23): Xaa is A or G
  MOD_RES (24)..(25)..(26)..(27): Xaa is A or G or is absent

SEQ ID NO: 70734 - protein, 31 aa, Artificial Sequence; identical to SEQ ID NO: 57770
  GFR-binding peptide
  MOD_RES (1)..(1): Xaa is C or S

SEQ ID NO: 70735 - protein, 36 aa, Artificial Sequence; identical to SEQ ID NO: 32856
  GFR-binding peptide
  MOD_RES (5)..(6): Xaa is C or S

SEQ ID NO: 70736 - protein, 32 aa, Artificial Sequence
  GFR-binding peptide
  MOD_RES (32)..(32): Xaa is C or S
TPTKMSATSMLYYNDKQQIILRKHRGMVVDRX

SEQ ID NO: 70737 - protein, 41 aa, Artificial Sequence; identical to SEQ ID NO: 8429
  GFR-binding peptide
  MOD_RES (4)..(5)..(39)..(41): Xaa is C or S
  MOD_RES (19)..(20)..(21)..(22)..(23): Xaa is A or G
  MOD_RES (24)..(25)..(26)..(27): Xaa is A or G or is absent

SEQ ID NO: 70738 - protein, 38 aa, Artificial Sequence; identical to SEQ ID NO: 8431
  GFR-binding peptide
  MOD_RES (1)..(35)..(37): Xaa is C or S
  MOD_RES (15)..(16)..(17)..(18)..(19): Xaa is A or G
  MOD_RES (20)..(21)..(22)..(23): Xaa is A or G or is absent

SEQ ID NO: 70739 - protein, 37 aa, Artificial Sequence; identical to SEQ ID NO: 29744
  GFR-binding peptide
  MOD_RES (6)..(7): Xaa is C or S

SEQ ID NO: 70740 - protein, 33 aa, Artificial Sequence; identical to SEQ ID NO: 8433
  GFR-binding peptide
  MOD_RES (1)..(1): Xaa is C or S
  MOD_RES (15)..(16)..(17)..(18)..(19): Xaa is A or G
  MOD_RES (20)..(21)..(22)..(23): Xaa is A or G or is absent

SEQ ID NO: 70741 - protein, 40 aa, Artificial Sequence; identical to SEQ ID NO: 32867
  GFR-binding peptide
  MOD_RES (5)..(6)..(40): Xaa is C or S
  MOD_RES (20)..(21)..(22)..(23)..(24): Xaa is A or G
  MOD_RES (25)..(26)..(27)..(28): Xaa is A or G or is absent

SEQ ID NO: 70742 - protein, 43 aa, Artificial Sequence; identical to SEQ ID NO: 8437
  GFR-binding peptide
  MOD_RES (6)..(7)..(40)..(42): Xaa is C or S
  MOD_RES (21)..(22)..(23)..(24)..(25): Xaa is A or G
  MOD_RES (26)..(27)..(28)..(29): Xaa is A or G or is absent

SEQ ID NO: 70743 - protein, 39 aa, Artificial Sequence; identical to SEQ ID NO: 8439
  GFR-binding peptide
  MOD_RES (4)..(5)..(37)..(39): Xaa is C or S

SEQ ID NO: 70744 - protein, 39 aa, Artificial Sequence; identical to SEQ ID NO: 29750
  GFR-binding peptide
  MOD_RES (2)..(3)..(37)..(39): Xaa is C or S
  MOD_RES (17)..(18)..(19)..(20)..(21): Xaa is A or G
  MOD_RES (22)..(23)..(24)..(25): Xaa is A or G or is absent

SEQ ID NO: 70745 - protein, 36 aa, Artificial Sequence; identical to SEQ ID NO: 29751
  GFR-binding peptide
  MOD_RES (1)..(35): Xaa is C or S
  MOD_RES (15)..(16)..(17)..(18)..(19): Xaa is A or G
  MOD_RES (20)..(21)..(22)..(23): Xaa is A or G or is absent

SEQ ID NO: 70746 - protein, 34 aa, Artificial Sequence; identical to SEQ ID NO: 29752
  GFR-binding peptide
  MOD_RES (32)..(34): Xaa is C or S

SEQ ID NO: 70747 - protein, 38 aa, Artificial Sequence; identical to SEQ ID NO: 8442
  GFR-binding peptide
  MOD_RES (1)..(2)..(35)..(37): Xaa is C or S
  MOD_RES (16)..(17)..(18)..(19)..(20): Xaa is A or G
  MOD_RES (21)..(22)..(23)..(24): Xaa is A or G or is absent

SEQ ID NO: 70748 - protein, 33 aa, Artificial Sequence; identical to SEQ ID NO: 29755
  GFR-binding peptide
  MOD_RES (1)..(2): Xaa is C or S

SEQ ID NO: 70749 - protein, 33 aa, Artificial Sequence; identical to SEQ ID NO: 8443
  GFR-binding peptide
  MOD_RES (2)..(3): Xaa is C or S

SEQ ID NO: 70750 - protein, 34 aa, Artificial Sequence
  GFR-binding peptide
  MOD_RES (1)..(2)..(34): Xaa is C or S
XXVPEKMSPISILYKDENKNVVLKYHYNMTVESX

SEQ ID NO: 70751 - protein, 37 aa, Artificial Sequence; identical to SEQ ID NO: 32875
  GFR-binding peptide
  MOD_RES (34)..(36): Xaa is C or S
  MOD_RES (14)..(15)..(16)..(17)..(18): Xaa is A or G
  MOD_RES (19)..(20)..(21)..(22): Xaa is A or G or is absent

SEQ ID NO: 70752 - protein, 35 aa, Artificial Sequence; identical to SEQ ID NO: 8445
  GFR-binding peptide
  MOD_RES (33)..(35): Xaa is C or S

SEQ ID NO: 70753 - protein, 41 aa, Artificial Sequence
  GFR-binding peptide
  MOD_RES (5)..(6)..(38)..(40): Xaa is C or S
APASXXVPARLSATSILYYDAANNVVLRKHRDMVVEAXGXR

SEQ ID NO: 70754 - protein, 31 aa, Artificial Sequence
  GFR-binding peptide
  MOD_RES (1)..(1): Xaa is C or S
XAPVKTSATSMLYYDNGRVLLLRKHRMIVEE

SEQ ID NO: 70755 - protein, 38 aa, Artificial Sequence; identical to SEQ ID NO: 15745
  GFR-binding peptide
  MOD_RES (3)..(4)..(38): Xaa is C or S
  MOD_RES (18)..(19)..(20)..(21)..(22): Xaa is A or G
  MOD_RES (23)..(24)..(25)..(26): Xaa is A or G or is absent

SEQ ID NO: 70756 - protein, 41 aa, Artificial Sequence; identical to SEQ ID NO: 29762
  GFR-binding peptide
  MOD_RES (5)..(6)..(40): Xaa is C or S
  MOD_RES (20)..(21)..(22)..(23)..(24): Xaa is A or G
  MOD_RES (25)..(26)..(27)..(28): Xaa is A or G or is absent

SEQ ID NO: 70757 - protein, 33 aa, Artificial Sequence
  GFR-binding peptide
  MOD_RES (1)..(2): Xaa is C or S
XXVPEKMSPINILYFDENKNVVYGKIPNMTVES

SEQ ID NO: 70758 - protein, 37 aa, Artificial Sequence
  GFR-binding peptide
  MOD_RES (2)..(3)..(37): Xaa is C or S
  MOD_RES (17)..(18)..(19)..(20)..(21): Xaa is A or G
  MOD_RES (22)..(23)..(24)..(25): Xaa is A or G or is absent
PXXTPTKMSPISMLYKXXXXXXXXXLKYHYGMVVDRX

SEQ ID NO: 70759 - protein, 37 aa, Artificial Sequence
  GFR-binding peptide
  MOD_RES (3)..(4): Xaa is C or S
  MOD_RES (18)..(19)..(20)..(21)..(22): Xaa is A or G
  MOD_RES (23)..(24)..(25)..(26): Xaa is A or G or is absent
EPXXVPEKMSPISILYKXXXXXXXXXLKYHYNMTVES

SEQ ID NO: 70760 - protein, 37 aa, Artificial Sequence
  GFR-binding peptide
  MOD_RES (3)..(4)..(36): Xaa is C or S
EPXXVPEKMEPISILYLDENKNVVKFKYENMTVESXA

SEQ ID NO: 70761 - protein, 35 aa, Artificial Sequence; identical to SEQ ID NO: 29764
  GFR-binding peptide
  MOD_RES (1)..(32)..(34): Xaa is C or S

SEQ ID NO: 70762 - protein, 41 aa, Artificial Sequence; identical to SEQ ID NO: 29765
  GFR-binding peptide
  MOD_RES (5)..(6)..(40): Xaa is C or S
  MOD_RES (20)..(21)..(22)..(23)..(24): Xaa is A or G
  MOD_RES (25)..(26)..(27)..(28): Xaa is A or G or is absent

SEQ ID NO: 70763 - protein, 37 aa, Artificial Sequence; identical to SEQ ID NO: 8453
  GFR-binding peptide
  MOD_RES (1)..(2)..(36): Xaa is C or S
  MOD_RES (16)..(17)..(18)..(19)..(20): Xaa is A or G
  MOD_RES (21)..(22)..(23)..(24): Xaa is A or G or is absent

SEQ ID NO: 70764 - protein, 36 aa, Artificial Sequence; identical to SEQ ID NO: 32899
  GFR-binding peptide
  MOD_RES (2)..(3): Xaa is C or S
  MOD_RES (17)..(18)..(19)..(20)..(21): Xaa is A or G
  MOD_RES (22)..(23)..(24)..(25): Xaa is A or G or is absent

SEQ ID NO: 70765 - protein, 32 aa, Artificial Sequence; identical to SEQ ID NO: 29770
  GFR-binding peptide
  MOD_RES (14)..(15)..(16)..(17)..(18): Xaa is A or G
  MOD_RES (19)..(20)..(21)..(22): Xaa is A or G or is absent

SEQ ID NO: 70766 - protein, 38 aa, Artificial Sequence; identical to SEQ ID NO: 32903
  GFR-binding peptide
  MOD_RES (3)..(4)..(38): Xaa is C or S
  MOD_RES (18)..(19)..(20)..(21)..(22): Xaa is A or G
  MOD_RES (23)..(24)..(25)..(26): Xaa is A or G or is absent

SEQ ID NO: 70767 - protein, 33 aa, Artificial Sequence; identical to SEQ ID NO: 8459
  GFR-binding peptide
  MOD_RES (1)..(1): Xaa is C or S
  MOD_RES (15)..(16)..(17)..(18)..(19): Xaa is A or G
  MOD_RES (20)..(21)..(22)..(23): Xaa is A or G or is absent

SEQ ID NO: 70768 - protein, 39 aa, Artificial Sequence; identical to SEQ ID NO: 29774
  GFR-binding peptide
  MOD_RES (6)..(7)..(38): Xaa is C or S

SEQ ID NO: 70769 - protein, 34 aa, Artificial Sequence
  GFR-binding peptide
  MOD_RES (2)..(3)..(34): Xaa is C or S
PXXVPQALSPINILYFVGRKPKVYGKIPMIVRSX

SEQ ID NO: 70770 - protein, 33 aa, Artificial Sequence; identical to SEQ ID NO: 8460
  GFR-binding peptide
  MOD_RES (2)..(3): Xaa is C or S

SEQ ID NO: 70771 - protein, 41 aa, Artificial Sequence
  GFR-binding peptide
  MOD_RES (6)..(7)..(39)..(41): Xaa is C or S
STPPTXXVPTRLEPISILYLDSANNVVKFKYEDMVVESXGX

SEQ ID NO: 70772 - protein, 30 aa, Artificial Sequence; identical to SEQ ID NO: 32912
  GFR-binding peptide

SEQ ID NO: 70773 - protein, 38 aa, Artificial Sequence
  GFR-binding peptide
  MOD_RES (5)..(6)..(38): Xaa is C or S
IPEPXXVPEKMEPISILYLDENKNVVKFKYENMTVESX

SEQ ID NO: 70774 - protein, 38 aa, Artificial Sequence; identical to SEQ ID NO: 29782
  GFR-binding peptide
  MOD_RES (5)..(6): Xaa is C or S
  MOD_RES (20)..(21)..(22)..(23)..(24): Xaa is A or G
  MOD_RES (25)..(26)..(27)..(28): Xaa is A or G or is absent

SEQ ID NO: 70775 - protein, 43 aa, Artificial Sequence; identical to SEQ ID NO: 29783
  GFR-binding peptide
  MOD_RES (4)..(5)..(40)..(42): Xaa is C or S
  MOD_RES (19)..(20)..(21)..(22)..(23): Xaa is A or G
  MOD_RES (24)..(25)..(26)..(27): Xaa is A or G or is absent

SEQ ID NO: 70776 - protein, 34 aa, Artificial Sequence; identical to SEQ ID NO: 8464
  GFR-binding peptide
  MOD_RES (3)..(4): Xaa is C or S

SEQ ID NO: 70777 - protein, 37 aa, Artificial Sequence; identical to SEQ ID NO: 8465
  GFR-binding peptide
  MOD_RES (1)..(35)..(37): Xaa is C or S
  MOD_RES (15)..(16)..(17)..(18)..(19): Xaa is A or G
  MOD_RES (20)..(21)..(22)..(23): Xaa is A or G or is absent

SEQ ID NO: 70778 - protein, 36 aa, Artificial Sequence
  GFR-binding peptide
  MOD_RES (3)..(4): Xaa is C or S
  MOD_RES (18)..(19)..(20)..(21)..(22): Xaa is A or G
  MOD_RES (23)..(24)..(25)..(26): Xaa is A or G or is absent
GPXXTPTKMSATSMLYYXXXXXXXXXLRKHRGMVVD

SEQ ID NO: 70779 - protein, 38 aa, Artificial Sequence; identical to SEQ ID NO: 8466
  GFR-binding peptide
  MOD_RES (3)..(4)..(36)..(38): Xaa is C or S

SEQ ID NO: 70780 - protein, 37 aa, Artificial Sequence; identical to SEQ ID NO: 8467
  GFR-binding peptide
  MOD_RES (3)..(4): Xaa is C or S
  MOD_RES (18)..(19)..(20)..(21)..(22): Xaa is A or G
  MOD_RES (23)..(24)..(25)..(26): Xaa is A or G or is absent

SEQ ID NO: 70781 - protein, 38 aa, Artificial Sequence; identical to SEQ ID NO: 8470
  GFR-binding peptide
  MOD_RES (6)..(7): Xaa is C or S

SEQ ID NO: 70782 - protein, 40 aa, Artificial Sequence; identical to SEQ ID NO: 29792
  GFR-binding peptide
  MOD_RES (5)..(6)..(39): Xaa is C or S
  MOD_RES (20)..(21)..(22)..(23)..(24): Xaa is A or G
  MOD_RES (25)..(26)..(27)..(28): Xaa is A or G or is absent

SEQ ID NO: 70783 - protein, 39 aa, Artificial Sequence; identical to SEQ ID NO: 8472
  GFR-binding peptide
  MOD_RES (5)..(6): Xaa is C or S
  MOD_RES (20)..(21)..(22)..(23)..(24): Xaa is A or G
  MOD_RES (25)..(26)..(27)..(28): Xaa is A or G or is absent

SEQ ID NO: 70784 - protein, 33 aa, Artificial Sequence; identical to SEQ ID NO: 29794
  GFR-binding peptide
  MOD_RES (32)..(32): Xaa is C or S

SEQ ID NO: 70785 - protein, 36 aa, Artificial Sequence
  GFR-binding peptide
  MOD_RES (3)..(4)..(36): Xaa is C or S
PTXXVPTRLSATSILYYDSANNVVLRKHRDMVVESX

SEQ ID NO: 70786 - protein, 33 aa, Artificial Sequence; identical to SEQ ID NO: 8478
  GFR-binding peptide
  MOD_RES (31)..(33): Xaa is C or S

SEQ ID NO: 70787 - protein, 41 aa, Artificial Sequence; identical to SEQ ID NO: 8479
  GFR-binding peptide
  MOD_RES (6)..(7)..(39)..(41): Xaa is C or S

SEQ ID NO: 70788 - protein, 35 aa, Artificial Sequence
  GFR-binding peptide
  MOD_RES (1)..(2): Xaa is C or S
  MOD_RES (16)..(17)..(18)..(19)..(20): Xaa is A or G
  MOD_RES (21)..(22)..(23)..(24): Xaa is A or G or is absent
XXVPEKMEPISILYLXXXXXXXXXKFKYENMTVES

SEQ ID NO: 70789 - protein, 41 aa, Artificial Sequence; identical to SEQ ID NO: 29799
  GFR-binding peptide
  MOD_RES (3)..(4)..(38)..(40): Xaa is C or S
  MOD_RES (18)..(19)..(20)..(21)..(22): Xaa is A or G
  MOD_RES (23)..(24)..(25)..(26): Xaa is A or G or is absent

SEQ ID NO: 70790 - protein, 40 aa, Artificial Sequence; identical to SEQ ID NO: 8480
  GFR-binding peptide
  MOD_RES (5)..(6)..(37)..(39): Xaa is C or S

SEQ ID NO: 70791 - protein, 41 aa, Artificial Sequence; identical to SEQ ID NO: 8481
  GFR-binding peptide
  MOD_RES (5)..(6)..(39)..(41): Xaa is C or S
  MOD_RES (20)..(21)..(22)..(23)..(24): Xaa is A or G
  MOD_RES (25)..(26)..(27)..(28): Xaa is A or G or is absent

SEQ ID NO: 70792 - protein, 35 aa, Artificial Sequence; identical to SEQ ID NO: 29802
  GFR-binding peptide
  MOD_RES (2)..(3): Xaa is C or S
  MOD_RES (17)..(18)..(19)..(20)..(21): Xaa is A or G
  MOD_RES (22)..(23)..(24)..(25): Xaa is A or G or is absent

SEQ ID NO: 70793 - protein, 41 aa, Artificial Sequence
  GFR-binding peptide
  MOD_RES (6)..(7)..(39)..(41): Xaa is C or S
GIPEPXXVPEKMSATSILYYDENKNVVLRKHRNMTVESXAX

SEQ ID NO: 70794 - protein, 39 aa, Artificial Sequence
  GFR-binding peptide
  MOD_RES (4)..(5)..(39): Xaa is C or S
  MOD_RES (19)..(20)..(21)..(22)..(23): Xaa is A or G
  MOD_RES (24)..(25)..(26)..(27): Xaa is A or G or is absent
PPTXXVPTRLSPISILYKXXXXXXXXXLKYHYDMVVESX

SEQ ID NO: 70795 - protein, 38 aa, Artificial Sequence; identical to SEQ ID NO: 8486
  GFR-binding peptide
  MOD_RES (5)..(6)..(38): Xaa is C or S

SEQ ID NO: 70796 - protein, 34 aa, Artificial Sequence; identical to SEQ ID NO: 29805
  GFR-binding peptide
  MOD_RES (32)..(34): Xaa is C or S

SEQ ID NO: 70797 - protein, 37 aa, Artificial Sequence; identical to SEQ ID NO: 8487
  GFR-binding peptide
  MOD_RES (1)..(2)..(37): Xaa is C or S
  MOD_RES (16)..(17)..(18)..(19)..(20): Xaa is A or G
  MOD_RES (21)..(22)..(23)..(24): Xaa is A or G or is absent

SEQ ID NO: 70798 - protein, 30 aa, Artificial Sequence; identical to SEQ ID NO: 8488
  GFR-binding peptide

SEQ ID NO: 70799 - protein, 35 aa, Artificial Sequence
  GFR-binding peptide
  MOD_RES (3)..(4): Xaa is C or S
EPXXVPEKMSPINILYFDENKNVVYGKIPNMTVES

SEQ ID NO: 70800 - protein, 35 aa, Artificial Sequence; identical to SEQ ID NO: 8491
  GFR-binding peptide
  MOD_RES (1)..(2)..(35): Xaa is C or S
  MOD_RES (16)..(17)..(18)..(19)..(20): Xaa is A or G
  MOD_RES (21)..(22)..(23)..(24): Xaa is A or G or is absent

SEQ ID NO: 70801 - protein, 40 aa, Artificial Sequence
  GFR-binding peptide
  MOD_RES (6)..(7)..(39): Xaa is C or S
GIPEPXXVPEKMSPISILYKDENKNVVLKYHYNMTVESXA

SEQ ID NO: 70802 - protein, 34 aa, Artificial Sequence
  GFR-binding peptide
  MOD_RES (1)..(2): Xaa is C or S
  MOD_RES (16)..(17)..(18)..(19)..(20): Xaa is A or G
  MOD_RES (21)..(22)..(23)..(24): Xaa is A or G or is absent
XXVPTKLSATSILYYXXXXXXXXXLRKHRGMAVS

SEQ ID NO: 70803 - protein, 37 aa, Artificial Sequence
  GFR-binding peptide
  MOD_RES (34)..(36): Xaa is C or S
  MOD_RES (14)..(15)..(16)..(17)..(18): Xaa is A or G
  MOD_RES (19)..(20)..(21)..(22): Xaa is A or G or is absent
VPTRLSATSILYYXXXXXXXXXLRKHRDMVVESXGXR

SEQ ID NO: 70804 - protein, 38 aa, Artificial Sequence; identical to SEQ ID NO: 29814
  GFR-binding peptide
  MOD_RES (1)..(35)..(37): Xaa is C or S
  MOD_RES (15)..(16)..(17)..(18)..(19): Xaa is A or G
  MOD_RES (20)..(21)..(22)..(23): Xaa is A or G or is absent

SEQ ID NO: 70805 - protein, 36 aa, Artificial Sequence; identical to SEQ ID NO: 32949
  GFR-binding peptide
  MOD_RES (3)..(4)..(36): Xaa is C or S

SEQ ID NO: 70806 - protein, 39 aa, Artificial Sequence
  GFR-binding peptide
  MOD_RES (3)..(4)..(37)..(39): Xaa is C or S
  MOD_RES (18)..(19)..(20)..(21)..(22): Xaa is A or G
  MOD_RES (23)..(24)..(25)..(26): Xaa is A or G or is absent
STXXAPVKTSATSMLYYXXXXXXXXXLRKHRMIVEEXGX

SEQ ID NO: 70807 - protein, 37 aa, Artificial Sequence; identical to SEQ ID NO: 32950
  GFR-binding peptide
  MOD_RES (2)..(3)..(36): Xaa is C or S
  MOD_RES (17)..(18)..(19)..(20)..(21): Xaa is A or G
  MOD_RES (22)..(23)..(24)..(25): Xaa is A or G or is absent

SEQ ID NO: 70808 - protein, 33 aa, Artificial Sequence; identical to SEQ ID NO: 8503
  GFR-binding peptide
  MOD_RES (31)..(33): Xaa is C or S

SEQ ID NO: 70809 - protein, 34 aa, Artificial Sequence; identical to SEQ ID NO: 29820
  GFR-binding peptide
  MOD_RES (1)..(34): Xaa is C or S
  MOD_RES (15)..(16)..(17)..(18)..(19): Xaa is A or G
  MOD_RES (20)..(21)..(22)..(23): Xaa is A or G or is absent

SEQ ID NO: 70810 - protein, 41 aa, Artificial Sequence; identical to SEQ ID NO: 8508
  GFR-binding peptide
  MOD_RES (5)..(6)..(39)..(41): Xaa is C or S
  MOD_RES (20)..(21)..(22)..(23)..(24): Xaa is A or G
  MOD_RES (25)..(26)..(27)..(28): Xaa is A or G or is absent

SEQ ID NO: 70811 - protein, 36 aa, Artificial Sequence
  GFR-binding peptide
  MOD_RES (5)..(6): Xaa is C or S
SASPXXVSQDLSPINILYFIGKTPKIYGKIPMIVKS

SEQ ID NO: 70812 - protein, 34 aa, Artificial Sequence
  GFR-binding peptide
  MOD_RES (1)..(33): Xaa is C or S
XVPTRLSATSILYYDSANNVVLRKHRDMVVESXG

SEQ ID NO: 70813 - protein, 33 aa, Artificial Sequence
  GFR-binding peptide
  MOD_RES (2)..(3): Xaa is C or S
AXXVPTKLSATSILYYDKGVVTYLRKHRGMAVS

SEQ ID NO: 70814 - protein, 38 aa, Artificial Sequence
  GFR-binding peptide
  MOD_RES (2)..(3)..(37): Xaa is C or S
  MOD_RES (17)..(18)..(19)..(20)..(21): Xaa is A or G
  MOD_RES (22)..(23)..(24)..(25): Xaa is A or G or is absent
PXXVPEKMSATSILYYXXXXXXXXXLRKHRNMTVESXA

SEQ ID NO: 70815 - protein, 37 aa, Artificial Sequence; identical to SEQ ID NO: 29837
  GFR-binding peptide
  MOD_RES (34)..(36): Xaa is C or S
  MOD_RES (14)..(15)..(16)..(17)..(18): Xaa is A or G
  MOD_RES (19)..(20)..(21)..(22): Xaa is A or G or is absent

SEQ ID NO: 70816 - protein, 37 aa, Artificial Sequence
  GFR-binding peptide
  MOD_RES (2)..(3)..(34)..(36): Xaa is C or S
TXXAPVKTSATSMLYYDNGRVLLLRKHRMIVEEXGXL

SEQ ID NO: 70817 - protein, 40 aa, Artificial Sequence; identical to SEQ ID NO: 8520
  GFR-binding peptide
  MOD_RES (3)..(37)..(39): Xaa is C or S
  MOD_RES (17)..(18)..(19)..(20)..(21): Xaa is A or G
  MOD_RES (22)..(23)..(24)..(25): Xaa is A or G or is absent

SEQ ID NO: 70818 - protein, 36 aa, Artificial Sequence; identical to SEQ ID NO: 8522
  GFR-binding peptide
  MOD_RES (3)..(4): Xaa is C or S
  MOD_RES (18)..(19)..(20)..(21)..(22): Xaa is A or G
  MOD_RES (23)..(24)..(25)..(26): Xaa is A or G or is absent

SEQ ID NO: 70819 - protein, 40 aa, Artificial Sequence; identical to SEQ ID NO: 8523
  GFR-binding peptide
  MOD_RES (4)..(5)..(40): Xaa is C or S
  MOD_RES (19)..(20)..(21)..(22)..(23): Xaa is A or G
  MOD_RES (24)..(25)..(26)..(27): Xaa is A or G or is absent

SEQ ID NO: 70820 - protein, 33 aa, Artificial Sequence; identical to SEQ ID NO: 8526
  GFR-binding peptide
  MOD_RES (1)..(2)..(33): Xaa is C or S

SEQ ID NO: 70821 - protein, 37 aa, Artificial Sequence; identical to SEQ ID NO: 32976
  GFR-binding peptide
  MOD_RES (34)..(36): Xaa is C or S
  MOD_RES (14)..(15)..(16)..(17)..(18): Xaa is A or G
  MOD_RES (19)..(20)..(21)..(22): Xaa is A or G or is absent

SEQ ID NO: 70822 - protein, 39 aa, Artificial Sequence
  GFR-binding peptide
  MOD_RES (6)..(7)..(38): Xaa is C or S
ASAAPXXVPQALSPINILYFVGRKPKVYGKIPMIVRSXK

SEQ ID NO: 70823 - protein, 35 aa, Artificial Sequence; identical to SEQ ID NO: 8532
  GFR-binding peptide
  MOD_RES (1)..(2)..(33)..(35): Xaa is C or S

SEQ ID NO: 70824 - protein, 40 aa, Artificial Sequence; identical to SEQ ID NO: 29847
  GFR-binding peptide
  MOD_RES (5)..(6)..(40): Xaa is C or S
  MOD_RES (20)..(21)..(22)..(23)..(24): Xaa is A or G
  MOD_RES (25)..(26)..(27)..(28): Xaa is A or G or is absent

SEQ ID NO: 70825 - protein, 36 aa, Artificial Sequence
  GFR-binding peptide
  MOD_RES (1)..(2)..(34)..(36): Xaa is C or S
XXTPTKMSPISMLYKNDKQQIILKYHYGMVVDRXGX

SEQ ID NO: 70826 - protein, 41 aa, Artificial Sequence
  GFR-binding peptide
  MOD_RES (4)..(5)..(39)..(41): Xaa is C or S
  MOD_RES (19)..(20)..(21)..(22)..(23): Xaa is A or G
  MOD_RES (24)..(25)..(26)..(27): Xaa is A or G or is absent
AGPXXTPTKMEPISMLYLXXXXXXXXXKFKYEGMVVDRXGX

SEQ ID NO: 70827 - protein, 38 aa, Artificial Sequence; identical to SEQ ID NO: 29849
  GFR-binding peptide
  MOD_RES (5)..(6)..(38): Xaa is C or S

SEQ ID NO: 70828 - protein, 38 aa, Artificial Sequence; identical to SEQ ID NO: 8542
  GFR-binding peptide
  MOD_RES (2)..(3)..(35)..(37): Xaa is C or S

SEQ ID NO: 70829 - protein, 35 aa, Artificial Sequence; identical to SEQ ID NO: 29858
  GFR-binding peptide
  MOD_RES (32)..(34): Xaa is C or S

SEQ ID NO: 70830 - protein, 32 aa, Artificial Sequence
  GFR-binding peptide
  MOD_RES (31)..(31): Xaa is C or S
APVKTSATSMLYYDNGRVLLLRKHRMIVEEXG

SEQ ID NO: 70831 - protein, 38 aa, Artificial Sequence
  GFR-binding peptide
  MOD_RES (2)..(3)..(35)..(37): Xaa is C or S
PXXTPTKMSATSMLYYNDKQQIILRKHRGMVVDRXGXS

SEQ ID NO: 70832 - protein, 41 aa, Artificial Sequence; identical to SEQ ID NO: 29859
  GFR-binding peptide
  MOD_RES (4)..(5)..(39)..(41): Xaa is C or S
  MOD_RES (19)..(20)..(21)..(22)..(23): Xaa is A or G
  MOD_RES (24)..(25)..(26)..(27): Xaa is A or G or is absent

SEQ ID NO: 70833 - protein, 36 aa, Artificial Sequence; identical to SEQ ID NO: 29860
  GFR-binding peptide
  MOD_RES (34)..(36): Xaa is C or S
  MOD_RES (14)..(15)..(16)..(17)..(18): Xaa is A or G
  MOD_RES (19)..(20)..(21)..(22): Xaa is A or G or is absent

SEQ ID NO: 70834 - protein, 37 aa, Artificial Sequence
  GFR-binding peptide
  MOD_RES (1)..(2)..(36): Xaa is C or S
  MOD_RES (16)..(17)..(18)..(19)..(20): Xaa is A or G
  MOD_RES (21)..(22)..(23)..(24): Xaa is A or G or is absent
XXVPTRLSATSILYYXXXXXXXXXLRKHRDMVVESXG

SEQ ID NO: 70835 - protein, 40 aa, Artificial Sequence; identical to SEQ ID NO: 29863
  GFR-binding peptide
  MOD_RES (2)..(3)..(37)..(39): Xaa is C or S
  MOD_RES (17)..(18)..(19)..(20)..(21): Xaa is A or G
  MOD_RES (22)..(23)..(24)..(25): Xaa is A or G or is absent

SEQ ID NO: 70836 - protein, 38 aa, Artificial Sequence; identical to SEQ ID NO: 29864
  GFR-binding peptide
  MOD_RES (5)..(6)..(38): Xaa is C or S

SEQ ID NO: 70837 - protein, 32 aa, Artificial Sequence; identical to SEQ ID NO: 32994
  GFR-binding peptide
  MOD_RES (32)..(32): Xaa is C or S

SEQ ID NO: 70838 - protein, 40 aa, Artificial Sequence; identical to SEQ ID NO: 32996
  GFR-binding peptide
  MOD_RES (6)..(7)..(40): Xaa is C or S
  MOD_RES (21)..(22)..(23)..(24)..(25): Xaa is A or G
  MOD_RES (26)..(27)..(28)..(29): Xaa is A or G or is absent

SEQ ID NO: 70839 - protein, 35 aa, Artificial Sequence; identical to SEQ ID NO: 29866
  GFR-binding peptide
  MOD_RES (1)..(2): Xaa is C or S
  MOD_RES (16)..(17)..(18)..(19)..(20): Xaa is A or G
  MOD_RES (21)..(22)..(23)..(24): Xaa is A or G or is absent

SEQ ID NO: 70840 - protein, 36 aa, Artificial Sequence; identical to SEQ ID NO: 29873
  GFR-binding peptide
  MOD_RES (2)..(34)..(36): Xaa is C or S

SEQ ID NO: 70841 - protein, 36 aa, Artificial Sequence; identical to SEQ ID NO: 8565
  GFR-binding peptide
  MOD_RES (1)..(34)..(36): Xaa is C or S

SEQ ID NO: 70842 - protein, 39 aa, Artificial Sequence; identical to SEQ ID NO: 29878
  GFR-binding peptide
  MOD_RES (6)..(7): Xaa is C or S
  MOD_RES (21)..(22)..(23)..(24)..(25): Xaa is A or G
  MOD_RES (26)..(27)..(28)..(29): Xaa is A or G or is absent

SEQ ID NO: 70843 - protein, 34 aa, Artificial Sequence; identical to SEQ ID NO: 33006
  GFR-binding peptide
  MOD_RES (2)..(3): Xaa is C or S

SEQ ID NO: 70844 - protein, 37 aa, Artificial Sequence; identical to SEQ ID NO: 29881
  GFR-binding peptide
  MOD_RES (2)..(3)..(37): Xaa is C or S
  MOD_RES (17)..(18)..(19)..(20)..(21): Xaa is A or G
  MOD_RES (22)..(23)..(24)..(25): Xaa is A or G or is absent

SEQ ID NO: 70845 - protein, 34 aa, Artificial Sequence
  GFR-binding peptide
  MOD_RES (3)..(4): Xaa is C or S
EPXXVPEKMNAISILYFDENKNVVLKKYRNMTVE

SEQ ID NO: 70846 - protein, 41 aa, Artificial Sequence; identical to SEQ ID NO: 29883
  GFR-binding peptide
  MOD_RES (5)..(6)..(38)..(40): Xaa is C or S

SEQ ID NO: 70847 - protein, 38 aa, Artificial Sequence
  GFR-binding peptide
  MOD_RES (2)..(3)..(37): Xaa is C or S
  MOD_RES (17)..(18)..(19)..(20)..(21): Xaa is A or G
  MOD_RES (22)..(23)..(24)..(25): Xaa is A or G or is absent
TXXVPTRLSATSILYYXXXXXXXXXLRKHRDMVVESXG

SEQ ID NO: 70848 - protein, 36 aa, Artificial Sequence; identical to SEQ ID NO: 29888
  GFR-binding peptide
  MOD_RES (3)..(4)..(35): Xaa is C or S

SEQ ID NO: 70849 - protein, 37 aa, Artificial Sequence
  GFR-binding peptide
  MOD_RES (1)..(35)..(37): Xaa is C or S
  MOD_RES (15)..(16)..(17)..(18)..(19): Xaa is A or G
  MOD_RES (20)..(21)..(22)..(23): Xaa is A or G or is absent
XVPTKLSATSILYYXXXXXXXXXLRKHRGMAVSEXGX

SEQ ID NO: 70850 - protein, 39 aa, Artificial Sequence; identical to SEQ ID NO: 33022
  GFR-binding peptide
  MOD_RES (4)..(5)..(38): Xaa is C or S

SEQ ID NO: 70851 - protein, 37 aa, Artificial Sequence
  GFR-binding peptide
  MOD_RES (3)..(4)..(36): Xaa is C or S
ASXXVPARLSATSILYYDAANNVVLRKHRDMVVEAXG

SEQ ID NO: 70852 - protein, 41 aa, Artificial Sequence; identical to SEQ ID NO: 8571
  GFR-binding peptide
  MOD_RES (6)..(7)..(39)..(41): Xaa is C or S

SEQ ID NO: 70853 - protein, 38 aa, Artificial Sequence
  GFR-binding peptide
  MOD_RES (1)..(2)..(36)..(38): Xaa is C or S
  MOD_RES (16)..(17)..(18)..(19)..(20): Xaa is A or G
  MOD_RES (21)..(22)..(23)..(24): Xaa is A or G or is absent
XXTPTKMEPISMLYLXXXXXXXXXKFKYEGMVVDRXGX

SEQ ID NO: 70854 - protein, 36 aa, Artificial Sequence; identical to SEQ ID NO: 8572
  GFR-binding peptide
  MOD_RES (5)..(6): Xaa is C or S

SEQ ID NO: 70855 - protein, 40 aa, Artificial Sequence; identical to SEQ ID NO: 8573
  GFR-binding peptide
  MOD_RES (4)..(5)..(37)..(39): Xaa is C or S

SEQ ID NO: 70856 - protein, 40 aa, Artificial Sequence; identical to SEQ ID NO: 8578
  GFR-binding peptide
  MOD_RES (1)..(2)..(37)..(39): Xaa is C or S
  MOD_RES (16)..(17)..(18)..(19)..(20): Xaa is A or G
  MOD_RES (21)..(22)..(23)..(24): Xaa is A or G or is absent

SEQ ID NO: 70857 - protein, 41 aa, Artificial Sequence
  GFR-binding peptide
  MOD_RES (4)..(5)..(38)..(40): Xaa is C or S
  MOD_RES (19)..(20)..(21)..(22)..(23): Xaa is A or G
  MOD_RES (24)..(25)..(26)..(27): Xaa is A or G or is absent
PSTXXAPVKTEPISMLYLXXXXXXXXXKFKYEMIVEEXGXL

SEQ ID NO: 70858 - protein, 32 aa, Artificial Sequence
  GFR-binding peptide
  MOD_RES (14)..(15)..(16)..(17)..(18): Xaa is A or G
  MOD_RES (19)..(20)..(21)..(22): Xaa is A or G or is absent
VPEKMSPISILYKXXXXXXXXXLKYHYNMTVE

SEQ ID NO: 70859 - protein, 34 aa, Artificial Sequence; identical to SEQ ID NO: 8582
  GFR-binding peptide
  MOD_RES (2)..(3): Xaa is C or S

SEQ ID NO: 70860 - protein, 34 aa, Artificial Sequence; identical to SEQ ID NO: 33039
  GFR-binding peptide
  MOD_RES (32)..(34): Xaa is C or S

SEQ ID NO: 70861 - protein, 38 aa, Artificial Sequence; identical to SEQ ID NO: 33040
  GFR-binding peptide
  MOD_RES (5)..(6)..(38): Xaa is C or S

SEQ ID NO: 70862 - protein, 37 aa, Artificial Sequence; identical to SEQ ID NO: 8584
  GFR-binding peptide
  MOD_RES (1)..(35)..(37): Xaa is C or S
  MOD_RES (15)..(16)..(17)..(18)..(19): Xaa is A or G
  MOD_RES (20)..(21)..(22)..(23): Xaa is A or G or is absent

SEQ ID NO: 70863 - protein, 36 aa, Artificial Sequence
  GFR-binding peptide
  MOD_RES (1)..(2)..(36): Xaa is C or S
  MOD_RES (16)..(17)..(18)..(19)..(20): Xaa is A or G
  MOD_RES (21)..(22)..(23)..(24): Xaa is A or G or is absent
XXVPTRLEPISILYLXXXXXXXXXKFKYEDMVVESX

SEQ ID NO: 70864 - protein, 38 aa, Artificial Sequence; identical to SEQ ID NO: 29909
  GFR-binding peptide
  MOD_RES (6)..(7): Xaa is C or S

SEQ ID NO: 70865 - protein, 34 aa, Artificial Sequence; identical to SEQ ID NO: 29911
  GFR-binding peptide
  MOD_RES (34)..(34): Xaa is C or S
  MOD_RES (14)..(15)..(16)..(17)..(18): Xaa is A or G
  MOD_RES (19)..(20)..(21)..(22): Xaa is A or G or is absent

SEQ ID NO: 70866 - protein, 31 aa, Artificial Sequence; identical to SEQ ID NO: 8589
  GFR-binding peptide
  MOD_RES (1)..(1): Xaa is C or S

SEQ ID NO: 70867 - protein, 41 aa, Artificial Sequence; identical to SEQ ID NO: 33046
  GFR-binding peptide
  MOD_RES (6)..(7)..(39)..(41): Xaa is C or S

SEQ ID NO: 70868 - protein, 39 aa, Artificial Sequence; identical to SEQ ID NO: 33047
  GFR-binding peptide
  MOD_RES (6)..(7): Xaa is C or S
  MOD_RES (21)..(22)..(23)..(24)..(25): Xaa is A or G
  MOD_RES (26)..(27)..(28)..(29): Xaa is A or G or is absent

SEQ ID NO: 70869 - protein, 37 aa, Artificial Sequence; identical to SEQ ID NO: 8590
  GFR-binding peptide
  MOD_RES (3)..(4)..(35)..(37): Xaa is C or S

SEQ ID NO: 70870 - protein, 41 aa, Artificial Sequence
  GFR-binding peptide
  MOD_RES (6)..(7)..(41): Xaa is C or S
  MOD_RES (21)..(22)..(23)..(24)..(25): Xaa is A or G
  MOD_RES (26)..(27)..(28)..(29): Xaa is A or G or is absent
GIPEPXXVPEKMNAISILYFXXXXXXXXXLKKYRNMTVESX

SEQ ID NO: 70871 - protein, 41 aa, Artificial Sequence; identical to SEQ ID NO: 29918
  GFR-binding peptide
  MOD_RES (4)..(5)..(39)..(41): Xaa is C or S
  MOD_RES (19)..(20)..(21)..(22)..(23): Xaa is A or G
  MOD_RES (24)..(25)..(26)..(27): Xaa is A or G or is absent

SEQ ID NO: 70872 - protein, 34 aa, Artificial Sequence
  GFR-binding peptide
  MOD_RES (1)..(33): Xaa is C or S
XTPTKMEPISMLYLNDKQQIIKFKYEGMVVDRXG

SEQ ID NO: 70873 - protein, 39 aa, Artificial Sequence; identical to SEQ ID NO: 8592
  GFR-binding peptide
  MOD_RES (2)..(3)..(36)..(38): Xaa is C or S
  MOD_RES (17)..(18)..(19)..(20)..(21): Xaa is A or G
  MOD_RES (22)..(23)..(24)..(25): Xaa is A or G or is absent

SEQ ID NO: 70874 - protein, 35 aa, Artificial Sequence; identical to SEQ ID NO: 8594
  GFR-binding peptide
  MOD_RES (1)..(34): Xaa is C or S
  MOD_RES (15)..(16)..(17)..(18)..(19): Xaa is A or G
  MOD_RES (20)..(21)..(22)..(23): Xaa is A or G or is absent

SEQ ID NO: 70875 - protein, 33 aa, Artificial Sequence
  GFR-binding peptide
  MOD_RES (1)..(1): Xaa is C or S
  MOD_RES (15)..(16)..(17)..(18)..(19): Xaa is A or G
  MOD_RES (20)..(21)..(22)..(23): Xaa is A or G or is absent
XVPTRLSATSILYYXXXXXXXXXLRKHRDMVVE

SEQ ID NO: 70876 - protein, 37 aa, Artificial Sequence; identical to SEQ ID NO: 33054
  GFR-binding peptide
  MOD_RES (1)..(2)..(36): Xaa is C or S
  MOD_RES (16)..(17)..(18)..(19)..(20): Xaa is A or G
  MOD_RES (21)..(22)..(23)..(24): Xaa is A or G or is absent

SEQ ID NO: 70877 - protein, 30 aa, Artificial Sequence
  GFR-binding peptide
VPTRLSPISILYKDSANNVVLKYHYDMVVE

SEQ ID NO: 70878 - protein, 42 aa, Artificial Sequence; identical to SEQ ID NO: 8599
  GFR-binding peptide
  MOD_RES (6)..(7)..(41): Xaa is C or S
  MOD_RES (21)..(22)..(23)..(24)..(25): Xaa is A or G
  MOD_RES (26)..(27)..(28)..(29): Xaa is A or G or is absent

SEQ ID NO: 70879 - protein, 39 aa, Artificial Sequence
  GFR-binding peptide
  MOD_RES (4)..(5)..(38): Xaa is C or S
  MOD_RES (19)..(20)..(21)..(22)..(23): Xaa is A or G
  MOD_RES (24)..(25)..(26)..(27): Xaa is A or G or is absent
PSTXXAPVKTSATSMLYYXXXXXXXXXLRKHRMIVEEXG

SEQ ID NO: 70880 - protein, 40 aa, Artificial Sequence; identical to SEQ ID NO: 8600
  GFR-binding peptide
  MOD_RES (6)..(7): Xaa is C or S
  MOD_RES (21)..(22)..(23)..(24)..(25): Xaa is A or G
  MOD_RES (26)..(27)..(28)..(29): Xaa is A or G or is absent

SEQ ID NO: 70881 - protein, 36 aa, Artificial Sequence; identical to SEQ ID NO: 29931
  GFR-binding peptide
  MOD_RES (3)..(3): Xaa is C or S
  MOD_RES (17)..(18)..(19)..(20)..(21): Xaa is A or G
  MOD_RES (22)..(23)..(24)..(25): Xaa is A or G or is absent

SEQ ID NO: 70882 - protein, 35 aa, Artificial Sequence; identical to SEQ ID NO: 29932
  GFR-binding peptide
  MOD_RES (1)..(35): Xaa is C or S
  MOD_RES (15)..(16)..(17)..(18)..(19): Xaa is A or G
  MOD_RES (20)..(21)..(22)..(23): Xaa is A or G or is absent

SEQ ID NO: 70883 - protein, 38 aa, Artificial Sequence; identical to SEQ ID NO: 8602
  GFR-binding peptide
  MOD_RES (1)..(35)..(37): Xaa is C or S
  MOD_RES (15)..(16)..(17)..(18)..(19): Xaa is A or G
  MOD_RES (20)..(21)..(22)..(23): Xaa is A or G or is absent

SEQ ID NO: 70884 - protein, 40 aa, Artificial Sequence; identical to SEQ ID NO: 8603
  GFR-binding peptide
  MOD_RES (4)..(5)..(39): Xaa is C or S
  MOD_RES (19)..(20)..(21)..(22)..(23): Xaa is A or G
  MOD_RES (24)..(25)..(26)..(27): Xaa is A or G or is absent

SEQ ID NO: 70885 - protein, 36 aa, Artificial Sequence; identical to SEQ ID NO: 29935
  GFR-binding peptide
  MOD_RES (1)..(35): Xaa is C or S
  MOD_RES (15)..(16)..(17)..(18)..(19): Xaa is A or G
  MOD_RES (20)..(21)..(22)..(23): Xaa is A or G or is absent

SEQ ID NO: 70886 - protein, 42 aa, Artificial Sequence; identical to SEQ ID NO: 33060
  GFR-binding peptide
  MOD_RES (6)..(7)..(39)..(41): Xaa is C or S

SEQ ID NO: 70887 - protein, 32 aa, Artificial Sequence
  GFR-binding peptide
  MOD_RES (14)..(15)..(16)..(17)..(18): Xaa is A or G
  MOD_RES (19)..(20)..(21)..(22): Xaa is A or G or is absent
APVKTSPISMLYKXXXXXXXXXLKYHYMIVEE

SEQ ID NO: 70888 - protein, 42 aa, Artificial Sequence; identical to SEQ ID NO: 57953
  GFR-binding peptide
  MOD_RES (5)..(6)..(40)..(42): Xaa is C or S
  MOD_RES (20)..(21)..(22)..(23)..(24): Xaa is A or G
  MOD_RES (25)..(26)..(27)..(28): Xaa is A or G or is absent

SEQ ID NO: 70889 - protein, 39 aa, Artificial Sequence; identical to SEQ ID NO: 8610
  GFR-binding peptide
  MOD_RES (6)..(7)..(38): Xaa is C or S

SEQ ID NO: 70890 - protein, 38 aa, Artificial Sequence; identical to SEQ ID NO: 8613
  GFR-binding peptide
  MOD_RES (3)..(4)..(37): Xaa is C or S
  MOD_RES (18)..(19)..(20)..(21)..(22): Xaa is A or G
  MOD_RES (23)..(24)..(25)..(26): Xaa is A or G or is absent

SEQ ID NO: 70891 - protein, 34 aa, Artificial Sequence; identical to SEQ ID NO: 33067
  GFR-binding peptide
  MOD_RES (1)..(1): Xaa is C or S
  MOD_RES (15)..(16)..(17)..(18)..(19): Xaa is A or G
  MOD_RES (20)..(21)..(22)..(23): Xaa is A or G or is absent

SEQ ID NO: 70892 - protein, 33 aa, Artificial Sequence
  GFR-binding peptide
  MOD_RES (14)..(15)..(16)..(17)..(18): Xaa is A or G
  MOD_RES (19)..(20)..(21)..(22): Xaa is A or G or is absent
VPEKMSATSILYYXXXXXXXXXLRKHRNMTVES

SEQ ID NO: 70893 - protein, 43 aa, Artificial Sequence; identical to SEQ ID NO: 29947
  GFR-binding peptide
  MOD_RES (6)..(40)..(42): Xaa is C or S
  MOD_RES (20)..(21)..(22)..(23)..(24): Xaa is A or G
  MOD_RES (25)..(26)..(27)..(28): Xaa is A or G or is absent

SEQ ID NO: 70894 - protein, 42 aa, Artificial Sequence
  GFR-binding peptide
  MOD_RES (6)..(7)..(39)..(41): Xaa is C or S
GSAGPXXTPTKMSPISMLYKNDKQQIILKYHYGMVVDRXGXS

SEQ ID NO: 70895 - protein, 38 aa, Artificial Sequence; identical to SEQ ID NO: 8616
  GFR-binding peptide
  MOD_RES (2)..(36)..(38): Xaa is C or S
  MOD_RES (16)..(17)..(18)..(19)..(20): Xaa is A or G
  MOD_RES (21)..(22)..(23)..(24): Xaa is A or G or is absent

SEQ ID NO: 70896 - protein, 36 aa, Artificial Sequence; identical to SEQ ID NO: 8617
  GFR-binding peptide
  MOD_RES (3)..(4)..(36): Xaa is C or S

SEQ ID NO: 70897 - protein, 38 aa, Artificial Sequence; identical to SEQ ID NO: 29951
  GFR-binding peptide
  MOD_RES (5)..(6)..(38): Xaa is C or S

SEQ ID NO: 70898 - protein, 36 aa, Artificial Sequence; identical to SEQ ID NO: 8619
  GFR-binding peptide
  MOD_RES (5)..(6): Xaa is C or S

SEQ ID NO: 70899 - protein, 37 aa, Artificial Sequence; identical to SEQ ID NO: 29954
  GFR-binding peptide
  MOD_RES (4)..(5): Xaa is C or S
  MOD_RES (19)..(20)..(21)..(22)..(23): Xaa is A or G
  MOD_RES (24)..(25)..(26)..(27): Xaa is A or G or is absent

SEQ ID NO: 70900 - protein, 32 aa, Artificial Sequence; identical to SEQ ID NO: 29955
  GFR-binding peptide
  MOD_RES (1)..(1): Xaa is C or S

SEQ ID NO: 70901 - protein, 38 aa, Artificial Sequence; identical to SEQ ID NO: 8621
  GFR-binding peptide
  MOD_RES (5)..(6): Xaa is C or S
  MOD_RES (20)..(21)..(22)..(23)..(24): Xaa is A or G
  MOD_RES (25)..(26)..(27)..(28): Xaa is A or G or is absent

SEQ ID NO: 70902 - protein, 35 aa, Artificial Sequence; identical to SEQ ID NO: 29958
  GFR-binding peptide
  MOD_RES (1)..(35): Xaa is C or S
  MOD_RES (15)..(16)..(17)..(18)..(19): Xaa is A or G
  MOD_RES (20)..(21)..(22)..(23): Xaa is A or G or is absent

SEQ ID NO: 70903 - protein, 44 aa, Artificial Sequence; identical to SEQ ID NO: 33074
  GFR-binding peptide
  MOD_RES (6)..(7)..(41)..(43): Xaa is C or S
  MOD_RES (21)..(22)..(23)..(24)..(25): Xaa is A or G
  MOD_RES (26)..(27)..(28)..(29): Xaa is A or G or is absent

SEQ ID NO: 70904 - protein, 38 aa, Artificial Sequence; identical to SEQ ID NO: 33075
  GFR-binding peptide
  MOD_RES (1)..(2)..(36)..(38): Xaa is C or S
  MOD_RES (16)..(17)..(18)..(19)..(20): Xaa is A or G
  MOD_RES (21)..(22)..(23)..(24): Xaa is A or G or is absent

SEQ ID NO: 70905 - protein, 34 aa, Artificial Sequence; identical to SEQ ID NO: 8626
  GFR-binding peptide
  MOD_RES (1)..(2)..(33): Xaa is C or S

SEQ ID NO: 70906 - protein, 37 aa, Artificial Sequence; identical to SEQ ID NO: 57969
  GFR-binding peptide
  MOD_RES (1)..(34)..(36): Xaa is C or S
  MOD_RES (15)..(16)..(17)..(18)..(19): Xaa is A or G
  MOD_RES (20)..(21)..(22)..(23): Xaa is A or G or is absent

SEQ ID NO: 70907 - protein, 31 aa, Artificial Sequence; identical to SEQ ID NO: 33081
  GFR-binding peptide
  MOD_RES (1)..(1): Xaa is C or S

SEQ ID NO: 70908 - protein, 34 aa, Artificial Sequence
  GFR-binding peptide
  MOD_RES (34)..(34): Xaa is C or S
  MOD_RES (14)..(15)..(16)..(17)..(18): Xaa is A or G
  MOD_RES (19)..(20)..(21)..(22): Xaa is A or G or is absent
VPEKMSPINILYFXXXXXXXXXYGKIPNMTVESX

SEQ ID NO: 70909 - protein, 33 aa, Artificial Sequence; identical to SEQ ID NO: 33090
  GFR-binding peptide
  MOD_RES (1)..(2): Xaa is C or S

SEQ ID NO: 70910 - protein, 38 aa, Artificial Sequence; identical to SEQ ID NO: 8628
  GFR-binding peptide
  MOD_RES (1)..(36)..(38): Xaa is C or S
  MOD_RES (15)..(16)..(17)..(18)..(19): Xaa is A or G
  MOD_RES (20)..(21)..(22)..(23): Xaa is A or G or is absent

SEQ ID NO: 70911 - protein, 37 aa, Artificial Sequence
  GFR-binding peptide
  MOD_RES (3)..(4)..(36): Xaa is C or S
EPXXVPEKMNAISILYFDENKNVVLKKYRNMTVESXA

SEQ ID NO: 70912 - protein, 36 aa, Artificial Sequence; identical to SEQ ID NO: 8629
  GFR-binding peptide
  MOD_RES (34)..(36): Xaa is C or S
  MOD_RES (14)..(15)..(16)..(17)..(18): Xaa is A or G
  MOD_RES (19)..(20)..(21)..(22): Xaa is A or G or is absent

SEQ ID NO: 70913 - protein, 38 aa, Artificial Sequence; identical to SEQ ID NO: 8630
  GFR-binding peptide
  MOD_RES (1)..(2)..(36)..(38): Xaa is C or S
  MOD_RES (16)..(17)..(18)..(19)..(20): Xaa is A or G
  MOD_RES (21)..(22)..(23)..(24): Xaa is A or G or is absent

SEQ ID NO: 70914 - protein, 37 aa, Artificial Sequence; identical to SEQ ID NO: 8631
  GFR-binding peptide
  MOD_RES (1)..(34)..(36): Xaa is C or S
  MOD_RES (15)..(16)..(17)..(18)..(19): Xaa is A or G
  MOD_RES (20)..(21)..(22)..(23): Xaa is A or G or is absent

SEQ ID NO: 70915 - protein, 39 aa, Artificial Sequence; identical to SEQ ID NO: 33095
  GFR-binding peptide
  MOD_RES (6)..(7): Xaa is C or S
  MOD_RES (21)..(22)..(23)..(24)..(25): Xaa is A or G
  MOD_RES (26)..(27)..(28)..(29): Xaa is A or G or is absent

SEQ ID NO: 70916 - protein, 36 aa, Artificial Sequence; identical to SEQ ID NO: 29969
  GFR-binding peptide
  MOD_RES (3)..(4)..(36): Xaa is C or S

SEQ ID NO: 70917 - protein, 40 aa, Artificial Sequence; identical to SEQ ID NO: 8635
  GFR-binding peptide
  MOD_RES (4)..(5)..(39): Xaa is C or S
  MOD_RES (19)..(20)..(21)..(22)..(23): Xaa is A or G
  MOD_RES (24)..(25)..(26)..(27): Xaa is A or G or is absent

SEQ ID NO: 70918 - protein, 36 aa, Artificial Sequence; identical to SEQ ID NO: 33100
  GFR-binding peptide
  MOD_RES (1)..(2)..(34)..(36): Xaa is C or S

SEQ ID NO: 70919 - protein, 36 aa, Artificial Sequence; identical to SEQ ID NO: 33102
  GFR-binding peptide
  MOD_RES (1)..(33)..(35): Xaa is C or S

SEQ ID NO: 70920 - protein, 35 aa, Artificial Sequence; identical to SEQ ID NO: 8637
  GFR-binding peptide
  MOD_RES (2)..(3)..(35): Xaa is C or S

SEQ ID NO: 70921 - protein, 41 aa, Artificial Sequence; identical to SEQ ID NO: 8638
  GFR-binding peptide
  MOD_RES (6)..(7): Xaa is C or S
  MOD_RES (21)..(22)..(23)..(24)..(25): Xaa is A or G
  MOD_RES (26)..(27)..(28)..(29): Xaa is A or G or is absent

SEQ ID NO: 70922 - protein, 37 aa, Artificial Sequence; identical to SEQ ID NO: 8639
  GFR-binding peptide
  MOD_RES (1)..(34)..(36): Xaa is C or S
  MOD_RES (15)..(16)..(17)..(18)..(19): Xaa is A or G
  MOD_RES (20)..(21)..(22)..(23): Xaa is A or G or is absent

SEQ ID NO: 70923 - protein, 36 aa, Artificial Sequence
  GFR-binding peptide
  MOD_RES (3)..(4)..(36): Xaa is C or S
EPXXVPEKMSPISILYKDENKNVVLKYHYNMTVESX

SEQ ID NO: 70924 - protein, 32 aa, Artificial Sequence; identical to SEQ ID NO: 29973
  GFR-binding peptide
  MOD_RES (31)..(31): Xaa is C or S

SEQ ID NO: 70925 - protein, 42 aa, Artificial Sequence
  GFR-binding peptide
  MOD_RES (5)..(6)..(40)..(42): Xaa is C or S
  MOD_RES (20)..(21)..(22)..(23)..(24): Xaa is A or G
  MOD_RES (25)..(26)..(27)..(28): Xaa is A or G or is absent
SAGPXXTPTKMEPISMLYLXXXXXXXXXKFKYEGMVVDRXGX

SEQ ID NO: 70926 - protein, 33 aa, Artificial Sequence; identical to SEQ ID NO: 29976
  GFR-binding peptide
  MOD_RES (1)..(2)..(33): Xaa is C or S

SEQ ID NO: 70927 - protein, 37 aa, Artificial Sequence; identical to SEQ ID NO: 29979
  GFR-binding peptide
  MOD_RES (1)..(34)..(36): Xaa is C or S
  MOD_RES (15)..(16)..(17)..(18)..(19): Xaa is A or G
  MOD_RES (20)..(21)..(22)..(23): Xaa is A or G or is absent

SEQ ID NO: 70928 - protein, 31 aa, Artificial Sequence; identical to SEQ ID NO: 8641
  GFR-binding peptide

SEQ ID NO: 70929 - protein, 42 aa, Artificial Sequence; identical to SEQ ID NO: 8642
  GFR-binding peptide
  MOD_RES (5)..(6)..(40)..(42): Xaa is C or S
  MOD_RES (20)..(21)..(22)..(23)..(24): Xaa is A or G
  MOD_RES (25)..(26)..(27)..(28): Xaa is A or G or is absent

SEQ ID NO: 70930 - protein, 33 aa, Artificial Sequence; identical to SEQ ID NO: 8643
  GFR-binding peptide
  MOD_RES (1)..(32): Xaa is C or S

SEQ ID NO: 70931 - protein, 33 aa, Artificial Sequence; identical to SEQ ID NO: 8645
  GFR-binding peptide
  MOD_RES (1)..(2): Xaa is C or S

SEQ ID NO: 70932 - protein, 37 aa, Artificial Sequence; identical to SEQ ID NO: 29986
  GFR-binding peptide
  MOD_RES (3)..(4): Xaa is C or S
  MOD_RES (18)..(19)..(20)..(21)..(22): Xaa is A or G
  MOD_RES (23)..(24)..(25)..(26): Xaa is A or G or is absent

SEQ ID NO: 70933 - protein, 43 aa, Artificial Sequence; identical to SEQ ID NO: 29987
  GFR-binding peptide
  MOD_RES (6)..(7)..(42): Xaa is C or S
  MOD_RES (21)..(22)..(23)..(24)..(25): Xaa is A or G
  MOD_RES (26)..(27)..(28)..(29): Xaa is A or G or is absent

SEQ ID NO: 70934 - protein, 40 aa, Artificial Sequence; identical to SEQ ID NO: 15943
  GFR-binding peptide
  MOD_RES (4)..(5)..(39): Xaa is C or S
  MOD_RES (19)..(20)..(21)..(22)..(23): Xaa is A or G
  MOD_RES (24)..(25)..(26)..(27): Xaa is A or G or is absent

SEQ ID NO: 70935 - protein, 38 aa, Artificial Sequence; identical to SEQ ID NO: 33112
  GFR-binding peptide
  MOD_RES (3)..(4)..(38): Xaa is C or S
  MOD_RES (18)..(19)..(20)..(21)..(22): Xaa is A or G
  MOD_RES (23)..(24)..(25)..(26): Xaa is A or G or is absent

SEQ ID NO: 70936 - protein, 37 aa, Artificial Sequence; identical to SEQ ID NO: 8647
  GFR-binding peptide
  MOD_RES (3)..(4)..(36): Xaa is C or S

SEQ ID NO: 70937 - protein, 36 aa, Artificial Sequence; identical to SEQ ID NO: 8648
  GFR-binding peptide
  MOD_RES (2)..(3)..(35): Xaa is C or S

SEQ ID NO: 70938 - protein, 41 aa, Artificial Sequence; identical to SEQ ID NO: 33114
  GFR-binding peptide
  MOD_RES (6)..(7)..(41): Xaa is C or S
  MOD_RES (21)..(22)..(23)..(24)..(25): Xaa is A or G
  MOD_RES (26)..(27)..(28)..(29): Xaa is A or G or is absent

SEQ ID NO: 70939 - protein, 37 aa, Artificial Sequence; identical to SEQ ID NO: 33116
  GFR-binding peptide
  MOD_RES (1)..(2)..(36): Xaa is C or S
  MOD_RES (16)..(17)..(18)..(19)..(20): Xaa is A or G
  MOD_RES (21)..(22)..(23)..(24): Xaa is A or G or is absent

SEQ ID NO: 70940 - protein, 41 aa, Artificial Sequence; identical to SEQ ID NO: 57997
  GFR-binding peptide
  MOD_RES (6)..(7)..(41): Xaa is C or S
  MOD_RES (21)..(22)..(23)..(24)..(25): Xaa is A or G
  MOD_RES (26)..(27)..(28)..(29): Xaa is A or G or is absent

SEQ ID NO: 70941 - protein, 36 aa, Artificial Sequence; identical to SEQ ID NO: 8653
  GFR-binding peptide
  MOD_RES (3)..(4): Xaa is C or S
  MOD_RES (18)..(19)..(20)..(21)..(22): Xaa is A or G
  MOD_RES (23)..(24)..(25)..(26): Xaa is A or G or is absent

SEQ ID NO: 70942 - protein, 35 aa, Artificial Sequence; identical to SEQ ID NO: 15950
  GFR-binding peptide
  MOD_RES (1)..(2)..(34): Xaa is C or S

SEQ ID NO: 70943 - protein, 34 aa, Artificial Sequence
  GFR-binding peptide
  MOD_RES (32)..(34): Xaa is C or S
VPEKMSATSILYYDENKNVVLRKHRNMTVESXAX

SEQ ID NO: 70944 - protein, 32 aa, Artificial Sequence; identical to SEQ ID NO: 8655
  GFR-binding peptide
  MOD_RES (14)..(15)..(16)..(17)..(18): Xaa is A or G
  MOD_RES (19)..(20)..(21)..(22): Xaa is A or G or is absent

SEQ ID NO: 70945 - protein, 38 aa, Artificial Sequence; identical to SEQ ID NO: 8657
  GFR-binding peptide
  MOD_RES (6)..(7)..(38): Xaa is C or S

SEQ ID NO: 70946 - protein, 38 aa, Artificial Sequence; identical to SEQ ID NO: 33125
  GFR-binding peptide
  MOD_RES (3)..(4)..(36)..(38): Xaa is C or S

SEQ ID NO: 70947 - protein, 31 aa, Artificial Sequence; identical to SEQ ID NO: 33129
  GFR-binding peptide

SEQ ID NO: 70948 - protein, 36 aa, Artificial Sequence; identical to SEQ ID NO: 8663
  GFR-binding peptide
  MOD_RES (1)..(2)..(33)..(35): Xaa is C or S

SEQ ID NO: 70949 - protein, 37 aa, Artificial Sequence; identical to SEQ ID NO: 30003
  GFR-binding peptide
  MOD_RES (3)..(4)..(36): Xaa is C or S

SEQ ID NO: 70950 - protein, 36 aa, Artificial Sequence; identical to SEQ ID NO: 30005
  GFR-binding peptide
  MOD_RES (2)..(3): Xaa is C or S
  MOD_RES (17)..(18)..(19)..(20)..(21): Xaa is A or G
  MOD_RES (22)..(23)..(24)..(25): Xaa is A or G or is absent

SEQ ID NO: 70951 - protein, 43 aa, Artificial Sequence; identical to SEQ ID NO: 8670
  GFR-binding peptide
  MOD_RES (6)..(7)..(41)..(43): Xaa is C or S
  MOD_RES (21)..(22)..(23)..(24)..(25): Xaa is A or G
  MOD_RES (26)..(27)..(28)..(29): Xaa is A or G or is absent

SEQ ID NO: 70952 - protein, 35 aa, Artificial Sequence; identical to SEQ ID NO: 58007
  GFR-binding peptide
  MOD_RES (2)..(3)..(34): Xaa is C or S

SEQ ID NO: 70953 - protein, 38 aa, Artificial Sequence; identical to SEQ ID NO: 8673
  GFR-binding peptide
  MOD_RES (2)..(3)..(37): Xaa is C or S
  MOD_RES (17)..(18)..(19)..(20)..(21): Xaa is A or G
  MOD_RES (22)..(23)..(24)..(25): Xaa is A or G or is absent

SEQ ID NO: 70954 - protein, 38 aa, Artificial Sequence; identical to SEQ ID NO: 8674
  GFR-binding peptide
  MOD_RES (3)..(4)..(35)..(37): Xaa is C or S

SEQ ID NO: 70955 - protein, 37 aa, Artificial Sequence
  GFR-binding peptide
  MOD_RES (1)..(2)..(34)..(36): Xaa is C or S
XXVPEKMSATSILYYDENKNVVLRKHRNMTVESXAXR

SEQ ID NO: 70956 - protein, 36 aa, Artificial Sequence; identical to SEQ ID NO: 33142
  GFR-binding peptide
  MOD_RES (4)..(5): Xaa is C or S

SEQ ID NO: 70957 - protein, 39 aa, Artificial Sequence; identical to SEQ ID NO: 33146
  GFR-binding peptide
  MOD_RES (2)..(3)..(37)..(39): Xaa is C or S
  MOD_RES (17)..(18)..(19)..(20)..(21): Xaa is A or G
  MOD_RES (22)..(23)..(24)..(25): Xaa is A or G or is absent

SEQ ID NO: 70958 - protein, 38 aa, Artificial Sequence
  GFR-binding peptide
  MOD_RES (3)..(4)..(38): Xaa is C or S
  MOD_RES (18)..(19)..(20)..(21)..(22): Xaa is A or G
  MOD_RES (23)..(24)..(25)..(26): Xaa is A or G or is absent
KAXXVPTKLSATSILYYXXXXXXXXXLRKHRGMAVSEX

SEQ ID NO: 70959 - protein, 36 aa, Artificial Sequence
  GFR-binding peptide
  MOD_RES (5)..(6): Xaa is C or S
SAAPXXVPQALSPINILYFVGRKPKVYGKIPMIVRS

SEQ ID NO: 70960 - protein, 38 aa, Artificial Sequence
  GFR-binding peptide
  MOD_RES (2)..(3)..(36)..(38): Xaa is C or S
  MOD_RES (17)..(18)..(19)..(20)..(21): Xaa is A or G
  MOD_RES (22)..(23)..(24)..(25): Xaa is A or G or is absent
TXXAPVKTEPISMLYLXXXXXXXXXKFKYEMIVEEXGX

SEQ ID NO: 70961 - protein, 39 aa, Artificial Sequence; identical to SEQ ID NO: 8676
  GFR-binding peptide
  MOD_RES (3)..(4)..(38): Xaa is C or S
  MOD_RES (18)..(19)..(20)..(21)..(22): Xaa is A or G
  MOD_RES (23)..(24)..(25)..(26): Xaa is A or G or is absent

SEQ ID NO: 70962 - protein, 38 aa, Artificial Sequence; identical to SEQ ID NO: 30015
  GFR-binding peptide
  MOD_RES (4)..(5): Xaa is C or S
  MOD_RES (19)..(20)..(21)..(22)..(23): Xaa is A or G
  MOD_RES (24)..(25)..(26)..(27): Xaa is A or G or is absent

SEQ ID NO: 70963 - protein, 36 aa, Artificial Sequence; identical to SEQ ID NO: 8677
  GFR-binding peptide
  MOD_RES (1)..(2): Xaa is C or S
  MOD_RES (16)..(17)..(18)..(19)..(20): Xaa is A or G
  MOD_RES (21)..(22)..(23)..(24): Xaa is A or G or is absent

SEQ ID NO: 70964 - protein, 35 aa, Artificial Sequence; identical to SEQ ID NO: 33154
  GFR-binding peptide
  MOD_RES (2)..(3): Xaa is C or S
  MOD_RES (17)..(18)..(19)..(20)..(21): Xaa is A or G
  MOD_RES (22)..(23)..(24)..(25): Xaa is A or G or is absent

SEQ ID NO: 70965 - protein, 37 aa, Artificial Sequence
  GFR-binding peptide
  MOD_RES (3)..(4): Xaa is C or S
  MOD_RES (18)..(19)..(20)..(21)..(22): Xaa is A or G
  MOD_RES (23)..(24)..(25)..(26): Xaa is A or G or is absent
EPXXVPEKMSATSILYYXXXXXXXXXLRKHRNMTVES

SEQ ID NO: 70966 - protein, 40 aa, Artificial Sequence; identical to SEQ ID NO: 33160
  GFR-binding peptide
  MOD_RES (6)..(7): Xaa is C or S
  MOD_RES (21)..(22)..(23)..(24)..(25): Xaa is A or G
  MOD_RES (26)..(27)..(28)..(29): Xaa is A or G or is absent

SEQ ID NO: 70967 - protein, 39 aa, Artificial Sequence; identical to SEQ ID NO: 15982
  GFR-binding peptide
  MOD_RES (3)..(4)..(38): Xaa is C or S
  MOD_RES (18)..(19)..(20)..(21)..(22): Xaa is A or G
  MOD_RES (23)..(24)..(25)..(26): Xaa is A or G or is absent

SEQ ID NO: 70968 - protein, 42 aa, Artificial Sequence; identical to SEQ ID NO: 30019
  GFR-binding peptide
  MOD_RES (5)..(6)..(39)..(41): Xaa is C or S
  MOD_RES (20)..(21)..(22)..(23)..(24): Xaa is A or G
  MOD_RES (25)..(26)..(27)..(28): Xaa is A or G or is absent

SEQ ID NO: 70969 - protein, 39 aa, Artificial Sequence; identical to SEQ ID NO: 15985
  GFR-binding peptide
  MOD_RES (4)..(5)..(37)..(39): Xaa is C or S

SEQ ID NO: 70970 - protein, 36 aa, Artificial Sequence; identical to SEQ ID NO: 8681
  GFR-binding peptide
  MOD_RES (3)..(4): Xaa is C or S
  MOD_RES (18)..(19)..(20)..(21)..(22): Xaa is A or G
  MOD_RES (23)..(24)..(25)..(26): Xaa is A or G or is absent

SEQ ID NO: 70971 - protein, 42 aa, Artificial Sequence; identical to SEQ ID NO: 8682
  GFR-binding peptide
  MOD_RES (6)..(7)..(40)..(42): Xaa is C or S
  MOD_RES (21)..(22)..(23)..(24)..(25): Xaa is A or G
  MOD_RES (26)..(27)..(28)..(29): Xaa is A or G or is absent

SEQ ID NO: 70972 - protein, 38 aa, Artificial Sequence
  GFR-binding peptide
  MOD_RES (2)..(3)..(36)..(38): Xaa is C or S
  MOD_RES (17)..(18)..(19)..(20)..(21): Xaa is A or G
  MOD_RES (22)..(23)..(24)..(25): Xaa is A or G or is absent
PXXVPQDLSPINILYFXXXXXXXXXYGKIPMVVKSXKX

SEQ ID NO: 70973 - protein, 43 aa, Artificial Sequence
  GFR-binding peptide
  MOD_RES (5)..(6)..(40)..(42): Xaa is C or S
  MOD_RES (20)..(21)..(22)..(23)..(24): Xaa is A or G
  MOD_RES (25)..(26)..(27)..(28): Xaa is A or G or is absent
SAGPXXTPTKMSATSMLYYXXXXXXXXXLRKHRGMVVDRXGXS

SEQ ID NO: 70974 - protein, 43 aa, Artificial Sequence; identical to SEQ ID NO: 8683
  GFR-binding peptide
  MOD_RES (6)..(7)..(41)..(43): Xaa is C or S
  MOD_RES (21)..(22)..(23)..(24)..(25): Xaa is A or G
  MOD_RES (26)..(27)..(28)..(29): Xaa is A or G or is absent

SEQ ID NO: 70975 - protein, 39 aa, Artificial Sequence; identical to SEQ ID NO: 33171
  GFR-binding peptide
  MOD_RES (5)..(6)..(38): Xaa is C or S

SEQ ID NO: 70976 - protein, 36 aa, Artificial Sequence
  GFR-binding peptide
  MOD_RES (33)..(35): Xaa is C or S
  MOD_RES (14)..(15)..(16)..(17)..(18): Xaa is A or G
  MOD_RES (19)..(20)..(21)..(22): Xaa is A or G or is absent
APVKTSPISMLYKXXXXXXXXXLKYHYMIVEEXGXL

SEQ ID NO: 70977 - protein, 35 aa, Artificial Sequence; identical to SEQ ID NO: 8688
  GFR-binding peptide
  MOD_RES (1)..(2)..(34): Xaa is C or S

SEQ ID NO: 70978 - protein, 34 aa, Artificial Sequence; identical to SEQ ID NO: 30029
  GFR-binding peptide
  MOD_RES (1)..(1): Xaa is C or S
  MOD_RES (15)..(16)..(17)..(18)..(19): Xaa is A or G
  MOD_RES (20)..(21)..(22)..(23): Xaa is A or G or is absent

SEQ ID NO: 70979 - protein, 39 aa, Artificial Sequence; identical to SEQ ID NO: 8689
  GFR-binding peptide
  MOD_RES (3)..(4)..(36)..(38): Xaa is C or S

SEQ ID NO: 70980 - protein, 37 aa, Artificial Sequence; identical to SEQ ID NO: 33175
  GFR-binding peptide
  MOD_RES (35)..(37): Xaa is C or S
  MOD_RES (14)..(15)..(16)..(17)..(18): Xaa is A or G
  MOD_RES (19)..(20)..(21)..(22): Xaa is A or G or is absent

SEQ ID NO: 70981 - protein, 44 aa, Artificial Sequence
  GFR-binding peptide
  MOD_RES (6)..(7)..(41)..(43): Xaa is C or S
  MOD_RES (21)..(22)..(23)..(24)..(25): Xaa is A or G
  MOD_RES (26)..(27)..(28)..(29): Xaa is A or G or is absent
GIPEPXXVPEKMNAISILYFXXXXXXXXXLKKYRNMTVESXAXR

SEQ ID NO: 70982 - protein, 33 aa, Artificial Sequence; identical to SEQ ID NO: 33181
  GFR-binding peptide
  MOD_RES (1)..(2): Xaa is C or S

SEQ ID NO: 70983 - protein, 40 aa, Artificial Sequence
  GFR-binding peptide
  MOD_RES (6)..(7): Xaa is C or S
  MOD_RES (21)..(22)..(23)..(24)..(25): Xaa is A or G
  MOD_RES (26)..(27)..(28)..(29): Xaa is A or G or is absent
HVPKPXXAPTKLEPISVLYLXXXXXXXXXKFKYENMVVRS

SEQ ID NO: 70984 - protein, 39 aa, Artificial Sequence; identical to SEQ ID NO: 33186
  GFR-binding peptide
  MOD_RES (2)..(3)..(36)..(38): Xaa is C or S
  MOD_RES (17)..(18)..(19)..(20)..(21): Xaa is A or G
  MOD_RES (22)..(23)..(24)..(25): Xaa is A or G or is absent

SEQ ID NO: 70985 - protein, 36 aa, Artificial Sequence; identical to SEQ ID NO: 30035
  GFR-binding peptide
  MOD_RES (3)..(35): Xaa is C or S

SEQ ID NO: 70986 - protein, 38 aa, Artificial Sequence; identical to SEQ ID NO: 33190
  GFR-binding peptide
  MOD_RES (5)..(6): Xaa is C or S
  MOD_RES (20)..(21)..(22)..(23)..(24): Xaa is A or G
  MOD_RES (25)..(26)..(27)..(28): Xaa is A or G or is absent

SEQ ID NO: 70987 - protein, 40 aa, Artificial Sequence; identical to SEQ ID NO: 33193
  GFR-binding peptide
  MOD_RES (4)..(5)..(39): Xaa is C or S
  MOD_RES (19)..(20)..(21)..(22)..(23): Xaa is A or G
  MOD_RES (24)..(25)..(26)..(27): Xaa is A or G or is absent

SEQ ID NO: 70988 - protein, 37 aa, Artificial Sequence; identical to SEQ ID NO: 8698
  GFR-binding peptide
  MOD_RES (5)..(6)..(37): Xaa is C or S

SEQ ID NO: 70989 - protein, 39 aa, Artificial Sequence; identical to SEQ ID NO: 30038
  GFR-binding peptide
  MOD_RES (7)..(39): Xaa is C or S

SEQ ID NO: 70990 - protein, 34 aa, Artificial Sequence
  GFR-binding peptide
  MOD_RES (2)..(3): Xaa is C or S
TXXVPTRLSPISILYKDSANNVVLKYHYDMVVES

SEQ ID NO: 70991 - protein, 37 aa, Artificial Sequence; identical to SEQ ID NO: 30041
  GFR-binding peptide
  MOD_RES (1)..(2)..(36): Xaa is C or S
  MOD_RES (16)..(17)..(18)..(19)..(20): Xaa is A or G
  MOD_RES (21)..(22)..(23)..(24): Xaa is A or G or is absent

SEQ ID NO: 70992 - protein, 35 aa, Artificial Sequence; identical to SEQ ID NO: 33197
  GFR-binding peptide
  MOD_RES (2)..(3): Xaa is C or S
  MOD_RES (17)..(18)..(19)..(20)..(21): Xaa is A or G
  MOD_RES (22)..(23)..(24)..(25): Xaa is A or G or is absent

SEQ ID NO: 70993 - protein, 43 aa, Artificial Sequence; identical to SEQ ID NO: 30042
  GFR-binding peptide
  MOD_RES (5)..(6)..(40)..(42): Xaa is C or S
  MOD_RES (20)..(21)..(22)..(23)..(24): Xaa is A or G
  MOD_RES (25)..(26)..(27)..(28): Xaa is A or G or is absent

SEQ ID NO: 70994 - protein, 37 aa, Artificial Sequence; identical to SEQ ID NO: 30043
  GFR-binding peptide
  MOD_RES (1)..(2)..(36): Xaa is C or S
  MOD_RES (16)..(17)..(18)..(19)..(20): Xaa is A or G
  MOD_RES (21)..(22)..(23)..(24): Xaa is A or G or is absent

SEQ ID NO: 70995 - protein, 35 aa, Artificial Sequence
  GFR-binding peptide
  MOD_RES (33)..(35): Xaa is C or S
  MOD_RES (14)..(15)..(16)..(17)..(18): Xaa is A or G
  MOD_RES (19)..(20)..(21)..(22): Xaa is A or G or is absent
VPQDLSPINILYFXXXXXXXXXYGKIPMVVKSXKX

SEQ ID NO: 70996 - protein, 40 aa, Artificial Sequence; identical to SEQ ID NO: 8707
  GFR-binding peptide
  MOD_RES (4)..(5)..(39): Xaa is C or S
  MOD_RES (19)..(20)..(21)..(22)..(23): Xaa is A or G
  MOD_RES (24)..(25)..(26)..(27): Xaa is A or G or is absent

SEQ ID NO: 70997 - protein, 42 aa, Artificial Sequence; identical to SEQ ID NO: 8708
  GFR-binding peptide
  MOD_RES (4)..(5)..(39)..(41): Xaa is C or S
  MOD_RES (19)..(20)..(21)..(22)..(23): Xaa is A or G
  MOD_RES (24)..(25)..(26)..(27): Xaa is A or G or is absent

SEQ ID NO: 70998 - protein, 34 aa, Artificial Sequence; identical to SEQ ID NO: 33203
  GFR-binding peptide
  MOD_RES (3)..(4): Xaa is C or S

SEQ ID NO: 70999 - protein, 40 aa, Artificial Sequence
  GFR-binding peptide
  MOD_RES (4)..(5)..(39): Xaa is C or S
  MOD_RES (19)..(20)..(21)..(22)..(23): Xaa is A or G
  MOD_RES (24)..(25)..(26)..(27): Xaa is A or G or is absent
PEPXXVPEKMSATSILYYXXXXXXXXXLRKHRNMTVESXA

SEQ ID NO: 71000 - protein, 34 aa, Artificial Sequence; identical to SEQ ID NO: 8710
  GFR-binding peptide
  MOD_RES (2)..(34): Xaa is C or S

SEQ ID NO: 71001 - protein, 38 aa, Artificial Sequence; identical to SEQ ID NO: 33206
  GFR-binding peptide
  MOD_RES (1)..(35)..(37): Xaa is C or S
  MOD_RES (15)..(16)..(17)..(18)..(19): Xaa is A or G
  MOD_RES (20)..(21)..(22)..(23): Xaa is A or G or is absent

SEQ ID NO: 71002 - protein, 36 aa, Artificial Sequence; identical to SEQ ID NO: 8711
  GFR-binding peptide
  MOD_RES (1)..(2)..(35): Xaa is C or S
  MOD_RES (16)..(17)..(18)..(19)..(20): Xaa is A or G
  MOD_RES (21)..(22)..(23)..(24): Xaa is A or G or is absent

SEQ ID NO: 71003 - protein, 32 aa, Artificial Sequence; identical to SEQ ID NO: 30050
  GFR-binding peptide
  MOD_RES (1)..(1): Xaa is C or S

SEQ ID NO: 71004 - protein, 33 aa, Artificial Sequence; identical to SEQ ID NO: 8712
  GFR-binding peptide
  MOD_RES (2)..(2): Xaa is C or S

SEQ ID NO: 71005 - protein, 33 aa, Artificial Sequence
  GFR-binding peptide
  MOD_RES (1)..(1): Xaa is C or S
  MOD_RES (15)..(16)..(17)..(18)..(19): Xaa is A or G
  MOD_RES (20)..(21)..(22)..(23): Xaa is A or G or is absent
XVPQALSPINILYFXXXXXXXXXYGKIPMIVRS

SEQ ID NO: 71006 - protein, 31 aa, Artificial Sequence
  GFR-binding peptide
VPTRLSATSILYYDSANNVVLRKHRDMVVES

SEQ ID NO: 71007 - protein, 39 aa, Artificial Sequence
  GFR-binding peptide
  MOD_RES (4)..(5)..(39): Xaa is C or S
  MOD_RES (19)..(20)..(21)..(22)..(23): Xaa is A or G
  MOD_RES (24)..(25)..(26)..(27): Xaa is A or G or is absent
PEPXXVPEKMNAISILYFXXXXXXXXXLKKYRNMTVESX

SEQ ID NO: 71008 - protein, 36 aa, Artificial Sequence; identical to SEQ ID NO: 8717
  GFR-binding peptide
  MOD_RES (5)..(5): Xaa is C or S

SEQ ID NO: 71009 - protein, 34 aa, Artificial Sequence; identical to SEQ ID NO: 8718
  GFR-binding peptide
  MOD_RES (1)..(34): Xaa is C or S
  MOD_RES (15)..(16)..(17)..(18)..(19): Xaa is A or G
  MOD_RES (20)..(21)..(22)..(23): Xaa is A or G or is absent

SEQ ID NO: 71010 - protein, 35 aa, Artificial Sequence; identical to SEQ ID NO: 8722
  GFR-binding peptide
  MOD_RES (1)..(33)..(35): Xaa is C or S

SEQ ID NO: 71011 - protein, 36 aa, Artificial Sequence; identical to SEQ ID NO: 30062
  GFR-binding peptide
  MOD_RES (1)..(33)..(35): Xaa is C or S

SEQ ID NO: 71012 - protein, 34 aa, Artificial Sequence; identical to SEQ ID NO: 33219
  GFR-binding peptide
  MOD_RES (1)..(2): Xaa is C or S
  MOD_RES (16)..(17)..(18)..(19)..(20): Xaa is A or G
  MOD_RES (21)..(22)..(23)..(24): Xaa is A or G or is absent

SEQ ID NO: 71013 - protein, 39 aa, Artificial Sequence; identical to SEQ ID NO: 33220
  GFR-binding peptide
  MOD_RES (6)..(7): Xaa is C or S
  MOD_RES (21)..(22)..(23)..(24)..(25): Xaa is A or G
  MOD_RES (26)..(27)..(28)..(29): Xaa is A or G or is absent

SEQ ID NO: 71014 - protein, 39 aa, Artificial Sequence; identical to SEQ ID NO: 8727
  GFR-binding peptide
  MOD_RES (2)..(3)..(37)..(39): Xaa is C or S
  MOD_RES (17)..(18)..(19)..(20)..(21): Xaa is A or G
  MOD_RES (22)..(23)..(24)..(25): Xaa is A or G or is absent

SEQ ID NO: 71015 - protein, 41 aa, Artificial Sequence; identical to SEQ ID NO: 33223
  GFR-binding peptide
  MOD_RES (5)..(6)..(38)..(40): Xaa is C or S

SEQ ID NO: 71016 - protein, 39 aa, Artificial Sequence; identical to SEQ ID NO: 30068
  GFR-binding peptide
  MOD_RES (4)..(5)..(37)..(39): Xaa is C or S

SEQ ID NO: 71017 - protein, 42 aa, Artificial Sequence; identical to SEQ ID NO: 30070
  GFR-binding peptide
  MOD_RES (5)..(6)..(40)..(42): Xaa is C or S
  MOD_RES (20)..(21)..(22)..(23)..(24): Xaa is A or G
  MOD_RES (25)..(26)..(27)..(28): Xaa is A or G or is absent

SEQ ID NO: 71018 - protein, 39 aa, Artificial Sequence; identical to SEQ ID NO: 8731
  GFR-binding peptide
  MOD_RES (5)..(6): Xaa is C or S
  MOD_RES (20)..(21)..(22)..(23)..(24): Xaa is A or G
  MOD_RES (25)..(26)..(27)..(28): Xaa is A or G or is absent

SEQ ID NO: 71019 - protein, 34 aa, Artificial Sequence; identical to SEQ ID NO: 30075
  GFR-binding peptide
  MOD_RES (3)..(4): Xaa is C or S

SEQ ID NO: 71020 - protein, 42 aa, Artificial Sequence; identical to SEQ ID NO: 8733
  GFR-binding peptide
  MOD_RES (6)..(7)..(39)..(41): Xaa is C or S

SEQ ID NO: 71021 - protein, 41 aa, Artificial Sequence; identical to SEQ ID NO: 8735
  GFR-binding peptide
  MOD_RES (4)..(5)..(38)..(40): Xaa is C or S
  MOD_RES (19)..(20)..(21)..(22)..(23): Xaa is A or G
  MOD_RES (24)..(25)..(26)..(27): Xaa is A or G or is absent

SEQ ID NO: 71022 - protein, 35 aa, Artificial Sequence; identical to SEQ ID NO: 30082
  GFR-binding peptide
  MOD_RES (2)..(2): Xaa is C or S
  MOD_RES (16)..(17)..(18)..(19)..(20): Xaa is A or G
  MOD_RES (21)..(22)..(23)..(24): Xaa is A or G or is absent

SEQ ID NO: 71023 - protein, 33 aa, Artificial Sequence; identical to SEQ ID NO: 33231
  GFR-binding peptide
  MOD_RES (32)..(32): Xaa is C or S

SEQ ID NO: 71024 - protein, 39 aa, Artificial Sequence; identical to SEQ ID NO: 8742
  GFR-binding peptide
  MOD_RES (3)..(4)..(38): Xaa is C or S
  MOD_RES (18)..(19)..(20)..(21)..(22): Xaa is A or G
  MOD_RES (23)..(24)..(25)..(26): Xaa is A or G or is absent

SEQ ID NO: 71025 - protein, 36 aa, Artificial Sequence
  GFR-binding peptide
  MOD_RES (1)..(35): Xaa is C or S
  MOD_RES (15)..(16)..(17)..(18)..(19): Xaa is A or G
  MOD_RES (20)..(21)..(22)..(23): Xaa is A or G or is absent
XTPTKMEPISMLYLXXXXXXXXXKFKYEGMVVDRXG

SEQ ID NO: 71026 - protein, 40 aa, Artificial Sequence; identical to SEQ ID NO: 16037
  GFR-binding peptide
  MOD_RES (4)..(5)..(37)..(39): Xaa is C or S

SEQ ID NO: 71027 - protein, 43 aa, Artificial Sequence
  GFR-binding peptide
  MOD_RES (6)..(7)..(40)..(42): Xaa is C or S
  MOD_RES (21)..(22)..(23)..(24)..(25): Xaa is A or G
  MOD_RES (26)..(27)..(28)..(29): Xaa is A or G or is absent
RVPSTXXAPVKTEPISMLYLXXXXXXXXXKFKYEMIVEEXGXL

SEQ ID NO: 71028 - protein, 36 aa, Artificial Sequence; identical to SEQ ID NO: 8744
  GFR-binding peptide
  MOD_RES (5)..(6): Xaa is C or S

SEQ ID NO: 71029 - protein, 40 aa, Artificial Sequence; identical to SEQ ID NO: 8745
  GFR-binding peptide
  MOD_RES (6)..(7)..(40): Xaa is C or S

SEQ ID NO: 71030 - protein, 43 aa, Artificial Sequence; identical to SEQ ID NO: 30092
  GFR-binding peptide
  MOD_RES (6)..(7)..(41)..(43): Xaa is C or S
  MOD_RES (21)..(22)..(23)..(24)..(25): Xaa is A or G
  MOD_RES (26)..(27)..(28)..(29): Xaa is A or G or is absent

SEQ ID NO: 71031 - protein, 41 aa, Artificial Sequence; identical to SEQ ID NO: 8747
  GFR-binding peptide
  MOD_RES (6)..(40): Xaa is C or S
  MOD_RES (20)..(21)..(22)..(23)..(24): Xaa is A or G
  MOD_RES (25)..(26)..(27)..(28): Xaa is A or G or is absent

SEQ ID NO: 71032 - protein, 37 aa, Artificial Sequence; identical to SEQ ID NO: 8748
  GFR-binding peptide
  MOD_RES (1)..(36): Xaa is C or S
  MOD_RES (15)..(16)..(17)..(18)..(19): Xaa is A or G
  MOD_RES (20)..(21)..(22)..(23): Xaa is A or G or is absent

SEQ ID NO: 71033 - protein, 35 aa, Artificial Sequence; identical to SEQ ID NO: 30093
  GFR-binding peptide
  MOD_RES (3)..(35): Xaa is C or S

SEQ ID NO: 71034 - protein, 32 aa, Artificial Sequence
  GFR-binding peptide
  MOD_RES (14)..(15)..(16)..(17)..(18): Xaa is A or G
  MOD_RES (19)..(20)..(21)..(22): Xaa is A or G or is absent
VPEKMSPINILYFXXXXXXXXXYGKIPNMTVE

SEQ ID NO: 71035 - protein, 39 aa, Artificial Sequence
  GFR-binding peptide
  MOD_RES (6)..(7)..(38): Xaa is C or S
RVPSTXXAPVKTEPISMLYLDNGRVLLKFKYEMIVEEXG

SEQ ID NO: 71036 - protein, 38 aa, Artificial Sequence
  GFR-binding peptide
  MOD_RES (5)..(6)..(38): Xaa is C or S
IPEPXXVPEKMSATSILYYDENKNVVLRKHRNMTVESX

SEQ ID NO: 71037 - protein, 36 aa, Artificial Sequence; identical to SEQ ID NO: 58090
  GFR-binding peptide
  MOD_RES (1)..(33)..(35): Xaa is C or S

SEQ ID NO: 71038 - protein, 34 aa, Artificial Sequence; identical to SEQ ID NO: 16051
  GFR-binding peptide
  MOD_RES (1)..(2)..(34): Xaa is C or S

SEQ ID NO: 71039 - protein, 38 aa, Artificial Sequence
  GFR-binding peptide
  MOD_RES (2)..(3)..(35)..(37): Xaa is C or S
PXXVPEKMEPISILYLDENKNVVKFKYENMTVESXAXR

SEQ ID NO: 71040 - protein, 38 aa, Artificial Sequence
  GFR-binding peptide
  MOD_RES (1)..(2)..(35)..(37): Xaa is C or S
  MOD_RES (16)..(17)..(18)..(19)..(20): Xaa is A or G
  MOD_RES (21)..(22)..(23)..(24): Xaa is A or G or is absent
XXAPVKTSPISMLYKXXXXXXXXXLKYHYMIVEEXGXL

SEQ ID NO: 71041 - protein, 31 aa, Artificial Sequence; identical to SEQ ID NO: 8756
  GFR-binding peptide
  MOD_RES (1)..(1): Xaa is C or S

SEQ ID NO: 71042 - protein, 34 aa, Artificial Sequence; identical to SEQ ID NO: 30108
  GFR-binding peptide
  MOD_RES (1)..(2): Xaa is C or S
  MOD_RES (16)..(17)..(18)..(19)..(20): Xaa is A or G
  MOD_RES (21)..(22)..(23)..(24): Xaa is A or G or is absent

SEQ ID NO: 71043 - protein, 38 aa, Artificial Sequence; identical to SEQ ID NO: 30115
  GFR-binding peptide
  MOD_RES (4)..(5)..(38): Xaa is C or S

SEQ ID NO: 71044 - protein, 32 aa, Artificial Sequence
  GFR-binding peptide
  MOD_RES (14)..(15)..(16)..(17)..(18): Xaa is A or G
  MOD_RES (19)..(20)..(21)..(22): Xaa is A or G or is absent
VPEKMEPISILYLXXXXXXXXXKFKYENMTVE

SEQ ID NO: 71045 - protein, 38 aa, Artificial Sequence; identical to SEQ ID NO: 8763
  GFR-binding peptide
  MOD_RES (6)..(7): Xaa is C or S

SEQ ID NO: 71046 - protein, 37 aa, Artificial Sequence; identical to SEQ ID NO: 8765
  GFR-binding peptide
  MOD_RES (6)..(7): Xaa is C or S

SEQ ID NO: 71047 - protein, 38 aa, Artificial Sequence; identical to SEQ ID NO: 8766
  GFR-binding peptide
  MOD_RES (3)..(37): Xaa is C or S
  MOD_RES (17)..(18)..(19)..(20)..(21): Xaa is A or G
  MOD_RES (22)..(23)..(24)..(25): Xaa is A or G or is absent

SEQ ID NO: 71048 - protein, 41 aa, Artificial Sequence; identical to SEQ ID NO: 8769
  GFR-binding peptide
  MOD_RES (6)..(7)..(41): Xaa is C or S
  MOD_RES (21)..(22)..(23)..(24)..(25): Xaa is A or G
  MOD_RES (26)..(27)..(28)..(29): Xaa is A or G or is absent

SEQ ID NO: 71049 - protein, 37 aa, Artificial Sequence
  GFR-binding peptide
  MOD_RES (3)..(4): Xaa is C or S
  MOD_RES (18)..(19)..(20)..(21)..(22): Xaa is A or G
  MOD_RES (23)..(24)..(25)..(26): Xaa is A or G or is absent
ASXXVPARLSATSILYYXXXXXXXXXLRKHRDMVVEA

SEQ ID NO: 71050 - protein, 38 aa, Artificial Sequence; identical to SEQ ID NO: 8775
  GFR-binding peptide
  MOD_RES (5)..(6): Xaa is C or S
  MOD_RES (20)..(21)..(22)..(23)..(24): Xaa is A or G
  MOD_RES (25)..(26)..(27)..(28): Xaa is A or G or is absent

SEQ ID NO: 71051 - protein, 40 aa, Artificial Sequence; identical to SEQ ID NO: 8777
  GFR-binding peptide
  MOD_RES (5)..(6)..(39): Xaa is C or S
  MOD_RES (20)..(21)..(22)..(23)..(24): Xaa is A or G
  MOD_RES (25)..(26)..(27)..(28): Xaa is A or G or is absent

SEQ ID NO: 71052 - protein, 33 aa, Artificial Sequence
  GFR-binding peptide
  MOD_RES (1)..(1): Xaa is C or S
  MOD_RES (15)..(16)..(17)..(18)..(19): Xaa is A or G
  MOD_RES (20)..(21)..(22)..(23): Xaa is A or G or is absent
XVPQDLSPINILYFXXXXXXXXXYGKIPMVVKS

SEQ ID NO: 71053 - protein, 36 aa, Artificial Sequence; identical to SEQ ID NO: 8778
  GFR-binding peptide
  MOD_RES (4)..(5)..(36): Xaa is C or S

SEQ ID NO: 71054 - protein, 38 aa, Artificial Sequence
  GFR-binding peptide
  MOD_RES (4)..(5)..(37): Xaa is C or S
PPTXXVPTRLEPISILYLDSANNVVKFKYEDMVVESXG

SEQ ID NO: 71055 - protein, 32 aa, Artificial Sequence; identical to SEQ ID NO: 33263
  GFR-binding peptide
  MOD_RES (1)..(2): Xaa is C or S

SEQ ID NO: 71056 - protein, 35 aa, Artificial Sequence; identical to SEQ ID NO: 58107
  GFR-binding peptide
  MOD_RES (1)..(33)..(35): Xaa is C or S

SEQ ID NO: 71057 - protein, 31 aa, Artificial Sequence; identical to SEQ ID NO: 8779
  GFR-binding peptide

SEQ ID NO: 71058 - protein, 35 aa, Artificial Sequence
  GFR-binding peptide
  MOD_RES (1)..(2)..(34): Xaa is C or S
XXVPEKMEPISILYLDENKNVVKFKYENMTVESXA

SEQ ID NO: 71059 - protein, 40 aa, Artificial Sequence; identical to SEQ ID NO: 58114
  GFR-binding peptide
  MOD_RES (6)..(7)..(38)..(40): Xaa is C or S

SEQ ID NO: 71060 - protein, 38 aa, Artificial Sequence; identical to SEQ ID NO: 8782
  GFR-binding peptide
  MOD_RES (3)..(4)..(38): Xaa is C or S
  MOD_RES (18)..(19)..(20)..(21)..(22): Xaa is A or G
  MOD_RES (23)..(24)..(25)..(26): Xaa is A or G or is absent

SEQ ID NO: 71061 - protein, 32 aa, Artificial Sequence
  GFR-binding peptide
  MOD_RES (1)..(1): Xaa is C or S
XTPTKMEPISMLYLNDKQQIIKFKYEGMVVDR

SEQ ID NO: 71062 - protein, 38 aa, Artificial Sequence; identical to SEQ ID NO: 8783
  GFR-binding peptide
  MOD_RES (5)..(6): Xaa is C or S
  MOD_RES (20)..(21)..(22)..(23)..(24): Xaa is A or G
  MOD_RES (25)..(26)..(27)..(28): Xaa is A or G or is absent

SEQ ID NO: 71063 - protein, 32 aa, Artificial Sequence
  GFR-binding peptide
  MOD_RES (14)..(15)..(16)..(17)..(18): Xaa is A or G
  MOD_RES (19)..(20)..(21)..(22): Xaa is A or G or is absent
VSQDLSPINILYFXXXXXXXXXYGKIPMIVKS

SEQ ID NO: 71064 - protein, 39 aa, Artificial Sequence; identical to SEQ ID NO: 30138
  GFR-binding peptide
  MOD_RES (4)..(5)..(37)..(39): Xaa is C or S

SEQ ID NO: 71065 - protein, 35 aa, Artificial Sequence; identical to SEQ ID NO: 8786
  GFR-binding peptide
  MOD_RES (3)..(4)..(35): Xaa is C or S

SEQ ID NO: 71066 - protein, 38 aa, Artificial Sequence
  GFR-binding peptide
  MOD_RES (4)..(5): Xaa is C or S
  MOD_RES (19)..(20)..(21)..(22)..(23): Xaa is A or G
  MOD_RES (24)..(25)..(26)..(27): Xaa is A or G or is absent
AGPXXTPTKMEPISMLYLXXXXXXXXXKFKYEGMVVDR

SEQ ID NO: 71067 - protein, 36 aa, Artificial Sequence; identical to SEQ ID NO: 30139
  GFR-binding peptide
  MOD_RES (2)..(3)..(35): Xaa is C or S

SEQ ID NO: 71068 - protein, 41 aa, Artificial Sequence; identical to SEQ ID NO: 8787
  GFR-binding peptide
  MOD_RES (7)..(41): Xaa is C or S
  MOD_RES (21)..(22)..(23)..(24)..(25): Xaa is A or G
  MOD_RES (26)..(27)..(28)..(29): Xaa is A or G or is absent

SEQ ID NO: 71069 - protein, 35 aa, Artificial Sequence; identical to SEQ ID NO: 8792
  GFR-binding peptide
  MOD_RES (33)..(35): Xaa is C or S

SEQ ID NO: 71070 - protein, 31 aa, Artificial Sequence; identical to SEQ ID NO: 30144
  GFR-binding peptide
  MOD_RES (1)..(1): Xaa is C or S

SEQ ID NO: 71071 - protein, 38 aa, Artificial Sequence; identical to SEQ ID NO: 30145
  GFR-binding peptide
  MOD_RES (2)..(3)..(37): Xaa is C or S
  MOD_RES (17)..(18)..(19)..(20)..(21): Xaa is A or G
  MOD_RES (22)..(23)..(24)..(25): Xaa is A or G or is absent

SEQ ID NO: 71072 - protein, 41 aa, Artificial Sequence; identical to SEQ ID NO: 8798
  GFR-binding peptide
  MOD_RES (5)..(6)..(38)..(40): Xaa is C or S

SEQ ID NO: 71073 - protein, 36 aa, Artificial Sequence; identical to SEQ ID NO: 8800
  GFR-binding peptide
  MOD_RES (3)..(4): Xaa is C or S
  MOD_RES (18)..(19)..(20)..(21)..(22): Xaa is A or G
  MOD_RES (23)..(24)..(25)..(26): Xaa is A or G or is absent

SEQ ID NO: 71074 - protein, 39 aa, Artificial Sequence; identical to SEQ ID NO: 30153
  GFR-binding peptide
  MOD_RES (3)..(4)..(36)..(38): Xaa is C or S

SEQ ID NO: 71075 - protein, 37 aa, Artificial Sequence; identical to SEQ ID NO: 8803
  GFR-binding peptide
  MOD_RES (3)..(4)..(36): Xaa is C or S

SEQ ID NO: 71076 - protein, 34 aa, Artificial Sequence
  GFR-binding peptide
  MOD_RES (2)..(3)..(34): Xaa is C or S
PXXVSQDLSPINILYFIGKTPKIYGKIPMIVKSX

SEQ ID NO: 71077 - protein, 34 aa, Artificial Sequence; identical to SEQ ID NO: 8805
  GFR-binding peptide
  MOD_RES (1)..(2): Xaa is C or S

SEQ ID NO: 71078 - protein, 36 aa, Artificial Sequence; identical to SEQ ID NO: 30155
  GFR-binding peptide
  MOD_RES (1)..(2)..(36): Xaa is C or S
  MOD_RES (16)..(17)..(18)..(19)..(20): Xaa is A or G
  MOD_RES (21)..(22)..(23)..(24): Xaa is A or G or is absent

SEQ ID NO: 71079 - protein, 38 aa, Artificial Sequence
  GFR-binding peptide
  MOD_RES (6)..(7): Xaa is C or S
GIPEPXXVPEKMSPISILYKDENKNVVLKYHYNMTVES

SEQ ID NO: 71080 - protein, 33 aa, Artificial Sequence
  GFR-binding peptide
  MOD_RES (1)..(33): Xaa is C or S
XVPEKMSPISILYKDENKNVVLKYHYNMTVESX

SEQ ID NO: 71081 - protein, 42 aa, Artificial Sequence; identical to SEQ ID NO: 8809
  GFR-binding peptide
  MOD_RES (5)..(6)..(39)..(41): Xaa is C or S
  MOD_RES (20)..(21)..(22)..(23)..(24): Xaa is A or G
  MOD_RES (25)..(26)..(27)..(28): Xaa is A or G or is absent

SEQ ID NO: 71082 - protein, 40 aa, Artificial Sequence; identical to SEQ ID NO: 8811
  GFR-binding peptide
  MOD_RES (6)..(7): Xaa is C or S
  MOD_RES (21)..(22)..(23)..(24)..(25): Xaa is A or G
  MOD_RES (26)..(27)..(28)..(29): Xaa is A or G or is absent

SEQ ID NO: 71083 - protein, 33 aa, Artificial Sequence; identical to SEQ ID NO: 8812
  GFR-binding peptide
  MOD_RES (33)..(33): Xaa is C or S
  MOD_RES (14)..(15)..(16)..(17)..(18): Xaa is A or G
  MOD_RES (19)..(20)..(21)..(22): Xaa is A or G or is absent

SEQ ID NO: 71084 - protein, 38 aa, Artificial Sequence
  GFR-binding peptide
  MOD_RES (3)..(4)..(37): Xaa is C or S
  MOD_RES (18)..(19)..(20)..(21)..(22): Xaa is A or G
  MOD_RES (23)..(24)..(25)..(26): Xaa is A or G or is absent
STXXAPVKTEPISMLYLXXXXXXXXXKFKYEMIVEEXG

SEQ ID NO: 71085 - protein, 40 aa, Artificial Sequence
  GFR-binding peptide
  MOD_RES (6)..(7)..(39): Xaa is C or S
KASKAXXVPTKLSATSILYYDKGVVTYLRKHRGMAVSEXG

SEQ ID NO: 71086 - protein, 36 aa, Artificial Sequence
  GFR-binding peptide
  MOD_RES (4)..(5): Xaa is C or S
PEPXXVPEKMNAISILYFDENKNVVLKKYRNMTVES

SEQ ID NO: 71087 - protein, 31 aa, Artificial Sequence
  GFR-binding peptide
VPEKMSATSILYYDENKNVVLRKHRNMTVES

SEQ ID NO: 71088 - protein, 33 aa, Artificial Sequence; identical to SEQ ID NO: 33306
  GFR-binding peptide
  MOD_RES (1)..(2): Xaa is C or S

SEQ ID NO: 71089 - protein, 41 aa, Artificial Sequence; identical to SEQ ID NO: 30177
  GFR-binding peptide
  MOD_RES (3)..(4)..(38)..(40): Xaa is C or S
  MOD_RES (18)..(19)..(20)..(21)..(22): Xaa is A or G
  MOD_RES (23)..(24)..(25)..(26): Xaa is A or G or is absent

SEQ ID NO: 71090 - protein, 33 aa, Artificial Sequence; identical to SEQ ID NO: 30178
  GFR-binding peptide
  MOD_RES (14)..(15)..(16)..(17)..(18): Xaa is A or G
  MOD_RES (19)..(20)..(21)..(22): Xaa is A or G or is absent

SEQ ID NO: 71091 - protein, 36 aa, Artificial Sequence; identical to SEQ ID NO: 30182
  GFR-binding peptide
  MOD_RES (1)..(33)..(35): Xaa is C or S

SEQ ID NO: 71092 - protein, 36 aa, Artificial Sequence; identical to SEQ ID NO: 8824
  GFR-binding peptide
  MOD_RES (1)..(2)..(33)..(35): Xaa is C or S

SEQ ID NO: 71093 - protein, 39 aa, Artificial Sequence
  GFR-binding peptide
  MOD_RES (6)..(7)..(39): Xaa is C or S
HVPKPXXAPTKLSATSVLYYDDSSNVILRKHRNMVVRSX

SEQ ID NO: 71094 - protein, 44 aa, Artificial Sequence; identical to SEQ ID NO: 30187
  GFR-binding peptide
  MOD_RES (6)..(7)..(41)..(43): Xaa is C or S
  MOD_RES (21)..(22)..(23)..(24)..(25): Xaa is A or G
  MOD_RES (26)..(27)..(28)..(29): Xaa is A or G or is absent

SEQ ID NO: 71095 - protein, 36 aa, Artificial Sequence; identical to SEQ ID NO: 8830
  GFR-binding peptide
  MOD_RES (2)..(3)..(35): Xaa is C or S

SEQ ID NO: 71096 - protein, 36 aa, Artificial Sequence; identical to SEQ ID NO: 8831
  GFR-binding peptide
  MOD_RES (3)..(4)..(36): Xaa is C or S

SEQ ID NO: 71097 - protein, 35 aa, Artificial Sequence; identical to SEQ ID NO: 33321
  GFR-binding peptide
  MOD_RES (3)..(35): Xaa is C or S

SEQ ID NO: 71098 - protein, 35 aa, Artificial Sequence; identical to SEQ ID NO: 8833
  GFR-binding peptide
  MOD_RES (1)..(33)..(35): Xaa is C or S

SEQ ID NO: 71099 - protein, 38 aa, Artificial Sequence; identical to SEQ ID NO: 33323
  GFR-binding peptide
  MOD_RES (2)..(3)..(37): Xaa is C or S
  MOD_RES (17)..(18)..(19)..(20)..(21): Xaa is A or G
  MOD_RES (22)..(23)..(24)..(25): Xaa is A or G or is absent

SEQ ID NO: 71100 - protein, 35 aa, Artificial Sequence; identical to SEQ ID NO: 8835
  GFR-binding peptide
  MOD_RES (32)..(34): Xaa is C or S

SEQ ID NO: 71101 - protein, 36 aa, Artificial Sequence; identical to SEQ ID NO: 30195
  GFR-binding peptide
  MOD_RES (1)..(2)..(34)..(36): Xaa is C or S

SEQ ID NO: 71102 - protein, 40 aa, Artificial Sequence; identical to SEQ ID NO: 33325
  GFR-binding peptide
  MOD_RES (6)..(7): Xaa is C or S
  MOD_RES (21)..(22)..(23)..(24)..(25): Xaa is A or G
  MOD_RES (26)..(27)..(28)..(29): Xaa is A or G or is absent

SEQ ID NO: 71103 - protein, 39 aa, Artificial Sequence; identical to SEQ ID NO: 33326
  GFR-binding peptide
  MOD_RES (4)..(5)..(39): Xaa is C or S
  MOD_RES (19)..(20)..(21)..(22)..(23): Xaa is A or G
  MOD_RES (24)..(25)..(26)..(27): Xaa is A or G or is absent

SEQ ID NO: 71104 - protein, 36 aa, Artificial Sequence
  GFR-binding peptide
  MOD_RES (1)..(33)..(35): Xaa is C or S
XVPEKMSPINILYFDENKNVVYGKIPNMTVESXAXR

SEQ ID NO: 71105 - protein, 39 aa, Artificial Sequence; identical to SEQ ID NO: 30197
  GFR-binding peptide
  MOD_RES (5)..(6)..(38): Xaa is C or S

SEQ ID NO: 71106 - protein, 37 aa, Artificial Sequence; identical to SEQ ID NO: 30198
  GFR-binding peptide
  MOD_RES (3)..(4)..(36): Xaa is C or S

SEQ ID NO: 71107 - protein, 39 aa, Artificial Sequence
  GFR-binding peptide
  MOD_RES (4)..(5)..(37)..(39): Xaa is C or S
AGPXXTPTKMEPISMLYLNDKQQIIKFKYEGMVVDRXGX

SEQ ID NO: 71108 - protein, 37 aa, Artificial Sequence; identical to SEQ ID NO: 8842
  GFR-binding peptide
  MOD_RES (3)..(4): Xaa is C or S
  MOD_RES (18)..(19)..(20)..(21)..(22): Xaa is A or G
  MOD_RES (23)..(24)..(25)..(26): Xaa is A or G or is absent

SEQ ID NO: 71109 - protein, 39 aa, Artificial Sequence; identical to SEQ ID NO: 33330
  GFR-binding peptide
  MOD_RES (6)..(7): Xaa is C or S
  MOD_RES (21)..(22)..(23)..(24)..(25): Xaa is A or G
  MOD_RES (26)..(27)..(28)..(29): Xaa is A or G or is absent

SEQ ID NO: 71110 - protein, 38 aa, Artificial Sequence; identical to SEQ ID NO: 58177
  GFR-binding peptide
  MOD_RES (2)..(3)..(35)..(37): Xaa is C or S

SEQ ID NO: 71111 - protein, 37 aa, Artificial Sequence; identical to SEQ ID NO: 8844
  GFR-binding peptide
  MOD_RES (5)..(6)..(37): Xaa is C or S

SEQ ID NO: 71112 - protein, 32 aa, Artificial Sequence; identical to SEQ ID NO: 8845
  GFR-binding peptide
  MOD_RES (1)..(2): Xaa is C or S

SEQ ID NO: 71113 - protein, 35 aa, Artificial Sequence; identical to SEQ ID NO: 8848
  GFR-binding peptide
  MOD_RES (1)..(2)..(34): Xaa is C or S

SEQ ID NO: 71114 - protein, 38 aa, Artificial Sequence; identical to SEQ ID NO: 8850
  GFR-binding peptide
  MOD_RES (4)..(5)..(38): Xaa is C or S

SEQ ID NO: 71115 - protein, 37 aa, Artificial Sequence
  GFR-binding peptide
  MOD_RES (4)..(5): Xaa is C or S
  MOD_RES (19)..(20)..(21)..(22)..(23): Xaa is A or G
  MOD_RES (24)..(25)..(26)..(27): Xaa is A or G or is absent
PEPXXVPEKMSPISILYKXXXXXXXXXLKYHYNMTVE

SEQ ID NO: 71116 - protein, 38 aa, Artificial Sequence; identical to SEQ ID NO: 30210
  GFR-binding peptide
  MOD_RES (2)..(3)..(38): Xaa is C or S
  MOD_RES (17)..(18)..(19)..(20)..(21): Xaa is A or G
  MOD_RES (22)..(23)..(24)..(25): Xaa is A or G or is absent

SEQ ID NO: 71117 - protein, 34 aa, Artificial Sequence; identical to SEQ ID NO: 8851
  GFR-binding peptide
  MOD_RES (1)..(2): Xaa is C or S
  MOD_RES (16)..(17)..(18)..(19)..(20): Xaa is A or G
  MOD_RES (21)..(22)..(23)..(24): Xaa is A or G or is absent

SEQ ID NO: 71118 - protein, 33 aa, Artificial Sequence
  GFR-binding peptide
  MOD_RES (1)..(1): Xaa is C or S
  MOD_RES (15)..(16)..(17)..(18)..(19): Xaa is A or G
  MOD_RES (20)..(21)..(22)..(23): Xaa is A or G or is absent
XVPEKMSPINILYFXXXXXXXXXYGKIPNMTVE

SEQ ID NO: 71119 - protein, 39 aa, Artificial Sequence; identical to SEQ ID NO: 33341
  GFR-binding peptide
  MOD_RES (6)..(7): Xaa is C or S
  MOD_RES (21)..(22)..(23)..(24)..(25): Xaa is A or G
  MOD_RES (26)..(27)..(28)..(29): Xaa is A or G or is absent

SEQ ID NO: 71120 - protein, 41 aa, Artificial Sequence; identical to SEQ ID NO: 30215
  GFR-binding peptide
  MOD_RES (5)..(6)..(40): Xaa is C or S
  MOD_RES (20)..(21)..(22)..(23)..(24): Xaa is A or G
  MOD_RES (25)..(26)..(27)..(28): Xaa is A or G or is absent

SEQ ID NO: 71121 - protein, 40 aa, Artificial Sequence
  GFR-binding peptide
  MOD_RES (5)..(6)..(37)..(39): Xaa is C or S
SAAPXXVPQALSPINILYFVGRKPKVYGKIPMIVRSXKXS

SEQ ID NO: 71122 - protein, 38 aa, Artificial Sequence; identical to SEQ ID NO: 8856
  GFR-binding peptide
  MOD_RES (6)..(7)..(38): Xaa is C or S

SEQ ID NO: 71123 - protein, 41 aa, Artificial Sequence; identical to SEQ ID NO: 58194
  GFR-binding peptide
  MOD_RES (3)..(4)..(38)..(40): Xaa is C or S
  MOD_RES (18)..(19)..(20)..(21)..(22): Xaa is A or G
  MOD_RES (23)..(24)..(25)..(26): Xaa is A or G or is absent

SEQ ID NO: 71124 - protein, 32 aa, Artificial Sequence; identical to SEQ ID NO: 33346
  GFR-binding peptide
  MOD_RES (1)..(1): Xaa is C or S

SEQ ID NO: 71125 - protein, 38 aa, Artificial Sequence; identical to SEQ ID NO: 8859
  GFR-binding peptide
  MOD_RES (3)..(4)..(38): Xaa is C or S
  MOD_RES (18)..(19)..(20)..(21)..(22): Xaa is A or G
  MOD_RES (23)..(24)..(25)..(26): Xaa is A or G or is absent

SEQ ID NO: 71126 - protein, 33 aa, Artificial Sequence; identical to SEQ ID NO: 30226
  GFR-binding peptide
  MOD_RES (1)..(1): Xaa is C or S
  MOD_RES (15)..(16)..(17)..(18)..(19): Xaa is A or G
  MOD_RES (20)..(21)..(22)..(23): Xaa is A or G or is absent

SEQ ID NO: 71127 - protein, 33 aa, Artificial Sequence; identical to SEQ ID NO: 33348
  GFR-binding peptide
  MOD_RES (14)..(15)..(16)..(17)..(18): Xaa is A or G
  MOD_RES (19)..(20)..(21)..(22): Xaa is A or G or is absent

SEQ ID NO: 71128 - protein, 44 aa, Artificial Sequence; identical to SEQ ID NO: 8862
  GFR-binding peptide
  MOD_RES (6)..(7)..(41)..(43): Xaa is C or S
  MOD_RES (21)..(22)..(23)..(24)..(25): Xaa is A or G
  MOD_RES (26)..(27)..(28)..(29): Xaa is A or G or is absent

SEQ ID NO: 71129 - protein, 37 aa, Artificial Sequence; identical to SEQ ID NO: 33350
  GFR-binding peptide
  MOD_RES (1)..(2)..(35)..(37): Xaa is C or S

SEQ ID NO: 71130 - protein, 39 aa, Artificial Sequence
  GFR-binding peptide
  MOD_RES (6)..(7): Xaa is C or S
  MOD_RES (21)..(22)..(23)..(24)..(25): Xaa is A or G
  MOD_RES (26)..(27)..(28)..(29): Xaa is A or G or is absent
HVPKPXXAPTKLEPISVLYLXXXXXXXXXKFKYENMVVR

SEQ ID NO: 71131 - protein, 37 aa, Artificial Sequence
  GFR-binding peptide
  MOD_RES (3)..(4)..(35)..(37): Xaa is C or S
SPXXVPQDLSPINILYFVGRTPKVYGKIPMVVKSXKX

SEQ ID NO: 71132 - protein, 36 aa, Artificial Sequence
  GFR-binding peptide
  MOD_RES (5)..(6): Xaa is C or S
ASKAXXVPTKLSATSILYYDKGVVTYLRKHRGMAVS

SEQ ID NO: 71133 - protein, 38 aa, Artificial Sequence; identical to SEQ ID NO: 8869
  GFR-binding peptide
  MOD_RES (3)..(4)..(36)..(38): Xaa is C or S

SEQ ID NO: 71134 - protein, 39 aa, Artificial Sequence; identical to SEQ ID NO: 8870
  GFR-binding peptide
  MOD_RES (2)..(3)..(37)..(39): Xaa is C or S
  MOD_RES (17)..(18)..(19)..(20)..(21): Xaa is A or G
  MOD_RES (22)..(23)..(24)..(25): Xaa is A or G or is absent

SEQ ID NO: 71135 - protein, 33 aa, Artificial Sequence; identical to SEQ ID NO: 30235
  GFR-binding peptide
  MOD_RES (2)..(3): Xaa is C or S

SEQ ID NO: 71136 - protein, 36 aa, Artificial Sequence; identical to SEQ ID NO: 8874
  GFR-binding peptide
  MOD_RES (3)..(4): Xaa is C or S

SEQ ID NO: 71137 - protein, 36 aa, Artificial Sequence; identical to SEQ ID NO: 8876
  GFR-binding peptide
  MOD_RES (1)..(36): Xaa is C or S
  MOD_RES (15)..(16)..(17)..(18)..(19): Xaa is A or G
  MOD_RES (20)..(21)..(22)..(23): Xaa is A or G or is absent

SEQ ID NO: 71138 - protein, 41 aa, Artificial Sequence; identical to SEQ ID NO: 30240
  GFR-binding peptide
  MOD_RES (6)..(7): Xaa is C or S
  MOD_RES (21)..(22)..(23)..(24)..(25): Xaa is A or G
  MOD_RES (26)..(27)..(28)..(29): Xaa is A or G or is absent

SEQ ID NO: 71139 - protein, 31 aa, Artificial Sequence; identical to SEQ ID NO: 8880
  GFR-binding peptide
  MOD_RES (31)..(31): Xaa is C or S

SEQ ID NO: 71140 - protein, 35 aa, Artificial Sequence
  GFR-binding peptide
  MOD_RES (33)..(35): Xaa is C or S
  MOD_RES (14)..(15)..(16)..(17)..(18): Xaa is A or G
  MOD_RES (19)..(20)..(21)..(22): Xaa is A or G or is absent
APVKTSATSMLYYXXXXXXXXXLRKHRMIVEEXGX

SEQ ID NO: 71141 - protein, 38 aa, Artificial Sequence
  GFR-binding peptide
  MOD_RES (4)..(5)..(38): Xaa is C or S
  MOD_RES (19)..(20)..(21)..(22)..(23): Xaa is A or G
  MOD_RES (24)..(25)..(26)..(27): Xaa is A or G or is absent
ASPXXVPQDLSPINILYFXXXXXXXXXYGKIPMVVKSX

SEQ ID NO: 71142 - protein, 36 aa, Artificial Sequence
  GFR-binding peptide
  MOD_RES (4)..(5): Xaa is C or S
PEPXXVPEKMSATSILYYDENKNVVLRKHRNMTVES

SEQ ID NO: 71143 - protein, 33 aa, Artificial Sequence; identical to SEQ ID NO: 30247
  GFR-binding peptide
  MOD_RES (1)..(1): Xaa is C or S
  MOD_RES (15)..(16)..(17)..(18)..(19): Xaa is A or G
  MOD_RES (20)..(21)..(22)..(23): Xaa is A or G or is absent

SEQ ID NO: 71144 - protein, 36 aa, Artificial Sequence
  GFR-binding peptide
  MOD_RES (2)..(3): Xaa is C or S
  MOD_RES (17)..(18)..(19)..(20)..(21): Xaa is A or G
  MOD_RES (22)..(23)..(24)..(25): Xaa is A or G or is absent
TXXVPTRLEPISILYLXXXXXXXXXKFKYEDMVVES

SEQ ID NO: 71145 - protein, 36 aa, Artificial Sequence; identical to SEQ ID NO: 32321
  GFR-binding peptide
  MOD_RES (5)..(6): Xaa is C or S

SEQ ID NO: 71146 - protein, 34 aa, Artificial Sequence
  GFR-binding peptide
  MOD_RES (32)..(34): Xaa is C or S
VPTRLSPISILYKDSANNVVLKYHYDMVVESXGX

SEQ ID NO: 71147 - protein, 35 aa, Artificial Sequence
  GFR-binding peptide
  MOD_RES (1)..(35): Xaa is C or S
  MOD_RES (15)..(16)..(17)..(18)..(19): Xaa is A or G
  MOD_RES (20)..(21)..(22)..(23): Xaa is A or G or is absent
XVPEKMSPINILYFXXXXXXXXXYGKIPNMTVESX

SEQ ID NO: 71148 - protein, 33 aa, Artificial Sequence; identical to SEQ ID NO: 30249
  GFR-binding peptide
  MOD_RES (1)..(1): Xaa is C or S
  MOD_RES (15)..(16)..(17)..(18)..(19): Xaa is A or G
  MOD_RES (20)..(21)..(22)..(23): Xaa is A or G or is absent

SEQ ID NO: 71149 - protein, 39 aa, Artificial Sequence; identical to SEQ ID NO: 32325
  GFR-binding peptide
  MOD_RES (3)..(37)..(39): Xaa is C or S
  MOD_RES (17)..(18)..(19)..(20)..(21): Xaa is A or G
  MOD_RES (22)..(23)..(24)..(25): Xaa is A or G or is absent

SEQ ID NO: 71150 - protein, 42 aa, Artificial Sequence; identical to SEQ ID NO: 30255
  GFR-binding peptide
  MOD_RES (6)..(40)..(42): Xaa is C or S
  MOD_RES (20)..(21)..(22)..(23)..(24): Xaa is A or G
  MOD_RES (25)..(26)..(27)..(28): Xaa is A or G or is absent

SEQ ID NO: 71151 - protein, 36 aa, Artificial Sequence; identical to SEQ ID NO: 32328
  GFR-binding peptide
  MOD_RES (2)..(3)..(35): Xaa is C or S

SEQ ID NO: 71152 - protein, 37 aa, Artificial Sequence; identical to SEQ ID NO: 8895
  GFR-binding peptide
  MOD_RES (6)..(7): Xaa is C or S

SEQ ID NO: 71153 - protein, 36 aa, Artificial Sequence; identical to SEQ ID NO: 30262
  GFR-binding peptide
  MOD_RES (2)..(3)..(35): Xaa is C or S

SEQ ID NO: 71154 - protein, 41 aa, Artificial Sequence; identical to SEQ ID NO: 8899
  GFR-binding peptide
  MOD_RES (5)..(6)..(41): Xaa is C or S
  MOD_RES (20)..(21)..(22)..(23)..(24): Xaa is A or G
  MOD_RES (25)..(26)..(27)..(28): Xaa is A or G or is absent

SEQ ID NO: 71155 - protein, 34 aa, Artificial Sequence; identical to SEQ ID NO: 8903
  GFR-binding peptide
  MOD_RES (34)..(34): Xaa is C or S
  MOD_RES (14)..(15)..(16)..(17)..(18): Xaa is A or G
  MOD_RES (19)..(20)..(21)..(22): Xaa is A or G or is absent

SEQ ID NO: 71156 - protein, 36 aa, Artificial Sequence
  GFR-binding peptide
  MOD_RES (4)..(5)..(36): Xaa is C or S
ASPXXVPQDLSPINILYFVGRTPKVYGKIPMVVKSX

SEQ ID NO: 71157 - protein, 44 aa, Artificial Sequence; identical to SEQ ID NO: 32340
  GFR-binding peptide
  MOD_RES (6)..(7)..(41)..(43): Xaa is C or S
  MOD_RES (21)..(22)..(23)..(24)..(25): Xaa is A or G
  MOD_RES (26)..(27)..(28)..(29): Xaa is A or G or is absent

SEQ ID NO: 71158 - protein, 38 aa, Artificial Sequence
  GFR-binding peptide
  MOD_RES (5)..(6): Xaa is C or S
  MOD_RES (20)..(21)..(22)..(23)..(24): Xaa is A or G
  MOD_RES (25)..(26)..(27)..(28): Xaa is A or G or is absent
VPSTXXAPVKTSATSMLYYXXXXXXXXXLRKHRMIVEE

SEQ ID NO: 71159 - protein, 34 aa, Artificial Sequence; identical to SEQ ID NO: 32343
  GFR-binding peptide
  MOD_RES (2)..(3): Xaa is C or S

SEQ ID NO: 71160 - protein, 36 aa, Artificial Sequence
  GFR-binding peptide
  MOD_RES (1)..(2)..(34)..(36): Xaa is C or S
XXVPEKMNAISILYFDENKNVVLKKYRNMTVESXAX

SEQ ID NO: 71161 - protein, 36 aa, Artificial Sequence; identical to SEQ ID NO: 30275
  GFR-binding peptide
  MOD_RES (5)..(6): Xaa is C or S

SEQ ID NO: 71162 - protein, 37 aa, Artificial Sequence
  GFR-binding peptide
  MOD_RES (6)..(7): Xaa is C or S
HVPKPXXAPTKLSPISVLYKDDSSNVILKYHYNMVVR

SEQ ID NO: 71163 - protein, 34 aa, Artificial Sequence
  GFR-binding peptide
  MOD_RES (32)..(34): Xaa is C or S
VPTRLEPISILYLDSANNVVKFKYEDMVVESXGX

SEQ ID NO: 71164 - protein, 39 aa, Artificial Sequence; identical to SEQ ID NO: 32346
  GFR-binding peptide
  MOD_RES (3)..(4)..(36)..(38): Xaa is C or S

SEQ ID NO: 71165 - protein, 37 aa, Artificial Sequence
  GFR-binding peptide
  MOD_RES (34)..(36): Xaa is C or S
  MOD_RES (14)..(15)..(16)..(17)..(18): Xaa is A or G
  MOD_RES (19)..(20)..(21)..(22): Xaa is A or G or is absent
VPTKLSATSILYYXXXXXXXXXLRKHRGMAVSEXGXR

SEQ ID NO: 71166 - protein, 35 aa, Artificial Sequence; identical to SEQ ID NO: 30277
  GFR-binding peptide
  MOD_RES (1)..(33)..(35): Xaa is C or S

SEQ ID NO: 71167 - protein, 40 aa, Artificial Sequence; identical to SEQ ID NO: 32353
  GFR-binding peptide
  MOD_RES (3)..(4)..(38)..(40): Xaa is C or S
  MOD_RES (18)..(19)..(20)..(21)..(22): Xaa is A or G
  MOD_RES (23)..(24)..(25)..(26): Xaa is A or G or is absent

SEQ ID NO: 71168 - protein, 36 aa, Artificial Sequence; identical to SEQ ID NO: 30281
  GFR-binding peptide
  MOD_RES (1)..(33)..(35): Xaa is C or S

SEQ ID NO: 71169 - protein, 43 aa, Artificial Sequence; identical to SEQ ID NO: 30282
  GFR-binding peptide
  MOD_RES (6)..(7)..(41)..(43): Xaa is C or S
  MOD_RES (21)..(22)..(23)..(24)..(25): Xaa is A or G
  MOD_RES (26)..(27)..(28)..(29): Xaa is A or G or is absent

SEQ ID NO: 71170 - protein, 34 aa, Artificial Sequence; identical to SEQ ID NO: 8911
  GFR-binding peptide
  MOD_RES (1)..(32)..(34): Xaa is C or S

SEQ ID NO: 71171 - protein, 36 aa, Artificial Sequence; identical to SEQ ID NO: 30285
  GFR-binding peptide
  MOD_RES (3)..(4): Xaa is C or S
  MOD_RES (18)..(19)..(20)..(21)..(22): Xaa is A or G
  MOD_RES (23)..(24)..(25)..(26): Xaa is A or G or is absent

SEQ ID NO: 71172 - protein, 30 aa, Artificial Sequence
  GFR-binding peptide
VPEKMNAISILYFDENKNVVLKKYRNMTVE

SEQ ID NO: 71173 - protein, 36 aa, Artificial Sequence
  GFR-binding peptide
  MOD_RES (2)..(3)..(36): Xaa is C or S
  MOD_RES (17)..(18)..(19)..(20)..(21): Xaa is A or G
  MOD_RES (22)..(23)..(24)..(25): Xaa is A or G or is absent
TXXAPVKTEPISMLYLXXXXXXXXXKFKYEMIVEEX

SEQ ID NO: 71174 - protein, 36 aa, Artificial Sequence; identical to SEQ ID NO: 16218
  GFR-binding peptide
  MOD_RES (34)..(36): Xaa is C or S
  MOD_RES (14)..(15)..(16)..(17)..(18): Xaa is A or G
  MOD_RES (19)..(20)..(21)..(22): Xaa is A or G or is absent

SEQ ID NO: 71175 - protein, 36 aa, Artificial Sequence; identical to SEQ ID NO: 8917
  GFR-binding peptide
  MOD_RES (3)..(4)..(35): Xaa is C or S

SEQ ID NO: 71176 - protein, 35 aa, Artificial Sequence; identical to SEQ ID NO: 32358
  GFR-binding peptide
  MOD_RES (1)..(33)..(35): Xaa is C or S

SEQ ID NO: 71177 - protein, 33 aa, Artificial Sequence; identical to SEQ ID NO: 16220
  GFR-binding peptide
  MOD_RES (32)..(32): Xaa is C or S

SEQ ID NO: 71178 - protein, 39 aa, Artificial Sequence; identical to SEQ ID NO: 8919
  GFR-binding peptide
  MOD_RES (2)..(3)..(36)..(38): Xaa is C or S

SEQ ID NO: 71179 - protein, 38 aa, Artificial Sequence; identical to SEQ ID NO: 8920
  GFR-binding peptide
  MOD_RES (3)..(4)..(36)..(38): Xaa is C or S

SEQ ID NO: 71180 - protein, 35 aa, Artificial Sequence
  GFR-binding peptide
  MOD_RES (2)..(3)..(34): Xaa is C or S
PXXVSQDLSPINILYFIGKTPKIYGKIPMIVKSXK

SEQ ID NO: 71181 - protein, 35 aa, Artificial Sequence; identical to SEQ ID NO: 8921
  GFR-binding peptide
  MOD_RES (1)..(2)..(35): Xaa is C or S
  MOD_RES (16)..(17)..(18)..(19)..(20): Xaa is A or G
  MOD_RES (21)..(22)..(23)..(24): Xaa is A or G or is absent

SEQ ID NO: 71182 - protein, 45 aa, Artificial Sequence; identical to SEQ ID NO: 8922
  GFR-binding peptide
  MOD_RES (6)..(7)..(42)..(44): Xaa is C or S
  MOD_RES (21)..(22)..(23)..(24)..(25): Xaa is A or G
  MOD_RES (26)..(27)..(28)..(29): Xaa is A or G or is absent

SEQ ID NO: 71183 - protein, 42 aa, Artificial Sequence
  GFR-binding peptide
  MOD_RES (6)..(7)..(41): Xaa is C or S
  MOD_RES (21)..(22)..(23)..(24)..(25): Xaa is A or G
  MOD_RES (26)..(27)..(28)..(29): Xaa is A or G or is absent
KASKAXXVPTKLSATSILYYXXXXXXXXXLRKHRGMAVSEXG

SEQ ID NO: 71184 - protein, 36 aa, Artificial Sequence; identical to SEQ ID NO: 8924
  GFR-binding peptide
  MOD_RES (1)..(33)..(35): Xaa is C or S

SEQ ID NO: 71185 - protein, 40 aa, Artificial Sequence; identical to SEQ ID NO: 8926
  GFR-binding peptide
  MOD_RES (5)..(6)..(38)..(40): Xaa is C or S

SEQ ID NO: 71186 - protein, 38 aa, Artificial Sequence; identical to SEQ ID NO: 32368
  GFR-binding peptide
  MOD_RES (3)..(4)..(38): Xaa is C or S
  MOD_RES (18)..(19)..(20)..(21)..(22): Xaa is A or G
  MOD_RES (23)..(24)..(25)..(26): Xaa is A or G or is absent

SEQ ID NO: 71187 - protein, 34 aa, Artificial Sequence; identical to SEQ ID NO: 32369
  GFR-binding peptide
  MOD_RES (14)..(15)..(16)..(17)..(18): Xaa is A or G
  MOD_RES (19)..(20)..(21)..(22): Xaa is A or G or is absent

SEQ ID NO: 71188 - protein, 34 aa, Artificial Sequence; identical to SEQ ID NO: 30302
  GFR-binding peptide
  MOD_RES (1)..(2): Xaa is C or S
  MOD_RES (16)..(17)..(18)..(19)..(20): Xaa is A or G
  MOD_RES (21)..(22)..(23)..(24): Xaa is A or G or is absent

SEQ ID NO: 71189 - protein, 41 aa, Artificial Sequence; identical to SEQ ID NO: 32373
  GFR-binding peptide
  MOD_RES (4)..(5)..(39)..(41): Xaa is C or S
  MOD_RES (19)..(20)..(21)..(22)..(23): Xaa is A or G
  MOD_RES (24)..(25)..(26)..(27): Xaa is A or G or is absent

SEQ ID NO: 71190 - protein, 43 aa, Artificial Sequence; identical to SEQ ID NO: 8929
  GFR-binding peptide
  MOD_RES (6)..(7)..(41)..(43): Xaa is C or S
  MOD_RES (21)..(22)..(23)..(24)..(25): Xaa is A or G
  MOD_RES (26)..(27)..(28)..(29): Xaa is A or G or is absent

SEQ ID NO: 71191 - protein, 42 aa, Artificial Sequence; identical to SEQ ID NO: 8930
  GFR-binding peptide
  MOD_RES (4)..(5)..(39)..(41): Xaa is C or S
  MOD_RES (19)..(20)..(21)..(22)..(23): Xaa is A or G
  MOD_RES (24)..(25)..(26)..(27): Xaa is A or G or is absent

SEQ ID NO: 71192 - protein, 39 aa, Artificial Sequence; identical to SEQ ID NO: 30305
  GFR-binding peptide
  MOD_RES (6)..(7)..(39): Xaa is C or S

SEQ ID NO: 71193 - protein, 34 aa, Artificial Sequence; identical to SEQ ID NO: 32376
  GFR-binding peptide
  MOD_RES (1)..(33): Xaa is C or S

SEQ ID NO: 71194 - protein, 32 aa, Artificial Sequence; identical to SEQ ID NO: 8933
  GFR-binding peptide
  MOD_RES (14)..(15)..(16)..(17)..(18): Xaa is A or G
  MOD_RES (19)..(20)..(21)..(22): Xaa is A or G or is absent

SEQ ID NO: 71195 - protein, 31 aa, Artificial Sequence
  GFR-binding peptide
  MOD_RES (1)..(1): Xaa is C or S
XVSQDLSPINILYFIGKTPKIYGKIPMIVKS

SEQ ID NO: 71196 - protein, 39 aa, Artificial Sequence; identical to SEQ ID NO: 8935
  GFR-binding peptide
  MOD_RES (3)..(4)..(37)..(39): Xaa is C or S
  MOD_RES (18)..(19)..(20)..(21)..(22): Xaa is A or G
  MOD_RES (23)..(24)..(25)..(26): Xaa is A or G or is absent

SEQ ID NO: 71197 - protein, 41 aa, Artificial Sequence; identical to SEQ ID NO: 32381
  GFR-binding peptide
  MOD_RES (7)..(39)..(41): Xaa is C or S

SEQ ID NO: 71198 - protein, 33 aa, Artificial Sequence
  GFR-binding peptide
  MOD_RES (32)..(32): Xaa is C or S
VPTRLEPISILYLDSANNVVKFKYEDMVVESXG

SEQ ID NO: 71199 - protein, 38 aa, Artificial Sequence; identical to SEQ ID NO: 8940
  GFR-binding peptide
  MOD_RES (6)..(7): Xaa is C or S

SEQ ID NO: 71200 - protein, 37 aa, Artificial Sequence; identical to SEQ ID NO: 8942
  GFR-binding peptide
  MOD_RES (2)..(3)..(37): Xaa is C or S
  MOD_RES (17)..(18)..(19)..(20)..(21): Xaa is A or G
  MOD_RES (22)..(23)..(24)..(25): Xaa is A or G or is absent

SEQ ID NO: 71201 - protein, 34 aa, Artificial Sequence
  GFR-binding peptide
  MOD_RES (1)..(2)..(34): Xaa is C or S
XXVPTKLSATSILYYDKGVVTYLRKHRGMAVSEX

SEQ ID NO: 71202 - protein, 39 aa, Artificial Sequence; identical to SEQ ID NO: 8944
  GFR-binding peptide
  MOD_RES (1)..(2)..(36)..(38): Xaa is C or S
  MOD_RES (16)..(17)..(18)..(19)..(20): Xaa is A or G
  MOD_RES (21)..(22)..(23)..(24): Xaa is A or G or is absent

SEQ ID NO: 71203 - protein, 37 aa, Artificial Sequence; identical to SEQ ID NO: 30316
  GFR-binding peptide
  MOD_RES (5)..(6)..(37): Xaa is C or S

SEQ ID NO: 71204 - protein, 32 aa, Artificial Sequence; identical to SEQ ID NO: 32395
  GFR-binding peptide
  MOD_RES (14)..(15)..(16)..(17)..(18): Xaa is A or G
  MOD_RES (19)..(20)..(21)..(22): Xaa is A or G or is absent

SEQ ID NO: 71205 - protein, 33 aa, Artificial Sequence
  GFR-binding peptide
  MOD_RES (14)..(15)..(16)..(17)..(18): Xaa is A or G
  MOD_RES (19)..(20)..(21)..(22): Xaa is A or G or is absent
VPEKMSPINILYFXXXXXXXXXYGKIPNMTVES

SEQ ID NO: 71206 - protein, 38 aa, Artificial Sequence
  GFR-binding peptide
  MOD_RES (5)..(6)..(38): Xaa is C or S
TPPTXXVPTRLSATSILYYDSANNVVLRKHRDMVVESX

SEQ ID NO: 71207 - protein, 35 aa, Artificial Sequence
  GFR-binding peptide
  MOD_RES (32)..(34): Xaa is C or S
TPTKMEPISMLYLNDKQQIIKFKYEGMVVDRXGXS

SEQ ID NO: 71208 - protein, 41 aa, Artificial Sequence; identical to SEQ ID NO: 8949
  GFR-binding peptide
  MOD_RES (5)..(6)..(38)..(40): Xaa is C or S

SEQ ID NO: 71209 - protein, 39 aa, Artificial Sequence; identical to SEQ ID NO: 8952
  GFR-binding peptide
  MOD_RES (5)..(6)..(38): Xaa is C or S

SEQ ID NO: 71210 - protein, 31 aa, Artificial Sequence; identical to SEQ ID NO: 8956
  GFR-binding peptide
  MOD_RES (1)..(1): Xaa is C or S

SEQ ID NO: 71211 - protein, 34 aa, Artificial Sequence; identical to SEQ ID NO: 30330
  GFR-binding peptide
  MOD_RES (2)..(3): Xaa is C or S

SEQ ID NO: 71212 - protein, 40 aa, Artificial Sequence
  GFR-binding peptide
  MOD_RES (5)..(6)..(40): Xaa is C or S
  MOD_RES (20)..(21)..(22)..(23)..(24): Xaa is A or G
  MOD_RES (25)..(26)..(27)..(28): Xaa is A or G or is absent
APASXXVPARLSATSILYYXXXXXXXXXLRKHRDMVVEAX

SEQ ID NO: 71213 - protein, 37 aa, Artificial Sequence; identical to SEQ ID NO: 8965
  GFR-binding peptide
  MOD_RES (5)..(6): Xaa is C or S

SEQ ID NO: 71214 - protein, 35 aa, Artificial Sequence; identical to SEQ ID NO: 30340
  GFR-binding peptide
  MOD_RES (34)..(34): Xaa is C or S
  MOD_RES (14)..(15)..(16)..(17)..(18): Xaa is A or G
  MOD_RES (19)..(20)..(21)..(22): Xaa is A or G or is absent

SEQ ID NO: 71215 - protein, 40 aa, Artificial Sequence
  GFR-binding peptide
  MOD_RES (4)..(5)..(39): Xaa is C or S
  MOD_RES (19)..(20)..(21)..(22)..(23): Xaa is A or G
  MOD_RES (24)..(25)..(26)..(27): Xaa is A or G or is absent
PEPXXVPEKMSPISILYKXXXXXXXXXLKYHYNMTVESXA

SEQ ID NO: 71216 - protein, 39 aa, Artificial Sequence; identical to SEQ ID NO: 8969
  GFR-binding peptide
  MOD_RES (2)..(3)..(36)..(38): Xaa is C or S
  MOD_RES (17)..(18)..(19)..(20)..(21): Xaa is A or G
  MOD_RES (22)..(23)..(24)..(25): Xaa is A or G or is absent

SEQ ID NO: 71217 - protein, 41 aa, Artificial Sequence
  GFR-binding peptide
  MOD_RES (5)..(6)..(38)..(40): Xaa is C or S
TPPTXXVPTRLSATSILYYDSANNVVLRKHRDMVVESXGXR

SEQ ID NO: 71218 - protein, 41 aa, Artificial Sequence; identical to SEQ ID NO: 8972
  GFR-binding peptide
  MOD_RES (4)..(5)..(38)..(40): Xaa is C or S
  MOD_RES (19)..(20)..(21)..(22)..(23): Xaa is A or G
  MOD_RES (24)..(25)..(26)..(27): Xaa is A or G or is absent

SEQ ID NO: 71219 - protein, 35 aa, Artificial Sequence
  GFR-binding peptide
  MOD_RES (32)..(34): Xaa is C or S
TPTKMSPISMLYKNDKQQIILKYHYGMVVDRXGXS

SEQ ID NO: 71220 - protein, 39 aa, Artificial Sequence
  GFR-binding peptide
  MOD_RES (3)..(4)..(37)..(39): Xaa is C or S
  MOD_RES (18)..(19)..(20)..(21)..(22): Xaa is A or G
  MOD_RES (23)..(24)..(25)..(26): Xaa is A or G or is absent
APXXVPQALSPINILYFXXXXXXXXXYGKIPMIVRSXKX

SEQ ID NO: 71221 - protein, 37 aa, Artificial Sequence; identical to SEQ ID NO: 57342
  GFR-binding peptide
  MOD_RES (1)..(35)..(37): Xaa is C or S
  MOD_RES (15)..(16)..(17)..(18)..(19): Xaa is A or G
  MOD_RES (20)..(21)..(22)..(23): Xaa is A or G or is absent

SEQ ID NO: 71222 - protein, 39 aa, Artificial Sequence; identical to SEQ ID NO: 32426
  GFR-binding peptide
  MOD_RES (6)..(7): Xaa is C or S
  MOD_RES (21)..(22)..(23)..(24)..(25): Xaa is A or G
  MOD_RES (26)..(27)..(28)..(29): Xaa is A or G or is absent

SEQ ID NO: 71223 - protein, 31 aa, Artificial Sequence; identical to SEQ ID NO: 8975
  GFR-binding peptide
  MOD_RES (1)..(1): Xaa is C or S

SEQ ID NO: 71224 - protein, 35 aa, Artificial Sequence; identical to SEQ ID NO: 30350
  GFR-binding peptide
  MOD_RES (1)..(33)..(35): Xaa is C or S

SEQ ID NO: 71225 - protein, 44 aa, Artificial Sequence; identical to SEQ ID NO: 8976
  GFR-binding peptide
  MOD_RES (5)..(6)..(41)..(43): Xaa is C or S
  MOD_RES (20)..(21)..(22)..(23)..(24): Xaa is A or G
  MOD_RES (25)..(26)..(27)..(28): Xaa is A or G or is absent

SEQ ID NO: 71226 - protein, 34 aa, Artificial Sequence; identical to SEQ ID NO: 30353
  GFR-binding peptide
  MOD_RES (3)..(4): Xaa is C or S

SEQ ID NO: 71227 - protein, 44 aa, Artificial Sequence; identical to SEQ ID NO: 8978
  GFR-binding peptide
  MOD_RES (6)..(7)..(41)..(43): Xaa is C or S
  MOD_RES (21)..(22)..(23)..(24)..(25): Xaa is A or G
  MOD_RES (26)..(27)..(28)..(29): Xaa is A or G or is absent

SEQ ID NO: 71228 - protein, 39 aa, Artificial Sequence
  GFR-binding peptide
  MOD_RES (5)..(6)..(37)..(39): Xaa is C or S
VPSTXXAPVKTSPISMLYKDNGRVLLLKYHYMIVEEXGX

SEQ ID NO: 71229 - protein, 31 aa, Artificial Sequence
  GFR-binding peptide
  MOD_RES (1)..(1): Xaa is C or S
XVPARLSATSILYYDAANNVVLRKHRDMVVE

SEQ ID NO: 71230 - protein, 37 aa, Artificial Sequence; identical to SEQ ID NO: 32433
  GFR-binding peptide
  MOD_RES (3)..(4)..(36): Xaa is C or S

SEQ ID NO: 71231 - protein, 36 aa, Artificial Sequence; identical to SEQ ID NO: 30357
  GFR-binding peptide
  MOD_RES (1)..(2)..(33)..(35): Xaa is C or S

SEQ ID NO: 71232 - protein, 39 aa, Artificial Sequence; identical to SEQ ID NO: 57351
  GFR-binding peptide
  MOD_RES (2)..(3)..(37)..(39): Xaa is C or S
  MOD_RES (17)..(18)..(19)..(20)..(21): Xaa is A or G
  MOD_RES (22)..(23)..(24)..(25): Xaa is A or G or is absent

SEQ ID NO: 71233 - protein, 42 aa, Artificial Sequence; identical to SEQ ID NO: 8984
  GFR-binding peptide
  MOD_RES (4)..(5)..(39)..(41): Xaa is C or S
  MOD_RES (19)..(20)..(21)..(22)..(23): Xaa is A or G
  MOD_RES (24)..(25)..(26)..(27): Xaa is A or G or is absent

SEQ ID NO: 71234 - protein, 42 aa, Artificial Sequence
  GFR-binding peptide
  MOD_RES (4)..(5)..(39)..(41): Xaa is C or S
  MOD_RES (19)..(20)..(21)..(22)..(23): Xaa is A or G
  MOD_RES (24)..(25)..(26)..(27): Xaa is A or G or is absent
PPTXXVPTRLEPISILYLXXXXXXXXXKFKYEDMVVESXGXR

SEQ ID NO: 71235 - protein, 36 aa, Artificial Sequence; identical to SEQ ID NO: 16277
  GFR-binding peptide
  MOD_RES (3)..(4): Xaa is C or S
  MOD_RES (18)..(19)..(20)..(21)..(22): Xaa is A or G
  MOD_RES (23)..(24)..(25)..(26): Xaa is A or G or is absent

SEQ ID NO: 71236 - protein, 38 aa, Artificial Sequence
  GFR-binding peptide
  MOD_RES (3)..(4)..(36)..(38): Xaa is C or S
PTXXVPTRLEPISILYLDSANNVVKFKYEDMVVESXGX

SEQ ID NO: 71237 - protein, 36 aa, Artificial Sequence; identical to SEQ ID NO: 32445
  GFR-binding peptide
  MOD_RES (5)..(6): Xaa is C or S

SEQ ID NO: 71238 - protein, 37 aa, Artificial Sequence; identical to SEQ ID NO: 32447
  GFR-binding peptide
  MOD_RES (4)..(5): Xaa is C or S
  MOD_RES (19)..(20)..(21)..(22)..(23): Xaa is A or G
  MOD_RES (24)..(25)..(26)..(27): Xaa is A or G or is absent

SEQ ID NO: 71239 - protein, 38 aa, Artificial Sequence; identical to SEQ ID NO: 8989
  GFR-binding peptide
  MOD_RES (5)..(6): Xaa is C or S
  MOD_RES (20)..(21)..(22)..(23)..(24): Xaa is A or G
  MOD_RES (25)..(26)..(27)..(28): Xaa is A or G or is absent

SEQ ID NO: 71240 - protein, 39 aa, Artificial Sequence; identical to SEQ ID NO: 8990
  GFR-binding peptide
  MOD_RES (1)..(36)..(38): Xaa is C or S
  MOD_RES (15)..(16)..(17)..(18)..(19): Xaa is A or G
  MOD_RES (20)..(21)..(22)..(23): Xaa is A or G or is absent

SEQ ID NO: 71241 - protein, 33 aa, Artificial Sequence; identical to SEQ ID NO: 8997
  GFR-binding peptide
  MOD_RES (1)..(33): Xaa is C or S

SEQ ID NO: 71242 - protein, 36 aa, Artificial Sequence
  GFR-binding peptide
  MOD_RES (1)..(34)..(36): Xaa is C or S
  MOD_RES (15)..(16)..(17)..(18)..(19): Xaa is A or G
  MOD_RES (20)..(21)..(22)..(23): Xaa is A or G or is absent
XVPQDLSPINILYFXXXXXXXXXYGKIPMVVKSXKX

SEQ ID NO: 71243 - protein, 32 aa, Artificial Sequence; identical to SEQ ID NO: 30376
  GFR-binding peptide
  MOD_RES (1)..(32): Xaa is C or S

SEQ ID NO: 71244 - protein, 40 aa, Artificial Sequence; identical to SEQ ID NO: 8999
  GFR-binding peptide
  MOD_RES (6)..(7)..(38)..(40): Xaa is C or S

SEQ ID NO: 71245 - protein, 39 aa, Artificial Sequence; identical to SEQ ID NO: 9000
  GFR-binding peptide
  MOD_RES (7)..(39): Xaa is C or S

SEQ ID NO: 71246 - protein, 35 aa, Artificial Sequence
  GFR-binding peptide
  MOD_RES (2)..(3)..(35): Xaa is C or S
AXXVPTKLSATSILYYDKGVVTYLRKHRGMAVSEX

SEQ ID NO: 71247 - protein, 39 aa, Artificial Sequence; identical to SEQ ID NO: 30378
  GFR-binding peptide
  MOD_RES (2)..(3)..(38): Xaa is C or S
  MOD_RES (17)..(18)..(19)..(20)..(21): Xaa is A or G
  MOD_RES (22)..(23)..(24)..(25): Xaa is A or G or is absent

SEQ ID NO: 71248 - protein, 42 aa, Artificial Sequence
  GFR-binding peptide
  MOD_RES (5)..(6)..(40)..(42): Xaa is C or S
  MOD_RES (20)..(21)..(22)..(23)..(24): Xaa is A or G
  MOD_RES (25)..(26)..(27)..(28): Xaa is A or G or is absent
SAGPXXTPTKMSATSMLYYXXXXXXXXXLRKHRGMVVDRXGX

SEQ ID NO: 71249 - protein, 38 aa, Artificial Sequence
  GFR-binding peptide
  MOD_RES (4)..(5): Xaa is C or S
  MOD_RES (19)..(20)..(21)..(22)..(23): Xaa is A or G
  MOD_RES (24)..(25)..(26)..(27): Xaa is A or G or is absent
SKAXXVPTKLSATSILYYXXXXXXXXXLRKHRGMAVSE

SEQ ID NO: 71250 - protein, 31 aa, Artificial Sequence; identical to SEQ ID NO: 9003
  GFR-binding peptide
  MOD_RES (1)..(1): Xaa is C or S

SEQ ID NO: 71251 - protein, 37 aa, Artificial Sequence
  GFR-binding peptide
  MOD_RES (2)..(3)..(34)..(36): Xaa is C or S
PXXVPQALSPINILYFVGRKPKVYGKIPMIVRSXKXS

SEQ ID NO: 71252 - protein, 42 aa, Artificial Sequence; identical to SEQ ID NO: 16301
  GFR-binding peptide
  MOD_RES (4)..(5)..(39)..(41): Xaa is C or S
  MOD_RES (19)..(20)..(21)..(22)..(23): Xaa is A or G
  MOD_RES (24)..(25)..(26)..(27): Xaa is A or G or is absent

SEQ ID NO: 71253 - protein, 32 aa, Artificial Sequence; identical to SEQ ID NO: 9010
  GFR-binding peptide
  MOD_RES (1)..(2): Xaa is C or S

SEQ ID NO: 71254 - protein, 39 aa, Artificial Sequence; identical to SEQ ID NO: 30390
  GFR-binding peptide
  MOD_RES (4)..(5)..(39): Xaa is C or S
  MOD_RES (19)..(20)..(21)..(22)..(23): Xaa is A or G
  MOD_RES (24)..(25)..(26)..(27): Xaa is A or G or is absent

SEQ ID NO: 71255 - protein, 31 aa, Artificial Sequence; identical to SEQ ID NO: 16304
  GFR-binding peptide

SEQ ID NO: 71256 - protein, 34 aa, Artificial Sequence
  GFR-binding peptide
  MOD_RES (31)..(33): Xaa is C or S
APVKTSPISMLYKDNGRVLLLKYHYMIVEEXGXL

SEQ ID NO: 71257 - protein, 33 aa, Artificial Sequence; identical to SEQ ID NO: 9011
  GFR-binding peptide
  MOD_RES (1)..(2): Xaa is C or S

SEQ ID NO: 71258 - protein, 32 aa, Artificial Sequence; identical to SEQ ID NO: 9012
  GFR-binding peptide
  MOD_RES (1)..(2): Xaa is C or S

SEQ ID NO: 71259 - protein, 32 aa, Artificial Sequence; identical to SEQ ID NO: 30396
  GFR-binding peptide
  MOD_RES (1)..(2): Xaa is C or S

SEQ ID NO: 71260 - protein, 39 aa, Artificial Sequence
  GFR-binding peptide
  MOD_RES (4)..(5)..(37)..(39): Xaa is C or S
PEPXXVPEKMSPINILYFDENKNVVYGKIPNMTVESXAX

SEQ ID NO: 71261 - protein, 41 aa, Artificial Sequence; identical to SEQ ID NO: 32490
  GFR-binding peptide
  MOD_RES (3)..(4)..(38)..(40): Xaa is C or S
  MOD_RES (18)..(19)..(20)..(21)..(22): Xaa is A or G
  MOD_RES (23)..(24)..(25)..(26): Xaa is A or G or is absent

SEQ ID NO: 71262 - protein, 41 aa, Artificial Sequence; identical to SEQ ID NO: 9021
  GFR-binding peptide
  MOD_RES (3)..(4)..(38)..(40): Xaa is C or S
  MOD_RES (18)..(19)..(20)..(21)..(22): Xaa is A or G
  MOD_RES (23)..(24)..(25)..(26): Xaa is A or G or is absent

SEQ ID NO: 71263 - protein, 40 aa, Artificial Sequence; identical to SEQ ID NO: 30402
  GFR-binding peptide
  MOD_RES (7)..(7): Xaa is C or S
  MOD_RES (21)..(22)..(23)..(24)..(25): Xaa is A or G
  MOD_RES (26)..(27)..(28)..(29): Xaa is A or G or is absent

SEQ ID NO: 71264 - protein, 38 aa, Artificial Sequence
  GFR-binding peptide
  MOD_RES (3)..(4)..(36)..(38): Xaa is C or S
EPXXVPEKMSATSILYYDENKNVVLRKHRNMTVESXAX

SEQ ID NO: 71265 - protein, 34 aa, Artificial Sequence; identical to SEQ ID NO: 9022
  GFR-binding peptide
  MOD_RES (1)..(2): Xaa is C or S
  MOD_RES (16)..(17)..(18)..(19)..(20): Xaa is A or G
  MOD_RES (21)..(22)..(23)..(24): Xaa is A or G or is absent

SEQ ID NO: 71266 - protein, 36 aa, Artificial Sequence; identical to SEQ ID NO: 9023
  GFR-binding peptide
  MOD_RES (3)..(4): Xaa is C or S
  MOD_RES (18)..(19)..(20)..(21)..(22): Xaa is A or G
  MOD_RES (23)..(24)..(25)..(26): Xaa is A or G or is absent

SEQ ID NO: 71267 - protein, 41 aa, Artificial Sequence; identical to SEQ ID NO: 30405
  GFR-binding peptide
  MOD_RES (4)..(5)..(39)..(41): Xaa is C or S
  MOD_RES (19)..(20)..(21)..(22)..(23): Xaa is A or G
  MOD_RES (24)..(25)..(26)..(27): Xaa is A or G or is absent

SEQ ID NO: 71268 - protein, 41 aa, Artificial Sequence
  GFR-binding peptide
  MOD_RES (5)..(6)..(40): Xaa is C or S
  MOD_RES (20)..(21)..(22)..(23)..(24): Xaa is A or G
  MOD_RES (25)..(26)..(27)..(28): Xaa is A or G or is absent
ASKAXXVPTKLSATSILYYXXXXXXXXXLRKHRGMAVSEXG

SEQ ID NO: 71269 - protein, 37 aa, Artificial Sequence
  GFR-binding peptide
  MOD_RES (6)..(7): Xaa is C or S
RVPSTXXAPVKTSPISMLYKDNGRVLLLKYHYMIVEE

SEQ ID NO: 71270 - protein, 38 aa, Artificial Sequence; identical to SEQ ID NO: 30409
  GFR-binding peptide
  MOD_RES (4)..(5)..(36)..(38): Xaa is C or S

SEQ ID NO: 71271 - protein, 37 aa, Artificial Sequence; identical to SEQ ID NO: 9026
  GFR-binding peptide
  MOD_RES (2)..(3)..(35)..(37): Xaa is C or S

SEQ ID NO: 71272 - protein, 37 aa, Artificial Sequence; identical to SEQ ID NO: 32505
  GFR-binding peptide
  MOD_RES (1)..(2)..(36): Xaa is C or S
  MOD_RES (16)..(17)..(18)..(19)..(20): Xaa is A or G
  MOD_RES (21)..(22)..(23)..(24): Xaa is A or G or is absent

SEQ ID NO: 71273 - protein, 33 aa, Artificial Sequence
  GFR-binding peptide
  MOD_RES (1)..(33): Xaa is C or S
XTPTKMEPISMLYLNDKQQIIKFKYEGMVVDRX

SEQ ID NO: 71274 - protein, 33 aa, Artificial Sequence; identical to SEQ ID NO: 32507
  GFR-binding peptide
  MOD_RES (32)..(32): Xaa is C or S

SEQ ID NO: 71275 - protein, 37 aa, Artificial Sequence; identical to SEQ ID NO: 9028
  GFR-binding peptide
  MOD_RES (3)..(37): Xaa is C or S
  MOD_RES (17)..(18)..(19)..(20)..(21): Xaa is A or G
  MOD_RES (22)..(23)..(24)..(25): Xaa is A or G or is absent

SEQ ID NO: 71276 - protein, 37 aa, Artificial Sequence; identical to SEQ ID NO: 30415
  GFR-binding peptide
  MOD_RES (1)..(2)..(36): Xaa is C or S
  MOD_RES (16)..(17)..(18)..(19)..(20): Xaa is A or G
  MOD_RES (21)..(22)..(23)..(24): Xaa is A or G or is absent

SEQ ID NO: 71277 - protein, 40 aa, Artificial Sequence; identical to SEQ ID NO: 9033
  GFR-binding peptide
  MOD_RES (6)..(7): Xaa is C or S
  MOD_RES (21)..(22)..(23)..(24)..(25): Xaa is A or G
  MOD_RES (26)..(27)..(28)..(29): Xaa is A or G or is absent

SEQ ID NO: 71278 - protein, 37 aa, Artificial Sequence; identical to SEQ ID NO: 9034
  GFR-binding peptide
  MOD_RES (3)..(4): Xaa is C or S
  MOD_RES (18)..(19)..(20)..(21)..(22): Xaa is A or G
  MOD_RES (23)..(24)..(25)..(26): Xaa is A or G or is absent

SEQ ID NO: 71279 - protein, 32 aa, Artificial Sequence
  GFR-binding peptide
  MOD_RES (32)..(32): Xaa is C or S
VPEKMSPISILYKDENKNVVLKYHYNMTVESX

SEQ ID NO: 71280 - protein, 33 aa, Artificial Sequence; identical to SEQ ID NO: 30420
  GFR-binding peptide
  MOD_RES (1)..(33): Xaa is C or S

SEQ ID NO: 71281 - protein, 42 aa, Artificial Sequence; identical to SEQ ID NO: 30421
  GFR-binding peptide
  MOD_RES (6)..(7)..(41): Xaa is C or S
  MOD_RES (21)..(22)..(23)..(24)..(25): Xaa is A or G
  MOD_RES (26)..(27)..(28)..(29): Xaa is A or G or is absent

SEQ ID NO: 71282 - protein, 35 aa, Artificial Sequence
  GFR-binding peptide
  MOD_RES (4)..(5): Xaa is C or S
PPTXXVPTRLEPISILYLDSANNVVKFKYEDMVVE

SEQ ID NO: 71283 - protein, 37 aa, Artificial Sequence
  GFR-binding peptide
  MOD_RES (4)..(5): Xaa is C or S
  MOD_RES (19)..(20)..(21)..(22)..(23): Xaa is A or G
  MOD_RES (24)..(25)..(26)..(27): Xaa is A or G or is absent
PPTXXVPTRLSATSILYYXXXXXXXXXLRKHRDMVVE

SEQ ID NO: 71284 - protein, 36 aa, Artificial Sequence; identical to SEQ ID NO: 9037
  GFR-binding peptide
  MOD_RES (34)..(36): Xaa is C or S
  MOD_RES (14)..(15)..(16)..(17)..(18): Xaa is A or G
  MOD_RES (19)..(20)..(21)..(22): Xaa is A or G or is absent

SEQ ID NO: 71285 - protein, 36 aa, Artificial Sequence; identical to SEQ ID NO: 9038
  GFR-binding peptide
  MOD_RES (1)..(34)..(36): Xaa is C or S
  MOD_RES (15)..(16)..(17)..(18)..(19): Xaa is A or G
  MOD_RES (20)..(21)..(22)..(23): Xaa is A or G or is absent

SEQ ID NO: 71286 - protein, 36 aa, Artificial Sequence; identical to SEQ ID NO: 9040
  GFR-binding peptide
  MOD_RES (33)..(35): Xaa is C or S
  MOD_RES (14)..(15)..(16)..(17)..(18): Xaa is A or G
  MOD_RES (19)..(20)..(21)..(22): Xaa is A or G or is absent

SEQ ID NO: 71287 - protein, 43 aa, Artificial Sequence
  GFR-binding peptide
  MOD_RES (5)..(6)..(40)..(42): Xaa is C or S
  MOD_RES (20)..(21)..(22)..(23)..(24): Xaa is A or G
  MOD_RES (25)..(26)..(27)..(28): Xaa is A or G or is absent
ASKAXXVPTKLSATSILYYXXXXXXXXXLRKHRGMAVSEXGXR

SEQ ID NO: 71288 - protein, 36 aa, Artificial Sequence
  GFR-binding peptide
  MOD_RES (34)..(36): Xaa is C or S
  MOD_RES (14)..(15)..(16)..(17)..(18): Xaa is A or G
  MOD_RES (19)..(20)..(21)..(22): Xaa is A or G or is absent
VPTKLSATSILYYXXXXXXXXXLRKHRGMAVSEXGX

SEQ ID NO: 71289 - protein, 39 aa, Artificial Sequence; identical to SEQ ID NO: 9041
  GFR-binding peptide
  MOD_RES (3)..(4)..(37)..(39): Xaa is C or S
  MOD_RES (18)..(19)..(20)..(21)..(22): Xaa is A or G
  MOD_RES (23)..(24)..(25)..(26): Xaa is A or G or is absent

SEQ ID NO: 71290 - protein, 41 aa, Artificial Sequence
  GFR-binding peptide
  MOD_RES (5)..(6)..(38)..(40): Xaa is C or S
IPEPXXVPEKMSATSILYYDENKNVVLRKHRNMTVESXAXR

SEQ ID NO: 71291 - protein, 39 aa, Artificial Sequence
  GFR-binding peptide
  MOD_RES (4)..(5)..(39): Xaa is C or S
  MOD_RES (19)..(20)..(21)..(22)..(23): Xaa is A or G
  MOD_RES (24)..(25)..(26)..(27): Xaa is A or G or is absent
AGPXXTPTKMEPISMLYLXXXXXXXXXKFKYEGMVVDRX

SEQ ID NO: 71292 - protein, 38 aa, Artificial Sequence
  GFR-binding peptide
  MOD_RES (6)..(7): Xaa is C or S
AAPASXXVPARLSATSILYYDAANNVVLRKHRDMVVEA

SEQ ID NO: 71293 - protein, 34 aa, Artificial Sequence; identical to SEQ ID NO: 30432
  GFR-binding peptide
  MOD_RES (34)..(34): Xaa is C or S
  MOD_RES (14)..(15)..(16)..(17)..(18): Xaa is A or G
  MOD_RES (19)..(20)..(21)..(22): Xaa is A or G or is absent

SEQ ID NO: 71294 - protein, 43 aa, Artificial Sequence; identical to SEQ ID NO: 9053
  GFR-binding peptide
  MOD_RES (5)..(6)..(40)..(42): Xaa is C or S
  MOD_RES (20)..(21)..(22)..(23)..(24): Xaa is A or G
  MOD_RES (25)..(26)..(27)..(28): Xaa is A or G or is absent

SEQ ID NO: 71295 - protein, 42 aa, Artificial Sequence; identical to SEQ ID NO: 9056
  GFR-binding peptide
  MOD_RES (6)..(7)..(41): Xaa is C or S
  MOD_RES (21)..(22)..(23)..(24)..(25): Xaa is A or G
  MOD_RES (26)..(27)..(28)..(29): Xaa is A or G or is absent

SEQ ID NO: 71296 - protein, 43 aa, Artificial Sequence; identical to SEQ ID NO: 9057
  GFR-binding peptide
  MOD_RES (7)..(41)..(43): Xaa is C or S
  MOD_RES (21)..(22)..(23)..(24)..(25): Xaa is A or G
  MOD_RES (26)..(27)..(28)..(29): Xaa is A or G or is absent

SEQ ID NO: 71297 - protein, 36 aa, Artificial Sequence; identical to SEQ ID NO: 9058
  GFR-binding peptide
  MOD_RES (5)..(6): Xaa is C or S

SEQ ID NO: 71298 - protein, 37 aa, Artificial Sequence
  GFR-binding peptide
  MOD_RES (2)..(3)..(37): Xaa is C or S
  MOD_RES (17)..(18)..(19)..(20)..(21): Xaa is A or G
  MOD_RES (22)..(23)..(24)..(25): Xaa is A or G or is absent
TXXVPTRLSATSILYYXXXXXXXXXLRKHRDMVVESX

SEQ ID NO: 71299 - protein, 36 aa, Artificial Sequence
  GFR-binding peptide
  MOD_RES (1)..(34)..(36): Xaa is C or S
  MOD_RES (15)..(16)..(17)..(18)..(19): Xaa is A or G
  MOD_RES (20)..(21)..(22)..(23): Xaa is A or G or is absent
XAPVKTSATSMLYYXXXXXXXXXLRKHRMIVEEXGX

SEQ ID NO: 71300 - protein, 35 aa, Artificial Sequence; identical to SEQ ID NO: 57439
  GFR-binding peptide
  MOD_RES (32)..(34): Xaa is C or S

SEQ ID NO: 71301 - protein, 44 aa, Artificial Sequence; identical to SEQ ID NO: 32536
  GFR-binding peptide
  MOD_RES (6)..(7)..(42)..(44): Xaa is C or S
  MOD_RES (21)..(22)..(23)..(24)..(25): Xaa is A or G
  MOD_RES (26)..(27)..(28)..(29): Xaa is A or G or is absent

SEQ ID NO: 71302 - protein, 40 aa, Artificial Sequence; identical to SEQ ID NO: 30440
  GFR-binding peptide
  MOD_RES (3)..(4)..(38)..(40): Xaa is C or S
  MOD_RES (18)..(19)..(20)..(21)..(22): Xaa is A or G
  MOD_RES (23)..(24)..(25)..(26): Xaa is A or G or is absent

SEQ ID NO: 71303 - protein, 43 aa, Artificial Sequence; identical to SEQ ID NO: 9064
  GFR-binding peptide
  MOD_RES (5)..(6)..(40)..(42): Xaa is C or S
  MOD_RES (20)..(21)..(22)..(23)..(24): Xaa is A or G
  MOD_RES (25)..(26)..(27)..(28): Xaa is A or G or is absent

SEQ ID NO: 71304 - protein, 38 aa, Artificial Sequence
  GFR-binding peptide
  MOD_RES (4)..(5): Xaa is C or S
  MOD_RES (19)..(20)..(21)..(22)..(23): Xaa is A or G
  MOD_RES (24)..(25)..(26)..(27): Xaa is A or G or is absent
PPTXXVPTRLSPISILYKXXXXXXXXXLKYHYDMVVES

SEQ ID NO: 71305 - protein, 32 aa, Artificial Sequence; identical to SEQ ID NO: 32547
  GFR-binding peptide
  MOD_RES (1)..(1): Xaa is C or S

SEQ ID NO: 71306 - protein, 41 aa, Artificial Sequence; identical to SEQ ID NO: 9065
  GFR-binding peptide
  MOD_RES (3)..(4)..(38)..(40): Xaa is C or S
  MOD_RES (18)..(19)..(20)..(21)..(22): Xaa is A or G
  MOD_RES (23)..(24)..(25)..(26): Xaa is A or G or is absent

SEQ ID NO: 71307 - protein, 39 aa, Artificial Sequence; identical to SEQ ID NO: 9066
  GFR-binding peptide
  MOD_RES (1)..(2)..(36)..(38): Xaa is C or S
  MOD_RES (16)..(17)..(18)..(19)..(20): Xaa is A or G
  MOD_RES (21)..(22)..(23)..(24): Xaa is A or G or is absent

SEQ ID NO: 71308 - protein, 30 aa, Artificial Sequence; identical to SEQ ID NO: 57457
  GFR-binding peptide

SEQ ID NO: 71309 - protein, 41 aa, Artificial Sequence; identical to SEQ ID NO: 9067
  GFR-binding peptide
  MOD_RES (5)..(6)..(40): Xaa is C or S
  MOD_RES (20)..(21)..(22)..(23)..(24): Xaa is A or G
  MOD_RES (25)..(26)..(27)..(28): Xaa is A or G or is absent

SEQ ID NO: 71310 - protein, 35 aa, Artificial Sequence; identical to SEQ ID NO: 9068
  GFR-binding peptide
  MOD_RES (3)..(4): Xaa is C or S

SEQ ID NO: 71311 - protein, 39 aa, Artificial Sequence
  GFR-binding peptide
  MOD_RES (3)..(4)..(37)..(39): Xaa is C or S
  MOD_RES (18)..(19)..(20)..(21)..(22): Xaa is A or G
  MOD_RES (23)..(24)..(25)..(26): Xaa is A or G or is absent
SPXXVPQDLSPINILYFXXXXXXXXXYGKIPMVVKSXKX

SEQ ID NO: 71312 - protein, 35 aa, Artificial Sequence; identical to SEQ ID NO: 9072
  GFR-binding peptide
  MOD_RES (1)..(35): Xaa is C or S
  MOD_RES (15)..(16)..(17)..(18)..(19): Xaa is A or G
  MOD_RES (20)..(21)..(22)..(23): Xaa is A or G or is absent

SEQ ID NO: 71313 - protein, 39 aa, Artificial Sequence
  GFR-binding peptide
  MOD_RES (4)..(5)..(38): Xaa is C or S
  MOD_RES (19)..(20)..(21)..(22)..(23): Xaa is A or G
  MOD_RES (24)..(25)..(26)..(27): Xaa is A or G or is absent
ASPXXVSQDLSPINILYFXXXXXXXXXYGKIPMIVKSXK

SEQ ID NO: 71314 - protein, 36 aa, Artificial Sequence
  GFR-binding peptide
  MOD_RES (2)..(3)..(36): Xaa is C or S
  MOD_RES (17)..(18)..(19)..(20)..(21): Xaa is A or G
  MOD_RES (22)..(23)..(24)..(25): Xaa is A or G or is absent
PXXVPQDLSPINILYFXXXXXXXXXYGKIPMVVKSX

SEQ ID NO: 71315 - protein, 40 aa, Artificial Sequence; identical to SEQ ID NO: 57462
  GFR-binding peptide
  MOD_RES (5)..(6)..(39): Xaa is C or S
  MOD_RES (20)..(21)..(22)..(23)..(24): Xaa is A or G
  MOD_RES (25)..(26)..(27)..(28): Xaa is A or G or is absent

SEQ ID NO: 71316 - protein, 37 aa, Artificial Sequence; identical to SEQ ID NO: 32559
  GFR-binding peptide
  MOD_RES (1)..(2)..(36): Xaa is C or S
  MOD_RES (16)..(17)..(18)..(19)..(20): Xaa is A or G
  MOD_RES (21)..(22)..(23)..(24): Xaa is A or G or is absent

SEQ ID NO: 71317 - protein, 36 aa, Artificial Sequence; identical to SEQ ID NO: 32560
  GFR-binding peptide
  MOD_RES (4)..(5): Xaa is C or S

SEQ ID NO: 71318 - protein, 39 aa, Artificial Sequence; identical to SEQ ID NO: 9073
  GFR-binding peptide
  MOD_RES (4)..(5)..(36)..(38): Xaa is C or S

SEQ ID NO: 71319 - protein, 39 aa, Artificial Sequence
  GFR-binding peptide
  MOD_RES (6)..(7)..(39): Xaa is C or S
KASKAXXVPTKLSATSILYYDKGVVTYLRKHRGMAVSEX

SEQ ID NO: 71320 - protein, 35 aa, Artificial Sequence; identical to SEQ ID NO: 30460
  GFR-binding peptide
  MOD_RES (1)..(2): Xaa is C or S
  MOD_RES (16)..(17)..(18)..(19)..(20): Xaa is A or G
  MOD_RES (21)..(22)..(23)..(24): Xaa is A or G or is absent

SEQ ID NO: 71321 - protein, 31 aa, Artificial Sequence; identical to SEQ ID NO: 9080
  GFR-binding peptide
  MOD_RES (1)..(1): Xaa is C or S

SEQ ID NO: 71322 - protein, 34 aa, Artificial Sequence; identical to SEQ ID NO: 9084
  GFR-binding peptide
  MOD_RES (31)..(33): Xaa is C or S

SEQ ID NO: 71323 - protein, 35 aa, Artificial Sequence; identical to SEQ ID NO: 32565
  GFR-binding peptide
  MOD_RES (2)..(3): Xaa is C or S
  MOD_RES (17)..(18)..(19)..(20)..(21): Xaa is A or G
  MOD_RES (22)..(23)..(24)..(25): Xaa is A or G or is absent

SEQ ID NO: 71324 - protein, 40 aa, Artificial Sequence
  GFR-binding peptide
  MOD_RES (2)..(3)..(37)..(39): Xaa is C or S
  MOD_RES (17)..(18)..(19)..(20)..(21): Xaa is A or G
  MOD_RES (22)..(23)..(24)..(25): Xaa is A or G or is absent
PXXVPEKMSPINILYFXXXXXXXXXYGKIPNMTVESXAXR

SEQ ID NO: 71325 - protein, 39 aa, Artificial Sequence; identical to SEQ ID NO: 9088
  GFR-binding peptide
  MOD_RES (4)..(5)..(37)..(39): Xaa is C or S

SEQ ID NO: 71326 - protein, 42 aa, Artificial Sequence; identical to SEQ ID NO: 32566
  GFR-binding peptide
  MOD_RES (6)..(7)..(39)..(41): Xaa is C or S

SEQ ID NO: 71327 - protein, 36 aa, Artificial Sequence; identical to SEQ ID NO: 9090
  GFR-binding peptide
  MOD_RES (35)..(35): Xaa is C or S
  MOD_RES (14)..(15)..(16)..(17)..(18): Xaa is A or G
  MOD_RES (19)..(20)..(21)..(22): Xaa is A or G or is absent

SEQ ID NO: 71328 - protein, 33 aa, Artificial Sequence; identical to SEQ ID NO: 9091
  GFR-binding peptide
  MOD_RES (1)..(1): Xaa is C or S
  MOD_RES (15)..(16)..(17)..(18)..(19): Xaa is A or G
  MOD_RES (20)..(21)..(22)..(23): Xaa is A or G or is absent

SEQ ID NO: 71329 - protein, 39 aa, Artificial Sequence
  GFR-binding peptide
  MOD_RES (4)..(5)..(36)..(38): Xaa is C or S
PSTXXAPVKTEPISMLYLDNGRVLLKFKYEMIVEEXGXL

SEQ ID NO: 71330 - protein, 35 aa, Artificial Sequence; identical to SEQ ID NO: 57483
  GFR-binding peptide
  MOD_RES (2)..(3): Xaa is C or S
  MOD_RES (17)..(18)..(19)..(20)..(21): Xaa is A or G
  MOD_RES (22)..(23)..(24)..(25): Xaa is A or G or is absent

SEQ ID NO: 71331 - protein, 33 aa, Artificial Sequence; identical to SEQ ID NO: 9094
  GFR-binding peptide
  MOD_RES (1)..(1): Xaa is C or S
  MOD_RES (15)..(16)..(17)..(18)..(19): Xaa is A or G
  MOD_RES (20)..(21)..(22)..(23): Xaa is A or G or is absent

SEQ ID NO: 71332 - protein, 40 aa, Artificial Sequence
  GFR-binding peptide
  MOD_RES (4)..(5)..(37)..(39): Xaa is C or S
PPTXXVPTRLEPISILYLDSANNVVKFKYEDMVVESXGXR

SEQ ID NO: 71333 - protein, 32 aa, Artificial Sequence
  GFR-binding peptide
  MOD_RES (32)..(32): Xaa is C or S
VPEKMNAISILYFDENKNVVLKKYRNMTVESX

SEQ ID NO: 71334 - protein, 41 aa, Artificial Sequence; identical to SEQ ID NO: 30472
  GFR-binding peptide
  MOD_RES (4)..(5)..(39)..(41): Xaa is C or S
  MOD_RES (19)..(20)..(21)..(22)..(23): Xaa is A or G
  MOD_RES (24)..(25)..(26)..(27): Xaa is A or G or is absent

SEQ ID NO: 71335 - protein, 33 aa, Artificial Sequence; identical to SEQ ID NO: 16389
  GFR-binding peptide
  MOD_RES (14)..(15)..(16)..(17)..(18): Xaa is A or G
  MOD_RES (19)..(20)..(21)..(22): Xaa is A or G or is absent

SEQ ID NO: 71336 - protein, 39 aa, Artificial Sequence; identical to SEQ ID NO: 30477
  GFR-binding peptide
  MOD_RES (6)..(7): Xaa is C or S
  MOD_RES (21)..(22)..(23)..(24)..(25): Xaa is A or G
  MOD_RES (26)..(27)..(28)..(29): Xaa is A or G or is absent

SEQ ID NO: 71337 - protein, 33 aa, Artificial Sequence; identical to SEQ ID NO: 9107
  GFR-binding peptide
  MOD_RES (14)..(15)..(16)..(17)..(18): Xaa is A or G
  MOD_RES (19)..(20)..(21)..(22): Xaa is A or G or is absent

SEQ ID NO: 71338 - protein, 34 aa, Artificial Sequence
  GFR-binding peptide
  MOD_RES (1)..(32)..(34): Xaa is C or S
XVPQDLSPINILYFVGRTPKVYGKIPMVVKSXKX

SEQ ID NO: 71339 - protein, 31 aa, Artificial Sequence; identical to SEQ ID NO: 9111
  GFR-binding peptide
  MOD_RES (31)..(31): Xaa is C or S

SEQ ID NO: 71340 - protein, 37 aa, Artificial Sequence; identical to SEQ ID NO: 30482
  GFR-binding peptide
  MOD_RES (2)..(34)..(36): Xaa is C or S

SEQ ID NO: 71341 - protein, 39 aa, Artificial Sequence
  GFR-binding peptide
  MOD_RES (6)..(7)..(38): Xaa is C or S
ASASPXXVSQDLSPINILYFIGKTPKIYGKIPMIVKSXK

SEQ ID NO: 71342 - protein, 42 aa, Artificial Sequence; identical to SEQ ID NO: 32593
  GFR-binding peptide
  MOD_RES (5)..(6)..(40)..(42): Xaa is C or S
  MOD_RES (20)..(21)..(22)..(23)..(24): Xaa is A or G
  MOD_RES (25)..(26)..(27)..(28): Xaa is A or G or is absent

SEQ ID NO: 71343 - protein, 36 aa, Artificial Sequence; identical to SEQ ID NO: 30483
  GFR-binding peptide
  MOD_RES (1)..(35): Xaa is C or S
  MOD_RES (15)..(16)..(17)..(18)..(19): Xaa is A or G
  MOD_RES (20)..(21)..(22)..(23): Xaa is A or G or is absent

SEQ ID NO: 71344 - protein, 43 aa, Artificial Sequence; identical to SEQ ID NO: 32596
  GFR-binding peptide
  MOD_RES (5)..(6)..(40)..(42): Xaa is C or S
  MOD_RES (20)..(21)..(22)..(23)..(24): Xaa is A or G
  MOD_RES (25)..(26)..(27)..(28): Xaa is A or G or is absent

SEQ ID NO: 71345 - protein, 35 aa, Artificial Sequence; identical to SEQ ID NO: 30486
  GFR-binding peptide
  MOD_RES (3)..(4): Xaa is C or S

SEQ ID NO: 71346 - protein, 38 aa, Artificial Sequence; identical to SEQ ID NO: 57505
  GFR-binding peptide
  MOD_RES (3)..(4)..(35)..(37): Xaa is C or S

SEQ ID NO: 71347 - protein, 33 aa, Artificial Sequence; identical to SEQ ID NO: 32600
  GFR-binding peptide
  MOD_RES (1)..(1): Xaa is C or S
  MOD_RES (15)..(16)..(17)..(18)..(19): Xaa is A or G
  MOD_RES (20)..(21)..(22)..(23): Xaa is A or G or is absent

SEQ ID NO: 71348 - protein, 41 aa, Artificial Sequence; identical to SEQ ID NO: 32602
  GFR-binding peptide
  MOD_RES (6)..(40): Xaa is C or S
  MOD_RES (20)..(21)..(22)..(23)..(24): Xaa is A or G
  MOD_RES (25)..(26)..(27)..(28): Xaa is A or G or is absent

SEQ ID NO: 71349 - protein, 34 aa, Artificial Sequence; identical to SEQ ID NO: 30489
  GFR-binding peptide
  MOD_RES (1)..(2)..(34): Xaa is C or S

SEQ ID NO: 71350 - protein, 38 aa, Artificial Sequence; identical to SEQ ID NO: 9119
  GFR-binding peptide
  MOD_RES (1)..(36)..(38): Xaa is C or S
  MOD_RES (15)..(16)..(17)..(18)..(19): Xaa is A or G
  MOD_RES (20)..(21)..(22)..(23): Xaa is A or G or is absent

SEQ ID NO: 71351 - protein, 40 aa, Artificial Sequence; identical to SEQ ID NO: 32604
  GFR-binding peptide
  MOD_RES (3)..(4)..(38)..(40): Xaa is C or S
  MOD_RES (18)..(19)..(20)..(21)..(22): Xaa is A or G
  MOD_RES (23)..(24)..(25)..(26): Xaa is A or G or is absent

SEQ ID NO: 71352 - protein, 37 aa, Artificial Sequence; identical to SEQ ID NO: 9123
  GFR-binding peptide
  MOD_RES (6)..(7): Xaa is C or S

SEQ ID NO: 71353 - protein, 37 aa, Artificial Sequence
  GFR-binding peptide
  MOD_RES (1)..(2)..(34)..(36): Xaa is C or S
XXVPTRLSATSILYYDSANNVVLRKHRDMVVESXGXR

SEQ ID NO: 71354 - protein, 36 aa, Artificial Sequence; identical to SEQ ID NO: 30493
  GFR-binding peptide
  MOD_RES (1)..(2)..(36): Xaa is C or S
  MOD_RES (16)..(17)..(18)..(19)..(20): Xaa is A or G
  MOD_RES (21)..(22)..(23)..(24): Xaa is A or G or is absent

SEQ ID NO: 71355 - protein, 42 aa, Artificial Sequence
  GFR-binding peptide
  MOD_RES (4)..(5)..(39)..(41): Xaa is C or S
  MOD_RES (19)..(20)..(21)..(22)..(23): Xaa is A or G
  MOD_RES (24)..(25)..(26)..(27): Xaa is A or G or is absent
AGPXXTPTKMSATSMLYYXXXXXXXXXLRKHRGMVVDRXGXS

SEQ ID NO: 71356 - protein, 40 aa, Artificial Sequence; identical to SEQ ID NO: 16402
  GFR-binding peptide
  MOD_RES (6)..(7): Xaa is C or S
  MOD_RES (21)..(22)..(23)..(24)..(25): Xaa is A or G
  MOD_RES (26)..(27)..(28)..(29): Xaa is A or G or is absent

SEQ ID NO: 71357 - protein, 37 aa, Artificial Sequence; identical to SEQ ID NO: 30494
  GFR-binding peptide
  MOD_RES (6)..(6): Xaa is C or S

SEQ ID NO: 71358 - protein, 33 aa, Artificial Sequence; identical to SEQ ID NO: 32606
  GFR-binding peptide
  MOD_RES (2)..(3): Xaa is C or S

SEQ ID NO: 71359 - protein, 39 aa, Artificial Sequence; identical to SEQ ID NO: 9125
  GFR-binding peptide
  MOD_RES (3)..(4)..(39): Xaa is C or S
  MOD_RES (18)..(19)..(20)..(21)..(22): Xaa is A or G
  MOD_RES (23)..(24)..(25)..(26): Xaa is A or G or is absent

SEQ ID NO: 71360 - protein, 38 aa, Artificial Sequence
  GFR-binding peptide
  MOD_RES (2)..(3)..(35)..(37): Xaa is C or S
PXXVPEKMSPISILYKDENKNVVLKYHYNMTVESXAXR

SEQ ID NO: 71361 - protein, 38 aa, Artificial Sequence; identical to SEQ ID NO: 32609
  GFR-binding peptide
  MOD_RES (4)..(38): Xaa is C or S
  MOD_RES (18)..(19)..(20)..(21)..(22): Xaa is A or G
  MOD_RES (23)..(24)..(25)..(26): Xaa is A or G or is absent

SEQ ID NO: 71362 - protein, 35 aa, Artificial Sequence; identical to SEQ ID NO: 30498
  GFR-binding peptide
  MOD_RES (3)..(4): Xaa is C or S

SEQ ID NO: 71363 - protein, 38 aa, Artificial Sequence; identical to SEQ ID NO: 32610
  GFR-binding peptide
  MOD_RES (3)..(35)..(37): Xaa is C or S

SEQ ID NO: 71364 - protein, 32 aa, Artificial Sequence; identical to SEQ ID NO: 9130
  GFR-binding peptide
  MOD_RES (1)..(2): Xaa is C or S

SEQ ID NO: 71365 - protein, 42 aa, Artificial Sequence; identical to SEQ ID NO: 32611
  GFR-binding peptide
  MOD_RES (6)..(7)..(41): Xaa is C or S
  MOD_RES (21)..(22)..(23)..(24)..(25): Xaa is A or G
  MOD_RES (26)..(27)..(28)..(29): Xaa is A or G or is absent

SEQ ID NO: 71366 - protein, 39 aa, Artificial Sequence
  GFR-binding peptide
  MOD_RES (2)..(3)..(37)..(39): Xaa is C or S
  MOD_RES (17)..(18)..(19)..(20)..(21): Xaa is A or G
  MOD_RES (22)..(23)..(24)..(25): Xaa is A or G or is absent
PXXVPEKMNAISILYFXXXXXXXXXLKKYRNMTVESXAX

SEQ ID NO: 71367 - protein, 39 aa, Artificial Sequence; identical to SEQ ID NO: 9138
  GFR-binding peptide
  MOD_RES (4)..(5)..(38): Xaa is C or S
  MOD_RES (19)..(20)..(21)..(22)..(23): Xaa is A or G
  MOD_RES (24)..(25)..(26)..(27): Xaa is A or G or is absent

SEQ ID NO: 71368 - protein, 38 aa, Artificial Sequence; identical to SEQ ID NO: 9142
  GFR-binding peptide
  MOD_RES (4)..(5)..(37): Xaa is C or S

SEQ ID NO: 71369 - protein, 36 aa, Artificial Sequence; identical to SEQ ID NO: 9143
  GFR-binding peptide
  MOD_RES (5)..(6): Xaa is C or S

SEQ ID NO: 71370 - protein, 33 aa, Artificial Sequence
  GFR-binding peptide
  MOD_RES (32)..(32): Xaa is C or S
VPEKMSPINILYFDENKNVVYGKIPNMTVESXA

SEQ ID NO: 71371 - protein, 36 aa, Artificial Sequence; identical to SEQ ID NO: 9144
  GFR-binding peptide
  MOD_RES (4)..(5): Xaa is C or S

SEQ ID NO: 71372 - protein, 37 aa, Artificial Sequence
  GFR-binding peptide
  MOD_RES (5)..(6)..(37): Xaa is C or S
VPSTXXAPVKTEPISMLYLDNGRVLLKFKYEMIVEEX

SEQ ID NO: 71373 - protein, 40 aa, Artificial Sequence
  GFR-binding peptide
  MOD_RES (4)..(5)..(38)..(40): Xaa is C or S
  MOD_RES (19)..(20)..(21)..(22)..(23): Xaa is A or G
  MOD_RES (24)..(25)..(26)..(27): Xaa is A or G or is absent
ASPXXVPQDLSPINILYFXXXXXXXXXYGKIPMVVKSXKX

SEQ ID NO: 71374 - protein, 34 aa, Artificial Sequence; identical to SEQ ID NO: 9150
  GFR-binding peptide
  MOD_RES (3)..(4): Xaa is C or S

SEQ ID NO: 71375 - protein, 39 aa, Artificial Sequence; identical to SEQ ID NO: 9155
  GFR-binding peptide
  MOD_RES (4)..(5)..(39): Xaa is C or S
  MOD_RES (19)..(20)..(21)..(22)..(23): Xaa is A or G
  MOD_RES (24)..(25)..(26)..(27): Xaa is A or G or is absent

SEQ ID NO: 71376 - protein, 34 aa, Artificial Sequence; identical to SEQ ID NO: 30515
  GFR-binding peptide
  MOD_RES (1)..(33): Xaa is C or S

SEQ ID NO: 71377 - protein, 33 aa, Artificial Sequence; identical to SEQ ID NO: 32637
  GFR-binding peptide
  MOD_RES (1)..(33): Xaa is C or S

SEQ ID NO: 71378 - protein, 40 aa, Artificial Sequence; identical to SEQ ID NO: 9156
  GFR-binding peptide
  MOD_RES (2)..(3)..(38)..(40): Xaa is C or S
  MOD_RES (17)..(18)..(19)..(20)..(21): Xaa is A or G
  MOD_RES (22)..(23)..(24)..(25): Xaa is A or G or is absent

SEQ ID NO: 71379 - protein, 35 aa, Artificial Sequence; identical to SEQ ID NO: 32639
  GFR-binding peptide
  MOD_RES (2)..(3)..(35): Xaa is C or S

SEQ ID NO: 71380 - protein, 35 aa, Artificial Sequence; identical to SEQ ID NO: 9157
  GFR-binding peptide
  MOD_RES (34)..(34): Xaa is C or S
  MOD_RES (14)..(15)..(16)..(17)..(18): Xaa is A or G
  MOD_RES (19)..(20)..(21)..(22): Xaa is A or G or is absent

SEQ ID NO: 71381 - protein, 34 aa, Artificial Sequence; identical to SEQ ID NO: 30519
  GFR-binding peptide
  MOD_RES (2)..(3)..(34): Xaa is C or S

SEQ ID NO: 71382 - protein, 36 aa, Artificial Sequence
  GFR-binding peptide
  MOD_RES (1)..(34)..(36): Xaa is C or S
  MOD_RES (15)..(16)..(17)..(18)..(19): Xaa is A or G
  MOD_RES (20)..(21)..(22)..(23): Xaa is A or G or is absent
XAPVKTEPISMLYLXXXXXXXXXKFKYEMIVEEXGX

SEQ ID NO: 71383 - protein, 38 aa, Artificial Sequence; identical to SEQ ID NO: 30520
  GFR-binding peptide
  MOD_RES (1)..(2)..(35)..(37): Xaa is C or S
  MOD_RES (16)..(17)..(18)..(19)..(20): Xaa is A or G
  MOD_RES (21)..(22)..(23)..(24): Xaa is A or G or is absent

SEQ ID NO: 71384 - protein, 43 aa, Artificial Sequence; identical to SEQ ID NO: 9160
  GFR-binding peptide
  MOD_RES (5)..(6)..(41)..(43): Xaa is C or S
  MOD_RES (20)..(21)..(22)..(23)..(24): Xaa is A or G
  MOD_RES (25)..(26)..(27)..(28): Xaa is A or G or is absent

SEQ ID NO: 71385 - protein, 40 aa, Artificial Sequence; identical to SEQ ID NO: 9161
  GFR-binding peptide
  MOD_RES (4)..(5)..(38)..(40): Xaa is C or S
  MOD_RES (19)..(20)..(21)..(22)..(23): Xaa is A or G
  MOD_RES (24)..(25)..(26)..(27): Xaa is A or G or is absent

SEQ ID NO: 71386 - protein, 40 aa, Artificial Sequence
  GFR-binding peptide
  MOD_RES (4)..(5)..(39): Xaa is C or S
  MOD_RES (19)..(20)..(21)..(22)..(23): Xaa is A or G
  MOD_RES (24)..(25)..(26)..(27): Xaa is A or G or is absent
SKAXXVPTKLSATSILYYXXXXXXXXXLRKHRGMAVSEXG

SEQ ID NO: 71387 - protein, 41 aa, Artificial Sequence; identical to SEQ ID NO: 9163
  GFR-binding peptide
  MOD_RES (6)..(7)..(41): Xaa is C or S
  MOD_RES (21)..(22)..(23)..(24)..(25): Xaa is A or G
  MOD_RES (26)..(27)..(28)..(29): Xaa is A or G or is absent

SEQ ID NO: 71388 - protein, 34 aa, Artificial Sequence; identical to SEQ ID NO: 9164
  GFR-binding peptide
  MOD_RES (2)..(3): Xaa is C or S

SEQ ID NO: 71389 - protein, 38 aa, Artificial Sequence; identical to SEQ ID NO: 30529
  GFR-binding peptide
  MOD_RES (4)..(38): Xaa is C or S
  MOD_RES (18)..(19)..(20)..(21)..(22): Xaa is A or G
  MOD_RES (23)..(24)..(25)..(26): Xaa is A or G or is absent

SEQ ID NO: 71390 - protein, 33 aa, Artificial Sequence; identical to SEQ ID NO: 30531
  GFR-binding peptide
  MOD_RES (2)..(3): Xaa is C or S

SEQ ID NO: 71391 - protein, 39 aa, Artificial Sequence; identical to SEQ ID NO: 32649
  GFR-binding peptide
  MOD_RES (1)..(2)..(36)..(38): Xaa is C or S
  MOD_RES (16)..(17)..(18)..(19)..(20): Xaa is A or G
  MOD_RES (21)..(22)..(23)..(24): Xaa is A or G or is absent

SEQ ID NO: 71392 - protein, 34 aa, Artificial Sequence
  GFR-binding peptide
  MOD_RES (1)..(34): Xaa is C or S
  MOD_RES (15)..(16)..(17)..(18)..(19): Xaa is A or G
  MOD_RES (20)..(21)..(22)..(23): Xaa is A or G or is absent
XVSQDLSPINILYFXXXXXXXXXYGKIPMIVKSX

SEQ ID NO: 71393 - protein, 32 aa, Artificial Sequence
  GFR-binding peptide
  MOD_RES (1)..(2): Xaa is C or S
XXVPARLSATSILYYDAANNVVLRKHRDMVVE

SEQ ID NO: 71394 - protein, 31 aa, Artificial Sequence
  GFR-binding peptide
  MOD_RES (1)..(1): Xaa is C or S
XAPVKTSPISMLYKDNGRVLLLKYHYMIVEE

SEQ ID NO: 71395 - protein, 32 aa, Artificial Sequence; identical to SEQ ID NO: 57558
  GFR-binding peptide
  MOD_RES (1)..(2): Xaa is C or S

SEQ ID NO: 71396 - protein, 39 aa, Artificial Sequence; identical to SEQ ID NO: 57560
  GFR-binding peptide
  MOD_RES (4)..(5)..(37)..(39): Xaa is C or S

SEQ ID NO: 71397 - protein, 37 aa, Artificial Sequence
  GFR-binding peptide
  MOD_RES (3)..(4)..(36): Xaa is C or S
EPXXVPEKMSPINILYFDENKNVVYGKIPNMTVESXA

SEQ ID NO: 71398 - protein, 41 aa, Artificial Sequence; identical to SEQ ID NO: 9173
  GFR-binding peptide
  MOD_RES (5)..(6)..(38)..(40): Xaa is C or S

SEQ ID NO: 71399 - protein, 41 aa, Artificial Sequence
  GFR-binding peptide
  MOD_RES (4)..(5)..(39)..(41): Xaa is C or S
  MOD_RES (19)..(20)..(21)..(22)..(23): Xaa is A or G
  MOD_RES (24)..(25)..(26)..(27): Xaa is A or G or is absent
AGPXXTPTKMSPISMLYKXXXXXXXXXLKYHYGMVVDRXGX

SEQ ID NO: 71400 - protein, 32 aa, Artificial Sequence; identical to SEQ ID NO: 30539
  GFR-binding peptide
  MOD_RES (14)..(15)..(16)..(17)..(18): Xaa is A or G
  MOD_RES (19)..(20)..(21)..(22): Xaa is A or G or is absent

SEQ ID NO: 71401 - protein, 36 aa, Artificial Sequence
  GFR-binding peptide
  MOD_RES (3)..(4): Xaa is C or S
  MOD_RES (18)..(19)..(20)..(21)..(22): Xaa is A or G
  MOD_RES (23)..(24)..(25)..(26): Xaa is A or G or is absent
SPXXVSQDLSPINILYFXXXXXXXXXYGKIPMIVKS

SEQ ID NO: 71402 - protein, 35 aa, Artificial Sequence; identical to SEQ ID NO: 9175
  GFR-binding peptide
  MOD_RES (1)..(34): Xaa is C or S
  MOD_RES (15)..(16)..(17)..(18)..(19): Xaa is A or G
  MOD_RES (20)..(21)..(22)..(23): Xaa is A or G or is absent

SEQ ID NO: 71403 - protein, 41 aa, Artificial Sequence; identical to SEQ ID NO: 32655
  GFR-binding peptide
  MOD_RES (5)..(6)..(39)..(41): Xaa is C or S

SEQ ID NO: 71404 - protein, 41 aa, Artificial Sequence; identical to SEQ ID NO: 32658
  GFR-binding peptide
  MOD_RES (5)..(6)..(40): Xaa is C or S
  MOD_RES (20)..(21)..(22)..(23)..(24): Xaa is A or G
  MOD_RES (25)..(26)..(27)..(28): Xaa is A or G or is absent

SEQ ID NO: 71405 - protein, 34 aa, Artificial Sequence; identical to SEQ ID NO: 32660
  GFR-binding peptide
  MOD_RES (1)..(2): Xaa is C or S
  MOD_RES (16)..(17)..(18)..(19)..(20): Xaa is A or G
  MOD_RES (21)..(22)..(23)..(24): Xaa is A or G or is absent

SEQ ID NO: 71406 - protein, 32 aa, Artificial Sequence; identical to SEQ ID NO: 30542
  GFR-binding peptide
  MOD_RES (14)..(15)..(16)..(17)..(18): Xaa is A or G
  MOD_RES (19)..(20)..(21)..(22): Xaa is A or G or is absent

SEQ ID NO: 71407 - protein, 36 aa, Artificial Sequence; identical to SEQ ID NO: 30545
  GFR-binding peptide
  MOD_RES (2)..(3)..(34)..(36): Xaa is C or S

SEQ ID NO: 71408 - protein, 37 aa, Artificial Sequence
  GFR-binding peptide
  MOD_RES (4)..(5): Xaa is C or S
  MOD_RES (19)..(20)..(21)..(22)..(23): Xaa is A or G
  MOD_RES (24)..(25)..(26)..(27): Xaa is A or G or is absent
PEPXXVPEKMSPINILYFXXXXXXXXXYGKIPNMTVE

SEQ ID NO: 71409 - protein, 38 aa, Artificial Sequence
  GFR-binding peptide
  MOD_RES (1)..(2)..(36)..(38): Xaa is C or S
  MOD_RES (16)..(17)..(18)..(19)..(20): Xaa is A or G
  MOD_RES (21)..(22)..(23)..(24): Xaa is A or G or is absent
XXVPTKLSATSILYYXXXXXXXXXLRKHRGMAVSEXGX

SEQ ID NO: 71410 - protein, 38 aa, Artificial Sequence; identical to SEQ ID NO: 16459
  GFR-binding peptide
  MOD_RES (4)..(5)..(37): Xaa is C or S

SEQ ID NO: 71411 - protein, 42 aa, Artificial Sequence; identical to SEQ ID NO: 30547
  GFR-binding peptide
  MOD_RES (7)..(41): Xaa is C or S
  MOD_RES (21)..(22)..(23)..(24)..(25): Xaa is A or G
  MOD_RES (26)..(27)..(28)..(29): Xaa is A or G or is absent

SEQ ID NO: 71412 - protein, 31 aa, Artificial Sequence; identical to SEQ ID NO: 30548
  GFR-binding peptide
  MOD_RES (31)..(31): Xaa is C or S

SEQ ID NO: 71413 - protein, 32 aa, Artificial Sequence; identical to SEQ ID NO: 9180
  GFR-binding peptide
  MOD_RES (1)..(2): Xaa is C or S

SEQ ID NO: 71414 - protein, 33 aa, Artificial Sequence; identical to SEQ ID NO: 30550
  GFR-binding peptide
  MOD_RES (1)..(2)..(33): Xaa is C or S

SEQ ID NO: 71415 - protein, 35 aa, Artificial Sequence; identical to SEQ ID NO: 9181
  GFR-binding peptide
  MOD_RES (2)..(3): Xaa is C or S
  MOD_RES (17)..(18)..(19)..(20)..(21): Xaa is A or G
  MOD_RES (22)..(23)..(24)..(25): Xaa is A or G or is absent

SEQ ID NO: 71416 - protein, 34 aa, Artificial Sequence; identical to SEQ ID NO: 32669
  GFR-binding peptide
  MOD_RES (1)..(2): Xaa is C or S
  MOD_RES (16)..(17)..(18)..(19)..(20): Xaa is A or G
  MOD_RES (21)..(22)..(23)..(24): Xaa is A or G or is absent

SEQ ID NO: 71417 - protein, 32 aa, Artificial Sequence; identical to SEQ ID NO: 9185
  GFR-binding peptide
  MOD_RES (1)..(32): Xaa is C or S

SEQ ID NO: 71418 - protein, 38 aa, Artificial Sequence
  GFR-binding peptide
  MOD_RES (3)..(4)..(36)..(38): Xaa is C or S
PTXXVPTRLSPISILYKDSANNVVLKYHYDMVVESXGX

SEQ ID NO: 71419 - protein, 32 aa, Artificial Sequence; identical to SEQ ID NO: 32673
  GFR-binding peptide
  MOD_RES (1)..(1): Xaa is C or S

SEQ ID NO: 71420 - protein, 41 aa, Artificial Sequence; identical to SEQ ID NO: 30557
  GFR-binding peptide
  MOD_RES (4)..(5)..(38)..(40): Xaa is C or S
  MOD_RES (19)..(20)..(21)..(22)..(23): Xaa is A or G
  MOD_RES (24)..(25)..(26)..(27): Xaa is A or G or is absent

SEQ ID NO: 71421 - protein, 38 aa, Artificial Sequence; identical to SEQ ID NO: 30558
  GFR-binding peptide
  MOD_RES (4)..(5): Xaa is C or S
  MOD_RES (19)..(20)..(21)..(22)..(23): Xaa is A or G
  MOD_RES (24)..(25)..(26)..(27): Xaa is A or G or is absent

SEQ ID NO: 71422 - protein, 36 aa, Artificial Sequence; identical to SEQ ID NO: 32683
  GFR-binding peptide
  MOD_RES (35)..(35): Xaa is C or S
  MOD_RES (14)..(15)..(16)..(17)..(18): Xaa is A or G
  MOD_RES (19)..(20)..(21)..(22): Xaa is A or G or is absent

SEQ ID NO: 71423 - protein, 42 aa, Artificial Sequence; identical to SEQ ID NO: 9190
  GFR-binding peptide
  MOD_RES (5)..(6)..(40)..(42): Xaa is C or S
  MOD_RES (20)..(21)..(22)..(23)..(24): Xaa is A or G
  MOD_RES (25)..(26)..(27)..(28): Xaa is A or G or is absent

SEQ ID NO: 71424 - protein, 35 aa, Artificial Sequence
  GFR-binding peptide
  MOD_RES (1)..(2): Xaa is C or S
  MOD_RES (16)..(17)..(18)..(19)..(20): Xaa is A or G
  MOD_RES (21)..(22)..(23)..(24): Xaa is A or G or is absent
XXVPEKMSPINILYFXXXXXXXXXYGKIPNMTVES

SEQ ID NO: 71425 - protein, 35 aa, Artificial Sequence; identical to SEQ ID NO: 9191
  GFR-binding peptide
  MOD_RES (34)..(34): Xaa is C or S
  MOD_RES (14)..(15)..(16)..(17)..(18): Xaa is A or G
  MOD_RES (19)..(20)..(21)..(22): Xaa is A or G or is absent

SEQ ID NO: 71426 - protein, 35 aa, Artificial Sequence; identical to SEQ ID NO: 9193
  GFR-binding peptide
  MOD_RES (4)..(5): Xaa is C or S

SEQ ID NO: 71427 - protein, 39 aa, Artificial Sequence; identical to SEQ ID NO: 32690
  GFR-binding peptide
  MOD_RES (6)..(7): Xaa is C or S
  MOD_RES (21)..(22)..(23)..(24)..(25): Xaa is A or G
  MOD_RES (26)..(27)..(28)..(29): Xaa is A or G or is absent

SEQ ID NO: 71428 - protein, 39 aa, Artificial Sequence; identical to SEQ ID NO: 9200
  GFR-binding peptide
  MOD_RES (6)..(7): Xaa is C or S
  MOD_RES (21)..(22)..(23)..(24)..(25): Xaa is A or G
  MOD_RES (26)..(27)..(28)..(29): Xaa is A or G or is absent

SEQ ID NO: 71429 - protein, 41 aa, Artificial Sequence; identical to SEQ ID NO: 9203
  GFR-binding peptide
  MOD_RES (4)..(38)..(40): Xaa is C or S
  MOD_RES (18)..(19)..(20)..(21)..(22): Xaa is A or G
  MOD_RES (23)..(24)..(25)..(26): Xaa is A or G or is absent

SEQ ID NO: 71430 - protein, 37 aa, Artificial Sequence; identical to SEQ ID NO: 30576
  GFR-binding peptide
  MOD_RES (34)..(36): Xaa is C or S
  MOD_RES (14)..(15)..(16)..(17)..(18): Xaa is A or G
  MOD_RES (19)..(20)..(21)..(22): Xaa is A or G or is absent

SEQ ID NO: 71431 - protein, 38 aa, Artificial Sequence
  GFR-binding peptide
  MOD_RES (3)..(4)..(38): Xaa is C or S
  MOD_RES (18)..(19)..(20)..(21)..(22): Xaa is A or G
  MOD_RES (23)..(24)..(25)..(26): Xaa is A or G or is absent
GPXXTPTKMSATSMLYYXXXXXXXXXLRKHRGMVVDRX

SEQ ID NO: 71432 - protein, 34 aa, Artificial Sequence; identical to SEQ ID NO: 32698
  GFR-binding peptide
  MOD_RES (1)..(2)..(34): Xaa is C or S

SEQ ID NO: 71433 - protein, 39 aa, Artificial Sequence
  GFR-binding peptide
  MOD_RES (2)..(3)..(37)..(39): Xaa is C or S
  MOD_RES (17)..(18)..(19)..(20)..(21): Xaa is A or G
  MOD_RES (22)..(23)..(24)..(25): Xaa is A or G or is absent
PXXTPTKMSATSMLYYXXXXXXXXXLRKHRGMVVDRXGX

SEQ ID NO: 71434 - protein, 37 aa, Artificial Sequence; identical to SEQ ID NO: 9206
  GFR-binding peptide
  MOD_RES (4)..(5)..(37): Xaa is C or S

SEQ ID NO: 71435 - protein, 36 aa, Artificial Sequence; identical to SEQ ID NO: 30581
  GFR-binding peptide
  MOD_RES (3)..(4)..(35): Xaa is C or S

SEQ ID NO: 71436 - protein, 37 aa, Artificial Sequence; identical to SEQ ID NO: 30582
  GFR-binding peptide
  MOD_RES (4)..(5)..(37): Xaa is C or S

SEQ ID NO: 71437 - protein, 35 aa, Artificial Sequence; identical to SEQ ID NO: 9208
  GFR-binding peptide
  MOD_RES (1)..(35): Xaa is C or S
  MOD_RES (15)..(16)..(17)..(18)..(19): Xaa is A or G
  MOD_RES (20)..(21)..(22)..(23): Xaa is A or G or is absent

SEQ ID NO: 71438 - protein, 37 aa, Artificial Sequence; identical to SEQ ID NO: 9209
  GFR-binding peptide
  MOD_RES (35)..(37): Xaa is C or S
  MOD_RES (14)..(15)..(16)..(17)..(18): Xaa is A or G
  MOD_RES (19)..(20)..(21)..(22): Xaa is A or G or is absent

SEQ ID NO: 71439 - protein, 42 aa, Artificial Sequence; identical to SEQ ID NO: 9210
  GFR-binding peptide
  MOD_RES (3)..(4)..(39)..(41): Xaa is C or S
  MOD_RES (18)..(19)..(20)..(21)..(22): Xaa is A or G
  MOD_RES (23)..(24)..(25)..(26): Xaa is A or G or is absent

SEQ ID NO: 71440 - protein, 40 aa, Artificial Sequence; identical to SEQ ID NO: 9212
  GFR-binding peptide
  MOD_RES (5)..(6)..(38)..(40): Xaa is C or S

SEQ ID NO: 71441 - protein, 39 aa, Artificial Sequence; identical to SEQ ID NO: 32702
  GFR-binding peptide
  MOD_RES (4)..(5)..(39): Xaa is C or S
  MOD_RES (19)..(20)..(21)..(22)..(23): Xaa is A or G
  MOD_RES (24)..(25)..(26)..(27): Xaa is A or G or is absent

SEQ ID NO: 71442 - protein, 37 aa, Artificial Sequence; identical to SEQ ID NO: 32703
  GFR-binding peptide
  MOD_RES (1)..(2)..(34)..(36): Xaa is C or S

SEQ ID NO: 71443 - protein, 35 aa, Artificial Sequence
  GFR-binding peptide
  MOD_RES (1)..(2)..(35): Xaa is C or S
  MOD_RES (16)..(17)..(18)..(19)..(20): Xaa is A or G
  MOD_RES (21)..(22)..(23)..(24): Xaa is A or G or is absent
XXAPVKTSATSMLYYXXXXXXXXXLRKHRMIVEEX

SEQ ID NO: 71444 - protein, 32 aa, Artificial Sequence
  GFR-binding peptide
  MOD_RES (1)..(2): Xaa is C or S
XXVSQDLSPINILYFIGKTPKIYGKIPMIVKS

SEQ ID NO: 71445 - protein, 38 aa, Artificial Sequence; identical to SEQ ID NO: 9217
  GFR-binding peptide
  MOD_RES (4)..(5): Xaa is C or S
  MOD_RES (19)..(20)..(21)..(22)..(23): Xaa is A or G
  MOD_RES (24)..(25)..(26)..(27): Xaa is A or G or is absent

SEQ ID NO: 71446 - protein, 38 aa, Artificial Sequence; identical to SEQ ID NO: 32715
  GFR-binding peptide
  MOD_RES (7)..(7): Xaa is C or S

SEQ ID NO: 71447 - protein, 34 aa, Artificial Sequence; identical to SEQ ID NO: 32717
  GFR-binding peptide
  MOD_RES (32)..(34): Xaa is C or S

SEQ ID NO: 71448 - protein, 39 aa, Artificial Sequence; identical to SEQ ID NO: 9219
  GFR-binding peptide
  MOD_RES (2)..(3)..(37)..(39): Xaa is C or S
  MOD_RES (17)..(18)..(19)..(20)..(21): Xaa is A or G
  MOD_RES (22)..(23)..(24)..(25): Xaa is A or G or is absent

SEQ ID NO: 71449 - protein, 34 aa, Artificial Sequence
  GFR-binding peptide
  MOD_RES (3)..(4): Xaa is C or S
SPXXVSQDLSPINILYFIGKTPKIYGKIPMIVKS

SEQ ID NO: 71450 - protein, 32 aa, Artificial Sequence
  GFR-binding peptide
  MOD_RES (32)..(32): Xaa is C or S
VPTKLSATSILYYDKGVVTYLRKHRGMAVSEX

SEQ ID NO: 71451 - protein, 30 aa, Artificial Sequence
  GFR-binding peptide
TPTKMSPISMLYKNDKQQIILKYHYGMVVD

SEQ ID NO: 71452 - protein, 36 aa, Artificial Sequence; identical to SEQ ID NO: 9224
  GFR-binding peptide
  MOD_RES (1)..(2): Xaa is C or S
  MOD_RES (16)..(17)..(18)..(19)..(20): Xaa is A or G
  MOD_RES (21)..(22)..(23)..(24): Xaa is A or G or is absent

SEQ ID NO: 71453 - protein, 42 aa, Artificial Sequence; identical to SEQ ID NO: 9225
  GFR-binding peptide
  MOD_RES (5)..(6)..(40)..(42): Xaa is C or S
  MOD_RES (20)..(21)..(22)..(23)..(24): Xaa is A or G
  MOD_RES (25)..(26)..(27)..(28): Xaa is A or G or is absent

SEQ ID NO: 71454 - protein, 38 aa, Artificial Sequence; identical to SEQ ID NO: 9228
  GFR-binding peptide
  MOD_RES (1)..(2)..(36)..(38): Xaa is C or S
  MOD_RES (16)..(17)..(18)..(19)..(20): Xaa is A or G
  MOD_RES (21)..(22)..(23)..(24): Xaa is A or G or is absent

SEQ ID NO: 71455 - protein, 34 aa, Artificial Sequence; identical to SEQ ID NO: 9229
  GFR-binding peptide
  MOD_RES (2)..(3)..(34): Xaa is C or S

SEQ ID NO: 71456 - protein, 39 aa, Artificial Sequence; identical to SEQ ID NO: 9231
  GFR-binding peptide
  MOD_RES (1)..(2)..(36)..(38): Xaa is C or S
  MOD_RES (16)..(17)..(18)..(19)..(20): Xaa is A or G
  MOD_RES (21)..(22)..(23)..(24): Xaa is A or G or is absent

SEQ ID NO: 71457 - protein, 39 aa, Artificial Sequence
  GFR-binding peptide
  MOD_RES (1)..(2)..(36)..(38): Xaa is C or S
  MOD_RES (16)..(17)..(18)..(19)..(20): Xaa is A or G
  MOD_RES (21)..(22)..(23)..(24): Xaa is A or G or is absent
XXTPTKMSATSMLYYXXXXXXXXXLRKHRGMVVDRXGXS

SEQ ID NO: 71458 - protein, 37 aa, Artificial Sequence; identical to SEQ ID NO: 9235
  GFR-binding peptide
  MOD_RES (2)..(3)..(36): Xaa is C or S
  MOD_RES (17)..(18)..(19)..(20)..(21): Xaa is A or G
  MOD_RES (22)..(23)..(24)..(25): Xaa is A or G or is absent

SEQ ID NO: 71459 - protein, 33 aa, Artificial Sequence; identical to SEQ ID NO: 32729
  GFR-binding peptide
  MOD_RES (1)..(1): Xaa is C or S
  MOD_RES (15)..(16)..(17)..(18)..(19): Xaa is A or G
  MOD_RES (20)..(21)..(22)..(23): Xaa is A or G or is absent

SEQ ID NO: 71460 - protein, 35 aa, Artificial Sequence
  GFR-binding peptide
  MOD_RES (3)..(4): Xaa is C or S
PTXXVPTRLEPISILYLDSANNVVKFKYEDMVVES

SEQ ID NO: 71461 - protein, 37 aa, Artificial Sequence; identical to SEQ ID NO: 9238
  GFR-binding peptide
  MOD_RES (1)..(2)..(35)..(37): Xaa is C or S
  MOD_RES (16)..(17)..(18)..(19)..(20): Xaa is A or G
  MOD_RES (21)..(22)..(23)..(24): Xaa is A or G or is absent

SEQ ID NO: 71462 - protein, 33 aa, Artificial Sequence; identical to SEQ ID NO: 9239
  GFR-binding peptide
  MOD_RES (1)..(33): Xaa is C or S

SEQ ID NO: 71463 - protein, 34 aa, Artificial Sequence; identical to SEQ ID NO: 57638
  GFR-binding peptide
  MOD_RES (1)..(33): Xaa is C or S

SEQ ID NO: 71464 - protein, 36 aa, Artificial Sequence
  GFR-binding peptide
  MOD_RES (1)..(35): Xaa is C or S
  MOD_RES (15)..(16)..(17)..(18)..(19): Xaa is A or G
  MOD_RES (20)..(21)..(22)..(23): Xaa is A or G or is absent
XVPEKMSPISILYKXXXXXXXXXLKYHYNMTVESXA

SEQ ID NO: 71465 - protein, 37 aa, Artificial Sequence; identical to SEQ ID NO: 32734
  GFR-binding peptide
  MOD_RES (1)..(35)..(37): Xaa is C or S
  MOD_RES (15)..(16)..(17)..(18)..(19): Xaa is A or G
  MOD_RES (20)..(21)..(22)..(23): Xaa is A or G or is absent

SEQ ID NO: 71466 - protein, 33 aa, Artificial Sequence
  GFR-binding peptide
  MOD_RES (32)..(32): Xaa is C or S
TPTKMEPISMLYLNDKQQIIKFKYEGMVVDRXG

SEQ ID NO: 71467 - protein, 42 aa, Artificial Sequence; identical to SEQ ID NO: 30613
  GFR-binding peptide
  MOD_RES (7)..(39)..(41): Xaa is C or S

SEQ ID NO: 71468 - protein, 34 aa, Artificial Sequence; identical to SEQ ID NO: 16520
  GFR-binding peptide
  MOD_RES (1)..(33): Xaa is C or S

SEQ ID NO: 71469 - protein, 41 aa, Artificial Sequence; identical to SEQ ID NO: 9245
  GFR-binding peptide
  MOD_RES (3)..(4)..(39)..(41): Xaa is C or S
  MOD_RES (18)..(19)..(20)..(21)..(22): Xaa is A or G
  MOD_RES (23)..(24)..(25)..(26): Xaa is A or G or is absent

SEQ ID NO: 71470 - protein, 40 aa, Artificial Sequence; identical to SEQ ID NO: 9246
  GFR-binding peptide
  MOD_RES (4)..(5)..(37)..(39): Xaa is C or S

SEQ ID NO: 71471 - protein, 33 aa, Artificial Sequence; identical to SEQ ID NO: 9247
  GFR-binding peptide
  MOD_RES (1)..(1): Xaa is C or S
  MOD_RES (15)..(16)..(17)..(18)..(19): Xaa is A or G
  MOD_RES (20)..(21)..(22)..(23): Xaa is A or G or is absent

SEQ ID NO: 71472 - protein, 39 aa, Artificial Sequence; identical to SEQ ID NO: 9248
  GFR-binding peptide
  MOD_RES (3)..(4)..(36)..(38): Xaa is C or S

SEQ ID NO: 71473 - protein, 37 aa, Artificial Sequence
  GFR-binding peptide
  MOD_RES (2)..(3)..(36): Xaa is C or S
  MOD_RES (17)..(18)..(19)..(20)..(21): Xaa is A or G
  MOD_RES (22)..(23)..(24)..(25): Xaa is A or G or is absent
TXXAPVKTSATSMLYYXXXXXXXXXLRKHRMIVEEXG

SEQ ID NO: 71474 - protein, 37 aa, Artificial Sequence; identical to SEQ ID NO: 32748
  GFR-binding peptide
  MOD_RES (4)..(5): Xaa is C or S
  MOD_RES (19)..(20)..(21)..(22)..(23): Xaa is A or G
  MOD_RES (24)..(25)..(26)..(27): Xaa is A or G or is absent

SEQ ID NO: 71475 - protein, 43 aa, Artificial Sequence; identical to SEQ ID NO: 9250
  GFR-binding peptide
  MOD_RES (6)..(7)..(41)..(43): Xaa is C or S
  MOD_RES (21)..(22)..(23)..(24)..(25): Xaa is A or G
  MOD_RES (26)..(27)..(28)..(29): Xaa is A or G or is absent

SEQ ID NO: 71476 - protein, 42 aa, Artificial Sequence; identical to SEQ ID NO: 30622
  GFR-binding peptide
  MOD_RES (6)..(7)..(41): Xaa is C or S
  MOD_RES (21)..(22)..(23)..(24)..(25): Xaa is A or G
  MOD_RES (26)..(27)..(28)..(29): Xaa is A or G or is absent

SEQ ID NO: 71477 - protein, 35 aa, Artificial Sequence; identical to SEQ ID NO: 32749
  GFR-binding peptide
  MOD_RES (1)..(35): Xaa is C or S
  MOD_RES (15)..(16)..(17)..(18)..(19): Xaa is A or G
  MOD_RES (20)..(21)..(22)..(23): Xaa is A or G or is absent

SEQ ID NO: 71478 - protein, 36 aa, Artificial Sequence; identical to SEQ ID NO: 9254
  GFR-binding peptide
  MOD_RES (2)..(3): Xaa is C or S
  MOD_RES (17)..(18)..(19)..(20)..(21): Xaa is A or G
  MOD_RES (22)..(23)..(24)..(25): Xaa is A or G or is absent

SEQ ID NO: 71479 - protein, 39 aa, Artificial Sequence; identical to SEQ ID NO: 30626
  GFR-binding peptide
  MOD_RES (4)..(5)..(36)..(38): Xaa is C or S

SEQ ID NO: 71480 - protein, 38 aa, Artificial Sequence; identical to SEQ ID NO: 30629
  GFR-binding peptide
  MOD_RES (5)..(6): Xaa is C or S

SEQ ID NO: 71481 - protein, 36 aa, Artificial Sequence; identical to SEQ ID NO: 9257
  GFR-binding peptide
  MOD_RES (1)..(33)..(35): Xaa is C or S

SEQ ID NO: 71482 - protein, 36 aa, Artificial Sequence; identical to SEQ ID NO: 9259
  GFR-binding peptide
  MOD_RES (6)..(6): Xaa is C or S

SEQ ID NO: 71483 - protein, 41 aa, Artificial Sequence; identical to SEQ ID NO: 9260
  GFR-binding peptide
  MOD_RES (6)..(7)..(41): Xaa is C or S
  MOD_RES (21)..(22)..(23)..(24)..(25): Xaa is A or G
  MOD_RES (26)..(27)..(28)..(29): Xaa is A or G or is absent

SEQ ID NO: 71484 - protein, 44 aa, Artificial Sequence; identical to SEQ ID NO: 32755
  GFR-binding peptide
  MOD_RES (6)..(7)..(41)..(43): Xaa is C or S
  MOD_RES (21)..(22)..(23)..(24)..(25): Xaa is A or G
  MOD_RES (26)..(27)..(28)..(29): Xaa is A or G or is absent

SEQ ID NO: 71485 - protein, 35 aa, Artificial Sequence
  GFR-binding peptide
  MOD_RES (2)..(3): Xaa is C or S
  MOD_RES (17)..(18)..(19)..(20)..(21): Xaa is A or G
  MOD_RES (22)..(23)..(24)..(25): Xaa is A or G or is absent
AXXVPTKLSATSILYYXXXXXXXXXLRKHRGMAVS

SEQ ID NO: 71486 - protein, 44 aa, Artificial Sequence; identical to SEQ ID NO: 30638
  GFR-binding peptide
  MOD_RES (6)..(7)..(41)..(43): Xaa is C or S
  MOD_RES (21)..(22)..(23)..(24)..(25): Xaa is A or G
  MOD_RES (26)..(27)..(28)..(29): Xaa is A or G or is absent

SEQ ID NO: 71487 - protein, 37 aa, Artificial Sequence; identical to SEQ ID NO: 9265
  GFR-binding peptide
  MOD_RES (4)..(5): Xaa is C or S
  MOD_RES (19)..(20)..(21)..(22)..(23): Xaa is A or G
  MOD_RES (24)..(25)..(26)..(27): Xaa is A or G or is absent

SEQ ID NO: 71488 - protein, 36 aa, Artificial Sequence; identical to SEQ ID NO: 30640
  GFR-binding peptide
  MOD_RES (33)..(35): Xaa is C or S
  MOD_RES (14)..(15)..(16)..(17)..(18): Xaa is A or G
  MOD_RES (19)..(20)..(21)..(22): Xaa is A or G or is absent

SEQ ID NO: 71489 - protein, 41 aa, Artificial Sequence; identical to SEQ ID NO: 9268
  GFR-binding peptide
  MOD_RES (6)..(7)..(40): Xaa is C or S
  MOD_RES (21)..(22)..(23)..(24)..(25): Xaa is A or G
  MOD_RES (26)..(27)..(28)..(29): Xaa is A or G or is absent

SEQ ID NO: 71490 - protein, 41 aa, Artificial Sequence
  GFR-binding peptide
  MOD_RES (5)..(6)..(38)..(40): Xaa is C or S
SAGPXXTPTKMEPISMLYLNDKQQIIKFKYEGMVVDRXGXS

SEQ ID NO: 71491 - protein, 37 aa, Artificial Sequence; identical to SEQ ID NO: 32761
  GFR-binding peptide
  MOD_RES (4)..(5): Xaa is C or S
  MOD_RES (19)..(20)..(21)..(22)..(23): Xaa is A or G
  MOD_RES (24)..(25)..(26)..(27): Xaa is A or G or is absent

SEQ ID NO: 71492 - protein, 36 aa, Artificial Sequence; identical to SEQ ID NO: 30646
  GFR-binding peptide
  MOD_RES (4)..(5)..(36): Xaa is C or S

SEQ ID NO: 71493 - protein, 34 aa, Artificial Sequence; identical to SEQ ID NO: 30648
  GFR-binding peptide
  MOD_RES (1)..(2): Xaa is C or S
  MOD_RES (16)..(17)..(18)..(19)..(20): Xaa is A or G
  MOD_RES (21)..(22)..(23)..(24): Xaa is A or G or is absent

SEQ ID NO: 71494 - protein, 41 aa, Artificial Sequence; identical to SEQ ID NO: 9269
  GFR-binding peptide
  MOD_RES (5)..(6)..(39)..(41): Xaa is C or S
  MOD_RES (20)..(21)..(22)..(23)..(24): Xaa is A or G
  MOD_RES (25)..(26)..(27)..(28): Xaa is A or G or is absent

SEQ ID NO: 71495 - protein, 37 aa, Artificial Sequence; identical to SEQ ID NO: 32763
  GFR-binding peptide
  MOD_RES (2)..(3)..(35)..(37): Xaa is C or S

SEQ ID NO: 71496 - protein, 35 aa, Artificial Sequence
  GFR-binding peptide
  MOD_RES (2)..(3)..(34): Xaa is C or S
PXXVPQDLSPINILYFVGRTPKVYGKIPMVVKSXK

SEQ ID NO: 71497 - protein, 33 aa, Artificial Sequence
  GFR-binding peptide
  MOD_RES (32)..(32): Xaa is C or S
TPTKMSATSMLYYNDKQQIILRKHRGMVVDRXG

SEQ ID NO: 71498 - protein, 37 aa, Artificial Sequence
  GFR-binding peptide
  MOD_RES (1)..(2)..(36): Xaa is C or S
  MOD_RES (16)..(17)..(18)..(19)..(20): Xaa is A or G
  MOD_RES (21)..(22)..(23)..(24): Xaa is A or G or is absent
XXVPTRLEPISILYLXXXXXXXXXKFKYEDMVVESXG

SEQ ID NO: 71499 - protein, 37 aa, Artificial Sequence
  GFR-binding peptide
  MOD_RES (1)..(2)..(35)..(37): Xaa is C or S
  MOD_RES (16)..(17)..(18)..(19)..(20): Xaa is A or G
  MOD_RES (21)..(22)..(23)..(24): Xaa is A or G or is absent
XXVSQDLSPINILYFXXXXXXXXXYGKIPMIVKSXKX

SEQ ID NO: 71500 - protein, 34 aa, Artificial Sequence; identical to SEQ ID NO: 30655
  GFR-binding peptide
  MOD_RES (1)..(2): Xaa is C or S
  MOD_RES (16)..(17)..(18)..(19)..(20): Xaa is A or G
  MOD_RES (21)..(22)..(23)..(24): Xaa is A or G or is absent

SEQ ID NO: 71501 - protein, 35 aa, Artificial Sequence; identical to SEQ ID NO: 9277
  GFR-binding peptide
  MOD_RES (2)..(3): Xaa is C or S
  MOD_RES (17)..(18)..(19)..(20)..(21): Xaa is A or G
  MOD_RES (22)..(23)..(24)..(25): Xaa is A or G or is absent

SEQ ID NO: 71502 - protein, 38 aa, Artificial Sequence; identical to SEQ ID NO: 30658
  GFR-binding peptide
  MOD_RES (6)..(7)..(38): Xaa is C or S

SEQ ID NO: 71503 - protein, 38 aa, Artificial Sequence
  GFR-binding peptide
  MOD_RES (4)..(5): Xaa is C or S
  MOD_RES (19)..(20)..(21)..(22)..(23): Xaa is A or G
  MOD_RES (24)..(25)..(26)..(27): Xaa is A or G or is absent
PEPXXVPEKMSPISILYKXXXXXXXXXLKYHYNMTVES

SEQ ID NO: 71504 - protein, 36 aa, Artificial Sequence; identical to SEQ ID NO: 30661
  GFR-binding peptide
  MOD_RES (1)..(33)..(35): Xaa is C or S

SEQ ID NO: 71505 - protein, 42 aa, Artificial Sequence; identical to SEQ ID NO: 9281
  GFR-binding peptide
  MOD_RES (6)..(7)..(41): Xaa is C or S
  MOD_RES (21)..(22)..(23)..(24)..(25): Xaa is A or G
  MOD_RES (26)..(27)..(28)..(29): Xaa is A or G or is absent

SEQ ID NO: 71506 - protein, 34 aa, Artificial Sequence; identical to SEQ ID NO: 30662
  GFR-binding peptide
  MOD_RES (2)..(3): Xaa is C or S

SEQ ID NO: 71507 - protein, 36 aa, Artificial Sequence; identical to SEQ ID NO: 32772
  GFR-binding peptide
  MOD_RES (3)..(3): Xaa is C or S
  MOD_RES (17)..(18)..(19)..(20)..(21): Xaa is A or G
  MOD_RES (22)..(23)..(24)..(25): Xaa is A or G or is absent

SEQ ID NO: 71508 - protein, 40 aa, Artificial Sequence
  GFR-binding peptide
  MOD_RES (4)..(5)..(37)..(39): Xaa is C or S
PPTXXVPTRLSPISILYKDSANNVVLKYHYDMVVESXGXR

SEQ ID NO: 71509 - protein, 42 aa, Artificial Sequence
  GFR-binding peptide
  MOD_RES (6)..(7)..(40)..(42): Xaa is C or S
  MOD_RES (21)..(22)..(23)..(24)..(25): Xaa is A or G
  MOD_RES (26)..(27)..(28)..(29): Xaa is A or G or is absent
ASASPXXVPQDLSPINILYFXXXXXXXXXYGKIPMVVKSXKX

SEQ ID NO: 71510 - protein, 37 aa, Artificial Sequence; identical to SEQ ID NO: 32774
  GFR-binding peptide
  MOD_RES (34)..(36): Xaa is C or S
  MOD_RES (14)..(15)..(16)..(17)..(18): Xaa is A or G
  MOD_RES (19)..(20)..(21)..(22): Xaa is A or G or is absent

SEQ ID NO: 71511 - protein, 37 aa, Artificial Sequence
  GFR-binding peptide
  MOD_RES (6)..(7): Xaa is C or S
HVPKPXXAPTKLSATSVLYYDDSSNVILRKHRNMVVR

SEQ ID NO: 71512 - protein, 37 aa, Artificial Sequence; identical to SEQ ID NO: 57686
  GFR-binding peptide
  MOD_RES (6)..(7): Xaa is C or S

SEQ ID NO: 71513 - protein, 36 aa, Artificial Sequence; identical to SEQ ID NO: 30668
  GFR-binding peptide
  MOD_RES (3)..(4): Xaa is C or S
  MOD_RES (18)..(19)..(20)..(21)..(22): Xaa is A or G
  MOD_RES (23)..(24)..(25)..(26): Xaa is A or G or is absent

SEQ ID NO: 71514 - protein, 41 aa, Artificial Sequence; identical to SEQ ID NO: 30670
  GFR-binding peptide
  MOD_RES (3)..(4)..(39)..(41): Xaa is C or S
  MOD_RES (18)..(19)..(20)..(21)..(22): Xaa is A or G
  MOD_RES (23)..(24)..(25)..(26): Xaa is A or G or is absent

SEQ ID NO: 71515 - protein, 37 aa, Artificial Sequence; identical to SEQ ID NO: 30671
  GFR-binding peptide
  MOD_RES (1)..(35)..(37): Xaa is C or S
  MOD_RES (15)..(16)..(17)..(18)..(19): Xaa is A or G
  MOD_RES (20)..(21)..(22)..(23): Xaa is A or G or is absent

SEQ ID NO: 71516 - protein, 35 aa, Artificial Sequence; identical to SEQ ID NO: 32792
  GFR-binding peptide
  MOD_RES (34)..(34): Xaa is C or S
  MOD_RES (14)..(15)..(16)..(17)..(18): Xaa is A or G
  MOD_RES (19)..(20)..(21)..(22): Xaa is A or G or is absent

SEQ ID NO: 71517 - protein, 38 aa, Artificial Sequence
  GFR-binding peptide
  MOD_RES (5)..(6): Xaa is C or S
  MOD_RES (20)..(21)..(22)..(23)..(24): Xaa is A or G
  MOD_RES (25)..(26)..(27)..(28): Xaa is A or G or is absent
IPEPXXVPEKMEPISILYLXXXXXXXXXKFKYENMTVE

SEQ ID NO: 71518 - protein, 38 aa, Artificial Sequence; identical to SEQ ID NO: 30674
  GFR-binding peptide
  MOD_RES (3)..(4)..(38): Xaa is C or S
  MOD_RES (18)..(19)..(20)..(21)..(22): Xaa is A or G
  MOD_RES (23)..(24)..(25)..(26): Xaa is A or G or is absent

SEQ ID NO: 71519 - protein, 34 aa, Artificial Sequence; identical to SEQ ID NO: 16578
  GFR-binding peptide
  MOD_RES (34)..(34): Xaa is C or S
  MOD_RES (14)..(15)..(16)..(17)..(18): Xaa is A or G
  MOD_RES (19)..(20)..(21)..(22): Xaa is A or G or is absent

SEQ ID NO: 71520 - protein, 39 aa, Artificial Sequence
  GFR-binding peptide
  MOD_RES (4)..(5)..(36)..(38): Xaa is C or S
PSTXXAPVKTSPISMLYKDNGRVLLLKYHYMIVEEXGXL

SEQ ID NO: 71521 - protein, 40 aa, Artificial Sequence; identical to SEQ ID NO: 32797
  GFR-binding peptide
  MOD_RES (6)..(38)..(40): Xaa is C or S

SEQ ID NO: 71522 - protein, 39 aa, Artificial Sequence; identical to SEQ ID NO: 9292
  GFR-binding peptide
  MOD_RES (6)..(7): Xaa is C or S
  MOD_RES (21)..(22)..(23)..(24)..(25): Xaa is A or G
  MOD_RES (26)..(27)..(28)..(29): Xaa is A or G or is absent

SEQ ID NO: 71523 - protein, 44 aa, Artificial Sequence; identical to SEQ ID NO: 9294
  GFR-binding peptide
  MOD_RES (6)..(7)..(41)..(43): Xaa is C or S
  MOD_RES (21)..(22)..(23)..(24)..(25): Xaa is A or G
  MOD_RES (26)..(27)..(28)..(29): Xaa is A or G or is absent

SEQ ID NO: 71524 - protein, 42 aa, Artificial Sequence; identical to SEQ ID NO: 30683
  GFR-binding peptide
  MOD_RES (5)..(6)..(40)..(42): Xaa is C or S
  MOD_RES (20)..(21)..(22)..(23)..(24): Xaa is A or G
  MOD_RES (25)..(26)..(27)..(28): Xaa is A or G or is absent

SEQ ID NO: 71525 - protein, 35 aa, Artificial Sequence; identical to SEQ ID NO: 30684
  GFR-binding peptide
  MOD_RES (3)..(4)..(35): Xaa is C or S

SEQ ID NO: 71526 - protein, 39 aa, Artificial Sequence; identical to SEQ ID NO: 9298
  GFR-binding peptide
  MOD_RES (1)..(2)..(37)..(39): Xaa is C or S
  MOD_RES (16)..(17)..(18)..(19)..(20): Xaa is A or G
  MOD_RES (21)..(22)..(23)..(24): Xaa is A or G or is absent

SEQ ID NO: 71527 - protein, 39 aa, Artificial Sequence; identical to SEQ ID NO: 9301
  GFR-binding peptide
  MOD_RES (2)..(3)..(38): Xaa is C or S
  MOD_RES (17)..(18)..(19)..(20)..(21): Xaa is A or G
  MOD_RES (22)..(23)..(24)..(25): Xaa is A or G or is absent

SEQ ID NO: 71528 - protein, 42 aa, Artificial Sequence; identical to SEQ ID NO: 9302
  GFR-binding peptide
  MOD_RES (6)..(7)..(40)..(42): Xaa is C or S
  MOD_RES (21)..(22)..(23)..(24)..(25): Xaa is A or G
  MOD_RES (26)..(27)..(28)..(29): Xaa is A or G or is absent

SEQ ID NO: 71529 - protein, 40 aa, Artificial Sequence
  GFR-binding peptide
  MOD_RES (4)..(5)..(39): Xaa is C or S
  MOD_RES (19)..(20)..(21)..(22)..(23): Xaa is A or G
  MOD_RES (24)..(25)..(26)..(27): Xaa is A or G or is absent
AGPXXTPTKMEPISMLYLXXXXXXXXXKFKYEGMVVDRXG

SEQ ID NO: 71530 - protein, 32 aa, Artificial Sequence; identical to SEQ ID NO: 32804
  GFR-binding peptide
  MOD_RES (14)..(15)..(16)..(17)..(18): Xaa is A or G
  MOD_RES (19)..(20)..(21)..(22): Xaa is A or G or is absent

SEQ ID NO: 71531 - protein, 40 aa, Artificial Sequence; identical to SEQ ID NO: 30691
  GFR-binding peptide
  MOD_RES (5)..(6)..(38)..(40): Xaa is C or S

SEQ ID NO: 71532 - protein, 34 aa, Artificial Sequence
  GFR-binding peptide
  MOD_RES (31)..(33): Xaa is C or S
APVKTEPISMLYLDNGRVLLKFKYEMIVEEXGXL

SEQ ID NO: 71533 - protein, 43 aa, Artificial Sequence; identical to SEQ ID NO: 9303
  GFR-binding peptide
  MOD_RES (6)..(7)..(40)..(42): Xaa is C or S
  MOD_RES (21)..(22)..(23)..(24)..(25): Xaa is A or G
  MOD_RES (26)..(27)..(28)..(29): Xaa is A or G or is absent

SEQ ID NO: 71534 - protein, 39 aa, Artificial Sequence; identical to SEQ ID NO: 30696
  GFR-binding peptide
  MOD_RES (3)..(4)..(36)..(38): Xaa is C or S

SEQ ID NO: 71535 - protein, 36 aa, Artificial Sequence; identical to SEQ ID NO: 30699
  GFR-binding peptide
  MOD_RES (3)..(4)..(36): Xaa is C or S

SEQ ID NO: 71536 - protein, 38 aa, Artificial Sequence; identical to SEQ ID NO: 30702
  GFR-binding peptide
  MOD_RES (3)..(4)..(36)..(38): Xaa is C or S

SEQ ID NO: 71537 - protein, 37 aa, Artificial Sequence; identical to SEQ ID NO: 30703
  GFR-binding peptide
  MOD_RES (2)..(3)..(35)..(37): Xaa is C or S

SEQ ID NO: 71538 - protein, 41 aa, Artificial Sequence; identical to SEQ ID NO: 9310
  GFR-binding peptide
  MOD_RES (3)..(4)..(38)..(40): Xaa is C or S
  MOD_RES (18)..(19)..(20)..(21)..(22): Xaa is A or G
  MOD_RES (23)..(24)..(25)..(26): Xaa is A or G or is absent

SEQ ID NO: 71539 - protein, 39 aa, Artificial Sequence; identical to SEQ ID NO: 32822
  GFR-binding peptide
  MOD_RES (2)..(3)..(37)..(39): Xaa is C or S
  MOD_RES (17)..(18)..(19)..(20)..(21): Xaa is A or G
  MOD_RES (22)..(23)..(24)..(25): Xaa is A or G or is absent

SEQ ID NO: 71540 - protein, 35 aa, Artificial Sequence
  GFR-binding peptide
  MOD_RES (1)..(32)..(34): Xaa is C or S
XVPQDLSPINILYFVGRTPKVYGKIPMVVKSXKXS

SEQ ID NO: 71541 - protein, 39 aa, Artificial Sequence; identical to SEQ ID NO: 9314
  GFR-binding peptide
  MOD_RES (2)..(3)..(36)..(38): Xaa is C or S
  MOD_RES (17)..(18)..(19)..(20)..(21): Xaa is A or G
  MOD_RES (22)..(23)..(24)..(25): Xaa is A or G or is absent

SEQ ID NO: 71542 - protein, 36 aa, Artificial Sequence; identical to SEQ ID NO: 9316
  GFR-binding peptide
  MOD_RES (3)..(4): Xaa is C or S
  MOD_RES (18)..(19)..(20)..(21)..(22): Xaa is A or G
  MOD_RES (23)..(24)..(25)..(26): Xaa is A or G or is absent

SEQ ID NO: 71543 - protein, 40 aa, Artificial Sequence
  GFR-binding peptide
  MOD_RES (6)..(7)..(40): Xaa is C or S
  MOD_RES (21)..(22)..(23)..(24)..(25): Xaa is A or G
  MOD_RES (26)..(27)..(28)..(29): Xaa is A or G or is absent
ASASPXXVSQDLSPINILYFXXXXXXXXXYGKIPMIVKSX

SEQ ID NO: 71544 - protein, 37 aa, Artificial Sequence; identical to SEQ ID NO: 9317
  GFR-binding peptide
  MOD_RES (3)..(4)..(37): Xaa is C or S
  MOD_RES (18)..(19)..(20)..(21)..(22): Xaa is A or G
  MOD_RES (23)..(24)..(25)..(26): Xaa is A or G or is absent

SEQ ID NO: 71545 - protein, 37 aa, Artificial Sequence
  GFR-binding peptide
  MOD_RES (1)..(2)..(34)..(36): Xaa is C or S
XXVPARLSATSILYYDAANNVVLRKHRDMVVEAXGXR

SEQ ID NO: 71546 - protein, 38 aa, Artificial Sequence
  GFR-binding peptide
  MOD_RES (2)..(3)..(36)..(38): Xaa is C or S
  MOD_RES (17)..(18)..(19)..(20)..(21): Xaa is A or G
  MOD_RES (22)..(23)..(24)..(25): Xaa is A or G or is absent
TXXAPVKTSATSMLYYXXXXXXXXXLRKHRMIVEEXGX

SEQ ID NO: 71547 - protein, 38 aa, Artificial Sequence; identical to SEQ ID NO: 9318
  GFR-binding peptide
  MOD_RES (5)..(6)..(38): Xaa is C or S

SEQ ID NO: 71548 - protein, 40 aa, Artificial Sequence; identical to SEQ ID NO: 30712
  GFR-binding peptide
  MOD_RES (6)..(7): Xaa is C or S
  MOD_RES (21)..(22)..(23)..(24)..(25): Xaa is A or G
  MOD_RES (26)..(27)..(28)..(29): Xaa is A or G or is absent

SEQ ID NO: 71549 - protein, 34 aa, Artificial Sequence; identical to SEQ ID NO: 32830
  GFR-binding peptide
  MOD_RES (34)..(34): Xaa is C or S
  MOD_RES (14)..(15)..(16)..(17)..(18): Xaa is A or G
  MOD_RES (19)..(20)..(21)..(22): Xaa is A or G or is absent

SEQ ID NO: 71550 - protein, 42 aa, Artificial Sequence; identical to SEQ ID NO: 9321
  GFR-binding peptide
  MOD_RES (6)..(40)..(42): Xaa is C or S
  MOD_RES (20)..(21)..(22)..(23)..(24): Xaa is A or G
  MOD_RES (25)..(26)..(27)..(28): Xaa is A or G or is absent

SEQ ID NO: 71551 - protein, 41 aa, Artificial Sequence
  GFR-binding peptide
  MOD_RES (6)..(7)..(41): Xaa is C or S
  MOD_RES (21)..(22)..(23)..(24)..(25): Xaa is A or G
  MOD_RES (26)..(27)..(28)..(29): Xaa is A or G or is absent
AAPASXXVPARLSATSILYYXXXXXXXXXLRKHRDMVVEAX

SEQ ID NO: 71552 - protein, 35 aa, Artificial Sequence; identical to SEQ ID NO: 9324
  GFR-binding peptide
  MOD_RES (1)..(33)..(35): Xaa is C or S

SEQ ID NO: 71553 - protein, 34 aa, Artificial Sequence
  GFR-binding peptide
  MOD_RES (3)..(4): Xaa is C or S
PTXXVPTRLSPISILYKDSANNVVLKYHYDMVVE

SEQ ID NO: 71554 - protein, 37 aa, Artificial Sequence; identical to SEQ ID NO: 30715
  GFR-binding peptide
  MOD_RES (5)..(6): Xaa is C or S

SEQ ID NO: 71555 - protein, 37 aa, Artificial Sequence; identical to SEQ ID NO: 9327
  GFR-binding peptide
  MOD_RES (1)..(2)..(35)..(37): Xaa is C or S
  MOD_RES (16)..(17)..(18)..(19)..(20): Xaa is A or G
  MOD_RES (21)..(22)..(23)..(24): Xaa is A or G or is absent

SEQ ID NO: 71556 - protein, 37 aa, Artificial Sequence; identical to SEQ ID NO: 9329
  GFR-binding peptide
  MOD_RES (2)..(3)..(37): Xaa is C or S
  MOD_RES (17)..(18)..(19)..(20)..(21): Xaa is A or G
  MOD_RES (22)..(23)..(24)..(25): Xaa is A or G or is absent

SEQ ID NO: 71557 - protein, 36 aa, Artificial Sequence
  GFR-binding peptide
  MOD_RES (3)..(4): Xaa is C or S
  MOD_RES (18)..(19)..(20)..(21)..(22): Xaa is A or G
  MOD_RES (23)..(24)..(25)..(26): Xaa is A or G or is absent
PTXXVPTRLEPISILYLXXXXXXXXXKFKYEDMVVE

SEQ ID NO: 71558 - protein, 37 aa, Artificial Sequence; identical to SEQ ID NO: 32845
  GFR-binding peptide
  MOD_RES (5)..(37): Xaa is C or S

SEQ ID NO: 71559 - protein, 35 aa, Artificial Sequence; identical to SEQ ID NO: 9332
  GFR-binding peptide
  MOD_RES (3)..(4)..(35): Xaa is C or S

SEQ ID NO: 71560 - protein, 35 aa, Artificial Sequence; identical to SEQ ID NO: 9335
  GFR-binding peptide
  MOD_RES (2)..(3)..(34): Xaa is C or S

SEQ ID NO: 71561 - protein, 34 aa, Artificial Sequence; identical to SEQ ID NO: 30725
  GFR-binding peptide
  MOD_RES (1)..(1): Xaa is C or S
  MOD_RES (15)..(16)..(17)..(18)..(19): Xaa is A or G
  MOD_RES (20)..(21)..(22)..(23): Xaa is A or G or is absent

SEQ ID NO: 71562 - protein, 37 aa, Artificial Sequence; identical to SEQ ID NO: 16639
  GFR-binding peptide
  MOD_RES (6)..(7): Xaa is C or S

SEQ ID NO: 71563 - protein, 31 aa, Artificial Sequence; identical to SEQ ID NO: 30727
  GFR-binding peptide

SEQ ID NO: 71564 - protein, 40 aa, Artificial Sequence
  GFR-binding peptide
  MOD_RES (5)..(6)..(40): Xaa is C or S
  MOD_RES (20)..(21)..(22)..(23)..(24): Xaa is A or G
  MOD_RES (25)..(26)..(27)..(28): Xaa is A or G or is absent
SAGPXXTPTKMEPISMLYLXXXXXXXXXKFKYEGMVVDRX

SEQ ID NO: 71565 - protein, 38 aa, Artificial Sequence; identical to SEQ ID NO: 9340
  GFR-binding peptide
  MOD_RES (1)..(2)..(36)..(38): Xaa is C or S
  MOD_RES (16)..(17)..(18)..(19)..(20): Xaa is A or G
  MOD_RES (21)..(22)..(23)..(24): Xaa is A or G or is absent

SEQ ID NO: 71566 - protein, 31 aa, Artificial Sequence; identical to SEQ ID NO: 9343
  GFR-binding peptide

SEQ ID NO: 71567 - protein, 39 aa, Artificial Sequence; identical to SEQ ID NO: 57769
  GFR-binding peptide
  MOD_RES (2)..(3)..(36)..(38): Xaa is C or S
  MOD_RES (17)..(18)..(19)..(20)..(21): Xaa is A or G
  MOD_RES (22)..(23)..(24)..(25): Xaa is A or G or is absent

SEQ ID NO: 71568 - protein, 41 aa, Artificial Sequence; identical to SEQ ID NO: 30733
  GFR-binding peptide
  MOD_RES (6)..(7)..(41): Xaa is C or S
  MOD_RES (21)..(22)..(23)..(24)..(25): Xaa is A or G
  MOD_RES (26)..(27)..(28)..(29): Xaa is A or G or is absent

SEQ ID NO: 71569 - protein, 40 aa, Artificial Sequence; identical to SEQ ID NO: 30734
  GFR-binding peptide
  MOD_RES (6)..(7): Xaa is C or S
  MOD_RES (21)..(22)..(23)..(24)..(25): Xaa is A or G
  MOD_RES (26)..(27)..(28)..(29): Xaa is A or G or is absent

SEQ ID NO: 71570 - protein, 35 aa, Artificial Sequence; identical to SEQ ID NO: 30735
  GFR-binding peptide
  MOD_RES (32)..(34): Xaa is C or S

SEQ ID NO: 71571 - protein, 36 aa, Artificial Sequence; identical to SEQ ID NO: 32864
  GFR-binding peptide
  MOD_RES (3)..(4): Xaa is C or S
  MOD_RES (18)..(19)..(20)..(21)..(22): Xaa is A or G
  MOD_RES (23)..(24)..(25)..(26): Xaa is A or G or is absent

SEQ ID NO: 71572 - protein, 38 aa, Artificial Sequence; identical to SEQ ID NO: 9349
  GFR-binding peptide
  MOD_RES (3)..(4)..(35)..(37): Xaa is C or S

SEQ ID NO: 71573 - protein, 34 aa, Artificial Sequence; identical to SEQ ID NO: 30739
  GFR-binding peptide
  MOD_RES (1)..(33): Xaa is C or S

SEQ ID NO: 71574 - protein, 37 aa, Artificial Sequence; identical to SEQ ID NO: 9351
  GFR-binding peptide
  MOD_RES (5)..(6): Xaa is C or S

SEQ ID NO: 71575 - protein, 35 aa, Artificial Sequence; identical to SEQ ID NO: 32869
  GFR-binding peptide
  MOD_RES (33)..(35): Xaa is C or S
  MOD_RES (14)..(15)..(16)..(17)..(18): Xaa is A or G
  MOD_RES (19)..(20)..(21)..(22): Xaa is A or G or is absent

SEQ ID NO: 71576 - protein, 39 aa, Artificial Sequence; identical to SEQ ID NO: 9352
  GFR-binding peptide
  MOD_RES (5)..(6)..(38): Xaa is C or S

SEQ ID NO: 71577 - protein, 36 aa, Artificial Sequence; identical to SEQ ID NO: 9353
  GFR-binding peptide
  MOD_RES (33)..(35): Xaa is C or S
  MOD_RES (14)..(15)..(16)..(17)..(18): Xaa is A or G
  MOD_RES (19)..(20)..(21)..(22): Xaa is A or G or is absent

SEQ ID NO: 71578 - protein, 38 aa, Artificial Sequence
  GFR-binding peptide
  MOD_RES (2)..(3)..(35)..(37): Xaa is C or S
PXXVPEKMNAISILYFDENKNVVLKKYRNMTVESXAXR

SEQ ID NO: 71579 - protein, 33 aa, Artificial Sequence
  GFR-binding peptide
  MOD_RES (1)..(33): Xaa is C or S
XVPTKLSATSILYYDKGVVTYLRKHRGMAVSEX

SEQ ID NO: 71580 - protein, 41 aa, Artificial Sequence; identical to SEQ ID NO: 9357
  GFR-binding peptide
  MOD_RES (2)..(3)..(38)..(40): Xaa is C or S
  MOD_RES (17)..(18)..(19)..(20)..(21): Xaa is A or G
  MOD_RES (22)..(23)..(24)..(25): Xaa is A or G or is absent

SEQ ID NO: 71581 - protein, 38 aa, Artificial Sequence; identical to SEQ ID NO: 30749
  GFR-binding peptide
  MOD_RES (6)..(7)..(38): Xaa is C or S

SEQ ID NO: 71582 - protein, 33 aa, Artificial Sequence; identical to SEQ ID NO: 9358
  GFR-binding peptide
  MOD_RES (1)..(1): Xaa is C or S

SEQ ID NO: 71583 - protein, 35 aa, Artificial Sequence; identical to SEQ ID NO: 9359
  GFR-binding peptide
  MOD_RES (4)..(5): Xaa is C or S

SEQ ID NO: 71584 - protein, 36 aa, Artificial Sequence; identical to SEQ ID NO: 9360
  GFR-binding peptide
  MOD_RES (1)..(33)..(35): Xaa is C or S

SEQ ID NO: 71585 - protein, 41 aa, Artificial Sequence
  GFR-binding peptide
  MOD_RES (5)..(6)..(38)..(40): Xaa is C or S
SAGPXXTPTKMSPISMLYKNDKQQIILKYHYGMVVDRXGXS

SEQ ID NO: 71586 - protein, 43 aa, Artificial Sequence
  GFR-binding peptide
  MOD_RES (6)..(7)..(40)..(42): Xaa is C or S
  MOD_RES (21)..(22)..(23)..(24)..(25): Xaa is A or G
  MOD_RES (26)..(27)..(28)..(29): Xaa is A or G or is absent
ASASPXXVPQDLSPINILYFXXXXXXXXXYGKIPMVVKSXKXS

SEQ ID NO: 71587 - protein, 37 aa, Artificial Sequence; identical to SEQ ID NO: 30756
  GFR-binding peptide
  MOD_RES (2)..(3)..(37): Xaa is C or S
  MOD_RES (17)..(18)..(19)..(20)..(21): Xaa is A or G
  MOD_RES (22)..(23)..(24)..(25): Xaa is A or G or is absent

SEQ ID NO: 71588 - protein, 35 aa, Artificial Sequence; identical to SEQ ID NO: 32882
  GFR-binding peptide
  MOD_RES (2)..(3): Xaa is C or S
  MOD_RES (17)..(18)..(19)..(20)..(21): Xaa is A or G
  MOD_RES (22)..(23)..(24)..(25): Xaa is A or G or is absent

SEQ ID NO: 71589 - protein, 35 aa, Artificial Sequence
  GFR-binding peptide
  MOD_RES (4)..(5): Xaa is C or S
SKAXXVPTKLSATSILYYDKGVVTYLRKHRGMAVS

SEQ ID NO: 71590 - protein, 32 aa, Artificial Sequence; identical to SEQ ID NO: 30757
  GFR-binding peptide
  MOD_RES (2)..(2): Xaa is C or S

SEQ ID NO: 71591 - protein, 31 aa, Artificial Sequence; identical to SEQ ID NO: 9367
  GFR-binding peptide
  MOD_RES (1)..(1): Xaa is C or S

SEQ ID NO: 71592 - protein, 35 aa, Artificial Sequence; identical to SEQ ID NO: 9368
  GFR-binding peptide
  MOD_RES (1)..(2): Xaa is C or S
  MOD_RES (16)..(17)..(18)..(19)..(20): Xaa is A or G
  MOD_RES (21)..(22)..(23)..(24): Xaa is A or G or is absent

SEQ ID NO: 71593 - protein, 40 aa, Artificial Sequence
  GFR-binding peptide
  MOD_RES (6)..(7): Xaa is C or S
  MOD_RES (21)..(22)..(23)..(24)..(25): Xaa is A or G
  MOD_RES (26)..(27)..(28)..(29): Xaa is A or G or is absent
GSAGPXXTPTKMSPISMLYKXXXXXXXXXLKYHYGMVVDR

SEQ ID NO: 71594 - protein, 40 aa, Artificial Sequence; identical to SEQ ID NO: 30762
  GFR-binding peptide
  MOD_RES (3)..(4)..(38)..(40): Xaa is C or S
  MOD_RES (18)..(19)..(20)..(21)..(22): Xaa is A or G
  MOD_RES (23)..(24)..(25)..(26): Xaa is A or G or is absent

SEQ ID NO: 71595 - protein, 41 aa, Artificial Sequence; identical to SEQ ID NO: 32888
  GFR-binding peptide
  MOD_RES (5)..(6)..(40): Xaa is C or S
  MOD_RES (20)..(21)..(22)..(23)..(24): Xaa is A or G
  MOD_RES (25)..(26)..(27)..(28): Xaa is A or G or is absent

SEQ ID NO: 71596 - protein, 34 aa, Artificial Sequence; identical to SEQ ID NO: 9369
  GFR-binding peptide
  MOD_RES (1)..(2)..(34): Xaa is C or S

SEQ ID NO: 71597 - protein, 31 aa, Artificial Sequence; identical to SEQ ID NO: 30766
  GFR-binding peptide
  MOD_RES (1)..(1): Xaa is C or S

SEQ ID NO: 71598 - protein, 35 aa, Artificial Sequence; identical to SEQ ID NO: 57809
  GFR-binding peptide
  MOD_RES (33)..(35): Xaa is C or S
  MOD_RES (14)..(15)..(16)..(17)..(18): Xaa is A or G
  MOD_RES (19)..(20)..(21)..(22): Xaa is A or G or is absent

SEQ ID NO: 71599 - protein, 38 aa, Artificial Sequence
  GFR-binding peptide
  MOD_RES (6)..(7): Xaa is C or S
GIPEPXXVPEKMNAISILYFDENKNVVLKKYRNMTVES

SEQ ID NO: 71600 - protein, 37 aa, Artificial Sequence; identical to SEQ ID NO: 9372
  GFR-binding peptide
  MOD_RES (3)..(4)..(37): Xaa is C or S
  MOD_RES (18)..(19)..(20)..(21)..(22): Xaa is A or G
  MOD_RES (23)..(24)..(25)..(26): Xaa is A or G or is absent

SEQ ID NO: 71601 - protein, 36 aa, Artificial Sequence; identical to SEQ ID NO: 32900
  GFR-binding peptide
  MOD_RES (34)..(36): Xaa is C or S
  MOD_RES (14)..(15)..(16)..(17)..(18): Xaa is A or G
  MOD_RES (19)..(20)..(21)..(22): Xaa is A or G or is absent

SEQ ID NO: 71602 - protein, 36 aa, Artificial Sequence; identical to SEQ ID NO: 30769
  GFR-binding peptide
  MOD_RES (1)..(2)..(35): Xaa is C or S
  MOD_RES (16)..(17)..(18)..(19)..(20): Xaa is A or G
  MOD_RES (21)..(22)..(23)..(24): Xaa is A or G or is absent

SEQ ID NO: 71603 - protein, 39 aa, Artificial Sequence; identical to SEQ ID NO: 30770
  GFR-binding peptide
  MOD_RES (1)..(36)..(38): Xaa is C or S
  MOD_RES (15)..(16)..(17)..(18)..(19): Xaa is A or G
  MOD_RES (20)..(21)..(22)..(23): Xaa is A or G or is absent

SEQ ID NO: 71604 - protein, 37 aa, Artificial Sequence; identical to SEQ ID NO: 32901
  GFR-binding peptide
  MOD_RES (34)..(36): Xaa is C or S
  MOD_RES (14)..(15)..(16)..(17)..(18): Xaa is A or G
  MOD_RES (19)..(20)..(21)..(22): Xaa is A or G or is absent

SEQ ID NO: 71605 - protein, 38 aa, Artificial Sequence
  GFR-binding peptide
  MOD_RES (5)..(6)..(38): Xaa is C or S
ASKAXXVPTKLSATSILYYDKGVVTYLRKHRGMAVSEX

SEQ ID NO: 71606 - protein, 38 aa, Artificial Sequence; identical to SEQ ID NO: 32904
  GFR-binding peptide
  MOD_RES (2)..(3)..(37): Xaa is C or S
  MOD_RES (17)..(18)..(19)..(20)..(21): Xaa is A or G
  MOD_RES (22)..(23)..(24)..(25): Xaa is A or G or is absent

SEQ ID NO: 71607 - protein, 38 aa, Artificial Sequence
  GFR-binding peptide
  MOD_RES (4)..(5)..(38): Xaa is C or S
  MOD_RES (19)..(20)..(21)..(22)..(23): Xaa is A or G
  MOD_RES (24)..(25)..(26)..(27): Xaa is A or G or is absent
PSTXXAPVKTSPISMLYKXXXXXXXXXLKYHYMIVEEX

SEQ ID NO: 71608 - protein, 35 aa, Artificial Sequence; identical to SEQ ID NO: 30777
  GFR-binding peptide
  MOD_RES (33)..(35): Xaa is C or S
  MOD_RES (14)..(15)..(16)..(17)..(18): Xaa is A or G
  MOD_RES (19)..(20)..(21)..(22): Xaa is A or G or is absent

SEQ ID NO: 71609 - protein, 36 aa, Artificial Sequence; identical to SEQ ID NO: 9378
  GFR-binding peptide
  MOD_RES (4)..(4): Xaa is C or S
  MOD_RES (18)..(19)..(20)..(21)..(22): Xaa is A or G
  MOD_RES (23)..(24)..(25)..(26): Xaa is A or G or is absent

SEQ ID NO: 71610 - protein, 38 aa, Artificial Sequence; identical to SEQ ID NO: 30779
  GFR-binding peptide
  MOD_RES (1)..(35)..(37): Xaa is C or S
  MOD_RES (15)..(16)..(17)..(18)..(19): Xaa is A or G
  MOD_RES (20)..(21)..(22)..(23): Xaa is A or G or is absent

SEQ ID NO: 71611 - protein, 36 aa, Artificial Sequence; identical to SEQ ID NO: 9379
  GFR-binding peptide
  MOD_RES (5)..(6): Xaa is C or S

SEQ ID NO: 71612 - protein, 36 aa, Artificial Sequence; identical to SEQ ID NO: 30781
  GFR-binding peptide
  MOD_RES (2)..(3)..(36): Xaa is C or S

SEQ ID NO: 71613 - protein, 43 aa, Artificial Sequence; identical to SEQ ID NO: 9384
  GFR-binding peptide
  MOD_RES (6)..(7)..(42): Xaa is C or S
  MOD_RES (21)..(22)..(23)..(24)..(25): Xaa is A or G
  MOD_RES (26)..(27)..(28)..(29): Xaa is A or G or is absent

SEQ ID NO: 71614 - protein, 36 aa, Artificial Sequence
  GFR-binding peptide
  MOD_RES (33)..(35): Xaa is C or S
  MOD_RES (14)..(15)..(16)..(17)..(18): Xaa is A or G
  MOD_RES (19)..(20)..(21)..(22): Xaa is A or G or is absent
APVKTEPISMLYLXXXXXXXXXKFKYEMIVEEXGXL

SEQ ID NO: 71615 - protein, 42 aa, Artificial Sequence; identical to SEQ ID NO: 57822
  GFR-binding peptide
  MOD_RES (6)..(7)..(39)..(41): Xaa is C or S

SEQ ID NO: 71616 - protein, 34 aa, Artificial Sequence; identical to SEQ ID NO: 9391
  GFR-binding peptide
  MOD_RES (3)..(4): Xaa is C or S

SEQ ID NO: 71617 - protein, 38 aa, Artificial Sequence
  GFR-binding peptide
  MOD_RES (6)..(7): Xaa is C or S
STPPTXXVPTRLEPISILYLDSANNVVKFKYEDMVVES

SEQ ID NO: 71618 - protein, 31 aa, Artificial Sequence
  GFR-binding peptide
  MOD_RES (31)..(31): Xaa is C or S
VSQDLSPINILYFIGKTPKIYGKIPMIVKSX

SEQ ID NO: 71619 - protein, 36 aa, Artificial Sequence; identical to SEQ ID NO: 30791
  GFR-binding peptide
  MOD_RES (1)..(2): Xaa is C or S
  MOD_RES (16)..(17)..(18)..(19)..(20): Xaa is A or G
  MOD_RES (21)..(22)..(23)..(24): Xaa is A or G or is absent

SEQ ID NO: 71620 - protein, 38 aa, Artificial Sequence; identical to SEQ ID NO: 9395
  GFR-binding peptide
  MOD_RES (3)..(4)..(38): Xaa is C or S
  MOD_RES (18)..(19)..(20)..(21)..(22): Xaa is A or G
  MOD_RES (23)..(24)..(25)..(26): Xaa is A or G or is absent

SEQ ID NO: 71621 - protein, 38 aa, Artificial Sequence; identical to SEQ ID NO: 9399
  GFR-binding peptide
  MOD_RES (4)..(5)..(38): Xaa is C or S
  MOD_RES (19)..(20)..(21)..(22)..(23): Xaa is A or G
  MOD_RES (24)..(25)..(26)..(27): Xaa is A or G or is absent

SEQ ID NO: 71622 - protein, 43 aa, Artificial Sequence; identical to SEQ ID NO: 30798
  GFR-binding peptide
  MOD_RES (6)..(7)..(41)..(43): Xaa is C or S
  MOD_RES (21)..(22)..(23)..(24)..(25): Xaa is A or G
  MOD_RES (26)..(27)..(28)..(29): Xaa is A or G or is absent

SEQ ID NO: 71623 - protein, 39 aa, Artificial Sequence
  GFR-binding peptide
  MOD_RES (1)..(2)..(36)..(38): Xaa is C or S
  MOD_RES (16)..(17)..(18)..(19)..(20): Xaa is A or G
  MOD_RES (21)..(22)..(23)..(24): Xaa is A or G or is absent
XXVPEKMEPISILYLXXXXXXXXXKFKYENMTVESXAXR

SEQ ID NO: 71624 - protein, 39 aa, Artificial Sequence; identical to SEQ ID NO: 30804
  GFR-binding peptide
  MOD_RES (5)..(6)..(38): Xaa is C or S

SEQ ID NO: 71625 - protein, 40 aa, Artificial Sequence
  GFR-binding peptide
  MOD_RES (6)..(7)..(40): Xaa is C or S
  MOD_RES (21)..(22)..(23)..(24)..(25): Xaa is A or G
  MOD_RES (26)..(27)..(28)..(29): Xaa is A or G or is absent
RVPSTXXAPVKTSPISMLYKXXXXXXXXXLKYHYMIVEEX

SEQ ID NO: 71626 - protein, 35 aa, Artificial Sequence; identical to SEQ ID NO: 30805
  GFR-binding peptide
  MOD_RES (2)..(3)..(35): Xaa is C or S

SEQ ID NO: 71627 - protein, 30 aa, Artificial Sequence; identical to SEQ ID NO: 30808
  GFR-binding peptide

SEQ ID NO: 71628 - protein, 36 aa, Artificial Sequence; identical to SEQ ID NO: 30809
  GFR-binding peptide
  MOD_RES (3)..(4)..(35): Xaa is C or S

SEQ ID NO: 71629 - protein, 42 aa, Artificial Sequence
  GFR-binding peptide
  MOD_RES (6)..(7)..(41): Xaa is C or S
  MOD_RES (21)..(22)..(23)..(24)..(25): Xaa is A or G
  MOD_RES (26)..(27)..(28)..(29): Xaa is A or G or is absent
GIPEPXXVPEKMSATSILYYXXXXXXXXXLRKHRNMTVESXA

SEQ ID NO: 71630 - protein, 32 aa, Artificial Sequence; identical to SEQ ID NO: 32944
  GFR-binding peptide
  MOD_RES (14)..(15)..(16)..(17)..(18): Xaa is A or G
  MOD_RES (19)..(20)..(21)..(22): Xaa is A or G or is absent

SEQ ID NO: 71631 - protein, 36 aa, Artificial Sequence; identical to SEQ ID NO: 9403
  GFR-binding peptide
  MOD_RES (4)..(5)..(36): Xaa is C or S

SEQ ID NO: 71632 - protein, 34 aa, Artificial Sequence; identical to SEQ ID NO: 9404
  GFR-binding peptide
  MOD_RES (1)..(2)..(34): Xaa is C or S

SEQ ID NO: 71633 - protein, 38 aa, Artificial Sequence
  GFR-binding peptide
  MOD_RES (1)..(2)..(36)..(38): Xaa is C or S
  MOD_RES (16)..(17)..(18)..(19)..(20): Xaa is A or G
  MOD_RES (21)..(22)..(23)..(24): Xaa is A or G or is absent
XXVPEKMSPINILYFXXXXXXXXXYGKIPNMTVESXAX

SEQ ID NO: 71634 - protein, 37 aa, Artificial Sequence
  GFR-binding peptide
  MOD_RES (1)..(2)..(35)..(37): Xaa is C or S
  MOD_RES (16)..(17)..(18)..(19)..(20): Xaa is A or G
  MOD_RES (21)..(22)..(23)..(24): Xaa is A or G or is absent
XXVPQALSPINILYFXXXXXXXXXYGKIPMIVRSXKX

SEQ ID NO: 71635 - protein, 44 aa, Artificial Sequence; identical to SEQ ID NO: 32946
  GFR-binding peptide
  MOD_RES (6)..(7)..(41)..(43): Xaa is C or S
  MOD_RES (21)..(22)..(23)..(24)..(25): Xaa is A or G
  MOD_RES (26)..(27)..(28)..(29): Xaa is A or G or is absent

SEQ ID NO: 71636 - protein, 36 aa, Artificial Sequence; identical to SEQ ID NO: 9409
  GFR-binding peptide
  MOD_RES (1)..(2)..(35): Xaa is C or S

SEQ ID NO: 71637 - protein, 34 aa, Artificial Sequence; identical to SEQ ID NO: 9410
  GFR-binding peptide
  MOD_RES (33)..(33): Xaa is C or S
  MOD_RES (14)..(15)..(16)..(17)..(18): Xaa is A or G
  MOD_RES (19)..(20)..(21)..(22): Xaa is A or G or is absent

SEQ ID NO: 71638 - protein, 41 aa, Artificial Sequence; identical to SEQ ID NO: 9411
  GFR-binding peptide
  MOD_RES (4)..(5)..(38)..(40): Xaa is C or S

SEQ ID NO: 71639 - protein, 42 aa, Artificial Sequence
  GFR-binding peptide
  MOD_RES (5)..(6)..(40)..(42): Xaa is C or S
  MOD_RES (20)..(21)..(22)..(23)..(24): Xaa is A or G
  MOD_RES (25)..(26)..(27)..(28): Xaa is A or G or is absent
APASXXVPARLSATSILYYXXXXXXXXXLRKHRDMVVEAXGX

SEQ ID NO: 71640 - protein, 36 aa, Artificial Sequence; identical to SEQ ID NO: 30818
  GFR-binding peptide
  MOD_RES (2)..(3)..(36): Xaa is C or S
  MOD_RES (17)..(18)..(19)..(20)..(21): Xaa is A or G
  MOD_RES (22)..(23)..(24)..(25): Xaa is A or G or is absent

SEQ ID NO: 71641 - protein, 33 aa, Artificial Sequence
  GFR-binding peptide
  MOD_RES (32)..(32): Xaa is C or S
VPTRLSATSILYYDSANNVVLRKHRDMVVESXG

SEQ ID NO: 71642 - protein, 38 aa, Artificial Sequence; identical to SEQ ID NO: 32955
  GFR-binding peptide
  MOD_RES (1)..(35)..(37): Xaa is C or S
  MOD_RES (15)..(16)..(17)..(18)..(19): Xaa is A or G
  MOD_RES (20)..(21)..(22)..(23): Xaa is A or G or is absent

SEQ ID NO: 71643 - protein, 35 aa, Artificial Sequence; identical to SEQ ID NO: 9414
  GFR-binding peptide
  MOD_RES (2)..(3)..(34): Xaa is C or S

SEQ ID NO: 71644 - protein, 35 aa, Artificial Sequence; identical to SEQ ID NO: 32958
  GFR-binding peptide
  MOD_RES (32)..(34): Xaa is C or S

SEQ ID NO: 71645 - protein, 32 aa, Artificial Sequence; identical to SEQ ID NO: 9416
  GFR-binding peptide
  MOD_RES (1)..(32): Xaa is C or S

SEQ ID NO: 71646 - protein, 30 aa, Artificial Sequence
  GFR-binding peptide
VPQDLSPINILYFVGRTPKVYGKIPMVVKS

SEQ ID NO: 71647 - protein, 36 aa, Artificial Sequence; identical to SEQ ID NO: 57854
  GFR-binding peptide
  MOD_RES (1)..(2)..(34)..(36): Xaa is C or S

SEQ ID NO: 71648 - protein, 36 aa, Artificial Sequence; identical to SEQ ID NO: 30823
  GFR-binding peptide
  MOD_RES (1)..(2)..(34)..(36): Xaa is C or S

SEQ ID NO: 71649 - protein, 36 aa, Artificial Sequence; identical to SEQ ID NO: 9418
  GFR-binding peptide
  MOD_RES (2)..(3)..(35): Xaa is C or S

SEQ ID NO: 71650 - protein, 36 aa, Artificial Sequence; identical to SEQ ID NO: 9420
  GFR-binding peptide
  MOD_RES (2)..(3): Xaa is C or S
  MOD_RES (17)..(18)..(19)..(20)..(21): Xaa is A or G
  MOD_RES (22)..(23)..(24)..(25): Xaa is A or G or is absent

SEQ ID NO: 71651 - protein, 33 aa, Artificial Sequence; identical to SEQ ID NO: 30829
  GFR-binding peptide
  MOD_RES (33)..(33): Xaa is C or S
  MOD_RES (14)..(15)..(16)..(17)..(18): Xaa is A or G
  MOD_RES (19)..(20)..(21)..(22): Xaa is A or G or is absent

SEQ ID NO: 71652 - protein, 33 aa, Artificial Sequence; identical to SEQ ID NO: 9421
  GFR-binding peptide
  MOD_RES (33)..(33): Xaa is C or S
  MOD_RES (14)..(15)..(16)..(17)..(18): Xaa is A or G
  MOD_RES (19)..(20)..(21)..(22): Xaa is A or G or is absent

SEQ ID NO: 71653 - protein, 38 aa, Artificial Sequence; identical to SEQ ID NO: 30830
  GFR-binding peptide
  MOD_RES (3)..(4)..(35)..(37): Xaa is C or S

SEQ ID NO: 71654 - protein, 39 aa, Artificial Sequence; identical to SEQ ID NO: 9425
  GFR-binding peptide
  MOD_RES (6)..(7)..(39): Xaa is C or S

SEQ ID NO: 71655 - protein, 39 aa, Artificial Sequence
  GFR-binding peptide
  MOD_RES (6)..(7): Xaa is C or S
  MOD_RES (21)..(22)..(23)..(24)..(25): Xaa is A or G
  MOD_RES (26)..(27)..(28)..(29): Xaa is A or G or is absent
STPPTXXVPTRLSPISILYKXXXXXXXXXLKYHYDMVVE

SEQ ID NO: 71656 - protein, 39 aa, Artificial Sequence
  GFR-binding peptide
  MOD_RES (3)..(4)..(36)..(38): Xaa is C or S
EPXXVPEKMSPINILYFDENKNVVYGKIPNMTVESXAXR

SEQ ID NO: 71657 - protein, 38 aa, Artificial Sequence
  GFR-binding peptide
  MOD_RES (5)..(6): Xaa is C or S
  MOD_RES (20)..(21)..(22)..(23)..(24): Xaa is A or G
  MOD_RES (25)..(26)..(27)..(28): Xaa is A or G or is absent
IPEPXXVPEKMSPISILYKXXXXXXXXXLKYHYNMTVE

SEQ ID NO: 71658 - protein, 34 aa, Artificial Sequence; identical to SEQ ID NO: 9427
  GFR-binding peptide
  MOD_RES (1)..(2): Xaa is C or S
  MOD_RES (16)..(17)..(18)..(19)..(20): Xaa is A or G
  MOD_RES (21)..(22)..(23)..(24): Xaa is A or G or is absent

SEQ ID NO: 71659 - protein, 36 aa, Artificial Sequence; identical to SEQ ID NO: 32972
  GFR-binding peptide
  MOD_RES (1)..(36): Xaa is C or S
  MOD_RES (15)..(16)..(17)..(18)..(19): Xaa is A or G
  MOD_RES (20)..(21)..(22)..(23): Xaa is A or G or is absent

SEQ ID NO: 71660 - protein, 42 aa, Artificial Sequence; identical to SEQ ID NO: 30835
  GFR-binding peptide
  MOD_RES (4)..(5)..(39)..(41): Xaa is C or S
  MOD_RES (19)..(20)..(21)..(22)..(23): Xaa is A or G
  MOD_RES (24)..(25)..(26)..(27): Xaa is A or G or is absent

SEQ ID NO: 71661 - protein, 34 aa, Artificial Sequence; identical to SEQ ID NO: 32983
  GFR-binding peptide
  MOD_RES (32)..(34): Xaa is C or S

SEQ ID NO: 71662 - protein, 41 aa, Artificial Sequence; identical to SEQ ID NO: 16738
  GFR-binding peptide
  MOD_RES (6)..(7)..(39)..(41): Xaa is C or S

SEQ ID NO: 71663 - protein, 34 aa, Artificial Sequence; identical to SEQ ID NO: 9436
  GFR-binding peptide
  MOD_RES (32)..(34): Xaa is C or S

SEQ ID NO: 71664 - protein, 39 aa, Artificial Sequence
  GFR-binding peptide
  MOD_RES (6)..(7)..(39): Xaa is C or S
AAPASXXVPARLSATSILYYDAANNVVLRKHRDMVVEAX

SEQ ID NO: 71665 - protein, 39 aa, Artificial Sequence
  GFR-binding peptide
  MOD_RES (1)..(2)..(36)..(38): Xaa is C or S
  MOD_RES (16)..(17)..(18)..(19)..(20): Xaa is A or G
  MOD_RES (21)..(22)..(23)..(24): Xaa is A or G or is absent
XXVPEKMSATSILYYXXXXXXXXXLRKHRNMTVESXAXR

SEQ ID NO: 71666 - protein, 30 aa, Artificial Sequence
  GFR-binding peptide
VPTRLSATSILYYDSANNVVLRKHRDMVVE

SEQ ID NO: 71667 - protein, 38 aa, Artificial Sequence; identical to SEQ ID NO: 9438
  GFR-binding peptide
  MOD_RES (2)..(3)..(36)..(38): Xaa is C or S
  MOD_RES (17)..(18)..(19)..(20)..(21): Xaa is A or G
  MOD_RES (22)..(23)..(24)..(25): Xaa is A or G or is absent

SEQ ID NO: 71668 - protein, 37 aa, Artificial Sequence; identical to SEQ ID NO: 9439
  GFR-binding peptide
  MOD_RES (4)..(4): Xaa is C or S
  MOD_RES (18)..(19)..(20)..(21)..(22): Xaa is A or G
  MOD_RES (23)..(24)..(25)..(26): Xaa is A or G or is absent

SEQ ID NO: 71669 - protein, 40 aa, Artificial Sequence; identical to SEQ ID NO: 32988
  GFR-binding peptide
  MOD_RES (5)..(39): Xaa is C or S
  MOD_RES (19)..(20)..(21)..(22)..(23): Xaa is A or G
  MOD_RES (24)..(25)..(26)..(27): Xaa is A or G or is absent

SEQ ID NO: 71670 - protein, 39 aa, Artificial Sequence; identical to SEQ ID NO: 9442
  GFR-binding peptide
  MOD_RES (6)..(7)..(39): Xaa is C or S

SEQ ID NO: 71671 - protein, 39 aa, Artificial Sequence
  GFR-binding peptide
  MOD_RES (3)..(4)..(37)..(39): Xaa is C or S
  MOD_RES (18)..(19)..(20)..(21)..(22): Xaa is A or G
  MOD_RES (23)..(24)..(25)..(26): Xaa is A or G or is absent
STXXAPVKTSPISMLYKXXXXXXXXXLKYHYMIVEEXGX

SEQ ID NO: 71672 - protein, 39 aa, Artificial Sequence
  GFR-binding peptide
  MOD_RES (6)..(7)..(39): Xaa is C or S
GSAGPXXTPTKMSATSMLYYNDKQQIILRKHRGMVVDRX

SEQ ID NO: 71673 - protein, 39 aa, Artificial Sequence; identical to SEQ ID NO: 9450
  GFR-binding peptide
  MOD_RES (3)..(4)..(38): Xaa is C or S
  MOD_RES (18)..(19)..(20)..(21)..(22): Xaa is A or G
  MOD_RES (23)..(24)..(25)..(26): Xaa is A or G or is absent

SEQ ID NO: 71674 - protein, 42 aa, Artificial Sequence
  GFR-binding peptide
  MOD_RES (6)..(7)..(39)..(41): Xaa is C or S
GIPEPXXVPEKMNAISILYFDENKNVVLKKYRNMTVESXAXR

SEQ ID NO: 71675 - protein, 34 aa, Artificial Sequence
  GFR-binding peptide
  MOD_RES (3)..(4): Xaa is C or S
PTXXVPTRLEPISILYLDSANNVVKFKYEDMVVE

SEQ ID NO: 71676 - protein, 40 aa, Artificial Sequence; identical to SEQ ID NO: 9455
  GFR-binding peptide
  MOD_RES (4)..(5)..(37)..(39): Xaa is C or S

SEQ ID NO: 71677 - protein, 33 aa, Artificial Sequence; identical to SEQ ID NO: 57891
  GFR-binding peptide
  MOD_RES (2)..(3): Xaa is C or S

SEQ ID NO: 71678 - protein, 35 aa, Artificial Sequence; identical to SEQ ID NO: 30855
  GFR-binding peptide
  MOD_RES (1)..(35): Xaa is C or S
  MOD_RES (15)..(16)..(17)..(18)..(19): Xaa is A or G
  MOD_RES (20)..(21)..(22)..(23): Xaa is A or G or is absent

SEQ ID NO: 71679 - protein, 32 aa, Artificial Sequence
  GFR-binding peptide
  MOD_RES (1)..(2): Xaa is C or S
XXVPEKMSPISILYKDENKNVVLKYHYNMTVE

SEQ ID NO: 71680 - protein, 38 aa, Artificial Sequence
  GFR-binding peptide
  MOD_RES (4)..(5)..(37): Xaa is C or S
AGPXXTPTKMSPISMLYKNDKQQIILKYHYGMVVDRXG

SEQ ID NO: 71681 - protein, 43 aa, Artificial Sequence; identical to SEQ ID NO: 57898
  GFR-binding peptide
  MOD_RES (5)..(6)..(40)..(42): Xaa is C or S
  MOD_RES (20)..(21)..(22)..(23)..(24): Xaa is A or G
  MOD_RES (25)..(26)..(27)..(28): Xaa is A or G or is absent

SEQ ID NO: 71682 - protein, 42 aa, Artificial Sequence
  GFR-binding peptide
  MOD_RES (6)..(7)..(41): Xaa is C or S
  MOD_RES (21)..(22)..(23)..(24)..(25): Xaa is A or G
  MOD_RES (26)..(27)..(28)..(29): Xaa is A or G or is absent
HVPKPXXAPTKLSATSVLYYXXXXXXXXXLRKHRNMVVRSXG

SEQ ID NO: 71683 - protein, 36 aa, Artificial Sequence; identical to SEQ ID NO: 9460
  GFR-binding peptide
  MOD_RES (35)..(35): Xaa is C or S
  MOD_RES (14)..(15)..(16)..(17)..(18): Xaa is A or G
  MOD_RES (19)..(20)..(21)..(22): Xaa is A or G or is absent

SEQ ID NO: 71684 - protein, 36 aa, Artificial Sequence; identical to SEQ ID NO: 33002
  GFR-binding peptide
  MOD_RES (2)..(3)..(34)..(36): Xaa is C or S

SEQ ID NO: 71685 - protein, 34 aa, Artificial Sequence; identical to SEQ ID NO: 9461
  GFR-binding peptide
  MOD_RES (1)..(33): Xaa is C or S

SEQ ID NO: 71686 - protein, 33 aa, Artificial Sequence; identical to SEQ ID NO: 33004
  GFR-binding peptide
  MOD_RES (2)..(3): Xaa is C or S

SEQ ID NO: 71687 - protein, 35 aa, Artificial Sequence; identical to SEQ ID NO: 30860
  GFR-binding peptide
  MOD_RES (3)..(4): Xaa is C or S

SEQ ID NO: 71688 - protein, 30 aa, Artificial Sequence; identical to SEQ ID NO: 33010
  GFR-binding peptide

SEQ ID NO: 71689 - protein, 34 aa, Artificial Sequence; identical to SEQ ID NO: 16767
  GFR-binding peptide
  MOD_RES (1)..(1): Xaa is C or S
  MOD_RES (15)..(16)..(17)..(18)..(19): Xaa is A or G
  MOD_RES (20)..(21)..(22)..(23): Xaa is A or G or is absent

SEQ ID NO: 71690 - protein, 43 aa, Artificial Sequence; identical to SEQ ID NO: 30865
  GFR-binding peptide
  MOD_RES (7)..(41)..(43): Xaa is C or S
  MOD_RES (21)..(22)..(23)..(24)..(25): Xaa is A or G
  MOD_RES (26)..(27)..(28)..(29): Xaa is A or G or is absent

SEQ ID NO: 71691 - protein, 37 aa, Artificial Sequence; identical to SEQ ID NO: 9469
  GFR-binding peptide
  MOD_RES (1)..(2)..(34)..(36): Xaa is C or S

SEQ ID NO: 71692 - protein, 39 aa, Artificial Sequence; identical to SEQ ID NO: 16772
  GFR-binding peptide
  MOD_RES (6)..(7)..(39): Xaa is C or S

SEQ ID NO: 71693 - protein, 40 aa, Artificial Sequence; identical to SEQ ID NO: 33019
  GFR-binding peptide
  MOD_RES (6)..(7)..(40): Xaa is C or S

SEQ ID NO: 71694 - protein, 36 aa, Artificial Sequence; identical to SEQ ID NO: 30869
  GFR-binding peptide
  MOD_RES (1)..(2)..(34)..(36): Xaa is C or S

SEQ ID NO: 71695 - protein, 36 aa, Artificial Sequence; identical to SEQ ID NO: 9470
  GFR-binding peptide
  MOD_RES (1)..(2)..(34)..(36): Xaa is C or S

SEQ ID NO: 71696 - protein, 31 aa, Artificial Sequence
  GFR-binding peptide
  MOD_RES (1)..(1): Xaa is C or S
XVPEKMSPISILYKDENKNVVLKYHYNMTVE

SEQ ID NO: 71697 - protein, 40 aa, Artificial Sequence; identical to SEQ ID NO: 30872
  GFR-binding peptide
  MOD_RES (6)..(7): Xaa is C or S
  MOD_RES (21)..(22)..(23)..(24)..(25): Xaa is A or G
  MOD_RES (26)..(27)..(28)..(29): Xaa is A or G or is absent

SEQ ID NO: 71698 - protein, 35 aa, Artificial Sequence; identical to SEQ ID NO: 9474
  GFR-binding peptide
  MOD_RES (2)..(3)..(34): Xaa is C or S

SEQ ID NO: 71699 - protein, 39 aa, Artificial Sequence; identical to SEQ ID NO: 9475
  GFR-binding peptide
  MOD_RES (5)..(6)..(38): Xaa is C or S

SEQ ID NO: 71700 - protein, 34 aa, Artificial Sequence
  GFR-binding peptide
  MOD_RES (1)..(2): Xaa is C or S
  MOD_RES (16)..(17)..(18)..(19)..(20): Xaa is A or G
  MOD_RES (21)..(22)..(23)..(24): Xaa is A or G or is absent
XXVPQDLSPINILYFXXXXXXXXXYGKIPMVVKS

SEQ ID NO: 71701 - protein, 34 aa, Artificial Sequence; identical to SEQ ID NO: 9477
  GFR-binding peptide
  MOD_RES (1)..(1): Xaa is C or S
  MOD_RES (15)..(16)..(17)..(18)..(19): Xaa is A or G
  MOD_RES (20)..(21)..(22)..(23): Xaa is A or G or is absent

SEQ ID NO: 71702 - protein, 42 aa, Artificial Sequence; identical to SEQ ID NO: 30877
  GFR-binding peptide
  MOD_RES (5)..(6)..(40)..(42): Xaa is C or S
  MOD_RES (20)..(21)..(22)..(23)..(24): Xaa is A or G
  MOD_RES (25)..(26)..(27)..(28): Xaa is A or G or is absent

SEQ ID NO: 71703 - protein, 35 aa, Artificial Sequence
  GFR-binding peptide
  MOD_RES (32)..(34): Xaa is C or S
VPEKMNAISILYFDENKNVVLKKYRNMTVESXAXR

SEQ ID NO: 71704 - protein, 41 aa, Artificial Sequence
  GFR-binding peptide
  MOD_RES (5)..(6)..(38)..(40): Xaa is C or S
IPEPXXVPEKMEPISILYLDENKNVVKFKYENMTVESXAXR

SEQ ID NO: 71705 - protein, 39 aa, Artificial Sequence; identical to SEQ ID NO: 33027
  GFR-binding peptide
  MOD_RES (3)..(4)..(38): Xaa is C or S
  MOD_RES (18)..(19)..(20)..(21)..(22): Xaa is A or G
  MOD_RES (23)..(24)..(25)..(26): Xaa is A or G or is absent

SEQ ID NO: 71706 - protein, 33 aa, Artificial Sequence
  GFR-binding peptide
  MOD_RES (31)..(33): Xaa is C or S
VPQDLSPINILYFVGRTPKVYGKIPMVVKSXKX

SEQ ID NO: 71707 - protein, 37 aa, Artificial Sequence; identical to SEQ ID NO: 9479
  GFR-binding peptide
  MOD_RES (5)..(6): Xaa is C or S

SEQ ID NO: 71708 - protein, 38 aa, Artificial Sequence; identical to SEQ ID NO: 9480
  GFR-binding peptide
  MOD_RES (5)..(6): Xaa is C or S
  MOD_RES (20)..(21)..(22)..(23)..(24): Xaa is A or G
  MOD_RES (25)..(26)..(27)..(28): Xaa is A or G or is absent

SEQ ID NO: 71709 - protein, 36 aa, Artificial Sequence; identical to SEQ ID NO: 9481
  GFR-binding peptide
  MOD_RES (33)..(35): Xaa is C or S
  MOD_RES (14)..(15)..(16)..(17)..(18): Xaa is A or G
  MOD_RES (19)..(20)..(21)..(22): Xaa is A or G or is absent

SEQ ID NO: 71710 - protein, 39 aa, Artificial Sequence; identical to SEQ ID NO: 9482
  GFR-binding peptide
  MOD_RES (6)..(7)..(38): Xaa is C or S

SEQ ID NO: 71711 - protein, 37 aa, Artificial Sequence; identical to SEQ ID NO: 30885
  GFR-binding peptide
  MOD_RES (5)..(6): Xaa is C or S

SEQ ID NO: 71712 - protein, 39 aa, Artificial Sequence; identical to SEQ ID NO: 33035
  GFR-binding peptide
  MOD_RES (6)..(7): Xaa is C or S
  MOD_RES (21)..(22)..(23)..(24)..(25): Xaa is A or G
  MOD_RES (26)..(27)..(28)..(29): Xaa is A or G or is absent

SEQ ID NO: 71713 - protein, 34 aa, Artificial Sequence
  GFR-binding peptide
  MOD_RES (2)..(3)..(34): Xaa is C or S
TXXAPVKTSPISMLYKDNGRVLLLKYHYMIVEEX

SEQ ID NO: 71714 - protein, 37 aa, Artificial Sequence; identical to SEQ ID NO: 9486
  GFR-binding peptide
  MOD_RES (6)..(7): Xaa is C or S

SEQ ID NO: 71715 - protein, 41 aa, Artificial Sequence; identical to SEQ ID NO: 9487
  GFR-binding peptide
  MOD_RES (4)..(5)..(39)..(41): Xaa is C or S
  MOD_RES (19)..(20)..(21)..(22)..(23): Xaa is A or G
  MOD_RES (24)..(25)..(26)..(27): Xaa is A or G or is absent

SEQ ID NO: 71716 - protein, 34 aa, Artificial Sequence; identical to SEQ ID NO: 33038
  GFR-binding peptide
  MOD_RES (2)..(2): Xaa is C or S
  MOD_RES (16)..(17)..(18)..(19)..(20): Xaa is A or G
  MOD_RES (21)..(22)..(23)..(24): Xaa is A or G or is absent

SEQ ID NO: 71717 - protein, 37 aa, Artificial Sequence; identical to SEQ ID NO: 9489
  GFR-binding peptide
  MOD_RES (2)..(3)..(34)..(36): Xaa is C or S

SEQ ID NO: 71718 - protein, 37 aa, Artificial Sequence; identical to SEQ ID NO: 30891
  GFR-binding peptide
  MOD_RES (4)..(5): Xaa is C or S
  MOD_RES (19)..(20)..(21)..(22)..(23): Xaa is A or G
  MOD_RES (24)..(25)..(26)..(27): Xaa is A or G or is absent

SEQ ID NO: 71719 - protein, 40 aa, Artificial Sequence; identical to SEQ ID NO: 9492
  GFR-binding peptide
  MOD_RES (2)..(3)..(37)..(39): Xaa is C or S
  MOD_RES (17)..(18)..(19)..(20)..(21): Xaa is A or G
  MOD_RES (22)..(23)..(24)..(25): Xaa is A or G or is absent

SEQ ID NO: 71720 - protein, 37 aa, Artificial Sequence
  GFR-binding peptide
  MOD_RES (1)..(34)..(36): Xaa is C or S
  MOD_RES (15)..(16)..(17)..(18)..(19): Xaa is A or G
  MOD_RES (20)..(21)..(22)..(23): Xaa is A or G or is absent
XAPVKTSATSMLYYXXXXXXXXXLRKHRMIVEEXGXL

SEQ ID NO: 71721 - protein, 43 aa, Artificial Sequence
  GFR-binding peptide
  MOD_RES (5)..(6)..(40)..(42): Xaa is C or S
  MOD_RES (20)..(21)..(22)..(23)..(24): Xaa is A or G
  MOD_RES (25)..(26)..(27)..(28): Xaa is A or G or is absent
IPEPXXVPEKMSPISILYKXXXXXXXXXLKYHYNMTVESXAXR

SEQ ID NO: 71722 - protein, 33 aa, Artificial Sequence; identical to SEQ ID NO: 57932
  GFR-binding peptide
  MOD_RES (32)..(32): Xaa is C or S

SEQ ID NO: 71723 - protein, 37 aa, Artificial Sequence; identical to SEQ ID NO: 30894
  GFR-binding peptide
  MOD_RES (1)..(36): Xaa is C or S
  MOD_RES (15)..(16)..(17)..(18)..(19): Xaa is A or G
  MOD_RES (20)..(21)..(22)..(23): Xaa is A or G or is absent

SEQ ID NO: 71724 - protein, 33 aa, Artificial Sequence; identical to SEQ ID NO: 30895
  GFR-binding peptide
  MOD_RES (2)..(3): Xaa is C or S

SEQ ID NO: 71725 - protein, 37 aa, Artificial Sequence
  GFR-binding peptide
  MOD_RES (5)..(6): Xaa is C or S
APASXXVPARLSATSILYYDAANNVVLRKHRDMVVEA

SEQ ID NO: 71726 - protein, 33 aa, Artificial Sequence; identical to SEQ ID NO: 33045
  GFR-binding peptide
  MOD_RES (14)..(15)..(16)..(17)..(18): Xaa is A or G
  MOD_RES (19)..(20)..(21)..(22): Xaa is A or G or is absent

SEQ ID NO: 71727 - protein, 32 aa, Artificial Sequence; identical to SEQ ID NO: 9495
  GFR-binding peptide
  MOD_RES (1)..(2): Xaa is C or S

SEQ ID NO: 71728 - protein, 40 aa, Artificial Sequence
  GFR-binding peptide
  MOD_RES (3)..(4)..(38)..(40): Xaa is C or S
  MOD_RES (18)..(19)..(20)..(21)..(22): Xaa is A or G
  MOD_RES (23)..(24)..(25)..(26): Xaa is A or G or is absent
PTXXVPTRLSPISILYKXXXXXXXXXLKYHYDMVVESXGX

SEQ ID NO: 71729 - protein, 41 aa, Artificial Sequence; identical to SEQ ID NO: 33048
  GFR-binding peptide
  MOD_RES (5)..(6)..(40): Xaa is C or S
  MOD_RES (20)..(21)..(22)..(23)..(24): Xaa is A or G
  MOD_RES (25)..(26)..(27)..(28): Xaa is A or G or is absent

SEQ ID NO: 71730 - protein, 40 aa, Artificial Sequence
  GFR-binding peptide
  MOD_RES (5)..(6)..(40): Xaa is C or S
  MOD_RES (20)..(21)..(22)..(23)..(24): Xaa is A or G
  MOD_RES (25)..(26)..(27)..(28): Xaa is A or G or is absent
IPEPXXVPEKMEPISILYLXXXXXXXXXKFKYENMTVESX

SEQ ID NO: 71731 - protein, 32 aa, Artificial Sequence; identical to SEQ ID NO: 30902
  GFR-binding peptide
  MOD_RES (1)..(1): Xaa is C or S

SEQ ID NO: 71732 - protein, 34 aa, Artificial Sequence; identical to SEQ ID NO: 9499
  GFR-binding peptide
  MOD_RES (34)..(34): Xaa is C or S
  MOD_RES (14)..(15)..(16)..(17)..(18): Xaa is A or G
  MOD_RES (19)..(20)..(21)..(22): Xaa is A or G or is absent

SEQ ID NO: 71733 - protein, 39 aa, Artificial Sequence; identical to SEQ ID NO: 9502
  GFR-binding peptide
  MOD_RES (5)..(6)..(39): Xaa is C or S
  MOD_RES (20)..(21)..(22)..(23)..(24): Xaa is A or G
  MOD_RES (25)..(26)..(27)..(28): Xaa is A or G or is absent

SEQ ID NO: 71734 - protein, 38 aa, Artificial Sequence; identical to SEQ ID NO: 33055
  GFR-binding peptide
  MOD_RES (3)..(4)..(37): Xaa is C or S
  MOD_RES (18)..(19)..(20)..(21)..(22): Xaa is A or G
  MOD_RES (23)..(24)..(25)..(26): Xaa is A or G or is absent

SEQ ID NO: 71735 - protein, 36 aa, Artificial Sequence; identical to SEQ ID NO: 9507
  GFR-binding peptide
  MOD_RES (1)..(33)..(35): Xaa is C or S

SEQ ID NO: 71736 - protein, 41 aa, Artificial Sequence; identical to SEQ ID NO: 16810
  GFR-binding peptide
  MOD_RES (4)..(5)..(39)..(41): Xaa is C or S
  MOD_RES (19)..(20)..(21)..(22)..(23): Xaa is A or G
  MOD_RES (24)..(25)..(26)..(27): Xaa is A or G or is absent

SEQ ID NO: 71737 - protein, 37 aa, Artificial Sequence; identical to SEQ ID NO: 9513
  GFR-binding peptide
  MOD_RES (4)..(5)..(36): Xaa is C or S

SEQ ID NO: 71738 - protein, 40 aa, Artificial Sequence; identical to SEQ ID NO: 57954
  GFR-binding peptide
  MOD_RES (6)..(7)..(40): Xaa is C or S
  MOD_RES (21)..(22)..(23)..(24)..(25): Xaa is A or G
  MOD_RES (26)..(27)..(28)..(29): Xaa is A or G or is absent

SEQ ID NO: 71739 - protein, 33 aa, Artificial Sequence; identical to SEQ ID NO: 9514
  GFR-binding peptide
  MOD_RES (1)..(2)..(33): Xaa is C or S

SEQ ID NO: 71740 - protein, 36 aa, Artificial Sequence; identical to SEQ ID NO: 30912
  GFR-binding peptide
  MOD_RES (1)..(2)..(36): Xaa is C or S
  MOD_RES (16)..(17)..(18)..(19)..(20): Xaa is A or G
  MOD_RES (21)..(22)..(23)..(24): Xaa is A or G or is absent

SEQ ID NO: 71741 - protein, 44 aa, Artificial Sequence; identical to SEQ ID NO: 9516
  GFR-binding peptide
  MOD_RES (6)..(7)..(41)..(43): Xaa is C or S
  MOD_RES (21)..(22)..(23)..(24)..(25): Xaa is A or G
  MOD_RES (26)..(27)..(28)..(29): Xaa is A or G or is absent

SEQ ID NO: 71742 - protein, 38 aa, Artificial Sequence; identical to SEQ ID NO: 9517
  GFR-binding peptide
  MOD_RES (1)..(35)..(37): Xaa is C or S
  MOD_RES (15)..(16)..(17)..(18)..(19): Xaa is A or G
  MOD_RES (20)..(21)..(22)..(23): Xaa is A or G or is absent

SEQ ID NO: 71743 - protein, 33 aa, Artificial Sequence
  GFR-binding peptide
  MOD_RES (1)..(33): Xaa is C or S
XVPEKMSPINILYFDENKNVVYGKIPNMTVESX

SEQ ID NO: 71744 - protein, 40 aa, Artificial Sequence; identical to SEQ ID NO: 33066
  GFR-binding peptide
  MOD_RES (3)..(4)..(38)..(40): Xaa is C or S
  MOD_RES (18)..(19)..(20)..(21)..(22): Xaa is A or G
  MOD_RES (23)..(24)..(25)..(26): Xaa is A or G or is absent

SEQ ID NO: 71745 - protein, 32 aa, Artificial Sequence; identical to SEQ ID NO: 30917
  GFR-binding peptide
  MOD_RES (1)..(2): Xaa is C or S

SEQ ID NO: 71746 - protein, 39 aa, Artificial Sequence; identical to SEQ ID NO: 9524
  GFR-binding peptide
  MOD_RES (2)..(3)..(36)..(38): Xaa is C or S
  MOD_RES (17)..(18)..(19)..(20)..(21): Xaa is A or G
  MOD_RES (22)..(23)..(24)..(25): Xaa is A or G or is absent

SEQ ID NO: 71747 - protein, 36 aa, Artificial Sequence
  GFR-binding peptide
  MOD_RES (3)..(4)..(36): Xaa is C or S
ASXXVPARLSATSILYYDAANNVVLRKHRDMVVEAX

SEQ ID NO: 71748 - protein, 38 aa, Artificial Sequence
  GFR-binding peptide
  MOD_RES (6)..(7): Xaa is C or S
HVPKPXXAPTKLSATSVLYYDDSSNVILRKHRNMVVRS

SEQ ID NO: 71749 - protein, 36 aa, Artificial Sequence; identical to SEQ ID NO: 33073
  GFR-binding peptide
  MOD_RES (1)..(2)..(36): Xaa is C or S
  MOD_RES (16)..(17)..(18)..(19)..(20): Xaa is A or G
  MOD_RES (21)..(22)..(23)..(24): Xaa is A or G or is absent

SEQ ID NO: 71750 - protein, 33 aa, Artificial Sequence; identical to SEQ ID NO: 9527
  GFR-binding peptide
  MOD_RES (33)..(33): Xaa is C or S
  MOD_RES (14)..(15)..(16)..(17)..(18): Xaa is A or G
  MOD_RES (19)..(20)..(21)..(22): Xaa is A or G or is absent

SEQ ID NO: 71751 - protein, 37 aa, Artificial Sequence; identical to SEQ ID NO: 30922
  GFR-binding peptide
  MOD_RES (1)..(2)..(34)..(36): Xaa is C or S

SEQ ID NO: 71752 - protein, 36 aa, Artificial Sequence; identical to SEQ ID NO: 30924
  GFR-binding peptide
  MOD_RES (6)..(6): Xaa is C or S

SEQ ID NO: 71753 - protein, 39 aa, Artificial Sequence; identical to SEQ ID NO: 30930
  GFR-binding peptide
  MOD_RES (5)..(6)..(38): Xaa is C or S

SEQ ID NO: 71754 - protein, 38 aa, Artificial Sequence; identical to SEQ ID NO: 9536
  GFR-binding peptide
  MOD_RES (6)..(7): Xaa is C or S

SEQ ID NO: 71755 - protein, 39 aa, Artificial Sequence; identical to SEQ ID NO: 9537
  GFR-binding peptide
  MOD_RES (5)..(6): Xaa is C or S
  MOD_RES (20)..(21)..(22)..(23)..(24): Xaa is A or G
  MOD_RES (25)..(26)..(27)..(28): Xaa is A or G or is absent

SEQ ID NO: 71756 - protein, 34 aa, Artificial Sequence
  GFR-binding peptide
  MOD_RES (1)..(2)..(34): Xaa is C or S
XXTPTKMEPISMLYLNDKQQIIKFKYEGMVVDRX

SEQ ID NO: 71757 - protein, 40 aa, Artificial Sequence; identical to SEQ ID NO: 9538
  GFR-binding peptide
  MOD_RES (5)..(6)..(37)..(39): Xaa is C or S

SEQ ID NO: 71758 - protein, 39 aa, Artificial Sequence; identical to SEQ ID NO: 33096
  GFR-binding peptide
  MOD_RES (5)..(6)..(38): Xaa is C or S

SEQ ID NO: 71759 - protein, 40 aa, Artificial Sequence; identical to SEQ ID NO: 9541
  GFR-binding peptide
  MOD_RES (4)..(5)..(39): Xaa is C or S
  MOD_RES (19)..(20)..(21)..(22)..(23): Xaa is A or G
  MOD_RES (24)..(25)..(26)..(27): Xaa is A or G or is absent

SEQ ID NO: 71760 - protein, 36 aa, Artificial Sequence; identical to SEQ ID NO: 9542
  GFR-binding peptide
  MOD_RES (1)..(34)..(36): Xaa is C or S
  MOD_RES (15)..(16)..(17)..(18)..(19): Xaa is A or G
  MOD_RES (20)..(21)..(22)..(23): Xaa is A or G or is absent

SEQ ID NO: 71761 - protein, 38 aa, Artificial Sequence; identical to SEQ ID NO: 30935
  GFR-binding peptide
  MOD_RES (1)..(36)..(38): Xaa is C or S
  MOD_RES (15)..(16)..(17)..(18)..(19): Xaa is A or G
  MOD_RES (20)..(21)..(22)..(23): Xaa is A or G or is absent

SEQ ID NO: 71762 - protein, 38 aa, Artificial Sequence
  GFR-binding peptide
  MOD_RES (3)..(4)..(36)..(38): Xaa is C or S
GPXXTPTKMSATSMLYYNDKQQIILRKHRGMVVDRXGX

SEQ ID NO: 71763 - protein, 37 aa, Artificial Sequence; identical to SEQ ID NO: 33103
  GFR-binding peptide
  MOD_RES (5)..(6): Xaa is C or S

SEQ ID NO: 71764 - protein, 34 aa, Artificial Sequence; identical to SEQ ID NO: 9545
  GFR-binding peptide
  MOD_RES (1)..(33): Xaa is C or S

SEQ ID NO: 71765 - protein, 39 aa, Artificial Sequence; identical to SEQ ID NO: 9546
  GFR-binding peptide
  MOD_RES (6)..(7)..(38): Xaa is C or S

SEQ ID NO: 71766 - protein, 37 aa, Artificial Sequence; identical to SEQ ID NO: 33104
  GFR-binding peptide
  MOD_RES (3)..(4)..(36): Xaa is C or S

SEQ ID NO: 71767 - protein, 37 aa, Artificial Sequence; identical to SEQ ID NO: 30941
  GFR-binding peptide
  MOD_RES (1)..(35)..(37): Xaa is C or S
  MOD_RES (15)..(16)..(17)..(18)..(19): Xaa is A or G
  MOD_RES (20)..(21)..(22)..(23): Xaa is A or G or is absent

SEQ ID NO: 71768 - protein, 34 aa, Artificial Sequence
  GFR-binding peptide
  MOD_RES (1)..(2): Xaa is C or S
  MOD_RES (16)..(17)..(18)..(19)..(20): Xaa is A or G
  MOD_RES (21)..(22)..(23)..(24): Xaa is A or G or is absent
XXVPEKMSPINILYFXXXXXXXXXYGKIPNMTVE

SEQ ID NO: 71769 - protein, 35 aa, Artificial Sequence
  GFR-binding peptide
  MOD_RES (1)..(2)..(34): Xaa is C or S
XXVPTRLSATSILYYDSANNVVLRKHRDMVVESXG

SEQ ID NO: 71770 - protein, 35 aa, Artificial Sequence; identical to SEQ ID NO: 33110
  GFR-binding peptide
  MOD_RES (1)..(2): Xaa is C or S
  MOD_RES (16)..(17)..(18)..(19)..(20): Xaa is A or G
  MOD_RES (21)..(22)..(23)..(24): Xaa is A or G or is absent

SEQ ID NO: 71771 - protein, 34 aa, Artificial Sequence; identical to SEQ ID NO: 9550
  GFR-binding peptide
  MOD_RES (34)..(34): Xaa is C or S
  MOD_RES (14)..(15)..(16)..(17)..(18): Xaa is A or G
  MOD_RES (19)..(20)..(21)..(22): Xaa is A or G or is absent

SEQ ID NO: 71772 - protein, 37 aa, Artificial Sequence; identical to SEQ ID NO: 9551
  GFR-binding peptide
  MOD_RES (1)..(36): Xaa is C or S
  MOD_RES (15)..(16)..(17)..(18)..(19): Xaa is A or G
  MOD_RES (20)..(21)..(22)..(23): Xaa is A or G or is absent

SEQ ID NO: 71773 - protein, 40 aa, Artificial Sequence; identical to SEQ ID NO: 9553
  GFR-binding peptide
  MOD_RES (6)..(7)..(40): Xaa is C or S

SEQ ID NO: 71774 - protein, 32 aa, Artificial Sequence; identical to SEQ ID NO: 9556
  GFR-binding peptide
  MOD_RES (1)..(1): Xaa is C or S

SEQ ID NO: 71775 - protein, 39 aa, Artificial Sequence; identical to SEQ ID NO: 9557
  GFR-binding peptide
  MOD_RES (6)..(7): Xaa is C or S
  MOD_RES (21)..(22)..(23)..(24)..(25): Xaa is A or G
  MOD_RES (26)..(27)..(28)..(29): Xaa is A or G or is absent

SEQ ID NO: 71776 - protein, 43 aa, Artificial Sequence; identical to SEQ ID NO: 33113
  GFR-binding peptide
  MOD_RES (5)..(6)..(40)..(42): Xaa is C or S
  MOD_RES (20)..(21)..(22)..(23)..(24): Xaa is A or G
  MOD_RES (25)..(26)..(27)..(28): Xaa is A or G or is absent

SEQ ID NO: 71777 - protein, 39 aa, Artificial Sequence; identical to SEQ ID NO: 33115
  GFR-binding peptide
  MOD_RES (5)..(6)..(38): Xaa is C or S

SEQ ID NO: 71778 - protein, 37 aa, Artificial Sequence
  GFR-binding peptide
  MOD_RES (3)..(4)..(35)..(37): Xaa is C or S
STXXAPVKTSATSMLYYDNGRVLLLRKHRMIVEEXGX

SEQ ID NO: 71779 - protein, 34 aa, Artificial Sequence; identical to SEQ ID NO: 9559
  GFR-binding peptide
  MOD_RES (1)..(32)..(34): Xaa is C or S

SEQ ID NO: 71780 - protein, 40 aa, Artificial Sequence; identical to SEQ ID NO: 9562
  GFR-binding peptide
  MOD_RES (5)..(6)..(39): Xaa is C or S
  MOD_RES (20)..(21)..(22)..(23)..(24): Xaa is A or G
  MOD_RES (25)..(26)..(27)..(28): Xaa is A or G or is absent

SEQ ID NO: 71781 - protein, 32 aa, Artificial Sequence; identical to SEQ ID NO: 9563
  GFR-binding peptide
  MOD_RES (2)..(2): Xaa is C or S

SEQ ID NO: 71782 - protein, 36 aa, Artificial Sequence; identical to SEQ ID NO: 9564
  GFR-binding peptide
  MOD_RES (1)..(33)..(35): Xaa is C or S

SEQ ID NO: 71783 - protein, 36 aa, Artificial Sequence; identical to SEQ ID NO: 33124
  GFR-binding peptide
  MOD_RES (1)..(2)..(36): Xaa is C or S
  MOD_RES (16)..(17)..(18)..(19)..(20): Xaa is A or G
  MOD_RES (21)..(22)..(23)..(24): Xaa is A or G or is absent

SEQ ID NO: 71784 - protein, 37 aa, Artificial Sequence; identical to SEQ ID NO: 9566
  GFR-binding peptide
  MOD_RES (3)..(4)..(36): Xaa is C or S

SEQ ID NO: 71785 - protein, 37 aa, Artificial Sequence; identical to SEQ ID NO: 33126
  GFR-binding peptide
  MOD_RES (1)..(2)..(36): Xaa is C or S
  MOD_RES (16)..(17)..(18)..(19)..(20): Xaa is A or G
  MOD_RES (21)..(22)..(23)..(24): Xaa is A or G or is absent

SEQ ID NO: 71786 - protein, 36 aa, Artificial Sequence; identical to SEQ ID NO: 9567
  GFR-binding peptide
  MOD_RES (4)..(5)..(36): Xaa is C or S

SEQ ID NO: 71787 - protein, 33 aa, Artificial Sequence
  GFR-binding peptide
  MOD_RES (33)..(33): Xaa is C or S
  MOD_RES (14)..(15)..(16)..(17)..(18): Xaa is A or G
  MOD_RES (19)..(20)..(21)..(22): Xaa is A or G or is absent
VSQDLSPINILYFXXXXXXXXXYGKIPMIVKSX

SEQ ID NO: 71788 - protein, 35 aa, Artificial Sequence
  GFR-binding peptide
  MOD_RES (2)..(3): Xaa is C or S
  MOD_RES (17)..(18)..(19)..(20)..(21): Xaa is A or G
  MOD_RES (22)..(23)..(24)..(25): Xaa is A or G or is absent
PXXVPEKMSPINILYFXXXXXXXXXYGKIPNMTVE

SEQ ID NO: 71789 - protein, 35 aa, Artificial Sequence
  GFR-binding peptide
  MOD_RES (4)..(5): Xaa is C or S
AGPXXTPTKMSPISMLYKNDKQQIILKYHYGMVVD

SEQ ID NO: 71790 - protein, 33 aa, Artificial Sequence; identical to SEQ ID NO: 9570
  GFR-binding peptide
  MOD_RES (14)..(15)..(16)..(17)..(18): Xaa is A or G
  MOD_RES (19)..(20)..(21)..(22): Xaa is A or G or is absent

SEQ ID NO: 71791 - protein, 38 aa, Artificial Sequence; identical to SEQ ID NO: 30965
  GFR-binding peptide
  MOD_RES (5)..(6)..(38): Xaa is C or S

SEQ ID NO: 71792 - protein, 35 aa, Artificial Sequence; identical to SEQ ID NO: 33135
  GFR-binding peptide
  MOD_RES (4)..(4): Xaa is C or S

SEQ ID NO: 71793 - protein, 41 aa, Artificial Sequence; identical to SEQ ID NO: 30966
  GFR-binding peptide
  MOD_RES (4)..(5)..(39)..(41): Xaa is C or S
  MOD_RES (19)..(20)..(21)..(22)..(23): Xaa is A or G
  MOD_RES (24)..(25)..(26)..(27): Xaa is A or G or is absent

SEQ ID NO: 71794 - protein, 41 aa, Artificial Sequence; identical to SEQ ID NO: 30970
  GFR-binding peptide
  MOD_RES (6)..(7)..(41): Xaa is C or S
  MOD_RES (21)..(22)..(23)..(24)..(25): Xaa is A or G
  MOD_RES (26)..(27)..(28)..(29): Xaa is A or G or is absent

SEQ ID NO: 71795 - protein, 30 aa, Artificial Sequence
  GFR-binding peptide
TPTKMSATSMLYYNDKQQIILRKHRGMVVD

SEQ ID NO: 71796 - protein, 35 aa, Artificial Sequence
  GFR-binding peptide
  MOD_RES (1)..(2): Xaa is C or S
  MOD_RES (16)..(17)..(18)..(19)..(20): Xaa is A or G
  MOD_RES (21)..(22)..(23)..(24): Xaa is A or G or is absent
XXVPEKMNAISILYFXXXXXXXXXLKKYRNMTVES

SEQ ID NO: 71797 - protein, 38 aa, Artificial Sequence
  GFR-binding peptide
  MOD_RES (5)..(6): Xaa is C or S
  MOD_RES (20)..(21)..(22)..(23)..(24): Xaa is A or G
  MOD_RES (25)..(26)..(27)..(28): Xaa is A or G or is absent
SAGPXXTPTKMSPISMLYKXXXXXXXXXLKYHYGMVVD

SEQ ID NO: 71798 - protein, 38 aa, Artificial Sequence; identical to SEQ ID NO: 9577
  GFR-binding peptide
  MOD_RES (4)..(5)..(37): Xaa is C or S

SEQ ID NO: 71799 - protein, 38 aa, Artificial Sequence; identical to SEQ ID NO: 9578
  GFR-binding peptide
  MOD_RES (4)..(5)..(38): Xaa is C or S
  MOD_RES (19)..(20)..(21)..(22)..(23): Xaa is A or G
  MOD_RES (24)..(25)..(26)..(27): Xaa is A or G or is absent

SEQ ID NO: 71800 - protein, 41 aa, Artificial Sequence; identical to SEQ ID NO: 33143
  GFR-binding peptide
  MOD_RES (2)..(3)..(38)..(40): Xaa is C or S
  MOD_RES (17)..(18)..(19)..(20)..(21): Xaa is A or G
  MOD_RES (22)..(23)..(24)..(25): Xaa is A or G or is absent

SEQ ID NO: 71801 - protein, 39 aa, Artificial Sequence
  GFR-binding peptide
  MOD_RES (3)..(4)..(38): Xaa is C or S
  MOD_RES (18)..(19)..(20)..(21)..(22): Xaa is A or G
  MOD_RES (23)..(24)..(25)..(26): Xaa is A or G or is absent
KAXXVPTKLSATSILYYXXXXXXXXXLRKHRGMAVSEXG

SEQ ID NO: 71802 - protein, 40 aa, Artificial Sequence; identical to SEQ ID NO: 9582
  GFR-binding peptide
  MOD_RES (6)..(7)..(40): Xaa is C or S
  MOD_RES (21)..(22)..(23)..(24)..(25): Xaa is A or G
  MOD_RES (26)..(27)..(28)..(29): Xaa is A or G or is absent

SEQ ID NO: 71803 - protein, 38 aa, Artificial Sequence; identical to SEQ ID NO: 9583
  GFR-binding peptide
  MOD_RES (6)..(7): Xaa is C or S

SEQ ID NO: 71804 - protein, 36 aa, Artificial Sequence; identical to SEQ ID NO: 58018
  GFR-binding peptide
  MOD_RES (1)..(35): Xaa is C or S
  MOD_RES (15)..(16)..(17)..(18)..(19): Xaa is A or G
  MOD_RES (20)..(21)..(22)..(23): Xaa is A or G or is absent

SEQ ID NO: 71805 - protein, 39 aa, Artificial Sequence; identical to SEQ ID NO: 30982
  GFR-binding peptide
  MOD_RES (5)..(39): Xaa is C or S
  MOD_RES (19)..(20)..(21)..(22)..(23): Xaa is A or G
  MOD_RES (24)..(25)..(26)..(27): Xaa is A or G or is absent

SEQ ID NO: 71806 - protein, 36 aa, Artificial Sequence; identical to SEQ ID NO: 33151
  GFR-binding peptide
  MOD_RES (2)..(3)..(36): Xaa is C or S
  MOD_RES (17)..(18)..(19)..(20)..(21): Xaa is A or G
  MOD_RES (22)..(23)..(24)..(25): Xaa is A or G or is absent

SEQ ID NO: 71807 - protein, 40 aa, Artificial Sequence; identical to SEQ ID NO: 30983
  GFR-binding peptide
  MOD_RES (2)..(3)..(37)..(39): Xaa is C or S
  MOD_RES (17)..(18)..(19)..(20)..(21): Xaa is A or G
  MOD_RES (22)..(23)..(24)..(25): Xaa is A or G or is absent

SEQ ID NO: 71808 - protein, 42 aa, Artificial Sequence
  GFR-binding peptide
  MOD_RES (6)..(7)..(39)..(41): Xaa is C or S
AAPASXXVPARLSATSILYYDAANNVVLRKHRDMVVEAXGXR

SEQ ID NO: 71809 - protein, 30 aa, Artificial Sequence; identical to SEQ ID NO: 9588
  GFR-binding peptide

SEQ ID NO: 71810 - protein, 39 aa, Artificial Sequence; identical to SEQ ID NO: 9589
  GFR-binding peptide
  MOD_RES (1)..(2)..(36)..(38): Xaa is C or S
  MOD_RES (16)..(17)..(18)..(19)..(20): Xaa is A or G
  MOD_RES (21)..(22)..(23)..(24): Xaa is A or G or is absent

SEQ ID NO: 71811 - protein, 37 aa, Artificial Sequence; identical to SEQ ID NO: 9590
  GFR-binding peptide
  MOD_RES (2)..(3)..(35)..(37): Xaa is C or S

SEQ ID NO: 71812 - protein, 35 aa, Artificial Sequence
  GFR-binding peptide
  MOD_RES (1)..(2)..(34): Xaa is C or S
XXVPTRLEPISILYLDSANNVVKFKYEDMVVESXG

SEQ ID NO: 71813 - protein, 37 aa, Artificial Sequence
  GFR-binding peptide
  MOD_RES (1)..(34)..(36): Xaa is C or S
  MOD_RES (15)..(16)..(17)..(18)..(19): Xaa is A or G
  MOD_RES (20)..(21)..(22)..(23): Xaa is A or G or is absent
XVSQDLSPINILYFXXXXXXXXXYGKIPMIVKSXKXS

SEQ ID NO: 71814 - protein, 41 aa, Artificial Sequence
  GFR-binding peptide
  MOD_RES (4)..(5)..(38)..(40): Xaa is C or S
  MOD_RES (19)..(20)..(21)..(22)..(23): Xaa is A or G
  MOD_RES (24)..(25)..(26)..(27): Xaa is A or G or is absent
AAPXXVPQALSPINILYFXXXXXXXXXYGKIPMIVRSXKXS

SEQ ID NO: 71815 - protein, 37 aa, Artificial Sequence
  GFR-binding peptide
  MOD_RES (6)..(7): Xaa is C or S
RVPSTXXAPVKTEPISMLYLDNGRVLLKFKYEMIVEE

SEQ ID NO: 71816 - protein, 37 aa, Artificial Sequence; identical to SEQ ID NO: 9602
  GFR-binding peptide
  MOD_RES (4)..(5)..(37): Xaa is C or S

SEQ ID NO: 71817 - protein, 40 aa, Artificial Sequence; identical to SEQ ID NO: 9605
  GFR-binding peptide
  MOD_RES (5)..(39): Xaa is C or S
  MOD_RES (19)..(20)..(21)..(22)..(23): Xaa is A or G
  MOD_RES (24)..(25)..(26)..(27): Xaa is A or G or is absent

SEQ ID NO: 71818 - protein, 35 aa, Artificial Sequence
  GFR-binding peptide
  MOD_RES (4)..(5): Xaa is C or S
AGPXXTPTKMEPISMLYLNDKQQIIKFKYEGMVVD

SEQ ID NO: 71819 - protein, 37 aa, Artificial Sequence; identical to SEQ ID NO: 33172
  GFR-binding peptide
  MOD_RES (1)..(35)..(37): Xaa is C or S
  MOD_RES (15)..(16)..(17)..(18)..(19): Xaa is A or G
  MOD_RES (20)..(21)..(22)..(23): Xaa is A or G or is absent

SEQ ID NO: 71820 - protein, 36 aa, Artificial Sequence; identical to SEQ ID NO: 9607
  GFR-binding peptide
  MOD_RES (3)..(4)..(36): Xaa is C or S

SEQ ID NO: 71821 - protein, 35 aa, Artificial Sequence; identical to SEQ ID NO: 31002
  GFR-binding peptide
  MOD_RES (33)..(35): Xaa is C or S

SEQ ID NO: 71822 - protein, 35 aa, Artificial Sequence; identical to SEQ ID NO: 9608
  GFR-binding peptide
  MOD_RES (32)..(34): Xaa is C or S

SEQ ID NO: 71823 - protein, 37 aa, Artificial Sequence; identical to SEQ ID NO: 33176
  GFR-binding peptide
  MOD_RES (4)..(5): Xaa is C or S
  MOD_RES (19)..(20)..(21)..(22)..(23): Xaa is A or G
  MOD_RES (24)..(25)..(26)..(27): Xaa is A or G or is absent

SEQ ID NO: 71824 - protein, 39 aa, Artificial Sequence
  GFR-binding peptide
  MOD_RES (6)..(7)..(39): Xaa is C or S
GIPEPXXVPEKMSATSILYYDENKNVVLRKHRNMTVESX

SEQ ID NO: 71825 - protein, 34 aa, Artificial Sequence
  GFR-binding peptide
  MOD_RES (1)..(1): Xaa is C or S
  MOD_RES (15)..(16)..(17)..(18)..(19): Xaa is A or G
  MOD_RES (20)..(21)..(22)..(23): Xaa is A or G or is absent
XVPEKMNAISILYFXXXXXXXXXLKKYRNMTVES

SEQ ID NO: 71826 - protein, 41 aa, Artificial Sequence; identical to SEQ ID NO: 9610
  GFR-binding peptide
  MOD_RES (5)..(6)..(40): Xaa is C or S
  MOD_RES (20)..(21)..(22)..(23)..(24): Xaa is A or G
  MOD_RES (25)..(26)..(27)..(28): Xaa is A or G or is absent

SEQ ID NO: 71827 - protein, 35 aa, Artificial Sequence; identical to SEQ ID NO: 9611
  GFR-binding peptide
  MOD_RES (4)..(5): Xaa is C or S

SEQ ID NO: 71828 - protein, 42 aa, Artificial Sequence
  GFR-binding peptide
  MOD_RES (6)..(7)..(39)..(41): Xaa is C or S
KASKAXXVPTKLSATSILYYDKGVVTYLRKHRGMAVSEXGXR

SEQ ID NO: 71829 - protein, 34 aa, Artificial Sequence
  GFR-binding peptide
  MOD_RES (31)..(33): Xaa is C or S
VPQALSPINILYFVGRKPKVYGKIPMIVRSXKXS

SEQ ID NO: 71830 - protein, 38 aa, Artificial Sequence; identical to SEQ ID NO: 31009
  GFR-binding peptide
  MOD_RES (2)..(3)..(37): Xaa is C or S
  MOD_RES (17)..(18)..(19)..(20)..(21): Xaa is A or G
  MOD_RES (22)..(23)..(24)..(25): Xaa is A or G or is absent

SEQ ID NO: 71831 - protein, 37 aa, Artificial Sequence; identical to SEQ ID NO: 33192
  GFR-binding peptide
  MOD_RES (3)..(4)..(36): Xaa is C or S

SEQ ID NO: 71832 - protein, 39 aa, Artificial Sequence; identical to SEQ ID NO: 31012
  GFR-binding peptide
  MOD_RES (5)..(6)..(37)..(39): Xaa is C or S

SEQ ID NO: 71833 - protein, 38 aa, Artificial Sequence
  GFR-binding peptide
  MOD_RES (5)..(6): Xaa is C or S
  MOD_RES (20)..(21)..(22)..(23)..(24): Xaa is A or G
  MOD_RES (25)..(26)..(27)..(28): Xaa is A or G or is absent
ASKAXXVPTKLSATSILYYXXXXXXXXXLRKHRGMAVS

SEQ ID NO: 71834 - protein, 42 aa, Artificial Sequence
  GFR-binding peptide
  MOD_RES (6)..(7)..(40)..(42): Xaa is C or S
  MOD_RES (21)..(22)..(23)..(24)..(25): Xaa is A or G
  MOD_RES (26)..(27)..(28)..(29): Xaa is A or G or is absent
ASAAPXXVPQALSPINILYFXXXXXXXXXYGKIPMIVRSXKX

SEQ ID NO: 71835 - protein, 38 aa, Artificial Sequence
  GFR-binding peptide
  MOD_RES (2)..(3)..(35)..(37): Xaa is C or S
PXXTPTKMEPISMLYLNDKQQIIKFKYEGMVVDRXGXS

SEQ ID NO: 71836 - protein, 32 aa, Artificial Sequence; identical to SEQ ID NO: 31016
  GFR-binding peptide
  MOD_RES (32)..(32): Xaa is C or S

SEQ ID NO: 71837 - protein, 35 aa, Artificial Sequence; identical to SEQ ID NO: 31019
  GFR-binding peptide
  MOD_RES (4)..(5): Xaa is C or S

SEQ ID NO: 71838 - protein, 38 aa, Artificial Sequence; identical to SEQ ID NO: 9616
  GFR-binding peptide
  MOD_RES (1)..(2)..(35)..(37): Xaa is C or S
  MOD_RES (16)..(17)..(18)..(19)..(20): Xaa is A or G
  MOD_RES (21)..(22)..(23)..(24): Xaa is A or G or is absent

SEQ ID NO: 71839 - protein, 35 aa, Artificial Sequence; identical to SEQ ID NO: 16902
  GFR-binding peptide
  MOD_RES (1)..(2): Xaa is C or S
  MOD_RES (16)..(17)..(18)..(19)..(20): Xaa is A or G
  MOD_RES (21)..(22)..(23)..(24): Xaa is A or G or is absent

SEQ ID NO: 71840 - protein, 37 aa, Artificial Sequence; identical to SEQ ID NO: 31020
  GFR-binding peptide
  MOD_RES (3)..(4)..(36): Xaa is C or S

SEQ ID NO: 71841 - protein, 35 aa, Artificial Sequence; identical to SEQ ID NO: 9617
  GFR-binding peptide
  MOD_RES (1)..(35): Xaa is C or S
  MOD_RES (15)..(16)..(17)..(18)..(19): Xaa is A or G
  MOD_RES (20)..(21)..(22)..(23): Xaa is A or G or is absent

SEQ ID NO: 71842 - protein, 35 aa, Artificial Sequence
  GFR-binding peptide
  MOD_RES (2)..(3): Xaa is C or S
  MOD_RES (17)..(18)..(19)..(20)..(21): Xaa is A or G
  MOD_RES (22)..(23)..(24)..(25): Xaa is A or G or is absent
PXXVPQDLSPINILYFXXXXXXXXXYGKIPMVVKS

SEQ ID NO: 71843 - protein, 42 aa, Artificial Sequence; identical to SEQ ID NO: 9619
  GFR-binding peptide
  MOD_RES (6)..(7)..(41): Xaa is C or S
  MOD_RES (21)..(22)..(23)..(24)..(25): Xaa is A or G
  MOD_RES (26)..(27)..(28)..(29): Xaa is A or G or is absent

SEQ ID NO: 71844 - protein, 36 aa, Artificial Sequence
  GFR-binding peptide
  MOD_RES (3)..(4): Xaa is C or S
  MOD_RES (18)..(19)..(20)..(21)..(22): Xaa is A or G
  MOD_RES (23)..(24)..(25)..(26): Xaa is A or G or is absent
STXXAPVKTSATSMLYYXXXXXXXXXLRKHRMIVEE

SEQ ID NO: 71845 - protein, 37 aa, Artificial Sequence; identical to SEQ ID NO: 33201
  GFR-binding peptide
  MOD_RES (2)..(3)..(37): Xaa is C or S
  MOD_RES (17)..(18)..(19)..(20)..(21): Xaa is A or G
  MOD_RES (22)..(23)..(24)..(25): Xaa is A or G or is absent

SEQ ID NO: 71846 - protein, 43 aa, Artificial Sequence
  GFR-binding peptide
  MOD_RES (6)..(7)..(41)..(43): Xaa is C or S
  MOD_RES (21)..(22)..(23)..(24)..(25): Xaa is A or G
  MOD_RES (26)..(27)..(28)..(29): Xaa is A or G or is absent
GSAGPXXTPTKMSPISMLYKXXXXXXXXXLKYHYGMVVDRXGX

SEQ ID NO: 71847 - protein, 33 aa, Artificial Sequence; identical to SEQ ID NO: 33202
  GFR-binding peptide
  MOD_RES (1)..(1): Xaa is C or S
  MOD_RES (15)..(16)..(17)..(18)..(19): Xaa is A or G
  MOD_RES (20)..(21)..(22)..(23): Xaa is A or G or is absent

SEQ ID NO: 71848 - protein, 36 aa, Artificial Sequence; identical to SEQ ID NO: 31025
  GFR-binding peptide
  MOD_RES (2)..(3)..(34)..(36): Xaa is C or S

SEQ ID NO: 71849 - protein, 36 aa, Artificial Sequence; identical to SEQ ID NO: 9625
  GFR-binding peptide
  MOD_RES (1)..(2)..(33)..(35): Xaa is C or S

SEQ ID NO: 71850 - protein, 31 aa, Artificial Sequence
  GFR-binding peptide
  MOD_RES (1)..(1): Xaa is C or S
XVPEKMSATSILYYDENKNVVLRKHRNMTVE

SEQ ID NO: 71851 - protein, 40 aa, Artificial Sequence; identical to SEQ ID NO: 33205
  GFR-binding peptide
  MOD_RES (6)..(7): Xaa is C or S
  MOD_RES (21)..(22)..(23)..(24)..(25): Xaa is A or G
  MOD_RES (26)..(27)..(28)..(29): Xaa is A or G or is absent

SEQ ID NO: 71852 - protein, 41 aa, Artificial Sequence; identical to SEQ ID NO: 9628
  GFR-binding peptide
  MOD_RES (6)..(7)..(41): Xaa is C or S
  MOD_RES (21)..(22)..(23)..(24)..(25): Xaa is A or G
  MOD_RES (26)..(27)..(28)..(29): Xaa is A or G or is absent

SEQ ID NO: 71853 - protein, 35 aa, Artificial Sequence; identical to SEQ ID NO: 33207
  GFR-binding peptide
  MOD_RES (2)..(2): Xaa is C or S
  MOD_RES (16)..(17)..(18)..(19)..(20): Xaa is A or G
  MOD_RES (21)..(22)..(23)..(24): Xaa is A or G or is absent

SEQ ID NO: 71854 - protein, 35 aa, Artificial Sequence; identical to SEQ ID NO: 9629
  GFR-binding peptide
  MOD_RES (1)..(2)..(35): Xaa is C or S
  MOD_RES (16)..(17)..(18)..(19)..(20): Xaa is A or G
  MOD_RES (21)..(22)..(23)..(24): Xaa is A or G or is absent

SEQ ID NO: 71855 - protein, 39 aa, Artificial Sequence; identical to SEQ ID NO: 31031
  GFR-binding peptide
  MOD_RES (1)..(2)..(36)..(38): Xaa is C or S
  MOD_RES (16)..(17)..(18)..(19)..(20): Xaa is A or G
  MOD_RES (21)..(22)..(23)..(24): Xaa is A or G or is absent

SEQ ID NO: 71856 - protein, 37 aa, Artificial Sequence
  GFR-binding peptide
  MOD_RES (2)..(3)..(36): Xaa is C or S
  MOD_RES (17)..(18)..(19)..(20)..(21): Xaa is A or G
  MOD_RES (22)..(23)..(24)..(25): Xaa is A or G or is absent
TXXAPVKTSPISMLYKXXXXXXXXXLKYHYMIVEEXG

SEQ ID NO: 71857 - protein, 37 aa, Artificial Sequence; identical to SEQ ID NO: 31033
  GFR-binding peptide
  MOD_RES (34)..(36): Xaa is C or S
  MOD_RES (14)..(15)..(16)..(17)..(18): Xaa is A or G
  MOD_RES (19)..(20)..(21)..(22): Xaa is A or G or is absent

SEQ ID NO: 71858 - protein, 32 aa, Artificial Sequence; identical to SEQ ID NO: 33210
  GFR-binding peptide
  MOD_RES (14)..(15)..(16)..(17)..(18): Xaa is A or G
  MOD_RES (19)..(20)..(21)..(22): Xaa is A or G or is absent

SEQ ID NO: 71859 - protein, 41 aa, Artificial Sequence
  GFR-binding peptide
  MOD_RES (5)..(6)..(40): Xaa is C or S
  MOD_RES (20)..(21)..(22)..(23)..(24): Xaa is A or G
  MOD_RES (25)..(26)..(27)..(28): Xaa is A or G or is absent
IPEPXXVPEKMNAISILYFXXXXXXXXXLKKYRNMTVESXA

SEQ ID NO: 71860 - protein, 42 aa, Artificial Sequence; identical to SEQ ID NO: 9631
  GFR-binding peptide
  MOD_RES (5)..(6)..(39)..(41): Xaa is C or S
  MOD_RES (20)..(21)..(22)..(23)..(24): Xaa is A or G
  MOD_RES (25)..(26)..(27)..(28): Xaa is A or G or is absent

SEQ ID NO: 71861 - protein, 36 aa, Artificial Sequence; identical to SEQ ID NO: 33213
  GFR-binding peptide
  MOD_RES (2)..(3): Xaa is C or S
  MOD_RES (17)..(18)..(19)..(20)..(21): Xaa is A or G
  MOD_RES (22)..(23)..(24)..(25): Xaa is A or G or is absent

SEQ ID NO: 71862 - protein, 40 aa, Artificial Sequence; identical to SEQ ID NO: 33214
  GFR-binding peptide
  MOD_RES (6)..(7): Xaa is C or S
  MOD_RES (21)..(22)..(23)..(24)..(25): Xaa is A or G
  MOD_RES (26)..(27)..(28)..(29): Xaa is A or G or is absent

SEQ ID NO: 71863 - protein, 36 aa, Artificial Sequence; identical to SEQ ID NO: 31040
  GFR-binding peptide
  MOD_RES (4)..(5): Xaa is C or S

SEQ ID NO: 71864 - protein, 39 aa, Artificial Sequence
  GFR-binding peptide
  MOD_RES (6)..(7)..(39): Xaa is C or S
STPPTXXVPTRLSPISILYKDSANNVVLKYHYDMVVESX

SEQ ID NO: 71865 - protein, 43 aa, Artificial Sequence; identical to SEQ ID NO: 9639
  GFR-binding peptide
  MOD_RES (6)..(7)..(41)..(43): Xaa is C or S
  MOD_RES (21)..(22)..(23)..(24)..(25): Xaa is A or G
  MOD_RES (26)..(27)..(28)..(29): Xaa is A or G or is absent

SEQ ID NO: 71866 - protein, 39 aa, Artificial Sequence; identical to SEQ ID NO: 33224
  GFR-binding peptide
  MOD_RES (4)..(5)..(39): Xaa is C or S
  MOD_RES (19)..(20)..(21)..(22)..(23): Xaa is A or G
  MOD_RES (24)..(25)..(26)..(27): Xaa is A or G or is absent

SEQ ID NO: 71867 - protein, 37 aa, Artificial Sequence
  GFR-binding peptide
  MOD_RES (3)..(4): Xaa is C or S
  MOD_RES (18)..(19)..(20)..(21)..(22): Xaa is A or G
  MOD_RES (23)..(24)..(25)..(26): Xaa is A or G or is absent
PTXXVPTRLSPISILYKXXXXXXXXXLKYHYDMVVES

SEQ ID NO: 71868 - protein, 41 aa, Artificial Sequence; identical to SEQ ID NO: 9647
  GFR-binding peptide
  MOD_RES (5)..(6)..(38)..(40): Xaa is C or S

SEQ ID NO: 71869 - protein, 37 aa, Artificial Sequence
  GFR-binding peptide
  MOD_RES (4)..(5)..(37): Xaa is C or S
PASXXVPARLSATSILYYDAANNVVLRKHRDMVVEAX

SEQ ID NO: 71870 - protein, 40 aa, Artificial Sequence; identical to SEQ ID NO: 33228
  GFR-binding peptide
  MOD_RES (2)..(3)..(37)..(39): Xaa is C or S
  MOD_RES (17)..(18)..(19)..(20)..(21): Xaa is A or G
  MOD_RES (22)..(23)..(24)..(25): Xaa is A or G or is absent

SEQ ID NO: 71871 - protein, 35 aa, Artificial Sequence
  GFR-binding peptide
  MOD_RES (34)..(34): Xaa is C or S
  MOD_RES (14)..(15)..(16)..(17)..(18): Xaa is A or G
  MOD_RES (19)..(20)..(21)..(22): Xaa is A or G or is absent
VPEKMSATSILYYXXXXXXXXXLRKHRNMTVESXA

SEQ ID NO: 71872 - protein, 34 aa, Artificial Sequence; identical to SEQ ID NO: 9648
  GFR-binding peptide
  MOD_RES (34)..(34): Xaa is C or S
  MOD_RES (14)..(15)..(16)..(17)..(18): Xaa is A or G
  MOD_RES (19)..(20)..(21)..(22): Xaa is A or G or is absent

SEQ ID NO: 71873 - protein, 37 aa, Artificial Sequence; identical to SEQ ID NO: 9651
  GFR-binding peptide
  MOD_RES (1)..(34)..(36): Xaa is C or S
  MOD_RES (15)..(16)..(17)..(18)..(19): Xaa is A or G
  MOD_RES (20)..(21)..(22)..(23): Xaa is A or G or is absent

SEQ ID NO: 71874 - protein, 42 aa, Artificial Sequence; identical to SEQ ID NO: 9652
  GFR-binding peptide
  MOD_RES (6)..(7)..(40)..(42): Xaa is C or S
  MOD_RES (21)..(22)..(23)..(24)..(25): Xaa is A or G
  MOD_RES (26)..(27)..(28)..(29): Xaa is A or G or is absent

SEQ ID NO: 71875 - protein, 34 aa, Artificial Sequence
  GFR-binding peptide
  MOD_RES (2)..(3)..(34): Xaa is C or S
TXXAPVKTSATSMLYYDNGRVLLLRKHRMIVEEX

SEQ ID NO: 71876 - protein, 32 aa, Artificial Sequence
  GFR-binding peptide
  MOD_RES (1)..(32): Xaa is C or S
XVSQDLSPINILYFIGKTPKIYGKIPMIVKSX

SEQ ID NO: 71877 - protein, 39 aa, Artificial Sequence
  GFR-binding peptide
  MOD_RES (5)..(6): Xaa is C or S
  MOD_RES (20)..(21)..(22)..(23)..(24): Xaa is A or G
  MOD_RES (25)..(26)..(27)..(28): Xaa is A or G or is absent
TPPTXXVPTRLSPISILYKXXXXXXXXXLKYHYDMVVES

SEQ ID NO: 71878 - protein, 38 aa, Artificial Sequence; identical to SEQ ID NO: 9658
  GFR-binding peptide
  MOD_RES (5)..(6): Xaa is C or S
  MOD_RES (20)..(21)..(22)..(23)..(24): Xaa is A or G
  MOD_RES (25)..(26)..(27)..(28): Xaa is A or G or is absent

SEQ ID NO: 71879 - protein, 35 aa, Artificial Sequence; identical to SEQ ID NO: 9660
  GFR-binding peptide
  MOD_RES (4)..(5): Xaa is C or S

SEQ ID NO: 71880 - protein, 39 aa, Artificial Sequence; identical to SEQ ID NO: 31064
  GFR-binding peptide
  MOD_RES (5)..(6)..(38): Xaa is C or S

SEQ ID NO: 71881 - protein, 36 aa, Artificial Sequence; identical to SEQ ID NO: 9661
  GFR-binding peptide
  MOD_RES (3)..(4)..(36): Xaa is C or S

SEQ ID NO: 71882 - protein, 33 aa, Artificial Sequence
  GFR-binding peptide
  MOD_RES (2)..(3): Xaa is C or S
SXXVPARLSATSILYYDAANNVVLRKHRDMVVE

SEQ ID NO: 71883 - protein, 43 aa, Artificial Sequence; identical to SEQ ID NO: 9662
  GFR-binding peptide
  MOD_RES (5)..(6)..(40)..(42): Xaa is C or S
  MOD_RES (20)..(21)..(22)..(23)..(24): Xaa is A or G
  MOD_RES (25)..(26)..(27)..(28): Xaa is A or G or is absent

SEQ ID NO: 71884 - protein, 38 aa, Artificial Sequence; identical to SEQ ID NO: 31068
  GFR-binding peptide
  MOD_RES (6)..(6): Xaa is C or S
  MOD_RES (20)..(21)..(22)..(23)..(24): Xaa is A or G
  MOD_RES (25)..(26)..(27)..(28): Xaa is A or G or is absent

SEQ ID NO: 71885 - protein, 37 aa, Artificial Sequence; identical to SEQ ID NO: 31069
  GFR-binding peptide
  MOD_RES (1)..(2)..(34)..(36): Xaa is C or S

SEQ ID NO: 71886 - protein, 37 aa, Artificial Sequence; identical to SEQ ID NO: 9664
  GFR-binding peptide
  MOD_RES (2)..(3)..(37): Xaa is C or S
  MOD_RES (17)..(18)..(19)..(20)..(21): Xaa is A or G
  MOD_RES (22)..(23)..(24)..(25): Xaa is A or G or is absent

SEQ ID NO: 71887 - protein, 43 aa, Artificial Sequence
  GFR-binding peptide
  MOD_RES (6)..(7)..(41)..(43): Xaa is C or S
  MOD_RES (21)..(22)..(23)..(24)..(25): Xaa is A or G
  MOD_RES (26)..(27)..(28)..(29): Xaa is A or G or is absent
GIPEPXXVPEKMSPINILYFXXXXXXXXXYGKIPNMTVESXAX

SEQ ID NO: 71888 - protein, 44 aa, Artificial Sequence
  GFR-binding peptide
  MOD_RES (6)..(7)..(41)..(43): Xaa is C or S
  MOD_RES (21)..(22)..(23)..(24)..(25): Xaa is A or G
  MOD_RES (26)..(27)..(28)..(29): Xaa is A or G or is absent
GIPEPXXVPEKMSATSILYYXXXXXXXXXLRKHRNMTVESXAXR

SEQ ID NO: 71889 - protein, 38 aa, Artificial Sequence; identical to SEQ ID NO: 31074
  GFR-binding peptide
  MOD_RES (5)..(6): Xaa is C or S
  MOD_RES (20)..(21)..(22)..(23)..(24): Xaa is A or G
  MOD_RES (25)..(26)..(27)..(28): Xaa is A or G or is absent

SEQ ID NO: 71890 - protein, 35 aa, Artificial Sequence; identical to SEQ ID NO: 9666
  GFR-binding peptide
  MOD_RES (2)..(3)..(34): Xaa is C or S

SEQ ID NO: 71891 - protein, 40 aa, Artificial Sequence; identical to SEQ ID NO: 33243
  GFR-binding peptide
  MOD_RES (4)..(5)..(39): Xaa is C or S
  MOD_RES (19)..(20)..(21)..(22)..(23): Xaa is A or G
  MOD_RES (24)..(25)..(26)..(27): Xaa is A or G or is absent

SEQ ID NO: 71892 - protein, 40 aa, Artificial Sequence; identical to SEQ ID NO: 9672
  GFR-binding peptide
  MOD_RES (6)..(7)..(39): Xaa is C or S

SEQ ID NO: 71893 - protein, 31 aa, Artificial Sequence; identical to SEQ ID NO: 31081
  GFR-binding peptide
  MOD_RES (1)..(1): Xaa is C or S

SEQ ID NO: 71894 - protein, 33 aa, Artificial Sequence; identical to SEQ ID NO: 9674
  GFR-binding peptide
  MOD_RES (1)..(2)..(33): Xaa is C or S

SEQ ID NO: 71895 - protein, 31 aa, Artificial Sequence; identical to SEQ ID NO: 9675
  GFR-binding peptide
  MOD_RES (1)..(1): Xaa is C or S

SEQ ID NO: 71896 - protein, 38 aa, Artificial Sequence; identical to SEQ ID NO: 33245
  GFR-binding peptide
  MOD_RES (4)..(5)..(37): Xaa is C or S

SEQ ID NO: 71897 - protein, 36 aa, Artificial Sequence; identical to SEQ ID NO: 9682
  GFR-binding peptide
  MOD_RES (1)..(2)..(34)..(36): Xaa is C or S

SEQ ID NO: 71898 - protein, 42 aa, Artificial Sequence
  GFR-binding peptide
  MOD_RES (6)..(7)..(39)..(41): Xaa is C or S
GIPEPXXVPEKMSPISILYKDENKNVVLKYHYNMTVESXAXR

SEQ ID NO: 71899 - protein, 38 aa, Artificial Sequence; identical to SEQ ID NO: 16967
  GFR-binding peptide
  MOD_RES (1)..(2)..(36)..(38): Xaa is C or S
  MOD_RES (16)..(17)..(18)..(19)..(20): Xaa is A or G
  MOD_RES (21)..(22)..(23)..(24): Xaa is A or G or is absent

SEQ ID NO: 71900 - protein, 35 aa, Artificial Sequence
  GFR-binding peptide
  MOD_RES (1)..(33)..(35): Xaa is C or S
XVPEKMSPINILYFDENKNVVYGKIPNMTVESXAX

SEQ ID NO: 71901 - protein, 38 aa, Artificial Sequence; identical to SEQ ID NO: 9685
  GFR-binding peptide
  MOD_RES (3)..(4)..(38): Xaa is C or S
  MOD_RES (18)..(19)..(20)..(21)..(22): Xaa is A or G
  MOD_RES (23)..(24)..(25)..(26): Xaa is A or G or is absent

SEQ ID NO: 71902 - protein, 39 aa, Artificial Sequence; identical to SEQ ID NO: 33255
  GFR-binding peptide
  MOD_RES (1)..(2)..(36)..(38): Xaa is C or S
  MOD_RES (16)..(17)..(18)..(19)..(20): Xaa is A or G
  MOD_RES (21)..(22)..(23)..(24): Xaa is A or G or is absent

SEQ ID NO: 71903 - protein, 40 aa, Artificial Sequence; identical to SEQ ID NO: 31091
  GFR-binding peptide
  MOD_RES (5)..(6)..(38)..(40): Xaa is C or S

SEQ ID NO: 71904 - protein, 34 aa, Artificial Sequence; identical to SEQ ID NO: 31092
  GFR-binding peptide
  MOD_RES (1)..(2): Xaa is C or S
  MOD_RES (16)..(17)..(18)..(19)..(20): Xaa is A or G
  MOD_RES (21)..(22)..(23)..(24): Xaa is A or G or is absent

SEQ ID NO: 71905 - protein, 43 aa, Artificial Sequence
  GFR-binding peptide
  MOD_RES (6)..(7)..(40)..(42): Xaa is C or S
  MOD_RES (21)..(22)..(23)..(24)..(25): Xaa is A or G
  MOD_RES (26)..(27)..(28)..(29): Xaa is A or G or is absent
RVPSTXXAPVKTSATSMLYYXXXXXXXXXLRKHRMIVEEXGXL

SEQ ID NO: 71906 - protein, 33 aa, Artificial Sequence; identical to SEQ ID NO: 33258
  GFR-binding peptide
  MOD_RES (1)..(1): Xaa is C or S
  MOD_RES (15)..(16)..(17)..(18)..(19): Xaa is A or G
  MOD_RES (20)..(21)..(22)..(23): Xaa is A or G or is absent

SEQ ID NO: 71907 - protein, 41 aa, Artificial Sequence; identical to SEQ ID NO: 9689
  GFR-binding peptide
  MOD_RES (6)..(7)..(40): Xaa is C or S
  MOD_RES (21)..(22)..(23)..(24)..(25): Xaa is A or G
  MOD_RES (26)..(27)..(28)..(29): Xaa is A or G or is absent

SEQ ID NO: 71908 - protein, 36 aa, Artificial Sequence; identical to SEQ ID NO: 33262
  GFR-binding peptide
  MOD_RES (5)..(6): Xaa is C or S

SEQ ID NO: 71909 - protein, 44 aa, Artificial Sequence
  GFR-binding peptide
  MOD_RES (6)..(7)..(41)..(43): Xaa is C or S
  MOD_RES (21)..(22)..(23)..(24)..(25): Xaa is A or G
  MOD_RES (26)..(27)..(28)..(29): Xaa is A or G or is absent
GIPEPXXVPEKMEPISILYLXXXXXXXXXKFKYENMTVESXAXR

SEQ ID NO: 71910 - protein, 37 aa, Artificial Sequence
  GFR-binding peptide
  MOD_RES (5)..(6): Xaa is C or S
IPEPXXVPEKMSPISILYKDENKNVVLKYHYNMTVES

SEQ ID NO: 71911 - protein, 42 aa, Artificial Sequence; identical to SEQ ID NO: 9692
  GFR-binding peptide
  MOD_RES (6)..(7)..(40)..(42): Xaa is C or S

SEQ ID NO: 71912 - protein, 39 aa, Artificial Sequence
  GFR-binding peptide
  MOD_RES (4)..(5)..(37)..(39): Xaa is C or S
PEPXXVPEKMSATSILYYDENKNVVLRKHRNMTVESXAX

SEQ ID NO: 71913 - protein, 40 aa, Artificial Sequence; identical to SEQ ID NO: 31100
  GFR-binding peptide
  MOD_RES (4)..(5)..(40): Xaa is C or S
  MOD_RES (19)..(20)..(21)..(22)..(23): Xaa is A or G
  MOD_RES (24)..(25)..(26)..(27): Xaa is A or G or is absent

SEQ ID NO: 71914 - protein, 30 aa, Artificial Sequence; identical to SEQ ID NO: 9695
  GFR-binding peptide

SEQ ID NO: 71915 - protein, 38 aa, Artificial Sequence; identical to SEQ ID NO: 33275
  GFR-binding peptide
  MOD_RES (1)..(2)..(36)..(38): Xaa is C or S
  MOD_RES (16)..(17)..(18)..(19)..(20): Xaa is A or G
  MOD_RES (21)..(22)..(23)..(24): Xaa is A or G or is absent

SEQ ID NO: 71916 - protein, 37 aa, Artificial Sequence; identical to SEQ ID NO: 16987
  GFR-binding peptide
  MOD_RES (5)..(6): Xaa is C or S

SEQ ID NO: 71917 - protein, 34 aa, Artificial Sequence; identical to SEQ ID NO: 9698
  GFR-binding peptide
  MOD_RES (14)..(15)..(16)..(17)..(18): Xaa is A or G
  MOD_RES (19)..(20)..(21)..(22): Xaa is A or G or is absent

SEQ ID NO: 71918 - protein, 32 aa, Artificial Sequence; identical to SEQ ID NO: 31104
  GFR-binding peptide
  MOD_RES (1)..(2): Xaa is C or S

SEQ ID NO: 71919 - protein, 38 aa, Artificial Sequence; identical to SEQ ID NO: 31111
  GFR-binding peptide
  MOD_RES (2)..(3)..(36)..(38): Xaa is C or S
  MOD_RES (17)..(18)..(19)..(20)..(21): Xaa is A or G
  MOD_RES (22)..(23)..(24)..(25): Xaa is A or G or is absent

SEQ ID NO: 71920 - protein, 33 aa, Artificial Sequence; identical to SEQ ID NO: 31112
  GFR-binding peptide
  MOD_RES (14)..(15)..(16)..(17)..(18): Xaa is A or G
  MOD_RES (19)..(20)..(21)..(22): Xaa is A or G or is absent

SEQ ID NO: 71921 - protein, 36 aa, Artificial Sequence; identical to SEQ ID NO: 31113
  GFR-binding peptide
  MOD_RES (3)..(4): Xaa is C or S
  MOD_RES (18)..(19)..(20)..(21)..(22): Xaa is A or G
  MOD_RES (23)..(24)..(25)..(26): Xaa is A or G or is absent

SEQ ID NO: 71922 - protein, 39 aa, Artificial Sequence; identical to SEQ ID NO: 31116
  GFR-binding peptide
  MOD_RES (3)..(4)..(36)..(38): Xaa is C or S

SEQ ID NO: 71923 - protein, 38 aa, Artificial Sequence; identical to SEQ ID NO: 9704
  GFR-binding peptide
  MOD_RES (2)..(3)..(38): Xaa is C or S
  MOD_RES (17)..(18)..(19)..(20)..(21): Xaa is A or G
  MOD_RES (22)..(23)..(24)..(25): Xaa is A or G or is absent

SEQ ID NO: 71924 - protein, 35 aa, Artificial Sequence; identical to SEQ ID NO: 31119
  GFR-binding peptide
  MOD_RES (34)..(34): Xaa is C or S
  MOD_RES (14)..(15)..(16)..(17)..(18): Xaa is A or G
  MOD_RES (19)..(20)..(21)..(22): Xaa is A or G or is absent

SEQ ID NO: 71925 - protein, 33 aa, Artificial Sequence; identical to SEQ ID NO: 9706
  GFR-binding peptide
  MOD_RES (31)..(33): Xaa is C or S

SEQ ID NO: 71926 - protein, 39 aa, Artificial Sequence; identical to SEQ ID NO: 31122
  GFR-binding peptide
  MOD_RES (6)..(7)..(39): Xaa is C or S

SEQ ID NO: 71927 - protein, 39 aa, Artificial Sequence; identical to SEQ ID NO: 33283
  GFR-binding peptide
  MOD_RES (4)..(36)..(38): Xaa is C or S

SEQ ID NO: 71928 - protein, 45 aa, Artificial Sequence; identical to SEQ ID NO: 31126
  GFR-binding peptide
  MOD_RES (6)..(7)..(42)..(44): Xaa is C or S
  MOD_RES (21)..(22)..(23)..(24)..(25): Xaa is A or G
  MOD_RES (26)..(27)..(28)..(29): Xaa is A or G or is absent

SEQ ID NO: 71929 - protein, 42 aa, Artificial Sequence; identical to SEQ ID NO: 33290
  GFR-binding peptide
  MOD_RES (6)..(7)..(41): Xaa is C or S
  MOD_RES (21)..(22)..(23)..(24)..(25): Xaa is A or G
  MOD_RES (26)..(27)..(28)..(29): Xaa is A or G or is absent

SEQ ID NO: 71930 - protein, 35 aa, Artificial Sequence; identical to SEQ ID NO: 9712
  GFR-binding peptide
  MOD_RES (1)..(35): Xaa is C or S
  MOD_RES (15)..(16)..(17)..(18)..(19): Xaa is A or G
  MOD_RES (20)..(21)..(22)..(23): Xaa is A or G or is absent

SEQ ID NO: 71931 - protein, 35 aa, Artificial Sequence; identical to SEQ ID NO: 9714
  GFR-binding peptide
  MOD_RES (2)..(3): Xaa is C or S
  MOD_RES (17)..(18)..(19)..(20)..(21): Xaa is A or G
  MOD_RES (22)..(23)..(24)..(25): Xaa is A or G or is absent

SEQ ID NO: 71932 - protein, 40 aa, Artificial Sequence; identical to SEQ ID NO: 9717
  GFR-binding peptide
  MOD_RES (2)..(3)..(37)..(39): Xaa is C or S
  MOD_RES (17)..(18)..(19)..(20)..(21): Xaa is A or G
  MOD_RES (22)..(23)..(24)..(25): Xaa is A or G or is absent

SEQ ID NO: 71933 - protein, 40 aa, Artificial Sequence; identical to SEQ ID NO: 33295
  GFR-binding peptide
  MOD_RES (5)..(6)..(40): Xaa is C or S
  MOD_RES (20)..(21)..(22)..(23)..(24): Xaa is A or G
  MOD_RES (25)..(26)..(27)..(28): Xaa is A or G or is absent

SEQ ID NO: 71934 - protein, 34 aa, Artificial Sequence; identical to SEQ ID NO: 9718
  GFR-binding peptide
  MOD_RES (2)..(3): Xaa is C or S

SEQ ID NO: 71935 - protein, 34 aa, Artificial Sequence; identical to SEQ ID NO: 9719
  GFR-binding peptide
  MOD_RES (1)..(2): Xaa is C or S
  MOD_RES (16)..(17)..(18)..(19)..(20): Xaa is A or G
  MOD_RES (21)..(22)..(23)..(24): Xaa is A or G or is absent

SEQ ID NO: 71936 - protein, 37 aa, Artificial Sequence; identical to SEQ ID NO: 9721
  GFR-binding peptide
  MOD_RES (4)..(5)..(37): Xaa is C or S

SEQ ID NO: 71937 - protein, 37 aa, Artificial Sequence; identical to SEQ ID NO: 9722
  GFR-binding peptide
  MOD_RES (1)..(2)..(36): Xaa is C or S
  MOD_RES (16)..(17)..(18)..(19)..(20): Xaa is A or G
  MOD_RES (21)..(22)..(23)..(24): Xaa is A or G or is absent

SEQ ID NO: 71938 - protein, 38 aa, Artificial Sequence; identical to SEQ ID NO: 9725
  GFR-binding peptide
  MOD_RES (5)..(37): Xaa is C or S

SEQ ID NO: 71939 - protein, 32 aa, Artificial Sequence
  GFR-binding peptide
  MOD_RES (32)..(32): Xaa is C or S
VPEKMSPINILYFDENKNVVYGKIPNMTVESX

SEQ ID NO: 71940 - protein, 44 aa, Artificial Sequence; identical to SEQ ID NO: 9727
  GFR-binding peptide
  MOD_RES (7)..(41)..(43): Xaa is C or S
  MOD_RES (21)..(22)..(23)..(24)..(25): Xaa is A or G
  MOD_RES (26)..(27)..(28)..(29): Xaa is A or G or is absent

SEQ ID NO: 71941 - protein, 37 aa, Artificial Sequence; identical to SEQ ID NO: 9728
  GFR-binding peptide
  MOD_RES (34)..(36): Xaa is C or S
  MOD_RES (14)..(15)..(16)..(17)..(18): Xaa is A or G
  MOD_RES (19)..(20)..(21)..(22): Xaa is A or G or is absent

SEQ ID NO: 71942 - protein, 33 aa, Artificial Sequence; identical to SEQ ID NO: 9732
  GFR-binding peptide
  MOD_RES (14)..(15)..(16)..(17)..(18): Xaa is A or G
  MOD_RES (19)..(20)..(21)..(22): Xaa is A or G or is absent

SEQ ID NO: 71943 - protein, 37 aa, Artificial Sequence; identical to SEQ ID NO: 33307
  GFR-binding peptide
  MOD_RES (1)..(2)..(34)..(36): Xaa is C or S

SEQ ID NO: 71944 - protein, 36 aa, Artificial Sequence; identical to SEQ ID NO: 31148
  GFR-binding peptide
  MOD_RES (1)..(2)..(34)..(36): Xaa is C or S

SEQ ID NO: 71945 - protein, 35 aa, Artificial Sequence
  GFR-binding peptide
  MOD_RES (1)..(2)..(34): Xaa is C or S
XXTPTKMSATSMLYYNDKQQIILRKHRGMVVDRXG

SEQ ID NO: 71946 - protein, 39 aa, Artificial Sequence
  GFR-binding peptide
  MOD_RES (2)..(3)..(37)..(39): Xaa is C or S
  MOD_RES (17)..(18)..(19)..(20)..(21): Xaa is A or G
  MOD_RES (22)..(23)..(24)..(25): Xaa is A or G or is absent
PXXVPEKMSPINILYFXXXXXXXXXYGKIPNMTVESXAX

SEQ ID NO: 71947 - protein, 32 aa, Artificial Sequence; identical to SEQ ID NO: 9739
  GFR-binding peptide
  MOD_RES (1)..(2): Xaa is C or S

SEQ ID NO: 71948 - protein, 40 aa, Artificial Sequence; identical to SEQ ID NO: 9741
  GFR-binding peptide
  MOD_RES (4)..(5)..(38)..(40): Xaa is C or S
  MOD_RES (19)..(20)..(21)..(22)..(23): Xaa is A or G
  MOD_RES (24)..(25)..(26)..(27): Xaa is A or G or is absent

SEQ ID NO: 71949 - protein, 38 aa, Artificial Sequence; identical to SEQ ID NO: 9742
  GFR-binding peptide
  MOD_RES (2)..(3)..(35)..(37): Xaa is C or S

SEQ ID NO: 71950 - protein, 38 aa, Artificial Sequence; identical to SEQ ID NO: 9744
  GFR-binding peptide
  MOD_RES (5)..(6): Xaa is C or S
  MOD_RES (20)..(21)..(22)..(23)..(24): Xaa is A or G
  MOD_RES (25)..(26)..(27)..(28): Xaa is A or G or is absent

SEQ ID NO: 71951 - protein, 42 aa, Artificial Sequence; identical to SEQ ID NO: 31158
  GFR-binding peptide
  MOD_RES (4)..(5)..(39)..(41): Xaa is C or S
  MOD_RES (19)..(20)..(21)..(22)..(23): Xaa is A or G
  MOD_RES (24)..(25)..(26)..(27): Xaa is A or G or is absent

SEQ ID NO: 71952 - protein, 34 aa, Artificial Sequence; identical to SEQ ID NO: 9747
  GFR-binding peptide
  MOD_RES (1)..(2): Xaa is C or S
  MOD_RES (16)..(17)..(18)..(19)..(20): Xaa is A or G
  MOD_RES (21)..(22)..(23)..(24): Xaa is A or G or is absent

SEQ ID NO: 71953 - protein, 40 aa, Artificial Sequence; identical to SEQ ID NO: 31165
  GFR-binding peptide
  MOD_RES (5)..(6)..(40): Xaa is C or S
  MOD_RES (20)..(21)..(22)..(23)..(24): Xaa is A or G
  MOD_RES (25)..(26)..(27)..(28): Xaa is A or G or is absent

SEQ ID NO: 71954 - protein, 37 aa, Artificial Sequence
  GFR-binding peptide
  MOD_RES (3)..(4): Xaa is C or S
  MOD_RES (18)..(19)..(20)..(21)..(22): Xaa is A or G
  MOD_RES (23)..(24)..(25)..(26): Xaa is A or G or is absent
GPXXTPTKMEPISMLYLXXXXXXXXXKFKYEGMVVDR

SEQ ID NO: 71955 - protein, 34 aa, Artificial Sequence; identical to SEQ ID NO: 33324
  GFR-binding peptide
  MOD_RES (1)..(1): Xaa is C or S
  MOD_RES (15)..(16)..(17)..(18)..(19): Xaa is A or G
  MOD_RES (20)..(21)..(22)..(23): Xaa is A or G or is absent

SEQ ID NO: 71956 - protein, 39 aa, Artificial Sequence; identical to SEQ ID NO: 31167
  GFR-binding peptide
  MOD_RES (7)..(7): Xaa is C or S
  MOD_RES (21)..(22)..(23)..(24)..(25): Xaa is A or G
  MOD_RES (26)..(27)..(28)..(29): Xaa is A or G or is absent

SEQ ID NO: 71957 - protein, 33 aa, Artificial Sequence; identical to SEQ ID NO: 31171
  GFR-binding peptide
  MOD_RES (1)..(2): Xaa is C or S

SEQ ID NO: 71958 - protein, 40 aa, Artificial Sequence
  GFR-binding peptide
  MOD_RES (4)..(5)..(38)..(40): Xaa is C or S
  MOD_RES (19)..(20)..(21)..(22)..(23): Xaa is A or G
  MOD_RES (24)..(25)..(26)..(27): Xaa is A or G or is absent
AAPXXVPQALSPINILYFXXXXXXXXXYGKIPMIVRSXKX

SEQ ID NO: 71959 - protein, 38 aa, Artificial Sequence; identical to SEQ ID NO: 31172
  GFR-binding peptide
  MOD_RES (2)..(3)..(35)..(37): Xaa is C or S

SEQ ID NO: 71960 - protein, 36 aa, Artificial Sequence
  GFR-binding peptide
  MOD_RES (34)..(36): Xaa is C or S
  MOD_RES (14)..(15)..(16)..(17)..(18): Xaa is A or G
  MOD_RES (19)..(20)..(21)..(22): Xaa is A or G or is absent
VPEKMSPINILYFXXXXXXXXXYGKIPNMTVESXAX

SEQ ID NO: 71961 - protein, 39 aa, Artificial Sequence
  GFR-binding peptide
  MOD_RES (6)..(7): Xaa is C or S
  MOD_RES (21)..(22)..(23)..(24)..(25): Xaa is A or G
  MOD_RES (26)..(27)..(28)..(29): Xaa is A or G or is absent
STPPTXXVPTRLEPISILYLXXXXXXXXXKFKYEDMVVE

SEQ ID NO: 71962 - protein, 42 aa, Artificial Sequence; identical to SEQ ID NO: 33331
  GFR-binding peptide
  MOD_RES (5)..(6)..(40)..(42): Xaa is C or S
  MOD_RES (20)..(21)..(22)..(23)..(24): Xaa is A or G
  MOD_RES (25)..(26)..(27)..(28): Xaa is A or G or is absent

SEQ ID NO: 71963 - protein, 34 aa, Artificial Sequence; identical to SEQ ID NO: 31179
  GFR-binding peptide
  MOD_RES (32)..(34): Xaa is C or S

SEQ ID NO: 71964 - protein, 41 aa, Artificial Sequence; identical to SEQ ID NO: 17035
  GFR-binding peptide
  MOD_RES (5)..(6)..(40): Xaa is C or S
  MOD_RES (20)..(21)..(22)..(23)..(24): Xaa is A or G
  MOD_RES (25)..(26)..(27)..(28): Xaa is A or G or is absent

SEQ ID NO: 71965 - protein, 40 aa, Artificial Sequence; identical to SEQ ID NO: 31182
  GFR-binding peptide
  MOD_RES (6)..(7)..(39): Xaa is C or S

SEQ ID NO: 71966 - protein, 36 aa, Artificial Sequence; identical to SEQ ID NO: 9760
  GFR-binding peptide
  MOD_RES (6)..(6): Xaa is C or S

SEQ ID NO: 71967 - protein, 34 aa, Artificial Sequence; identical to SEQ ID NO: 31185
  GFR-binding peptide
  MOD_RES (3)..(3): Xaa is C or S

SEQ ID NO: 71968 - protein, 39 aa, Artificial Sequence; identical to SEQ ID NO: 9762
  GFR-binding peptide
  MOD_RES (2)..(3)..(37)..(39): Xaa is C or S
  MOD_RES (17)..(18)..(19)..(20)..(21): Xaa is A or G
  MOD_RES (22)..(23)..(24)..(25): Xaa is A or G or is absent

SEQ ID NO: 71969 - protein, 41 aa, Artificial Sequence; identical to SEQ ID NO: 9763
  GFR-binding peptide
  MOD_RES (5)..(6)..(39)..(41): Xaa is C or S
  MOD_RES (20)..(21)..(22)..(23)..(24): Xaa is A or G
  MOD_RES (25)..(26)..(27)..(28): Xaa is A or G or is absent

SEQ ID NO: 71970 - protein, 39 aa, Artificial Sequence
  GFR-binding peptide
  MOD_RES (6)..(7)..(38): Xaa is C or S
ASASPXXVPQDLSPINILYFVGRTPKVYGKIPMVVKSXK

SEQ ID NO: 71971 - protein, 36 aa, Artificial Sequence; identical to SEQ ID NO: 9768
  GFR-binding peptide
  MOD_RES (2)..(3)..(35): Xaa is C or S

SEQ ID NO: 71972 - protein, 35 aa, Artificial Sequence; identical to SEQ ID NO: 9770
  GFR-binding peptide
  MOD_RES (1)..(32)..(34): Xaa is C or S

SEQ ID NO: 71973 - protein, 36 aa, Artificial Sequence; identical to SEQ ID NO: 9772
  GFR-binding peptide
  MOD_RES (1)..(2)..(36): Xaa is C or S
  MOD_RES (16)..(17)..(18)..(19)..(20): Xaa is A or G
  MOD_RES (21)..(22)..(23)..(24): Xaa is A or G or is absent

SEQ ID NO: 71974 - protein, 35 aa, Artificial Sequence
  GFR-binding peptide
  MOD_RES (1)..(2)..(34): Xaa is C or S
XXTPTKMEPISMLYLNDKQQIIKFKYEGMVVDRXG

SEQ ID NO: 71975 - protein, 36 aa, Artificial Sequence; identical to SEQ ID NO: 33347
  GFR-binding peptide
  MOD_RES (3)..(35): Xaa is C or S

SEQ ID NO: 71976 - protein, 36 aa, Artificial Sequence; identical to SEQ ID NO: 31193
  GFR-binding peptide
  MOD_RES (1)..(35): Xaa is C or S
  MOD_RES (15)..(16)..(17)..(18)..(19): Xaa is A or G
  MOD_RES (20)..(21)..(22)..(23): Xaa is A or G or is absent

SEQ ID NO: 71977 - protein, 36 aa, Artificial Sequence
  GFR-binding peptide
  MOD_RES (5)..(6): Xaa is C or S
IPEPXXVPEKMSPISILYKDENKNVVLKYHYNMTVE

SEQ ID NO: 71978 - protein, 37 aa, Artificial Sequence; identical to SEQ ID NO: 31196
  GFR-binding peptide
  MOD_RES (3)..(4)..(36): Xaa is C or S

SEQ ID NO: 71979 - protein, 33 aa, Artificial Sequence; identical to SEQ ID NO: 9775
  GFR-binding peptide
  MOD_RES (2)..(3): Xaa is C or S

SEQ ID NO: 71980 - protein, 38 aa, Artificial Sequence
  GFR-binding peptide
  MOD_RES (3)..(4)..(37): Xaa is C or S
  MOD_RES (18)..(19)..(20)..(21)..(22): Xaa is A or G
  MOD_RES (23)..(24)..(25)..(26): Xaa is A or G or is absent
APXXVPQALSPINILYFXXXXXXXXXYGKIPMIVRSXK

SEQ ID NO: 71981 - protein, 37 aa, Artificial Sequence; identical to SEQ ID NO: 53760
  GFR-binding peptide
  MOD_RES (6)..(7): Xaa is C or S

SEQ ID NO: 71982 - protein, 36 aa, Artificial Sequence
  GFR-binding peptide
  MOD_RES (1)..(34)..(36): Xaa is C or S
  MOD_RES (15)..(16)..(17)..(18)..(19): Xaa is A or G
  MOD_RES (20)..(21)..(22)..(23): Xaa is A or G or is absent
XVSQDLSNITIQIMXXXXXXXXXLGEMSMIVKSXKX

SEQ ID NO: 71983 - protein, 35 aa, Artificial Sequence
  GFR-binding peptide
  MOD_RES (4)..(5): Xaa is C or S
PPTXXVPTRLSNITIQIMDSANNVVIGEMSDMVVE

SEQ ID NO: 71984 - protein, 40 aa, Artificial Sequence
  GFR-binding peptide
  MOD_RES (4)..(5)..(38)..(40): Xaa is C or S
  MOD_RES (19)..(20)..(21)..(22)..(23): Xaa is A or G
  MOD_RES (24)..(25)..(26)..(27): Xaa is A or G or is absent
ASPXXVPQDLSNITIQIMXXXXXXXXXLGEMSMVVKSXKX

SEQ ID NO: 71985 - protein, 37 aa, Artificial Sequence; identical to SEQ ID NO: 18704
  GFR-binding peptide
  MOD_RES (37)..(37): Xaa is C or S
  MOD_RES (16)..(17)..(18)..(19)..(20): Xaa is A or G
  MOD_RES (21)..(22)..(23)..(24): Xaa is A or G or is absent

SEQ ID NO: 71986 - protein, 37 aa, Artificial Sequence
  GFR-binding peptide
  MOD_RES (5)..(6): Xaa is C or S
APASXXVPARLSNITIQIMDAANNVVLGEMSDMVVEA

SEQ ID NO: 71987 - protein, 38 aa, Artificial Sequence; identical to SEQ ID NO: 53763
  GFR-binding peptide
  MOD_RES (5)..(6): Xaa is C or S
  MOD_RES (20)..(21)..(22)..(23)..(24): Xaa is A or G
  MOD_RES (25)..(26)..(27)..(28): Xaa is A or G or is absent

SEQ ID NO: 71988 - protein, 40 aa, Artificial Sequence
  GFR-binding peptide
  MOD_RES (3)..(4)..(37)..(39): Xaa is C or S
  MOD_RES (18)..(19)..(20)..(21)..(22): Xaa is A or G
  MOD_RES (23)..(24)..(25)..(26): Xaa is A or G or is absent
SPXXVPQDLSNITIQIMXXXXXXXXXLGEMSMVVKSXKXS

SEQ ID NO: 71989 - protein, 38 aa, Artificial Sequence
  GFR-binding peptide
  MOD_RES (1)..(2)..(36)..(38): Xaa is C or S
  MOD_RES (16)..(17)..(18)..(19)..(20): Xaa is A or G
  MOD_RES (21)..(22)..(23)..(24): Xaa is A or G or is absent
XXVPARLSNITIQIMXXXXXXXXXLGEMSDMVVEAXGX

SEQ ID NO: 71990 - protein, 37 aa, Artificial Sequence
  GFR-binding peptide
  MOD_RES (6)..(7): Xaa is C or S
RVPSTXXAPVKTSNITMQIMDNGRVLLLGEMSMIVEE

SEQ ID NO: 71991 - protein, 36 aa, Artificial Sequence; identical to SEQ ID NO: 18705
  GFR-binding peptide
  MOD_RES (34)..(36): Xaa is C or S

SEQ ID NO: 71992 - protein, 40 aa, Artificial Sequence; identical to SEQ ID NO: 18706
  GFR-binding peptide
  MOD_RES (6)..(40): Xaa is C or S
  MOD_RES (20)..(21)..(22)..(23)..(24): Xaa is A or G
  MOD_RES (25)..(26)..(27)..(28): Xaa is A or G or is absent

SEQ ID NO: 71993 - protein, 43 aa, Artificial Sequence
  GFR-binding peptide
  MOD_RES (5)..(6)..(40)..(42): Xaa is C or S
  MOD_RES (20)..(21)..(22)..(23)..(24): Xaa is A or G
  MOD_RES (25)..(26)..(27)..(28): Xaa is A or G or is absent
APASXXVPARLSNITIQIMXXXXXXXXXIGEMSDMVVEAXGXR

SEQ ID NO: 71994 - protein, 41 aa, Artificial Sequence
  GFR-binding peptide
  MOD_RES (4)..(5)..(38)..(40): Xaa is C or S
  MOD_RES (19)..(20)..(21)..(22)..(23): Xaa is A or G
  MOD_RES (24)..(25)..(26)..(27): Xaa is A or G or is absent
ASPXXVPQDLSNITIQIMXXXXXXXXXLGEMSMVVKSXKXS

SEQ ID NO: 71995 - protein, 43 aa, Artificial Sequence; identical to SEQ ID NO: 18707
  GFR-binding peptide
  MOD_RES (7)..(41)..(43): Xaa is C or S

SEQ ID NO: 71996 - protein, 35 aa, Artificial Sequence; identical to SEQ ID NO: 18708
  GFR-binding peptide
  MOD_RES (1)..(35): Xaa is C or S

SEQ ID NO: 71997 - protein, 34 aa, Artificial Sequence
  GFR-binding peptide
  MOD_RES (3)..(4): Xaa is C or S
STXXAPVKTSNITMQIMDNGRVLLLGEMSMIVEE

SEQ ID NO: 71998 - protein, 42 aa, Artificial Sequence; identical to SEQ ID NO: 18709
  GFR-binding peptide
  MOD_RES (2)..(39)..(41): Xaa is C or S
  MOD_RES (18)..(19)..(20)..(21)..(22): Xaa is A or G
  MOD_RES (23)..(24)..(25)..(26): Xaa is A or G or is absent

SEQ ID NO: 71999 - protein, 38 aa, Artificial Sequence; identical to SEQ ID NO: 18710
  GFR-binding peptide
  MOD_RES (36)..(38): Xaa is C or S
  MOD_RES (15)..(16)..(17)..(18)..(19): Xaa is A or G
  MOD_RES (20)..(21)..(22)..(23): Xaa is A or G or is absent

SEQ ID NO: 72000 - protein, 41 aa, Artificial Sequence; identical to SEQ ID NO: 18711
  GFR-binding peptide
  MOD_RES (2)..(39)..(41): Xaa is C or S
  MOD_RES (18)..(19)..(20)..(21)..(22): Xaa is A or G
  MOD_RES (23)..(24)..(25)..(26): Xaa is A or G or is absent

SEQ ID NO: 72001 - protein, 38 aa, Artificial Sequence
  GFR-binding peptide
  MOD_RES (5)..(6): Xaa is C or S
  MOD_RES (20)..(21)..(22)..(23)..(24): Xaa is A or G
  MOD_RES (25)..(26)..(27)..(28): Xaa is A or G or is absent
TPPTXXVPTRLSNITIQIMXXXXXXXXXIGEMSDMVVE

SEQ ID NO: 72002 - protein, 38 aa, Artificial Sequence
  GFR-binding peptide
  MOD_RES (3)..(4)..(37): Xaa is C or S
  MOD_RES (18)..(19)..(20)..(21)..(22): Xaa is A or G
  MOD_RES (23)..(24)..(25)..(26): Xaa is A or G or is absent
SPXXVPQDLSNITIQIMXXXXXXXXXLGEMSMVVKSXK

SEQ ID NO: 72003 - protein, 32 aa, Artificial Sequence; identical to SEQ ID NO: 53785
  GFR-binding peptide
  MOD_RES (1)..(32): Xaa is C or S

SEQ ID NO: 72004 - protein, 43 aa, Artificial Sequence
  GFR-binding peptide
  MOD_RES (6)..(7)..(41)..(43): Xaa is C or S
  MOD_RES (21)..(22)..(23)..(24)..(25): Xaa is A or G
  MOD_RES (26)..(27)..(28)..(29): Xaa is A or G or is absent
STPPTXXVPTRLSNITIQIMXXXXXXXXXLGEMSDMVVESXGX

SEQ ID NO: 72005 - protein, 36 aa, Artificial Sequence; identical to SEQ ID NO: 18717
  GFR-binding peptide
  MOD_RES (2)..(2): Xaa is C or S
  MOD_RES (18)..(19)..(20)..(21)..(22): Xaa is A or G
  MOD_RES (23)..(24)..(25)..(26): Xaa is A or G or is absent

SEQ ID NO: 72006 - protein, 34 aa, Artificial Sequence; identical to SEQ ID NO: 53786
  GFR-binding peptide
  MOD_RES (2)..(3): Xaa is C or S

SEQ ID NO: 72007 - protein, 39 aa, Artificial Sequence
  GFR-binding peptide
  MOD_RES (6)..(7): Xaa is C or S
  MOD_RES (21)..(22)..(23)..(24)..(25): Xaa is A or G
  MOD_RES (26)..(27)..(28)..(29): Xaa is A or G or is absent
STPPTXXVPTRLSNITIQIMXXXXXXXXXLGEMSDMVVE

SEQ ID NO: 72008 - protein, 35 aa, Artificial Sequence
  GFR-binding peptide
  MOD_RES (3)..(4): Xaa is C or S
ASXXVPARLSNITIQIMDAANNVVIGEMSDMVVEA

SEQ ID NO: 72009 - protein, 31 aa, Artificial Sequence
  GFR-binding peptide
VPARLSNITIQIMDAANNVVLGEMSDMVVEA

SEQ ID NO: 72010 - protein, 39 aa, Artificial Sequence
  GFR-binding peptide
  MOD_RES (3)..(4)..(38): Xaa is C or S
  MOD_RES (18)..(19)..(20)..(21)..(22): Xaa is A or G
  MOD_RES (23)..(24)..(25)..(26): Xaa is A or G or is absent
GPXXTPTKMSNITMQIMXXXXXXXXXIGEMSGMVVDRXG

SEQ ID NO: 72011 - protein, 31 aa, Artificial Sequence
  GFR-binding peptide
  MOD_RES (1)..(1): Xaa is C or S
XAPVKTSNITMQIMDNGRVLLLGEMSMIVEE

SEQ ID NO: 72012 - protein, 36 aa, Artificial Sequence; identical to SEQ ID NO: 18723
  GFR-binding peptide
  MOD_RES (1)..(35): Xaa is C or S
  MOD_RES (15)..(16)..(17)..(18)..(19): Xaa is A or G
  MOD_RES (20)..(21)..(22)..(23): Xaa is A or G or is absent

SEQ ID NO: 72013 - protein, 35 aa, Artificial Sequence; identical to SEQ ID NO: 18724
  GFR-binding peptide
  MOD_RES (34)..(34): Xaa is C or S

SEQ ID NO: 72014 - protein, 39 aa, Artificial Sequence; identical to SEQ ID NO: 18725
  GFR-binding peptide
  MOD_RES (2)..(39): Xaa is C or S

SEQ ID NO: 72015 - protein, 38 aa, Artificial Sequence; identical to SEQ ID NO: 18726
  GFR-binding peptide
  MOD_RES (4)..(38): Xaa is C or S
  MOD_RES (18)..(19)..(20)..(21)..(22): Xaa is A or G
  MOD_RES (23)..(24)..(25)..(26): Xaa is A or G or is absent

SEQ ID NO: 72016 - protein, 39 aa, Artificial Sequence
  GFR-binding peptide
  MOD_RES (4)..(5)..(36)..(38): Xaa is C or S
ASPXXVPQDLSNITIQIMVGRTPKVLGEMSMVVKSXKXS

SEQ ID NO: 72017 - protein, 38 aa, Artificial Sequence; identical to SEQ ID NO: 51399
  GFR-binding peptide
  MOD_RES (4)..(5): Xaa is C or S
  MOD_RES (19)..(20)..(21)..(22)..(23): Xaa is A or G
  MOD_RES (24)..(25)..(26)..(27): Xaa is A or G or is absent

SEQ ID NO: 72018 - protein, 39 aa, Artificial Sequence; identical to SEQ ID NO: 51404
  GFR-binding peptide
  MOD_RES (3)..(4)..(36)..(38): Xaa is C or S

SEQ ID NO: 72019 - protein, 30 aa, Artificial Sequence
  GFR-binding peptide
VPTRLSNITIQIMDSANNVVIGEMSDMVVE

SEQ ID NO: 72020 - protein, 42 aa, Artificial Sequence; identical to SEQ ID NO: 18733
  GFR-binding peptide
  MOD_RES (5)..(42): Xaa is C or S
  MOD_RES (21)..(22)..(23)..(24)..(25): Xaa is A or G
  MOD_RES (26)..(27)..(28)..(29): Xaa is A or G or is absent

SEQ ID NO: 72021 - protein, 36 aa, Artificial Sequence; identical to SEQ ID NO: 18735
  GFR-binding peptide
  MOD_RES (1)..(1): Xaa is C or S

SEQ ID NO: 72022 - protein, 36 aa, Artificial Sequence
  GFR-binding peptide
  MOD_RES (1)..(2)..(33)..(35): Xaa is C or S
XXAPVKTSNITMQIMDNGRVLLLGEMSMIVEEXGXL

SEQ ID NO: 72023 - protein, 35 aa, Artificial Sequence
  GFR-binding peptide
  MOD_RES (3)..(4)..(35): Xaa is C or S
SPXXVPQDLSNITIQIMVGRTPKVLGEMSMVVKSX

SEQ ID NO: 72024 - protein, 33 aa, Artificial Sequence; identical to SEQ ID NO: 51409
  GFR-binding peptide
  MOD_RES (1)..(33): Xaa is C or S

SEQ ID NO: 72025 - protein, 45 aa, Artificial Sequence; identical to SEQ ID NO: 18736
  GFR-binding peptide
  MOD_RES (5)..(42)..(44): Xaa is C or S

SEQ ID NO: 72026 - protein, 34 aa, Artificial Sequence
  GFR-binding peptide
  MOD_RES (32)..(34): Xaa is C or S
TPTKMSNITMQIMNDKQQIIIGEMSGMVVDRXGX

SEQ ID NO: 72027 - protein, 39 aa, Artificial Sequence; identical to SEQ ID NO: 53820
  GFR-binding peptide
  MOD_RES (4)..(5)..(36)..(38): Xaa is C or S

SEQ ID NO: 72028 - protein, 34 aa, Artificial Sequence; identical to SEQ ID NO: 53824
  GFR-binding peptide
  MOD_RES (1)..(34): Xaa is C or S
  MOD_RES (15)..(16)..(17)..(18)..(19): Xaa is A or G
  MOD_RES (20)..(21)..(22)..(23): Xaa is A or G or is absent

SEQ ID NO: 72029 - protein, 35 aa, Artificial Sequence; identical to SEQ ID NO: 18739
  GFR-binding peptide
  MOD_RES (1)..(1): Xaa is C or S

SEQ ID NO: 72030 - protein, 42 aa, Artificial Sequence; identical to SEQ ID NO: 51419
  GFR-binding peptide
  MOD_RES (5)..(6)..(40)..(42): Xaa is C or S
  MOD_RES (20)..(21)..(22)..(23)..(24): Xaa is A or G
  MOD_RES (25)..(26)..(27)..(28): Xaa is A or G or is absent

SEQ ID NO: 72031 - protein, 37 aa, Artificial Sequence; identical to SEQ ID NO: 51423
  GFR-binding peptide
  MOD_RES (2)..(3)..(37): Xaa is C or S
  MOD_RES (17)..(18)..(19)..(20)..(21): Xaa is A or G
  MOD_RES (22)..(23)..(24)..(25): Xaa is A or G or is absent

SEQ ID NO: 72032 - protein, 34 aa, Artificial Sequence; identical to SEQ ID NO: 18741
  GFR-binding peptide
  MOD_RES (34)..(34): Xaa is C or S
  MOD_RES (14)..(15)..(16)..(17)..(18): Xaa is A or G
  MOD_RES (19)..(20)..(21)..(22): Xaa is A or G or is absent

SEQ ID NO: 72033 - protein, 33 aa, Artificial Sequence; identical to SEQ ID NO: 18742
  GFR-binding peptide

SEQ ID NO: 72034 - protein, 42 aa, Artificial Sequence
  GFR-binding peptide
  MOD_RES (4)..(5)..(39)..(41): Xaa is C or S
  MOD_RES (19)..(20)..(21)..(22)..(23): Xaa is A or G
  MOD_RES (24)..(25)..(26)..(27): Xaa is A or G or is absent
PKPXXAPTKLSNITVQIMXXXXXXXXXLGEMSNMVVRSXGXH

SEQ ID NO: 72035 - protein, 33 aa, Artificial Sequence; identical to SEQ ID NO: 53828
  GFR-binding peptide
  MOD_RES (33)..(33): Xaa is C or S
  MOD_RES (14)..(15)..(16)..(17)..(18): Xaa is A or G
  MOD_RES (19)..(20)..(21)..(22): Xaa is A or G or is absent

SEQ ID NO: 72036 - protein, 44 aa, Artificial Sequence; identical to SEQ ID NO: 18743
  GFR-binding peptide
  MOD_RES (4)..(41)..(43): Xaa is C or S

SEQ ID NO: 72037 - protein, 40 aa, Artificial Sequence; identical to SEQ ID NO: 53831
  GFR-binding peptide
  MOD_RES (5)..(6)..(39): Xaa is C or S
  MOD_RES (20)..(21)..(22)..(23)..(24): Xaa is A or G
  MOD_RES (25)..(26)..(27)..(28): Xaa is A or G or is absent

SEQ ID NO: 72038 - protein, 37 aa, Artificial Sequence
  GFR-binding peptide
  MOD_RES (3)..(4): Xaa is C or S
  MOD_RES (18)..(19)..(20)..(21)..(22): Xaa is A or G
  MOD_RES (23)..(24)..(25)..(26): Xaa is A or G or is absent
GPXXTPTKMSNITMQIMXXXXXXXXXLGEMSGMVVDR

SEQ ID NO: 72039 - protein, 39 aa, Artificial Sequence; identical to SEQ ID NO: 18745
  GFR-binding peptide
  MOD_RES (4)..(38): Xaa is C or S
  MOD_RES (18)..(19)..(20)..(21)..(22): Xaa is A or G
  MOD_RES (23)..(24)..(25)..(26): Xaa is A or G or is absent

SEQ ID NO: 72040 - protein, 38 aa, Artificial Sequence; identical to SEQ ID NO: 18746
  GFR-binding peptide
  MOD_RES (2)..(36)..(38): Xaa is C or S
  MOD_RES (16)..(17)..(18)..(19)..(20): Xaa is A or G
  MOD_RES (21)..(22)..(23)..(24): Xaa is A or G or is absent

SEQ ID NO: 72041 - protein, 32 aa, Artificial Sequence
  GFR-binding peptide
  MOD_RES (32)..(32): Xaa is C or S
TPTKMSNITMQIMNDKQQIIIGEMSGMVVDRX

SEQ ID NO: 72042 - protein, 42 aa, Artificial Sequence; identical to SEQ ID NO: 18748
  GFR-binding peptide
  MOD_RES (4)..(41): Xaa is C or S
  MOD_RES (20)..(21)..(22)..(23)..(24): Xaa is A or G
  MOD_RES (25)..(26)..(27)..(28): Xaa is A or G or is absent

SEQ ID NO: 72043 - protein, 35 aa, Artificial Sequence
  GFR-binding peptide
  MOD_RES (1)..(2)..(33)..(35): Xaa is C or S
XXAPVKTSNITMQIMDNGRVLLLGEMSMIVEEXGX

SEQ ID NO: 72044 - protein, 41 aa, Artificial Sequence
  GFR-binding peptide
  MOD_RES (6)..(7)..(39)..(41): Xaa is C or S
GSAGPXXTPTKMSNITMQIMNDKQQIILGEMSGMVVDRXGX

SEQ ID NO: 72045 - protein, 38 aa, Artificial Sequence; identical to SEQ ID NO: 51437
  GFR-binding peptide
  MOD_RES (4)..(5)..(36)..(38): Xaa is C or S

SEQ ID NO: 72046 - protein, 40 aa, Artificial Sequence; identical to SEQ ID NO: 18752
  GFR-binding peptide
  MOD_RES (6)..(40): Xaa is C or S

SEQ ID NO: 72047 - protein, 36 aa, Artificial Sequence
  GFR-binding peptide
  MOD_RES (1)..(2)..(34)..(36): Xaa is C or S
XXVPTRLSNITIQIMDSANNVVLGEMSDMVVESXGX

SEQ ID NO: 72048 - protein, 36 aa, Artificial Sequence; identical to SEQ ID NO: 53847
  GFR-binding peptide
  MOD_RES (33)..(35): Xaa is C or S
  MOD_RES (14)..(15)..(16)..(17)..(18): Xaa is A or G
  MOD_RES (19)..(20)..(21)..(22): Xaa is A or G or is absent

SEQ ID NO: 72049 - protein, 37 aa, Artificial Sequence; identical to SEQ ID NO: 18753
  GFR-binding peptide
  MOD_RES (34)..(36): Xaa is C or S
  MOD_RES (14)..(15)..(16)..(17)..(18): Xaa is A or G
  MOD_RES (19)..(20)..(21)..(22): Xaa is A or G or is absent

SEQ ID NO: 72050 - protein, 37 aa, Artificial Sequence; identical to SEQ ID NO: 18755
  GFR-binding peptide
  MOD_RES (3)..(3): Xaa is C or S

SEQ ID NO: 72051 - protein, 39 aa, Artificial Sequence
  GFR-binding peptide
  MOD_RES (2)..(3)..(37)..(39): Xaa is C or S
  MOD_RES (17)..(18)..(19)..(20)..(21): Xaa is A or G
  MOD_RES (22)..(23)..(24)..(25): Xaa is A or G or is absent
SXXVPARLSNITIQIMXXXXXXXXXIGEMSDMVVEAXGX

SEQ ID NO: 72052 - protein, 34 aa, Artificial Sequence; identical to SEQ ID NO: 51443
  GFR-binding peptide
  MOD_RES (33)..(33): Xaa is C or S
  MOD_RES (14)..(15)..(16)..(17)..(18): Xaa is A or G
  MOD_RES (19)..(20)..(21)..(22): Xaa is A or G or is absent

SEQ ID NO: 72053 - protein, 42 aa, Artificial Sequence
  GFR-binding peptide
  MOD_RES (6)..(7)..(41): Xaa is C or S
  MOD_RES (21)..(22)..(23)..(24)..(25): Xaa is A or G
  MOD_RES (26)..(27)..(28)..(29): Xaa is A or G or is absent
GSAGPXXTPTKMSNITMQIMXXXXXXXXXIGEMSGMVVDRXG

SEQ ID NO: 72054 - protein, 37 aa, Artificial Sequence
  GFR-binding peptide
  MOD_RES (2)..(3)..(34)..(36): Xaa is C or S
PXXVPQALSNITIQIMVGRKPKVLGEMSMIVRSXKXS

SEQ ID NO: 72055 - protein, 41 aa, Artificial Sequence; identical to SEQ ID NO: 18758
  GFR-binding peptide
  MOD_RES (4)..(41): Xaa is C or S

SEQ ID NO: 72056 - protein, 33 aa, Artificial Sequence; identical to SEQ ID NO: 53860
  GFR-binding peptide
  MOD_RES (1)..(32): Xaa is C or S

SEQ ID NO: 72057 - protein, 40 aa, Artificial Sequence
  GFR-binding peptide
  MOD_RES (6)..(7): Xaa is C or S
  MOD_RES (21)..(22)..(23)..(24)..(25): Xaa is A or G
  MOD_RES (26)..(27)..(28)..(29): Xaa is A or G or is absent
HVPKPXXAPTKLSNITVQIMXXXXXXXXXIGEMSNMVVRS

SEQ ID NO: 72058 - protein, 38 aa, Artificial Sequence
  GFR-binding peptide
  MOD_RES (5)..(6)..(37): Xaa is C or S
SASPXXVSQDLSNITIQIMIGKTPKILGEMSMIVKSXK

SEQ ID NO: 72059 - protein, 33 aa, Artificial Sequence
  GFR-binding peptide
  MOD_RES (14)..(15)..(16)..(17)..(18): Xaa is A or G
  MOD_RES (19)..(20)..(21)..(22): Xaa is A or G or is absent
VPARLSNITIQIMXXXXXXXXXLGEMSDMVVEA

SEQ ID NO: 72060 - protein, 41 aa, Artificial Sequence
  GFR-binding peptide
  MOD_RES (6)..(7)..(40): Xaa is C or S
  MOD_RES (21)..(22)..(23)..(24)..(25): Xaa is A or G
  MOD_RES (26)..(27)..(28)..(29): Xaa is A or G or is absent
RVPSTXXAPVKTSNITMQIMXXXXXXXXXIGEMSMIVEEXG

SEQ ID NO: 72061 - protein, 40 aa, Artificial Sequence; identical to SEQ ID NO: 18763
  GFR-binding peptide
  MOD_RES (4)..(38)..(40): Xaa is C or S
  MOD_RES (18)..(19)..(20)..(21)..(22): Xaa is A or G
  MOD_RES (23)..(24)..(25)..(26): Xaa is A or G or is absent

SEQ ID NO: 72062 - protein, 43 aa, Artificial Sequence; identical to SEQ ID NO: 18764
  GFR-binding peptide
  MOD_RES (6)..(40)..(42): Xaa is C or S
  MOD_RES (20)..(21)..(22)..(23)..(24): Xaa is A or G
  MOD_RES (25)..(26)..(27)..(28): Xaa is A or G or is absent

SEQ ID NO: 72063 - protein, 34 aa, Artificial Sequence
  GFR-binding peptide
  MOD_RES (1)..(2): Xaa is C or S
  MOD_RES (16)..(17)..(18)..(19)..(20): Xaa is A or G
  MOD_RES (21)..(22)..(23)..(24): Xaa is A or G or is absent
XXTPTKMSNITMQIMXXXXXXXXXLGEMSGMVVD

SEQ ID NO: 72064 - protein, 39 aa, Artificial Sequence; identical to SEQ ID NO: 18766
  GFR-binding peptide
  MOD_RES (2)..(36)..(38): Xaa is C or S

SEQ ID NO: 72065 - protein, 35 aa, Artificial Sequence
  GFR-binding peptide
  MOD_RES (1)..(34): Xaa is C or S
  MOD_RES (15)..(16)..(17)..(18)..(19): Xaa is A or G
  MOD_RES (20)..(21)..(22)..(23): Xaa is A or G or is absent
XAPVKTSNITMQIMXXXXXXXXXLGEMSMIVEEXG

SEQ ID NO: 72066 - protein, 40 aa, Artificial Sequence
  GFR-binding peptide
  MOD_RES (4)..(5)..(39): Xaa is C or S
  MOD_RES (19)..(20)..(21)..(22)..(23): Xaa is A or G
  MOD_RES (24)..(25)..(26)..(27): Xaa is A or G or is absent
AGPXXTPTKMSNITMQIMXXXXXXXXXLGEMSGMVVDRXG

SEQ ID NO: 72067 - protein, 34 aa, Artificial Sequence
  GFR-binding peptide
  MOD_RES (1)..(32)..(34): Xaa is C or S
XAPVKTSNITMQIMDNGRVLLIGEMSMIVEEXGX

SEQ ID NO: 72068 - protein, 35 aa, Artificial Sequence
  GFR-binding peptide
  MOD_RES (33)..(35): Xaa is C or S
  MOD_RES (14)..(15)..(16)..(17)..(18): Xaa is A or G
  MOD_RES (19)..(20)..(21)..(22): Xaa is A or G or is absent
VPQDLSNITIQIMXXXXXXXXXLGEMSMVVKSXKX

SEQ ID NO: 72069 - protein, 34 aa, Artificial Sequence; identical to SEQ ID NO: 18769
  GFR-binding peptide
  MOD_RES (1)..(1): Xaa is C or S
  MOD_RES (15)..(16)..(17)..(18)..(19): Xaa is A or G
  MOD_RES (20)..(21)..(22)..(23): Xaa is A or G or is absent

SEQ ID NO: 72070 - protein, 33 aa, Artificial Sequence; identical to SEQ ID NO: 53876
  GFR-binding peptide
  MOD_RES (1)..(1): Xaa is C or S
  MOD_RES (15)..(16)..(17)..(18)..(19): Xaa is A or G
  MOD_RES (20)..(21)..(22)..(23): Xaa is A or G or is absent

SEQ ID NO: 72071 - protein, 40 aa, Artificial Sequence; identical to SEQ ID NO: 18770
  GFR-binding peptide
  MOD_RES (4)..(4): Xaa is C or S

SEQ ID NO: 72072 - protein, 41 aa, Artificial Sequence
  GFR-binding peptide
  MOD_RES (5)..(6)..(38)..(40): Xaa is C or S
SAGPXXTPTKMSNITMQIMNDKQQIIIGEMSGMVVDRXGXS

SEQ ID NO: 72073 - protein, 36 aa, Artificial Sequence; identical to SEQ ID NO: 53879
  GFR-binding peptide
  MOD_RES (1)..(2)..(33)..(35): Xaa is C or S

SEQ ID NO: 72074 - protein, 35 aa, Artificial Sequence
  GFR-binding peptide
  MOD_RES (1)..(2)..(33)..(35): Xaa is C or S
XXAPVKTSNITMQIMDNGRVLLIGEMSMIVEEXGX

SEQ ID NO: 72075 - protein, 42 aa, Artificial Sequence; identical to SEQ ID NO: 18772
  GFR-binding peptide
  MOD_RES (7)..(41): Xaa is C or S
  MOD_RES (21)..(22)..(23)..(24)..(25): Xaa is A or G
  MOD_RES (26)..(27)..(28)..(29): Xaa is A or G or is absent

SEQ ID NO: 72076 - protein, 36 aa, Artificial Sequence
  GFR-binding peptide
  MOD_RES (5)..(6): Xaa is C or S
VPSTXXAPVKTSNITMQIMDNGRVLLLGEMSMIVEE

SEQ ID NO: 72077 - protein, 35 aa, Artificial Sequence
  GFR-binding peptide
  MOD_RES (3)..(4)..(35): Xaa is C or S
STXXAPVKTSNITMQIMDNGRVLLLGEMSMIVEEX

SEQ ID NO: 72078 - protein, 32 aa, Artificial Sequence
  GFR-binding peptide
  MOD_RES (14)..(15)..(16)..(17)..(18): Xaa is A or G
  MOD_RES (19)..(20)..(21)..(22): Xaa is A or G or is absent
VPARLSNITIQIMXXXXXXXXXIGEMSDMVVE

SEQ ID NO: 72079 - protein, 35 aa, Artificial Sequence
  GFR-binding peptide
  MOD_RES (1)..(33)..(35): Xaa is C or S
XTPTKMSNITMQIMNDKQQIILGEMSGMVVDRXGX

SEQ ID NO: 72080 - protein, 40 aa, Artificial Sequence
  GFR-binding peptide
  MOD_RES (6)..(7): Xaa is C or S
  MOD_RES (21)..(22)..(23)..(24)..(25): Xaa is A or G
  MOD_RES (26)..(27)..(28)..(29): Xaa is A or G or is absent
AAPASXXVPARLSNITIQIMXXXXXXXXXIGEMSDMVVEA

SEQ ID NO: 72081 - protein, 45 aa, Artificial Sequence; identical to SEQ ID NO: 18773
  GFR-binding peptide
  MOD_RES (5)..(42)..(44): Xaa is C or S

SEQ ID NO: 72082 - protein, 33 aa, Artificial Sequence
  GFR-binding peptide
  MOD_RES (1)..(1): Xaa is C or S
  MOD_RES (15)..(16)..(17)..(18)..(19): Xaa is A or G
  MOD_RES (20)..(21)..(22)..(23): Xaa is A or G or is absent
XTPTKMSNITMQIMXXXXXXXXXLGEMSGMVVD

SEQ ID NO: 72083 - protein, 37 aa, Artificial Sequence; identical to SEQ ID NO: 51465
  GFR-binding peptide
  MOD_RES (4)..(5): Xaa is C or S
  MOD_RES (19)..(20)..(21)..(22)..(23): Xaa is A or G
  MOD_RES (24)..(25)..(26)..(27): Xaa is A or G or is absent

SEQ ID NO: 72084 - protein, 40 aa, Artificial Sequence; identical to SEQ ID NO: 53887
  GFR-binding peptide
  MOD_RES (4)..(5)..(38)..(40): Xaa is C or S
  MOD_RES (19)..(20)..(21)..(22)..(23): Xaa is A or G
  MOD_RES (24)..(25)..(26)..(27): Xaa is A or G or is absent

SEQ ID NO: 72085 - protein, 36 aa, Artificial Sequence
  GFR-binding peptide
  MOD_RES (1)..(2)..(36): Xaa is C or S
  MOD_RES (16)..(17)..(18)..(19)..(20): Xaa is A or G
  MOD_RES (21)..(22)..(23)..(24): Xaa is A or G or is absent
XXVPARLSNITIQIMXXXXXXXXXLGEMSDMVVEAX

SEQ ID NO: 72086 - protein, 34 aa, Artificial Sequence
  GFR-binding peptide
  MOD_RES (1)..(2): Xaa is C or S
  MOD_RES (16)..(17)..(18)..(19)..(20): Xaa is A or G
  MOD_RES (21)..(22)..(23)..(24): Xaa is A or G or is absent
XXVPQDLSNITIQIMXXXXXXXXXLGEMSMVVKS

SEQ ID NO: 72087 - protein, 39 aa, Artificial Sequence; identical to SEQ ID NO: 18775
  GFR-binding peptide
  MOD_RES (5)..(39): Xaa is C or S

SEQ ID NO: 72088 - protein, 36 aa, Artificial Sequence; identical to SEQ ID NO: 18776
  GFR-binding peptide
  MOD_RES (2)..(36): Xaa is C or S
  MOD_RES (16)..(17)..(18)..(19)..(20): Xaa is A or G
  MOD_RES (21)..(22)..(23)..(24): Xaa is A or G or is absent

SEQ ID NO: 72089 - protein, 42 aa, Artificial Sequence; identical to SEQ ID NO: 18777
  GFR-binding peptide
  MOD_RES (5)..(42): Xaa is C or S

SEQ ID NO: 72090 - protein, 37 aa, Artificial Sequence; identical to SEQ ID NO: 18778
  GFR-binding peptide
  MOD_RES (2)..(36): Xaa is C or S
  MOD_RES (16)..(17)..(18)..(19)..(20): Xaa is A or G
  MOD_RES (21)..(22)..(23)..(24): Xaa is A or G or is absent

SEQ ID NO: 72091 - protein, 41 aa, Artificial Sequence
  GFR-binding peptide
  MOD_RES (5)..(6)..(40): Xaa is C or S
  MOD_RES (20)..(21)..(22)..(23)..(24): Xaa is A or G
  MOD_RES (25)..(26)..(27)..(28): Xaa is A or G or is absent
SAGPXXTPTKMSNITMQIMXXXXXXXXXIGEMSGMVVDRXG

SEQ ID NO: 72092 - protein, 38 aa, Artificial Sequence; identical to SEQ ID NO: 18781
  GFR-binding peptide
  MOD_RES (5)..(5): Xaa is C or S
  MOD_RES (19)..(20)..(21)..(22)..(23): Xaa is A or G
  MOD_RES (24)..(25)..(26)..(27): Xaa is A or G or is absent

SEQ ID NO: 72093 - protein, 32 aa, Artificial Sequence
  GFR-binding peptide
  MOD_RES (14)..(15)..(16)..(17)..(18): Xaa is A or G
  MOD_RES (19)..(20)..(21)..(22): Xaa is A or G or is absent
VPTRLSNITIQIMXXXXXXXXXIGEMSDMVVE

SEQ ID NO: 72094 - protein, 37 aa, Artificial Sequence; identical to SEQ ID NO: 18782
  GFR-binding peptide
  MOD_RES (1)..(35)..(37): Xaa is C or S
  MOD_RES (15)..(16)..(17)..(18)..(19): Xaa is A or G
  MOD_RES (20)..(21)..(22)..(23): Xaa is A or G or is absent

SEQ ID NO: 72095 - protein, 39 aa, Artificial Sequence; identical to SEQ ID NO: 18783
  GFR-binding peptide
  MOD_RES (36)..(38): Xaa is C or S
  MOD_RES (15)..(16)..(17)..(18)..(19): Xaa is A or G
  MOD_RES (20)..(21)..(22)..(23): Xaa is A or G or is absent

SEQ ID NO: 72096 - protein, 37 aa, Artificial Sequence; identical to SEQ ID NO: 51476
  GFR-binding peptide
  MOD_RES (1)..(35)..(37): Xaa is C or S
  MOD_RES (15)..(16)..(17)..(18)..(19): Xaa is A or G
  MOD_RES (20)..(21)..(22)..(23): Xaa is A or G or is absent

SEQ ID NO: 72097 - protein, 37 aa, Artificial Sequence
  GFR-binding peptide
  MOD_RES (1)..(2)..(35)..(37): Xaa is C or S
  MOD_RES (16)..(17)..(18)..(19)..(20): Xaa is A or G
  MOD_RES (21)..(22)..(23)..(24): Xaa is A or G or is absent
XXVSQDLSNITIQIMXXXXXXXXXLGEMSMIVKSXKX

SEQ ID NO: 72098 - protein, 36 aa, Artificial Sequence
  GFR-binding peptide
  MOD_RES (1)..(2)..(35): Xaa is C or S
  MOD_RES (16)..(17)..(18)..(19)..(20): Xaa is A or G
  MOD_RES (21)..(22)..(23)..(24): Xaa is A or G or is absent
XXAPVKTSNITMQIMXXXXXXXXXLGEMSMIVEEXG

SEQ ID NO: 72099 - protein, 34 aa, Artificial Sequence; identical to SEQ ID NO: 51480
  GFR-binding peptide
  MOD_RES (1)..(2): Xaa is C or S
  MOD_RES (16)..(17)..(18)..(19)..(20): Xaa is A or G
  MOD_RES (21)..(22)..(23)..(24): Xaa is A or G or is absent

SEQ ID NO: 72100 - protein, 35 aa, Artificial Sequence
  GFR-binding peptide
  MOD_RES (1)..(35): Xaa is C or S
  MOD_RES (15)..(16)..(17)..(18)..(19): Xaa is A or G
  MOD_RES (20)..(21)..(22)..(23): Xaa is A or G or is absent
XVPARLSNITIQIMXXXXXXXXXLGEMSDMVVEAX

SEQ ID NO: 72101 - protein, 40 aa, Artificial Sequence; identical to SEQ ID NO: 18786
  GFR-binding peptide
  MOD_RES (5)..(5): Xaa is C or S

SEQ ID NO: 72102 - protein, 33 aa, Artificial Sequence
  GFR-binding peptide
  MOD_RES (1)..(1): Xaa is C or S
  MOD_RES (15)..(16)..(17)..(18)..(19): Xaa is A or G
  MOD_RES (20)..(21)..(22)..(23): Xaa is A or G or is absent
XVPQDLSNITIQIMXXXXXXXXXLGEMSMVVKS

SEQ ID NO: 72103 - protein, 35 aa, Artificial Sequence; identical to SEQ ID NO: 51482
  GFR-binding peptide
  MOD_RES (1)..(32)..(34): Xaa is C or S

SEQ ID NO: 72104 - protein, 37 aa, Artificial Sequence; identical to SEQ ID NO: 51486
  GFR-binding peptide
  MOD_RES (4)..(5)..(36): Xaa is C or S

SEQ ID NO: 72105 - protein, 36 aa, Artificial Sequence
  GFR-binding peptide
  MOD_RES (1)..(35): Xaa is C or S
  MOD_RES (15)..(16)..(17)..(18)..(19): Xaa is A or G
  MOD_RES (20)..(21)..(22)..(23): Xaa is A or G or is absent
XVPTRLSNITIQIMXXXXXXXXXIGEMSDMVVESXG

SEQ ID NO: 72106 - protein, 36 aa, Artificial Sequence
  GFR-binding peptide
  MOD_RES (2)..(3)..(35): Xaa is C or S
PXXTPTKMSNITMQIMNDKQQIILGEMSGMVVDRXG

SEQ ID NO: 72107 - protein, 39 aa, Artificial Sequence
  GFR-binding peptide
  MOD_RES (5)..(6): Xaa is C or S
  MOD_RES (20)..(21)..(22)..(23)..(24): Xaa is A or G
  MOD_RES (25)..(26)..(27)..(28): Xaa is A or G or is absent
TPPTXXVPTRLSNITIQIMXXXXXXXXXLGEMSDMVVES

SEQ ID NO: 72108 - protein, 36 aa, Artificial Sequence
  GFR-binding peptide
  MOD_RES (33)..(35): Xaa is C or S
  MOD_RES (14)..(15)..(16)..(17)..(18): Xaa is A or G
  MOD_RES (19)..(20)..(21)..(22): Xaa is A or G or is absent
APVKTSNITMQIMXXXXXXXXXLGEMSMIVEEXGXL

SEQ ID NO: 72109 - protein, 31 aa, Artificial Sequence; identical to SEQ ID NO: 53907
  GFR-binding peptide
  MOD_RES (1)..(1): Xaa is C or S

SEQ ID NO: 72110 - protein, 39 aa, Artificial Sequence; identical to SEQ ID NO: 18793
  GFR-binding peptide
  MOD_RES (1)..(38): Xaa is C or S
  MOD_RES (17)..(18)..(19)..(20)..(21): Xaa is A or G
  MOD_RES (22)..(23)..(24)..(25): Xaa is A or G or is absent

SEQ ID NO: 72111 - protein, 39 aa, Artificial Sequence
  GFR-binding peptide
  MOD_RES (5)..(6)..(38): Xaa is C or S
TPPTXXVPTRLSNITIQIMDSANNVVIGEMSDMVVESXG

SEQ ID NO: 72112 - protein, 38 aa, Artificial Sequence; identical to SEQ ID NO: 53910
  GFR-binding peptide
  MOD_RES (4)..(5)..(38): Xaa is C or S
  MOD_RES (19)..(20)..(21)..(22)..(23): Xaa is A or G
  MOD_RES (24)..(25)..(26)..(27): Xaa is A or G or is absent

SEQ ID NO: 72113 - protein, 44 aa, Artificial Sequence; identical to SEQ ID NO: 18795
  GFR-binding peptide
  MOD_RES (5)..(42)..(44): Xaa is C or S
  MOD_RES (21)..(22)..(23)..(24)..(25): Xaa is A or G
  MOD_RES (26)..(27)..(28)..(29): Xaa is A or G or is absent

SEQ ID NO: 72114 - protein, 37 aa, Artificial Sequence; identical to SEQ ID NO: 53911
  GFR-binding peptide
  MOD_RES (5)..(6)..(37): Xaa is C or S

SEQ ID NO: 72115 - protein, 35 aa, Artificial Sequence
  GFR-binding peptide
  MOD_RES (1)..(33)..(35): Xaa is C or S
XVPARLSNITIQIMDAANNVVLGEMSDMVVEAXGX

SEQ ID NO: 72116 - protein, 39 aa, Artificial Sequence
  GFR-binding peptide
  MOD_RES (5)..(6)..(38): Xaa is C or S
SAGPXXTPTKMSNITMQIMNDKQQIILGEMSGMVVDRXG

SEQ ID NO: 72117 - protein, 39 aa, Artificial Sequence; identical to SEQ ID NO: 53912
  GFR-binding peptide
  MOD_RES (4)..(5)..(39): Xaa is C or S
  MOD_RES (19)..(20)..(21)..(22)..(23): Xaa is A or G
  MOD_RES (24)..(25)..(26)..(27): Xaa is A or G or is absent

SEQ ID NO: 72118 - protein, 33 aa, Artificial Sequence
  GFR-binding peptide
  MOD_RES (2)..(3): Xaa is C or S
SXXVPARLSNITIQIMDAANNVVIGEMSDMVVE

SEQ ID NO: 72119 - protein, 40 aa, Artificial Sequence
  GFR-binding peptide
  MOD_RES (5)..(6)..(38)..(40): Xaa is C or S
APASXXVPARLSNITIQIMDAANNVVIGEMSDMVVEAXGX

SEQ ID NO: 72120 - protein, 30 aa, Artificial Sequence
  GFR-binding peptide
VPQDLSNITIQIMVGRTPKVLGEMSMVVKS

SEQ ID NO: 72121 - protein, 34 aa, Artificial Sequence
  GFR-binding peptide
  MOD_RES (33)..(33): Xaa is C or S
  MOD_RES (14)..(15)..(16)..(17)..(18): Xaa is A or G
  MOD_RES (19)..(20)..(21)..(22): Xaa is A or G or is absent
VSQDLSNITIQIMXXXXXXXXXLGEMSMIVKSXK

SEQ ID NO: 72122 - protein, 35 aa, Artificial Sequence
  GFR-binding peptide
  MOD_RES (1)..(2)..(34): Xaa is C or S
XXVPTRLSNITIQIMDSANNVVLGEMSDMVVESXG

SEQ ID NO: 72123 - protein, 41 aa, Artificial Sequence; identical to SEQ ID NO: 18797
  GFR-binding peptide
  MOD_RES (4)..(41): Xaa is C or S

SEQ ID NO: 72124 - protein, 38 aa, Artificial Sequence
  GFR-binding peptide
  MOD_RES (1)..(2)..(35)..(37): Xaa is C or S
  MOD_RES (16)..(17)..(18)..(19)..(20): Xaa is A or G
  MOD_RES (21)..(22)..(23)..(24): Xaa is A or G or is absent
XXVPQDLSNITIQIMXXXXXXXXXLGEMSMVVKSXKXS

SEQ ID NO: 72125 - protein, 35 aa, Artificial Sequence
  GFR-binding peptide
  MOD_RES (1)..(35): Xaa is C or S
  MOD_RES (15)..(16)..(17)..(18)..(19): Xaa is A or G
  MOD_RES (20)..(21)..(22)..(23): Xaa is A or G or is absent
XTPTKMSNITMQIMXXXXXXXXXIGEMSGMVVDRX

SEQ ID NO: 72126 - protein, 40 aa, Artificial Sequence; identical to SEQ ID NO: 18799
  GFR-binding peptide
  MOD_RES (37)..(39): Xaa is C or S
  MOD_RES (16)..(17)..(18)..(19)..(20): Xaa is A or G
  MOD_RES (21)..(22)..(23)..(24): Xaa is A or G or is absent

SEQ ID NO: 72127 - protein, 34 aa, Artificial Sequence; identical to SEQ ID NO: 51517
  GFR-binding peptide
  MOD_RES (1)..(32)..(34): Xaa is C or S

SEQ ID NO: 72128 - protein, 36 aa, Artificial Sequence; identical to SEQ ID NO: 18800
  GFR-binding peptide
  MOD_RES (16)..(17)..(18)..(19)..(20): Xaa is A or G
  MOD_RES (21)..(22)..(23)..(24): Xaa is A or G or is absent

SEQ ID NO: 72129 - protein, 37 aa, Artificial Sequence
  GFR-binding peptide
  MOD_RES (3)..(4)..(37): Xaa is C or S
  MOD_RES (18)..(19)..(20)..(21)..(22): Xaa is A or G
  MOD_RES (23)..(24)..(25)..(26): Xaa is A or G or is absent
SPXXVPQDLSNITIQIMXXXXXXXXXLGEMSMVVKSX

SEQ ID NO: 72130 - protein, 35 aa, Artificial Sequence
  GFR-binding peptide
  MOD_RES (2)..(3): Xaa is C or S
  MOD_RES (17)..(18)..(19)..(20)..(21): Xaa is A or G
  MOD_RES (22)..(23)..(24)..(25): Xaa is A or G or is absent
TXXVPTRLSNITIQIMXXXXXXXXXIGEMSDMVVE

SEQ ID NO: 72131 - protein, 43 aa, Artificial Sequence; identical to SEQ ID NO: 53916
  GFR-binding peptide
  MOD_RES (6)..(7)..(40)..(42): Xaa is C or S
  MOD_RES (21)..(22)..(23)..(24)..(25): Xaa is A or G
  MOD_RES (26)..(27)..(28)..(29): Xaa is A or G or is absent

SEQ ID NO: 72132 - protein, 32 aa, Artificial Sequence
  GFR-binding peptide
  MOD_RES (1)..(2): Xaa is C or S
XXVPQALSNITIQIMVGRKPKVLGEMSMIVRS

SEQ ID NO: 72133 - protein, 33 aa, Artificial Sequence
  GFR-binding peptide
  MOD_RES (14)..(15)..(16)..(17)..(18): Xaa is A or G
  MOD_RES (19)..(20)..(21)..(22): Xaa is A or G or is absent
VPTRLSNITIQIMXXXXXXXXXLGEMSDMVVES

SEQ ID NO: 72134 - protein, 38 aa, Artificial Sequence
  GFR-binding peptide
  MOD_RES (2)..(3)..(35)..(37): Xaa is C or S
SXXVPARLSNITIQIMDAANNVVIGEMSDMVVEAXGXR

SEQ ID NO: 72135 - protein, 38 aa, Artificial Sequence
  GFR-binding peptide
  MOD_RES (6)..(7): Xaa is C or S
STPPTXXVPTRLSNITIQIMDSANNVVLGEMSDMVVES

SEQ ID NO: 72136 - protein, 41 aa, Artificial Sequence
  GFR-binding peptide
  MOD_RES (6)..(7)..(39)..(41): Xaa is C or S
HVPKPXXAPTKLSNITVQIMDDSSNVILGEMSNMVVRSXGX

SEQ ID NO: 72137 - protein, 38 aa, Artificial Sequence
  GFR-binding peptide
  MOD_RES (5)..(6): Xaa is C or S
  MOD_RES (20)..(21)..(22)..(23)..(24): Xaa is A or G
  MOD_RES (25)..(26)..(27)..(28): Xaa is A or G or is absent
VPKPXXAPTKLSNITVQIMXXXXXXXXXLGEMSNMVVR

SEQ ID NO: 72138 - protein, 33 aa, Artificial Sequence; identical to SEQ ID NO: 18807
  GFR-binding peptide
  MOD_RES (15)..(16)..(17)..(18)..(19): Xaa is A or G
  MOD_RES (20)..(21)..(22)..(23): Xaa is A or G or is absent

SEQ ID NO: 72139 - protein, 37 aa, Artificial Sequence; identical to SEQ ID NO: 18810
  GFR-binding peptide
  MOD_RES (1)..(1): Xaa is C or S

SEQ ID NO: 72140 - protein, 34 aa, Artificial Sequence
  GFR-binding peptide
  MOD_RES (1)..(32)..(34): Xaa is C or S
XAPVKTSNITMQIMDNGRVLLLGEMSMIVEEXGX

SEQ ID NO: 72141 - protein, 35 aa, Artificial Sequence; identical to SEQ ID NO: 51535
  GFR-binding peptide
  MOD_RES (1)..(2): Xaa is C or S
  MOD_RES (16)..(17)..(18)..(19)..(20): Xaa is A or G
  MOD_RES (21)..(22)..(23)..(24): Xaa is A or G or is absent

SEQ ID NO: 72142 - protein, 40 aa, Artificial Sequence; identical to SEQ ID NO: 18811
  GFR-binding peptide
  MOD_RES (37)..(39): Xaa is C or S
  MOD_RES (16)..(17)..(18)..(19)..(20): Xaa is A or G
  MOD_RES (21)..(22)..(23)..(24): Xaa is A or G or is absent

SEQ ID NO: 72143 - protein, 40 aa, Artificial Sequence
  GFR-binding peptide
  MOD_RES (4)..(5)..(38)..(40): Xaa is C or S
  MOD_RES (19)..(20)..(21)..(22)..(23): Xaa is A or G
  MOD_RES (24)..(25)..(26)..(27): Xaa is A or G or is absent
PSTXXAPVKTSNITMQIMXXXXXXXXXIGEMSMIVEEXGX

SEQ ID NO: 72144 - protein, 36 aa, Artificial Sequence; identical to SEQ ID NO: 18813
  GFR-binding peptide
  MOD_RES (2)..(36): Xaa is C or S

SEQ ID NO: 72145 - protein, 34 aa, Artificial Sequence; identical to SEQ ID NO: 51540
  GFR-binding peptide
  MOD_RES (3)..(4): Xaa is C or S

SEQ ID NO: 72146 - protein, 39 aa, Artificial Sequence; identical to SEQ ID NO: 51541
  GFR-binding peptide
  MOD_RES (2)..(3)..(37)..(39): Xaa is C or S
  MOD_RES (17)..(18)..(19)..(20)..(21): Xaa is A or G
  MOD_RES (22)..(23)..(24)..(25): Xaa is A or G or is absent

SEQ ID NO: 72147 - protein, 37 aa, Artificial Sequence
  GFR-binding peptide
  MOD_RES (1)..(2)..(36): Xaa is C or S
  MOD_RES (16)..(17)..(18)..(19)..(20): Xaa is A or G
  MOD_RES (21)..(22)..(23)..(24): Xaa is A or G or is absent
XXVPARLSNITIQIMXXXXXXXXXIGEMSDMVVEAXG

SEQ ID NO: 72148 - protein, 38 aa, Artificial Sequence; identical to SEQ ID NO: 18814
  GFR-binding peptide
  MOD_RES (3)..(3): Xaa is C or S
  MOD_RES (19)..(20)..(21)..(22)..(23): Xaa is A or G
  MOD_RES (24)..(25)..(26)..(27): Xaa is A or G or is absent

SEQ ID NO: 72149 - protein, 34 aa, Artificial Sequence
  GFR-binding peptide
  MOD_RES (34)..(34): Xaa is C or S
  MOD_RES (14)..(15)..(16)..(17)..(18): Xaa is A or G
  MOD_RES (19)..(20)..(21)..(22): Xaa is A or G or is absent
APTKLSNITVQIMXXXXXXXXXLGEMSNMVVRSX

SEQ ID NO: 72150 - protein, 42 aa, Artificial Sequence; identical to SEQ ID NO: 53948
  GFR-binding peptide
  MOD_RES (5)..(6)..(39)..(41): Xaa is C or S
  MOD_RES (20)..(21)..(22)..(23)..(24): Xaa is A or G
  MOD_RES (25)..(26)..(27)..(28): Xaa is A or G or is absent

SEQ ID NO: 72151 - protein, 40 aa, Artificial Sequence; identical to SEQ ID NO: 51543
  GFR-binding peptide
  MOD_RES (5)..(6)..(40): Xaa is C or S
  MOD_RES (20)..(21)..(22)..(23)..(24): Xaa is A or G
  MOD_RES (25)..(26)..(27)..(28): Xaa is A or G or is absent

SEQ ID NO: 72152 - protein, 34 aa, Artificial Sequence
  GFR-binding peptide
  MOD_RES (32)..(34): Xaa is C or S
VPTRLSNITIQIMDSANNVVLGEMSDMVVESXGX

SEQ ID NO: 72153 - protein, 37 aa, Artificial Sequence
  GFR-binding peptide
  MOD_RES (2)..(3)..(36): Xaa is C or S
  MOD_RES (17)..(18)..(19)..(20)..(21): Xaa is A or G
  MOD_RES (22)..(23)..(24)..(25): Xaa is A or G or is absent
PXXVPQALSNITIQIMXXXXXXXXXLGEMSMIVRSXK

SEQ ID NO: 72154 - protein, 32 aa, Artificial Sequence
  GFR-binding peptide
  MOD_RES (32)..(32): Xaa is C or S
APTKLSNITVQIMDDSSNVILGEMSNMVVRSX

SEQ ID NO: 72155 - protein, 37 aa, Artificial Sequence; identical to SEQ ID NO: 51551
  GFR-binding peptide
  MOD_RES (2)..(3)..(36): Xaa is C or S
  MOD_RES (17)..(18)..(19)..(20)..(21): Xaa is A or G
  MOD_RES (22)..(23)..(24)..(25): Xaa is A or G or is absent

SEQ ID NO: 72156 - protein, 36 aa, Artificial Sequence
  GFR-binding peptide
  MOD_RES (3)..(4)..(36): Xaa is C or S
PTXXVPTRLSNITIQIMDSANNVVLGEMSDMVVESX

SEQ ID NO: 72157 - protein, 38 aa, Artificial Sequence
  GFR-binding peptide
  MOD_RES (3)..(4)..(36)..(38): Xaa is C or S
GPXXTPTKMSNITMQIMNDKQQIILGEMSGMVVDRXGX

SEQ ID NO: 72158 - protein, 38 aa, Artificial Sequence; identical to SEQ ID NO: 51557
  GFR-binding peptide
  MOD_RES (5)..(6): Xaa is C or S
  MOD_RES (20)..(21)..(22)..(23)..(24): Xaa is A or G
  MOD_RES (25)..(26)..(27)..(28): Xaa is A or G or is absent

SEQ ID NO: 72159 - protein, 44 aa, Artificial Sequence; identical to SEQ ID NO: 18817
  GFR-binding peptide
  MOD_RES (4)..(41)..(43): Xaa is C or S

SEQ ID NO: 72160 - protein, 43 aa, Artificial Sequence; identical to SEQ ID NO: 18818
  GFR-binding peptide
  MOD_RES (5)..(42): Xaa is C or S

SEQ ID NO: 72161 - protein, 32 aa, Artificial Sequence; identical to SEQ ID NO: 53972
  GFR-binding peptide
  MOD_RES (14)..(15)..(16)..(17)..(18): Xaa is A or G
  MOD_RES (19)..(20)..(21)..(22): Xaa is A or G or is absent

SEQ ID NO: 72162 - protein, 40 aa, Artificial Sequence
  GFR-binding peptide
  MOD_RES (5)..(6)..(38)..(40): Xaa is C or S
SAGPXXTPTKMSNITMQIMNDKQQIILGEMSGMVVDRXGX

SEQ ID NO: 72163 - protein, 35 aa, Artificial Sequence; identical to SEQ ID NO: 18821
  GFR-binding peptide

SEQ ID NO: 72164 - protein, 38 aa, Artificial Sequence
  GFR-binding peptide
  MOD_RES (4)..(5)..(37): Xaa is C or S
PPTXXVPTRLSNITIQIMDSANNVVIGEMSDMVVESXG

SEQ ID NO: 72165 - protein, 35 aa, Artificial Sequence
  GFR-binding peptide
  MOD_RES (1)..(33)..(35): Xaa is C or S
XAPTKLSNITVQIMDDSSNVILGEMSNMVVRSXGX

SEQ ID NO: 72166 - protein, 36 aa, Artificial Sequence
  GFR-binding peptide
  MOD_RES (1)..(33)..(35): Xaa is C or S
XVPTRLSNITIQIMDSANNVVLGEMSDMVVESXGXR

SEQ ID NO: 72167 - protein, 35 aa, Artificial Sequence
  GFR-binding peptide
  MOD_RES (2)..(3): Xaa is C or S
  MOD_RES (17)..(18)..(19)..(20)..(21): Xaa is A or G
  MOD_RES (22)..(23)..(24)..(25): Xaa is A or G or is absent
SXXVPARLSNITIQIMXXXXXXXXXIGEMSDMVVE

SEQ ID NO: 72168 - protein, 41 aa, Artificial Sequence
  GFR-binding peptide
  MOD_RES (5)..(6)..(39)..(41): Xaa is C or S
  MOD_RES (20)..(21)..(22)..(23)..(24): Xaa is A or G
  MOD_RES (25)..(26)..(27)..(28): Xaa is A or G or is absent
SAAPXXVPQALSNITIQIMXXXXXXXXXLGEMSMIVRSXKX

SEQ ID NO: 72169 - protein, 36 aa, Artificial Sequence; identical to SEQ ID NO: 18822
  GFR-binding peptide
  MOD_RES (34)..(36): Xaa is C or S
  MOD_RES (14)..(15)..(16)..(17)..(18): Xaa is A or G
  MOD_RES (19)..(20)..(21)..(22): Xaa is A or G or is absent

SEQ ID NO: 72170 - protein, 35 aa, Artificial Sequence
  GFR-binding peptide
  MOD_RES (32)..(34): Xaa is C or S
VPARLSNITIQIMDAANNVVIGEMSDMVVEAXGXR

SEQ ID NO: 72171 - protein, 42 aa, Artificial Sequence
  GFR-binding peptide
  MOD_RES (6)..(7)..(41): Xaa is C or S
  MOD_RES (21)..(22)..(23)..(24)..(25): Xaa is A or G
  MOD_RES (26)..(27)..(28)..(29): Xaa is A or G or is absent
AAPASXXVPARLSNITIQIMXXXXXXXXXIGEMSDMVVEAXG

SEQ ID NO: 72172 - protein, 36 aa, Artificial Sequence
  GFR-binding peptide
  MOD_RES (3)..(4): Xaa is C or S
  MOD_RES (18)..(19)..(20)..(21)..(22): Xaa is A or G
  MOD_RES (23)..(24)..(25)..(26): Xaa is A or G or is absent
SPXXVSQDLSNITIQIMXXXXXXXXXLGEMSMIVKS

SEQ ID NO: 72173 - protein, 36 aa, Artificial Sequence; identical to SEQ ID NO: 53979
  GFR-binding peptide
  MOD_RES (33)..(35): Xaa is C or S
  MOD_RES (14)..(15)..(16)..(17)..(18): Xaa is A or G
  MOD_RES (19)..(20)..(21)..(22): Xaa is A or G or is absent

SEQ ID NO: 72174 - protein, 41 aa, Artificial Sequence
  GFR-binding peptide
  MOD_RES (6)..(7)..(39)..(41): Xaa is C or S
AAPASXXVPARLSNITIQIMDAANNVVIGEMSDMVVEAXGX

SEQ ID NO: 72175 - protein, 39 aa, Artificial Sequence; identical to SEQ ID NO: 18826
  GFR-binding peptide
  MOD_RES (2)..(36)..(38): Xaa is C or S
  MOD_RES (16)..(17)..(18)..(19)..(20): Xaa is A or G
  MOD_RES (21)..(22)..(23)..(24): Xaa is A or G or is absent

SEQ ID NO: 72176 - protein, 37 aa, Artificial Sequence
  GFR-binding peptide
  MOD_RES (1)..(34)..(36): Xaa is C or S
  MOD_RES (15)..(16)..(17)..(18)..(19): Xaa is A or G
  MOD_RES (20)..(21)..(22)..(23): Xaa is A or G or is absent
XVSQDLSNITIQIMXXXXXXXXXLGEMSMIVKSXKXS

SEQ ID NO: 72177 - protein, 34 aa, Artificial Sequence; identical to SEQ ID NO: 18827
  GFR-binding peptide

SEQ ID NO: 72178 - protein, 40 aa, Artificial Sequence
  GFR-binding peptide
  MOD_RES (5)..(6)..(39): Xaa is C or S
  MOD_RES (20)..(21)..(22)..(23)..(24): Xaa is A or G
  MOD_RES (25)..(26)..(27)..(28): Xaa is A or G or is absent
VPSTXXAPVKTSNITMQIMXXXXXXXXXIGEMSMIVEEXG

SEQ ID NO: 72179 - protein, 39 aa, Artificial Sequence
  GFR-binding peptide
  MOD_RES (6)..(7)..(39): Xaa is C or S
STPPTXXVPTRLSNITIQIMDSANNVVIGEMSDMVVESX

SEQ ID NO: 72180 - protein, 36 aa, Artificial Sequence
  GFR-binding peptide
  MOD_RES (1)..(2)..(36): Xaa is C or S
  MOD_RES (16)..(17)..(18)..(19)..(20): Xaa is A or G
  MOD_RES (21)..(22)..(23)..(24): Xaa is A or G or is absent
XXVPTRLSNITIQIMXXXXXXXXXLGEMSDMVVESX

SEQ ID NO: 72181 - protein, 40 aa, Artificial Sequence; identical to SEQ ID NO: 18830
  GFR-binding peptide
  MOD_RES (4)..(4): Xaa is C or S
  MOD_RES (20)..(21)..(22)..(23)..(24): Xaa is A or G
  MOD_RES (25)..(26)..(27)..(28): Xaa is A or G or is absent

SEQ ID NO: 72182 - protein, 36 aa, Artificial Sequence
  GFR-binding peptide
  MOD_RES (3)..(4)..(36): Xaa is C or S
GPXXTPTKMSNITMQIMNDKQQIIIGEMSGMVVDRX

SEQ ID NO: 72183 - protein, 37 aa, Artificial Sequence
  GFR-binding peptide
  MOD_RES (5)..(6)..(37): Xaa is C or S
VPSTXXAPVKTSNITMQIMDNGRVLLIGEMSMIVEEX

SEQ ID NO: 72184 - protein, 40 aa, Artificial Sequence; identical to SEQ ID NO: 18833
  GFR-binding peptide
  MOD_RES (7)..(7): Xaa is C or S

SEQ ID NO: 72185 - protein, 35 aa, Artificial Sequence
  GFR-binding peptide
  MOD_RES (34)..(34): Xaa is C or S
  MOD_RES (14)..(15)..(16)..(17)..(18): Xaa is A or G
  MOD_RES (19)..(20)..(21)..(22): Xaa is A or G or is absent
APTKLSNITVQIMXXXXXXXXXLGEMSNMVVRSXG

SEQ ID NO: 72186 - protein, 36 aa, Artificial Sequence; identical to SEQ ID NO: 18834
  GFR-binding peptide
  MOD_RES (36)..(36): Xaa is C or S
  MOD_RES (15)..(16)..(17)..(18)..(19): Xaa is A or G
  MOD_RES (20)..(21)..(22)..(23): Xaa is A or G or is absent

SEQ ID NO: 72187 - protein, 35 aa, Artificial Sequence; identical to SEQ ID NO: 18835
  GFR-binding peptide
  MOD_RES (1)..(35): Xaa is C or S
  MOD_RES (15)..(16)..(17)..(18)..(19): Xaa is A or G
  MOD_RES (20)..(21)..(22)..(23): Xaa is A or G or is absent

SEQ ID NO: 72188 - protein, 41 aa, Artificial Sequence
  GFR-binding peptide
  MOD_RES (5)..(6)..(39)..(41): Xaa is C or S
  MOD_RES (20)..(21)..(22)..(23)..(24): Xaa is A or G
  MOD_RES (25)..(26)..(27)..(28): Xaa is A or G or is absent
SASPXXVSQDLSNITIQIMXXXXXXXXXLGEMSMIVKSXKX

SEQ ID NO: 72189 - protein, 35 aa, Artificial Sequence
  GFR-binding peptide
  MOD_RES (3)..(4): Xaa is C or S
PTXXVPTRLSNITIQIMDSANNVVLGEMSDMVVES

SEQ ID NO: 72190 - protein, 37 aa, Artificial Sequence
  GFR-binding peptide
  MOD_RES (6)..(7): Xaa is C or S
HVPKPXXAPTKLSNITVQIMDDSSNVILGEMSNMVVR

SEQ ID NO: 72191 - protein, 39 aa, Artificial Sequence
  GFR-binding peptide
  MOD_RES (1)..(2)..(36)..(38): Xaa is C or S
  MOD_RES (16)..(17)..(18)..(19)..(20): Xaa is A or G
  MOD_RES (21)..(22)..(23)..(24): Xaa is A or G or is absent
XXAPTKLSNITVQIMXXXXXXXXXLGEMSNMVVRSXGXH

SEQ ID NO: 72192 - protein, 34 aa, Artificial Sequence; identical to SEQ ID NO: 51608
  GFR-binding peptide
  MOD_RES (32)..(34): Xaa is C or S

SEQ ID NO: 72193 - protein, 37 aa, Artificial Sequence; identical to SEQ ID NO: 18842
  GFR-binding peptide
  MOD_RES (4)..(4): Xaa is C or S

SEQ ID NO: 72194 - protein, 39 aa, Artificial Sequence; identical to SEQ ID NO: 54012
  GFR-binding peptide
  MOD_RES (6)..(7): Xaa is C or S
  MOD_RES (21)..(22)..(23)..(24)..(25): Xaa is A or G
  MOD_RES (26)..(27)..(28)..(29): Xaa is A or G or is absent

SEQ ID NO: 72195 - protein, 35 aa, Artificial Sequence
  GFR-binding peptide
  MOD_RES (33)..(35): Xaa is C or S
  MOD_RES (14)..(15)..(16)..(17)..(18): Xaa is A or G
  MOD_RES (19)..(20)..(21)..(22): Xaa is A or G or is absent
VSQDLSNITIQIMXXXXXXXXXLGEMSMIVKSXKX

SEQ ID NO: 72196 - protein, 34 aa, Artificial Sequence
  GFR-binding peptide
  MOD_RES (1)..(1): Xaa is C or S
  MOD_RES (15)..(16)..(17)..(18)..(19): Xaa is A or G
  MOD_RES (20)..(21)..(22)..(23): Xaa is A or G or is absent
XTPTKMSNITMQIMXXXXXXXXXIGEMSGMVVDR

SEQ ID NO: 72197 - protein, 34 aa, Artificial Sequence; identical to SEQ ID NO: 18843
  GFR-binding peptide
  MOD_RES (1)..(1): Xaa is C or S
  MOD_RES (15)..(16)..(17)..(18)..(19): Xaa is A or G
  MOD_RES (20)..(21)..(22)..(23): Xaa is A or G or is absent

SEQ ID NO: 72198 - protein, 33 aa, Artificial Sequence
  GFR-binding peptide
  MOD_RES (1)..(1): Xaa is C or S
  MOD_RES (15)..(16)..(17)..(18)..(19): Xaa is A or G
  MOD_RES (20)..(21)..(22)..(23): Xaa is A or G or is absent
XVSQDLSNITIQIMXXXXXXXXXLGEMSMIVKS

SEQ ID NO: 72199 - protein, 35 aa, Artificial Sequence; identical to SEQ ID NO: 18846
  GFR-binding peptide
  MOD_RES (35)..(35): Xaa is C or S

SEQ ID NO: 72200 - protein, 43 aa, Artificial Sequence; identical to SEQ ID NO: 18847
  GFR-binding peptide
  MOD_RES (7)..(41)..(43): Xaa is C or S
  MOD_RES (21)..(22)..(23)..(24)..(25): Xaa is A or G
  MOD_RES (26)..(27)..(28)..(29): Xaa is A or G or is absent

SEQ ID NO: 72201 - protein, 37 aa, Artificial Sequence
  GFR-binding peptide
  MOD_RES (3)..(4)..(37): Xaa is C or S
  MOD_RES (18)..(19)..(20)..(21)..(22): Xaa is A or G
  MOD_RES (23)..(24)..(25)..(26): Xaa is A or G or is absent
SPXXVSQDLSNITIQIMXXXXXXXXXLGEMSMIVKSX

SEQ ID NO: 72202 - protein, 39 aa, Artificial Sequence
  GFR-binding peptide
  MOD_RES (3)..(4)..(36)..(38): Xaa is C or S
GPXXTPTKMSNITMQIMNDKQQIIIGEMSGMVVDRXGXS

SEQ ID NO: 72203 - protein, 40 aa, Artificial Sequence
  GFR-binding peptide
  MOD_RES (5)..(6)..(39): Xaa is C or S
  MOD_RES (20)..(21)..(22)..(23)..(24): Xaa is A or G
  MOD_RES (25)..(26)..(27)..(28): Xaa is A or G or is absent
SASPXXVPQDLSNITIQIMXXXXXXXXXLGEMSMVVKSXK

SEQ ID NO: 72204 - protein, 42 aa, Artificial Sequence
  GFR-binding peptide
  MOD_RES (5)..(6)..(40)..(42): Xaa is C or S
  MOD_RES (20)..(21)..(22)..(23)..(24): Xaa is A or G
  MOD_RES (25)..(26)..(27)..(28): Xaa is A or G or is absent
SAGPXXTPTKMSNITMQIMXXXXXXXXXLGEMSGMVVDRXGX

SEQ ID NO: 72205 - protein, 38 aa, Artificial Sequence
  GFR-binding peptide
  MOD_RES (5)..(6): Xaa is C or S
  MOD_RES (20)..(21)..(22)..(23)..(24): Xaa is A or G
  MOD_RES (25)..(26)..(27)..(28): Xaa is A or G or is absent
SAAPXXVPQALSNITIQIMXXXXXXXXXLGEMSMIVRS

SEQ ID NO: 72206 - protein, 40 aa, Artificial Sequence
  GFR-binding peptide
  MOD_RES (6)..(7)..(39): Xaa is C or S
AAPASXXVPARLSNITIQIMDAANNVVLGEMSDMVVEAXG

SEQ ID NO: 72207 - protein, 36 aa, Artificial Sequence; identical to SEQ ID NO: 51625
  GFR-binding peptide
  MOD_RES (3)..(4): Xaa is C or S
  MOD_RES (18)..(19)..(20)..(21)..(22): Xaa is A or G
  MOD_RES (23)..(24)..(25)..(26): Xaa is A or G or is absent

SEQ ID NO: 72208 - protein, 34 aa, Artificial Sequence; identical to SEQ ID NO: 18850
  GFR-binding peptide
  MOD_RES (2)..(2): Xaa is C or S
  MOD_RES (16)..(17)..(18)..(19)..(20): Xaa is A or G
  MOD_RES (21)..(22)..(23)..(24): Xaa is A or G or is absent

SEQ ID NO: 72209 - protein, 39 aa, Artificial Sequence
  GFR-binding peptide
  MOD_RES (6)..(7)..(39): Xaa is C or S
AAPASXXVPARLSNITIQIMDAANNVVLGEMSDMVVEAX

SEQ ID NO: 72210 - protein, 38 aa, Artificial Sequence
  GFR-binding peptide
  MOD_RES (3)..(4)..(38): Xaa is C or S
  MOD_RES (18)..(19)..(20)..(21)..(22): Xaa is A or G
  MOD_RES (23)..(24)..(25)..(26): Xaa is A or G or is absent
ASXXVPARLSNITIQIMXXXXXXXXXLGEMSDMVVEAX

SEQ ID NO: 72211 - protein, 38 aa, Artificial Sequence
  GFR-binding peptide
  MOD_RES (4)..(5)..(36)..(38): Xaa is C or S
ASPXXVSQDLSNITIQIMIGKTPKILGEMSMIVKSXKX

SEQ ID NO: 72212 - protein, 36 aa, Artificial Sequence
  GFR-binding peptide
  MOD_RES (1)..(2)..(34)..(36): Xaa is C or S
XXVPARLSNITIQIMDAANNVVIGEMSDMVVEAXGX

SEQ ID NO: 72213 - protein, 34 aa, Artificial Sequence; identical to SEQ ID NO: 18852
  GFR-binding peptide

SEQ ID NO: 72214 - protein, 34 aa, Artificial Sequence; identical to SEQ ID NO: 51631
  GFR-binding peptide
  MOD_RES (1)..(34): Xaa is C or S
  MOD_RES (15)..(16)..(17)..(18)..(19): Xaa is A or G
  MOD_RES (20)..(21)..(22)..(23): Xaa is A or G or is absent

SEQ ID NO: 72215 - protein, 43 aa, Artificial Sequence; identical to SEQ ID NO: 18853
  GFR-binding peptide
  MOD_RES (5)..(42): Xaa is C or S

SEQ ID NO: 72216 - protein, 36 aa, Artificial Sequence
  GFR-binding peptide
  MOD_RES (3)..(4)..(36): Xaa is C or S
ASXXVPARLSNITIQIMDAANNVVLGEMSDMVVEAX

SEQ ID NO: 72217 - protein, 35 aa, Artificial Sequence
  GFR-binding peptide
  MOD_RES (4)..(5): Xaa is C or S
ASPXXVSQDLSNITIQIMIGKTPKILGEMSMIVKS

SEQ ID NO: 72218 - protein, 38 aa, Artificial Sequence; identical to SEQ ID NO: 54029
  GFR-binding peptide
  MOD_RES (5)..(6)..(37): Xaa is C or S

SEQ ID NO: 72219 - protein, 38 aa, Artificial Sequence; identical to SEQ ID NO: 18855
  GFR-binding peptide
  MOD_RES (2)..(2): Xaa is C or S
  MOD_RES (18)..(19)..(20)..(21)..(22): Xaa is A or G
  MOD_RES (23)..(24)..(25)..(26): Xaa is A or G or is absent

SEQ ID NO: 72220 - protein, 36 aa, Artificial Sequence; identical to SEQ ID NO: 54031
  GFR-binding peptide
  MOD_RES (1)..(33)..(35): Xaa is C or S

SEQ ID NO: 72221 - protein, 37 aa, Artificial Sequence
  GFR-binding peptide
  MOD_RES (2)..(3)..(35)..(37): Xaa is C or S
SXXVPARLSNITIQIMDAANNVVLGEMSDMVVEAXGX

SEQ ID NO: 72222 - protein, 38 aa, Artificial Sequence; identical to SEQ ID NO: 18859
  GFR-binding peptide
  MOD_RES (2)..(2): Xaa is C or S

SEQ ID NO: 72223 - protein, 32 aa, Artificial Sequence; identical to SEQ ID NO: 18860
  GFR-binding peptide
  MOD_RES (14)..(15)..(16)..(17)..(18): Xaa is A or G
  MOD_RES (19)..(20)..(21)..(22): Xaa is A or G or is absent

SEQ ID NO: 72224 - protein, 38 aa, Artificial Sequence; identical to SEQ ID NO: 51642
  GFR-binding peptide
  MOD_RES (3)..(4)..(37): Xaa is C or S
  MOD_RES (18)..(19)..(20)..(21)..(22): Xaa is A or G
  MOD_RES (23)..(24)..(25)..(26): Xaa is A or G or is absent

SEQ ID NO: 72225 - protein, 37 aa, Artificial Sequence; identical to SEQ ID NO: 18861
  GFR-binding peptide
  MOD_RES (2)..(2): Xaa is C or S

SEQ ID NO: 72226 - protein, 35 aa, Artificial Sequence; identical to SEQ ID NO: 18863
  GFR-binding peptide
  MOD_RES (16)..(17)..(18)..(19)..(20): Xaa is A or G
  MOD_RES (21)..(22)..(23)..(24): Xaa is A or G or is absent

SEQ ID NO: 72227 - protein, 42 aa, Artificial Sequence
  GFR-binding peptide
  MOD_RES (4)..(5)..(39)..(41): Xaa is C or S
  MOD_RES (19)..(20)..(21)..(22)..(23): Xaa is A or G
  MOD_RES (24)..(25)..(26)..(27): Xaa is A or G or is absent
PPTXXVPTRLSNITIQIMXXXXXXXXXLGEMSDMVVESXGXR

SEQ ID NO: 72228 - protein, 38 aa, Artificial Sequence; identical to SEQ ID NO: 18864
  GFR-binding peptide
  MOD_RES (37)..(37): Xaa is C or S
  MOD_RES (16)..(17)..(18)..(19)..(20): Xaa is A or G
  MOD_RES (21)..(22)..(23)..(24): Xaa is A or G or is absent

SEQ ID NO: 72229 - protein, 35 aa, Artificial Sequence; identical to SEQ ID NO: 54045
  GFR-binding peptide
  MOD_RES (33)..(35): Xaa is C or S
  MOD_RES (14)..(15)..(16)..(17)..(18): Xaa is A or G
  MOD_RES (19)..(20)..(21)..(22): Xaa is A or G or is absent

SEQ ID NO: 72230 - protein, 35 aa, Artificial Sequence
  GFR-binding peptide
  MOD_RES (4)..(5): Xaa is C or S
PASXXVPARLSNITIQIMDAANNVVIGEMSDMVVE

SEQ ID NO: 72231 - protein, 38 aa, Artificial Sequence
  GFR-binding peptide
  MOD_RES (2)..(3)..(35)..(37): Xaa is C or S
PXXAPTKLSNITVQIMDDSSNVILGEMSNMVVRSXGXH

SEQ ID NO: 72232 - protein, 38 aa, Artificial Sequence
  GFR-binding peptide
  MOD_RES (6)..(7)..(38): Xaa is C or S
ASASPXXVPQDLSNITIQIMVGRTPKVLGEMSMVVKSX

SEQ ID NO: 72233 - protein, 38 aa, Artificial Sequence; identical to SEQ ID NO: 18866
  GFR-binding peptide
  MOD_RES (1)..(38): Xaa is C or S

SEQ ID NO: 72234 - protein, 33 aa, Artificial Sequence; identical to SEQ ID NO: 18868
  GFR-binding peptide

SEQ ID NO: 72235 - protein, 36 aa, Artificial Sequence
  GFR-binding peptide
  MOD_RES (3)..(4): Xaa is C or S
  MOD_RES (18)..(19)..(20)..(21)..(22): Xaa is A or G
  MOD_RES (23)..(24)..(25)..(26): Xaa is A or G or is absent
PTXXVPTRLSNITIQIMXXXXXXXXXLGEMSDMVVE

SEQ ID NO: 72236 - protein, 33 aa, Artificial Sequence; identical to SEQ ID NO: 18869
  GFR-binding peptide
  MOD_RES (1)..(1): Xaa is C or S
  MOD_RES (15)..(16)..(17)..(18)..(19): Xaa is A or G
  MOD_RES (20)..(21)..(22)..(23): Xaa is A or G or is absent

SEQ ID NO: 72237 - protein, 44 aa, Artificial Sequence
  GFR-binding peptide
  MOD_RES (6)..(7)..(41)..(43): Xaa is C or S
  MOD_RES (21)..(22)..(23)..(24)..(25): Xaa is A or G
  MOD_RES (26)..(27)..(28)..(29): Xaa is A or G or is absent
HVPKPXXAPTKLSNITVQIMXXXXXXXXXIGEMSNMVVRSXGXH

SEQ ID NO: 72238 - protein, 36 aa, Artificial Sequence; identical to SEQ ID NO: 18872
  GFR-binding peptide
  MOD_RES (1)..(35): Xaa is C or S
  MOD_RES (15)..(16)..(17)..(18)..(19): Xaa is A or G
  MOD_RES (20)..(21)..(22)..(23): Xaa is A or G or is absent

SEQ ID NO: 72239 - protein, 40 aa, Artificial Sequence
  GFR-binding peptide
  MOD_RES (4)..(5)..(39): Xaa is C or S
  MOD_RES (19)..(20)..(21)..(22)..(23): Xaa is A or G
  MOD_RES (24)..(25)..(26)..(27): Xaa is A or G or is absent
PASXXVPARLSNITIQIMXXXXXXXXXIGEMSDMVVEAXG

SEQ ID NO: 72240 - protein, 36 aa, Artificial Sequence; identical to SEQ ID NO: 18873
  GFR-binding peptide
  MOD_RES (16)..(17)..(18)..(19)..(20): Xaa is A or G
  MOD_RES (21)..(22)..(23)..(24): Xaa is A or G or is absent

SEQ ID NO: 72241 - protein, 41 aa, Artificial Sequence
  GFR-binding peptide
  MOD_RES (6)..(7)..(39)..(41): Xaa is C or S
STPPTXXVPTRLSNITIQIMDSANNVVIGEMSDMVVESXGX

SEQ ID NO: 72242 - protein, 42 aa, Artificial Sequence; identical to SEQ ID NO: 18875
  GFR-binding peptide
  MOD_RES (3)..(40)..(42): Xaa is C or S

SEQ ID NO: 72243 - protein, 40 aa, Artificial Sequence; identical to SEQ ID NO: 18876
  GFR-binding peptide
  MOD_RES (37)..(39): Xaa is C or S

SEQ ID NO: 72244 - protein, 34 aa, Artificial Sequence
  GFR-binding peptide
  MOD_RES (1)..(32)..(34): Xaa is C or S
XVSQDLSNITIQIMIGKTPKILGEMSMIVKSXKX

SEQ ID NO: 72245 - protein, 36 aa, Artificial Sequence
  GFR-binding peptide
  MOD_RES (3)..(4): Xaa is C or S
  MOD_RES (18)..(19)..(20)..(21)..(22): Xaa is A or G
  MOD_RES (23)..(24)..(25)..(26): Xaa is A or G or is absent
STXXAPVKTSNITMQIMXXXXXXXXXIGEMSMIVEE

SEQ ID NO: 72246 - protein, 39 aa, Artificial Sequence; identical to SEQ ID NO: 18879
  GFR-binding peptide
  MOD_RES (3)..(3): Xaa is C or S
  MOD_RES (19)..(20)..(21)..(22)..(23): Xaa is A or G
  MOD_RES (24)..(25)..(26)..(27): Xaa is A or G or is absent

SEQ ID NO: 72247 - protein, 34 aa, Artificial Sequence; identical to SEQ ID NO: 51669
  GFR-binding peptide
  MOD_RES (1)..(32)..(34): Xaa is C or S

SEQ ID NO: 72248 - protein, 33 aa, Artificial Sequence; identical to SEQ ID NO: 51671
  GFR-binding peptide
  MOD_RES (1)..(2)..(33): Xaa is C or S

SEQ ID NO: 72249 - protein, 34 aa, Artificial Sequence
  GFR-binding peptide
  MOD_RES (31)..(33): Xaa is C or S
APVKTSNITMQIMDNGRVLLLGEMSMIVEEXGXL

SEQ ID NO: 72250 - protein, 42 aa, Artificial Sequence
  GFR-binding peptide
  MOD_RES (5)..(6)..(40)..(42): Xaa is C or S
  MOD_RES (20)..(21)..(22)..(23)..(24): Xaa is A or G
  MOD_RES (25)..(26)..(27)..(28): Xaa is A or G or is absent
TPPTXXVPTRLSNITIQIMXXXXXXXXXLGEMSDMVVESXGX

SEQ ID NO: 72251 - protein, 37 aa, Artificial Sequence
  GFR-binding peptide
  MOD_RES (5)..(6): Xaa is C or S
SAGPXXTPTKMSNITMQIMNDKQQIILGEMSGMVVDR

SEQ ID NO: 72252 - protein, 38 aa, Artificial Sequence
  GFR-binding peptide
  MOD_RES (2)..(3)..(37): Xaa is C or S
  MOD_RES (17)..(18)..(19)..(20)..(21): Xaa is A or G
  MOD_RES (22)..(23)..(24)..(25): Xaa is A or G or is absent
SXXVPARLSNITIQIMXXXXXXXXXLGEMSDMVVEAXG

SEQ ID NO: 72253 - protein, 34 aa, Artificial Sequence; identical to SEQ ID NO: 18883
  GFR-binding peptide
  MOD_RES (2)..(2): Xaa is C or S
  MOD_RES (16)..(17)..(18)..(19)..(20): Xaa is A or G
  MOD_RES (21)..(22)..(23)..(24): Xaa is A or G or is absent

SEQ ID NO: 72254 - protein, 36 aa, Artificial Sequence; identical to SEQ ID NO: 51676
  GFR-binding peptide
  MOD_RES (3)..(4): Xaa is C or S
  MOD_RES (18)..(19)..(20)..(21)..(22): Xaa is A or G
  MOD_RES (23)..(24)..(25)..(26): Xaa is A or G or is absent

SEQ ID NO: 72255 - protein, 42 aa, Artificial Sequence; identical to SEQ ID NO: 18885
  GFR-binding peptide
  MOD_RES (3)..(40)..(42): Xaa is C or S
  MOD_RES (19)..(20)..(21)..(22)..(23): Xaa is A or G
  MOD_RES (24)..(25)..(26)..(27): Xaa is A or G or is absent

SEQ ID NO: 72256 - protein, 38 aa, Artificial Sequence
  GFR-binding peptide
  MOD_RES (3)..(4)..(38): Xaa is C or S
  MOD_RES (18)..(19)..(20)..(21)..(22): Xaa is A or G
  MOD_RES (23)..(24)..(25)..(26): Xaa is A or G or is absent
KPXXAPTKLSNITVQIMXXXXXXXXXLGEMSNMVVRSX

SEQ ID NO: 72257 - protein, 39 aa, Artificial Sequence; identical to SEQ ID NO: 18886
  GFR-binding peptide
  MOD_RES (3)..(37)..(39): Xaa is C or S
  MOD_RES (17)..(18)..(19)..(20)..(21): Xaa is A or G
  MOD_RES (22)..(23)..(24)..(25): Xaa is A or G or is absent

SEQ ID NO: 72258 - protein, 32 aa, Artificial Sequence
  GFR-binding peptide
  MOD_RES (1)..(2): Xaa is C or S
XXAPTKLSNITVQIMDDSSNVILGEMSNMVVR

SEQ ID NO: 72259 - protein, 36 aa, Artificial Sequence
  GFR-binding peptide
  MOD_RES (2)..(3): Xaa is C or S
  MOD_RES (17)..(18)..(19)..(20)..(21): Xaa is A or G
  MOD_RES (22)..(23)..(24)..(25): Xaa is A or G or is absent
TXXVPTRLSNITIQIMXXXXXXXXXIGEMSDMVVES

SEQ ID NO: 72260 - protein, 37 aa, Artificial Sequence
  GFR-binding peptide
  MOD_RES (2)..(3)..(35)..(37): Xaa is C or S
PXXAPTKLSNITVQIMDDSSNVILGEMSNMVVRSXGX

SEQ ID NO: 72261 - protein, 35 aa, Artificial Sequence; identical to SEQ ID NO: 18888
  GFR-binding peptide
  MOD_RES (3)..(3): Xaa is C or S

SEQ ID NO: 72262 - protein, 35 aa, Artificial Sequence; identical to SEQ ID NO: 18889
  GFR-binding peptide
  MOD_RES (3)..(3): Xaa is C or S
  MOD_RES (17)..(18)..(19)..(20)..(21): Xaa is A or G
  MOD_RES (22)..(23)..(24)..(25): Xaa is A or G or is absent

SEQ ID NO: 72263 - protein, 37 aa, Artificial Sequence
  GFR-binding peptide
  MOD_RES (3)..(4)..(37): Xaa is C or S
  MOD_RES (18)..(19)..(20)..(21)..(22): Xaa is A or G
  MOD_RES (23)..(24)..(25)..(26): Xaa is A or G or is absent
STXXAPVKTSNITMQIMXXXXXXXXXIGEMSMIVEEX

SEQ ID NO: 72264 - protein, 37 aa, Artificial Sequence
  GFR-binding peptide
  MOD_RES (5)..(6)..(37): Xaa is C or S
SASPXXVSQDLSNITIQIMIGKTPKILGEMSMIVKSX

SEQ ID NO: 72265 - protein, 37 aa, Artificial Sequence; identical to SEQ ID NO: 18890
  GFR-binding peptide
  MOD_RES (1)..(35)..(37): Xaa is C or S

SEQ ID NO: 72266 - protein, 37 aa, Artificial Sequence; identical to SEQ ID NO: 51680
  GFR-binding peptide
  MOD_RES (4)..(5)..(36): Xaa is C or S

SEQ ID NO: 72267 - protein, 34 aa, Artificial Sequence; identical to SEQ ID NO: 18893
  GFR-binding peptide

SEQ ID NO: 72268 - protein, 37 aa, Artificial Sequence; identical to SEQ ID NO: 18894
  GFR-binding peptide
  MOD_RES (3)..(37): Xaa is C or S
  MOD_RES (17)..(18)..(19)..(20)..(21): Xaa is A or G
  MOD_RES (22)..(23)..(24)..(25): Xaa is A or G or is absent

SEQ ID NO: 72269 - protein, 39 aa, Artificial Sequence
  GFR-binding peptide
  MOD_RES (4)..(5)..(39): Xaa is C or S
  MOD_RES (19)..(20)..(21)..(22)..(23): Xaa is A or G
  MOD_RES (24)..(25)..(26)..(27): Xaa is A or G or is absent
AGPXXTPTKMSNITMQIMXXXXXXXXXLGEMSGMVVDRX

SEQ ID NO: 72270 - protein, 41 aa, Artificial Sequence
  GFR-binding peptide
  MOD_RES (5)..(6)..(38)..(40): Xaa is C or S
APASXXVPARLSNITIQIMDAANNVVIGEMSDMVVEAXGXR

SEQ ID NO: 72271 - protein, 37 aa, Artificial Sequence
  GFR-binding peptide
  MOD_RES (2)..(3)..(37): Xaa is C or S
  MOD_RES (17)..(18)..(19)..(20)..(21): Xaa is A or G
  MOD_RES (22)..(23)..(24)..(25): Xaa is A or G or is absent
SXXVPARLSNITIQIMXXXXXXXXXIGEMSDMVVEAX

SEQ ID NO: 72272 - protein, 36 aa, Artificial Sequence
  GFR-binding peptide
  MOD_RES (34)..(36): Xaa is C or S
  MOD_RES (14)..(15)..(16)..(17)..(18): Xaa is A or G
  MOD_RES (19)..(20)..(21)..(22): Xaa is A or G or is absent
VPTRLSNITIQIMXXXXXXXXXLGEMSDMVVESXGX

SEQ ID NO: 72273 - protein, 39 aa, Artificial Sequence
  GFR-binding peptide
  MOD_RES (4)..(5)..(37)..(39): Xaa is C or S
PASXXVPARLSNITIQIMDAANNVVIGEMSDMVVEAXGX

SEQ ID NO: 72274 - protein, 39 aa, Artificial Sequence; identical to SEQ ID NO: 18897
  GFR-binding peptide
  MOD_RES (1)..(38): Xaa is C or S
  MOD_RES (17)..(18)..(19)..(20)..(21): Xaa is A or G
  MOD_RES (22)..(23)..(24)..(25): Xaa is A or G or is absent

SEQ ID NO: 72275 - protein, 44 aa, Artificial Sequence
  GFR-binding peptide
  MOD_RES (6)..(7)..(41)..(43): Xaa is C or S
  MOD_RES (21)..(22)..(23)..(24)..(25): Xaa is A or G
  MOD_RES (26)..(27)..(28)..(29): Xaa is A or G or is absent
GSAGPXXTPTKMSNITMQIMXXXXXXXXXIGEMSGMVVDRXGXS

SEQ ID NO: 72276 - protein, 39 aa, Artificial Sequence
  GFR-binding peptide
  MOD_RES (3)..(4)..(37)..(39): Xaa is C or S
  MOD_RES (18)..(19)..(20)..(21)..(22): Xaa is A or G
  MOD_RES (23)..(24)..(25)..(26): Xaa is A or G or is absent
APXXVPQALSNITIQIMXXXXXXXXXLGEMSMIVRSXKX

SEQ ID NO: 72277 - protein, 40 aa, Artificial Sequence; identical to SEQ ID NO: 18898
  GFR-binding peptide
  MOD_RES (4)..(4): Xaa is C or S

SEQ ID NO: 72278 - protein, 37 aa, Artificial Sequence; identical to SEQ ID NO: 18899
  GFR-binding peptide
  MOD_RES (35)..(37): Xaa is C or S
  MOD_RES (14)..(15)..(16)..(17)..(18): Xaa is A or G
  MOD_RES (19)..(20)..(21)..(22): Xaa is A or G or is absent

SEQ ID NO: 72279 - protein, 35 aa, Artificial Sequence; identical to SEQ ID NO: 18900
  GFR-binding peptide
  MOD_RES (34)..(34): Xaa is C or S

SEQ ID NO: 72280 - protein, 34 aa, Artificial Sequence
  GFR-binding peptide
  MOD_RES (1)..(2)..(34): Xaa is C or S
XXVPTRLSNITIQIMDSANNVVIGEMSDMVVESX

SEQ ID NO: 72281 - protein, 35 aa, Artificial Sequence
  GFR-binding peptide
  MOD_RES (1)..(2)..(35): Xaa is C or S
  MOD_RES (16)..(17)..(18)..(19)..(20): Xaa is A or G
  MOD_RES (21)..(22)..(23)..(24): Xaa is A or G or is absent
XXVPQALSNITIQIMXXXXXXXXXLGEMSMIVRSX

SEQ ID NO: 72282 - protein, 40 aa, Artificial Sequence; identical to SEQ ID NO: 18901
  GFR-binding peptide
  MOD_RES (3)..(40): Xaa is C or S
  MOD_RES (19)..(20)..(21)..(22)..(23): Xaa is A or G
  MOD_RES (24)..(25)..(26)..(27): Xaa is A or G or is absent

SEQ ID NO: 72283 - protein, 40 aa, Artificial Sequence
  GFR-binding peptide
  MOD_RES (4)..(5)..(37)..(39): Xaa is C or S
PASXXVPARLSNITIQIMDAANNVVIGEMSDMVVEAXGXR

SEQ ID NO: 72284 - protein, 32 aa, Artificial Sequence
  GFR-binding peptide
  MOD_RES (1)..(1): Xaa is C or S
XVPTRLSNITIQIMDSANNVVIGEMSDMVVES

SEQ ID NO: 72285 - protein, 34 aa, Artificial Sequence; identical to SEQ ID NO: 54096
  GFR-binding peptide
  MOD_RES (31)..(33): Xaa is C or S

SEQ ID NO: 72286 - protein, 37 aa, Artificial Sequence
  GFR-binding peptide
  MOD_RES (4)..(5)..(37): Xaa is C or S
PASXXVPARLSNITIQIMDAANNVVLGEMSDMVVEAX

SEQ ID NO: 72287 - protein, 43 aa, Artificial Sequence; identical to SEQ ID NO: 18904
  GFR-binding peptide
  MOD_RES (3)..(40)..(42): Xaa is C or S
  MOD_RES (19)..(20)..(21)..(22)..(23): Xaa is A or G
  MOD_RES (24)..(25)..(26)..(27): Xaa is A or G or is absent

SEQ ID NO: 72288 - protein, 31 aa, Artificial Sequence; identical to SEQ ID NO: 51705
  GFR-binding peptide
  MOD_RES (1)..(1): Xaa is C or S

SEQ ID NO: 72289 - protein, 41 aa, Artificial Sequence; identical to SEQ ID NO: 18905
  GFR-binding peptide
  MOD_RES (5)..(39)..(41): Xaa is C or S
  MOD_RES (19)..(20)..(21)..(22)..(23): Xaa is A or G
  MOD_RES (24)..(25)..(26)..(27): Xaa is A or G or is absent

SEQ ID NO: 72290 - protein, 38 aa, Artificial Sequence
  GFR-binding peptide
  MOD_RES (1)..(2)..(36)..(38): Xaa is C or S
  MOD_RES (16)..(17)..(18)..(19)..(20): Xaa is A or G
  MOD_RES (21)..(22)..(23)..(24): Xaa is A or G or is absent
XXAPTKLSNITVQIMXXXXXXXXXLGEMSNMVVRSXGX

SEQ ID NO: 72291 - protein, 38 aa, Artificial Sequence; identical to SEQ ID NO: 18907
  GFR-binding peptide
  MOD_RES (35)..(37): Xaa is C or S

SEQ ID NO: 72292 - protein, 34 aa, Artificial Sequence
  GFR-binding peptide
  MOD_RES (33)..(33): Xaa is C or S
  MOD_RES (14)..(15)..(16)..(17)..(18): Xaa is A or G
  MOD_RES (19)..(20)..(21)..(22): Xaa is A or G or is absent
VPQDLSNITIQIMXXXXXXXXXLGEMSMVVKSXK

SEQ ID NO: 72293 - protein, 35 aa, Artificial Sequence; identical to SEQ ID NO: 18908
  GFR-binding peptide
  MOD_RES (2)..(2): Xaa is C or S
  MOD_RES (16)..(17)..(18)..(19)..(20): Xaa is A or G
  MOD_RES (21)..(22)..(23)..(24): Xaa is A or G or is absent

SEQ ID NO: 72294 - protein, 38 aa, Artificial Sequence; identical to SEQ ID NO: 18912
  GFR-binding peptide
  MOD_RES (37)..(37): Xaa is C or S
  MOD_RES (16)..(17)..(18)..(19)..(20): Xaa is A or G
  MOD_RES (21)..(22)..(23)..(24): Xaa is A or G or is absent

SEQ ID NO: 72295 - protein, 36 aa, Artificial Sequence; identical to SEQ ID NO: 18913
  GFR-binding peptide
  MOD_RES (2)..(2): Xaa is C or S
  MOD_RES (18)..(19)..(20)..(21)..(22): Xaa is A or G
  MOD_RES (23)..(24)..(25)..(26): Xaa is A or G or is absent

SEQ ID NO: 72296 - protein, 33 aa, Artificial Sequence; identical to SEQ ID NO: 18914
  GFR-binding peptide
  MOD_RES (1)..(1): Xaa is C or S

SEQ ID NO: 72297 - protein, 39 aa, Artificial Sequence
  GFR-binding peptide
  MOD_RES (1)..(2)..(36)..(38): Xaa is C or S
  MOD_RES (16)..(17)..(18)..(19)..(20): Xaa is A or G
  MOD_RES (21)..(22)..(23)..(24): Xaa is A or G or is absent
XXVPTRLSNITIQIMXXXXXXXXXLGEMSDMVVESXGXR

SEQ ID NO: 72298 - protein, 38 aa, Artificial Sequence
  GFR-binding peptide
  MOD_RES (1)..(35)..(37): Xaa is C or S
  MOD_RES (15)..(16)..(17)..(18)..(19): Xaa is A or G
  MOD_RES (20)..(21)..(22)..(23): Xaa is A or G or is absent
XTPTKMSNITMQIMXXXXXXXXXIGEMSGMVVDRXGXS

SEQ ID NO: 72299 - protein, 37 aa, Artificial Sequence
  GFR-binding peptide
  MOD_RES (2)..(3)..(35)..(37): Xaa is C or S
PXXTPTKMSNITMQIMNDKQQIILGEMSGMVVDRXGX

SEQ ID NO: 72300 - protein, 39 aa, Artificial Sequence; identical to SEQ ID NO: 18915
  GFR-binding peptide
  MOD_RES (4)..(4): Xaa is C or S

SEQ ID NO: 72301 - protein, 39 aa, Artificial Sequence; identical to SEQ ID NO: 18916
  GFR-binding peptide
  MOD_RES (2)..(39): Xaa is C or S
  MOD_RES (18)..(19)..(20)..(21)..(22): Xaa is A or G
  MOD_RES (23)..(24)..(25)..(26): Xaa is A or G or is absent

SEQ ID NO: 72302 - protein, 35 aa, Artificial Sequence
  GFR-binding peptide
  MOD_RES (1)..(2)..(34): Xaa is C or S
XXVPARLSNITIQIMDAANNVVIGEMSDMVVEAXG

SEQ ID NO: 72303 - protein, 38 aa, Artificial Sequence
  GFR-binding peptide
  MOD_RES (1)..(35)..(37): Xaa is C or S
  MOD_RES (15)..(16)..(17)..(18)..(19): Xaa is A or G
  MOD_RES (20)..(21)..(22)..(23): Xaa is A or G or is absent
XVPARLSNITIQIMXXXXXXXXXLGEMSDMVVEAXGXR

SEQ ID NO: 72304 - protein, 35 aa, Artificial Sequence
  GFR-binding peptide
  MOD_RES (1)..(32)..(34): Xaa is C or S
XVPQALSNITIQIMVGRKPKVLGEMSMIVRSXKXS

SEQ ID NO: 72305 - protein, 33 aa, Artificial Sequence
  GFR-binding peptide
  MOD_RES (1)..(1): Xaa is C or S
  MOD_RES (15)..(16)..(17)..(18)..(19): Xaa is A or G
  MOD_RES (20)..(21)..(22)..(23): Xaa is A or G or is absent
XVPARLSNITIQIMXXXXXXXXXIGEMSDMVVE

SEQ ID NO: 72306 - protein, 33 aa, Artificial Sequence
  GFR-binding peptide
  MOD_RES (1)..(2): Xaa is C or S
XXVPTRLSNITIQIMDSANNVVLGEMSDMVVES

SEQ ID NO: 72307 - protein, 43 aa, Artificial Sequence; identical to SEQ ID NO: 18920
  GFR-binding peptide
  MOD_RES (7)..(41)..(43): Xaa is C or S
  MOD_RES (21)..(22)..(23)..(24)..(25): Xaa is A or G
  MOD_RES (26)..(27)..(28)..(29): Xaa is A or G or is absent

SEQ ID NO: 72308 - protein, 39 aa, Artificial Sequence; identical to SEQ ID NO: 18922
  GFR-binding peptide
  MOD_RES (2)..(39): Xaa is C or S

SEQ ID NO: 72309 - protein, 34 aa, Artificial Sequence
  GFR-binding peptide
  MOD_RES (3)..(4): Xaa is C or S
ASXXVPARLSNITIQIMDAANNVVLGEMSDMVVE

SEQ ID NO: 72310 - protein, 40 aa, Artificial Sequence
  GFR-binding peptide
  MOD_RES (6)..(7): Xaa is C or S
  MOD_RES (21)..(22)..(23)..(24)..(25): Xaa is A or G
  MOD_RES (26)..(27)..(28)..(29): Xaa is A or G or is absent
GSAGPXXTPTKMSNITMQIMXXXXXXXXXLGEMSGMVVDR

SEQ ID NO: 72311 - protein, 35 aa, Artificial Sequence; identical to SEQ ID NO: 18926
  GFR-binding peptide
  MOD_RES (34)..(34): Xaa is C or S
  MOD_RES (14)..(15)..(16)..(17)..(18): Xaa is A or G
  MOD_RES (19)..(20)..(21)..(22): Xaa is A or G or is absent

SEQ ID NO: 72312 - protein, 39 aa, Artificial Sequence
  GFR-binding peptide
  MOD_RES (4)..(5)..(36)..(38): Xaa is C or S
PSTXXAPVKTSNITMQIMDNGRVLLIGEMSMIVEEXGXL

SEQ ID NO: 72313 - protein, 37 aa, Artificial Sequence; identical to SEQ ID NO: 54127
  GFR-binding peptide
  MOD_RES (1)..(2)..(35)..(37): Xaa is C or S
  MOD_RES (16)..(17)..(18)..(19)..(20): Xaa is A or G
  MOD_RES (21)..(22)..(23)..(24): Xaa is A or G or is absent

SEQ ID NO: 72314 - protein, 42 aa, Artificial Sequence; identical to SEQ ID NO: 18930
  GFR-binding peptide
  MOD_RES (4)..(41): Xaa is C or S

SEQ ID NO: 72315 - protein, 35 aa, Artificial Sequence; identical to SEQ ID NO: 18932
  GFR-binding peptide
  MOD_RES (35)..(35): Xaa is C or S
  MOD_RES (14)..(15)..(16)..(17)..(18): Xaa is A or G
  MOD_RES (19)..(20)..(21)..(22): Xaa is A or G or is absent

SEQ ID NO: 72316 - protein, 32 aa, Artificial Sequence
  GFR-binding peptide
  MOD_RES (14)..(15)..(16)..(17)..(18): Xaa is A or G
  MOD_RES (19)..(20)..(21)..(22): Xaa is A or G or is absent
APVKTSNITMQIMXXXXXXXXXLGEMSMIVEE

SEQ ID NO: 72317 - protein, 39 aa, Artificial Sequence; identical to SEQ ID NO: 18934
  GFR-binding peptide
  MOD_RES (2)..(36)..(38): Xaa is C or S
  MOD_RES (16)..(17)..(18)..(19)..(20): Xaa is A or G
  MOD_RES (21)..(22)..(23)..(24): Xaa is A or G or is absent

SEQ ID NO: 72318 - protein, 38 aa, Artificial Sequence; identical to SEQ ID NO: 18935
  GFR-binding peptide
  MOD_RES (3)..(3): Xaa is C or S

SEQ ID NO: 72319 - protein, 38 aa, Artificial Sequence; identical to SEQ ID NO: 51741
  GFR-binding peptide
  MOD_RES (3)..(4)..(35)..(37): Xaa is C or S

SEQ ID NO: 72320 - protein, 36 aa, Artificial Sequence
  GFR-binding peptide
  MOD_RES (2)..(3)..(36): Xaa is C or S
  MOD_RES (17)..(18)..(19)..(20)..(21): Xaa is A or G
  MOD_RES (22)..(23)..(24)..(25): Xaa is A or G or is absent
TXXAPVKTSNITMQIMXXXXXXXXXLGEMSMIVEEX

SEQ ID NO: 72321 - protein, 40 aa, Artificial Sequence; identical to SEQ ID NO: 18936
  GFR-binding peptide
  MOD_RES (4)..(4): Xaa is C or S
  MOD_RES (20)..(21)..(22)..(23)..(24): Xaa is A or G
  MOD_RES (25)..(26)..(27)..(28): Xaa is A or G or is absent

SEQ ID NO: 72322 - protein, 34 aa, Artificial Sequence; identical to SEQ ID NO: 18937
  GFR-binding peptide

SEQ ID NO: 72323 - protein, 39 aa, Artificial Sequence
  GFR-binding peptide
  MOD_RES (6)..(7): Xaa is C or S
  MOD_RES (21)..(22)..(23)..(24)..(25): Xaa is A or G
  MOD_RES (26)..(27)..(28)..(29): Xaa is A or G or is absent
RVPSTXXAPVKTSNITMQIMXXXXXXXXXLGEMSMIVEE

SEQ ID NO: 72324 - protein, 33 aa, Artificial Sequence
  GFR-binding peptide
  MOD_RES (32)..(32): Xaa is C or S
VPTRLSNITIQIMDSANNVVIGEMSDMVVESXG

SEQ ID NO: 72325 - protein, 38 aa, Artificial Sequence; identical to SEQ ID NO: 18939
  GFR-binding peptide
  MOD_RES (5)..(5): Xaa is C or S
  MOD_RES (19)..(20)..(21)..(22)..(23): Xaa is A or G
  MOD_RES (24)..(25)..(26)..(27): Xaa is A or G or is absent

SEQ ID NO: 72326 - protein, 39 aa, Artificial Sequence; identical to SEQ ID NO: 54137
  GFR-binding peptide
  MOD_RES (5)..(6)..(38): Xaa is C or S

SEQ ID NO: 72327 - protein, 32 aa, Artificial Sequence; identical to SEQ ID NO: 51747
  GFR-binding peptide
  MOD_RES (31)..(31): Xaa is C or S

SEQ ID NO: 72328 - protein, 39 aa, Artificial Sequence; identical to SEQ ID NO: 18941
  GFR-binding peptide
  MOD_RES (4)..(4): Xaa is C or S
  MOD_RES (20)..(21)..(22)..(23)..(24): Xaa is A or G
  MOD_RES (25)..(26)..(27)..(28): Xaa is A or G or is absent

SEQ ID NO: 72329 - protein, 41 aa, Artificial Sequence; identical to SEQ ID NO: 18942
  GFR-binding peptide
  MOD_RES (4)..(38)..(40): Xaa is C or S
  MOD_RES (18)..(19)..(20)..(21)..(22): Xaa is A or G
  MOD_RES (23)..(24)..(25)..(26): Xaa is A or G or is absent

SEQ ID NO: 72330 - protein, 36 aa, Artificial Sequence
  GFR-binding peptide
  MOD_RES (1)..(33)..(35): Xaa is C or S
XVPARLSNITIQIMDAANNVVIGEMSDMVVEAXGXR

SEQ ID NO: 72331 - protein, 32 aa, Artificial Sequence
  GFR-binding peptide
  MOD_RES (1)..(2): Xaa is C or S
XXVPARLSNITIQIMDAANNVVLGEMSDMVVE

SEQ ID NO: 72332 - protein, 42 aa, Artificial Sequence
  GFR-binding peptide
  MOD_RES (5)..(6)..(39)..(41): Xaa is C or S
  MOD_RES (20)..(21)..(22)..(23)..(24): Xaa is A or G
  MOD_RES (25)..(26)..(27)..(28): Xaa is A or G or is absent
SASPXXVSQDLSNITIQIMXXXXXXXXXLGEMSMIVKSXKXS

SEQ ID NO: 72333 - protein, 38 aa, Artificial Sequence
  GFR-binding peptide
  MOD_RES (3)..(4)..(38): Xaa is C or S
  MOD_RES (18)..(19)..(20)..(21)..(22): Xaa is A or G
  MOD_RES (23)..(24)..(25)..(26): Xaa is A or G or is absent
PTXXVPTRLSNITIQIMXXXXXXXXXLGEMSDMVVESX

SEQ ID NO: 72334 - protein, 38 aa, Artificial Sequence; identical to SEQ ID NO: 18943
  GFR-binding peptide
  MOD_RES (4)..(4): Xaa is C or S

SEQ ID NO: 72335 - protein, 37 aa, Artificial Sequence
  GFR-binding peptide
  MOD_RES (6)..(7): Xaa is C or S
AAPASXXVPARLSNITIQIMDAANNVVLGEMSDMVVE

SEQ ID NO: 72336 - protein, 43 aa, Artificial Sequence
  GFR-binding peptide
  MOD_RES (6)..(7)..(41)..(43): Xaa is C or S
  MOD_RES (21)..(22)..(23)..(24)..(25): Xaa is A or G
  MOD_RES (26)..(27)..(28)..(29): Xaa is A or G or is absent
GSAGPXXTPTKMSNITMQIMXXXXXXXXXIGEMSGMVVDRXGX

SEQ ID NO: 72337 - protein, 37 aa, Artificial Sequence; identical to SEQ ID NO: 18945
  GFR-binding peptide
  MOD_RES (3)..(3): Xaa is C or S
  MOD_RES (19)..(20)..(21)..(22)..(23): Xaa is A or G
  MOD_RES (24)..(25)..(26)..(27): Xaa is A or G or is absent

SEQ ID NO: 72338 - protein, 36 aa, Artificial Sequence
  GFR-binding peptide
  MOD_RES (5)..(6): Xaa is C or S
SAGPXXTPTKMSNITMQIMNDKQQIIIGEMSGMVVD

SEQ ID NO: 72339 - protein, 36 aa, Artificial Sequence
  GFR-binding peptide
  MOD_RES (4)..(5)..(36): Xaa is C or S
ASPXXVPQDLSNITIQIMVGRTPKVLGEMSMVVKSX

SEQ ID NO: 72340 - protein, 37 aa, Artificial Sequence; identical to SEQ ID NO: 18946
  GFR-binding peptide
  MOD_RES (2)..(2): Xaa is C or S
  MOD_RES (18)..(19)..(20)..(21)..(22): Xaa is A or G
  MOD_RES (23)..(24)..(25)..(26): Xaa is A or G or is absent

SEQ ID NO: 72341 - protein, 41 aa, Artificial Sequence
  GFR-binding peptide
  MOD_RES (4)..(5)..(38)..(40): Xaa is C or S
  MOD_RES (19)..(20)..(21)..(22)..(23): Xaa is A or G
  MOD_RES (24)..(25)..(26)..(27): Xaa is A or G or is absent
PSTXXAPVKTSNITMQIMXXXXXXXXXIGEMSMIVEEXGXL

SEQ ID NO: 72342 - protein, 37 aa, Artificial Sequence
  GFR-binding peptide
  MOD_RES (1)..(35)..(37): Xaa is C or S
  MOD_RES (15)..(16)..(17)..(18)..(19): Xaa is A or G
  MOD_RES (20)..(21)..(22)..(23): Xaa is A or G or is absent
XTPTKMSNITMQIMXXXXXXXXXLGEMSGMVVDRXGX

SEQ ID NO: 72343 - protein, 36 aa, Artificial Sequence
  GFR-binding peptide
  MOD_RES (4)..(5): Xaa is C or S
PASXXVPARLSNITIQIMDAANNVVLGEMSDMVVEA

SEQ ID NO: 72344 - protein, 41 aa, Artificial Sequence
  GFR-binding peptide
  MOD_RES (5)..(6)..(39)..(41): Xaa is C or S
  MOD_RES (20)..(21)..(22)..(23)..(24): Xaa is A or G
  MOD_RES (25)..(26)..(27)..(28): Xaa is A or G or is absent
SASPXXVPQDLSNITIQIMXXXXXXXXXLGEMSMVVKSXKX

SEQ ID NO: 72345 - protein, 33 aa, Artificial Sequence
  GFR-binding peptide
  MOD_RES (32)..(32): Xaa is C or S
TPTKMSNITMQIMNDKQQIILGEMSGMVVDRXG

SEQ ID NO: 72346 - protein, 33 aa, Artificial Sequence; identical to SEQ ID NO: 18950
  GFR-binding peptide
  MOD_RES (14)..(15)..(16)..(17)..(18): Xaa is A or G
  MOD_RES (19)..(20)..(21)..(22): Xaa is A or G or is absent

SEQ ID NO: 72347 - protein, 32 aa, Artificial Sequence
  GFR-binding peptide
  MOD_RES (31)..(31): Xaa is C or S
APVKTSNITMQIMDNGRVLLLGEMSMIVEEXG

SEQ ID NO: 72348 - protein, 34 aa, Artificial Sequence
  GFR-binding peptide
  MOD_RES (3)..(4): Xaa is C or S
PTXXVPTRLSNITIQIMDSANNVVLGEMSDMVVE

SEQ ID NO: 72349 - protein, 41 aa, Artificial Sequence
  GFR-binding peptide
  MOD_RES (4)..(5)..(38)..(40): Xaa is C or S
  MOD_RES (19)..(20)..(21)..(22)..(23): Xaa is A or G
  MOD_RES (24)..(25)..(26)..(27): Xaa is A or G or is absent
AAPXXVPQALSNITIQIMXXXXXXXXXLGEMSMIVRSXKXS

SEQ ID NO: 72350 - protein, 35 aa, Artificial Sequence
  GFR-binding peptide
  MOD_RES (1)..(2)..(34): Xaa is C or S
XXAPTKLSNITVQIMDDSSNVILGEMSNMVVRSXG

SEQ ID NO: 72351 - protein, 32 aa, Artificial Sequence; identical to SEQ ID NO: 54165
  GFR-binding peptide
  MOD_RES (1)..(32): Xaa is C or S

SEQ ID NO: 72352 - protein, 38 aa, Artificial Sequence; identical to SEQ ID NO: 18953
  GFR-binding peptide
  MOD_RES (6)..(6): Xaa is C or S
  MOD_RES (20)..(21)..(22)..(23)..(24): Xaa is A or G
  MOD_RES (25)..(26)..(27)..(28): Xaa is A or G or is absent

SEQ ID NO: 72353 - protein, 38 aa, Artificial Sequence
  GFR-binding peptide
  MOD_RES (4)..(5): Xaa is C or S
  MOD_RES (19)..(20)..(21)..(22)..(23): Xaa is A or G
  MOD_RES (24)..(25)..(26)..(27): Xaa is A or G or is absent
PASXXVPARLSNITIQIMXXXXXXXXXIGEMSDMVVEA

SEQ ID NO: 72354 - protein, 37 aa, Artificial Sequence; identical to SEQ ID NO: 18955
  GFR-binding peptide
  MOD_RES (5)..(5): Xaa is C or S
  MOD_RES (19)..(20)..(21)..(22)..(23): Xaa is A or G
  MOD_RES (24)..(25)..(26)..(27): Xaa is A or G or is absent

SEQ ID NO: 72355 - protein, 32 aa, Artificial Sequence
  GFR-binding peptide
  MOD_RES (14)..(15)..(16)..(17)..(18): Xaa is A or G
  MOD_RES (19)..(20)..(21)..(22): Xaa is A or G or is absent
VPQDLSNITIQIMXXXXXXXXXLGEMSMVVKS

SEQ ID NO: 72356 - protein, 39 aa, Artificial Sequence
  GFR-binding peptide
  MOD_RES (5)..(6)..(39): Xaa is C or S
  MOD_RES (20)..(21)..(22)..(23)..(24): Xaa is A or G
  MOD_RES (25)..(26)..(27)..(28): Xaa is A or G or is absent
VPSTXXAPVKTSNITMQIMXXXXXXXXXLGEMSMIVEEX

SEQ ID NO: 72357 - protein, 33 aa, Artificial Sequence
  GFR-binding peptide
  MOD_RES (33)..(33): Xaa is C or S
  MOD_RES (14)..(15)..(16)..(17)..(18): Xaa is A or G
  MOD_RES (19)..(20)..(21)..(22): Xaa is A or G or is absent
APVKTSNITMQIMXXXXXXXXXIGEMSMIVEEX

SEQ ID NO: 72358 - protein, 38 aa, Artificial Sequence
  GFR-binding peptide
  MOD_RES (2)..(3)..(35)..(37): Xaa is C or S
PXXTPTKMSNITMQIMNDKQQIIIGEMSGMVVDRXGXS

SEQ ID NO: 72359 - protein, 42 aa, Artificial Sequence; identical to SEQ ID NO: 18956
  GFR-binding peptide
  MOD_RES (7)..(41): Xaa is C or S
  MOD_RES (21)..(22)..(23)..(24)..(25): Xaa is A or G
  MOD_RES (26)..(27)..(28)..(29): Xaa is A or G or is absent

SEQ ID NO: 72360 - protein, 39 aa, Artificial Sequence; identical to SEQ ID NO: 51777
  GFR-binding peptide
  MOD_RES (4)..(5)..(36)..(38): Xaa is C or S

SEQ ID NO: 72361 - protein, 37 aa, Artificial Sequence; identical to SEQ ID NO: 18958
  GFR-binding peptide
  MOD_RES (36)..(36): Xaa is C or S
  MOD_RES (15)..(16)..(17)..(18)..(19): Xaa is A or G
  MOD_RES (20)..(21)..(22)..(23): Xaa is A or G or is absent

SEQ ID NO: 72362 - protein, 31 aa, Artificial Sequence
  GFR-binding peptide
APTKLSNITVQIMDDSSNVILGEMSNMVVRS

SEQ ID NO: 72363 - protein, 33 aa, Artificial Sequence; identical to SEQ ID NO: 18959
  GFR-binding peptide
  MOD_RES (15)..(16)..(17)..(18)..(19): Xaa is A or G
  MOD_RES (20)..(21)..(22)..(23): Xaa is A or G or is absent

SEQ ID NO: 72364 - protein, 37 aa, Artificial Sequence; identical to SEQ ID NO: 54174
  GFR-binding peptide
  MOD_RES (6)..(7): Xaa is C or S

SEQ ID NO: 72365 - protein, 36 aa, Artificial Sequence
  GFR-binding peptide
  MOD_RES (4)..(5): Xaa is C or S
PPTXXVPTRLSNITIQIMDSANNVVIGEMSDMVVES

SEQ ID NO: 72366 - protein, 43 aa, Artificial Sequence; identical to SEQ ID NO: 18961
  GFR-binding peptide
  MOD_RES (3)..(40)..(42): Xaa is C or S
  MOD_RES (19)..(20)..(21)..(22)..(23): Xaa is A or G
  MOD_RES (24)..(25)..(26)..(27): Xaa is A or G or is absent

SEQ ID NO: 72367 - protein, 40 aa, Artificial Sequence
  GFR-binding peptide
  MOD_RES (4)..(5)..(38)..(40): Xaa is C or S
  MOD_RES (19)..(20)..(21)..(22)..(23): Xaa is A or G
  MOD_RES (24)..(25)..(26)..(27): Xaa is A or G or is absent
PSTXXAPVKTSNITMQIMXXXXXXXXXLGEMSMIVEEXGX

SEQ ID NO: 72368 - protein, 37 aa, Artificial Sequence
  GFR-binding peptide
  MOD_RES (5)..(6)..(37): Xaa is C or S
SAAPXXVPQALSNITIQIMVGRKPKVLGEMSMIVRSX

SEQ ID NO: 72369 - protein, 36 aa, Artificial Sequence; identical to SEQ ID NO: 54181
  GFR-binding peptide
  MOD_RES (5)..(6): Xaa is C or S

SEQ ID NO: 72370 - protein, 41 aa, Artificial Sequence
  GFR-binding peptide
  MOD_RES (3)..(4)..(38)..(40): Xaa is C or S
  MOD_RES (18)..(19)..(20)..(21)..(22): Xaa is A or G
  MOD_RES (23)..(24)..(25)..(26): Xaa is A or G or is absent
PTXXVPTRLSNITIQIMXXXXXXXXXIGEMSDMVVESXGXR

SEQ ID NO: 72371 - protein, 36 aa, Artificial Sequence; identical to SEQ ID NO: 54186
  GFR-binding peptide
  MOD_RES (2)..(3)..(34)..(36): Xaa is C or S

SEQ ID NO: 72372 - protein, 36 aa, Artificial Sequence
  GFR-binding peptide
  MOD_RES (34)..(36): Xaa is C or S
  MOD_RES (14)..(15)..(16)..(17)..(18): Xaa is A or G
  MOD_RES (19)..(20)..(21)..(22): Xaa is A or G or is absent
VPARLSNITIQIMXXXXXXXXXIGEMSDMVVEAXGX

SEQ ID NO: 72373 - protein, 37 aa, Artificial Sequence; identical to SEQ ID NO: 18963
  GFR-binding peptide
  MOD_RES (36)..(36): Xaa is C or S

SEQ ID NO: 72374 - protein, 36 aa, Artificial Sequence; identical to SEQ ID NO: 51793
  GFR-binding peptide
  MOD_RES (4)..(5)..(36): Xaa is C or S

SEQ ID NO: 72375 - protein, 38 aa, Artificial Sequence
  GFR-binding peptide
  MOD_RES (3)..(4)..(36)..(38): Xaa is C or S
PTXXVPTRLSNITIQIMDSANNVVLGEMSDMVVESXGX

SEQ ID NO: 72376 - protein, 34 aa, Artificial Sequence
  GFR-binding peptide
  MOD_RES (33)..(33): Xaa is C or S
  MOD_RES (14)..(15)..(16)..(17)..(18): Xaa is A or G
  MOD_RES (19)..(20)..(21)..(22): Xaa is A or G or is absent
APVKTSNITMQIMXXXXXXXXXLGEMSMIVEEXG

SEQ ID NO: 72377 - protein, 31 aa, Artificial Sequence
  GFR-binding peptide
  MOD_RES (1)..(1): Xaa is C or S
XVPARLSNITIQIMDAANNVVIGEMSDMVVE

SEQ ID NO: 72378 - protein, 38 aa, Artificial Sequence; identical to SEQ ID NO: 18964
  GFR-binding peptide
  MOD_RES (2)..(2): Xaa is C or S

SEQ ID NO: 72379 - protein, 37 aa, Artificial Sequence
  GFR-binding peptide
  MOD_RES (6)..(7): Xaa is C or S
GSAGPXXTPTKMSNITMQIMNDKQQIIIGEMSGMVVD

SEQ ID NO: 72380 - protein, 33 aa, Artificial Sequence; identical to SEQ ID NO: 18966
  GFR-binding peptide
  MOD_RES (1)..(1): Xaa is C or S

SEQ ID NO: 72381 - protein, 41 aa, Artificial Sequence; identical to SEQ ID NO: 18968
  GFR-binding peptide
  MOD_RES (7)..(41): Xaa is C or S
  MOD_RES (21)..(22)..(23)..(24)..(25): Xaa is A or G
  MOD_RES (26)..(27)..(28)..(29): Xaa is A or G or is absent

SEQ ID NO: 72382 - protein, 39 aa, Artificial Sequence; identical to SEQ ID NO: 18969
  GFR-binding peptide
  MOD_RES (5)..(5): Xaa is C or S

SEQ ID NO: 72383 - protein, 39 aa, Artificial Sequence
  GFR-binding peptide
  MOD_RES (6)..(7)..(39): Xaa is C or S
HVPKPXXAPTKLSNITVQIMDDSSNVIIGEMSNMVVRSX

SEQ ID NO: 72384 - protein, 37 aa, Artificial Sequence; identical to SEQ ID NO: 18971
  GFR-binding peptide
  MOD_RES (36)..(36): Xaa is C or S
  MOD_RES (15)..(16)..(17)..(18)..(19): Xaa is A or G
  MOD_RES (20)..(21)..(22)..(23): Xaa is A or G or is absent

SEQ ID NO: 72385 - protein, 32 aa, Artificial Sequence
  GFR-binding peptide
  MOD_RES (14)..(15)..(16)..(17)..(18): Xaa is A or G
  MOD_RES (19)..(20)..(21)..(22): Xaa is A or G or is absent
TPTKMSNITMQIMXXXXXXXXXLGEMSGMVVD

SEQ ID NO: 72386 - protein, 42 aa, Artificial Sequence; identical to SEQ ID NO: 18972
  GFR-binding peptide
  MOD_RES (4)..(41): Xaa is C or S

SEQ ID NO: 72387 - protein, 33 aa, Artificial Sequence; identical to SEQ ID NO: 51797
  GFR-binding peptide
  MOD_RES (1)..(2)..(33): Xaa is C or S

SEQ ID NO: 72388 - protein, 35 aa, Artificial Sequence
  GFR-binding peptide
  MOD_RES (1)..(2): Xaa is C or S
  MOD_RES (16)..(17)..(18)..(19)..(20): Xaa is A or G
  MOD_RES (21)..(22)..(23)..(24): Xaa is A or G or is absent
XXVPARLSNITIQIMXXXXXXXXXLGEMSDMVVEA

SEQ ID NO: 72389 - protein, 39 aa, Artificial Sequence
  GFR-binding peptide
  MOD_RES (3)..(4)..(37)..(39): Xaa is C or S
  MOD_RES (18)..(19)..(20)..(21)..(22): Xaa is A or G
  MOD_RES (23)..(24)..(25)..(26): Xaa is A or G or is absent
SPXXVSQDLSNITIQIMXXXXXXXXXLGEMSMIVKSXKX

SEQ ID NO: 72390 - protein, 38 aa, Artificial Sequence; identical to SEQ ID NO: 18973
  GFR-binding peptide
  MOD_RES (5)..(5): Xaa is C or S

SEQ ID NO: 72391 - protein, 42 aa, Artificial Sequence; identical to SEQ ID NO: 18974
  GFR-binding peptide
  MOD_RES (4)..(41): Xaa is C or S
  MOD_RES (20)..(21)..(22)..(23)..(24): Xaa is A or G
  MOD_RES (25)..(26)..(27)..(28): Xaa is A or G or is absent

SEQ ID NO: 72392 - protein, 41 aa, Artificial Sequence
  GFR-binding peptide
  MOD_RES (5)..(6)..(40): Xaa is C or S
  MOD_RES (20)..(21)..(22)..(23)..(24): Xaa is A or G
  MOD_RES (25)..(26)..(27)..(28): Xaa is A or G or is absent
APASXXVPARLSNITIQIMXXXXXXXXXIGEMSDMVVEAXG

SEQ ID NO: 72393 - protein, 34 aa, Artificial Sequence; identical to SEQ ID NO: 54201
  GFR-binding peptide
  MOD_RES (1)..(2)..(33): Xaa is C or S

SEQ ID NO: 72394 - protein, 41 aa, Artificial Sequence
  GFR-binding peptide
  MOD_RES (6)..(7)..(41): Xaa is C or S
  MOD_RES (21)..(22)..(23)..(24)..(25): Xaa is A or G
  MOD_RES (26)..(27)..(28)..(29): Xaa is A or G or is absent
HVPKPXXAPTKLSNITVQIMXXXXXXXXXIGEMSNMVVRSX

SEQ ID NO: 72395 - protein, 37 aa, Artificial Sequence; identical to SEQ ID NO: 18975
  GFR-binding peptide
  MOD_RES (5)..(5): Xaa is C or S
  MOD_RES (19)..(20)..(21)..(22)..(23): Xaa is A or G
  MOD_RES (24)..(25)..(26)..(27): Xaa is A or G or is absent

SEQ ID NO: 72396 - protein, 40 aa, Artificial Sequence
  GFR-binding peptide
  MOD_RES (5)..(6)..(39): Xaa is C or S
  MOD_RES (20)..(21)..(22)..(23)..(24): Xaa is A or G
  MOD_RES (25)..(26)..(27)..(28): Xaa is A or G or is absent
SASPXXVSQDLSNITIQIMXXXXXXXXXLGEMSMIVKSXK

SEQ ID NO: 72397 - protein, 41 aa, Artificial Sequence; identical to SEQ ID NO: 18976
  GFR-binding peptide
  MOD_RES (1)..(38)..(40): Xaa is C or S
  MOD_RES (17)..(18)..(19)..(20)..(21): Xaa is A or G
  MOD_RES (22)..(23)..(24)..(25): Xaa is A or G or is absent

SEQ ID NO: 72398 - protein, 37 aa, Artificial Sequence
  GFR-binding peptide
  MOD_RES (1)..(2)..(36): Xaa is C or S
  MOD_RES (16)..(17)..(18)..(19)..(20): Xaa is A or G
  MOD_RES (21)..(22)..(23)..(24): Xaa is A or G or is absent
XXTPTKMSNITMQIMXXXXXXXXXIGEMSGMVVDRXG

SEQ ID NO: 72399 - protein, 32 aa, Artificial Sequence
  GFR-binding peptide
  MOD_RES (1)..(1): Xaa is C or S
XTPTKMSNITMQIMNDKQQIIIGEMSGMVVDR

SEQ ID NO: 72400 - protein, 36 aa, Artificial Sequence
  GFR-binding peptide
  MOD_RES (2)..(3): Xaa is C or S
  MOD_RES (17)..(18)..(19)..(20)..(21): Xaa is A or G
  MOD_RES (22)..(23)..(24)..(25): Xaa is A or G or is absent
SXXVPARLSNITIQIMXXXXXXXXXIGEMSDMVVEA

SEQ ID NO: 72401 - protein, 39 aa, Artificial Sequence; identical to SEQ ID NO: 18978
  GFR-binding peptide
  MOD_RES (3)..(3): Xaa is C or S
  MOD_RES (19)..(20)..(21)..(22)..(23): Xaa is A or G
  MOD_RES (24)..(25)..(26)..(27): Xaa is A or G or is absent

SEQ ID NO: 72402 - protein, 34 aa, Artificial Sequence; identical to SEQ ID NO: 51813
  GFR-binding peptide
  MOD_RES (31)..(33): Xaa is C or S

SEQ ID NO: 72403 - protein, 34 aa, Artificial Sequence
  GFR-binding peptide
  MOD_RES (1)..(2): Xaa is C or S
  MOD_RES (16)..(17)..(18)..(19)..(20): Xaa is A or G
  MOD_RES (21)..(22)..(23)..(24): Xaa is A or G or is absent
XXVSQDLSNITIQIMXXXXXXXXXLGEMSMIVKS

SEQ ID NO: 72404 - protein, 32 aa, Artificial Sequence
  GFR-binding peptide
  MOD_RES (31)..(31): Xaa is C or S
VSQDLSNITIQIMIGKTPKILGEMSMIVKSXK

SEQ ID NO: 72405 - protein, 42 aa, Artificial Sequence; identical to SEQ ID NO: 18979
  GFR-binding peptide
  MOD_RES (2)..(39)..(41): Xaa is C or S
  MOD_RES (18)..(19)..(20)..(21)..(22): Xaa is A or G
  MOD_RES (23)..(24)..(25)..(26): Xaa is A or G or is absent

SEQ ID NO: 72406 - protein, 35 aa, Artificial Sequence; identical to SEQ ID NO: 54218
  GFR-binding peptide
  MOD_RES (3)..(4)..(35): Xaa is C or S

SEQ ID NO: 72407 - protein, 37 aa, Artificial Sequence
  GFR-binding peptide
  MOD_RES (34)..(36): Xaa is C or S
  MOD_RES (14)..(15)..(16)..(17)..(18): Xaa is A or G
  MOD_RES (19)..(20)..(21)..(22): Xaa is A or G or is absent
TPTKMSNITMQIMXXXXXXXXXIGEMSGMVVDRXGXS

SEQ ID NO: 72408 - protein, 36 aa, Artificial Sequence; identical to SEQ ID NO: 54221
  GFR-binding peptide
  MOD_RES (5)..(6): Xaa is C or S

SEQ ID NO: 72409 - protein, 36 aa, Artificial Sequence
  GFR-binding peptide
  MOD_RES (34)..(36): Xaa is C or S
  MOD_RES (14)..(15)..(16)..(17)..(18): Xaa is A or G
  MOD_RES (19)..(20)..(21)..(22): Xaa is A or G or is absent
APTKLSNITVQIMXXXXXXXXXLGEMSNMVVRSXGX

SEQ ID NO: 72410 - protein, 35 aa, Artificial Sequence
  GFR-binding peptide
  MOD_RES (2)..(3)..(34): Xaa is C or S
TXXAPVKTSNITMQIMDNGRVLLIGEMSMIVEEXG

SEQ ID NO: 72411 - protein, 33 aa, Artificial Sequence
  GFR-binding peptide
  MOD_RES (2)..(3): Xaa is C or S
TXXAPVKTSNITMQIMDNGRVLLIGEMSMIVEE

SEQ ID NO: 72412 - protein, 38 aa, Artificial Sequence; identical to SEQ ID NO: 18980
  GFR-binding peptide
  MOD_RES (1)..(38): Xaa is C or S

SEQ ID NO: 72413 - protein, 40 aa, Artificial Sequence; identical to SEQ ID NO: 18981
  GFR-binding peptide
  MOD_RES (5)..(5): Xaa is C or S
  MOD_RES (21)..(22)..(23)..(24)..(25): Xaa is A or G
  MOD_RES (26)..(27)..(28)..(29): Xaa is A or G or is absent

SEQ ID NO: 72414 - protein, 42 aa, Artificial Sequence; identical to SEQ ID NO: 18982
  GFR-binding peptide
  MOD_RES (5)..(42): Xaa is C or S
  MOD_RES (21)..(22)..(23)..(24)..(25): Xaa is A or G
  MOD_RES (26)..(27)..(28)..(29): Xaa is A or G or is absent

SEQ ID NO: 72415 - protein, 36 aa, Artificial Sequence; identical to SEQ ID NO: 54224
  GFR-binding peptide
  MOD_RES (1)..(2)..(34)..(36): Xaa is C or S

SEQ ID NO: 72416 - protein, 35 aa, Artificial Sequence; identical to SEQ ID NO: 18985
  GFR-binding peptide
  MOD_RES (1)..(35): Xaa is C or S
  MOD_RES (15)..(16)..(17)..(18)..(19): Xaa is A or G
  MOD_RES (20)..(21)..(22)..(23): Xaa is A or G or is absent

SEQ ID NO: 72417 - protein, 38 aa, Artificial Sequence
  GFR-binding peptide
  MOD_RES (4)..(5): Xaa is C or S
  MOD_RES (19)..(20)..(21)..(22)..(23): Xaa is A or G
  MOD_RES (24)..(25)..(26)..(27): Xaa is A or G or is absent
AGPXXTPTKMSNITMQIMXXXXXXXXXIGEMSGMVVDR

SEQ ID NO: 72418 - protein, 37 aa, Artificial Sequence
  GFR-binding peptide
  MOD_RES (4)..(5)..(37): Xaa is C or S
AGPXXTPTKMSNITMQIMNDKQQIILGEMSGMVVDRX

SEQ ID NO: 72419 - protein, 34 aa, Artificial Sequence
  GFR-binding peptide
  MOD_RES (1)..(33): Xaa is C or S
XVPTRLSNITIQIMDSANNVVIGEMSDMVVESXG

SEQ ID NO: 72420 - protein, 36 aa, Artificial Sequence; identical to SEQ ID NO: 18988
  GFR-binding peptide

SEQ ID NO: 72421 - protein, 31 aa, Artificial Sequence; identical to SEQ ID NO: 51833
  GFR-binding peptide
  MOD_RES (31)..(31): Xaa is C or S

SEQ ID NO: 72422 - protein, 36 aa, Artificial Sequence; identical to SEQ ID NO: 51835
  GFR-binding peptide
  MOD_RES (1)..(2)..(35): Xaa is C or S
  MOD_RES (16)..(17)..(18)..(19)..(20): Xaa is A or G
  MOD_RES (21)..(22)..(23)..(24): Xaa is A or G or is absent

SEQ ID NO: 72423 - protein, 41 aa, Artificial Sequence; identical to SEQ ID NO: 18989
  GFR-binding peptide
  MOD_RES (1)..(38)..(40): Xaa is C or S
  MOD_RES (17)..(18)..(19)..(20)..(21): Xaa is A or G
  MOD_RES (22)..(23)..(24)..(25): Xaa is A or G or is absent

SEQ ID NO: 72424 - protein, 36 aa, Artificial Sequence; identical to SEQ ID NO: 18991
  GFR-binding peptide
  MOD_RES (36)..(36): Xaa is C or S
  MOD_RES (15)..(16)..(17)..(18)..(19): Xaa is A or G
  MOD_RES (20)..(21)..(22)..(23): Xaa is A or G or is absent

SEQ ID NO: 72425 - protein, 44 aa, Artificial Sequence; identical to SEQ ID NO: 18992
  GFR-binding peptide
  MOD_RES (5)..(42)..(44): Xaa is C or S

SEQ ID NO: 72426 - protein, 36 aa, Artificial Sequence
  GFR-binding peptide
  MOD_RES (34)..(36): Xaa is C or S
  MOD_RES (14)..(15)..(16)..(17)..(18): Xaa is A or G
  MOD_RES (19)..(20)..(21)..(22): Xaa is A or G or is absent
VPARLSNITIQIMXXXXXXXXXLGEMSDMVVEAXGX

SEQ ID NO: 72427 - protein, 37 aa, Artificial Sequence
  GFR-binding peptide
  MOD_RES (3)..(4)..(36): Xaa is C or S
PTXXVPTRLSNITIQIMDSANNVVIGEMSDMVVESXG

SEQ ID NO: 72428 - protein, 36 aa, Artificial Sequence; identical to SEQ ID NO: 54236
  GFR-binding peptide
  MOD_RES (1)..(34)..(36): Xaa is C or S
  MOD_RES (15)..(16)..(17)..(18)..(19): Xaa is A or G
  MOD_RES (20)..(21)..(22)..(23): Xaa is A or G or is absent

SEQ ID NO: 72429 - protein, 42 aa, Artificial Sequence
  GFR-binding peptide
  MOD_RES (6)..(7)..(41): Xaa is C or S
  MOD_RES (21)..(22)..(23)..(24)..(25): Xaa is A or G
  MOD_RES (26)..(27)..(28)..(29): Xaa is A or G or is absent
STPPTXXVPTRLSNITIQIMXXXXXXXXXLGEMSDMVVESXG

SEQ ID NO: 72430 - protein, 33 aa, Artificial Sequence
  GFR-binding peptide
  MOD_RES (1)..(32): Xaa is C or S
XVPQALSNITIQIMVGRKPKVLGEMSMIVRSXK

SEQ ID NO: 72431 - protein, 35 aa, Artificial Sequence
  GFR-binding peptide
  MOD_RES (2)..(3)..(35): Xaa is C or S
PXXTPTKMSNITMQIMNDKQQIILGEMSGMVVDRX

SEQ ID NO: 72432 - protein, 36 aa, Artificial Sequence
  GFR-binding peptide
  MOD_RES (1)..(34)..(36): Xaa is C or S
  MOD_RES (15)..(16)..(17)..(18)..(19): Xaa is A or G
  MOD_RES (20)..(21)..(22)..(23): Xaa is A or G or is absent
XVPQDLSNITIQIMXXXXXXXXXLGEMSMVVKSXKX

SEQ ID NO: 72433 - protein, 34 aa, Artificial Sequence
  GFR-binding peptide
  MOD_RES (2)..(3)..(34): Xaa is C or S
TXXAPVKTSNITMQIMDNGRVLLIGEMSMIVEEX

SEQ ID NO: 72434 - protein, 33 aa, Artificial Sequence
  GFR-binding peptide
  MOD_RES (1)..(2): Xaa is C or S
XXTPTKMSNITMQIMNDKQQIILGEMSGMVVDR

SEQ ID NO: 72435 - protein, 38 aa, Artificial Sequence; identical to SEQ ID NO: 51852
  GFR-binding peptide
  MOD_RES (2)..(3)..(36)..(38): Xaa is C or S
  MOD_RES (17)..(18)..(19)..(20)..(21): Xaa is A or G
  MOD_RES (22)..(23)..(24)..(25): Xaa is A or G or is absent

SEQ ID NO: 72436 - protein, 39 aa, Artificial Sequence
  GFR-binding peptide
  MOD_RES (3)..(4)..(36)..(38): Xaa is C or S
PTXXVPTRLSNITIQIMDSANNVVIGEMSDMVVESXGXR

SEQ ID NO: 72437 - protein, 37 aa, Artificial Sequence; identical to SEQ ID NO: 54245
  GFR-binding peptide
  MOD_RES (2)..(3)..(34)..(36): Xaa is C or S

SEQ ID NO: 72438 - protein, 40 aa, Artificial Sequence
  GFR-binding peptide
  MOD_RES (2)..(3)..(37)..(39): Xaa is C or S
  MOD_RES (17)..(18)..(19)..(20)..(21): Xaa is A or G
  MOD_RES (22)..(23)..(24)..(25): Xaa is A or G or is absent
TXXVPTRLSNITIQIMXXXXXXXXXLGEMSDMVVESXGXR

SEQ ID NO: 72439 - protein, 36 aa, Artificial Sequence
  GFR-binding peptide
  MOD_RES (4)..(5): Xaa is C or S
AGPXXTPTKMSNITMQIMNDKQQIILGEMSGMVVDR

SEQ ID NO: 72440 - protein, 37 aa, Artificial Sequence
  GFR-binding peptide
  MOD_RES (1)..(2)..(34)..(36): Xaa is C or S
XXTPTKMSNITMQIMNDKQQIIIGEMSGMVVDRXGXS

SEQ ID NO: 72441 - protein, 38 aa, Artificial Sequence
  GFR-binding peptide
  MOD_RES (5)..(6)..(37): Xaa is C or S
SASPXXVPQDLSNITIQIMVGRTPKVLGEMSMVVKSXK

SEQ ID NO: 72442 - protein, 32 aa, Artificial Sequence; identical to SEQ ID NO: 51860
  GFR-binding peptide
  MOD_RES (1)..(1): Xaa is C or S

SEQ ID NO: 72443 - protein, 34 aa, Artificial Sequence; identical to SEQ ID NO: 18996
  GFR-binding peptide

SEQ ID NO: 72444 - protein, 33 aa, Artificial Sequence
  GFR-binding peptide
  MOD_RES (14)..(15)..(16)..(17)..(18): Xaa is A or G
  MOD_RES (19)..(20)..(21)..(22): Xaa is A or G or is absent
TPTKMSNITMQIMXXXXXXXXXLGEMSGMVVDR

SEQ ID NO: 72445 - protein, 39 aa, Artificial Sequence; identical to SEQ ID NO: 19000
  GFR-binding peptide
  MOD_RES (7)..(7): Xaa is C or S
  MOD_RES (21)..(22)..(23)..(24)..(25): Xaa is A or G
  MOD_RES (26)..(27)..(28)..(29): Xaa is A or G or is absent

SEQ ID NO: 72446 - protein, 38 aa, Artificial Sequence; identical to SEQ ID NO: 19001
  GFR-binding peptide
  MOD_RES (4)..(38): Xaa is C or S
  MOD_RES (18)..(19)..(20)..(21)..(22): Xaa is A or G
  MOD_RES (23)..(24)..(25)..(26): Xaa is A or G or is absent

SEQ ID NO: 72447 - protein, 40 aa, Artificial Sequence
  GFR-binding peptide
  MOD_RES (6)..(7)..(40): Xaa is C or S
  MOD_RES (21)..(22)..(23)..(24)..(25): Xaa is A or G
  MOD_RES (26)..(27)..(28)..(29): Xaa is A or G or is absent
ASAAPXXVPQALSNITIQIMXXXXXXXXXLGEMSMIVRSX

SEQ ID NO: 72448 - protein, 40 aa, Artificial Sequence
  GFR-binding peptide
  MOD_RES (4)..(5)..(38)..(40): Xaa is C or S
  MOD_RES (19)..(20)..(21)..(22)..(23): Xaa is A or G
  MOD_RES (24)..(25)..(26)..(27): Xaa is A or G or is absent
AAPXXVPQALSNITIQIMXXXXXXXXXLGEMSMIVRSXKX

SEQ ID NO: 72449 - protein, 35 aa, Artificial Sequence; identical to SEQ ID NO: 19003
  GFR-binding peptide
  MOD_RES (3)..(3): Xaa is C or S
  MOD_RES (17)..(18)..(19)..(20)..(21): Xaa is A or G
  MOD_RES (22)..(23)..(24)..(25): Xaa is A or G or is absent

SEQ ID NO: 72450 - protein, 35 aa, Artificial Sequence; identical to SEQ ID NO: 51869
  GFR-binding peptide
  MOD_RES (4)..(5): Xaa is C or S

SEQ ID NO: 72451 - protein, 40 aa, Artificial Sequence; identical to SEQ ID NO: 51870
  GFR-binding peptide
  MOD_RES (4)..(5)..(38)..(40): Xaa is C or S
  MOD_RES (19)..(20)..(21)..(22)..(23): Xaa is A or G
  MOD_RES (24)..(25)..(26)..(27): Xaa is A or G or is absent

SEQ ID NO: 72452 - protein, 35 aa, Artificial Sequence; identical to SEQ ID NO: 51871
  GFR-binding peptide
  MOD_RES (1)..(2)..(33)..(35): Xaa is C or S

SEQ ID NO: 72453 - protein, 40 aa, Artificial Sequence; identical to SEQ ID NO: 19005
  GFR-binding peptide
  MOD_RES (3)..(40): Xaa is C or S

SEQ ID NO: 72454 - protein, 41 aa, Artificial Sequence
  GFR-binding peptide
  MOD_RES (5)..(6)..(38)..(40): Xaa is C or S
VPKPXXAPTKLSNITVQIMDDSSNVILGEMSNMVVRSXGXH

SEQ ID NO: 72455 - protein, 33 aa, Artificial Sequence
  GFR-binding peptide
  MOD_RES (1)..(33): Xaa is C or S
XVPTRLSNITIQIMDSANNVVIGEMSDMVVESX

SEQ ID NO: 72456 - protein, 39 aa, Artificial Sequence
  GFR-binding peptide
  MOD_RES (4)..(5)..(36)..(38): Xaa is C or S
PSTXXAPVKTSNITMQIMDNGRVLLLGEMSMIVEEXGXL

SEQ ID NO: 72457 - protein, 40 aa, Artificial Sequence; identical to SEQ ID NO: 51879
  GFR-binding peptide
  MOD_RES (5)..(6)..(37)..(39): Xaa is C or S

SEQ ID NO: 72458 - protein, 35 aa, Artificial Sequence
  GFR-binding peptide
  MOD_RES (2)..(3)..(35): Xaa is C or S
PXXAPTKLSNITVQIMDDSSNVILGEMSNMVVRSX

SEQ ID NO: 72459 - protein, 39 aa, Artificial Sequence
  GFR-binding peptide
  MOD_RES (3)..(4)..(37)..(39): Xaa is C or S
  MOD_RES (18)..(19)..(20)..(21)..(22): Xaa is A or G
  MOD_RES (23)..(24)..(25)..(26): Xaa is A or G or is absent
STXXAPVKTSNITMQIMXXXXXXXXXLGEMSMIVEEXGX

SEQ ID NO: 72460 - protein, 39 aa, Artificial Sequence
  GFR-binding peptide
  MOD_RES (4)..(5)..(39): Xaa is C or S
  MOD_RES (19)..(20)..(21)..(22)..(23): Xaa is A or G
  MOD_RES (24)..(25)..(26)..(27): Xaa is A or G or is absent
PASXXVPARLSNITIQIMXXXXXXXXXIGEMSDMVVEAX

SEQ ID NO: 72461 - protein, 38 aa, Artificial Sequence; identical to SEQ ID NO: 19009
  GFR-binding peptide
  MOD_RES (3)..(3): Xaa is C or S
  MOD_RES (19)..(20)..(21)..(22)..(23): Xaa is A or G
  MOD_RES (24)..(25)..(26)..(27): Xaa is A or G or is absent

SEQ ID NO: 72462 - protein, 37 aa, Artificial Sequence
  GFR-binding peptide
  MOD_RES (1)..(2)..(34)..(36): Xaa is C or S
XXVPTRLSNITIQIMDSANNVVLGEMSDMVVESXGXR

SEQ ID NO: 72463 - protein, 37 aa, Artificial Sequence
  GFR-binding peptide
  MOD_RES (1)..(2)..(35)..(37): Xaa is C or S
  MOD_RES (16)..(17)..(18)..(19)..(20): Xaa is A or G
  MOD_RES (21)..(22)..(23)..(24): Xaa is A or G or is absent
XXVPQDLSNITIQIMXXXXXXXXXLGEMSMVVKSXKX

SEQ ID NO: 72464 - protein, 39 aa, Artificial Sequence
  GFR-binding peptide
  MOD_RES (4)..(5)..(39): Xaa is C or S
  MOD_RES (19)..(20)..(21)..(22)..(23): Xaa is A or G
  MOD_RES (24)..(25)..(26)..(27): Xaa is A or G or is absent
PPTXXVPTRLSNITIQIMXXXXXXXXXLGEMSDMVVESX

SEQ ID NO: 72465 - protein, 37 aa, Artificial Sequence
  GFR-binding peptide
  MOD_RES (34)..(36): Xaa is C or S
  MOD_RES (14)..(15)..(16)..(17)..(18): Xaa is A or G
  MOD_RES (19)..(20)..(21)..(22): Xaa is A or G or is absent
VPARLSNITIQIMXXXXXXXXXLGEMSDMVVEAXGXR

SEQ ID NO: 72466 - protein, 40 aa, Artificial Sequence
  GFR-binding peptide
  MOD_RES (3)..(4)..(38)..(40): Xaa is C or S
  MOD_RES (18)..(19)..(20)..(21)..(22): Xaa is A or G
  MOD_RES (23)..(24)..(25)..(26): Xaa is A or G or is absent
PTXXVPTRLSNITIQIMXXXXXXXXXLGEMSDMVVESXGX

SEQ ID NO: 72467 - protein, 37 aa, Artificial Sequence; identical to SEQ ID NO: 54294
  GFR-binding peptide
  MOD_RES (1)..(34)..(36): Xaa is C or S
  MOD_RES (15)..(16)..(17)..(18)..(19): Xaa is A or G
  MOD_RES (20)..(21)..(22)..(23): Xaa is A or G or is absent

SEQ ID NO: 72468 - protein, 35 aa, Artificial Sequence; identical to SEQ ID NO: 51889
  GFR-binding peptide
  MOD_RES (1)..(2)..(33)..(35): Xaa is C or S

SEQ ID NO: 72469 - protein, 40 aa, Artificial Sequence
  GFR-binding peptide
  MOD_RES (2)..(3)..(37)..(39): Xaa is C or S
  MOD_RES (17)..(18)..(19)..(20)..(21): Xaa is A or G
  MOD_RES (22)..(23)..(24)..(25): Xaa is A or G or is absent
PXXTPTKMSNITMQIMXXXXXXXXXLGEMSGMVVDRXGXS

SEQ ID NO: 72470 - protein, 36 aa, Artificial Sequence; identical to SEQ ID NO: 19012
  GFR-binding peptide
  MOD_RES (34)..(36): Xaa is C or S
  MOD_RES (14)..(15)..(16)..(17)..(18): Xaa is A or G
  MOD_RES (19)..(20)..(21)..(22): Xaa is A or G or is absent

SEQ ID NO: 72471 - protein, 36 aa, Artificial Sequence
  GFR-binding peptide
  MOD_RES (5)..(6): Xaa is C or S
VPKPXXAPTKLSNITVQIMDDSSNVILGEMSNMVVR

SEQ ID NO: 72472 - protein, 36 aa, Artificial Sequence; identical to SEQ ID NO: 19013
  GFR-binding peptide
  MOD_RES (3)..(3): Xaa is C or S
  MOD_RES (17)..(18)..(19)..(20)..(21): Xaa is A or G
  MOD_RES (22)..(23)..(24)..(25): Xaa is A or G or is absent

SEQ ID NO: 72473 - protein, 35 aa, Artificial Sequence; identical to SEQ ID NO: 51893
  GFR-binding peptide
  MOD_RES (3)..(4)..(35): Xaa is C or S

SEQ ID NO: 72474 - protein, 39 aa, Artificial Sequence
  GFR-binding peptide
  MOD_RES (3)..(4)..(38): Xaa is C or S
  MOD_RES (18)..(19)..(20)..(21)..(22): Xaa is A or G
  MOD_RES (23)..(24)..(25)..(26): Xaa is A or G or is absent
KPXXAPTKLSNITVQIMXXXXXXXXXLGEMSNMVVRSXG

SEQ ID NO: 72475 - protein, 38 aa, Artificial Sequence
  GFR-binding peptide
  MOD_RES (6)..(7): Xaa is C or S
AAPASXXVPARLSNITIQIMDAANNVVIGEMSDMVVEA

SEQ ID NO: 72476 - protein, 41 aa, Artificial Sequence; identical to SEQ ID NO: 54302
  GFR-binding peptide
  MOD_RES (6)..(7)..(40): Xaa is C or S
  MOD_RES (21)..(22)..(23)..(24)..(25): Xaa is A or G
  MOD_RES (26)..(27)..(28)..(29): Xaa is A or G or is absent

SEQ ID NO: 72477 - protein, 36 aa, Artificial Sequence
  GFR-binding peptide
  MOD_RES (5)..(6): Xaa is C or S
APASXXVPARLSNITIQIMDAANNVVIGEMSDMVVE

SEQ ID NO: 72478 - protein, 33 aa, Artificial Sequence
  GFR-binding peptide
  MOD_RES (1)..(2): Xaa is C or S
XXAPTKLSNITVQIMDDSSNVILGEMSNMVVRS

SEQ ID NO: 72479 - protein, 40 aa, Artificial Sequence
  GFR-binding peptide
  MOD_RES (6)..(7)..(38)..(40): Xaa is C or S
ASAAPXXVPQALSNITIQIMVGRKPKVLGEMSMIVRSXKX

SEQ ID NO: 72480 - protein, 35 aa, Artificial Sequence
  GFR-binding peptide
  MOD_RES (32)..(34): Xaa is C or S
VPTRLSNITIQIMDSANNVVLGEMSDMVVESXGXR

SEQ ID NO: 72481 - protein, 41 aa, Artificial Sequence; identical to SEQ ID NO: 19016
  GFR-binding peptide
  MOD_RES (5)..(5): Xaa is C or S

SEQ ID NO: 72482 - protein, 37 aa, Artificial Sequence; identical to SEQ ID NO: 19017
  GFR-binding peptide
  MOD_RES (2)..(36): Xaa is C or S

SEQ ID NO: 72483 - protein, 33 aa, Artificial Sequence
  GFR-binding peptide
  MOD_RES (2)..(3): Xaa is C or S
PXXTPTKMSNITMQIMNDKQQIILGEMSGMVVD

SEQ ID NO: 72484 - protein, 39 aa, Artificial Sequence; identical to SEQ ID NO: 19020
  GFR-binding peptide
  MOD_RES (37)..(39): Xaa is C or S

SEQ ID NO: 72485 - protein, 37 aa, Artificial Sequence
  GFR-binding peptide
  MOD_RES (3)..(4): Xaa is C or S
  MOD_RES (18)..(19)..(20)..(21)..(22): Xaa is A or G
  MOD_RES (23)..(24)..(25)..(26): Xaa is A or G or is absent
ASXXVPARLSNITIQIMXXXXXXXXXIGEMSDMVVEA

SEQ ID NO: 72486 - protein, 43 aa, Artificial Sequence; identical to SEQ ID NO: 54320
  GFR-binding peptide
  MOD_RES (6)..(7)..(40)..(42): Xaa is C or S
  MOD_RES (21)..(22)..(23)..(24)..(25): Xaa is A or G
  MOD_RES (26)..(27)..(28)..(29): Xaa is A or G or is absent

SEQ ID NO: 72487 - protein, 36 aa, Artificial Sequence
  GFR-binding peptide
  MOD_RES (3)..(4): Xaa is C or S
  MOD_RES (18)..(19)..(20)..(21)..(22): Xaa is A or G
  MOD_RES (23)..(24)..(25)..(26): Xaa is A or G or is absent
ASXXVPARLSNITIQIMXXXXXXXXXIGEMSDMVVE

SEQ ID NO: 72488 - protein, 40 aa, Artificial Sequence; identical to SEQ ID NO: 19023
  GFR-binding peptide
  MOD_RES (3)..(37)..(39): Xaa is C or S
  MOD_RES (17)..(18)..(19)..(20)..(21): Xaa is A or G
  MOD_RES (22)..(23)..(24)..(25): Xaa is A or G or is absent

SEQ ID NO: 72489 - protein, 43 aa, Artificial Sequence; identical to SEQ ID NO: 19025
  GFR-binding peptide
  MOD_RES (4)..(41)..(43): Xaa is C or S
  MOD_RES (20)..(21)..(22)..(23)..(24): Xaa is A or G
  MOD_RES (25)..(26)..(27)..(28): Xaa is A or G or is absent

SEQ ID NO: 72490 - protein, 39 aa, Artificial Sequence
  GFR-binding peptide
  MOD_RES (4)..(5)..(37)..(39): Xaa is C or S
PASXXVPARLSNITIQIMDAANNVVLGEMSDMVVEAXGX

SEQ ID NO: 72491 - protein, 41 aa, Artificial Sequence; identical to SEQ ID NO: 51908
  GFR-binding peptide
  MOD_RES (5)..(6)..(40): Xaa is C or S
  MOD_RES (20)..(21)..(22)..(23)..(24): Xaa is A or G
  MOD_RES (25)..(26)..(27)..(28): Xaa is A or G or is absent

SEQ ID NO: 72492 - protein, 34 aa, Artificial Sequence
  GFR-binding peptide
  MOD_RES (3)..(4): Xaa is C or S
GPXXTPTKMSNITMQIMNDKQQIIIGEMSGMVVD

SEQ ID NO: 72493 - protein, 43 aa, Artificial Sequence; identical to SEQ ID NO: 19031
  GFR-binding peptide
  MOD_RES (3)..(40)..(42): Xaa is C or S

SEQ ID NO: 72494 - protein, 37 aa, Artificial Sequence; identical to SEQ ID NO: 19032
  GFR-binding peptide
  MOD_RES (36)..(36): Xaa is C or S

SEQ ID NO: 72495 - protein, 36 aa, Artificial Sequence
  GFR-binding peptide
  MOD_RES (2)..(3): Xaa is C or S
  MOD_RES (17)..(18)..(19)..(20)..(21): Xaa is A or G
  MOD_RES (22)..(23)..(24)..(25): Xaa is A or G or is absent
PXXAPTKLSNITVQIMXXXXXXXXXLGEMSNMVVRS

SEQ ID NO: 72496 - protein, 38 aa, Artificial Sequence; identical to SEQ ID NO: 54339
  GFR-binding peptide
  MOD_RES (6)..(7)..(38): Xaa is C or S

SEQ ID NO: 72497 - protein, 40 aa, Artificial Sequence; identical to SEQ ID NO: 19033
  GFR-binding peptide
  MOD_RES (3)..(40): Xaa is C or S

SEQ ID NO: 72498 - protein, 40 aa, Artificial Sequence
  GFR-binding peptide
  MOD_RES (4)..(5)..(38)..(40): Xaa is C or S
  MOD_RES (19)..(20)..(21)..(22)..(23): Xaa is A or G
  MOD_RES (24)..(25)..(26)..(27): Xaa is A or G or is absent
ASPXXVSQDLSNITIQIMXXXXXXXXXLGEMSMIVKSXKX

SEQ ID NO: 72499 - protein, 38 aa, Artificial Sequence; identical to SEQ ID NO: 19034
  GFR-binding peptide
  MOD_RES (1)..(35)..(37): Xaa is C or S
  MOD_RES (15)..(16)..(17)..(18)..(19): Xaa is A or G
  MOD_RES (20)..(21)..(22)..(23): Xaa is A or G or is absent

SEQ ID NO: 72500 - protein, 38 aa, Artificial Sequence; identical to SEQ ID NO: 19035
  GFR-binding peptide
  MOD_RES (6)..(6): Xaa is C or S
  MOD_RES (20)..(21)..(22)..(23)..(24): Xaa is A or G
  MOD_RES (25)..(26)..(27)..(28): Xaa is A or G or is absent

SEQ ID NO: 72501 - protein, 40 aa, Artificial Sequence
  GFR-binding peptide
  MOD_RES (6)..(7)..(40): Xaa is C or S
  MOD_RES (21)..(22)..(23)..(24)..(25): Xaa is A or G
  MOD_RES (26)..(27)..(28)..(29): Xaa is A or G or is absent
RVPSTXXAPVKTSNITMQIMXXXXXXXXXLGEMSMIVEEX

SEQ ID NO: 72502 - protein, 35 aa, Artificial Sequence; identical to SEQ ID NO: 19038
  GFR-binding peptide
  MOD_RES (35)..(35): Xaa is C or S
  MOD_RES (14)..(15)..(16)..(17)..(18): Xaa is A or G
  MOD_RES (19)..(20)..(21)..(22): Xaa is A or G or is absent

SEQ ID NO: 72503 - protein, 39 aa, Artificial Sequence; identical to SEQ ID NO: 19039
  GFR-binding peptide
  MOD_RES (5)..(5): Xaa is C or S

SEQ ID NO: 72504 - protein, 41 aa, Artificial Sequence; identical to SEQ ID NO: 19040
  GFR-binding peptide
  MOD_RES (6)..(40): Xaa is C or S

SEQ ID NO: 72505 - protein, 39 aa, Artificial Sequence
  GFR-binding peptide
  MOD_RES (5)..(6): Xaa is C or S
  MOD_RES (20)..(21)..(22)..(23)..(24): Xaa is A or G
  MOD_RES (25)..(26)..(27)..(28): Xaa is A or G or is absent
SAGPXXTPTKMSNITMQIMXXXXXXXXXLGEMSGMVVDR

SEQ ID NO: 72506 - protein, 32 aa, Artificial Sequence
  GFR-binding peptide
  MOD_RES (1)..(2): Xaa is C or S
XXTPTKMSNITMQIMNDKQQIIIGEMSGMVVD

SEQ ID NO: 72507 - protein, 34 aa, Artificial Sequence
  GFR-binding peptide
  MOD_RES (1)..(2)..(33): Xaa is C or S
XXVPQALSNITIQIMVGRKPKVLGEMSMIVRSXK

SEQ ID NO: 72508 - protein, 38 aa, Artificial Sequence; identical to SEQ ID NO: 19041
  GFR-binding peptide
  MOD_RES (6)..(6): Xaa is C or S

SEQ ID NO: 72509 - protein, 36 aa, Artificial Sequence
  GFR-binding peptide
  MOD_RES (1)..(2)..(34)..(36): Xaa is C or S
XXTPTKMSNITMQIMNDKQQIIIGEMSGMVVDRXGX

SEQ ID NO: 72510 - protein, 40 aa, Artificial Sequence; identical to SEQ ID NO: 19043
  GFR-binding peptide
  MOD_RES (1)..(38)..(40): Xaa is C or S
  MOD_RES (17)..(18)..(19)..(20)..(21): Xaa is A or G
  MOD_RES (22)..(23)..(24)..(25): Xaa is A or G or is absent

SEQ ID NO: 72511 - protein, 31 aa, Artificial Sequence
  GFR-binding peptide
  MOD_RES (1)..(1): Xaa is C or S
XTPTKMSNITMQIMNDKQQIIIGEMSGMVVD

SEQ ID NO: 72512 - protein, 35 aa, Artificial Sequence; identical to SEQ ID NO: 19044
  GFR-binding peptide
  MOD_RES (3)..(3): Xaa is C or S

SEQ ID NO: 72513 - protein, 35 aa, Artificial Sequence; identical to SEQ ID NO: 51941
  GFR-binding peptide
  MOD_RES (2)..(3): Xaa is C or S
  MOD_RES (17)..(18)..(19)..(20)..(21): Xaa is A or G
  MOD_RES (22)..(23)..(24)..(25): Xaa is A or G or is absent

SEQ ID NO: 72514 - protein, 35 aa, Artificial Sequence
  GFR-binding peptide
  MOD_RES (1)..(32)..(34): Xaa is C or S
XVPQDLSNITIQIMVGRTPKVLGEMSMVVKSXKXS

SEQ ID NO: 72515 - protein, 36 aa, Artificial Sequence
  GFR-binding peptide
  MOD_RES (1)..(2)..(36): Xaa is C or S
  MOD_RES (16)..(17)..(18)..(19)..(20): Xaa is A or G
  MOD_RES (21)..(22)..(23)..(24): Xaa is A or G or is absent
XXTPTKMSNITMQIMXXXXXXXXXIGEMSGMVVDRX

SEQ ID NO: 72516 - protein, 41 aa, Artificial Sequence; identical to SEQ ID NO: 54359
  GFR-binding peptide
  MOD_RES (6)..(7)..(40): Xaa is C or S
  MOD_RES (21)..(22)..(23)..(24)..(25): Xaa is A or G
  MOD_RES (26)..(27)..(28)..(29): Xaa is A or G or is absent

SEQ ID NO: 72517 - protein, 41 aa, Artificial Sequence
  GFR-binding peptide
  MOD_RES (6)..(7)..(39)..(41): Xaa is C or S
HVPKPXXAPTKLSNITVQIMDDSSNVIIGEMSNMVVRSXGX

SEQ ID NO: 72518 - protein, 37 aa, Artificial Sequence; identical to SEQ ID NO: 19047
  GFR-binding peptide
  MOD_RES (1)..(1): Xaa is C or S

SEQ ID NO: 72519 - protein, 36 aa, Artificial Sequence
  GFR-binding peptide
  MOD_RES (33)..(35): Xaa is C or S
  MOD_RES (14)..(15)..(16)..(17)..(18): Xaa is A or G
  MOD_RES (19)..(20)..(21)..(22): Xaa is A or G or is absent
VPQDLSNITIQIMXXXXXXXXXLGEMSMVVKSXKXS

SEQ ID NO: 72520 - protein, 42 aa, Artificial Sequence; identical to SEQ ID NO: 19048
  GFR-binding peptide
  MOD_RES (6)..(40)..(42): Xaa is C or S

SEQ ID NO: 72521 - protein, 38 aa, Artificial Sequence; identical to SEQ ID NO: 19049
  GFR-binding peptide
  MOD_RES (4)..(4): Xaa is C or S

SEQ ID NO: 72522 - protein, 39 aa, Artificial Sequence; identical to SEQ ID NO: 51946
  GFR-binding peptide
  MOD_RES (2)..(3)..(36)..(38): Xaa is C or S
  MOD_RES (17)..(18)..(19)..(20)..(21): Xaa is A or G
  MOD_RES (22)..(23)..(24)..(25): Xaa is A or G or is absent

SEQ ID NO: 72523 - protein, 40 aa, Artificial Sequence; identical to SEQ ID NO: 51947
  GFR-binding peptide
  MOD_RES (4)..(5)..(37)..(39): Xaa is C or S

SEQ ID NO: 72524 - protein, 36 aa, Artificial Sequence
  GFR-binding peptide
  MOD_RES (1)..(33)..(35): Xaa is C or S
XTPTKMSNITMQIMNDKQQIILGEMSGMVVDRXGXS

SEQ ID NO: 72525 - protein, 39 aa, Artificial Sequence; identical to SEQ ID NO: 19051
  GFR-binding peptide
  MOD_RES (7)..(7): Xaa is C or S
  MOD_RES (21)..(22)..(23)..(24)..(25): Xaa is A or G
  MOD_RES (26)..(27)..(28)..(29): Xaa is A or G or is absent

SEQ ID NO: 72526 - protein, 41 aa, Artificial Sequence; identical to SEQ ID NO: 19052
  GFR-binding peptide
  MOD_RES (3)..(40): Xaa is C or S

SEQ ID NO: 72527 - protein, 36 aa, Artificial Sequence
  GFR-binding peptide
  MOD_RES (1)..(2)..(34)..(36): Xaa is C or S
XXTPTKMSNITMQIMNDKQQIILGEMSGMVVDRXGX

SEQ ID NO: 72528 - protein, 40 aa, Artificial Sequence; identical to SEQ ID NO: 19053
  GFR-binding peptide
  MOD_RES (37)..(39): Xaa is C or S

SEQ ID NO: 72529 - protein, 36 aa, Artificial Sequence
  GFR-binding peptide
  MOD_RES (3)..(4)..(35): Xaa is C or S
APXXVPQALSNITIQIMVGRKPKVLGEMSMIVRSXK

SEQ ID NO: 72530 - protein, 38 aa, Artificial Sequence
  GFR-binding peptide
  MOD_RES (5)..(6): Xaa is C or S
  MOD_RES (20)..(21)..(22)..(23)..(24): Xaa is A or G
  MOD_RES (25)..(26)..(27)..(28): Xaa is A or G or is absent
APASXXVPARLSNITIQIMXXXXXXXXXLGEMSDMVVE

SEQ ID NO: 72531 - protein, 37 aa, Artificial Sequence; identical to SEQ ID NO: 19054
  GFR-binding peptide
  MOD_RES (37)..(37): Xaa is C or S

SEQ ID NO: 72532 - protein, 36 aa, Artificial Sequence
  GFR-binding peptide
  MOD_RES (34)..(36): Xaa is C or S
  MOD_RES (14)..(15)..(16)..(17)..(18): Xaa is A or G
  MOD_RES (19)..(20)..(21)..(22): Xaa is A or G or is absent
TPTKMSNITMQIMXXXXXXXXXIGEMSGMVVDRXGX

SEQ ID NO: 72533 - protein, 35 aa, Artificial Sequence
  GFR-binding peptide
  MOD_RES (1)..(33)..(35): Xaa is C or S
XVPTRLSNITIQIMDSANNVVLGEMSDMVVESXGX

SEQ ID NO: 72534 - protein, 36 aa, Artificial Sequence; identical to SEQ ID NO: 19057
  GFR-binding peptide
  MOD_RES (1)..(1): Xaa is C or S
  MOD_RES (17)..(18)..(19)..(20)..(21): Xaa is A or G
  MOD_RES (22)..(23)..(24)..(25): Xaa is A or G or is absent

SEQ ID NO: 72535 - protein, 35 aa, Artificial Sequence
  GFR-binding peptide
  MOD_RES (1)..(2)..(35): Xaa is C or S
  MOD_RES (16)..(17)..(18)..(19)..(20): Xaa is A or G
  MOD_RES (21)..(22)..(23)..(24): Xaa is A or G or is absent
XXVSQDLSNITIQIMXXXXXXXXXLGEMSMIVKSX

SEQ ID NO: 72536 - protein, 32 aa, Artificial Sequence; identical to SEQ ID NO: 19059
  GFR-binding peptide
  MOD_RES (14)..(15)..(16)..(17)..(18): Xaa is A or G
  MOD_RES (19)..(20)..(21)..(22): Xaa is A or G or is absent

SEQ ID NO: 72537 - protein, 36 aa, Artificial Sequence
  GFR-binding peptide
  MOD_RES (2)..(3)..(34)..(36): Xaa is C or S
PXXVSQDLSNITIQIMIGKTPKILGEMSMIVKSXKX

SEQ ID NO: 72538 - protein, 33 aa, Artificial Sequence; identical to SEQ ID NO: 54376
  GFR-binding peptide
  MOD_RES (2)..(3): Xaa is C or S

SEQ ID NO: 72539 - protein, 41 aa, Artificial Sequence; identical to SEQ ID NO: 19060
  GFR-binding peptide
  MOD_RES (4)..(38)..(40): Xaa is C or S

SEQ ID NO: 72540 - protein, 38 aa, Artificial Sequence
  GFR-binding peptide
  MOD_RES (4)..(5)..(37): Xaa is C or S
PASXXVPARLSNITIQIMDAANNVVLGEMSDMVVEAXG

SEQ ID NO: 72541 - protein, 33 aa, Artificial Sequence
  GFR-binding peptide
  MOD_RES (31)..(33): Xaa is C or S
APVKTSNITMQIMDNGRVLLLGEMSMIVEEXGX

SEQ ID NO: 72542 - protein, 42 aa, Artificial Sequence; identical to SEQ ID NO: 19061
  GFR-binding peptide
  MOD_RES (3)..(40)..(42): Xaa is C or S

SEQ ID NO: 72543 - protein, 36 aa, Artificial Sequence
  GFR-binding peptide
  MOD_RES (5)..(6): Xaa is C or S
SASPXXVPQDLSNITIQIMVGRTPKVLGEMSMVVKS

SEQ ID NO: 72544 - protein, 38 aa, Artificial Sequence; identical to SEQ ID NO: 54382
  GFR-binding peptide
  MOD_RES (1)..(2)..(35)..(37): Xaa is C or S
  MOD_RES (16)..(17)..(18)..(19)..(20): Xaa is A or G
  MOD_RES (21)..(22)..(23)..(24): Xaa is A or G or is absent

SEQ ID NO: 72545 - protein, 32 aa, Artificial Sequence
  GFR-binding peptide
  MOD_RES (14)..(15)..(16)..(17)..(18): Xaa is A or G
  MOD_RES (19)..(20)..(21)..(22): Xaa is A or G or is absent
TPTKMSNITMQIMXXXXXXXXXIGEMSGMVVD

SEQ ID NO: 72546 - protein, 40 aa, Artificial Sequence
  GFR-binding peptide
  MOD_RES (5)..(6)..(40): Xaa is C or S
  MOD_RES (20)..(21)..(22)..(23)..(24): Xaa is A or G
  MOD_RES (25)..(26)..(27)..(28): Xaa is A or G or is absent
APASXXVPARLSNITIQIMXXXXXXXXXLGEMSDMVVEAX

SEQ ID NO: 72547 - protein, 39 aa, Artificial Sequence; identical to SEQ ID NO: 19062
  GFR-binding peptide
  MOD_RES (5)..(5): Xaa is C or S
  MOD_RES (21)..(22)..(23)..(24)..(25): Xaa is A or G
  MOD_RES (26)..(27)..(28)..(29): Xaa is A or G or is absent

SEQ ID NO: 72548 - protein, 34 aa, Artificial Sequence
  GFR-binding peptide
  MOD_RES (1)..(2): Xaa is C or S
  MOD_RES (16)..(17)..(18)..(19)..(20): Xaa is A or G
  MOD_RES (21)..(22)..(23)..(24): Xaa is A or G or is absent
XXAPVKTSNITMQIMXXXXXXXXXIGEMSMIVEE

SEQ ID NO: 72549 - protein, 40 aa, Artificial Sequence
  GFR-binding peptide
  MOD_RES (5)..(6)..(40): Xaa is C or S
  MOD_RES (20)..(21)..(22)..(23)..(24): Xaa is A or G
  MOD_RES (25)..(26)..(27)..(28): Xaa is A or G or is absent
APASXXVPARLSNITIQIMXXXXXXXXXIGEMSDMVVEAX

SEQ ID NO: 72550 - protein, 39 aa, Artificial Sequence
  GFR-binding peptide
  MOD_RES (6)..(7): Xaa is C or S
  MOD_RES (21)..(22)..(23)..(24)..(25): Xaa is A or G
  MOD_RES (26)..(27)..(28)..(29): Xaa is A or G or is absent
GSAGPXXTPTKMSNITMQIMXXXXXXXXXIGEMSGMVVD

SEQ ID NO: 72551 - protein, 39 aa, Artificial Sequence; identical to SEQ ID NO: 19065
  GFR-binding peptide
  MOD_RES (4)..(4): Xaa is C or S

SEQ ID NO: 72552 - protein, 35 aa, Artificial Sequence; identical to SEQ ID NO: 51967
  GFR-binding peptide
  MOD_RES (1)..(32)..(34): Xaa is C or S

SEQ ID NO: 72553 - protein, 42 aa, Artificial Sequence; identical to SEQ ID NO: 19068
  GFR-binding peptide
  MOD_RES (2)..(39)..(41): Xaa is C or S

SEQ ID NO: 72554 - protein, 44 aa, Artificial Sequence; identical to SEQ ID NO: 19069
  GFR-binding peptide
  MOD_RES (7)..(41)..(43): Xaa is C or S
  MOD_RES (21)..(22)..(23)..(24)..(25): Xaa is A or G
  MOD_RES (26)..(27)..(28)..(29): Xaa is A or G or is absent

SEQ ID NO: 72555 - protein, 42 aa, Artificial Sequence
  GFR-binding peptide
  MOD_RES (6)..(7)..(41): Xaa is C or S
  MOD_RES (21)..(22)..(23)..(24)..(25): Xaa is A or G
  MOD_RES (26)..(27)..(28)..(29): Xaa is A or G or is absent
HVPKPXXAPTKLSNITVQIMXXXXXXXXXLGEMSNMVVRSXG

SEQ ID NO: 72556 - protein, 35 aa, Artificial Sequence
  GFR-binding peptide
  MOD_RES (4)..(5): Xaa is C or S
PKPXXAPTKLSNITVQIMDDSSNVILGEMSNMVVR

SEQ ID NO: 72557 - protein, 40 aa, Artificial Sequence
  GFR-binding peptide
  MOD_RES (6)..(7)..(39): Xaa is C or S
STPPTXXVPTRLSNITIQIMDSANNVVLGEMSDMVVESXG

SEQ ID NO: 72558 - protein, 36 aa, Artificial Sequence; identical to SEQ ID NO: 54398
  GFR-binding peptide
  MOD_RES (3)..(4)..(35): Xaa is C or S

SEQ ID NO: 72559 - protein, 41 aa, Artificial Sequence; identical to SEQ ID NO: 51976
  GFR-binding peptide
  MOD_RES (4)..(5)..(38)..(40): Xaa is C or S
  MOD_RES (19)..(20)..(21)..(22)..(23): Xaa is A or G
  MOD_RES (24)..(25)..(26)..(27): Xaa is A or G or is absent

SEQ ID NO: 72560 - protein, 42 aa, Artificial Sequence; identical to SEQ ID NO: 19070
  GFR-binding peptide
  MOD_RES (4)..(41): Xaa is C or S
  MOD_RES (20)..(21)..(22)..(23)..(24): Xaa is A or G
  MOD_RES (25)..(26)..(27)..(28): Xaa is A or G or is absent

SEQ ID NO: 72561 - protein, 37 aa, Artificial Sequence; identical to SEQ ID NO: 19072
  GFR-binding peptide
  MOD_RES (3)..(37): Xaa is C or S
  MOD_RES (17)..(18)..(19)..(20)..(21): Xaa is A or G
  MOD_RES (22)..(23)..(24)..(25): Xaa is A or G or is absent

SEQ ID NO: 72562 - protein, 37 aa, Artificial Sequence; identical to SEQ ID NO: 19073
  GFR-binding peptide
  MOD_RES (37)..(37): Xaa is C or S

SEQ ID NO: 72563 - protein, 42 aa, Artificial Sequence
  GFR-binding peptide
  MOD_RES (4)..(5)..(39)..(41): Xaa is C or S
  MOD_RES (19)..(20)..(21)..(22)..(23): Xaa is A or G
  MOD_RES (24)..(25)..(26)..(27): Xaa is A or G or is absent
AGPXXTPTKMSNITMQIMXXXXXXXXXLGEMSGMVVDRXGXS

SEQ ID NO: 72564 - protein, 37 aa, Artificial Sequence; identical to SEQ ID NO: 19074
  GFR-binding peptide
  MOD_RES (3)..(37): Xaa is C or S
  MOD_RES (17)..(18)..(19)..(20)..(21): Xaa is A or G
  MOD_RES (22)..(23)..(24)..(25): Xaa is A or G or is absent

SEQ ID NO: 72565 - protein, 39 aa, Artificial Sequence; identical to SEQ ID NO: 51987
  GFR-binding peptide
  MOD_RES (3)..(4)..(37)..(39): Xaa is C or S
  MOD_RES (18)..(19)..(20)..(21)..(22): Xaa is A or G
  MOD_RES (23)..(24)..(25)..(26): Xaa is A or G or is absent

SEQ ID NO: 72566 - protein, 38 aa, Artificial Sequence; identical to SEQ ID NO: 19076
  GFR-binding peptide
  MOD_RES (6)..(6): Xaa is C or S

SEQ ID NO: 72567 - protein, 34 aa, Artificial Sequence
  GFR-binding peptide
  MOD_RES (1)..(1): Xaa is C or S
  MOD_RES (15)..(16)..(17)..(18)..(19): Xaa is A or G
  MOD_RES (20)..(21)..(22)..(23): Xaa is A or G or is absent
XAPTKLSNITVQIMXXXXXXXXXLGEMSNMVVRS

SEQ ID NO: 72568 - protein, 40 aa, Artificial Sequence; identical to SEQ ID NO: 51992
  GFR-binding peptide
  MOD_RES (3)..(4)..(37)..(39): Xaa is C or S
  MOD_RES (18)..(19)..(20)..(21)..(22): Xaa is A or G
  MOD_RES (23)..(24)..(25)..(26): Xaa is A or G or is absent

SEQ ID NO: 72569 - protein, 39 aa, Artificial Sequence
  GFR-binding peptide
  MOD_RES (6)..(7)..(38): Xaa is C or S
RVPSTXXAPVKTSNITMQIMDNGRVLLLGEMSMIVEEXG

SEQ ID NO: 72570 - protein, 37 aa, Artificial Sequence
  GFR-binding peptide
  MOD_RES (6)..(7): Xaa is C or S
ASAAPXXVPQALSNITIQIMVGRKPKVLGEMSMIVRS

SEQ ID NO: 72571 - protein, 42 aa, Artificial Sequence; identical to SEQ ID NO: 51998
  GFR-binding peptide
  MOD_RES (5)..(6)..(39)..(41): Xaa is C or S
  MOD_RES (20)..(21)..(22)..(23)..(24): Xaa is A or G
  MOD_RES (25)..(26)..(27)..(28): Xaa is A or G or is absent

SEQ ID NO: 72572 - protein, 35 aa, Artificial Sequence
  GFR-binding peptide
  MOD_RES (2)..(3): Xaa is C or S
  MOD_RES (17)..(18)..(19)..(20)..(21): Xaa is A or G
  MOD_RES (22)..(23)..(24)..(25): Xaa is A or G or is absent
PXXVPQDLSNITIQIMXXXXXXXXXLGEMSMVVKS

SEQ ID NO: 72573 - protein, 36 aa, Artificial Sequence
  GFR-binding peptide
  MOD_RES (1)..(2)..(34)..(36): Xaa is C or S
XXVPTRLSNITIQIMDSANNVVIGEMSDMVVESXGX

SEQ ID NO: 72574 - protein, 39 aa, Artificial Sequence; identical to SEQ ID NO: 19082
  GFR-binding peptide
  MOD_RES (1)..(38): Xaa is C or S

SEQ ID NO: 72575 - protein, 37 aa, Artificial Sequence; identical to SEQ ID NO: 19083
  GFR-binding peptide
  MOD_RES (3)..(37): Xaa is C or S

SEQ ID NO: 72576 - protein, 43 aa, Artificial Sequence; identical to SEQ ID NO: 19084
  GFR-binding peptide
  MOD_RES (3)..(40)..(42): Xaa is C or S

SEQ ID NO: 72577 - protein, 33 aa, Artificial Sequence; identical to SEQ ID NO: 19086
  GFR-binding peptide
  MOD_RES (14)..(15)..(16)..(17)..(18): Xaa is A or G
  MOD_RES (19)..(20)..(21)..(22): Xaa is A or G or is absent

SEQ ID NO: 72578 - protein, 34 aa, Artificial Sequence
  GFR-binding peptide
  MOD_RES (3)..(4): Xaa is C or S
PTXXVPTRLSNITIQIMDSANNVVIGEMSDMVVE

SEQ ID NO: 72579 - protein, 42 aa, Artificial Sequence
  GFR-binding peptide
  MOD_RES (6)..(7)..(39)..(41): Xaa is C or S
AAPASXXVPARLSNITIQIMDAANNVVIGEMSDMVVEAXGXR

SEQ ID NO: 72580 - protein, 39 aa, Artificial Sequence
  GFR-binding peptide
  MOD_RES (6)..(7)..(38): Xaa is C or S
RVPSTXXAPVKTSNITMQIMDNGRVLLIGEMSMIVEEXG

SEQ ID NO: 72581 - protein, 39 aa, Artificial Sequence
  GFR-binding peptide
  MOD_RES (6)..(7): Xaa is C or S
  MOD_RES (21)..(22)..(23)..(24)..(25): Xaa is A or G
  MOD_RES (26)..(27)..(28)..(29): Xaa is A or G or is absent
ASASPXXVPQDLSNITIQIMXXXXXXXXXLGEMSMVVKS

SEQ ID NO: 72582 - protein, 37 aa, Artificial Sequence
  GFR-binding peptide
  MOD_RES (5)..(6): Xaa is C or S
TPPTXXVPTRLSNITIQIMDSANNVVIGEMSDMVVES

SEQ ID NO: 72583 - protein, 39 aa, Artificial Sequence; identical to SEQ ID NO: 19089
  GFR-binding peptide
  MOD_RES (4)..(4): Xaa is C or S

SEQ ID NO: 72584 - protein, 39 aa, Artificial Sequence; identical to SEQ ID NO: 19090
  GFR-binding peptide
  MOD_RES (2)..(39): Xaa is C or S
  MOD_RES (18)..(19)..(20)..(21)..(22): Xaa is A or G
  MOD_RES (23)..(24)..(25)..(26): Xaa is A or G or is absent

SEQ ID NO: 72585 - protein, 35 aa, Artificial Sequence; identical to SEQ ID NO: 54443
  GFR-binding peptide
  MOD_RES (1)..(35): Xaa is C or S
  MOD_RES (15)..(16)..(17)..(18)..(19): Xaa is A or G
  MOD_RES (20)..(21)..(22)..(23): Xaa is A or G or is absent

SEQ ID NO: 72586 - protein, 37 aa, Artificial Sequence
  GFR-binding peptide
  MOD_RES (1)..(34)..(36): Xaa is C or S
  MOD_RES (15)..(16)..(17)..(18)..(19): Xaa is A or G
  MOD_RES (20)..(21)..(22)..(23): Xaa is A or G or is absent
XAPVKTSNITMQIMXXXXXXXXXLGEMSMIVEEXGXL

SEQ ID NO: 72587 - protein, 36 aa, Artificial Sequence
  GFR-binding peptide
  MOD_RES (2)..(3)..(35): Xaa is C or S
SXXVPARLSNITIQIMDAANNVVLGEMSDMVVEAXG

SEQ ID NO: 72588 - protein, 35 aa, Artificial Sequence
  GFR-binding peptide
  MOD_RES (1)..(35): Xaa is C or S
  MOD_RES (15)..(16)..(17)..(18)..(19): Xaa is A or G
  MOD_RES (20)..(21)..(22)..(23): Xaa is A or G or is absent
XAPTKLSNITVQIMXXXXXXXXXLGEMSNMVVRSX

SEQ ID NO: 72589 - protein, 38 aa, Artificial Sequence
  GFR-binding peptide
  MOD_RES (4)..(5)..(38): Xaa is C or S
  MOD_RES (19)..(20)..(21)..(22)..(23): Xaa is A or G
  MOD_RES (24)..(25)..(26)..(27): Xaa is A or G or is absent
PSTXXAPVKTSNITMQIMXXXXXXXXXIGEMSMIVEEX

SEQ ID NO: 72590 - protein, 42 aa, Artificial Sequence
  GFR-binding peptide
  MOD_RES (4)..(5)..(39)..(41): Xaa is C or S
  MOD_RES (19)..(20)..(21)..(22)..(23): Xaa is A or G
  MOD_RES (24)..(25)..(26)..(27): Xaa is A or G or is absent
AGPXXTPTKMSNITMQIMXXXXXXXXXIGEMSGMVVDRXGXS

SEQ ID NO: 72591 - protein, 31 aa, Artificial Sequence
  GFR-binding peptide
  MOD_RES (1)..(1): Xaa is C or S
XAPTKLSNITVQIMDDSSNVILGEMSNMVVR

SEQ ID NO: 72592 - protein, 38 aa, Artificial Sequence; identical to SEQ ID NO: 19093
  GFR-binding peptide
  MOD_RES (37)..(37): Xaa is C or S

SEQ ID NO: 72593 - protein, 38 aa, Artificial Sequence
  GFR-binding peptide
  MOD_RES (5)..(6): Xaa is C or S
  MOD_RES (20)..(21)..(22)..(23)..(24): Xaa is A or G
  MOD_RES (25)..(26)..(27)..(28): Xaa is A or G or is absent
VPSTXXAPVKTSNITMQIMXXXXXXXXXIGEMSMIVEE

SEQ ID NO: 72594 - protein, 39 aa, Artificial Sequence
  GFR-binding peptide
  MOD_RES (6)..(7): Xaa is C or S
  MOD_RES (21)..(22)..(23)..(24)..(25): Xaa is A or G
  MOD_RES (26)..(27)..(28)..(29): Xaa is A or G or is absent
AAPASXXVPARLSNITIQIMXXXXXXXXXIGEMSDMVVE

SEQ ID NO: 72595 - protein, 40 aa, Artificial Sequence; identical to SEQ ID NO: 52018
  GFR-binding peptide
  MOD_RES (3)..(4)..(38)..(40): Xaa is C or S
  MOD_RES (18)..(19)..(20)..(21)..(22): Xaa is A or G
  MOD_RES (23)..(24)..(25)..(26): Xaa is A or G or is absent

SEQ ID NO: 72596 - protein, 35 aa, Artificial Sequence
  GFR-binding peptide
  MOD_RES (34)..(34): Xaa is C or S
  MOD_RES (14)..(15)..(16)..(17)..(18): Xaa is A or G
  MOD_RES (19)..(20)..(21)..(22): Xaa is A or G or is absent
TPTKMSNITMQIMXXXXXXXXXIGEMSGMVVDRXG

SEQ ID NO: 72597 - protein, 40 aa, Artificial Sequence; identical to SEQ ID NO: 19096
  GFR-binding peptide
  MOD_RES (3)..(40): Xaa is C or S

SEQ ID NO: 72598 - protein, 32 aa, Artificial Sequence; identical to SEQ ID NO: 54452
  GFR-binding peptide
  MOD_RES (1)..(2): Xaa is C or S

SEQ ID NO: 72599 - protein, 42 aa, Artificial Sequence
  GFR-binding peptide
  MOD_RES (6)..(7)..(40)..(42): Xaa is C or S
  MOD_RES (21)..(22)..(23)..(24)..(25): Xaa is A or G
  MOD_RES (26)..(27)..(28)..(29): Xaa is A or G or is absent
ASASPXXVSQDLSNITIQIMXXXXXXXXXLGEMSMIVKSXKX

SEQ ID NO: 72600 - protein, 37 aa, Artificial Sequence; identical to SEQ ID NO: 19097
  GFR-binding peptide
  MOD_RES (1)..(35)..(37): Xaa is C or S

SEQ ID NO: 72601 - protein, 36 aa, Artificial Sequence; identical to SEQ ID NO: 54454
  GFR-binding peptide
  MOD_RES (4)..(5): Xaa is C or S

SEQ ID NO: 72602 - protein, 36 aa, Artificial Sequence
  GFR-binding peptide
  MOD_RES (5)..(6): Xaa is C or S
TPPTXXVPTRLSNITIQIMDSANNVVLGEMSDMVVE

SEQ ID NO: 72603 - protein, 32 aa, Artificial Sequence
  GFR-binding peptide
  MOD_RES (1)..(1): Xaa is C or S
XTPTKMSNITMQIMNDKQQIILGEMSGMVVDR

SEQ ID NO: 72604 - protein, 33 aa, Artificial Sequence; identical to SEQ ID NO: 54461
  GFR-binding peptide
  MOD_RES (2)..(3): Xaa is C or S

SEQ ID NO: 72605 - protein, 41 aa, Artificial Sequence; identical to SEQ ID NO: 19100
  GFR-binding peptide
  MOD_RES (3)..(40): Xaa is C or S

SEQ ID NO: 72606 - protein, 34 aa, Artificial Sequence
  GFR-binding peptide
  MOD_RES (32)..(34): Xaa is C or S
TPTKMSNITMQIMNDKQQIILGEMSGMVVDRXGX

SEQ ID NO: 72607 - protein, 35 aa, Artificial Sequence; identical to SEQ ID NO: 52036
  GFR-binding peptide
  MOD_RES (2)..(3)..(35): Xaa is C or S

SEQ ID NO: 72608 - protein, 39 aa, Artificial Sequence; identical to SEQ ID NO: 19101
  GFR-binding peptide
  MOD_RES (3)..(37)..(39): Xaa is C or S
  MOD_RES (17)..(18)..(19)..(20)..(21): Xaa is A or G
  MOD_RES (22)..(23)..(24)..(25): Xaa is A or G or is absent

SEQ ID NO: 72609 - protein, 39 aa, Artificial Sequence; identical to SEQ ID NO: 54465
  GFR-binding peptide
  MOD_RES (6)..(7)..(38): Xaa is C or S

SEQ ID NO: 72610 - protein, 42 aa, Artificial Sequence; identical to SEQ ID NO: 19102
  GFR-binding peptide
  MOD_RES (5)..(42): Xaa is C or S
  MOD_RES (21)..(22)..(23)..(24)..(25): Xaa is A or G
  MOD_RES (26)..(27)..(28)..(29): Xaa is A or G or is absent

SEQ ID NO: 72611 - protein, 41 aa, Artificial Sequence
  GFR-binding peptide
  MOD_RES (6)..(7)..(40): Xaa is C or S
  MOD_RES (21)..(22)..(23)..(24)..(25): Xaa is A or G
  MOD_RES (26)..(27)..(28)..(29): Xaa is A or G or is absent
ASAAPXXVPQALSNITIQIMXXXXXXXXXLGEMSMIVRSXK

SEQ ID NO: 72612 - protein, 39 aa, Artificial Sequence; identical to SEQ ID NO: 19103
  GFR-binding peptide
  MOD_RES (37)..(39): Xaa is C or S

SEQ ID NO: 72613 - protein, 43 aa, Artificial Sequence; identical to SEQ ID NO: 19104
  GFR-binding peptide
  MOD_RES (4)..(41)..(43): Xaa is C or S

SEQ ID NO: 72614 - protein, 42 aa, Artificial Sequence
  GFR-binding peptide
  MOD_RES (5)..(6)..(40)..(42): Xaa is C or S
  MOD_RES (20)..(21)..(22)..(23)..(24): Xaa is A or G
  MOD_RES (25)..(26)..(27)..(28): Xaa is A or G or is absent
APASXXVPARLSNITIQIMXXXXXXXXXLGEMSDMVVEAXGX

SEQ ID NO: 72615 - protein, 37 aa, Artificial Sequence
  GFR-binding peptide
  MOD_RES (2)..(3)..(35)..(37): Xaa is C or S
TXXVPTRLSNITIQIMDSANNVVIGEMSDMVVESXGX

SEQ ID NO: 72616 - protein, 39 aa, Artificial Sequence; identical to SEQ ID NO: 19106
  GFR-binding peptide
  MOD_RES (6)..(6): Xaa is C or S
  MOD_RES (20)..(21)..(22)..(23)..(24): Xaa is A or G
  MOD_RES (25)..(26)..(27)..(28): Xaa is A or G or is absent

SEQ ID NO: 72617 - protein, 44 aa, Artificial Sequence; identical to SEQ ID NO: 19107
  GFR-binding peptide
  MOD_RES (5)..(42)..(44): Xaa is C or S

SEQ ID NO: 72618 - protein, 44 aa, Artificial Sequence; identical to SEQ ID NO: 19108
  GFR-binding peptide
  MOD_RES (5)..(42)..(44): Xaa is C or S

SEQ ID NO: 72619 - protein, 38 aa, Artificial Sequence
  GFR-binding peptide
  MOD_RES (5)..(6)..(38): Xaa is C or S
APASXXVPARLSNITIQIMDAANNVVLGEMSDMVVEAX

SEQ ID NO: 72620 - protein, 38 aa, Artificial Sequence; identical to SEQ ID NO: 19109
  GFR-binding peptide
  MOD_RES (35)..(37): Xaa is C or S

SEQ ID NO: 72621 - protein, 34 aa, Artificial Sequence
  GFR-binding peptide
  MOD_RES (3)..(4): Xaa is C or S
ASXXVPARLSNITIQIMDAANNVVIGEMSDMVVE

SEQ ID NO: 72622 - protein, 35 aa, Artificial Sequence; identical to SEQ ID NO: 19111
  GFR-binding peptide
  MOD_RES (2)..(2): Xaa is C or S
  MOD_RES (16)..(17)..(18)..(19)..(20): Xaa is A or G
  MOD_RES (21)..(22)..(23)..(24): Xaa is A or G or is absent

SEQ ID NO: 72623 - protein, 38 aa, Artificial Sequence
  GFR-binding peptide
  MOD_RES (5)..(6)..(38): Xaa is C or S
TPPTXXVPTRLSNITIQIMDSANNVVLGEMSDMVVESX

SEQ ID NO: 72624 - protein, 36 aa, Artificial Sequence
  GFR-binding peptide
  MOD_RES (1)..(35): Xaa is C or S
  MOD_RES (15)..(16)..(17)..(18)..(19): Xaa is A or G
  MOD_RES (20)..(21)..(22)..(23): Xaa is A or G or is absent
XVPARLSNITIQIMXXXXXXXXXIGEMSDMVVEAXG

SEQ ID NO: 72625 - protein, 40 aa, Artificial Sequence
  GFR-binding peptide
  MOD_RES (3)..(4)..(37)..(39): Xaa is C or S
  MOD_RES (18)..(19)..(20)..(21)..(22): Xaa is A or G
  MOD_RES (23)..(24)..(25)..(26): Xaa is A or G or is absent
STXXAPVKTSNITMQIMXXXXXXXXXIGEMSMIVEEXGXL

SEQ ID NO: 72626 - protein, 41 aa, Artificial Sequence
  GFR-binding peptide
  MOD_RES (6)..(7)..(40): Xaa is C or S
  MOD_RES (21)..(22)..(23)..(24)..(25): Xaa is A or G
  MOD_RES (26)..(27)..(28)..(29): Xaa is A or G or is absent
ASASPXXVPQDLSNITIQIMXXXXXXXXXLGEMSMVVKSXK

SEQ ID NO: 72627 - protein, 39 aa, Artificial Sequence
  GFR-binding peptide
  MOD_RES (4)..(5)..(36)..(38): Xaa is C or S
ASPXXVSQDLSNITIQIMIGKTPKILGEMSMIVKSXKXS

SEQ ID NO: 72628 - protein, 33 aa, Artificial Sequence; identical to SEQ ID NO: 19114
  GFR-binding peptide

SEQ ID NO: 72629 - protein, 40 aa, Artificial Sequence
  GFR-binding peptide
  MOD_RES (6)..(7)..(40): Xaa is C or S
  MOD_RES (21)..(22)..(23)..(24)..(25): Xaa is A or G
  MOD_RES (26)..(27)..(28)..(29): Xaa is A or G or is absent
RVPSTXXAPVKTSNITMQIMXXXXXXXXXIGEMSMIVEEX

SEQ ID NO: 72630 - protein, 34 aa, Artificial Sequence; identical to SEQ ID NO: 54476
  GFR-binding peptide
  MOD_RES (1)..(2): Xaa is C or S
  MOD_RES (16)..(17)..(18)..(19)..(20): Xaa is A or G
  MOD_RES (21)..(22)..(23)..(24): Xaa is A or G or is absent

SEQ ID NO: 72631 - protein, 36 aa, Artificial Sequence
  GFR-binding peptide
  MOD_RES (1)..(2)..(35): Xaa is C or S
  MOD_RES (16)..(17)..(18)..(19)..(20): Xaa is A or G
  MOD_RES (21)..(22)..(23)..(24): Xaa is A or G or is absent
XXVSQDLSNITIQIMXXXXXXXXXLGEMSMIVKSXK

SEQ ID NO: 72632 - protein, 30 aa, Artificial Sequence
  GFR-binding peptide
APTKLSNITVQIMDDSSNVILGEMSNMVVR

SEQ ID NO: 72633 - protein, 31 aa, Artificial Sequence; identical to SEQ ID NO: 54479
  GFR-binding peptide
  MOD_RES (31)..(31): Xaa is C or S

SEQ ID NO: 72634 - protein, 37 aa, Artificial Sequence
  GFR-binding peptide
  MOD_RES (4)..(5)..(37): Xaa is C or S
PPTXXVPTRLSNITIQIMDSANNVVIGEMSDMVVESX

SEQ ID NO: 72635 - protein, 37 aa, Artificial Sequence
  GFR-binding peptide
  MOD_RES (4)..(5): Xaa is C or S
  MOD_RES (19)..(20)..(21)..(22)..(23): Xaa is A or G
  MOD_RES (24)..(25)..(26)..(27): Xaa is A or G or is absent
PSTXXAPVKTSNITMQIMXXXXXXXXXLGEMSMIVEE

SEQ ID NO: 72636 - protein, 41 aa, Artificial Sequence
  GFR-binding peptide
  MOD_RES (6)..(7)..(38)..(40): Xaa is C or S
ASASPXXVSQDLSNITIQIMIGKTPKILGEMSMIVKSXKXS

SEQ ID NO: 72637 - protein, 39 aa, Artificial Sequence; identical to SEQ ID NO: 19117
  GFR-binding peptide
  MOD_RES (36)..(38): Xaa is C or S

SEQ ID NO: 72638 - protein, 37 aa, Artificial Sequence; identical to SEQ ID NO: 19119
  GFR-binding peptide
  MOD_RES (2)..(36): Xaa is C or S

SEQ ID NO: 72639 - protein, 43 aa, Artificial Sequence
  GFR-binding peptide
  MOD_RES (6)..(7)..(40)..(42): Xaa is C or S
  MOD_RES (21)..(22)..(23)..(24)..(25): Xaa is A or G
  MOD_RES (26)..(27)..(28)..(29): Xaa is A or G or is absent
RVPSTXXAPVKTSNITMQIMXXXXXXXXXLGEMSMIVEEXGXL

SEQ ID NO: 72640 - protein, 39 aa, Artificial Sequence
  GFR-binding peptide
  MOD_RES (5)..(6)..(37)..(39): Xaa is C or S
SAAPXXVPQALSNITIQIMVGRKPKVLGEMSMIVRSXKX

SEQ ID NO: 72641 - protein, 35 aa, Artificial Sequence
  GFR-binding peptide
  MOD_RES (2)..(3)..(35): Xaa is C or S
TXXVPTRLSNITIQIMDSANNVVIGEMSDMVVESX

SEQ ID NO: 72642 - protein, 36 aa, Artificial Sequence; identical to SEQ ID NO: 19120
  GFR-binding peptide
  MOD_RES (1)..(1): Xaa is C or S
  MOD_RES (17)..(18)..(19)..(20)..(21): Xaa is A or G
  MOD_RES (22)..(23)..(24)..(25): Xaa is A or G or is absent

SEQ ID NO: 72643 - protein, 34 aa, Artificial Sequence; identical to SEQ ID NO: 19122
  GFR-binding peptide
  MOD_RES (1)..(1): Xaa is C or S

SEQ ID NO: 72644 - protein, 39 aa, Artificial Sequence
  GFR-binding peptide
  MOD_RES (5)..(6): Xaa is C or S
  MOD_RES (20)..(21)..(22)..(23)..(24): Xaa is A or G
  MOD_RES (25)..(26)..(27)..(28): Xaa is A or G or is absent
APASXXVPARLSNITIQIMXXXXXXXXXIGEMSDMVVEA

SEQ ID NO: 72645 - protein, 40 aa, Artificial Sequence
  GFR-binding peptide
  MOD_RES (5)..(6)..(37)..(39): Xaa is C or S
SASPXXVSQDLSNITIQIMIGKTPKILGEMSMIVKSXKXS

SEQ ID NO: 72646 - protein, 37 aa, Artificial Sequence; identical to SEQ ID NO: 19124
  GFR-binding peptide
  MOD_RES (1)..(1): Xaa is C or S
  MOD_RES (17)..(18)..(19)..(20)..(21): Xaa is A or G
  MOD_RES (22)..(23)..(24)..(25): Xaa is A or G or is absent

SEQ ID NO: 72647 - protein, 43 aa, Artificial Sequence
  GFR-binding peptide
  MOD_RES (5)..(6)..(40)..(42): Xaa is C or S
  MOD_RES (20)..(21)..(22)..(23)..(24): Xaa is A or G
  MOD_RES (25)..(26)..(27)..(28): Xaa is A or G or is absent
SAGPXXTPTKMSNITMQIMXXXXXXXXXIGEMSGMVVDRXGXS

SEQ ID NO: 72648 - protein, 36 aa, Artificial Sequence; identical to SEQ ID NO: 54498
  GFR-binding peptide
  MOD_RES (4)..(5)..(36): Xaa is C or S

SEQ ID NO: 72649 - protein, 39 aa, Artificial Sequence; identical to SEQ ID NO: 54499
  GFR-binding peptide
  MOD_RES (4)..(5)..(36)..(38): Xaa is C or S

SEQ ID NO: 72650 - protein, 38 aa, Artificial Sequence; identical to SEQ ID NO: 19127
  GFR-binding peptide
  MOD_RES (35)..(37): Xaa is C or S

SEQ ID NO: 72651 - protein, 37 aa, Artificial Sequence; identical to SEQ ID NO: 19128
  GFR-binding peptide
  MOD_RES (35)..(37): Xaa is C or S
  MOD_RES (14)..(15)..(16)..(17)..(18): Xaa is A or G
  MOD_RES (19)..(20)..(21)..(22): Xaa is A or G or is absent

SEQ ID NO: 72652 - protein, 36 aa, Artificial Sequence
  GFR-binding peptide
  MOD_RES (33)..(35): Xaa is C or S
  MOD_RES (14)..(15)..(16)..(17)..(18): Xaa is A or G
  MOD_RES (19)..(20)..(21)..(22): Xaa is A or G or is absent
VSQDLSNITIQIMXXXXXXXXXLGEMSMIVKSXKXS

SEQ ID NO: 72653 - protein, 40 aa, Artificial Sequence; identical to SEQ ID NO: 52072
  GFR-binding peptide
  MOD_RES (6)..(7)..(40): Xaa is C or S
  MOD_RES (21)..(22)..(23)..(24)..(25): Xaa is A or G
  MOD_RES (26)..(27)..(28)..(29): Xaa is A or G or is absent

SEQ ID NO: 72654 - protein, 36 aa, Artificial Sequence; identical to SEQ ID NO: 54502
  GFR-binding peptide
  MOD_RES (2)..(3)..(35): Xaa is C or S

SEQ ID NO: 72655 - protein, 34 aa, Artificial Sequence
  GFR-binding peptide
  MOD_RES (1)..(33): Xaa is C or S
XAPTKLSNITVQIMDDSSNVILGEMSNMVVRSXG

SEQ ID NO: 72656 - protein, 45 aa, Artificial Sequence; identical to SEQ ID NO: 19129
  GFR-binding peptide
  MOD_RES (5)..(42)..(44): Xaa is C or S
  MOD_RES (21)..(22)..(23)..(24)..(25): Xaa is A or G
  MOD_RES (26)..(27)..(28)..(29): Xaa is A or G or is absent

SEQ ID NO: 72657 - protein, 38 aa, Artificial Sequence; identical to SEQ ID NO: 19130
  GFR-binding peptide
  MOD_RES (2)..(36)..(38): Xaa is C or S

SEQ ID NO: 72658 - protein, 36 aa, Artificial Sequence
  GFR-binding peptide
  MOD_RES (2)..(3)..(34)..(36): Xaa is C or S
PXXVPQALSNITIQIMVGRKPKVLGEMSMIVRSXKX

SEQ ID NO: 72659 - protein, 39 aa, Artificial Sequence; identical to SEQ ID NO: 19131
  GFR-binding peptide
  MOD_RES (3)..(3): Xaa is C or S

SEQ ID NO: 72660 - protein, 45 aa, Artificial Sequence; identical to SEQ ID NO: 19133
  GFR-binding peptide
  MOD_RES (5)..(42)..(44): Xaa is C or S
  MOD_RES (21)..(22)..(23)..(24)..(25): Xaa is A or G
  MOD_RES (26)..(27)..(28)..(29): Xaa is A or G or is absent

SEQ ID NO: 72661 - protein, 34 aa, Artificial Sequence
  GFR-binding peptide
  MOD_RES (2)..(3): Xaa is C or S
PXXTPTKMSNITMQIMNDKQQIIIGEMSGMVVDR

SEQ ID NO: 72662 - protein, 35 aa, Artificial Sequence
  GFR-binding peptide
  MOD_RES (32)..(34): Xaa is C or S
TPTKMSNITMQIMNDKQQIIIGEMSGMVVDRXGXS

SEQ ID NO: 72663 - protein, 35 aa, Artificial Sequence
  GFR-binding peptide
  MOD_RES (32)..(34): Xaa is C or S
TPTKMSNITMQIMNDKQQIILGEMSGMVVDRXGXS

SEQ ID NO: 72664 - protein, 34 aa, Artificial Sequence
  GFR-binding peptide
  MOD_RES (1)..(2)..(34): Xaa is C or S
XXAPTKLSNITVQIMDDSSNVILGEMSNMVVRSX

SEQ ID NO: 72665 - protein, 41 aa, Artificial Sequence; identical to SEQ ID NO: 52095
  GFR-binding peptide
  MOD_RES (4)..(5)..(38)..(40): Xaa is C or S
  MOD_RES (19)..(20)..(21)..(22)..(23): Xaa is A or G
  MOD_RES (24)..(25)..(26)..(27): Xaa is A or G or is absent

SEQ ID NO: 72666 - protein, 39 aa, Artificial Sequence
  GFR-binding peptide
  MOD_RES (5)..(6)..(39): Xaa is C or S
  MOD_RES (20)..(21)..(22)..(23)..(24): Xaa is A or G
  MOD_RES (25)..(26)..(27)..(28): Xaa is A or G or is absent
SASPXXVSQDLSNITIQIMXXXXXXXXXLGEMSMIVKSX

SEQ ID NO: 72667 - protein, 35 aa, Artificial Sequence; identical to SEQ ID NO: 19135
  GFR-binding peptide
  MOD_RES (34)..(34): Xaa is C or S
  MOD_RES (14)..(15)..(16)..(17)..(18): Xaa is A or G
  MOD_RES (19)..(20)..(21)..(22): Xaa is A or G or is absent

SEQ ID NO: 72668 - protein, 31 aa, Artificial Sequence
  GFR-binding peptide
  MOD_RES (1)..(1): Xaa is C or S
XVSQDLSNITIQIMIGKTPKILGEMSMIVKS

SEQ ID NO: 72669 - protein, 34 aa, Artificial Sequence; identical to SEQ ID NO: 19137
  GFR-binding peptide
  MOD_RES (15)..(16)..(17)..(18)..(19): Xaa is A or G
  MOD_RES (20)..(21)..(22)..(23): Xaa is A or G or is absent

SEQ ID NO: 72670 - protein, 35 aa, Artificial Sequence
  GFR-binding peptide
  MOD_RES (2)..(3)..(35): Xaa is C or S
SXXVPARLSNITIQIMDAANNVVLGEMSDMVVEAX

SEQ ID NO: 72671 - protein, 38 aa, Artificial Sequence
  GFR-binding peptide
  MOD_RES (3)..(4)..(36)..(38): Xaa is C or S
GPXXTPTKMSNITMQIMNDKQQIIIGEMSGMVVDRXGX

SEQ ID NO: 72672 - protein, 37 aa, Artificial Sequence; identical to SEQ ID NO: 52104
  GFR-binding peptide
  MOD_RES (1)..(34)..(36): Xaa is C or S
  MOD_RES (15)..(16)..(17)..(18)..(19): Xaa is A or G
  MOD_RES (20)..(21)..(22)..(23): Xaa is A or G or is absent

SEQ ID NO: 72673 - protein, 34 aa, Artificial Sequence
  GFR-binding peptide
  MOD_RES (2)..(3)..(34): Xaa is C or S
PXXVPQALSNITIQIMVGRKPKVLGEMSMIVRSX

SEQ ID NO: 72674 - protein, 39 aa, Artificial Sequence; identical to SEQ ID NO: 19138
  GFR-binding peptide
  MOD_RES (7)..(7): Xaa is C or S

SEQ ID NO: 72675 - protein, 34 aa, Artificial Sequence
  GFR-binding peptide
  MOD_RES (1)..(2): Xaa is C or S
  MOD_RES (16)..(17)..(18)..(19)..(20): Xaa is A or G
  MOD_RES (21)..(22)..(23)..(24): Xaa is A or G or is absent
XXVPTRLSNITIQIMXXXXXXXXXLGEMSDMVVE

SEQ ID NO: 72676 - protein, 36 aa, Artificial Sequence; identical to SEQ ID NO: 19139
  GFR-binding peptide
  MOD_RES (1)..(35): Xaa is C or S

SEQ ID NO: 72677 - protein, 33 aa, Artificial Sequence
  GFR-binding peptide
  MOD_RES (14)..(15)..(16)..(17)..(18): Xaa is A or G
  MOD_RES (19)..(20)..(21)..(22): Xaa is A or G or is absent
APTKLSNITVQIMXXXXXXXXXLGEMSNMVVRS

SEQ ID NO: 72678 - protein, 41 aa, Artificial Sequence
  GFR-binding peptide
  MOD_RES (5)..(6)..(40): Xaa is C or S
  MOD_RES (20)..(21)..(22)..(23)..(24): Xaa is A or G
  MOD_RES (25)..(26)..(27)..(28): Xaa is A or G or is absent
VPKPXXAPTKLSNITVQIMXXXXXXXXXLGEMSNMVVRSXG

SEQ ID NO: 72679 - protein, 36 aa, Artificial Sequence
  GFR-binding peptide
  MOD_RES (5)..(6): Xaa is C or S
TPPTXXVPTRLSNITIQIMDSANNVVIGEMSDMVVE

SEQ ID NO: 72680 - protein, 41 aa, Artificial Sequence; identical to SEQ ID NO: 19140
  GFR-binding peptide
  MOD_RES (7)..(41): Xaa is C or S

SEQ ID NO: 72681 - protein, 37 aa, Artificial Sequence
  GFR-binding peptide
  MOD_RES (6)..(7): Xaa is C or S
HVPKPXXAPTKLSNITVQIMDDSSNVIIGEMSNMVVR

SEQ ID NO: 72682 - protein, 41 aa, Artificial Sequence; identical to SEQ ID NO: 19142
  GFR-binding peptide
  MOD_RES (7)..(41): Xaa is C or S
  MOD_RES (21)..(22)..(23)..(24)..(25): Xaa is A or G
  MOD_RES (26)..(27)..(28)..(29): Xaa is A or G or is absent

SEQ ID NO: 72683 - protein, 37 aa, Artificial Sequence; identical to SEQ ID NO: 54529
  GFR-binding peptide
  MOD_RES (2)..(3)..(34)..(36): Xaa is C or S

SEQ ID NO: 72684 - protein, 34 aa, Artificial Sequence
  GFR-binding peptide
  MOD_RES (2)..(3): Xaa is C or S
TXXVPTRLSNITIQIMDSANNVVIGEMSDMVVES

SEQ ID NO: 72685 - protein, 36 aa, Artificial Sequence; identical to SEQ ID NO: 52112
  GFR-binding peptide
  MOD_RES (1)..(35): Xaa is C or S
  MOD_RES (15)..(16)..(17)..(18)..(19): Xaa is A or G
  MOD_RES (20)..(21)..(22)..(23): Xaa is A or G or is absent

SEQ ID NO: 72686 - protein, 35 aa, Artificial Sequence
  GFR-binding peptide
  MOD_RES (1)..(2)..(34): Xaa is C or S
XXVPARLSNITIQIMDAANNVVLGEMSDMVVEAXG

SEQ ID NO: 72687 - protein, 36 aa, Artificial Sequence; identical to SEQ ID NO: 19144
  GFR-binding peptide
  MOD_RES (4)..(4): Xaa is C or S
  MOD_RES (18)..(19)..(20)..(21)..(22): Xaa is A or G
  MOD_RES (23)..(24)..(25)..(26): Xaa is A or G or is absent

SEQ ID NO: 72688 - protein, 42 aa, Artificial Sequence; identical to SEQ ID NO: 19145
  GFR-binding peptide
  MOD_RES (4)..(41): Xaa is C or S
  MOD_RES (20)..(21)..(22)..(23)..(24): Xaa is A or G
  MOD_RES (25)..(26)..(27)..(28): Xaa is A or G or is absent

SEQ ID NO: 72689 - protein, 41 aa, Artificial Sequence; identical to SEQ ID NO: 19146
  GFR-binding peptide
  MOD_RES (5)..(5): Xaa is C or S
  MOD_RES (21)..(22)..(23)..(24)..(25): Xaa is A or G
  MOD_RES (26)..(27)..(28)..(29): Xaa is A or G or is absent

SEQ ID NO: 72690 - protein, 40 aa, Artificial Sequence; identical to SEQ ID NO: 19147
  GFR-binding peptide
  MOD_RES (2)..(39): Xaa is C or S
  MOD_RES (18)..(19)..(20)..(21)..(22): Xaa is A or G
  MOD_RES (23)..(24)..(25)..(26): Xaa is A or G or is absent

SEQ ID NO: 72691 - protein, 42 aa, Artificial Sequence
  GFR-binding peptide
  MOD_RES (6)..(7)..(40)..(42): Xaa is C or S
  MOD_RES (21)..(22)..(23)..(24)..(25): Xaa is A or G
  MOD_RES (26)..(27)..(28)..(29): Xaa is A or G or is absent
RVPSTXXAPVKTSNITMQIMXXXXXXXXXIGEMSMIVEEXGX

SEQ ID NO: 72692 - protein, 35 aa, Artificial Sequence; identical to SEQ ID NO: 54541
  GFR-binding peptide
  MOD_RES (2)..(3): Xaa is C or S
  MOD_RES (17)..(18)..(19)..(20)..(21): Xaa is A or G
  MOD_RES (22)..(23)..(24)..(25): Xaa is A or G or is absent

SEQ ID NO: 72693 - protein, 34 aa, Artificial Sequence
  GFR-binding peptide
  MOD_RES (33)..(33): Xaa is C or S
  MOD_RES (14)..(15)..(16)..(17)..(18): Xaa is A or G
  MOD_RES (19)..(20)..(21)..(22): Xaa is A or G or is absent
APVKTSNITMQIMXXXXXXXXXIGEMSMIVEEXG

SEQ ID NO: 72694 - protein, 38 aa, Artificial Sequence; identical to SEQ ID NO: 19151
  GFR-binding peptide
  MOD_RES (37)..(37): Xaa is C or S

SEQ ID NO: 72695 - protein, 32 aa, Artificial Sequence
  GFR-binding peptide
  MOD_RES (1)..(1): Xaa is C or S
XVPARLSNITIQIMDAANNVVIGEMSDMVVEA

SEQ ID NO: 72696 - protein, 41 aa, Artificial Sequence; identical to SEQ ID NO: 19152
  GFR-binding peptide
  MOD_RES (1)..(38)..(40): Xaa is C or S

SEQ ID NO: 72697 - protein, 37 aa, Artificial Sequence; identical to SEQ ID NO: 19153
  GFR-binding peptide
  MOD_RES (34)..(36): Xaa is C or S

SEQ ID NO: 72698 - protein, 39 aa, Artificial Sequence; identical to SEQ ID NO: 19154
  GFR-binding peptide
  MOD_RES (36)..(38): Xaa is C or S

SEQ ID NO: 72699 - protein, 34 aa, Artificial Sequence
  GFR-binding peptide
  MOD_RES (1)..(32)..(34): Xaa is C or S
XVPQDLSNITIQIMVGRTPKVLGEMSMVVKSXKX

SEQ ID NO: 72700 - protein, 33 aa, Artificial Sequence; identical to SEQ ID NO: 52128
  GFR-binding peptide
  MOD_RES (33)..(33): Xaa is C or S
  MOD_RES (14)..(15)..(16)..(17)..(18): Xaa is A or G
  MOD_RES (19)..(20)..(21)..(22): Xaa is A or G or is absent

SEQ ID NO: 72701 - protein, 39 aa, Artificial Sequence
  GFR-binding peptide
  MOD_RES (6)..(7): Xaa is C or S
  MOD_RES (21)..(22)..(23)..(24)..(25): Xaa is A or G
  MOD_RES (26)..(27)..(28)..(29): Xaa is A or G or is absent
ASASPXXVSQDLSNITIQIMXXXXXXXXXLGEMSMIVKS

SEQ ID NO: 72702 - protein, 41 aa, Artificial Sequence; identical to SEQ ID NO: 19157
  GFR-binding peptide
  MOD_RES (4)..(38)..(40): Xaa is C or S

SEQ ID NO: 72703 - protein, 41 aa, Artificial Sequence; identical to SEQ ID NO: 19160
  GFR-binding peptide
  MOD_RES (3)..(40): Xaa is C or S
  MOD_RES (19)..(20)..(21)..(22)..(23): Xaa is A or G
  MOD_RES (24)..(25)..(26)..(27): Xaa is A or G or is absent

SEQ ID NO: 72704 - protein, 38 aa, Artificial Sequence; identical to SEQ ID NO: 19161
  GFR-binding peptide
  MOD_RES (3)..(37): Xaa is C or S
  MOD_RES (17)..(18)..(19)..(20)..(21): Xaa is A or G
  MOD_RES (22)..(23)..(24)..(25): Xaa is A or G or is absent

SEQ ID NO: 72705 - protein, 36 aa, Artificial Sequence
  GFR-binding peptide
  MOD_RES (2)..(3): Xaa is C or S
  MOD_RES (17)..(18)..(19)..(20)..(21): Xaa is A or G
  MOD_RES (22)..(23)..(24)..(25): Xaa is A or G or is absent
PXXTPTKMSNITMQIMXXXXXXXXXIGEMSGMVVDR

SEQ ID NO: 72706 - protein, 35 aa, Artificial Sequence
  GFR-binding peptide
  MOD_RES (34)..(34): Xaa is C or S
  MOD_RES (14)..(15)..(16)..(17)..(18): Xaa is A or G
  MOD_RES (19)..(20)..(21)..(22): Xaa is A or G or is absent
TPTKMSNITMQIMXXXXXXXXXLGEMSGMVVDRXG

SEQ ID NO: 72707 - protein, 37 aa, Artificial Sequence; identical to SEQ ID NO: 54556
  GFR-binding peptide
  MOD_RES (2)..(3)..(35)..(37): Xaa is C or S

SEQ ID NO: 72708 - protein, 44 aa, Artificial Sequence; identical to SEQ ID NO: 19164
  GFR-binding peptide
  MOD_RES (5)..(42)..(44): Xaa is C or S
  MOD_RES (21)..(22)..(23)..(24)..(25): Xaa is A or G
  MOD_RES (26)..(27)..(28)..(29): Xaa is A or G or is absent

SEQ ID NO: 72709 - protein, 38 aa, Artificial Sequence
  GFR-binding peptide
  MOD_RES (5)..(6): Xaa is C or S
  MOD_RES (20)..(21)..(22)..(23)..(24): Xaa is A or G
  MOD_RES (25)..(26)..(27)..(28): Xaa is A or G or is absent
SASPXXVPQDLSNITIQIMXXXXXXXXXLGEMSMVVKS

SEQ ID NO: 72710 - protein, 34 aa, Artificial Sequence
  GFR-binding peptide
  MOD_RES (1)..(34): Xaa is C or S
  MOD_RES (15)..(16)..(17)..(18)..(19): Xaa is A or G
  MOD_RES (20)..(21)..(22)..(23): Xaa is A or G or is absent
XVPQALSNITIQIMXXXXXXXXXLGEMSMIVRSX

SEQ ID NO: 72711 - protein, 35 aa, Artificial Sequence; identical to SEQ ID NO: 54560
  GFR-binding peptide
  MOD_RES (1)..(34): Xaa is C or S
  MOD_RES (15)..(16)..(17)..(18)..(19): Xaa is A or G
  MOD_RES (20)..(21)..(22)..(23): Xaa is A or G or is absent

SEQ ID NO: 72712 - protein, 37 aa, Artificial Sequence; identical to SEQ ID NO: 19167
  GFR-binding peptide
  MOD_RES (3)..(3): Xaa is C or S
  MOD_RES (19)..(20)..(21)..(22)..(23): Xaa is A or G
  MOD_RES (24)..(25)..(26)..(27): Xaa is A or G or is absent

SEQ ID NO: 72713 - protein, 35 aa, Artificial Sequence
  GFR-binding peptide
  MOD_RES (1)..(34): Xaa is C or S
  MOD_RES (15)..(16)..(17)..(18)..(19): Xaa is A or G
  MOD_RES (20)..(21)..(22)..(23): Xaa is A or G or is absent
XVPQDLSNITIQIMXXXXXXXXXLGEMSMVVKSXK

SEQ ID NO: 72714 - protein, 41 aa, Artificial Sequence
  GFR-binding peptide
  MOD_RES (6)..(7)..(38)..(40): Xaa is C or S
ASAAPXXVPQALSNITIQIMVGRKPKVLGEMSMIVRSXKXS

SEQ ID NO: 72715 - protein, 44 aa, Artificial Sequence
  GFR-binding peptide
  MOD_RES (6)..(7)..(41)..(43): Xaa is C or S
  MOD_RES (21)..(22)..(23)..(24)..(25): Xaa is A or G
  MOD_RES (26)..(27)..(28)..(29): Xaa is A or G or is absent
AAPASXXVPARLSNITIQIMXXXXXXXXXLGEMSDMVVEAXGXR

SEQ ID NO: 72716 - protein, 38 aa, Artificial Sequence
  GFR-binding peptide
  MOD_RES (1)..(35)..(37): Xaa is C or S
  MOD_RES (15)..(16)..(17)..(18)..(19): Xaa is A or G
  MOD_RES (20)..(21)..(22)..(23): Xaa is A or G or is absent
XVPTRLSNITIQIMXXXXXXXXXLGEMSDMVVESXGXR

SEQ ID NO: 72717 - protein, 44 aa, Artificial Sequence; identical to SEQ ID NO: 19171
  GFR-binding peptide
  MOD_RES (5)..(42)..(44): Xaa is C or S
  MOD_RES (21)..(22)..(23)..(24)..(25): Xaa is A or G
  MOD_RES (26)..(27)..(28)..(29): Xaa is A or G or is absent

SEQ ID NO: 72718 - protein, 38 aa, Artificial Sequence
  GFR-binding peptide
  MOD_RES (1)..(35)..(37): Xaa is C or S
  MOD_RES (15)..(16)..(17)..(18)..(19): Xaa is A or G
  MOD_RES (20)..(21)..(22)..(23): Xaa is A or G or is absent
XVPTRLSNITIQIMXXXXXXXXXIGEMSDMVVESXGXR

SEQ ID NO: 72719 - protein, 37 aa, Artificial Sequence; identical to SEQ ID NO: 19172
  GFR-binding peptide
  MOD_RES (4)..(4): Xaa is C or S
  MOD_RES (18)..(19)..(20)..(21)..(22): Xaa is A or G
  MOD_RES (23)..(24)..(25)..(26): Xaa is A or G or is absent

SEQ ID NO: 72720 - protein, 33 aa, Artificial Sequence; identical to SEQ ID NO: 52152
  GFR-binding peptide
  MOD_RES (31)..(33): Xaa is C or S

SEQ ID NO: 72721 - protein, 42 aa, Artificial Sequence
  GFR-binding peptide
  MOD_RES (6)..(7)..(41): Xaa is C or S
  MOD_RES (21)..(22)..(23)..(24)..(25): Xaa is A or G
  MOD_RES (26)..(27)..(28)..(29): Xaa is A or G or is absent
HVPKPXXAPTKLSNITVQIMXXXXXXXXXIGEMSNMVVRSXG

SEQ ID NO: 72722 - protein, 39 aa, Artificial Sequence; identical to SEQ ID NO: 54571
  GFR-binding peptide
  MOD_RES (6)..(7): Xaa is C or S
  MOD_RES (21)..(22)..(23)..(24)..(25): Xaa is A or G
  MOD_RES (26)..(27)..(28)..(29): Xaa is A or G or is absent

SEQ ID NO: 72723 - protein, 35 aa, Artificial Sequence
  GFR-binding peptide
  MOD_RES (1)..(2): Xaa is C or S
  MOD_RES (16)..(17)..(18)..(19)..(20): Xaa is A or G
  MOD_RES (21)..(22)..(23)..(24): Xaa is A or G or is absent
XXTPTKMSNITMQIMXXXXXXXXXLGEMSGMVVDR

SEQ ID NO: 72724 - protein, 33 aa, Artificial Sequence
  GFR-binding peptide
  MOD_RES (32)..(32): Xaa is C or S
VPTRLSNITIQIMDSANNVVLGEMSDMVVESXG

SEQ ID NO: 72725 - protein, 40 aa, Artificial Sequence
  GFR-binding peptide
  MOD_RES (6)..(7)..(40): Xaa is C or S
  MOD_RES (21)..(22)..(23)..(24)..(25): Xaa is A or G
  MOD_RES (26)..(27)..(28)..(29): Xaa is A or G or is absent
ASASPXXVSQDLSNITIQIMXXXXXXXXXLGEMSMIVKSX

SEQ ID NO: 72726 - protein, 39 aa, Artificial Sequence; identical to SEQ ID NO: 19175
  GFR-binding peptide
  MOD_RES (37)..(39): Xaa is C or S

SEQ ID NO: 72727 - protein, 40 aa, Artificial Sequence; identical to SEQ ID NO: 52166
  GFR-binding peptide
  MOD_RES (2)..(3)..(37)..(39): Xaa is C or S
  MOD_RES (17)..(18)..(19)..(20)..(21): Xaa is A or G
  MOD_RES (22)..(23)..(24)..(25): Xaa is A or G or is absent

SEQ ID NO: 72728 - protein, 40 aa, Artificial Sequence
  GFR-binding peptide
  MOD_RES (2)..(3)..(37)..(39): Xaa is C or S
  MOD_RES (17)..(18)..(19)..(20)..(21): Xaa is A or G
  MOD_RES (22)..(23)..(24)..(25): Xaa is A or G or is absent
PXXAPTKLSNITVQIMXXXXXXXXXLGEMSNMVVRSXGXH

SEQ ID NO: 72729 - protein, 31 aa, Artificial Sequence; identical to SEQ ID NO: 52167
  GFR-binding peptide
  MOD_RES (1)..(1): Xaa is C or S

SEQ ID NO: 72730 - protein, 43 aa, Artificial Sequence; identical to SEQ ID NO: 52169
  GFR-binding peptide
  MOD_RES (5)..(6)..(40)..(42): Xaa is C or S
  MOD_RES (20)..(21)..(22)..(23)..(24): Xaa is A or G
  MOD_RES (25)..(26)..(27)..(28): Xaa is A or G or is absent

SEQ ID NO: 72731 - protein, 40 aa, Artificial Sequence; identical to SEQ ID NO: 52170
  GFR-binding peptide
  MOD_RES (3)..(4)..(37)..(39): Xaa is C or S
  MOD_RES (18)..(19)..(20)..(21)..(22): Xaa is A or G
  MOD_RES (23)..(24)..(25)..(26): Xaa is A or G or is absent

SEQ ID NO: 72732 - protein, 32 aa, Artificial Sequence
  GFR-binding peptide
  MOD_RES (1)..(2): Xaa is C or S
XXAPVKTSNITMQIMDNGRVLLLGEMSMIVEE

SEQ ID NO: 72733 - protein, 38 aa, Artificial Sequence; identical to SEQ ID NO: 19178
  GFR-binding peptide
  MOD_RES (4)..(38): Xaa is C or S
  MOD_RES (18)..(19)..(20)..(21)..(22): Xaa is A or G
  MOD_RES (23)..(24)..(25)..(26): Xaa is A or G or is absent

SEQ ID NO: 72734 - protein, 37 aa, Artificial Sequence
  GFR-binding peptide
  MOD_RES (4)..(5): Xaa is C or S
  MOD_RES (19)..(20)..(21)..(22)..(23): Xaa is A or G
  MOD_RES (24)..(25)..(26)..(27): Xaa is A or G or is absent
PSTXXAPVKTSNITMQIMXXXXXXXXXIGEMSMIVEE

SEQ ID NO: 72735 - protein, 37 aa, Artificial Sequence; identical to SEQ ID NO: 19179
  GFR-binding peptide
  MOD_RES (5)..(5): Xaa is C or S

SEQ ID NO: 72736 - protein, 34 aa, Artificial Sequence
  GFR-binding peptide
  MOD_RES (31)..(33): Xaa is C or S
VPQALSNITIQIMVGRKPKVLGEMSMIVRSXKXS

SEQ ID NO: 72737 - protein, 38 aa, Artificial Sequence; identical to SEQ ID NO: 19181
  GFR-binding peptide
  MOD_RES (37)..(37): Xaa is C or S
  MOD_RES (16)..(17)..(18)..(19)..(20): Xaa is A or G
  MOD_RES (21)..(22)..(23)..(24): Xaa is A or G or is absent

SEQ ID NO: 72738 - protein, 35 aa, Artificial Sequence; identical to SEQ ID NO: 19182
  GFR-binding peptide
  MOD_RES (35)..(35): Xaa is C or S
  MOD_RES (14)..(15)..(16)..(17)..(18): Xaa is A or G
  MOD_RES (19)..(20)..(21)..(22): Xaa is A or G or is absent

SEQ ID NO: 72739 - protein, 33 aa, Artificial Sequence
  GFR-binding peptide
  MOD_RES (2)..(3): Xaa is C or S
PXXAPTKLSNITVQIMDDSSNVILGEMSNMVVR

SEQ ID NO: 72740 - protein, 43 aa, Artificial Sequence
  GFR-binding peptide
  MOD_RES (5)..(6)..(40)..(42): Xaa is C or S
  MOD_RES (20)..(21)..(22)..(23)..(24): Xaa is A or G
  MOD_RES (25)..(26)..(27)..(28): Xaa is A or G or is absent
VPKPXXAPTKLSNITVQIMXXXXXXXXXLGEMSNMVVRSXGXH

SEQ ID NO: 72741 - protein, 33 aa, Artificial Sequence
  GFR-binding peptide
  MOD_RES (1)..(1): Xaa is C or S
  MOD_RES (15)..(16)..(17)..(18)..(19): Xaa is A or G
  MOD_RES (20)..(21)..(22)..(23): Xaa is A or G or is absent
XVPARLSNITIQIMXXXXXXXXXLGEMSDMVVE

SEQ ID NO: 72742 - protein, 42 aa, Artificial Sequence; identical to SEQ ID NO: 54585
  GFR-binding peptide
  MOD_RES (5)..(6)..(39)..(41): Xaa is C or S
  MOD_RES (20)..(21)..(22)..(23)..(24): Xaa is A or G
  MOD_RES (25)..(26)..(27)..(28): Xaa is A or G or is absent

SEQ ID NO: 72743 - protein, 36 aa, Artificial Sequence; identical to SEQ ID NO: 54590
  GFR-binding peptide
  MOD_RES (2)..(3)..(34)..(36): Xaa is C or S

SEQ ID NO: 72744 - protein, 38 aa, Artificial Sequence
  GFR-binding peptide
  MOD_RES (2)..(3)..(37): Xaa is C or S
  MOD_RES (17)..(18)..(19)..(20)..(21): Xaa is A or G
  MOD_RES (22)..(23)..(24)..(25): Xaa is A or G or is absent
PXXAPTKLSNITVQIMXXXXXXXXXLGEMSNMVVRSXG

SEQ ID NO: 72745 - protein, 41 aa, Artificial Sequence; identical to SEQ ID NO: 19187
  GFR-binding peptide
  MOD_RES (5)..(5): Xaa is C or S

SEQ ID NO: 72746 - protein, 40 aa, Artificial Sequence
  GFR-binding peptide
  MOD_RES (6)..(7)..(39): Xaa is C or S
HVPKPXXAPTKLSNITVQIMDDSSNVIIGEMSNMVVRSXG

SEQ ID NO: 72747 - protein, 33 aa, Artificial Sequence; identical to SEQ ID NO: 54594
  GFR-binding peptide
  MOD_RES (2)..(3): Xaa is C or S

SEQ ID NO: 72748 - protein, 40 aa, Artificial Sequence
  GFR-binding peptide
  MOD_RES (4)..(5)..(39): Xaa is C or S
  MOD_RES (19)..(20)..(21)..(22)..(23): Xaa is A or G
  MOD_RES (24)..(25)..(26)..(27): Xaa is A or G or is absent
PPTXXVPTRLSNITIQIMXXXXXXXXXLGEMSDMVVESXG

SEQ ID NO: 72749 - protein, 41 aa, Artificial Sequence; identical to SEQ ID NO: 54599
  GFR-binding peptide
  MOD_RES (5)..(6)..(39)..(41): Xaa is C or S
  MOD_RES (20)..(21)..(22)..(23)..(24): Xaa is A or G
  MOD_RES (25)..(26)..(27)..(28): Xaa is A or G or is absent

SEQ ID NO: 72750 - protein, 36 aa, Artificial Sequence; identical to SEQ ID NO: 19190
  GFR-binding peptide
  MOD_RES (35)..(35): Xaa is C or S
  MOD_RES (14)..(15)..(16)..(17)..(18): Xaa is A or G
  MOD_RES (19)..(20)..(21)..(22): Xaa is A or G or is absent

SEQ ID NO: 72751 - protein, 36 aa, Artificial Sequence; identical to SEQ ID NO: 19191
  GFR-binding peptide
  MOD_RES (35)..(35): Xaa is C or S

SEQ ID NO: 72752 - protein, 32 aa, Artificial Sequence; identical to SEQ ID NO: 19192
  GFR-binding peptide
  MOD_RES (14)..(15)..(16)..(17)..(18): Xaa is A or G
  MOD_RES (19)..(20)..(21)..(22): Xaa is A or G or is absent

SEQ ID NO: 72753 - protein, 39 aa, Artificial Sequence; identical to SEQ ID NO: 19193
  GFR-binding peptide
  MOD_RES (1)..(38): Xaa is C or S
  MOD_RES (17)..(18)..(19)..(20)..(21): Xaa is A or G
  MOD_RES (22)..(23)..(24)..(25): Xaa is A or G or is absent

SEQ ID NO: 72754 - protein, 38 aa, Artificial Sequence
  GFR-binding peptide
  MOD_RES (5)..(6): Xaa is C or S
  MOD_RES (20)..(21)..(22)..(23)..(24): Xaa is A or G
  MOD_RES (25)..(26)..(27)..(28): Xaa is A or G or is absent
VPSTXXAPVKTSNITMQIMXXXXXXXXXLGEMSMIVEE

SEQ ID NO: 72755 - protein, 34 aa, Artificial Sequence
  GFR-binding peptide
  MOD_RES (1)..(1): Xaa is C or S
  MOD_RES (15)..(16)..(17)..(18)..(19): Xaa is A or G
  MOD_RES (20)..(21)..(22)..(23): Xaa is A or G or is absent
XVPARLSNITIQIMXXXXXXXXXIGEMSDMVVEA

SEQ ID NO: 72756 - protein, 38 aa, Artificial Sequence; identical to SEQ ID NO: 19195
  GFR-binding peptide
  MOD_RES (4)..(4): Xaa is C or S

SEQ ID NO: 72757 - protein, 40 aa, Artificial Sequence; identical to SEQ ID NO: 19196
  GFR-binding peptide
  MOD_RES (5)..(5): Xaa is C or S
  MOD_RES (21)..(22)..(23)..(24)..(25): Xaa is A or G
  MOD_RES (26)..(27)..(28)..(29): Xaa is A or G or is absent

SEQ ID NO: 72758 - protein, 33 aa, Artificial Sequence
  GFR-binding peptide
  MOD_RES (31)..(33): Xaa is C or S
VPQALSNITIQIMVGRKPKVLGEMSMIVRSXKX

SEQ ID NO: 72759 - protein, 42 aa, Artificial Sequence
  GFR-binding peptide
  MOD_RES (6)..(7)..(39)..(41): Xaa is C or S
HVPKPXXAPTKLSNITVQIMDDSSNVILGEMSNMVVRSXGXH

SEQ ID NO: 72760 - protein, 33 aa, Artificial Sequence
  GFR-binding peptide
  MOD_RES (31)..(33): Xaa is C or S
VSQDLSNITIQIMIGKTPKILGEMSMIVKSXKX

SEQ ID NO: 72761 - protein, 37 aa, Artificial Sequence
  GFR-binding peptide
  MOD_RES (1)..(35)..(37): Xaa is C or S
  MOD_RES (15)..(16)..(17)..(18)..(19): Xaa is A or G
  MOD_RES (20)..(21)..(22)..(23): Xaa is A or G or is absent
XVPTRLSNITIQIMXXXXXXXXXIGEMSDMVVESXGX

SEQ ID NO: 72762 - protein, 32 aa, Artificial Sequence; identical to SEQ ID NO: 19197
  GFR-binding peptide

SEQ ID NO: 72763 - protein, 40 aa, Artificial Sequence; identical to SEQ ID NO: 19198
  GFR-binding peptide
  MOD_RES (5)..(39): Xaa is C or S
  MOD_RES (19)..(20)..(21)..(22)..(23): Xaa is A or G
  MOD_RES (24)..(25)..(26)..(27): Xaa is A or G or is absent

SEQ ID NO: 72764 - protein, 39 aa, Artificial Sequence
  GFR-binding peptide
  MOD_RES (6)..(7)..(38): Xaa is C or S
ASAAPXXVPQALSNITIQIMVGRKPKVLGEMSMIVRSXK

SEQ ID NO: 72765 - protein, 38 aa, Artificial Sequence
  GFR-binding peptide
  MOD_RES (5)..(6)..(38): Xaa is C or S
APASXXVPARLSNITIQIMDAANNVVIGEMSDMVVEAX

SEQ ID NO: 72766 - protein, 35 aa, Artificial Sequence
  GFR-binding peptide
  MOD_RES (33)..(35): Xaa is C or S
  MOD_RES (14)..(15)..(16)..(17)..(18): Xaa is A or G
  MOD_RES (19)..(20)..(21)..(22): Xaa is A or G or is absent
VPQALSNITIQIMXXXXXXXXXLGEMSMIVRSXKX

SEQ ID NO: 72767 - protein, 37 aa, Artificial Sequence
  GFR-binding peptide
  MOD_RES (2)..(3)..(36): Xaa is C or S
  MOD_RES (17)..(18)..(19)..(20)..(21): Xaa is A or G
  MOD_RES (22)..(23)..(24)..(25): Xaa is A or G or is absent
TXXAPVKTSNITMQIMXXXXXXXXXLGEMSMIVEEXG

SEQ ID NO: 72768 - protein, 39 aa, Artificial Sequence; identical to SEQ ID NO: 19199
  GFR-binding peptide
  MOD_RES (7)..(7): Xaa is C or S

SEQ ID NO: 72769 - protein, 32 aa, Artificial Sequence
  GFR-binding peptide
  MOD_RES (31)..(31): Xaa is C or S
VPQALSNITIQIMVGRKPKVLGEMSMIVRSXK

SEQ ID NO: 72770 - protein, 34 aa, Artificial Sequence; identical to SEQ ID NO: 52198
  GFR-binding peptide
  MOD_RES (1)..(2)..(34): Xaa is C or S

SEQ ID NO: 72771 - protein, 42 aa, Artificial Sequence; identical to SEQ ID NO: 19200
  GFR-binding peptide
  MOD_RES (5)..(39)..(41): Xaa is C or S
  MOD_RES (19)..(20)..(21)..(22)..(23): Xaa is A or G
  MOD_RES (24)..(25)..(26)..(27): Xaa is A or G or is absent

SEQ ID NO: 72772 - protein, 42 aa, Artificial Sequence
  GFR-binding peptide
  MOD_RES (4)..(5)..(39)..(41): Xaa is C or S
  MOD_RES (19)..(20)..(21)..(22)..(23): Xaa is A or G
  MOD_RES (24)..(25)..(26)..(27): Xaa is A or G or is absent
PASXXVPARLSNITIQIMXXXXXXXXXLGEMSDMVVEAXGXR

SEQ ID NO: 72773 - protein, 31 aa, Artificial Sequence
  GFR-binding peptide
  MOD_RES (1)..(1): Xaa is C or S
XVPQALSNITIQIMVGRKPKVLGEMSMIVRS

SEQ ID NO: 72774 - protein, 37 aa, Artificial Sequence; identical to SEQ ID NO: 54614
  GFR-binding peptide
  MOD_RES (6)..(7): Xaa is C or S

SEQ ID NO: 72775 - protein, 35 aa, Artificial Sequence
  GFR-binding peptide
  MOD_RES (34)..(34): Xaa is C or S
  MOD_RES (14)..(15)..(16)..(17)..(18): Xaa is A or G
  MOD_RES (19)..(20)..(21)..(22): Xaa is A or G or is absent
VPTRLSNITIQIMXXXXXXXXXLGEMSDMVVESXG

SEQ ID NO: 72776 - protein, 34 aa, Artificial Sequence
  GFR-binding peptide
  MOD_RES (1)..(34): Xaa is C or S
  MOD_RES (15)..(16)..(17)..(18)..(19): Xaa is A or G
  MOD_RES (20)..(21)..(22)..(23): Xaa is A or G or is absent
XAPVKTSNITMQIMXXXXXXXXXLGEMSMIVEEX

SEQ ID NO: 72777 - protein, 34 aa, Artificial Sequence
  GFR-binding peptide
  MOD_RES (2)..(3): Xaa is C or S
SXXVPARLSNITIQIMDAANNVVLGEMSDMVVEA

SEQ ID NO: 72778 - protein, 31 aa, Artificial Sequence
  GFR-binding peptide
TPTKMSNITMQIMNDKQQIIIGEMSGMVVDR

SEQ ID NO: 72779 - protein, 39 aa, Artificial Sequence
  GFR-binding peptide
  MOD_RES (3)..(4)..(36)..(38): Xaa is C or S
ASXXVPARLSNITIQIMDAANNVVLGEMSDMVVEAXGXR

SEQ ID NO: 72780 - protein, 40 aa, Artificial Sequence
  GFR-binding peptide
  MOD_RES (6)..(7)..(39): Xaa is C or S
STPPTXXVPTRLSNITIQIMDSANNVVIGEMSDMVVESXG

SEQ ID NO: 72781 - protein, 37 aa, Artificial Sequence
  GFR-binding peptide
  MOD_RES (4)..(5)..(37): Xaa is C or S
PPTXXVPTRLSNITIQIMDSANNVVLGEMSDMVVESX

SEQ ID NO: 72782 - protein, 35 aa, Artificial Sequence
  GFR-binding peptide
  MOD_RES (3)..(4): Xaa is C or S
GPXXTPTKMSNITMQIMNDKQQIILGEMSGMVVDR

SEQ ID NO: 72783 - protein, 36 aa, Artificial Sequence; identical to SEQ ID NO: 19206
  GFR-binding peptide
  MOD_RES (36)..(36): Xaa is C or S
  MOD_RES (15)..(16)..(17)..(18)..(19): Xaa is A or G
  MOD_RES (20)..(21)..(22)..(23): Xaa is A or G or is absent

SEQ ID NO: 72784 - protein, 39 aa, Artificial Sequence; identical to SEQ ID NO: 19208
  GFR-binding peptide
  MOD_RES (2)..(39): Xaa is C or S
  MOD_RES (18)..(19)..(20)..(21)..(22): Xaa is A or G
  MOD_RES (23)..(24)..(25)..(26): Xaa is A or G or is absent

SEQ ID NO: 72785 - protein, 38 aa, Artificial Sequence; identical to SEQ ID NO: 19209
  GFR-binding peptide
  MOD_RES (3)..(37): Xaa is C or S
  MOD_RES (17)..(18)..(19)..(20)..(21): Xaa is A or G
  MOD_RES (22)..(23)..(24)..(25): Xaa is A or G or is absent

SEQ ID NO: 72786 - protein, 36 aa, Artificial Sequence
  GFR-binding peptide
  MOD_RES (2)..(3)..(34)..(36): Xaa is C or S
TXXAPVKTSNITMQIMDNGRVLLIGEMSMIVEEXGX

SEQ ID NO: 72787 - protein, 41 aa, Artificial Sequence; identical to SEQ ID NO: 19210
  GFR-binding peptide
  MOD_RES (7)..(41): Xaa is C or S

SEQ ID NO: 72788 - protein, 38 aa, Artificial Sequence
  GFR-binding peptide
  MOD_RES (6)..(7): Xaa is C or S
GSAGPXXTPTKMSNITMQIMNDKQQIIIGEMSGMVVDR

SEQ ID NO: 72789 - protein, 41 aa, Artificial Sequence; identical to SEQ ID NO: 19212
  GFR-binding peptide
  MOD_RES (6)..(40): Xaa is C or S
  MOD_RES (20)..(21)..(22)..(23)..(24): Xaa is A or G
  MOD_RES (25)..(26)..(27)..(28): Xaa is A or G or is absent

SEQ ID NO: 72790 - protein, 41 aa, Artificial Sequence; identical to SEQ ID NO: 54627
  GFR-binding peptide
  MOD_RES (6)..(7)..(40): Xaa is C or S
  MOD_RES (21)..(22)..(23)..(24)..(25): Xaa is A or G
  MOD_RES (26)..(27)..(28)..(29): Xaa is A or G or is absent

SEQ ID NO: 72791 - protein, 36 aa, Artificial Sequence; identical to SEQ ID NO: 54628
  GFR-binding peptide
  MOD_RES (1)..(2)..(35): Xaa is C or S
  MOD_RES (16)..(17)..(18)..(19)..(20): Xaa is A or G
  MOD_RES (21)..(22)..(23)..(24): Xaa is A or G or is absent

SEQ ID NO: 72792 - protein, 39 aa, Artificial Sequence; identical to SEQ ID NO: 19213
  GFR-binding peptide
  MOD_RES (5)..(39): Xaa is C or S
  MOD_RES (19)..(20)..(21)..(22)..(23): Xaa is A or G
  MOD_RES (24)..(25)..(26)..(27): Xaa is A or G or is absent

SEQ ID NO: 72793 - protein, 37 aa, Artificial Sequence
  GFR-binding peptide
  MOD_RES (1)..(2)..(34)..(36): Xaa is C or S
XXVPARLSNITIQIMDAANNVVIGEMSDMVVEAXGXR

SEQ ID NO: 72794 - protein, 37 aa, Artificial Sequence; identical to SEQ ID NO: 19214
  GFR-binding peptide
  MOD_RES (3)..(3): Xaa is C or S
  MOD_RES (19)..(20)..(21)..(22)..(23): Xaa is A or G
  MOD_RES (24)..(25)..(26)..(27): Xaa is A or G or is absent

SEQ ID NO: 72795 - protein, 37 aa, Artificial Sequence; identical to SEQ ID NO: 19216
  GFR-binding peptide
  MOD_RES (35)..(37): Xaa is C or S

SEQ ID NO: 72796 - protein, 37 aa, Artificial Sequence; identical to SEQ ID NO: 19217
  GFR-binding peptide
  MOD_RES (5)..(5): Xaa is C or S

SEQ ID NO: 72797 - protein, 37 aa, Artificial Sequence
  GFR-binding peptide
  MOD_RES (1)..(2)..(34)..(36): Xaa is C or S
XXVPARLSNITIQIMDAANNVVLGEMSDMVVEAXGXR

SEQ ID NO: 72798 - protein, 35 aa, Artificial Sequence
  GFR-binding peptide
  MOD_RES (2)..(3)..(35): Xaa is C or S
SXXVPARLSNITIQIMDAANNVVIGEMSDMVVEAX

SEQ ID NO: 72799 - protein, 34 aa, Artificial Sequence; identical to SEQ ID NO: 19218
  GFR-binding peptide
  MOD_RES (14)..(15)..(16)..(17)..(18): Xaa is A or G
  MOD_RES (19)..(20)..(21)..(22): Xaa is A or G or is absent

SEQ ID NO: 72800 - protein, 38 aa, Artificial Sequence
  GFR-binding peptide
  MOD_RES (1)..(2)..(35)..(37): Xaa is C or S
  MOD_RES (16)..(17)..(18)..(19)..(20): Xaa is A or G
  MOD_RES (21)..(22)..(23)..(24): Xaa is A or G or is absent
XXAPVKTSNITMQIMXXXXXXXXXLGEMSMIVEEXGXL

SEQ ID NO: 72801 - protein, 36 aa, Artificial Sequence
  GFR-binding peptide
  MOD_RES (4)..(5)..(36): Xaa is C or S
PSTXXAPVKTSNITMQIMDNGRVLLLGEMSMIVEEX

SEQ ID NO: 72802 - protein, 40 aa, Artificial Sequence
  GFR-binding peptide
  MOD_RES (5)..(6)..(40): Xaa is C or S
  MOD_RES (20)..(21)..(22)..(23)..(24): Xaa is A or G
  MOD_RES (25)..(26)..(27)..(28): Xaa is A or G or is absent
SAGPXXTPTKMSNITMQIMXXXXXXXXXLGEMSGMVVDRX

SEQ ID NO: 72803 - protein, 42 aa, Artificial Sequence
  GFR-binding peptide
  MOD_RES (6)..(7)..(40)..(42): Xaa is C or S
  MOD_RES (21)..(22)..(23)..(24)..(25): Xaa is A or G
  MOD_RES (26)..(27)..(28)..(29): Xaa is A or G or is absent
ASAAPXXVPQALSNITIQIMXXXXXXXXXLGEMSMIVRSXKX

SEQ ID NO: 72804 - protein, 35 aa, Artificial Sequence
  GFR-binding peptide
  MOD_RES (2)..(3)..(35): Xaa is C or S
TXXVPTRLSNITIQIMDSANNVVLGEMSDMVVESX

SEQ ID NO: 72805 - protein, 43 aa, Artificial Sequence; identical to SEQ ID NO: 19222
  GFR-binding peptide
  MOD_RES (6)..(40)..(42): Xaa is C or S

SEQ ID NO: 72806 - protein, 36 aa, Artificial Sequence; identical to SEQ ID NO: 19223
  GFR-binding peptide
  MOD_RES (35)..(35): Xaa is C or S

SEQ ID NO: 72807 - protein, 39 aa, Artificial Sequence; identical to SEQ ID NO: 19226
  GFR-binding peptide
  MOD_RES (4)..(4): Xaa is C or S
  MOD_RES (20)..(21)..(22)..(23)..(24): Xaa is A or G
  MOD_RES (25)..(26)..(27)..(28): Xaa is A or G or is absent

SEQ ID NO: 72808 - protein, 39 aa, Artificial Sequence; identical to SEQ ID NO: 19227
  GFR-binding peptide
  MOD_RES (37)..(39): Xaa is C or S
  MOD_RES (16)..(17)..(18)..(19)..(20): Xaa is A or G
  MOD_RES (21)..(22)..(23)..(24): Xaa is A or G or is absent

SEQ ID NO: 72809 - protein, 32 aa, Artificial Sequence; identical to SEQ ID NO: 19228
  GFR-binding peptide

SEQ ID NO: 72810 - protein, 37 aa, Artificial Sequence
  GFR-binding peptide
  MOD_RES (6)..(7): Xaa is C or S
ASASPXXVPQDLSNITIQIMVGRTPKVLGEMSMVVKS

SEQ ID NO: 72811 - protein, 41 aa, Artificial Sequence; identical to SEQ ID NO: 19230
  GFR-binding peptide
  MOD_RES (2)..(39)..(41): Xaa is C or S
  MOD_RES (18)..(19)..(20)..(21)..(22): Xaa is A or G
  MOD_RES (23)..(24)..(25)..(26): Xaa is A or G or is absent

SEQ ID NO: 72812 - protein, 35 aa, Artificial Sequence; identical to SEQ ID NO: 19231
  GFR-binding peptide
  MOD_RES (15)..(16)..(17)..(18)..(19): Xaa is A or G
  MOD_RES (20)..(21)..(22)..(23): Xaa is A or G or is absent

SEQ ID NO: 72813 - protein, 35 aa, Artificial Sequence
  GFR-binding peptide
  MOD_RES (1)..(2)..(34): Xaa is C or S
XXTPTKMSNITMQIMNDKQQIIIGEMSGMVVDRXG

SEQ ID NO: 72814 - protein, 38 aa, Artificial Sequence; identical to SEQ ID NO: 19232
  GFR-binding peptide
  MOD_RES (2)..(2): Xaa is C or S

SEQ ID NO: 72815 - protein, 39 aa, Artificial Sequence; identical to SEQ ID NO: 19233
  GFR-binding peptide
  MOD_RES (4)..(38): Xaa is C or S
  MOD_RES (18)..(19)..(20)..(21)..(22): Xaa is A or G
  MOD_RES (23)..(24)..(25)..(26): Xaa is A or G or is absent

SEQ ID NO: 72816 - protein, 39 aa, Artificial Sequence; identical to SEQ ID NO: 19234
  GFR-binding peptide
  MOD_RES (5)..(39): Xaa is C or S

SEQ ID NO: 72817 - protein, 33 aa, Artificial Sequence; identical to SEQ ID NO: 19236
  GFR-binding peptide
  MOD_RES (1)..(1): Xaa is C or S
  MOD_RES (15)..(16)..(17)..(18)..(19): Xaa is A or G
  MOD_RES (20)..(21)..(22)..(23): Xaa is A or G or is absent

SEQ ID NO: 72818 - protein, 36 aa, Artificial Sequence
  GFR-binding peptide
  MOD_RES (2)..(3)..(34)..(36): Xaa is C or S
TXXAPVKTSNITMQIMDNGRVLLLGEMSMIVEEXGX

SEQ ID NO: 72819 - protein, 40 aa, Artificial Sequence
  GFR-binding peptide
  MOD_RES (6)..(7)..(38)..(40): Xaa is C or S
ASASPXXVPQDLSNITIQIMVGRTPKVLGEMSMVVKSXKX

SEQ ID NO: 72820 - protein, 32 aa, Artificial Sequence; identical to SEQ ID NO: 19238
  GFR-binding peptide
  MOD_RES (14)..(15)..(16)..(17)..(18): Xaa is A or G
  MOD_RES (19)..(20)..(21)..(22): Xaa is A or G or is absent

SEQ ID NO: 72821 - protein, 39 aa, Artificial Sequence
  GFR-binding peptide
  MOD_RES (4)..(5)..(37)..(39): Xaa is C or S
AGPXXTPTKMSNITMQIMNDKQQIILGEMSGMVVDRXGX

SEQ ID NO: 72822 - protein, 39 aa, Artificial Sequence; identical to SEQ ID NO: 19241
  GFR-binding peptide
  MOD_RES (5)..(5): Xaa is C or S
  MOD_RES (21)..(22)..(23)..(24)..(25): Xaa is A or G
  MOD_RES (26)..(27)..(28)..(29): Xaa is A or G or is absent

SEQ ID NO: 72823 - protein, 37 aa, Artificial Sequence; identical to SEQ ID NO: 19242
  GFR-binding peptide
  MOD_RES (35)..(37): Xaa is C or S

SEQ ID NO: 72824 - protein, 34 aa, Artificial Sequence
  GFR-binding peptide
  MOD_RES (2)..(3)..(34): Xaa is C or S
PXXVSQDLSNITIQIMIGKTPKILGEMSMIVKSX

SEQ ID NO: 72825 - protein, 35 aa, Artificial Sequence; identical to SEQ ID NO: 19245
  GFR-binding peptide
  MOD_RES (1)..(1): Xaa is C or S
  MOD_RES (17)..(18)..(19)..(20)..(21): Xaa is A or G
  MOD_RES (22)..(23)..(24)..(25): Xaa is A or G or is absent

SEQ ID NO: 72826 - protein, 34 aa, Artificial Sequence; identical to SEQ ID NO: 54661
  GFR-binding peptide
  MOD_RES (33)..(33): Xaa is C or S
  MOD_RES (14)..(15)..(16)..(17)..(18): Xaa is A or G
  MOD_RES (19)..(20)..(21)..(22): Xaa is A or G or is absent

SEQ ID NO: 72827 - protein, 35 aa, Artificial Sequence; identical to SEQ ID NO: 19247
  GFR-binding peptide
  MOD_RES (1)..(1): Xaa is C or S
  MOD_RES (17)..(18)..(19)..(20)..(21): Xaa is A or G
  MOD_RES (22)..(23)..(24)..(25): Xaa is A or G or is absent

SEQ ID NO: 72828 - protein, 38 aa, Artificial Sequence
  GFR-binding peptide
  MOD_RES (1)..(2)..(36)..(38): Xaa is C or S
  MOD_RES (16)..(17)..(18)..(19)..(20): Xaa is A or G
  MOD_RES (21)..(22)..(23)..(24): Xaa is A or G or is absent
XXTPTKMSNITMQIMXXXXXXXXXLGEMSGMVVDRXGX

SEQ ID NO: 72829 - protein, 33 aa, Artificial Sequence
  GFR-binding peptide
  MOD_RES (2)..(3): Xaa is C or S
PXXVSQDLSNITIQIMIGKTPKILGEMSMIVKS

SEQ ID NO: 72830 - protein, 38 aa, Artificial Sequence; identical to SEQ ID NO: 19250
  GFR-binding peptide
  MOD_RES (2)..(36)..(38): Xaa is C or S

SEQ ID NO: 72831 - protein, 39 aa, Artificial Sequence
  GFR-binding peptide
  MOD_RES (4)..(5)..(38): Xaa is C or S
  MOD_RES (19)..(20)..(21)..(22)..(23): Xaa is A or G
  MOD_RES (24)..(25)..(26)..(27): Xaa is A or G or is absent
PSTXXAPVKTSNITMQIMXXXXXXXXXLGEMSMIVEEXG

SEQ ID NO: 72832 - protein, 37 aa, Artificial Sequence
  GFR-binding peptide
  MOD_RES (3)..(4): Xaa is C or S
  MOD_RES (18)..(19)..(20)..(21)..(22): Xaa is A or G
  MOD_RES (23)..(24)..(25)..(26): Xaa is A or G or is absent
PTXXVPTRLSNITIQIMXXXXXXXXXIGEMSDMVVES

SEQ ID NO: 72833 - protein, 39 aa, Artificial Sequence; identical to SEQ ID NO: 54666
  GFR-binding peptide
  MOD_RES (5)..(6)..(37)..(39): Xaa is C or S

SEQ ID NO: 72834 - protein, 39 aa, Artificial Sequence
  GFR-binding peptide
  MOD_RES (5)..(6): Xaa is C or S
  MOD_RES (20)..(21)..(22)..(23)..(24): Xaa is A or G
  MOD_RES (25)..(26)..(27)..(28): Xaa is A or G or is absent
TPPTXXVPTRLSNITIQIMXXXXXXXXXIGEMSDMVVES

SEQ ID NO: 72835 - protein, 36 aa, Artificial Sequence; identical to SEQ ID NO: 52270
  GFR-binding peptide
  MOD_RES (1)..(34)..(36): Xaa is C or S
  MOD_RES (15)..(16)..(17)..(18)..(19): Xaa is A or G
  MOD_RES (20)..(21)..(22)..(23): Xaa is A or G or is absent

SEQ ID NO: 72836 - protein, 45 aa, Artificial Sequence; identical to SEQ ID NO: 19256
  GFR-binding peptide
  MOD_RES (5)..(42)..(44): Xaa is C or S
  MOD_RES (21)..(22)..(23)..(24)..(25): Xaa is A or G
  MOD_RES (26)..(27)..(28)..(29): Xaa is A or G or is absent

SEQ ID NO: 72837 - protein, 39 aa, Artificial Sequence
  GFR-binding peptide
  MOD_RES (4)..(5)..(38): Xaa is C or S
  MOD_RES (19)..(20)..(21)..(22)..(23): Xaa is A or G
  MOD_RES (24)..(25)..(26)..(27): Xaa is A or G or is absent
PSTXXAPVKTSNITMQIMXXXXXXXXXIGEMSMIVEEXG

SEQ ID NO: 72838 - protein, 39 aa, Artificial Sequence
  GFR-binding peptide
  MOD_RES (5)..(6): Xaa is C or S
  MOD_RES (20)..(21)..(22)..(23)..(24): Xaa is A or G
  MOD_RES (25)..(26)..(27)..(28): Xaa is A or G or is absent
VPKPXXAPTKLSNITVQIMXXXXXXXXXLGEMSNMVVRS

SEQ ID NO: 72839 - protein, 32 aa, Artificial Sequence; identical to SEQ ID NO: 19257
  GFR-binding peptide

SEQ ID NO: 72840 - protein, 35 aa, Artificial Sequence
  GFR-binding peptide
  MOD_RES (2)..(3): Xaa is C or S
  MOD_RES (17)..(18)..(19)..(20)..(21): Xaa is A or G
  MOD_RES (22)..(23)..(24)..(25): Xaa is A or G or is absent
PXXVPQALSNITIQIMXXXXXXXXXLGEMSMIVRS

SEQ ID NO: 72841 - protein, 38 aa, Artificial Sequence; identical to SEQ ID NO: 54676
  GFR-binding peptide
  MOD_RES (5)..(6)..(38): Xaa is C or S

SEQ ID NO: 72842 - protein, 34 aa, Artificial Sequence
  GFR-binding peptide
  MOD_RES (32)..(34): Xaa is C or S
VPARLSNITIQIMDAANNVVLGEMSDMVVEAXGX

SEQ ID NO: 72843 - protein, 37 aa, Artificial Sequence
  GFR-binding peptide
  MOD_RES (4)..(5)..(36): Xaa is C or S
PSTXXAPVKTSNITMQIMDNGRVLLLGEMSMIVEEXG

SEQ ID NO: 72844 - protein, 32 aa, Artificial Sequence; identical to SEQ ID NO: 19260
  GFR-binding peptide

SEQ ID NO: 72845 - protein, 37 aa, Artificial Sequence; identical to SEQ ID NO: 19261
  GFR-binding peptide
  MOD_RES (1)..(1): Xaa is C or S
  MOD_RES (17)..(18)..(19)..(20)..(21): Xaa is A or G
  MOD_RES (22)..(23)..(24)..(25): Xaa is A or G or is absent

SEQ ID NO: 72846 - protein, 35 aa, Artificial Sequence; identical to SEQ ID NO: 19262
  GFR-binding peptide

SEQ ID NO: 72847 - protein, 39 aa, Artificial Sequence
  GFR-binding peptide
  MOD_RES (2)..(3)..(37)..(39): Xaa is C or S
  MOD_RES (17)..(18)..(19)..(20)..(21): Xaa is A or G
  MOD_RES (22)..(23)..(24)..(25): Xaa is A or G or is absent
PXXTPTKMSNITMQIMXXXXXXXXXLGEMSGMVVDRXGX

SEQ ID NO: 72848 - protein, 41 aa, Artificial Sequence; identical to SEQ ID NO: 19265
  GFR-binding peptide
  MOD_RES (1)..(38)..(40): Xaa is C or S
  MOD_RES (17)..(18)..(19)..(20)..(21): Xaa is A or G
  MOD_RES (22)..(23)..(24)..(25): Xaa is A or G or is absent

SEQ ID NO: 72849 - protein, 36 aa, Artificial Sequence
  GFR-binding peptide
  MOD_RES (2)..(3)..(36): Xaa is C or S
  MOD_RES (17)..(18)..(19)..(20)..(21): Xaa is A or G
  MOD_RES (22)..(23)..(24)..(25): Xaa is A or G or is absent
PXXVPQALSNITIQIMXXXXXXXXXLGEMSMIVRSX

SEQ ID NO: 72850 - protein, 41 aa, Artificial Sequence
  GFR-binding peptide
  MOD_RES (5)..(6)..(38)..(40): Xaa is C or S
APASXXVPARLSNITIQIMDAANNVVLGEMSDMVVEAXGXR

SEQ ID NO: 72851 - protein, 43 aa, Artificial Sequence; identical to SEQ ID NO: 19266
  GFR-binding peptide
  MOD_RES (6)..(40)..(42): Xaa is C or S
  MOD_RES (20)..(21)..(22)..(23)..(24): Xaa is A or G
  MOD_RES (25)..(26)..(27)..(28): Xaa is A or G or is absent

SEQ ID NO: 72852 - protein, 40 aa, Artificial Sequence; identical to SEQ ID NO: 19267
  GFR-binding peptide
  MOD_RES (2)..(39): Xaa is C or S

SEQ ID NO: 72853 - protein, 32 aa, Artificial Sequence; identical to SEQ ID NO: 19268
  GFR-binding peptide
  MOD_RES (14)..(15)..(16)..(17)..(18): Xaa is A or G
  MOD_RES (19)..(20)..(21)..(22): Xaa is A or G or is absent

SEQ ID NO: 72854 - protein, 35 aa, Artificial Sequence
  GFR-binding peptide
  MOD_RES (3)..(4): Xaa is C or S
ASXXVPARLSNITIQIMDAANNVVLGEMSDMVVEA

SEQ ID NO: 72855 - protein, 35 aa, Artificial Sequence; identical to SEQ ID NO: 19269
  GFR-binding peptide
  MOD_RES (15)..(16)..(17)..(18)..(19): Xaa is A or G
  MOD_RES (20)..(21)..(22)..(23): Xaa is A or G or is absent

SEQ ID NO: 72856 - protein, 37 aa, Artificial Sequence; identical to SEQ ID NO: 19270
  GFR-binding peptide
  MOD_RES (34)..(36): Xaa is C or S

SEQ ID NO: 72857 - protein, 33 aa, Artificial Sequence; identical to SEQ ID NO: 52307
  GFR-binding peptide
  MOD_RES (31)..(33): Xaa is C or S

SEQ ID NO: 72858 - protein, 38 aa, Artificial Sequence; identical to SEQ ID NO: 19272
  GFR-binding peptide
  MOD_RES (36)..(38): Xaa is C or S
  MOD_RES (15)..(16)..(17)..(18)..(19): Xaa is A or G
  MOD_RES (20)..(21)..(22)..(23): Xaa is A or G or is absent

SEQ ID NO: 72859 - protein, 37 aa, Artificial Sequence; identical to SEQ ID NO: 19274
  GFR-binding peptide
  MOD_RES (2)..(36): Xaa is C or S
  MOD_RES (16)..(17)..(18)..(19)..(20): Xaa is A or G
  MOD_RES (21)..(22)..(23)..(24): Xaa is A or G or is absent

SEQ ID NO: 72860 - protein, 37 aa, Artificial Sequence; identical to SEQ ID NO: 54704
  GFR-binding peptide
  MOD_RES (1)..(2)..(34)..(36): Xaa is C or S

SEQ ID NO: 72861 - protein, 35 aa, Artificial Sequence; identical to SEQ ID NO: 52316
  GFR-binding peptide
  MOD_RES (1)..(33)..(35): Xaa is C or S

SEQ ID NO: 72862 - protein, 43 aa, Artificial Sequence; identical to SEQ ID NO: 19275
  GFR-binding peptide
  MOD_RES (5)..(42): Xaa is C or S
  MOD_RES (21)..(22)..(23)..(24)..(25): Xaa is A or G
  MOD_RES (26)..(27)..(28)..(29): Xaa is A or G or is absent

SEQ ID NO: 72863 - protein, 35 aa, Artificial Sequence
  GFR-binding peptide
  MOD_RES (2)..(3)..(34): Xaa is C or S
PXXVPQALSNITIQIMVGRKPKVLGEMSMIVRSXK

SEQ ID NO: 72864 - protein, 38 aa, Artificial Sequence
  GFR-binding peptide
  MOD_RES (1)..(35)..(37): Xaa is C or S
  MOD_RES (15)..(16)..(17)..(18)..(19): Xaa is A or G
  MOD_RES (20)..(21)..(22)..(23): Xaa is A or G or is absent
XTPTKMSNITMQIMXXXXXXXXXLGEMSGMVVDRXGXS

SEQ ID NO: 72865 - protein, 40 aa, Artificial Sequence
  GFR-binding peptide
  MOD_RES (4)..(5)..(39): Xaa is C or S
  MOD_RES (19)..(20)..(21)..(22)..(23): Xaa is A or G
  MOD_RES (24)..(25)..(26)..(27): Xaa is A or G or is absent
PPTXXVPTRLSNITIQIMXXXXXXXXXIGEMSDMVVESXG

SEQ ID NO: 72866 - protein, 35 aa, Artificial Sequence
  GFR-binding peptide
  MOD_RES (3)..(4): Xaa is C or S
KPXXAPTKLSNITVQIMDDSSNVILGEMSNMVVRS

SEQ ID NO: 72867 - protein, 36 aa, Artificial Sequence; identical to SEQ ID NO: 54712
  GFR-binding peptide
  MOD_RES (1)..(2)..(35): Xaa is C or S
  MOD_RES (16)..(17)..(18)..(19)..(20): Xaa is A or G
  MOD_RES (21)..(22)..(23)..(24): Xaa is A or G or is absent

SEQ ID NO: 72868 - protein, 42 aa, Artificial Sequence; identical to SEQ ID NO: 19277
  GFR-binding peptide
  MOD_RES (2)..(39)..(41): Xaa is C or S
  MOD_RES (18)..(19)..(20)..(21)..(22): Xaa is A or G
  MOD_RES (23)..(24)..(25)..(26): Xaa is A or G or is absent

SEQ ID NO: 72869 - protein, 41 aa, Artificial Sequence
  GFR-binding peptide
  MOD_RES (4)..(5)..(39)..(41): Xaa is C or S
  MOD_RES (19)..(20)..(21)..(22)..(23): Xaa is A or G
  MOD_RES (24)..(25)..(26)..(27): Xaa is A or G or is absent
PASXXVPARLSNITIQIMXXXXXXXXXLGEMSDMVVEAXGX

SEQ ID NO: 72870 - protein, 39 aa, Artificial Sequence; identical to SEQ ID NO: 19279
  GFR-binding peptide
  MOD_RES (4)..(38): Xaa is C or S
  MOD_RES (18)..(19)..(20)..(21)..(22): Xaa is A or G
  MOD_RES (23)..(24)..(25)..(26): Xaa is A or G or is absent

SEQ ID NO: 72871 - protein, 38 aa, Artificial Sequence; identical to SEQ ID NO: 19280
  GFR-binding peptide
  MOD_RES (35)..(37): Xaa is C or S
  MOD_RES (14)..(15)..(16)..(17)..(18): Xaa is A or G
  MOD_RES (19)..(20)..(21)..(22): Xaa is A or G or is absent

SEQ ID NO: 72872 - protein, 38 aa, Artificial Sequence
  GFR-binding peptide
  MOD_RES (6)..(7): Xaa is C or S
HVPKPXXAPTKLSNITVQIMDDSSNVILGEMSNMVVRS

SEQ ID NO: 72873 - protein, 41 aa, Artificial Sequence
  GFR-binding peptide
  MOD_RES (6)..(7)..(41): Xaa is C or S
  MOD_RES (21)..(22)..(23)..(24)..(25): Xaa is A or G
  MOD_RES (26)..(27)..(28)..(29): Xaa is A or G or is absent
STPPTXXVPTRLSNITIQIMXXXXXXXXXLGEMSDMVVESX

SEQ ID NO: 72874 - protein, 39 aa, Artificial Sequence; identical to SEQ ID NO: 54722
  GFR-binding peptide
  MOD_RES (5)..(6)..(39): Xaa is C or S
  MOD_RES (20)..(21)..(22)..(23)..(24): Xaa is A or G
  MOD_RES (25)..(26)..(27)..(28): Xaa is A or G or is absent

SEQ ID NO: 72875 - protein, 37 aa, Artificial Sequence
  GFR-binding peptide
  MOD_RES (1)..(35)..(37): Xaa is C or S
  MOD_RES (15)..(16)..(17)..(18)..(19): Xaa is A or G
  MOD_RES (20)..(21)..(22)..(23): Xaa is A or G or is absent
XAPTKLSNITVQIMXXXXXXXXXLGEMSNMVVRSXGX

SEQ ID NO: 72876 - protein, 39 aa, Artificial Sequence
  GFR-binding peptide
  MOD_RES (2)..(3)..(36)..(38): Xaa is C or S
  MOD_RES (17)..(18)..(19)..(20)..(21): Xaa is A or G
  MOD_RES (22)..(23)..(24)..(25): Xaa is A or G or is absent
PXXVSQDLSNITIQIMXXXXXXXXXLGEMSMIVKSXKXS

SEQ ID NO: 72877 - protein, 39 aa, Artificial Sequence; identical to SEQ ID NO: 19283
  GFR-binding peptide
  MOD_RES (36)..(38): Xaa is C or S

SEQ ID NO: 72878 - protein, 39 aa, Artificial Sequence; identical to SEQ ID NO: 19284
  GFR-binding peptide
  MOD_RES (2)..(36)..(38): Xaa is C or S
  MOD_RES (16)..(17)..(18)..(19)..(20): Xaa is A or G
  MOD_RES (21)..(22)..(23)..(24): Xaa is A or G or is absent

SEQ ID NO: 72879 - protein, 35 aa, Artificial Sequence
  GFR-binding peptide
  MOD_RES (4)..(5): Xaa is C or S
PPTXXVPTRLSNITIQIMDSANNVVLGEMSDMVVE

SEQ ID NO: 72880 - protein, 35 aa, Artificial Sequence; identical to SEQ ID NO: 54724
  GFR-binding peptide
  MOD_RES (2)..(3)..(34): Xaa is C or S

SEQ ID NO: 72881 - protein, 36 aa, Artificial Sequence
  GFR-binding peptide
  MOD_RES (1)..(2)..(35): Xaa is C or S
  MOD_RES (16)..(17)..(18)..(19)..(20): Xaa is A or G
  MOD_RES (21)..(22)..(23)..(24): Xaa is A or G or is absent
XXVPQDLSNITIQIMXXXXXXXXXLGEMSMVVKSXK

SEQ ID NO: 72882 - protein, 35 aa, Artificial Sequence; identical to SEQ ID NO: 52343
  GFR-binding peptide
  MOD_RES (33)..(35): Xaa is C or S
  MOD_RES (14)..(15)..(16)..(17)..(18): Xaa is A or G
  MOD_RES (19)..(20)..(21)..(22): Xaa is A or G or is absent

SEQ ID NO: 72883 - protein, 38 aa, Artificial Sequence
  GFR-binding peptide
  MOD_RES (6)..(7)..(38): Xaa is C or S
RVPSTXXAPVKTSNITMQIMDNGRVLLLGEMSMIVEEX

SEQ ID NO: 72884 - protein, 37 aa, Artificial Sequence
  GFR-binding peptide
  MOD_RES (2)..(3)..(35)..(37): Xaa is C or S
SXXVPARLSNITIQIMDAANNVVIGEMSDMVVEAXGX

SEQ ID NO: 72885 - protein, 35 aa, Artificial Sequence
  GFR-binding peptide
  MOD_RES (2)..(3)..(34): Xaa is C or S
PXXVSQDLSNITIQIMIGKTPKILGEMSMIVKSXK

SEQ ID NO: 72886 - protein, 36 aa, Artificial Sequence
  GFR-binding peptide
  MOD_RES (3)..(4)..(36): Xaa is C or S
ASXXVPARLSNITIQIMDAANNVVIGEMSDMVVEAX

SEQ ID NO: 72887 - protein, 32 aa, Artificial Sequence; identical to SEQ ID NO: 54731
  GFR-binding peptide
  MOD_RES (1)..(2): Xaa is C or S

SEQ ID NO: 72888 - protein, 31 aa, Artificial Sequence
  GFR-binding peptide
VPARLSNITIQIMDAANNVVIGEMSDMVVEA

SEQ ID NO: 72889 - protein, 39 aa, Artificial Sequence; identical to SEQ ID NO: 19289
  GFR-binding peptide
  MOD_RES (3)..(37)..(39): Xaa is C or S
  MOD_RES (17)..(18)..(19)..(20)..(21): Xaa is A or G
  MOD_RES (22)..(23)..(24)..(25): Xaa is A or G or is absent

SEQ ID NO: 72890 - protein, 44 aa, Artificial Sequence
  GFR-binding peptide
  MOD_RES (6)..(7)..(41)..(43): Xaa is C or S
  MOD_RES (21)..(22)..(23)..(24)..(25): Xaa is A or G
  MOD_RES (26)..(27)..(28)..(29): Xaa is A or G or is absent
STPPTXXVPTRLSNITIQIMXXXXXXXXXLGEMSDMVVESXGXR

SEQ ID NO: 72891 - protein, 36 aa, Artificial Sequence
  GFR-binding peptide
  MOD_RES (2)..(3)..(35): Xaa is C or S
PXXAPTKLSNITVQIMDDSSNVILGEMSNMVVRSXG

SEQ ID NO: 72892 - protein, 37 aa, Artificial Sequence; identical to SEQ ID NO: 19291
  GFR-binding peptide
  MOD_RES (2)..(2): Xaa is C or S
  MOD_RES (18)..(19)..(20)..(21)..(22): Xaa is A or G
  MOD_RES (23)..(24)..(25)..(26): Xaa is A or G or is absent

SEQ ID NO: 72893 - protein, 38 aa, Artificial Sequence
  GFR-binding peptide
  MOD_RES (5)..(6): Xaa is C or S
  MOD_RES (20)..(21)..(22)..(23)..(24): Xaa is A or G
  MOD_RES (25)..(26)..(27)..(28): Xaa is A or G or is absent
SAGPXXTPTKMSNITMQIMXXXXXXXXXLGEMSGMVVD

SEQ ID NO: 72894 - protein, 41 aa, Artificial Sequence; identical to SEQ ID NO: 52365
  GFR-binding peptide
  MOD_RES (6)..(7)..(38)..(40): Xaa is C or S

SEQ ID NO: 72895 - protein, 34 aa, Artificial Sequence
  GFR-binding peptide
  MOD_RES (1)..(2): Xaa is C or S
  MOD_RES (16)..(17)..(18)..(19)..(20): Xaa is A or G
  MOD_RES (21)..(22)..(23)..(24): Xaa is A or G or is absent
XXAPVKTSNITMQIMXXXXXXXXXLGEMSMIVEE

SEQ ID NO: 72896 - protein, 35 aa, Artificial Sequence; identical to SEQ ID NO: 19294
  GFR-binding peptide
  MOD_RES (16)..(17)..(18)..(19)..(20): Xaa is A or G
  MOD_RES (21)..(22)..(23)..(24): Xaa is A or G or is absent

SEQ ID NO: 72897 - protein, 36 aa, Artificial Sequence; identical to SEQ ID NO: 19295
  GFR-binding peptide
  MOD_RES (4)..(4): Xaa is C or S
  MOD_RES (18)..(19)..(20)..(21)..(22): Xaa is A or G
  MOD_RES (23)..(24)..(25)..(26): Xaa is A or G or is absent

SEQ ID NO: 72898 - protein, 39 aa, Artificial Sequence
  GFR-binding peptide
  MOD_RES (3)..(4)..(38): Xaa is C or S
  MOD_RES (18)..(19)..(20)..(21)..(22): Xaa is A or G
  MOD_RES (23)..(24)..(25)..(26): Xaa is A or G or is absent
PTXXVPTRLSNITIQIMXXXXXXXXXLGEMSDMVVESXG

SEQ ID NO: 72899 - protein, 31 aa, Artificial Sequence
  GFR-binding peptide
  MOD_RES (31)..(31): Xaa is C or S
APVKTSNITMQIMDNGRVLLLGEMSMIVEEX

SEQ ID NO: 72900 - protein, 38 aa, Artificial Sequence
  GFR-binding peptide
  MOD_RES (5)..(6)..(37): Xaa is C or S
VPSTXXAPVKTSNITMQIMDNGRVLLLGEMSMIVEEXG

SEQ ID NO: 72901 - protein, 39 aa, Artificial Sequence
  GFR-binding peptide
  MOD_RES (3)..(4)..(38): Xaa is C or S
  MOD_RES (18)..(19)..(20)..(21)..(22): Xaa is A or G
  MOD_RES (23)..(24)..(25)..(26): Xaa is A or G or is absent
PTXXVPTRLSNITIQIMXXXXXXXXXIGEMSDMVVESXG

SEQ ID NO: 72902 - protein, 36 aa, Artificial Sequence; identical to SEQ ID NO: 19298
  GFR-binding peptide
  MOD_RES (1)..(1): Xaa is C or S

SEQ ID NO: 72903 - protein, 41 aa, Artificial Sequence; identical to SEQ ID NO: 19299
  GFR-binding peptide
  MOD_RES (6)..(40): Xaa is C or S
  MOD_RES (20)..(21)..(22)..(23)..(24): Xaa is A or G
  MOD_RES (25)..(26)..(27)..(28): Xaa is A or G or is absent

SEQ ID NO: 72904 - protein, 33 aa, Artificial Sequence
  GFR-binding peptide
  MOD_RES (2)..(3): Xaa is C or S
PXXVPQDLSNITIQIMVGRTPKVLGEMSMVVKS

SEQ ID NO: 72905 - protein, 38 aa, Artificial Sequence; identical to SEQ ID NO: 19301
  GFR-binding peptide
  MOD_RES (35)..(37): Xaa is C or S

SEQ ID NO: 72906 - protein, 35 aa, Artificial Sequence; identical to SEQ ID NO: 52379
  GFR-binding peptide
  MOD_RES (33)..(35): Xaa is C or S
  MOD_RES (14)..(15)..(16)..(17)..(18): Xaa is A or G
  MOD_RES (19)..(20)..(21)..(22): Xaa is A or G or is absent

SEQ ID NO: 72907 - protein, 32 aa, Artificial Sequence; identical to SEQ ID NO: 52380
  GFR-binding peptide
  MOD_RES (1)..(32): Xaa is C or S

SEQ ID NO: 72908 - protein, 38 aa, Artificial Sequence; identical to SEQ ID NO: 19303
  GFR-binding peptide
  MOD_RES (1)..(38): Xaa is C or S
  MOD_RES (17)..(18)..(19)..(20)..(21): Xaa is A or G
  MOD_RES (22)..(23)..(24)..(25): Xaa is A or G or is absent

SEQ ID NO: 72909 - protein, 31 aa, Artificial Sequence; identical to SEQ ID NO: 54755
  GFR-binding peptide
  MOD_RES (1)..(1): Xaa is C or S

SEQ ID NO: 72910 - protein, 37 aa, Artificial Sequence
  GFR-binding peptide
  MOD_RES (4)..(5)..(37): Xaa is C or S
PKPXXAPTKLSNITVQIMDDSSNVILGEMSNMVVRSX

SEQ ID NO: 72911 - protein, 38 aa, Artificial Sequence
  GFR-binding peptide
  MOD_RES (4)..(5): Xaa is C or S
  MOD_RES (19)..(20)..(21)..(22)..(23): Xaa is A or G
  MOD_RES (24)..(25)..(26)..(27): Xaa is A or G or is absent
PPTXXVPTRLSNITIQIMXXXXXXXXXIGEMSDMVVES

SEQ ID NO: 72912 - protein, 34 aa, Artificial Sequence
  GFR-binding peptide
  MOD_RES (1)..(2): Xaa is C or S
  MOD_RES (16)..(17)..(18)..(19)..(20): Xaa is A or G
  MOD_RES (21)..(22)..(23)..(24): Xaa is A or G or is absent
XXVPTRLSNITIQIMXXXXXXXXXIGEMSDMVVE

SEQ ID NO: 72913 - protein, 41 aa, Artificial Sequence
  GFR-binding peptide
  MOD_RES (5)..(6)..(38)..(40): Xaa is C or S
TPPTXXVPTRLSNITIQIMDSANNVVLGEMSDMVVESXGXR

SEQ ID NO: 72914 - protein, 35 aa, Artificial Sequence
  GFR-binding peptide
  MOD_RES (1)..(2): Xaa is C or S
  MOD_RES (16)..(17)..(18)..(19)..(20): Xaa is A or G
  MOD_RES (21)..(22)..(23)..(24): Xaa is A or G or is absent
XXVPTRLSNITIQIMXXXXXXXXXLGEMSDMVVES

SEQ ID NO: 72915 - protein, 39 aa, Artificial Sequence; identical to SEQ ID NO: 19306
  GFR-binding peptide
  MOD_RES (1)..(38): Xaa is C or S
  MOD_RES (17)..(18)..(19)..(20)..(21): Xaa is A or G
  MOD_RES (22)..(23)..(24)..(25): Xaa is A or G or is absent

SEQ ID NO: 72916 - protein, 38 aa, Artificial Sequence; identical to SEQ ID NO: 52395
  GFR-binding peptide
  MOD_RES (4)..(5)..(38): Xaa is C or S
  MOD_RES (19)..(20)..(21)..(22)..(23): Xaa is A or G
  MOD_RES (24)..(25)..(26)..(27): Xaa is A or G or is absent

SEQ ID NO: 72917 - protein, 41 aa, Artificial Sequence
  GFR-binding peptide
  MOD_RES (3)..(4)..(38)..(40): Xaa is C or S
  MOD_RES (18)..(19)..(20)..(21)..(22): Xaa is A or G
  MOD_RES (23)..(24)..(25)..(26): Xaa is A or G or is absent
GPXXTPTKMSNITMQIMXXXXXXXXXLGEMSGMVVDRXGXS

SEQ ID NO: 72918 - protein, 33 aa, Artificial Sequence; identical to SEQ ID NO: 19308
  GFR-binding peptide

SEQ ID NO: 72919 - protein, 40 aa, Artificial Sequence
  GFR-binding peptide
  MOD_RES (4)..(5)..(37)..(39): Xaa is C or S
AGPXXTPTKMSNITMQIMNDKQQIIIGEMSGMVVDRXGXS

SEQ ID NO: 72920 - protein, 43 aa, Artificial Sequence; identical to SEQ ID NO: 19309
  GFR-binding peptide
  MOD_RES (4)..(41)..(43): Xaa is C or S
  MOD_RES (20)..(21)..(22)..(23)..(24): Xaa is A or G
  MOD_RES (25)..(26)..(27)..(28): Xaa is A or G or is absent

SEQ ID NO: 72921 - protein, 34 aa, Artificial Sequence
  GFR-binding peptide
  MOD_RES (1)..(1): Xaa is C or S
  MOD_RES (15)..(16)..(17)..(18)..(19): Xaa is A or G
  MOD_RES (20)..(21)..(22)..(23): Xaa is A or G or is absent
XVPTRLSNITIQIMXXXXXXXXXLGEMSDMVVES

SEQ ID NO: 72922 - protein, 39 aa, Artificial Sequence; identical to SEQ ID NO: 19310
  GFR-binding peptide
  MOD_RES (5)..(39): Xaa is C or S
  MOD_RES (19)..(20)..(21)..(22)..(23): Xaa is A or G
  MOD_RES (24)..(25)..(26)..(27): Xaa is A or G or is absent

SEQ ID NO: 72923 - protein, 36 aa, Artificial Sequence; identical to SEQ ID NO: 54765
  GFR-binding peptide
  MOD_RES (5)..(6): Xaa is C or S

SEQ ID NO: 72924 - protein, 44 aa, Artificial Sequence; identical to SEQ ID NO: 19312
  GFR-binding peptide
  MOD_RES (7)..(41)..(43): Xaa is C or S
  MOD_RES (21)..(22)..(23)..(24)..(25): Xaa is A or G
  MOD_RES (26)..(27)..(28)..(29): Xaa is A or G or is absent

SEQ ID NO: 72925 - protein, 40 aa, Artificial Sequence
  GFR-binding peptide
  MOD_RES (3)..(4)..(37)..(39): Xaa is C or S
  MOD_RES (18)..(19)..(20)..(21)..(22): Xaa is A or G
  MOD_RES (23)..(24)..(25)..(26): Xaa is A or G or is absent
STXXAPVKTSNITMQIMXXXXXXXXXLGEMSMIVEEXGXL

SEQ ID NO: 72926 - protein, 41 aa, Artificial Sequence
  GFR-binding peptide
  MOD_RES (3)..(4)..(38)..(40): Xaa is C or S
  MOD_RES (18)..(19)..(20)..(21)..(22): Xaa is A or G
  MOD_RES (23)..(24)..(25)..(26): Xaa is A or G or is absent
ASXXVPARLSNITIQIMXXXXXXXXXIGEMSDMVVEAXGXR

SEQ ID NO: 72927 - protein, 36 aa, Artificial Sequence; identical to SEQ ID NO: 19316
  GFR-binding peptide
  MOD_RES (36)..(36): Xaa is C or S
  MOD_RES (15)..(16)..(17)..(18)..(19): Xaa is A or G
  MOD_RES (20)..(21)..(22)..(23): Xaa is A or G or is absent

SEQ ID NO: 72928 - protein, 35 aa, Artificial Sequence; identical to SEQ ID NO: 19317
  GFR-binding peptide
  MOD_RES (2)..(2): Xaa is C or S
  MOD_RES (16)..(17)..(18)..(19)..(20): Xaa is A or G
  MOD_RES (21)..(22)..(23)..(24): Xaa is A or G or is absent

SEQ ID NO: 72929 - protein, 33 aa, Artificial Sequence
  GFR-binding peptide
  MOD_RES (33)..(33): Xaa is C or S
  MOD_RES (14)..(15)..(16)..(17)..(18): Xaa is A or G
  MOD_RES (19)..(20)..(21)..(22): Xaa is A or G or is absent
VSQDLSNITIQIMXXXXXXXXXLGEMSMIVKSX

SEQ ID NO: 72930 - protein, 40 aa, Artificial Sequence; identical to SEQ ID NO: 52404
  GFR-binding peptide
  MOD_RES (5)..(6)..(37)..(39): Xaa is C or S

SEQ ID NO: 72931 - protein, 33 aa, Artificial Sequence
  GFR-binding peptide
  MOD_RES (2)..(3): Xaa is C or S
TXXVPTRLSNITIQIMDSANNVVIGEMSDMVVE

SEQ ID NO: 72932 - protein, 41 aa, Artificial Sequence
  GFR-binding peptide
  MOD_RES (6)..(7)..(39)..(41): Xaa is C or S
AAPASXXVPARLSNITIQIMDAANNVVLGEMSDMVVEAXGX

SEQ ID NO: 72933 - protein, 37 aa, Artificial Sequence
  GFR-binding peptide
  MOD_RES (2)..(3)..(36): Xaa is C or S
  MOD_RES (17)..(18)..(19)..(20)..(21): Xaa is A or G
  MOD_RES (22)..(23)..(24)..(25): Xaa is A or G or is absent
TXXAPVKTSNITMQIMXXXXXXXXXIGEMSMIVEEXG

SEQ ID NO: 72934 - protein, 32 aa, Artificial Sequence; identical to SEQ ID NO: 52418
  GFR-binding peptide
  MOD_RES (1)..(2): Xaa is C or S

SEQ ID NO: 72935 - protein, 38 aa, Artificial Sequence
  GFR-binding peptide
  MOD_RES (5)..(6)..(38): Xaa is C or S
VPKPXXAPTKLSNITVQIMDDSSNVILGEMSNMVVRSX

SEQ ID NO: 72936 - protein, 40 aa, Artificial Sequence
  GFR-binding peptide
  MOD_RES (6)..(7): Xaa is C or S
  MOD_RES (21)..(22)..(23)..(24)..(25): Xaa is A or G
  MOD_RES (26)..(27)..(28)..(29): Xaa is A or G or is absent
STPPTXXVPTRLSNITIQIMXXXXXXXXXIGEMSDMVVES

SEQ ID NO: 72937 - protein, 38 aa, Artificial Sequence; identical to SEQ ID NO: 54787
  GFR-binding peptide
  MOD_RES (2)..(3)..(37): Xaa is C or S
  MOD_RES (17)..(18)..(19)..(20)..(21): Xaa is A or G
  MOD_RES (22)..(23)..(24)..(25): Xaa is A or G or is absent

SEQ ID NO: 72938 - protein, 42 aa, Artificial Sequence
  GFR-binding peptide
  MOD_RES (5)..(6)..(40)..(42): Xaa is C or S
  MOD_RES (20)..(21)..(22)..(23)..(24): Xaa is A or G
  MOD_RES (25)..(26)..(27)..(28): Xaa is A or G or is absent
APASXXVPARLSNITIQIMXXXXXXXXXIGEMSDMVVEAXGX

SEQ ID NO: 72939 - protein, 32 aa, Artificial Sequence
  GFR-binding peptide
  MOD_RES (1)..(2): Xaa is C or S
XXVSQDLSNITIQIMIGKTPKILGEMSMIVKS

SEQ ID NO: 72940 - protein, 36 aa, Artificial Sequence
  GFR-binding peptide
  MOD_RES (3)..(4)..(35): Xaa is C or S
STXXAPVKTSNITMQIMDNGRVLLIGEMSMIVEEXG

SEQ ID NO: 72941 - protein, 36 aa, Artificial Sequence; identical to SEQ ID NO: 19326
  GFR-binding peptide
  MOD_RES (3)..(3): Xaa is C or S
  MOD_RES (17)..(18)..(19)..(20)..(21): Xaa is A or G
  MOD_RES (22)..(23)..(24)..(25): Xaa is A or G or is absent

SEQ ID NO: 72942 - protein, 38 aa, Artificial Sequence
  GFR-binding peptide
  MOD_RES (2)..(3)..(35)..(37): Xaa is C or S
PXXTPTKMSNITMQIMNDKQQIILGEMSGMVVDRXGXS

SEQ ID NO: 72943 - protein, 43 aa, Artificial Sequence; identical to SEQ ID NO: 19327
  GFR-binding peptide
  MOD_RES (3)..(40)..(42): Xaa is C or S
  MOD_RES (19)..(20)..(21)..(22)..(23): Xaa is A or G
  MOD_RES (24)..(25)..(26)..(27): Xaa is A or G or is absent

SEQ ID NO: 72944 - protein, 38 aa, Artificial Sequence; identical to SEQ ID NO: 19330
  GFR-binding peptide
  MOD_RES (36)..(38): Xaa is C or S

SEQ ID NO: 72945 - protein, 35 aa, Artificial Sequence
  GFR-binding peptide
  MOD_RES (1)..(33)..(35): Xaa is C or S
XVPTRLSNITIQIMDSANNVVIGEMSDMVVESXGX

SEQ ID NO: 72946 - protein, 41 aa, Artificial Sequence
  GFR-binding peptide
  MOD_RES (6)..(7)..(41): Xaa is C or S
  MOD_RES (21)..(22)..(23)..(24)..(25): Xaa is A or G
  MOD_RES (26)..(27)..(28)..(29): Xaa is A or G or is absent
AAPASXXVPARLSNITIQIMXXXXXXXXXIGEMSDMVVEAX

SEQ ID NO: 72947 - protein, 36 aa, Artificial Sequence
  GFR-binding peptide
  MOD_RES (34)..(36): Xaa is C or S
  MOD_RES (14)..(15)..(16)..(17)..(18): Xaa is A or G
  MOD_RES (19)..(20)..(21)..(22): Xaa is A or G or is absent
TPTKMSNITMQIMXXXXXXXXXLGEMSGMVVDRXGX

SEQ ID NO: 72948 - protein, 36 aa, Artificial Sequence; identical to SEQ ID NO: 52435
  GFR-binding peptide
  MOD_RES (2)..(3)..(36): Xaa is C or S
  MOD_RES (17)..(18)..(19)..(20)..(21): Xaa is A or G
  MOD_RES (22)..(23)..(24)..(25): Xaa is A or G or is absent

SEQ ID NO: 72949 - protein, 41 aa, Artificial Sequence; identical to SEQ ID NO: 19333
  GFR-binding peptide
  MOD_RES (5)..(5): Xaa is C or S
  MOD_RES (21)..(22)..(23)..(24)..(25): Xaa is A or G
  MOD_RES (26)..(27)..(28)..(29): Xaa is A or G or is absent

SEQ ID NO: 72950 - protein, 32 aa, Artificial Sequence; identical to SEQ ID NO: 52442
  GFR-binding peptide
  MOD_RES (1)..(2): Xaa is C or S

SEQ ID NO: 72951 - protein, 34 aa, Artificial Sequence
  GFR-binding peptide
  MOD_RES (1)..(33): Xaa is C or S
XVPARLSNITIQIMDAANNVVIGEMSDMVVEAXG

SEQ ID NO: 72952 - protein, 35 aa, Artificial Sequence
  GFR-binding peptide
  MOD_RES (1)..(32)..(34): Xaa is C or S
XVSQDLSNITIQIMIGKTPKILGEMSMIVKSXKXS

SEQ ID NO: 72953 - protein, 34 aa, Artificial Sequence
  GFR-binding peptide
  MOD_RES (32)..(34): Xaa is C or S
VPARLSNITIQIMDAANNVVIGEMSDMVVEAXGX

SEQ ID NO: 72954 - protein, 37 aa, Artificial Sequence
  GFR-binding peptide
  MOD_RES (1)..(2)..(36): Xaa is C or S
  MOD_RES (16)..(17)..(18)..(19)..(20): Xaa is A or G
  MOD_RES (21)..(22)..(23)..(24): Xaa is A or G or is absent
XXAPTKLSNITVQIMXXXXXXXXXLGEMSNMVVRSXG

SEQ ID NO: 72955 - protein, 37 aa, Artificial Sequence; identical to SEQ ID NO: 52450
  GFR-binding peptide
  MOD_RES (3)..(4)..(37): Xaa is C or S
  MOD_RES (18)..(19)..(20)..(21)..(22): Xaa is A or G
  MOD_RES (23)..(24)..(25)..(26): Xaa is A or G or is absent

SEQ ID NO: 72956 - protein, 40 aa, Artificial Sequence
  GFR-binding peptide
  MOD_RES (5)..(6)..(38)..(40): Xaa is C or S
TPPTXXVPTRLSNITIQIMDSANNVVIGEMSDMVVESXGX

SEQ ID NO: 72957 - protein, 35 aa, Artificial Sequence
  GFR-binding peptide
  MOD_RES (3)..(4): Xaa is C or S
PTXXVPTRLSNITIQIMDSANNVVIGEMSDMVVES

SEQ ID NO: 72958 - protein, 39 aa, Artificial Sequence; identical to SEQ ID NO: 54806
  GFR-binding peptide
  MOD_RES (5)..(6)..(39): Xaa is C or S
  MOD_RES (20)..(21)..(22)..(23)..(24): Xaa is A or G
  MOD_RES (25)..(26)..(27)..(28): Xaa is A or G or is absent

SEQ ID NO: 72959 - protein, 38 aa, Artificial Sequence
  GFR-binding peptide
  MOD_RES (5)..(6): Xaa is C or S
  MOD_RES (20)..(21)..(22)..(23)..(24): Xaa is A or G
  MOD_RES (25)..(26)..(27)..(28): Xaa is A or G or is absent
SAGPXXTPTKMSNITMQIMXXXXXXXXXIGEMSGMVVD

SEQ ID NO: 72960 - protein, 38 aa, Artificial Sequence
  GFR-binding peptide
  MOD_RES (4)..(5)..(36)..(38): Xaa is C or S
AAPXXVPQALSNITIQIMVGRKPKVLGEMSMIVRSXKX

SEQ ID NO: 72961 - protein, 36 aa, Artificial Sequence; identical to SEQ ID NO: 19339
  GFR-binding peptide
  MOD_RES (1)..(35): Xaa is C or S
  MOD_RES (15)..(16)..(17)..(18)..(19): Xaa is A or G
  MOD_RES (20)..(21)..(22)..(23): Xaa is A or G or is absent

SEQ ID NO: 72962 - protein, 39 aa, Artificial Sequence; identical to SEQ ID NO: 19340
  GFR-binding peptide
  MOD_RES (3)..(3): Xaa is C or S

SEQ ID NO: 72963 - protein, 39 aa, Artificial Sequence
  GFR-binding peptide
  MOD_RES (2)..(3)..(36)..(38): Xaa is C or S
  MOD_RES (17)..(18)..(19)..(20)..(21): Xaa is A or G
  MOD_RES (22)..(23)..(24)..(25): Xaa is A or G or is absent
PXXVPQDLSNITIQIMXXXXXXXXXLGEMSMVVKSXKXS

SEQ ID NO: 72964 - protein, 35 aa, Artificial Sequence; identical to SEQ ID NO: 54815
  GFR-binding peptide
  MOD_RES (1)..(34): Xaa is C or S
  MOD_RES (15)..(16)..(17)..(18)..(19): Xaa is A or G
  MOD_RES (20)..(21)..(22)..(23): Xaa is A or G or is absent

SEQ ID NO: 72965 - protein, 40 aa, Artificial Sequence
  GFR-binding peptide
  MOD_RES (4)..(5)..(37)..(39): Xaa is C or S
PPTXXVPTRLSNITIQIMDSANNVVLGEMSDMVVESXGXR

SEQ ID NO: 72966 - protein, 38 aa, Artificial Sequence
  GFR-binding peptide
  MOD_RES (1)..(2)..(36)..(38): Xaa is C or S
  MOD_RES (16)..(17)..(18)..(19)..(20): Xaa is A or G
  MOD_RES (21)..(22)..(23)..(24): Xaa is A or G or is absent
XXTPTKMSNITMQIMXXXXXXXXXIGEMSGMVVDRXGX

SEQ ID NO: 72967 - protein, 37 aa, Artificial Sequence
  GFR-binding peptide
  MOD_RES (1)..(34)..(36): Xaa is C or S
  MOD_RES (15)..(16)..(17)..(18)..(19): Xaa is A or G
  MOD_RES (20)..(21)..(22)..(23): Xaa is A or G or is absent
XAPVKTSNITMQIMXXXXXXXXXIGEMSMIVEEXGXL

SEQ ID NO: 72968 - protein, 35 aa, Artificial Sequence
  GFR-binding peptide
  MOD_RES (1)..(34): Xaa is C or S
  MOD_RES (15)..(16)..(17)..(18)..(19): Xaa is A or G
  MOD_RES (20)..(21)..(22)..(23): Xaa is A or G or is absent
XVSQDLSNITIQIMXXXXXXXXXLGEMSMIVKSXK

SEQ ID NO: 72969 - protein, 35 aa, Artificial Sequence
  GFR-binding peptide
  MOD_RES (2)..(3): Xaa is C or S
  MOD_RES (17)..(18)..(19)..(20)..(21): Xaa is A or G
  MOD_RES (22)..(23)..(24)..(25): Xaa is A or G or is absent
PXXVSQDLSNITIQIMXXXXXXXXXLGEMSMIVKS

SEQ ID NO: 72970 - protein, 36 aa, Artificial Sequence; identical to SEQ ID NO: 19344
  GFR-binding peptide
  MOD_RES (4)..(4): Xaa is C or S
  MOD_RES (18)..(19)..(20)..(21)..(22): Xaa is A or G
  MOD_RES (23)..(24)..(25)..(26): Xaa is A or G or is absent

SEQ ID NO: 72971 - protein, 32 aa, Artificial Sequence; identical to SEQ ID NO: 52460
  GFR-binding peptide
  MOD_RES (32)..(32): Xaa is C or S

SEQ ID NO: 72972 - protein, 32 aa, Artificial Sequence
  GFR-binding peptide
  MOD_RES (1)..(2): Xaa is C or S
XXVPQDLSNITIQIMVGRTPKVLGEMSMVVKS

SEQ ID NO: 72973 - protein, 35 aa, Artificial Sequence
  GFR-binding peptide
  MOD_RES (34)..(34): Xaa is C or S
  MOD_RES (14)..(15)..(16)..(17)..(18): Xaa is A or G
  MOD_RES (19)..(20)..(21)..(22): Xaa is A or G or is absent
VPTRLSNITIQIMXXXXXXXXXIGEMSDMVVESXG

SEQ ID NO: 72974 - protein, 36 aa, Artificial Sequence
  GFR-binding peptide
  MOD_RES (2)..(3)..(34)..(36): Xaa is C or S
PXXVPQDLSNITIQIMVGRTPKVLGEMSMVVKSXKX

SEQ ID NO: 72975 - protein, 37 aa, Artificial Sequence
  GFR-binding peptide
  MOD_RES (2)..(3)..(36): Xaa is C or S
  MOD_RES (17)..(18)..(19)..(20)..(21): Xaa is A or G
  MOD_RES (22)..(23)..(24)..(25): Xaa is A or G or is absent
PXXVSQDLSNITIQIMXXXXXXXXXLGEMSMIVKSXK

SEQ ID NO: 72976 - protein, 43 aa, Artificial Sequence; identical to SEQ ID NO: 19347
  GFR-binding peptide
  MOD_RES (4)..(41)..(43): Xaa is C or S
  MOD_RES (20)..(21)..(22)..(23)..(24): Xaa is A or G
  MOD_RES (25)..(26)..(27)..(28): Xaa is A or G or is absent

SEQ ID NO: 72977 - protein, 34 aa, Artificial Sequence; identical to SEQ ID NO: 19349
  GFR-binding peptide
  MOD_RES (14)..(15)..(16)..(17)..(18): Xaa is A or G
  MOD_RES (19)..(20)..(21)..(22): Xaa is A or G or is absent

SEQ ID NO: 72978 - protein, 36 aa, Artificial Sequence
  GFR-binding peptide
  MOD_RES (3)..(4)..(36): Xaa is C or S
KPXXAPTKLSNITVQIMDDSSNVILGEMSNMVVRSX

SEQ ID NO: 72979 - protein, 39 aa, Artificial Sequence
  GFR-binding peptide
  MOD_RES (5)..(6)..(38): Xaa is C or S
VPKPXXAPTKLSNITVQIMDDSSNVILGEMSNMVVRSXG

SEQ ID NO: 72980 - protein, 32 aa, Artificial Sequence
  GFR-binding peptide
  MOD_RES (1)..(32): Xaa is C or S
XAPVKTSNITMQIMDNGRVLLLGEMSMIVEEX

SEQ ID NO: 72981 - protein, 36 aa, Artificial Sequence; identical to SEQ ID NO: 54833
  GFR-binding peptide
  MOD_RES (3)..(4)..(36): Xaa is C or S

SEQ ID NO: 72982 - protein, 36 aa, Artificial Sequence; identical to SEQ ID NO: 19352
  GFR-binding peptide

SEQ ID NO: 72983 - protein, 40 aa, Artificial Sequence
  GFR-binding peptide
  MOD_RES (2)..(3)..(37)..(39): Xaa is C or S
  MOD_RES (17)..(18)..(19)..(20)..(21): Xaa is A or G
  MOD_RES (22)..(23)..(24)..(25): Xaa is A or G or is absent
TXXVPTRLSNITIQIMXXXXXXXXXIGEMSDMVVESXGXR

SEQ ID NO: 72984 - protein, 44 aa, Artificial Sequence; identical to SEQ ID NO: 19354
  GFR-binding peptide
  MOD_RES (4)..(41)..(43): Xaa is C or S

SEQ ID NO: 72985 - protein, 33 aa, Artificial Sequence
  GFR-binding peptide
  MOD_RES (1)..(2)..(33): Xaa is C or S
XXVPQDLSNITIQIMVGRTPKVLGEMSMVVKSX

SEQ ID NO: 72986 - protein, 31 aa, Artificial Sequence
  GFR-binding peptide
VPTRLSNITIQIMDSANNVVIGEMSDMVVES

SEQ ID NO: 72987 - protein, 36 aa, Artificial Sequence; identical to SEQ ID NO: 19355
  GFR-binding peptide
  MOD_RES (4)..(4): Xaa is C or S

SEQ ID NO: 72988 - protein, 36 aa, Artificial Sequence; identical to SEQ ID NO: 54841
  GFR-binding peptide
  MOD_RES (1)..(2)..(36): Xaa is C or S
  MOD_RES (16)..(17)..(18)..(19)..(20): Xaa is A or G
  MOD_RES (21)..(22)..(23)..(24): Xaa is A or G or is absent

SEQ ID NO: 72989 - protein, 34 aa, Artificial Sequence
  GFR-binding peptide
  MOD_RES (31)..(33): Xaa is C or S
APVKTSNITMQIMDNGRVLLIGEMSMIVEEXGXL

SEQ ID NO: 72990 - protein, 39 aa, Artificial Sequence
  GFR-binding peptide
  MOD_RES (6)..(7)..(39): Xaa is C or S
GSAGPXXTPTKMSNITMQIMNDKQQIIIGEMSGMVVDRX

SEQ ID NO: 72991 - protein, 38 aa, Artificial Sequence
  GFR-binding peptide
  MOD_RES (4)..(5)..(36)..(38): Xaa is C or S
PSTXXAPVKTSNITMQIMDNGRVLLLGEMSMIVEEXGX

SEQ ID NO: 72992 - protein, 37 aa, Artificial Sequence; identical to SEQ ID NO: 19358
  GFR-binding peptide
  MOD_RES (2)..(2): Xaa is C or S

SEQ ID NO: 72993 - protein, 38 aa, Artificial Sequence; identical to SEQ ID NO: 52486
  GFR-binding peptide
  MOD_RES (2)..(3)..(36)..(38): Xaa is C or S
  MOD_RES (17)..(18)..(19)..(20)..(21): Xaa is A or G
  MOD_RES (22)..(23)..(24)..(25): Xaa is A or G or is absent

SEQ ID NO: 72994 - protein, 36 aa, Artificial Sequence
  GFR-binding peptide
  MOD_RES (1)..(34)..(36): Xaa is C or S
  MOD_RES (15)..(16)..(17)..(18)..(19): Xaa is A or G
  MOD_RES (20)..(21)..(22)..(23): Xaa is A or G or is absent
XVPQALSNITIQIMXXXXXXXXXLGEMSMIVRSXKX

SEQ ID NO: 72995 - protein, 35 aa, Artificial Sequence
  GFR-binding peptide
  MOD_RES (1)..(2)..(34): Xaa is C or S
XXTPTKMSNITMQIMNDKQQIILGEMSGMVVDRXG

SEQ ID NO: 72996 - protein, 41 aa, Artificial Sequence
  GFR-binding peptide
  MOD_RES (4)..(5)..(38)..(40): Xaa is C or S
  MOD_RES (19)..(20)..(21)..(22)..(23): Xaa is A or G
  MOD_RES (24)..(25)..(26)..(27): Xaa is A or G or is absent
ASPXXVSQDLSNITIQIMXXXXXXXXXLGEMSMIVKSXKXS

SEQ ID NO: 72997 - protein, 34 aa, Artificial Sequence; identical to SEQ ID NO: 19360
  GFR-binding peptide
  MOD_RES (15)..(16)..(17)..(18)..(19): Xaa is A or G
  MOD_RES (20)..(21)..(22)..(23): Xaa is A or G or is absent

SEQ ID NO: 72998 - protein, 36 aa, Artificial Sequence; identical to SEQ ID NO: 19363
  GFR-binding peptide
  MOD_RES (1)..(1): Xaa is C or S

SEQ ID NO: 72999 - protein, 38 aa, Artificial Sequence; identical to SEQ ID NO: 54858
  GFR-binding peptide
  MOD_RES (1)..(2)..(35)..(37): Xaa is C or S
  MOD_RES (16)..(17)..(18)..(19)..(20): Xaa is A or G
  MOD_RES (21)..(22)..(23)..(24): Xaa is A or G or is absent

SEQ ID NO: 73000 - protein, 33 aa, Artificial Sequence
  GFR-binding peptide
  MOD_RES (31)..(33): Xaa is C or S
APVKTSNITMQIMDNGRVLLIGEMSMIVEEXGX

SEQ ID NO: 73001 - protein, 36 aa, Artificial Sequence
  GFR-binding peptide
  MOD_RES (1)..(2)..(36): Xaa is C or S
  MOD_RES (16)..(17)..(18)..(19)..(20): Xaa is A or G
  MOD_RES (21)..(22)..(23)..(24): Xaa is A or G or is absent
XXAPTKLSNITVQIMXXXXXXXXXLGEMSNMVVRSX

SEQ ID NO: 73002 - protein, 35 aa, Artificial Sequence; identical to SEQ ID NO: 19364
  GFR-binding peptide
  MOD_RES (1)..(1): Xaa is C or S

SEQ ID NO: 73003 - protein, 41 aa, Artificial Sequence
  GFR-binding peptide
  MOD_RES (6)..(7)..(38)..(40): Xaa is C or S
ASASPXXVPQDLSNITIQIMVGRTPKVLGEMSMVVKSXKXS

SEQ ID NO: 73004 - protein, 41 aa, Artificial Sequence
  GFR-binding peptide
  MOD_RES (4)..(5)..(39)..(41): Xaa is C or S
  MOD_RES (19)..(20)..(21)..(22)..(23): Xaa is A or G
  MOD_RES (24)..(25)..(26)..(27): Xaa is A or G or is absent
AGPXXTPTKMSNITMQIMXXXXXXXXXIGEMSGMVVDRXGX

SEQ ID NO: 73005 - protein, 35 aa, Artificial Sequence; identical to SEQ ID NO: 19365
  GFR-binding peptide
  MOD_RES (34)..(34): Xaa is C or S
  MOD_RES (14)..(15)..(16)..(17)..(18): Xaa is A or G
  MOD_RES (19)..(20)..(21)..(22): Xaa is A or G or is absent

SEQ ID NO: 73006 - protein, 36 aa, Artificial Sequence; identical to SEQ ID NO: 19366
  GFR-binding peptide
  MOD_RES (4)..(4): Xaa is C or S
  MOD_RES (18)..(19)..(20)..(21)..(22): Xaa is A or G
  MOD_RES (23)..(24)..(25)..(26): Xaa is A or G or is absent

SEQ ID NO: 73007 - protein, 42 aa, Artificial Sequence
  GFR-binding peptide
  MOD_RES (6)..(7)..(39)..(41): Xaa is C or S
STPPTXXVPTRLSNITIQIMDSANNVVIGEMSDMVVESXGXR

SEQ ID NO: 73008 - protein, 37 aa, Artificial Sequence
  GFR-binding peptide
  MOD_RES (3)..(4): Xaa is C or S
  MOD_RES (18)..(19)..(20)..(21)..(22): Xaa is A or G
  MOD_RES (23)..(24)..(25)..(26): Xaa is A or G or is absent
KPXXAPTKLSNITVQIMXXXXXXXXXLGEMSNMVVRS

SEQ ID NO: 73009 - protein, 34 aa, Artificial Sequence
  GFR-binding peptide
  MOD_RES (1)..(2): Xaa is C or S
  MOD_RES (16)..(17)..(18)..(19)..(20): Xaa is A or G
  MOD_RES (21)..(22)..(23)..(24): Xaa is A or G or is absent
XXAPTKLSNITVQIMXXXXXXXXXLGEMSNMVVR

SEQ ID NO: 73010 - protein, 40 aa, Artificial Sequence; identical to SEQ ID NO: 19367
  GFR-binding peptide
  MOD_RES (7)..(7): Xaa is C or S
  MOD_RES (21)..(22)..(23)..(24)..(25): Xaa is A or G
  MOD_RES (26)..(27)..(28)..(29): Xaa is A or G or is absent

SEQ ID NO: 73011 - protein, 35 aa, Artificial Sequence
  GFR-binding peptide
  MOD_RES (1)..(2)..(35): Xaa is C or S
  MOD_RES (16)..(17)..(18)..(19)..(20): Xaa is A or G
  MOD_RES (21)..(22)..(23)..(24): Xaa is A or G or is absent
XXAPVKTSNITMQIMXXXXXXXXXIGEMSMIVEEX

SEQ ID NO: 73012 - protein, 37 aa, Artificial Sequence; identical to SEQ ID NO: 52493
  GFR-binding peptide
  MOD_RES (2)..(3)..(36): Xaa is C or S
  MOD_RES (17)..(18)..(19)..(20)..(21): Xaa is A or G
  MOD_RES (22)..(23)..(24)..(25): Xaa is A or G or is absent

SEQ ID NO: 73013 - protein, 37 aa, Artificial Sequence
  GFR-binding peptide
  MOD_RES (6)..(7): Xaa is C or S
ASASPXXVSQDLSNITIQIMIGKTPKILGEMSMIVKS

SEQ ID NO: 73014 - protein, 37 aa, Artificial Sequence
  GFR-binding peptide
  MOD_RES (5)..(6): Xaa is C or S
VPKPXXAPTKLSNITVQIMDDSSNVILGEMSNMVVRS

SEQ ID NO: 73015 - protein, 37 aa, Artificial Sequence
  GFR-binding peptide
  MOD_RES (34)..(36): Xaa is C or S
  MOD_RES (14)..(15)..(16)..(17)..(18): Xaa is A or G
  MOD_RES (19)..(20)..(21)..(22): Xaa is A or G or is absent
VPARLSNITIQIMXXXXXXXXXIGEMSDMVVEAXGXR

SEQ ID NO: 73016 - protein, 37 aa, Artificial Sequence
  GFR-binding peptide
  MOD_RES (1)..(2)..(34)..(36): Xaa is C or S
XXVPTRLSNITIQIMDSANNVVIGEMSDMVVESXGXR

SEQ ID NO: 73017 - protein, 38 aa, Artificial Sequence
  GFR-binding peptide
  MOD_RES (2)..(3)..(36)..(38): Xaa is C or S
  MOD_RES (17)..(18)..(19)..(20)..(21): Xaa is A or G
  MOD_RES (22)..(23)..(24)..(25): Xaa is A or G or is absent
PXXVPQALSNITIQIMXXXXXXXXXLGEMSMIVRSXKX

SEQ ID NO: 73018 - protein, 37 aa, Artificial Sequence
  GFR-binding peptide
  MOD_RES (1)..(35)..(37): Xaa is C or S
  MOD_RES (15)..(16)..(17)..(18)..(19): Xaa is A or G
  MOD_RES (20)..(21)..(22)..(23): Xaa is A or G or is absent
XVPTRLSNITIQIMXXXXXXXXXLGEMSDMVVESXGX

SEQ ID NO: 73019 - protein, 34 aa, Artificial Sequence; identical to SEQ ID NO: 52502
  GFR-binding peptide
  MOD_RES (1)..(33): Xaa is C or S

SEQ ID NO: 73020 - protein, 42 aa, Artificial Sequence; identical to SEQ ID NO: 19368
  GFR-binding peptide
  MOD_RES (7)..(41): Xaa is C or S
  MOD_RES (21)..(22)..(23)..(24)..(25): Xaa is A or G
  MOD_RES (26)..(27)..(28)..(29): Xaa is A or G or is absent

SEQ ID NO: 73021 - protein, 37 aa, Artificial Sequence; identical to SEQ ID NO: 19369
  GFR-binding peptide
  MOD_RES (37)..(37): Xaa is C or S

SEQ ID NO: 73022 - protein, 43 aa, Artificial Sequence; identical to SEQ ID NO: 19370
  GFR-binding peptide
  MOD_RES (3)..(40)..(42): Xaa is C or S

SEQ ID NO: 73023 - protein, 36 aa, Artificial Sequence
  GFR-binding peptide
  MOD_RES (2)..(3)..(35): Xaa is C or S
SXXVPARLSNITIQIMDAANNVVIGEMSDMVVEAXG

SEQ ID NO: 73024 - protein, 34 aa, Artificial Sequence; identical to SEQ ID NO: 19371
  GFR-binding peptide

SEQ ID NO: 73025 - protein, 38 aa, Artificial Sequence
  GFR-binding peptide
  MOD_RES (5)..(6): Xaa is C or S
  MOD_RES (20)..(21)..(22)..(23)..(24): Xaa is A or G
  MOD_RES (25)..(26)..(27)..(28): Xaa is A or G or is absent
APASXXVPARLSNITIQIMXXXXXXXXXIGEMSDMVVE

SEQ ID NO: 73026 - protein, 35 aa, Artificial Sequence; identical to SEQ ID NO: 54882
  GFR-binding peptide
  MOD_RES (2)..(3): Xaa is C or S
  MOD_RES (17)..(18)..(19)..(20)..(21): Xaa is A or G
  MOD_RES (22)..(23)..(24)..(25): Xaa is A or G or is absent

SEQ ID NO: 73027 - protein, 41 aa, Artificial Sequence
  GFR-binding peptide
  MOD_RES (6)..(7)..(39)..(41): Xaa is C or S
STPPTXXVPTRLSNITIQIMDSANNVVLGEMSDMVVESXGX

SEQ ID NO: 73028 - protein, 31 aa, Artificial Sequence; identical to SEQ ID NO: 52509
  GFR-binding peptide
  MOD_RES (31)..(31): Xaa is C or S

SEQ ID NO: 73029 - protein, 40 aa, Artificial Sequence
  GFR-binding peptide
  MOD_RES (2)..(3)..(37)..(39): Xaa is C or S
  MOD_RES (17)..(18)..(19)..(20)..(21): Xaa is A or G
  MOD_RES (22)..(23)..(24)..(25): Xaa is A or G or is absent
PXXTPTKMSNITMQIMXXXXXXXXXIGEMSGMVVDRXGXS

SEQ ID NO: 73030 - protein, 40 aa, Artificial Sequence; identical to SEQ ID NO: 19375
  GFR-binding peptide
  MOD_RES (3)..(40): Xaa is C or S
  MOD_RES (19)..(20)..(21)..(22)..(23): Xaa is A or G
  MOD_RES (24)..(25)..(26)..(27): Xaa is A or G or is absent

SEQ ID NO: 73031 - protein, 39 aa, Artificial Sequence
  GFR-binding peptide
  MOD_RES (6)..(7): Xaa is C or S
  MOD_RES (21)..(22)..(23)..(24)..(25): Xaa is A or G
  MOD_RES (26)..(27)..(28)..(29): Xaa is A or G or is absent
AAPASXXVPARLSNITIQIMXXXXXXXXXLGEMSDMVVE

SEQ ID NO: 73032 - protein, 42 aa, Artificial Sequence; identical to SEQ ID NO: 19376
  GFR-binding peptide
  MOD_RES (6)..(40)..(42): Xaa is C or S

SEQ ID NO: 73033 - protein, 39 aa, Artificial Sequence; identical to SEQ ID NO: 19377
  GFR-binding peptide
  MOD_RES (37)..(39): Xaa is C or S

SEQ ID NO: 73034 - protein, 38 aa, Artificial Sequence; identical to SEQ ID NO: 52520
  GFR-binding peptide
  MOD_RES (4)..(5)..(38): Xaa is C or S
  MOD_RES (19)..(20)..(21)..(22)..(23): Xaa is A or G
  MOD_RES (24)..(25)..(26)..(27): Xaa is A or G or is absent

SEQ ID NO: 73035 - protein, 35 aa, Artificial Sequence; identical to SEQ ID NO: 19378
  GFR-binding peptide
  MOD_RES (1)..(1): Xaa is C or S

SEQ ID NO: 73036 - protein, 36 aa, Artificial Sequence; identical to SEQ ID NO: 19379
  GFR-binding peptide
  MOD_RES (4)..(4): Xaa is C or S

SEQ ID NO: 73037 - protein, 39 aa, Artificial Sequence; identical to SEQ ID NO: 54895
  GFR-binding peptide
  MOD_RES (2)..(3)..(36)..(38): Xaa is C or S
  MOD_RES (17)..(18)..(19)..(20)..(21): Xaa is A or G
  MOD_RES (22)..(23)..(24)..(25): Xaa is A or G or is absent

SEQ ID NO: 73038 - protein, 38 aa, Artificial Sequence
  GFR-binding peptide
  MOD_RES (5)..(6)..(37): Xaa is C or S
VPSTXXAPVKTSNITMQIMDNGRVLLIGEMSMIVEEXG

SEQ ID NO: 73039 - protein, 34 aa, Artificial Sequence; identical to SEQ ID NO: 54896
  GFR-binding peptide
  MOD_RES (3)..(4): Xaa is C or S

SEQ ID NO: 73040 - protein, 34 aa, Artificial Sequence; identical to SEQ ID NO: 19380
  GFR-binding peptide
  MOD_RES (16)..(17)..(18)..(19)..(20): Xaa is A or G
  MOD_RES (21)..(22)..(23)..(24): Xaa is A or G or is absent

SEQ ID NO: 73041 - protein, 38 aa, Artificial Sequence; identical to SEQ ID NO: 19382
  GFR-binding peptide
  MOD_RES (3)..(37): Xaa is C or S
  MOD_RES (17)..(18)..(19)..(20)..(21): Xaa is A or G
  MOD_RES (22)..(23)..(24)..(25): Xaa is A or G or is absent

SEQ ID NO: 73042 - protein, 37 aa, Artificial Sequence; identical to SEQ ID NO: 52533
  GFR-binding peptide
  MOD_RES (4)..(5)..(37): Xaa is C or S

SEQ ID NO: 73043 - protein, 38 aa, Artificial Sequence; identical to SEQ ID NO: 19385
  GFR-binding peptide
  MOD_RES (3)..(3): Xaa is C or S

SEQ ID NO: 73044 - protein, 40 aa, Artificial Sequence; identical to SEQ ID NO: 19386
  GFR-binding peptide
  MOD_RES (3)..(37)..(39): Xaa is C or S
  MOD_RES (17)..(18)..(19)..(20)..(21): Xaa is A or G
  MOD_RES (22)..(23)..(24)..(25): Xaa is A or G or is absent

SEQ ID NO: 73045 - protein, 35 aa, Artificial Sequence; identical to SEQ ID NO: 19387
  GFR-binding peptide

SEQ ID NO: 73046 - protein, 42 aa, Artificial Sequence; identical to SEQ ID NO: 19388
  GFR-binding peptide
  MOD_RES (4)..(41): Xaa is C or S

SEQ ID NO: 73047 - protein, 35 aa, Artificial Sequence
  GFR-binding peptide
  MOD_RES (4)..(5): Xaa is C or S
PSTXXAPVKTSNITMQIMDNGRVLLIGEMSMIVEE

SEQ ID NO: 73048 - protein, 35 aa, Artificial Sequence
  GFR-binding peptide
  MOD_RES (1)..(2)..(33)..(35): Xaa is C or S
XXVPQDLSNITIQIMVGRTPKVLGEMSMVVKSXKX

SEQ ID NO: 73049 - protein, 43 aa, Artificial Sequence; identical to SEQ ID NO: 19392
  GFR-binding peptide
  MOD_RES (7)..(41)..(43): Xaa is C or S
  MOD_RES (21)..(22)..(23)..(24)..(25): Xaa is A or G
  MOD_RES (26)..(27)..(28)..(29): Xaa is A or G or is absent

SEQ ID NO: 73050 - protein, 36 aa, Artificial Sequence
  GFR-binding peptide
  MOD_RES (1)..(2)..(35): Xaa is C or S
  MOD_RES (16)..(17)..(18)..(19)..(20): Xaa is A or G
  MOD_RES (21)..(22)..(23)..(24): Xaa is A or G or is absent
XXAPVKTSNITMQIMXXXXXXXXXIGEMSMIVEEXG

SEQ ID NO: 73051 - protein, 41 aa, Artificial Sequence; identical to SEQ ID NO: 19393
  GFR-binding peptide
  MOD_RES (1)..(38)..(40): Xaa is C or S

SEQ ID NO: 73052 - protein, 44 aa, Artificial Sequence; identical to SEQ ID NO: 19394
  GFR-binding peptide
  MOD_RES (4)..(41)..(43): Xaa is C or S
  MOD_RES (20)..(21)..(22)..(23)..(24): Xaa is A or G
  MOD_RES (25)..(26)..(27)..(28): Xaa is A or G or is absent

SEQ ID NO: 73053 - protein, 36 aa, Artificial Sequence
  GFR-binding peptide
  MOD_RES (3)..(4)..(35): Xaa is C or S
STXXAPVKTSNITMQIMDNGRVLLLGEMSMIVEEXG

SEQ ID NO: 73054 - protein, 33 aa, Artificial Sequence
  GFR-binding peptide
  MOD_RES (1)..(2): Xaa is C or S
XXVPARLSNITIQIMDAANNVVIGEMSDMVVEA

SEQ ID NO: 73055 - protein, 35 aa, Artificial Sequence
  GFR-binding peptide
  MOD_RES (1)..(2)..(33)..(35): Xaa is C or S
XXVSQDLSNITIQIMIGKTPKILGEMSMIVKSXKX

SEQ ID NO: 73056 - protein, 40 aa, Artificial Sequence; identical to SEQ ID NO: 19395
  GFR-binding peptide
  MOD_RES (5)..(39): Xaa is C or S
  MOD_RES (19)..(20)..(21)..(22)..(23): Xaa is A or G
  MOD_RES (24)..(25)..(26)..(27): Xaa is A or G or is absent

SEQ ID NO: 73057 - protein, 39 aa, Artificial Sequence; identical to SEQ ID NO: 19396
  GFR-binding peptide
  MOD_RES (1)..(38): Xaa is C or S

SEQ ID NO: 73058 - protein, 41 aa, Artificial Sequence; identical to SEQ ID NO: 19399
  GFR-binding peptide
  MOD_RES (4)..(38)..(40): Xaa is C or S
  MOD_RES (18)..(19)..(20)..(21)..(22): Xaa is A or G
  MOD_RES (23)..(24)..(25)..(26): Xaa is A or G or is absent

SEQ ID NO: 73059 - protein, 38 aa, Artificial Sequence; identical to SEQ ID NO: 19400
  GFR-binding peptide
  MOD_RES (1)..(35)..(37): Xaa is C or S
  MOD_RES (15)..(16)..(17)..(18)..(19): Xaa is A or G
  MOD_RES (20)..(21)..(22)..(23): Xaa is A or G or is absent

SEQ ID NO: 73060 - protein, 37 aa, Artificial Sequence; identical to SEQ ID NO: 19401
  GFR-binding peptide
  MOD_RES (37)..(37): Xaa is C or S

SEQ ID NO: 73061 - protein, 35 aa, Artificial Sequence
  GFR-binding peptide
  MOD_RES (4)..(5): Xaa is C or S
PSTXXAPVKTSNITMQIMDNGRVLLLGEMSMIVEE

SEQ ID NO: 73062 - protein, 34 aa, Artificial Sequence; identical to SEQ ID NO: 52561
  GFR-binding peptide
  MOD_RES (33)..(33): Xaa is C or S
  MOD_RES (14)..(15)..(16)..(17)..(18): Xaa is A or G
  MOD_RES (19)..(20)..(21)..(22): Xaa is A or G or is absent

SEQ ID NO: 73063 - protein, 37 aa, Artificial Sequence
  GFR-binding peptide
  MOD_RES (4)..(5)..(36): Xaa is C or S
PSTXXAPVKTSNITMQIMDNGRVLLIGEMSMIVEEXG

SEQ ID NO: 73064 - protein, 35 aa, Artificial Sequence; identical to SEQ ID NO: 52563
  GFR-binding peptide
  MOD_RES (2)..(3): Xaa is C or S
  MOD_RES (17)..(18)..(19)..(20)..(21): Xaa is A or G
  MOD_RES (22)..(23)..(24)..(25): Xaa is A or G or is absent

SEQ ID NO: 73065 - protein, 38 aa, Artificial Sequence
  GFR-binding peptide
  MOD_RES (1)..(35)..(37): Xaa is C or S
  MOD_RES (15)..(16)..(17)..(18)..(19): Xaa is A or G
  MOD_RES (20)..(21)..(22)..(23): Xaa is A or G or is absent
XAPTKLSNITVQIMXXXXXXXXXLGEMSNMVVRSXGXH

SEQ ID NO: 73066 - protein, 40 aa, Artificial Sequence
  GFR-binding peptide
  MOD_RES (5)..(6)..(38)..(40): Xaa is C or S
SAGPXXTPTKMSNITMQIMNDKQQIIIGEMSGMVVDRXGX

SEQ ID NO: 73067 - protein, 40 aa, Artificial Sequence
  GFR-binding peptide
  MOD_RES (6)..(7)..(39): Xaa is C or S
HVPKPXXAPTKLSNITVQIMDDSSNVILGEMSNMVVRSXG

SEQ ID NO: 73068 - protein, 41 aa, Artificial Sequence; identical to SEQ ID NO: 19404
  GFR-binding peptide
  MOD_RES (2)..(39)..(41): Xaa is C or S

SEQ ID NO: 73069 - protein, 36 aa, Artificial Sequence
  GFR-binding peptide
  MOD_RES (2)..(3)..(36): Xaa is C or S
  MOD_RES (17)..(18)..(19)..(20)..(21): Xaa is A or G
  MOD_RES (22)..(23)..(24)..(25): Xaa is A or G or is absent
PXXVPQDLSNITIQIMXXXXXXXXXLGEMSMVVKSX

SEQ ID NO: 73070 - protein, 34 aa, Artificial Sequence
  GFR-binding peptide
  MOD_RES (3)..(4): Xaa is C or S
KPXXAPTKLSNITVQIMDDSSNVILGEMSNMVVR

SEQ ID NO: 73071 - protein, 34 aa, Artificial Sequence; identical to SEQ ID NO: 19405
  GFR-binding peptide
  MOD_RES (16)..(17)..(18)..(19)..(20): Xaa is A or G
  MOD_RES (21)..(22)..(23)..(24): Xaa is A or G or is absent

SEQ ID NO: 73072 - protein, 40 aa, Artificial Sequence; identical to SEQ ID NO: 54936
  GFR-binding peptide
  MOD_RES (6)..(7)..(38)..(40): Xaa is C or S

SEQ ID NO: 73073 - protein, 40 aa, Artificial Sequence; identical to SEQ ID NO: 19408
  GFR-binding peptide
  MOD_RES (1)..(38)..(40): Xaa is C or S
  MOD_RES (17)..(18)..(19)..(20)..(21): Xaa is A or G
  MOD_RES (22)..(23)..(24)..(25): Xaa is A or G or is absent

SEQ ID NO: 73074 - protein, 39 aa, Artificial Sequence; identical to SEQ ID NO: 19409
  GFR-binding peptide
  MOD_RES (6)..(6): Xaa is C or S
  MOD_RES (20)..(21)..(22)..(23)..(24): Xaa is A or G
  MOD_RES (25)..(26)..(27)..(28): Xaa is A or G or is absent

SEQ ID NO: 73075 - protein, 37 aa, Artificial Sequence; identical to SEQ ID NO: 19410
  GFR-binding peptide
  MOD_RES (34)..(36): Xaa is C or S
  MOD_RES (14)..(15)..(16)..(17)..(18): Xaa is A or G
  MOD_RES (19)..(20)..(21)..(22): Xaa is A or G or is absent

SEQ ID NO: 73076 - protein, 37 aa, Artificial Sequence; identical to SEQ ID NO: 54945
  GFR-binding peptide
  MOD_RES (3)..(4)..(37): Xaa is C or S
  MOD_RES (18)..(19)..(20)..(21)..(22): Xaa is A or G
  MOD_RES (23)..(24)..(25)..(26): Xaa is A or G or is absent

SEQ ID NO: 73077 - protein, 34 aa, Artificial Sequence; identical to SEQ ID NO: 19413
  GFR-binding peptide
  MOD_RES (1)..(1): Xaa is C or S
  MOD_RES (15)..(16)..(17)..(18)..(19): Xaa is A or G
  MOD_RES (20)..(21)..(22)..(23): Xaa is A or G or is absent

SEQ ID NO: 73078 - protein, 37 aa, Artificial Sequence
  GFR-binding peptide
  MOD_RES (1)..(2)..(35)..(37): Xaa is C or S
  MOD_RES (16)..(17)..(18)..(19)..(20): Xaa is A or G
  MOD_RES (21)..(22)..(23)..(24): Xaa is A or G or is absent
XXAPVKTSNITMQIMXXXXXXXXXIGEMSMIVEEXGX

SEQ ID NO: 73079 - protein, 35 aa, Artificial Sequence; identical to SEQ ID NO: 19415
  GFR-binding peptide

SEQ ID NO: 73080 - protein, 34 aa, Artificial Sequence
  GFR-binding peptide
  MOD_RES (1)..(1): Xaa is C or S
  MOD_RES (15)..(16)..(17)..(18)..(19): Xaa is A or G
  MOD_RES (20)..(21)..(22)..(23): Xaa is A or G or is absent
XTPTKMSNITMQIMXXXXXXXXXLGEMSGMVVDR

SEQ ID NO: 73081 - protein, 36 aa, Artificial Sequence; identical to SEQ ID NO: 19416
  GFR-binding peptide
  MOD_RES (16)..(17)..(18)..(19)..(20): Xaa is A or G
  MOD_RES (21)..(22)..(23)..(24): Xaa is A or G or is absent

SEQ ID NO: 73082 - protein, 38 aa, Artificial Sequence; identical to SEQ ID NO: 19417
  GFR-binding peptide
  MOD_RES (36)..(38): Xaa is C or S
  MOD_RES (15)..(16)..(17)..(18)..(19): Xaa is A or G
  MOD_RES (20)..(21)..(22)..(23): Xaa is A or G or is absent

SEQ ID NO: 73083 - protein, 43 aa, Artificial Sequence
  GFR-binding peptide
  MOD_RES (5)..(6)..(40)..(42): Xaa is C or S
  MOD_RES (20)..(21)..(22)..(23)..(24): Xaa is A or G
  MOD_RES (25)..(26)..(27)..(28): Xaa is A or G or is absent
APASXXVPARLSNITIQIMXXXXXXXXXLGEMSDMVVEAXGXR

SEQ ID NO: 73084 - protein, 41 aa, Artificial Sequence; identical to SEQ ID NO: 19418
  GFR-binding peptide
  MOD_RES (2)..(39)..(41): Xaa is C or S
  MOD_RES (18)..(19)..(20)..(21)..(22): Xaa is A or G
  MOD_RES (23)..(24)..(25)..(26): Xaa is A or G or is absent

SEQ ID NO: 73085 - protein, 39 aa, Artificial Sequence; identical to SEQ ID NO: 19419
  GFR-binding peptide
  MOD_RES (4)..(4): Xaa is C or S
  MOD_RES (20)..(21)..(22)..(23)..(24): Xaa is A or G
  MOD_RES (25)..(26)..(27)..(28): Xaa is A or G or is absent

SEQ ID NO: 73086 - protein, 36 aa, Artificial Sequence; identical to SEQ ID NO: 52592
  GFR-binding peptide
  MOD_RES (3)..(4): Xaa is C or S
  MOD_RES (18)..(19)..(20)..(21)..(22): Xaa is A or G
  MOD_RES (23)..(24)..(25)..(26): Xaa is A or G or is absent

SEQ ID NO: 73087 - protein, 38 aa, Artificial Sequence
  GFR-binding peptide
  MOD_RES (4)..(5): Xaa is C or S
  MOD_RES (19)..(20)..(21)..(22)..(23): Xaa is A or G
  MOD_RES (24)..(25)..(26)..(27): Xaa is A or G or is absent
PPTXXVPTRLSNITIQIMXXXXXXXXXLGEMSDMVVES

SEQ ID NO: 73088 - protein, 36 aa, Artificial Sequence; identical to SEQ ID NO: 19423
  GFR-binding peptide
  MOD_RES (3)..(3): Xaa is C or S

SEQ ID NO: 73089 - protein, 40 aa, Artificial Sequence; identical to SEQ ID NO: 54978
  GFR-binding peptide
  MOD_RES (6)..(7)..(38)..(40): Xaa is C or S

SEQ ID NO: 73090 - protein, 35 aa, Artificial Sequence; identical to SEQ ID NO: 19424
  GFR-binding peptide
  MOD_RES (2)..(2): Xaa is C or S

SEQ ID NO: 73091 - protein, 35 aa, Artificial Sequence; identical to SEQ ID NO: 19426
  GFR-binding peptide
  MOD_RES (3)..(3): Xaa is C or S
  MOD_RES (17)..(18)..(19)..(20)..(21): Xaa is A or G
  MOD_RES (22)..(23)..(24)..(25): Xaa is A or G or is absent

SEQ ID NO: 73092 - protein, 38 aa, Artificial Sequence; identical to SEQ ID NO: 52606
  GFR-binding peptide
  MOD_RES (3)..(4)..(37): Xaa is C or S
  MOD_RES (18)..(19)..(20)..(21)..(22): Xaa is A or G
  MOD_RES (23)..(24)..(25)..(26): Xaa is A or G or is absent

SEQ ID NO: 73093 - protein, 36 aa, Artificial Sequence
  GFR-binding peptide
  MOD_RES (2)..(3)..(36): Xaa is C or S
  MOD_RES (17)..(18)..(19)..(20)..(21): Xaa is A or G
  MOD_RES (22)..(23)..(24)..(25): Xaa is A or G or is absent
PXXVSQDLSNITIQIMXXXXXXXXXLGEMSMIVKSX

SEQ ID NO: 73094 - protein, 32 aa, Artificial Sequence
  GFR-binding peptide
  MOD_RES (1)..(2): Xaa is C or S
XXTPTKMSNITMQIMNDKQQIILGEMSGMVVD

SEQ ID NO: 73095 - protein, 37 aa, Artificial Sequence
  GFR-binding peptide
  MOD_RES (2)..(3)..(34)..(36): Xaa is C or S
PXXVSQDLSNITIQIMIGKTPKILGEMSMIVKSXKXS

SEQ ID NO: 73096 - protein, 37 aa, Artificial Sequence
  GFR-binding peptide
  MOD_RES (1)..(2)..(36): Xaa is C or S
  MOD_RES (16)..(17)..(18)..(19)..(20): Xaa is A or G
  MOD_RES (21)..(22)..(23)..(24): Xaa is A or G or is absent
XXVPARLSNITIQIMXXXXXXXXXLGEMSDMVVEAXG

SEQ ID NO: 73097 - protein, 36 aa, Artificial Sequence
  GFR-binding peptide
  MOD_RES (4)..(5): Xaa is C or S
PASXXVPARLSNITIQIMDAANNVVIGEMSDMVVEA

SEQ ID NO: 73098 - protein, 39 aa, Artificial Sequence
  GFR-binding peptide
  MOD_RES (5)..(6)..(38): Xaa is C or S
SAGPXXTPTKMSNITMQIMNDKQQIIIGEMSGMVVDRXG

SEQ ID NO: 73099 - protein, 35 aa, Artificial Sequence
  GFR-binding peptide
  MOD_RES (1)..(2)..(34): Xaa is C or S
XXVPTRLSNITIQIMDSANNVVIGEMSDMVVESXG

SEQ ID NO: 73100 - protein, 37 aa, Artificial Sequence; identical to SEQ ID NO: 19428
  GFR-binding peptide
  MOD_RES (5)..(5): Xaa is C or S
  MOD_RES (19)..(20)..(21)..(22)..(23): Xaa is A or G
  MOD_RES (24)..(25)..(26)..(27): Xaa is A or G or is absent

SEQ ID NO: 73101 - protein, 38 aa, Artificial Sequence; identical to SEQ ID NO: 19430
  GFR-binding peptide
  MOD_RES (6)..(6): Xaa is C or S
  MOD_RES (20)..(21)..(22)..(23)..(24): Xaa is A or G
  MOD_RES (25)..(26)..(27)..(28): Xaa is A or G or is absent

SEQ ID NO: 73102 - protein, 40 aa, Artificial Sequence
  GFR-binding peptide
  MOD_RES (5)..(6)..(39): Xaa is C or S
  MOD_RES (20)..(21)..(22)..(23)..(24): Xaa is A or G
  MOD_RES (25)..(26)..(27)..(28): Xaa is A or G or is absent
SAAPXXVPQALSNITIQIMXXXXXXXXXLGEMSMIVRSXK

SEQ ID NO: 73103 - protein, 33 aa, Artificial Sequence; identical to SEQ ID NO: 19431
  GFR-binding peptide

SEQ ID NO: 73104 - protein, 42 aa, Artificial Sequence; identical to SEQ ID NO: 19432
  GFR-binding peptide
  MOD_RES (5)..(42): Xaa is C or S

SEQ ID NO: 73105 - protein, 39 aa, Artificial Sequence
  GFR-binding peptide
  MOD_RES (5)..(6)..(38): Xaa is C or S
APASXXVPARLSNITIQIMDAANNVVLGEMSDMVVEAXG

SEQ ID NO: 73106 - protein, 32 aa, Artificial Sequence
  GFR-binding peptide
  MOD_RES (1)..(32): Xaa is C or S
XVPQALSNITIQIMVGRKPKVLGEMSMIVRSX

SEQ ID NO: 73107 - protein, 39 aa, Artificial Sequence
  GFR-binding peptide
  MOD_RES (3)..(4)..(36)..(38): Xaa is C or S
KPXXAPTKLSNITVQIMDDSSNVILGEMSNMVVRSXGXH

SEQ ID NO: 73108 - protein, 31 aa, Artificial Sequence
  GFR-binding peptide
  MOD_RES (1)..(1): Xaa is C or S
XVPTRLSNITIQIMDSANNVVIGEMSDMVVE

SEQ ID NO: 73109 - protein, 32 aa, Artificial Sequence
  GFR-binding peptide
  MOD_RES (32)..(32): Xaa is C or S
TPTKMSNITMQIMNDKQQIILGEMSGMVVDRX

SEQ ID NO: 73110 - protein, 40 aa, Artificial Sequence
  GFR-binding peptide
  MOD_RES (5)..(6)..(38)..(40): Xaa is C or S
TPPTXXVPTRLSNITIQIMDSANNVVLGEMSDMVVESXGX

SEQ ID NO: 73111 - protein, 38 aa, Artificial Sequence; identical to SEQ ID NO: 52625
  GFR-binding peptide
  MOD_RES (3)..(4)..(35)..(37): Xaa is C or S

SEQ ID NO: 73112 - protein, 37 aa, Artificial Sequence
  GFR-binding peptide
  MOD_RES (2)..(3)..(35)..(37): Xaa is C or S
TXXVPTRLSNITIQIMDSANNVVLGEMSDMVVESXGX

SEQ ID NO: 73113 - protein, 36 aa, Artificial Sequence; identical to SEQ ID NO: 54995
  GFR-binding peptide
  MOD_RES (33)..(35): Xaa is C or S
  MOD_RES (14)..(15)..(16)..(17)..(18): Xaa is A or G
  MOD_RES (19)..(20)..(21)..(22): Xaa is A or G or is absent

SEQ ID NO: 73114 - protein, 37 aa, Artificial Sequence; identical to SEQ ID NO: 52627
  GFR-binding peptide
  MOD_RES (1)..(2)..(36): Xaa is C or S
  MOD_RES (16)..(17)..(18)..(19)..(20): Xaa is A or G
  MOD_RES (21)..(22)..(23)..(24): Xaa is A or G or is absent

SEQ ID NO: 73115 - protein, 39 aa, Artificial Sequence
  GFR-binding peptide
  MOD_RES (3)..(4)..(36)..(38): Xaa is C or S
GPXXTPTKMSNITMQIMNDKQQIILGEMSGMVVDRXGXS

SEQ ID NO: 73116 - protein, 41 aa, Artificial Sequence; identical to SEQ ID NO: 19438
  GFR-binding peptide
  MOD_RES (4)..(41): Xaa is C or S

SEQ ID NO: 73117 - protein, 33 aa, Artificial Sequence; identical to SEQ ID NO: 19439
  GFR-binding peptide
  MOD_RES (1)..(1): Xaa is C or S
  MOD_RES (15)..(16)..(17)..(18)..(19): Xaa is A or G
  MOD_RES (20)..(21)..(22)..(23): Xaa is A or G or is absent

SEQ ID NO: 73118 - protein, 34 aa, Artificial Sequence
  GFR-binding peptide
  MOD_RES (3)..(4): Xaa is C or S
SPXXVSQDLSNITIQIMIGKTPKILGEMSMIVKS

SEQ ID NO: 73119 - protein, 35 aa, Artificial Sequence; identical to SEQ ID NO: 19440
  GFR-binding peptide

SEQ ID NO: 73120 - protein, 38 aa, Artificial Sequence; identical to SEQ ID NO: 19441
  GFR-binding peptide
  MOD_RES (4)..(38): Xaa is C or S
  MOD_RES (18)..(19)..(20)..(21)..(22): Xaa is A or G
  MOD_RES (23)..(24)..(25)..(26): Xaa is A or G or is absent

SEQ ID NO: 73121 - protein, 39 aa, Artificial Sequence; identical to SEQ ID NO: 19442
  GFR-binding peptide
  MOD_RES (3)..(37)..(39): Xaa is C or S

SEQ ID NO: 73122 - protein, 33 aa, Artificial Sequence; identical to SEQ ID NO: 19443
  GFR-binding peptide

SEQ ID NO: 73123 - protein, 35 aa, Artificial Sequence
  GFR-binding peptide
  MOD_RES (2)..(3): Xaa is C or S
  MOD_RES (17)..(18)..(19)..(20)..(21): Xaa is A or G
  MOD_RES (22)..(23)..(24)..(25): Xaa is A or G or is absent
SXXVPARLSNITIQIMXXXXXXXXXLGEMSDMVVE

SEQ ID NO: 73124 - protein, 34 aa, Artificial Sequence; identical to SEQ ID NO: 19445
  GFR-binding peptide
  MOD_RES (2)..(2): Xaa is C or S
  MOD_RES (16)..(17)..(18)..(19)..(20): Xaa is A or G
  MOD_RES (21)..(22)..(23)..(24): Xaa is A or G or is absent

SEQ ID NO: 73125 - protein, 41 aa, Artificial Sequence
  GFR-binding peptide
  MOD_RES (5)..(6)..(39)..(41): Xaa is C or S
  MOD_RES (20)..(21)..(22)..(23)..(24): Xaa is A or G
  MOD_RES (25)..(26)..(27)..(28): Xaa is A or G or is absent
VPSTXXAPVKTSNITMQIMXXXXXXXXXLGEMSMIVEEXGX

SEQ ID NO: 73126 - protein, 33 aa, Artificial Sequence
  GFR-binding peptide
  MOD_RES (1)..(33): Xaa is C or S
XAPTKLSNITVQIMDDSSNVILGEMSNMVVRSX

SEQ ID NO: 73127 - protein, 38 aa, Artificial Sequence; identical to SEQ ID NO: 19449
  GFR-binding peptide
  MOD_RES (3)..(37): Xaa is C or S

SEQ ID NO: 73128 - protein, 39 aa, Artificial Sequence
  GFR-binding peptide
  MOD_RES (5)..(6)..(37)..(39): Xaa is C or S
VPSTXXAPVKTSNITMQIMDNGRVLLLGEMSMIVEEXGX

SEQ ID NO: 73129 - protein, 42 aa, Artificial Sequence; identical to SEQ ID NO: 55013
  GFR-binding peptide
  MOD_RES (4)..(5)..(39)..(41): Xaa is C or S
  MOD_RES (19)..(20)..(21)..(22)..(23): Xaa is A or G
  MOD_RES (24)..(25)..(26)..(27): Xaa is A or G or is absent

SEQ ID NO: 73130 - protein, 37 aa, Artificial Sequence; identical to SEQ ID NO: 19452
  GFR-binding peptide
  MOD_RES (1)..(1): Xaa is C or S

SEQ ID NO: 73131 - protein, 37 aa, Artificial Sequence; identical to SEQ ID NO: 19454
  GFR-binding peptide
  MOD_RES (1)..(35)..(37): Xaa is C or S
  MOD_RES (15)..(16)..(17)..(18)..(19): Xaa is A or G
  MOD_RES (20)..(21)..(22)..(23): Xaa is A or G or is absent

SEQ ID NO: 73132 - protein, 39 aa, Artificial Sequence; identical to SEQ ID NO: 55016
  GFR-binding peptide
  MOD_RES (5)..(6)..(37)..(39): Xaa is C or S

SEQ ID NO: 73133 - protein, 39 aa, Artificial Sequence
  GFR-binding peptide
  MOD_RES (5)..(6)..(38): Xaa is C or S
TPPTXXVPTRLSNITIQIMDSANNVVLGEMSDMVVESXG

SEQ ID NO: 73134 - protein, 33 aa, Artificial Sequence
  GFR-binding peptide
  MOD_RES (14)..(15)..(16)..(17)..(18): Xaa is A or G
  MOD_RES (19)..(20)..(21)..(22): Xaa is A or G or is absent
TPTKMSNITMQIMXXXXXXXXXIGEMSGMVVDR

SEQ ID NO: 73135 - protein, 36 aa, Artificial Sequence
  GFR-binding peptide
  MOD_RES (2)..(3): Xaa is C or S
  MOD_RES (17)..(18)..(19)..(20)..(21): Xaa is A or G
  MOD_RES (22)..(23)..(24)..(25): Xaa is A or G or is absent
TXXVPTRLSNITIQIMXXXXXXXXXLGEMSDMVVES

SEQ ID NO: 73136 - protein, 35 aa, Artificial Sequence; identical to SEQ ID NO: 52641
  GFR-binding peptide
  MOD_RES (4)..(5): Xaa is C or S

SEQ ID NO: 73137 - protein, 37 aa, Artificial Sequence
  GFR-binding peptide
  MOD_RES (2)..(3)..(37): Xaa is C or S
  MOD_RES (17)..(18)..(19)..(20)..(21): Xaa is A or G
  MOD_RES (22)..(23)..(24)..(25): Xaa is A or G or is absent
PXXAPTKLSNITVQIMXXXXXXXXXLGEMSNMVVRSX

SEQ ID NO: 73138 - protein, 37 aa, Artificial Sequence; identical to SEQ ID NO: 19458
  GFR-binding peptide
  MOD_RES (34)..(36): Xaa is C or S
  MOD_RES (14)..(15)..(16)..(17)..(18): Xaa is A or G
  MOD_RES (19)..(20)..(21)..(22): Xaa is A or G or is absent

SEQ ID NO: 73139 - protein, 43 aa, Artificial Sequence; identical to SEQ ID NO: 19460
  GFR-binding peptide
  MOD_RES (5)..(42): Xaa is C or S

SEQ ID NO: 73140 - protein, 37 aa, Artificial Sequence
  GFR-binding peptide
  MOD_RES (3)..(4)..(35)..(37): Xaa is C or S
SPXXVPQDLSNITIQIMVGRTPKVLGEMSMVVKSXKX

SEQ ID NO: 73141 - protein, 42 aa, Artificial Sequence; identical to SEQ ID NO: 19462
  GFR-binding peptide
  MOD_RES (5)..(42): Xaa is C or S
  MOD_RES (21)..(22)..(23)..(24)..(25): Xaa is A or G
  MOD_RES (26)..(27)..(28)..(29): Xaa is A or G or is absent

SEQ ID NO: 73142 - protein, 34 aa, Artificial Sequence; identical to SEQ ID NO: 19463
  GFR-binding peptide

SEQ ID NO: 73143 - protein, 38 aa, Artificial Sequence
  GFR-binding peptide
  MOD_RES (3)..(4)..(36)..(38): Xaa is C or S
KPXXAPTKLSNITVQIMDDSSNVILGEMSNMVVRSXGX

SEQ ID NO: 73144 - protein, 38 aa, Artificial Sequence; identical to SEQ ID NO: 19464
  GFR-binding peptide
  MOD_RES (2)..(2): Xaa is C or S
  MOD_RES (18)..(19)..(20)..(21)..(22): Xaa is A or G
  MOD_RES (23)..(24)..(25)..(26): Xaa is A or G or is absent

SEQ ID NO: 73145 - protein, 35 aa, Artificial Sequence; identical to SEQ ID NO: 19465
  GFR-binding peptide
  MOD_RES (1)..(35): Xaa is C or S
  MOD_RES (15)..(16)..(17)..(18)..(19): Xaa is A or G
  MOD_RES (20)..(21)..(22)..(23): Xaa is A or G or is absent

SEQ ID NO: 73146 - protein, 43 aa, Artificial Sequence
  GFR-binding peptide
  MOD_RES (6)..(7)..(41)..(43): Xaa is C or S
  MOD_RES (21)..(22)..(23)..(24)..(25): Xaa is A or G
  MOD_RES (26)..(27)..(28)..(29): Xaa is A or G or is absent
GSAGPXXTPTKMSNITMQIMXXXXXXXXXLGEMSGMVVDRXGX

SEQ ID NO: 73147 - protein, 35 aa, Artificial Sequence
  GFR-binding peptide
  MOD_RES (1)..(2): Xaa is C or S
  MOD_RES (16)..(17)..(18)..(19)..(20): Xaa is A or G
  MOD_RES (21)..(22)..(23)..(24): Xaa is A or G or is absent
XXAPTKLSNITVQIMXXXXXXXXXLGEMSNMVVRS

SEQ ID NO: 73148 - protein, 40 aa, Artificial Sequence; identical to SEQ ID NO: 55040
  GFR-binding peptide
  MOD_RES (3)..(4)..(37)..(39): Xaa is C or S
  MOD_RES (18)..(19)..(20)..(21)..(22): Xaa is A or G
  MOD_RES (23)..(24)..(25)..(26): Xaa is A or G or is absent

SEQ ID NO: 73149 - protein, 32 aa, Artificial Sequence; identical to SEQ ID NO: 19472
  GFR-binding peptide
  MOD_RES (14)..(15)..(16)..(17)..(18): Xaa is A or G
  MOD_RES (19)..(20)..(21)..(22): Xaa is A or G or is absent

SEQ ID NO: 73150 - protein, 38 aa, Artificial Sequence
  GFR-binding peptide
  MOD_RES (2)..(3)..(36)..(38): Xaa is C or S
  MOD_RES (17)..(18)..(19)..(20)..(21): Xaa is A or G
  MOD_RES (22)..(23)..(24)..(25): Xaa is A or G or is absent
PXXVPQDLSNITIQIMXXXXXXXXXLGEMSMVVKSXKX

SEQ ID NO: 73151 - protein, 38 aa, Artificial Sequence
  GFR-binding peptide
  MOD_RES (4)..(5)..(38): Xaa is C or S
  MOD_RES (19)..(20)..(21)..(22)..(23): Xaa is A or G
  MOD_RES (24)..(25)..(26)..(27): Xaa is A or G or is absent
ASPXXVPQDLSNITIQIMXXXXXXXXXLGEMSMVVKSX

SEQ ID NO: 73152 - protein, 33 aa, Artificial Sequence; identical to SEQ ID NO: 19476
  GFR-binding peptide
  MOD_RES (14)..(15)..(16)..(17)..(18): Xaa is A or G
  MOD_RES (19)..(20)..(21)..(22): Xaa is A or G or is absent

SEQ ID NO: 73153 - protein, 33 aa, Artificial Sequence
  GFR-binding peptide
  MOD_RES (1)..(2): Xaa is C or S
XXVPTRLSNITIQIMDSANNVVIGEMSDMVVES

SEQ ID NO: 73154 - protein, 37 aa, Artificial Sequence; identical to SEQ ID NO: 19477
  GFR-binding peptide
  MOD_RES (5)..(5): Xaa is C or S
  MOD_RES (19)..(20)..(21)..(22)..(23): Xaa is A or G
  MOD_RES (24)..(25)..(26)..(27): Xaa is A or G or is absent

SEQ ID NO: 73155 - protein, 35 aa, Artificial Sequence; identical to SEQ ID NO: 52673
  GFR-binding peptide
  MOD_RES (3)..(4)..(35): Xaa is C or S

SEQ ID NO: 73156 - protein, 33 aa, Artificial Sequence
  GFR-binding peptide
  MOD_RES (2)..(3): Xaa is C or S
TXXVPTRLSNITIQIMDSANNVVLGEMSDMVVE

SEQ ID NO: 73157 - protein, 43 aa, Artificial Sequence
  GFR-binding peptide
  MOD_RES (6)..(7)..(40)..(42): Xaa is C or S
  MOD_RES (21)..(22)..(23)..(24)..(25): Xaa is A or G
  MOD_RES (26)..(27)..(28)..(29): Xaa is A or G or is absent
RVPSTXXAPVKTSNITMQIMXXXXXXXXXIGEMSMIVEEXGXL

SEQ ID NO: 73158 - protein, 37 aa, Artificial Sequence
  GFR-binding peptide
  MOD_RES (1)..(34)..(36): Xaa is C or S
  MOD_RES (15)..(16)..(17)..(18)..(19): Xaa is A or G
  MOD_RES (20)..(21)..(22)..(23): Xaa is A or G or is absent
XVPQDLSNITIQIMXXXXXXXXXLGEMSMVVKSXKXS

SEQ ID NO: 73159 - protein, 31 aa, Artificial Sequence
  GFR-binding peptide
  MOD_RES (1)..(1): Xaa is C or S
XVPQDLSNITIQIMVGRTPKVLGEMSMVVKS

SEQ ID NO: 73160 - protein, 40 aa, Artificial Sequence; identical to SEQ ID NO: 19483
  GFR-binding peptide
  MOD_RES (5)..(39): Xaa is C or S

SEQ ID NO: 73161 - protein, 40 aa, Artificial Sequence; identical to SEQ ID NO: 19484
  GFR-binding peptide
  MOD_RES (4)..(4): Xaa is C or S
  MOD_RES (20)..(21)..(22)..(23)..(24): Xaa is A or G
  MOD_RES (25)..(26)..(27)..(28): Xaa is A or G or is absent

SEQ ID NO: 73162 - protein, 40 aa, Artificial Sequence
  GFR-binding peptide
  MOD_RES (6)..(7)..(38)..(40): Xaa is C or S
RVPSTXXAPVKTSNITMQIMDNGRVLLIGEMSMIVEEXGX

SEQ ID NO: 73163 - protein, 41 aa, Artificial Sequence; identical to SEQ ID NO: 55054
  GFR-binding peptide
  MOD_RES (6)..(7)..(38)..(40): Xaa is C or S

SEQ ID NO: 73164 - protein, 39 aa, Artificial Sequence
  GFR-binding peptide
  MOD_RES (6)..(7)..(39): Xaa is C or S
AAPASXXVPARLSNITIQIMDAANNVVIGEMSDMVVEAX

SEQ ID NO: 73165 - protein, 37 aa, Artificial Sequence
  GFR-binding peptide
  MOD_RES (1)..(35)..(37): Xaa is C or S
  MOD_RES (15)..(16)..(17)..(18)..(19): Xaa is A or G
  MOD_RES (20)..(21)..(22)..(23): Xaa is A or G or is absent
XVPARLSNITIQIMXXXXXXXXXLGEMSDMVVEAXGX

SEQ ID NO: 73166 - protein, 38 aa, Artificial Sequence
  GFR-binding peptide
  MOD_RES (5)..(6)..(37): Xaa is C or S
SAAPXXVPQALSNITIQIMVGRKPKVLGEMSMIVRSXK

SEQ ID NO: 73167 - protein, 41 aa, Artificial Sequence
  GFR-binding peptide
  MOD_RES (5)..(6)..(40): Xaa is C or S
  MOD_RES (20)..(21)..(22)..(23)..(24): Xaa is A or G
  MOD_RES (25)..(26)..(27)..(28): Xaa is A or G or is absent
SAGPXXTPTKMSNITMQIMXXXXXXXXXLGEMSGMVVDRXG

SEQ ID NO: 73168 - protein, 33 aa, Artificial Sequence
  GFR-binding peptide
  MOD_RES (1)..(2)..(33): Xaa is C or S
XXVSQDLSNITIQIMIGKTPKILGEMSMIVKSX

SEQ ID NO: 73169 - protein, 41 aa, Artificial Sequence
  GFR-binding peptide
  MOD_RES (5)..(6)..(38)..(40): Xaa is C or S
SAGPXXTPTKMSNITMQIMNDKQQIILGEMSGMVVDRXGXS

SEQ ID NO: 73170 - protein, 38 aa, Artificial Sequence
  GFR-binding peptide
  MOD_RES (3)..(4)..(38): Xaa is C or S
  MOD_RES (18)..(19)..(20)..(21)..(22): Xaa is A or G
  MOD_RES (23)..(24)..(25)..(26): Xaa is A or G or is absent
ASXXVPARLSNITIQIMXXXXXXXXXIGEMSDMVVEAX

SEQ ID NO: 73171 - protein, 39 aa, Artificial Sequence; identical to SEQ ID NO: 19487
  GFR-binding peptide
  MOD_RES (3)..(3): Xaa is C or S
  MOD_RES (19)..(20)..(21)..(22)..(23): Xaa is A or G
  MOD_RES (24)..(25)..(26)..(27): Xaa is A or G or is absent

SEQ ID NO: 73172 - protein, 43 aa, Artificial Sequence; identical to SEQ ID NO: 19488
  GFR-binding peptide
  MOD_RES (6)..(40)..(42): Xaa is C or S
  MOD_RES (20)..(21)..(22)..(23)..(24): Xaa is A or G
  MOD_RES (25)..(26)..(27)..(28): Xaa is A or G or is absent

SEQ ID NO: 73173 - protein, 36 aa, Artificial Sequence
  GFR-binding peptide
  MOD_RES (5)..(6): Xaa is C or S
SASPXXVSQDLSNITIQIMIGKTPKILGEMSMIVKS

SEQ ID NO: 73174 - protein, 38 aa, Artificial Sequence
  GFR-binding peptide
  MOD_RES (3)..(4)..(37): Xaa is C or S
  MOD_RES (18)..(19)..(20)..(21)..(22): Xaa is A or G
  MOD_RES (23)..(24)..(25)..(26): Xaa is A or G or is absent
APXXVPQALSNITIQIMXXXXXXXXXLGEMSMIVRSXK

SEQ ID NO: 73175 - protein, 40 aa, Artificial Sequence; identical to SEQ ID NO: 19493
  GFR-binding peptide
  MOD_RES (2)..(39): Xaa is C or S
  MOD_RES (18)..(19)..(20)..(21)..(22): Xaa is A or G
  MOD_RES (23)..(24)..(25)..(26): Xaa is A or G or is absent

SEQ ID NO: 73176 - protein, 35 aa, Artificial Sequence; identical to SEQ ID NO: 55062
  GFR-binding peptide
  MOD_RES (1)..(32)..(34): Xaa is C or S

SEQ ID NO: 73177 - protein, 35 aa, Artificial Sequence; identical to SEQ ID NO: 55064
  GFR-binding peptide
  MOD_RES (34)..(34): Xaa is C or S
  MOD_RES (14)..(15)..(16)..(17)..(18): Xaa is A or G
  MOD_RES (19)..(20)..(21)..(22): Xaa is A or G or is absent

SEQ ID NO: 73178 - protein, 32 aa, Artificial Sequence
  GFR-binding peptide
  MOD_RES (14)..(15)..(16)..(17)..(18): Xaa is A or G
  MOD_RES (19)..(20)..(21)..(22): Xaa is A or G or is absent
VPTRLSNITIQIMXXXXXXXXXLGEMSDMVVE

SEQ ID NO: 73179 - protein, 37 aa, Artificial Sequence; identical to SEQ ID NO: 19497
  GFR-binding peptide
  MOD_RES (2)..(2): Xaa is C or S

SEQ ID NO: 73180 - protein, 33 aa, Artificial Sequence; identical to SEQ ID NO: 55077
  GFR-binding peptide
  MOD_RES (2)..(3): Xaa is C or S

SEQ ID NO: 73181 - protein, 38 aa, Artificial Sequence; identical to SEQ ID NO: 19500
  GFR-binding peptide
  MOD_RES (2)..(2): Xaa is C or S

SEQ ID NO: 73182 - protein, 42 aa, Artificial Sequence
  GFR-binding peptide
  MOD_RES (5)..(6)..(39)..(41): Xaa is C or S
  MOD_RES (20)..(21)..(22)..(23)..(24): Xaa is A or G
  MOD_RES (25)..(26)..(27)..(28): Xaa is A or G or is absent
VPSTXXAPVKTSNITMQIMXXXXXXXXXIGEMSMIVEEXGXL

SEQ ID NO: 73183 - protein, 40 aa, Artificial Sequence; identical to SEQ ID NO: 52712
  GFR-binding peptide
  MOD_RES (5)..(6)..(39): Xaa is C or S
  MOD_RES (20)..(21)..(22)..(23)..(24): Xaa is A or G
  MOD_RES (25)..(26)..(27)..(28): Xaa is A or G or is absent

SEQ ID NO: 73184 - protein, 36 aa, Artificial Sequence; identical to SEQ ID NO: 19503
  GFR-binding peptide
  MOD_RES (36)..(36): Xaa is C or S

SEQ ID NO: 73185 - protein, 41 aa, Artificial Sequence; identical to SEQ ID NO: 55084
  GFR-binding peptide
  MOD_RES (4)..(5)..(38)..(40): Xaa is C or S
  MOD_RES (19)..(20)..(21)..(22)..(23): Xaa is A or G
  MOD_RES (24)..(25)..(26)..(27): Xaa is A or G or is absent

SEQ ID NO: 73186 - protein, 38 aa, Artificial Sequence
  GFR-binding peptide
  MOD_RES (6)..(7)..(38): Xaa is C or S
ASAAPXXVPQALSNITIQIMVGRKPKVLGEMSMIVRSX

SEQ ID NO: 73187 - protein, 40 aa, Artificial Sequence; identical to SEQ ID NO: 19505
  GFR-binding peptide
  MOD_RES (6)..(40): Xaa is C or S
  MOD_RES (20)..(21)..(22)..(23)..(24): Xaa is A or G
  MOD_RES (25)..(26)..(27)..(28): Xaa is A or G or is absent

SEQ ID NO: 73188 - protein, 40 aa, Artificial Sequence
  GFR-binding peptide
  MOD_RES (5)..(6)..(37)..(39): Xaa is C or S
VPSTXXAPVKTSNITMQIMDNGRVLLIGEMSMIVEEXGXL

SEQ ID NO: 73189 - protein, 37 aa, Artificial Sequence; identical to SEQ ID NO: 55091
  GFR-binding peptide
  MOD_RES (3)..(4)..(37): Xaa is C or S
  MOD_RES (18)..(19)..(20)..(21)..(22): Xaa is A or G
  MOD_RES (23)..(24)..(25)..(26): Xaa is A or G or is absent

SEQ ID NO: 73190 - protein, 42 aa, Artificial Sequence
  GFR-binding peptide
  MOD_RES (6)..(7)..(41): Xaa is C or S
  MOD_RES (21)..(22)..(23)..(24)..(25): Xaa is A or G
  MOD_RES (26)..(27)..(28)..(29): Xaa is A or G or is absent
AAPASXXVPARLSNITIQIMXXXXXXXXXLGEMSDMVVEAXG

SEQ ID NO: 73191 - protein, 36 aa, Artificial Sequence; identical to SEQ ID NO: 19508
  GFR-binding peptide
  MOD_RES (16)..(17)..(18)..(19)..(20): Xaa is A or G
  MOD_RES (21)..(22)..(23)..(24): Xaa is A or G or is absent

SEQ ID NO: 73192 - protein, 39 aa, Artificial Sequence; identical to SEQ ID NO: 19509
  GFR-binding peptide
  MOD_RES (5)..(39): Xaa is C or S
  MOD_RES (19)..(20)..(21)..(22)..(23): Xaa is A or G
  MOD_RES (24)..(25)..(26)..(27): Xaa is A or G or is absent

SEQ ID NO: 73193 - protein, 36 aa, Artificial Sequence
  GFR-binding peptide
  MOD_RES (1)..(2)..(36): Xaa is C or S
  MOD_RES (16)..(17)..(18)..(19)..(20): Xaa is A or G
  MOD_RES (21)..(22)..(23)..(24): Xaa is A or G or is absent
XXTPTKMSNITMQIMXXXXXXXXXLGEMSGMVVDRX

SEQ ID NO: 73194 - protein, 36 aa, Artificial Sequence
  GFR-binding peptide
  MOD_RES (5)..(6): Xaa is C or S
VPSTXXAPVKTSNITMQIMDNGRVLLIGEMSMIVEE

SEQ ID NO: 73195 - protein, 44 aa, Artificial Sequence; identical to SEQ ID NO: 19510
  GFR-binding peptide
  MOD_RES (5)..(42)..(44): Xaa is C or S
  MOD_RES (21)..(22)..(23)..(24)..(25): Xaa is A or G
  MOD_RES (26)..(27)..(28)..(29): Xaa is A or G or is absent

SEQ ID NO: 73196 - protein, 37 aa, Artificial Sequence; identical to SEQ ID NO: 19513
  GFR-binding peptide
  MOD_RES (4)..(4): Xaa is C or S
  MOD_RES (18)..(19)..(20)..(21)..(22): Xaa is A or G
  MOD_RES (23)..(24)..(25)..(26): Xaa is A or G or is absent

SEQ ID NO: 73197 - protein, 37 aa, Artificial Sequence
  GFR-binding peptide
  MOD_RES (1)..(35)..(37): Xaa is C or S
  MOD_RES (15)..(16)..(17)..(18)..(19): Xaa is A or G
  MOD_RES (20)..(21)..(22)..(23): Xaa is A or G or is absent
XTPTKMSNITMQIMXXXXXXXXXIGEMSGMVVDRXGX

SEQ ID NO: 73198 - protein, 40 aa, Artificial Sequence
  GFR-binding peptide
  MOD_RES (3)..(4)..(37)..(39): Xaa is C or S
  MOD_RES (18)..(19)..(20)..(21)..(22): Xaa is A or G
  MOD_RES (23)..(24)..(25)..(26): Xaa is A or G or is absent
SPXXVSQDLSNITIQIMXXXXXXXXXLGEMSMIVKSXKXS

SEQ ID NO: 73199 - protein, 41 aa, Artificial Sequence; identical to SEQ ID NO: 19515
  GFR-binding peptide
  MOD_RES (5)..(5): Xaa is C or S

SEQ ID NO: 73200 - protein, 34 aa, Artificial Sequence; identical to SEQ ID NO: 19516
  GFR-binding peptide
  MOD_RES (2)..(2): Xaa is C or S

SEQ ID NO: 73201 - protein, 37 aa, Artificial Sequence; identical to SEQ ID NO: 19517
  GFR-binding peptide
  MOD_RES (2)..(2): Xaa is C or S
  MOD_RES (18)..(19)..(20)..(21)..(22): Xaa is A or G
  MOD_RES (23)..(24)..(25)..(26): Xaa is A or G or is absent

SEQ ID NO: 73202 - protein, 39 aa, Artificial Sequence
  GFR-binding peptide
  MOD_RES (5)..(6)..(37)..(39): Xaa is C or S
SASPXXVPQDLSNITIQIMVGRTPKVLGEMSMVVKSXKX

SEQ ID NO: 73203 - protein, 42 aa, Artificial Sequence; identical to SEQ ID NO: 19519
  GFR-binding peptide
  MOD_RES (5)..(42): Xaa is C or S

SEQ ID NO: 73204 - protein, 39 aa, Artificial Sequence
  GFR-binding peptide
  MOD_RES (2)..(3)..(37)..(39): Xaa is C or S
  MOD_RES (17)..(18)..(19)..(20)..(21): Xaa is A or G
  MOD_RES (22)..(23)..(24)..(25): Xaa is A or G or is absent
PXXTPTKMSNITMQIMXXXXXXXXXIGEMSGMVVDRXGX

SEQ ID NO: 73205 - protein, 39 aa, Artificial Sequence
  GFR-binding peptide
  MOD_RES (3)..(4)..(38): Xaa is C or S
  MOD_RES (18)..(19)..(20)..(21)..(22): Xaa is A or G
  MOD_RES (23)..(24)..(25)..(26): Xaa is A or G or is absent
GPXXTPTKMSNITMQIMXXXXXXXXXLGEMSGMVVDRXG

SEQ ID NO: 73206 - protein, 34 aa, Artificial Sequence; identical to SEQ ID NO: 55108
  GFR-binding peptide
  MOD_RES (34)..(34): Xaa is C or S
  MOD_RES (14)..(15)..(16)..(17)..(18): Xaa is A or G
  MOD_RES (19)..(20)..(21)..(22): Xaa is A or G or is absent

SEQ ID NO: 73207 - protein, 34 aa, Artificial Sequence; identical to SEQ ID NO: 52734
  GFR-binding peptide
  MOD_RES (1)..(32)..(34): Xaa is C or S

SEQ ID NO: 73208 - protein, 38 aa, Artificial Sequence
  GFR-binding peptide
  MOD_RES (2)..(3)..(35)..(37): Xaa is C or S
SXXVPARLSNITIQIMDAANNVVLGEMSDMVVEAXGXR

SEQ ID NO: 73209 - protein, 36 aa, Artificial Sequence; identical to SEQ ID NO: 19521
  GFR-binding peptide
  MOD_RES (3)..(3): Xaa is C or S
  MOD_RES (17)..(18)..(19)..(20)..(21): Xaa is A or G
  MOD_RES (22)..(23)..(24)..(25): Xaa is A or G or is absent

SEQ ID NO: 73210 - protein, 35 aa, Artificial Sequence
  GFR-binding peptide
  MOD_RES (2)..(3)..(34): Xaa is C or S
TXXAPVKTSNITMQIMDNGRVLLLGEMSMIVEEXG

SEQ ID NO: 73211 - protein, 36 aa, Artificial Sequence; identical to SEQ ID NO: 52737
  GFR-binding peptide
  MOD_RES (2)..(3)..(36): Xaa is C or S
  MOD_RES (17)..(18)..(19)..(20)..(21): Xaa is A or G
  MOD_RES (22)..(23)..(24)..(25): Xaa is A or G or is absent

SEQ ID NO: 73212 - protein, 39 aa, Artificial Sequence
  GFR-binding peptide
  MOD_RES (6)..(7): Xaa is C or S
  MOD_RES (21)..(22)..(23)..(24)..(25): Xaa is A or G
  MOD_RES (26)..(27)..(28)..(29): Xaa is A or G or is absent
ASAAPXXVPQALSNITIQIMXXXXXXXXXLGEMSMIVRS

SEQ ID NO: 73213 - protein, 37 aa, Artificial Sequence
  GFR-binding peptide
  MOD_RES (4)..(5)..(36): Xaa is C or S
ASPXXVSQDLSNITIQIMIGKTPKILGEMSMIVKSXK

SEQ ID NO: 73214 - protein, 39 aa, Artificial Sequence; identical to SEQ ID NO: 19523
  GFR-binding peptide
  MOD_RES (2)..(39): Xaa is C or S

SEQ ID NO: 73215 - protein, 35 aa, Artificial Sequence
  GFR-binding peptide
  MOD_RES (1)..(35): Xaa is C or S
  MOD_RES (15)..(16)..(17)..(18)..(19): Xaa is A or G
  MOD_RES (20)..(21)..(22)..(23): Xaa is A or G or is absent
XTPTKMSNITMQIMXXXXXXXXXLGEMSGMVVDRX

SEQ ID NO: 73216 - protein, 32 aa, Artificial Sequence
  GFR-binding peptide
  MOD_RES (1)..(1): Xaa is C or S
XAPTKLSNITVQIMDDSSNVILGEMSNMVVRS

SEQ ID NO: 73217 - protein, 39 aa, Artificial Sequence
  GFR-binding peptide
  MOD_RES (5)..(6)..(37)..(39): Xaa is C or S
VPSTXXAPVKTSNITMQIMDNGRVLLIGEMSMIVEEXGX

SEQ ID NO: 73218 - protein, 41 aa, Artificial Sequence
  GFR-binding peptide
  MOD_RES (6)..(7)..(41): Xaa is C or S
  MOD_RES (21)..(22)..(23)..(24)..(25): Xaa is A or G
  MOD_RES (26)..(27)..(28)..(29): Xaa is A or G or is absent
AAPASXXVPARLSNITIQIMXXXXXXXXXLGEMSDMVVEAX

SEQ ID NO: 73219 - protein, 44 aa, Artificial Sequence
  GFR-binding peptide
  MOD_RES (6)..(7)..(41)..(43): Xaa is C or S
  MOD_RES (21)..(22)..(23)..(24)..(25): Xaa is A or G
  MOD_RES (26)..(27)..(28)..(29): Xaa is A or G or is absent
HVPKPXXAPTKLSNITVQIMXXXXXXXXXLGEMSNMVVRSXGXH

SEQ ID NO: 73220 - protein, 36 aa, Artificial Sequence; identical to SEQ ID NO: 55124
  GFR-binding peptide
  MOD_RES (3)..(4): Xaa is C or S
  MOD_RES (18)..(19)..(20)..(21)..(22): Xaa is A or G
  MOD_RES (23)..(24)..(25)..(26): Xaa is A or G or is absent

SEQ ID NO: 73221 - protein, 43 aa, Artificial Sequence; identical to SEQ ID NO: 19529
  GFR-binding peptide
  MOD_RES (7)..(41)..(43): Xaa is C or S
  MOD_RES (21)..(22)..(23)..(24)..(25): Xaa is A or G
  MOD_RES (26)..(27)..(28)..(29): Xaa is A or G or is absent

SEQ ID NO: 73222 - protein, 35 aa, Artificial Sequence
  GFR-binding peptide
  MOD_RES (33)..(35): Xaa is C or S
  MOD_RES (14)..(15)..(16)..(17)..(18): Xaa is A or G
  MOD_RES (19)..(20)..(21)..(22): Xaa is A or G or is absent
APVKTSNITMQIMXXXXXXXXXIGEMSMIVEEXGX

SEQ ID NO: 73223 - protein, 39 aa, Artificial Sequence; identical to SEQ ID NO: 19532
  GFR-binding peptide
  MOD_RES (6)..(6): Xaa is C or S

SEQ ID NO: 73224 - protein, 32 aa, Artificial Sequence
  GFR-binding peptide
  MOD_RES (14)..(15)..(16)..(17)..(18): Xaa is A or G
  MOD_RES (19)..(20)..(21)..(22): Xaa is A or G or is absent
APVKTSNITMQIMXXXXXXXXXIGEMSMIVEE

SEQ ID NO: 73225 - protein, 36 aa, Artificial Sequence
  GFR-binding peptide
  MOD_RES (3)..(4): Xaa is C or S
  MOD_RES (18)..(19)..(20)..(21)..(22): Xaa is A or G
  MOD_RES (23)..(24)..(25)..(26): Xaa is A or G or is absent
PTXXVPTRLSNITIQIMXXXXXXXXXIGEMSDMVVE

SEQ ID NO: 73226 - protein, 37 aa, Artificial Sequence
  GFR-binding peptide
  MOD_RES (6)..(7): Xaa is C or S
GSAGPXXTPTKMSNITMQIMNDKQQIILGEMSGMVVD

SEQ ID NO: 73227 - protein, 39 aa, Artificial Sequence
  GFR-binding peptide
  MOD_RES (6)..(7)..(39): Xaa is C or S
GSAGPXXTPTKMSNITMQIMNDKQQIILGEMSGMVVDRX

SEQ ID NO: 73228 - protein, 37 aa, Artificial Sequence; identical to SEQ ID NO: 55133
  GFR-binding peptide
  MOD_RES (2)..(3)..(36): Xaa is C or S
  MOD_RES (17)..(18)..(19)..(20)..(21): Xaa is A or G
  MOD_RES (22)..(23)..(24)..(25): Xaa is A or G or is absent

SEQ ID NO: 73229 - protein, 37 aa, Artificial Sequence
  GFR-binding peptide
  MOD_RES (4)..(5)..(37): Xaa is C or S
AGPXXTPTKMSNITMQIMNDKQQIIIGEMSGMVVDRX

SEQ ID NO: 73230 - protein, 42 aa, Artificial Sequence
  GFR-binding peptide
  MOD_RES (5)..(6)..(39)..(41): Xaa is C or S
  MOD_RES (20)..(21)..(22)..(23)..(24): Xaa is A or G
  MOD_RES (25)..(26)..(27)..(28): Xaa is A or G or is absent
SASPXXVPQDLSNITIQIMXXXXXXXXXLGEMSMVVKSXKXS

SEQ ID NO: 73231 - protein, 31 aa, Artificial Sequence
  GFR-binding peptide
  MOD_RES (1)..(1): Xaa is C or S
XAPVKTSNITMQIMDNGRVLLIGEMSMIVEE

SEQ ID NO: 73232 - protein, 36 aa, Artificial Sequence
  GFR-binding peptide
  MOD_RES (4)..(5): Xaa is C or S
AGPXXTPTKMSNITMQIMNDKQQIIIGEMSGMVVDR

SEQ ID NO: 73233 - protein, 35 aa, Artificial Sequence; identical to SEQ ID NO: 52772
  GFR-binding peptide
  MOD_RES (1)..(2)..(34): Xaa is C or S

SEQ ID NO: 73234 - protein, 37 aa, Artificial Sequence; identical to SEQ ID NO: 19537
  GFR-binding peptide
  MOD_RES (2)..(2): Xaa is C or S

SEQ ID NO: 73235 - protein, 40 aa, Artificial Sequence
  GFR-binding peptide
  MOD_RES (6)..(7): Xaa is C or S
  MOD_RES (21)..(22)..(23)..(24)..(25): Xaa is A or G
  MOD_RES (26)..(27)..(28)..(29): Xaa is A or G or is absent
GSAGPXXTPTKMSNITMQIMXXXXXXXXXIGEMSGMVVDR

SEQ ID NO: 73236 - protein, 36 aa, Artificial Sequence
  GFR-binding peptide
  MOD_RES (1)..(33)..(35): Xaa is C or S
XVPTRLSNITIQIMDSANNVVIGEMSDMVVESXGXR

SEQ ID NO: 73237 - protein, 40 aa, Artificial Sequence
  GFR-binding peptide
  MOD_RES (6)..(7)..(38)..(40): Xaa is C or S
ASASPXXVSQDLSNITIQIMIGKTPKILGEMSMIVKSXKX

SEQ ID NO: 73238 - protein, 41 aa, Artificial Sequence
  GFR-binding peptide
  MOD_RES (4)..(5)..(38)..(40): Xaa is C or S
  MOD_RES (19)..(20)..(21)..(22)..(23): Xaa is A or G
  MOD_RES (24)..(25)..(26)..(27): Xaa is A or G or is absent
PSTXXAPVKTSNITMQIMXXXXXXXXXLGEMSMIVEEXGXL

SEQ ID NO: 73239 - protein, 32 aa, Artificial Sequence
  GFR-binding peptide
  MOD_RES (1)..(2): Xaa is C or S
XXAPVKTSNITMQIMDNGRVLLIGEMSMIVEE

SEQ ID NO: 73240 - protein, 38 aa, Artificial Sequence; identical to SEQ ID NO: 19541
  GFR-binding peptide
  MOD_RES (3)..(3): Xaa is C or S

SEQ ID NO: 73241 - protein, 36 aa, Artificial Sequence
  GFR-binding peptide
  MOD_RES (3)..(4)..(36): Xaa is C or S
GPXXTPTKMSNITMQIMNDKQQIILGEMSGMVVDRX

SEQ ID NO: 73242 - protein, 40 aa, Artificial Sequence; identical to SEQ ID NO: 19543
  GFR-binding peptide
  MOD_RES (3)..(40): Xaa is C or S
  MOD_RES (19)..(20)..(21)..(22)..(23): Xaa is A or G
  MOD_RES (24)..(25)..(26)..(27): Xaa is A or G or is absent

SEQ ID NO: 73243 - protein, 40 aa, Artificial Sequence
  GFR-binding peptide
  MOD_RES (6)..(7)..(38)..(40): Xaa is C or S
RVPSTXXAPVKTSNITMQIMDNGRVLLLGEMSMIVEEXGX

SEQ ID NO: 73244 - protein, 40 aa, Artificial Sequence
  GFR-binding peptide
  MOD_RES (5)..(6)..(39): Xaa is C or S
  MOD_RES (20)..(21)..(22)..(23)..(24): Xaa is A or G
  MOD_RES (25)..(26)..(27)..(28): Xaa is A or G or is absent
VPSTXXAPVKTSNITMQIMXXXXXXXXXLGEMSMIVEEXG

SEQ ID NO: 73245 - protein, 34 aa, Artificial Sequence; identical to SEQ ID NO: 19544
  GFR-binding peptide

SEQ ID NO: 73246 - protein, 35 aa, Artificial Sequence
  GFR-binding peptide
  MOD_RES (32)..(34): Xaa is C or S
VPARLSNITIQIMDAANNVVLGEMSDMVVEAXGXR

SEQ ID NO: 73247 - protein, 33 aa, Artificial Sequence
  GFR-binding peptide
  MOD_RES (1)..(1): Xaa is C or S
  MOD_RES (15)..(16)..(17)..(18)..(19): Xaa is A or G
  MOD_RES (20)..(21)..(22)..(23): Xaa is A or G or is absent
XVPQALSNITIQIMXXXXXXXXXLGEMSMIVRS

SEQ ID NO: 73248 - protein, 34 aa, Artificial Sequence
  GFR-binding peptide
  MOD_RES (1)..(34): Xaa is C or S
  MOD_RES (15)..(16)..(17)..(18)..(19): Xaa is A or G
  MOD_RES (20)..(21)..(22)..(23): Xaa is A or G or is absent
XVPQDLSNITIQIMXXXXXXXXXLGEMSMVVKSX

SEQ ID NO: 73249 - protein, 36 aa, Artificial Sequence
  GFR-binding peptide
  MOD_RES (2)..(3)..(35): Xaa is C or S
PXXTPTKMSNITMQIMNDKQQIIIGEMSGMVVDRXG

SEQ ID NO: 73250 - protein, 33 aa, Artificial Sequence
  GFR-binding peptide
  MOD_RES (1)..(33): Xaa is C or S
XVPTRLSNITIQIMDSANNVVLGEMSDMVVESX

SEQ ID NO: 73251 - protein, 36 aa, Artificial Sequence; identical to SEQ ID NO: 19549
  GFR-binding peptide
  MOD_RES (35)..(35): Xaa is C or S
  MOD_RES (14)..(15)..(16)..(17)..(18): Xaa is A or G
  MOD_RES (19)..(20)..(21)..(22): Xaa is A or G or is absent

SEQ ID NO: 73252 - protein, 38 aa, Artificial Sequence
  GFR-binding peptide
  MOD_RES (5)..(6): Xaa is C or S
  MOD_RES (20)..(21)..(22)..(23)..(24): Xaa is A or G
  MOD_RES (25)..(26)..(27)..(28): Xaa is A or G or is absent
TPPTXXVPTRLSNITIQIMXXXXXXXXXLGEMSDMVVE

SEQ ID NO: 73253 - protein, 39 aa, Artificial Sequence
  GFR-binding peptide
  MOD_RES (6)..(7)..(39): Xaa is C or S
STPPTXXVPTRLSNITIQIMDSANNVVLGEMSDMVVESX

SEQ ID NO: 73254 - protein, 43 aa, Artificial Sequence
  GFR-binding peptide
  MOD_RES (6)..(7)..(41)..(43): Xaa is C or S
  MOD_RES (21)..(22)..(23)..(24)..(25): Xaa is A or G
  MOD_RES (26)..(27)..(28)..(29): Xaa is A or G or is absent
AAPASXXVPARLSNITIQIMXXXXXXXXXIGEMSDMVVEAXGX

SEQ ID NO: 73255 - protein, 38 aa, Artificial Sequence
  GFR-binding peptide
  MOD_RES (2)..(3)..(36)..(38): Xaa is C or S
  MOD_RES (17)..(18)..(19)..(20)..(21): Xaa is A or G
  MOD_RES (22)..(23)..(24)..(25): Xaa is A or G or is absent
TXXAPVKTSNITMQIMXXXXXXXXXIGEMSMIVEEXGX

SEQ ID NO: 73256 - protein, 37 aa, Artificial Sequence
  GFR-binding peptide
  MOD_RES (2)..(3)..(36): Xaa is C or S
  MOD_RES (17)..(18)..(19)..(20)..(21): Xaa is A or G
  MOD_RES (22)..(23)..(24)..(25): Xaa is A or G or is absent
PXXVPQDLSNITIQIMXXXXXXXXXLGEMSMVVKSXK

SEQ ID NO: 73257 - protein, 36 aa, Artificial Sequence
  GFR-binding peptide
  MOD_RES (34)..(36): Xaa is C or S
  MOD_RES (14)..(15)..(16)..(17)..(18): Xaa is A or G
  MOD_RES (19)..(20)..(21)..(22): Xaa is A or G or is absent
VPTRLSNITIQIMXXXXXXXXXIGEMSDMVVESXGX

SEQ ID NO: 73258 - protein, 36 aa, Artificial Sequence
  GFR-binding peptide
  MOD_RES (1)..(2)..(36): Xaa is C or S
  MOD_RES (16)..(17)..(18)..(19)..(20): Xaa is A or G
  MOD_RES (21)..(22)..(23)..(24): Xaa is A or G or is absent
XXVPTRLSNITIQIMXXXXXXXXXIGEMSDMVVESX

SEQ ID NO: 73259 - protein, 32 aa, Artificial Sequence
  GFR-binding peptide
  MOD_RES (14)..(15)..(16)..(17)..(18): Xaa is A or G
  MOD_RES (19)..(20)..(21)..(22): Xaa is A or G or is absent
VPQALSNITIQIMXXXXXXXXXLGEMSMIVRS

SEQ ID NO: 73260 - protein, 38 aa, Artificial Sequence
  GFR-binding peptide
  MOD_RES (4)..(5): Xaa is C or S
  MOD_RES (19)..(20)..(21)..(22)..(23): Xaa is A or G
  MOD_RES (24)..(25)..(26)..(27): Xaa is A or G or is absent
PKPXXAPTKLSNITVQIMXXXXXXXXXLGEMSNMVVRS

SEQ ID NO: 73261 - protein, 32 aa, Artificial Sequence
  GFR-binding peptide
  MOD_RES (14)..(15)..(16)..(17)..(18): Xaa is A or G
  MOD_RES (19)..(20)..(21)..(22): Xaa is A or G or is absent
VPARLSNITIQIMXXXXXXXXXLGEMSDMVVE

SEQ ID NO: 73262 - protein, 39 aa, Artificial Sequence; identical to SEQ ID NO: 55184
  GFR-binding peptide
  MOD_RES (1)..(2)..(36)..(38): Xaa is C or S
  MOD_RES (16)..(17)..(18)..(19)..(20): Xaa is A or G
  MOD_RES (21)..(22)..(23)..(24): Xaa is A or G or is absent

SEQ ID NO: 73263 - protein, 38 aa, Artificial Sequence
  GFR-binding peptide
  MOD_RES (2)..(3)..(37): Xaa is C or S
  MOD_RES (17)..(18)..(19)..(20)..(21): Xaa is A or G
  MOD_RES (22)..(23)..(24)..(25): Xaa is A or G or is absent
PXXTPTKMSNITMQIMXXXXXXXXXLGEMSGMVVDRXG

SEQ ID NO: 73264 - protein, 36 aa, Artificial Sequence
  GFR-binding peptide
  MOD_RES (3)..(4): Xaa is C or S
  MOD_RES (18)..(19)..(20)..(21)..(22): Xaa is A or G
  MOD_RES (23)..(24)..(25)..(26): Xaa is A or G or is absent
APXXVPQALSNITIQIMXXXXXXXXXLGEMSMIVRS

SEQ ID NO: 73265 - protein, 40 aa, Artificial Sequence
  GFR-binding peptide
  MOD_RES (3)..(4)..(38)..(40): Xaa is C or S
  MOD_RES (18)..(19)..(20)..(21)..(22): Xaa is A or G
  MOD_RES (23)..(24)..(25)..(26): Xaa is A or G or is absent
ASXXVPARLSNITIQIMXXXXXXXXXLGEMSDMVVEAXGX

SEQ ID NO: 73266 - protein, 33 aa, Artificial Sequence
  GFR-binding peptide
  MOD_RES (1)..(32): Xaa is C or S
XVPQDLSNITIQIMVGRTPKVLGEMSMVVKSXK

SEQ ID NO: 73267 - protein, 40 aa, Artificial Sequence; identical to SEQ ID NO: 19557
  GFR-binding peptide
  MOD_RES (37)..(39): Xaa is C or S

SEQ ID NO: 73268 - protein, 39 aa, Artificial Sequence; identical to SEQ ID NO: 19558
  GFR-binding peptide
  MOD_RES (2)..(36)..(38): Xaa is C or S
  MOD_RES (16)..(17)..(18)..(19)..(20): Xaa is A or G
  MOD_RES (21)..(22)..(23)..(24): Xaa is A or G or is absent

SEQ ID NO: 73269 - protein, 42 aa, Artificial Sequence
  GFR-binding peptide
  MOD_RES (6)..(7)..(41): Xaa is C or S
  MOD_RES (21)..(22)..(23)..(24)..(25): Xaa is A or G
  MOD_RES (26)..(27)..(28)..(29): Xaa is A or G or is absent
STPPTXXVPTRLSNITIQIMXXXXXXXXXIGEMSDMVVESXG

SEQ ID NO: 73270 - protein, 34 aa, Artificial Sequence
  GFR-binding peptide
  MOD_RES (2)..(3): Xaa is C or S
PXXAPTKLSNITVQIMDDSSNVILGEMSNMVVRS

SEQ ID NO: 73271 - protein, 37 aa, Artificial Sequence; identical to SEQ ID NO: 55194
  GFR-binding peptide
  MOD_RES (3)..(4)..(35)..(37): Xaa is C or S

SEQ ID NO: 73272 - protein, 42 aa, Artificial Sequence; identical to SEQ ID NO: 19559
  GFR-binding peptide
  MOD_RES (2)..(39)..(41): Xaa is C or S
  MOD_RES (18)..(19)..(20)..(21)..(22): Xaa is A or G
  MOD_RES (23)..(24)..(25)..(26): Xaa is A or G or is absent

SEQ ID NO: 73273 - protein, 45 aa, Artificial Sequence; identical to SEQ ID NO: 19560
  GFR-binding peptide
  MOD_RES (5)..(42)..(44): Xaa is C or S

SEQ ID NO: 73274 - protein, 32 aa, Artificial Sequence
  GFR-binding peptide
  MOD_RES (31)..(31): Xaa is C or S
APVKTSNITMQIMDNGRVLLIGEMSMIVEEXG

SEQ ID NO: 73275 - protein, 38 aa, Artificial Sequence; identical to SEQ ID NO: 19563
  GFR-binding peptide
  MOD_RES (3)..(37): Xaa is C or S

SEQ ID NO: 73276 - protein, 35 aa, Artificial Sequence
  GFR-binding peptide
  MOD_RES (2)..(3): Xaa is C or S
  MOD_RES (17)..(18)..(19)..(20)..(21): Xaa is A or G
  MOD_RES (22)..(23)..(24)..(25): Xaa is A or G or is absent
TXXVPTRLSNITIQIMXXXXXXXXXLGEMSDMVVE

SEQ ID NO: 73277 - protein, 41 aa, Artificial Sequence
  GFR-binding peptide
  MOD_RES (6)..(7)..(41): Xaa is C or S
  MOD_RES (21)..(22)..(23)..(24)..(25): Xaa is A or G
  MOD_RES (26)..(27)..(28)..(29): Xaa is A or G or is absent
STPPTXXVPTRLSNITIQIMXXXXXXXXXIGEMSDMVVESX

SEQ ID NO: 73278 - protein, 40 aa, Artificial Sequence
  GFR-binding peptide
  MOD_RES (3)..(4)..(38)..(40): Xaa is C or S
  MOD_RES (18)..(19)..(20)..(21)..(22): Xaa is A or G
  MOD_RES (23)..(24)..(25)..(26): Xaa is A or G or is absent
KPXXAPTKLSNITVQIMXXXXXXXXXLGEMSNMVVRSXGX

SEQ ID NO: 73279 - protein, 35 aa, Artificial Sequence
  GFR-binding peptide
  MOD_RES (1)..(34): Xaa is C or S
  MOD_RES (15)..(16)..(17)..(18)..(19): Xaa is A or G
  MOD_RES (20)..(21)..(22)..(23): Xaa is A or G or is absent
XAPVKTSNITMQIMXXXXXXXXXIGEMSMIVEEXG

SEQ ID NO: 73280 - protein, 36 aa, Artificial Sequence
  GFR-binding peptide
  MOD_RES (3)..(4): Xaa is C or S
  MOD_RES (18)..(19)..(20)..(21)..(22): Xaa is A or G
  MOD_RES (23)..(24)..(25)..(26): Xaa is A or G or is absent
STXXAPVKTSNITMQIMXXXXXXXXXLGEMSMIVEE

SEQ ID NO: 73281 - protein, 36 aa, Artificial Sequence
  GFR-binding peptide
  MOD_RES (4)..(5): Xaa is C or S
PPTXXVPTRLSNITIQIMDSANNVVLGEMSDMVVES

SEQ ID NO: 73282 - protein, 40 aa, Artificial Sequence; identical to SEQ ID NO: 19566
  GFR-binding peptide
  MOD_RES (37)..(39): Xaa is C or S
  MOD_RES (16)..(17)..(18)..(19)..(20): Xaa is A or G
  MOD_RES (21)..(22)..(23)..(24): Xaa is A or G or is absent

SEQ ID NO: 73283 - protein, 40 aa, Artificial Sequence; identical to SEQ ID NO: 55211
  GFR-binding peptide
  MOD_RES (5)..(6)..(37)..(39): Xaa is C or S

SEQ ID NO: 73284 - protein, 41 aa, Artificial Sequence
  GFR-binding peptide
  MOD_RES (4)..(5)..(39)..(41): Xaa is C or S
  MOD_RES (19)..(20)..(21)..(22)..(23): Xaa is A or G
  MOD_RES (24)..(25)..(26)..(27): Xaa is A or G or is absent
AGPXXTPTKMSNITMQIMXXXXXXXXXLGEMSGMVVDRXGX

SEQ ID NO: 73285 - protein, 41 aa, Artificial Sequence
  GFR-binding peptide
  MOD_RES (6)..(7)..(40): Xaa is C or S
  MOD_RES (21)..(22)..(23)..(24)..(25): Xaa is A or G
  MOD_RES (26)..(27)..(28)..(29): Xaa is A or G or is absent
RVPSTXXAPVKTSNITMQIMXXXXXXXXXLGEMSMIVEEXG

SEQ ID NO: 73286 - protein, 35 aa, Artificial Sequence; identical to SEQ ID NO: 19567
  GFR-binding peptide
  MOD_RES (1)..(1): Xaa is C or S

SEQ ID NO: 73287 - protein, 33 aa, Artificial Sequence
  GFR-binding peptide
  MOD_RES (1)..(32): Xaa is C or S
XVSQDLSNITIQIMIGKTPKILGEMSMIVKSXK

SEQ ID NO: 73288 - protein, 41 aa, Artificial Sequence
  GFR-binding peptide
  MOD_RES (4)..(5)..(39)..(41): Xaa is C or S
  MOD_RES (19)..(20)..(21)..(22)..(23): Xaa is A or G
  MOD_RES (24)..(25)..(26)..(27): Xaa is A or G or is absent
PASXXVPARLSNITIQIMXXXXXXXXXIGEMSDMVVEAXGX

SEQ ID NO: 73289 - protein, 40 aa, Artificial Sequence; identical to SEQ ID NO: 19568
  GFR-binding peptide
  MOD_RES (4)..(38)..(40): Xaa is C or S

SEQ ID NO: 73290 - protein, 38 aa, Artificial Sequence
  GFR-binding peptide
  MOD_RES (1)..(2)..(35)..(37): Xaa is C or S
  MOD_RES (16)..(17)..(18)..(19)..(20): Xaa is A or G
  MOD_RES (21)..(22)..(23)..(24): Xaa is A or G or is absent
XXVSQDLSNITIQIMXXXXXXXXXLGEMSMIVKSXKXS

SEQ ID NO: 73291 - protein, 33 aa, Artificial Sequence
  GFR-binding peptide
  MOD_RES (2)..(3): Xaa is C or S
PXXVPQALSNITIQIMVGRKPKVLGEMSMIVRS

SEQ ID NO: 73292 - protein, 33 aa, Artificial Sequence; identical to SEQ ID NO: 19571
  GFR-binding peptide
  MOD_RES (1)..(1): Xaa is C or S
  MOD_RES (15)..(16)..(17)..(18)..(19): Xaa is A or G
  MOD_RES (20)..(21)..(22)..(23): Xaa is A or G or is absent

SEQ ID NO: 73293 - protein, 33 aa, Artificial Sequence; identical to SEQ ID NO: 19572
  GFR-binding peptide

SEQ ID NO: 73294 - protein, 40 aa, Artificial Sequence
  GFR-binding peptide
  MOD_RES (3)..(4)..(38)..(40): Xaa is C or S
  MOD_RES (18)..(19)..(20)..(21)..(22): Xaa is A or G
  MOD_RES (23)..(24)..(25)..(26): Xaa is A or G or is absent
PTXXVPTRLSNITIQIMXXXXXXXXXIGEMSDMVVESXGX

SEQ ID NO: 73295 - protein, 37 aa, Artificial Sequence
  GFR-binding peptide
  MOD_RES (3)..(4)..(36): Xaa is C or S
PTXXVPTRLSNITIQIMDSANNVVLGEMSDMVVESXG

SEQ ID NO: 73296 - protein, 36 aa, Artificial Sequence
  GFR-binding peptide
  MOD_RES (1)..(33)..(35): Xaa is C or S
XAPTKLSNITVQIMDDSSNVILGEMSNMVVRSXGXH

SEQ ID NO: 73297 - protein, 38 aa, Artificial Sequence; identical to SEQ ID NO: 19574
  GFR-binding peptide
  MOD_RES (3)..(3): Xaa is C or S
  MOD_RES (19)..(20)..(21)..(22)..(23): Xaa is A or G
  MOD_RES (24)..(25)..(26)..(27): Xaa is A or G or is absent

SEQ ID NO: 73298 - protein, 40 aa, Artificial Sequence; identical to SEQ ID NO: 19576
  GFR-binding peptide
  MOD_RES (2)..(39): Xaa is C or S

SEQ ID NO: 73299 - protein, 38 aa, Artificial Sequence; identical to SEQ ID NO: 52834
  GFR-binding peptide
  MOD_RES (3)..(4)..(35)..(37): Xaa is C or S

SEQ ID NO: 73300 - protein, 35 aa, Artificial Sequence; identical to SEQ ID NO: 19578
  GFR-binding peptide

SEQ ID NO: 73301 - protein, 36 aa, Artificial Sequence; identical to SEQ ID NO: 19580
  GFR-binding peptide
  MOD_RES (2)..(2): Xaa is C or S
  MOD_RES (18)..(19)..(20)..(21)..(22): Xaa is A or G
  MOD_RES (23)..(24)..(25)..(26): Xaa is A or G or is absent

SEQ ID NO: 73302 - protein, 37 aa, Artificial Sequence
  GFR-binding peptide
  MOD_RES (5)..(6)..(37): Xaa is C or S
SASPXXVPQDLSNITIQIMVGRTPKVLGEMSMVVKSX

SEQ ID NO: 73303 - protein, 38 aa, Artificial Sequence
  GFR-binding peptide
  MOD_RES (4)..(5): Xaa is C or S
  MOD_RES (19)..(20)..(21)..(22)..(23): Xaa is A or G
  MOD_RES (24)..(25)..(26)..(27): Xaa is A or G or is absent
PASXXVPARLSNITIQIMXXXXXXXXXLGEMSDMVVEA

SEQ ID NO: 73304 - protein, 42 aa, Artificial Sequence
  GFR-binding peptide
  MOD_RES (4)..(5)..(39)..(41): Xaa is C or S
  MOD_RES (19)..(20)..(21)..(22)..(23): Xaa is A or G
  MOD_RES (24)..(25)..(26)..(27): Xaa is A or G or is absent
PPTXXVPTRLSNITIQIMXXXXXXXXXIGEMSDMVVESXGXR

SEQ ID NO: 73305 - protein, 34 aa, Artificial Sequence
  GFR-binding peptide
  MOD_RES (1)..(32)..(34): Xaa is C or S
XVPQALSNITIQIMVGRKPKVLGEMSMIVRSXKX

SEQ ID NO: 73306 - protein, 38 aa, Artificial Sequence
  GFR-binding peptide
  MOD_RES (4)..(5)..(38): Xaa is C or S
  MOD_RES (19)..(20)..(21)..(22)..(23): Xaa is A or G
  MOD_RES (24)..(25)..(26)..(27): Xaa is A or G or is absent
ASPXXVSQDLSNITIQIMXXXXXXXXXLGEMSMIVKSX

SEQ ID NO: 73307 - protein, 43 aa, Artificial Sequence; identical to SEQ ID NO: 55240
  GFR-binding peptide
  MOD_RES (6)..(7)..(40)..(42): Xaa is C or S
  MOD_RES (21)..(22)..(23)..(24)..(25): Xaa is A or G
  MOD_RES (26)..(27)..(28)..(29): Xaa is A or G or is absent

SEQ ID NO: 73308 - protein, 37 aa, Artificial Sequence
  GFR-binding peptide
  MOD_RES (2)..(3)..(37): Xaa is C or S
  MOD_RES (17)..(18)..(19)..(20)..(21): Xaa is A or G
  MOD_RES (22)..(23)..(24)..(25): Xaa is A or G or is absent
SXXVPARLSNITIQIMXXXXXXXXXLGEMSDMVVEAX

SEQ ID NO: 73309 - protein, 36 aa, Artificial Sequence; identical to SEQ ID NO: 19588
  GFR-binding peptide
  MOD_RES (2)..(36): Xaa is C or S
  MOD_RES (16)..(17)..(18)..(19)..(20): Xaa is A or G
  MOD_RES (21)..(22)..(23)..(24): Xaa is A or G or is absent

SEQ ID NO: 73310 - protein, 35 aa, Artificial Sequence
  GFR-binding peptide
  MOD_RES (1)..(35): Xaa is C or S
  MOD_RES (15)..(16)..(17)..(18)..(19): Xaa is A or G
  MOD_RES (20)..(21)..(22)..(23): Xaa is A or G or is absent
XVPARLSNITIQIMXXXXXXXXXIGEMSDMVVEAX

SEQ ID NO: 73311 - protein, 38 aa, Artificial Sequence; identical to SEQ ID NO: 19590
  GFR-binding peptide
  MOD_RES (2)..(36)..(38): Xaa is C or S
  MOD_RES (16)..(17)..(18)..(19)..(20): Xaa is A or G
  MOD_RES (21)..(22)..(23)..(24): Xaa is A or G or is absent

SEQ ID NO: 73312 - protein, 38 aa, Artificial Sequence; identical to SEQ ID NO: 52845
  GFR-binding peptide
  MOD_RES (2)..(3)..(35)..(37): Xaa is C or S

SEQ ID NO: 73313 - protein, 35 aa, Artificial Sequence
  GFR-binding peptide
  MOD_RES (1)..(2): Xaa is C or S
  MOD_RES (16)..(17)..(18)..(19)..(20): Xaa is A or G
  MOD_RES (21)..(22)..(23)..(24): Xaa is A or G or is absent
XXVPARLSNITIQIMXXXXXXXXXIGEMSDMVVEA

SEQ ID NO: 73314 - protein, 40 aa, Artificial Sequence
  GFR-binding peptide
  MOD_RES (5)..(6)..(37)..(39): Xaa is C or S
SASPXXVPQDLSNITIQIMVGRTPKVLGEMSMVVKSXKXS

SEQ ID NO: 73315 - protein, 33 aa, Artificial Sequence; identical to SEQ ID NO: 19592
  GFR-binding peptide
  MOD_RES (15)..(16)..(17)..(18)..(19): Xaa is A or G
  MOD_RES (20)..(21)..(22)..(23): Xaa is A or G or is absent

SEQ ID NO: 73316 - protein, 33 aa, Artificial Sequence
  GFR-binding peptide
  MOD_RES (31)..(33): Xaa is C or S
VPQDLSNITIQIMVGRTPKVLGEMSMVVKSXKX

SEQ ID NO: 73317 - protein, 38 aa, Artificial Sequence; identical to SEQ ID NO: 19593
  GFR-binding peptide
  MOD_RES (1)..(38): Xaa is C or S

SEQ ID NO: 73318 - protein, 42 aa, Artificial Sequence; identical to SEQ ID NO: 19594
  GFR-binding peptide
  MOD_RES (3)..(40)..(42): Xaa is C or S

SEQ ID NO: 73319 - protein, 40 aa, Artificial Sequence; identical to SEQ ID NO: 19595
  GFR-binding peptide
  MOD_RES (6)..(40): Xaa is C or S

SEQ ID NO: 73320 - protein, 35 aa, Artificial Sequence
  GFR-binding peptide
  MOD_RES (3)..(4)..(35): Xaa is C or S
STXXAPVKTSNITMQIMDNGRVLLIGEMSMIVEEX

SEQ ID NO: 73321 - protein, 41 aa, Artificial Sequence
  GFR-binding peptide
  MOD_RES (6)..(7)..(41): Xaa is C or S
  MOD_RES (21)..(22)..(23)..(24)..(25): Xaa is A or G
  MOD_RES (26)..(27)..(28)..(29): Xaa is A or G or is absent
HVPKPXXAPTKLSNITVQIMXXXXXXXXXLGEMSNMVVRSX

SEQ ID NO: 73322 - protein, 36 aa, Artificial Sequence
  GFR-binding peptide
  MOD_RES (3)..(4): Xaa is C or S
  MOD_RES (18)..(19)..(20)..(21)..(22): Xaa is A or G
  MOD_RES (23)..(24)..(25)..(26): Xaa is A or G or is absent
KPXXAPTKLSNITVQIMXXXXXXXXXLGEMSNMVVR

SEQ ID NO: 73323 - protein, 37 aa, Artificial Sequence; identical to SEQ ID NO: 55249
  GFR-binding peptide
  MOD_RES (4)..(5): Xaa is C or S
  MOD_RES (19)..(20)..(21)..(22)..(23): Xaa is A or G
  MOD_RES (24)..(25)..(26)..(27): Xaa is A or G or is absent

SEQ ID NO: 73324 - protein, 43 aa, Artificial Sequence
  GFR-binding peptide
  MOD_RES (6)..(7)..(40)..(42): Xaa is C or S
  MOD_RES (21)..(22)..(23)..(24)..(25): Xaa is A or G
  MOD_RES (26)..(27)..(28)..(29): Xaa is A or G or is absent
ASAAPXXVPQALSNITIQIMXXXXXXXXXLGEMSMIVRSXKXS

SEQ ID NO: 73325 - protein, 31 aa, Artificial Sequence; identical to SEQ ID NO: 55251
  GFR-binding peptide

SEQ ID NO: 73326 - protein, 37 aa, Artificial Sequence; identical to SEQ ID NO: 55254
  GFR-binding peptide
  MOD_RES (1)..(2)..(35)..(37): Xaa is C or S
  MOD_RES (16)..(17)..(18)..(19)..(20): Xaa is A or G
  MOD_RES (21)..(22)..(23)..(24): Xaa is A or G or is absent

SEQ ID NO: 73327 - protein, 38 aa, Artificial Sequence; identical to SEQ ID NO: 55256
  GFR-binding peptide
  MOD_RES (5)..(6): Xaa is C or S
  MOD_RES (20)..(21)..(22)..(23)..(24): Xaa is A or G
  MOD_RES (25)..(26)..(27)..(28): Xaa is A or G or is absent

SEQ ID NO: 73328 - protein, 37 aa, Artificial Sequence; identical to SEQ ID NO: 55258
  GFR-binding peptide
  MOD_RES (3)..(4)..(36): Xaa is C or S

SEQ ID NO: 73329 - protein, 34 aa, Artificial Sequence
  GFR-binding peptide
  MOD_RES (1)..(2)..(33): Xaa is C or S
XXVSQDLSNITIQIMIGKTPKILGEMSMIVKSXK

SEQ ID NO: 73330 - protein, 37 aa, Artificial Sequence
  GFR-binding peptide
  MOD_RES (5)..(6): Xaa is C or S
SAGPXXTPTKMSNITMQIMNDKQQIIIGEMSGMVVDR

SEQ ID NO: 73331 - protein, 37 aa, Artificial Sequence
  GFR-binding peptide
  MOD_RES (1)..(34)..(36): Xaa is C or S
  MOD_RES (15)..(16)..(17)..(18)..(19): Xaa is A or G
  MOD_RES (20)..(21)..(22)..(23): Xaa is A or G or is absent
XVPQALSNITIQIMXXXXXXXXXLGEMSMIVRSXKXS

SEQ ID NO: 73332 - protein, 38 aa, Artificial Sequence
  GFR-binding peptide
  MOD_RES (3)..(4)..(36)..(38): Xaa is C or S
ASXXVPARLSNITIQIMDAANNVVIGEMSDMVVEAXGX

SEQ ID NO: 73333 - protein, 33 aa, Artificial Sequence; identical to SEQ ID NO: 52859
  GFR-binding peptide
  MOD_RES (1)..(2): Xaa is C or S

SEQ ID NO: 73334 - protein, 38 aa, Artificial Sequence
  GFR-binding peptide
  MOD_RES (1)..(2)..(36)..(38): Xaa is C or S
  MOD_RES (16)..(17)..(18)..(19)..(20): Xaa is A or G
  MOD_RES (21)..(22)..(23)..(24): Xaa is A or G or is absent
XXVPTRLSNITIQIMXXXXXXXXXIGEMSDMVVESXGX

SEQ ID NO: 73335 - protein, 32 aa, Artificial Sequence
  GFR-binding peptide
  MOD_RES (32)..(32): Xaa is C or S
VPARLSNITIQIMDAANNVVLGEMSDMVVEAX

SEQ ID NO: 73336 - protein, 36 aa, Artificial Sequence
  GFR-binding peptide
  MOD_RES (3)..(4): Xaa is C or S
  MOD_RES (18)..(19)..(20)..(21)..(22): Xaa is A or G
  MOD_RES (23)..(24)..(25)..(26): Xaa is A or G or is absent
ASXXVPARLSNITIQIMXXXXXXXXXLGEMSDMVVE

SEQ ID NO: 73337 - protein, 38 aa, Artificial Sequence
  GFR-binding peptide
  MOD_RES (6)..(7): Xaa is C or S
AAPASXXVPARLSNITIQIMDAANNVVLGEMSDMVVEA

SEQ ID NO: 73338 - protein, 38 aa, Artificial Sequence; identical to SEQ ID NO: 55265
  GFR-binding peptide
  MOD_RES (3)..(4)..(38): Xaa is C or S
  MOD_RES (18)..(19)..(20)..(21)..(22): Xaa is A or G
  MOD_RES (23)..(24)..(25)..(26): Xaa is A or G or is absent

SEQ ID NO: 73339 - protein, 39 aa, Artificial Sequence
  GFR-binding peptide
  MOD_RES (2)..(3)..(36)..(38): Xaa is C or S
  MOD_RES (17)..(18)..(19)..(20)..(21): Xaa is A or G
  MOD_RES (22)..(23)..(24)..(25): Xaa is A or G or is absent
TXXAPVKTSNITMQIMXXXXXXXXXLGEMSMIVEEXGXL

SEQ ID NO: 73340 - protein, 36 aa, Artificial Sequence
  GFR-binding peptide
  MOD_RES (1)..(34)..(36): Xaa is C or S
  MOD_RES (15)..(16)..(17)..(18)..(19): Xaa is A or G
  MOD_RES (20)..(21)..(22)..(23): Xaa is A or G or is absent
XAPVKTSNITMQIMXXXXXXXXXLGEMSMIVEEXGX

SEQ ID NO: 73341 - protein, 33 aa, Artificial Sequence
  GFR-binding peptide
  MOD_RES (2)..(3): Xaa is C or S
PXXTPTKMSNITMQIMNDKQQIIIGEMSGMVVD

SEQ ID NO: 73342 - protein, 37 aa, Artificial Sequence
  GFR-binding peptide
  MOD_RES (4)..(5)..(36): Xaa is C or S
ASPXXVPQDLSNITIQIMVGRTPKVLGEMSMVVKSXK

SEQ ID NO: 73343 - protein, 37 aa, Artificial Sequence
  GFR-binding peptide
  MOD_RES (34)..(36): Xaa is C or S
  MOD_RES (14)..(15)..(16)..(17)..(18): Xaa is A or G
  MOD_RES (19)..(20)..(21)..(22): Xaa is A or G or is absent
VPTRLSNITIQIMXXXXXXXXXIGEMSDMVVESXGXR

SEQ ID NO: 73344 - protein, 36 aa, Artificial Sequence
  GFR-binding peptide
  MOD_RES (4)..(5): Xaa is C or S
PKPXXAPTKLSNITVQIMDDSSNVILGEMSNMVVRS

SEQ ID NO: 73345 - protein, 43 aa, Artificial Sequence; identical to SEQ ID NO: 19606
  GFR-binding peptide
  MOD_RES (6)..(40)..(42): Xaa is C or S
  MOD_RES (20)..(21)..(22)..(23)..(24): Xaa is A or G
  MOD_RES (25)..(26)..(27)..(28): Xaa is A or G or is absent

SEQ ID NO: 73346 - protein, 33 aa, Artificial Sequence; identical to SEQ ID NO: 52878
  GFR-binding peptide
  MOD_RES (1)..(1): Xaa is C or S
  MOD_RES (15)..(16)..(17)..(18)..(19): Xaa is A or G
  MOD_RES (20)..(21)..(22)..(23): Xaa is A or G or is absent

SEQ ID NO: 73347 - protein, 34 aa, Artificial Sequence
  GFR-binding peptide
  MOD_RES (31)..(33): Xaa is C or S
VPQDLSNITIQIMVGRTPKVLGEMSMVVKSXKXS

SEQ ID NO: 73348 - protein, 40 aa, Artificial Sequence
  GFR-binding peptide
  MOD_RES (6)..(7)..(39): Xaa is C or S
GSAGPXXTPTKMSNITMQIMNDKQQIIIGEMSGMVVDRXG

SEQ ID NO: 73349 - protein, 38 aa, Artificial Sequence
  GFR-binding peptide
  MOD_RES (4)..(5)..(36)..(38): Xaa is C or S
PSTXXAPVKTSNITMQIMDNGRVLLIGEMSMIVEEXGX

SEQ ID NO: 73350 - protein, 40 aa, Artificial Sequence; identical to SEQ ID NO: 19609
  GFR-binding peptide
  MOD_RES (2)..(39): Xaa is C or S
  MOD_RES (18)..(19)..(20)..(21)..(22): Xaa is A or G
  MOD_RES (23)..(24)..(25)..(26): Xaa is A or G or is absent

SEQ ID NO: 73351 - protein, 40 aa, Artificial Sequence
  GFR-binding peptide
  MOD_RES (5)..(6)..(38)..(40): Xaa is C or S
APASXXVPARLSNITIQIMDAANNVVLGEMSDMVVEAXGX

SEQ ID NO: 73352 - protein, 39 aa, Artificial Sequence; identical to SEQ ID NO: 19610
  GFR-binding peptide
  MOD_RES (7)..(7): Xaa is C or S
  MOD_RES (21)..(22)..(23)..(24)..(25): Xaa is A or G
  MOD_RES (26)..(27)..(28)..(29): Xaa is A or G or is absent

SEQ ID NO: 73353 - protein, 35 aa, Artificial Sequence
  GFR-binding peptide
  MOD_RES (3)..(4)..(35): Xaa is C or S
SPXXVSQDLSNITIQIMIGKTPKILGEMSMIVKSX

SEQ ID NO: 73354 - protein, 39 aa, Artificial Sequence
  GFR-binding peptide
  MOD_RES (1)..(2)..(36)..(38): Xaa is C or S
  MOD_RES (16)..(17)..(18)..(19)..(20): Xaa is A or G
  MOD_RES (21)..(22)..(23)..(24): Xaa is A or G or is absent
XXVPARLSNITIQIMXXXXXXXXXIGEMSDMVVEAXGXR

SEQ ID NO: 73355 - protein, 31 aa, Artificial Sequence
  GFR-binding peptide
TPTKMSNITMQIMNDKQQIILGEMSGMVVDR

SEQ ID NO: 73356 - protein, 40 aa, Artificial Sequence; identical to SEQ ID NO: 19611
  GFR-binding peptide
  MOD_RES (37)..(39): Xaa is C or S
  MOD_RES (16)..(17)..(18)..(19)..(20): Xaa is A or G
  MOD_RES (21)..(22)..(23)..(24): Xaa is A or G or is absent

SEQ ID NO: 73357 - protein, 31 aa, Artificial Sequence
  GFR-binding peptide
  MOD_RES (1)..(1): Xaa is C or S
XTPTKMSNITMQIMNDKQQIILGEMSGMVVD

SEQ ID NO: 73358 - protein, 37 aa, Artificial Sequence
  GFR-binding peptide
  MOD_RES (4)..(5)..(37): Xaa is C or S
PASXXVPARLSNITIQIMDAANNVVIGEMSDMVVEAX

SEQ ID NO: 73359 - protein, 38 aa, Artificial Sequence; identical to SEQ ID NO: 19612
  GFR-binding peptide
  MOD_RES (36)..(38): Xaa is C or S

SEQ ID NO: 73360 - protein, 36 aa, Artificial Sequence; identical to SEQ ID NO: 55291
  GFR-binding peptide
  MOD_RES (1)..(34)..(36): Xaa is C or S
  MOD_RES (15)..(16)..(17)..(18)..(19): Xaa is A or G
  MOD_RES (20)..(21)..(22)..(23): Xaa is A or G or is absent

SEQ ID NO: 73361 - protein, 42 aa, Artificial Sequence; identical to SEQ ID NO: 19614
  GFR-binding peptide
  MOD_RES (6)..(40)..(42): Xaa is C or S
  MOD_RES (20)..(21)..(22)..(23)..(24): Xaa is A or G
  MOD_RES (25)..(26)..(27)..(28): Xaa is A or G or is absent

SEQ ID NO: 73362 - protein, 34 aa, Artificial Sequence
  GFR-binding peptide
  MOD_RES (1)..(1): Xaa is C or S
  MOD_RES (15)..(16)..(17)..(18)..(19): Xaa is A or G
  MOD_RES (20)..(21)..(22)..(23): Xaa is A or G or is absent
XVPARLSNITIQIMXXXXXXXXXLGEMSDMVVEA

SEQ ID NO: 73363 - protein, 38 aa, Artificial Sequence; identical to SEQ ID NO: 19616
  GFR-binding peptide
  MOD_RES (36)..(38): Xaa is C or S
  MOD_RES (15)..(16)..(17)..(18)..(19): Xaa is A or G
  MOD_RES (20)..(21)..(22)..(23): Xaa is A or G or is absent

SEQ ID NO: 73364 - protein, 37 aa, Artificial Sequence
  GFR-binding peptide
  MOD_RES (1)..(2)..(34)..(36): Xaa is C or S
XXAPTKLSNITVQIMDDSSNVILGEMSNMVVRSXGXH

SEQ ID NO: 73365 - protein, 33 aa, Artificial Sequence; identical to SEQ ID NO: 52899
  GFR-binding peptide
  MOD_RES (31)..(33): Xaa is C or S

SEQ ID NO: 73366 - protein, 34 aa, Artificial Sequence
  GFR-binding peptide
  MOD_RES (1)..(2): Xaa is C or S
  MOD_RES (16)..(17)..(18)..(19)..(20): Xaa is A or G
  MOD_RES (21)..(22)..(23)..(24): Xaa is A or G or is absent
XXVPQALSNITIQIMXXXXXXXXXLGEMSMIVRS

SEQ ID NO: 73367 - protein, 34 aa, Artificial Sequence
  GFR-binding peptide
  MOD_RES (1)..(33): Xaa is C or S
XVPARLSNITIQIMDAANNVVLGEMSDMVVEAXG

SEQ ID NO: 73368 - protein, 39 aa, Artificial Sequence; identical to SEQ ID NO: 19622
  GFR-binding peptide
  MOD_RES (6)..(6): Xaa is C or S
  MOD_RES (20)..(21)..(22)..(23)..(24): Xaa is A or G
  MOD_RES (25)..(26)..(27)..(28): Xaa is A or G or is absent

SEQ ID NO: 73369 - protein, 35 aa, Artificial Sequence
  GFR-binding peptide
  MOD_RES (33)..(35): Xaa is C or S
  MOD_RES (14)..(15)..(16)..(17)..(18): Xaa is A or G
  MOD_RES (19)..(20)..(21)..(22): Xaa is A or G or is absent
APVKTSNITMQIMXXXXXXXXXLGEMSMIVEEXGX

SEQ ID NO: 73370 - protein, 39 aa, Artificial Sequence
  GFR-binding peptide
  MOD_RES (4)..(5)..(37)..(39): Xaa is C or S
PPTXXVPTRLSNITIQIMDSANNVVLGEMSDMVVESXGX

SEQ ID NO: 73371 - protein, 32 aa, Artificial Sequence; identical to SEQ ID NO: 19624
  GFR-binding peptide
  MOD_RES (14)..(15)..(16)..(17)..(18): Xaa is A or G
  MOD_RES (19)..(20)..(21)..(22): Xaa is A or G or is absent

SEQ ID NO: 73372 - protein, 34 aa, Artificial Sequence
  GFR-binding peptide
  MOD_RES (31)..(33): Xaa is C or S
VSQDLSNITIQIMIGKTPKILGEMSMIVKSXKXS

SEQ ID NO: 73373 - protein, 33 aa, Artificial Sequence
  GFR-binding peptide
  MOD_RES (1)..(2): Xaa is C or S
XXTPTKMSNITMQIMNDKQQIIIGEMSGMVVDR

SEQ ID NO: 73374 - protein, 36 aa, Artificial Sequence
  GFR-binding peptide
  MOD_RES (33)..(35): Xaa is C or S
  MOD_RES (14)..(15)..(16)..(17)..(18): Xaa is A or G
  MOD_RES (19)..(20)..(21)..(22): Xaa is A or G or is absent
APVKTSNITMQIMXXXXXXXXXIGEMSMIVEEXGXL

SEQ ID NO: 73375 - protein, 32 aa, Artificial Sequence
  GFR-binding peptide
  MOD_RES (14)..(15)..(16)..(17)..(18): Xaa is A or G
  MOD_RES (19)..(20)..(21)..(22): Xaa is A or G or is absent
APTKLSNITVQIMXXXXXXXXXLGEMSNMVVR

SEQ ID NO: 73376 - protein, 36 aa, Artificial Sequence; identical to SEQ ID NO: 19627
  GFR-binding peptide

SEQ ID NO: 73377 - protein, 31 aa, Artificial Sequence
  GFR-binding peptide
  MOD_RES (31)..(31): Xaa is C or S
VPQALSNITIQIMVGRKPKVLGEMSMIVRSX

SEQ ID NO: 73378 - protein, 39 aa, Artificial Sequence
  GFR-binding peptide
  MOD_RES (4)..(5)..(36)..(38): Xaa is C or S
AAPXXVPQALSNITIQIMVGRKPKVLGEMSMIVRSXKXS

SEQ ID NO: 73379 - protein, 36 aa, Artificial Sequence
  GFR-binding peptide
  MOD_RES (1)..(35): Xaa is C or S
  MOD_RES (15)..(16)..(17)..(18)..(19): Xaa is A or G
  MOD_RES (20)..(21)..(22)..(23): Xaa is A or G or is absent
XTPTKMSNITMQIMXXXXXXXXXLGEMSGMVVDRXG

SEQ ID NO: 73380 - protein, 43 aa, Artificial Sequence; identical to SEQ ID NO: 19630
  GFR-binding peptide
  MOD_RES (5)..(42): Xaa is C or S
  MOD_RES (21)..(22)..(23)..(24)..(25): Xaa is A or G
  MOD_RES (26)..(27)..(28)..(29): Xaa is A or G or is absent

SEQ ID NO: 73381 - protein, 44 aa, Artificial Sequence; identical to SEQ ID NO: 19632
  GFR-binding peptide
  MOD_RES (4)..(41)..(43): Xaa is C or S

SEQ ID NO: 73382 - protein, 37 aa, Artificial Sequence; identical to SEQ ID NO: 19634
  GFR-binding peptide
  MOD_RES (3)..(37): Xaa is C or S
  MOD_RES (17)..(18)..(19)..(20)..(21): Xaa is A or G
  MOD_RES (22)..(23)..(24)..(25): Xaa is A or G or is absent

SEQ ID NO: 73383 - protein, 35 aa, Artificial Sequence; identical to SEQ ID NO: 55328
  GFR-binding peptide
  MOD_RES (2)..(3)..(34): Xaa is C or S

SEQ ID NO: 73384 - protein, 39 aa, Artificial Sequence
  GFR-binding peptide
  MOD_RES (5)..(6)..(37)..(39): Xaa is C or S
SASPXXVSQDLSNITIQIMIGKTPKILGEMSMIVKSXKX

SEQ ID NO: 73385 - protein, 39 aa, Artificial Sequence
  GFR-binding peptide
  MOD_RES (6)..(7): Xaa is C or S
  MOD_RES (21)..(22)..(23)..(24)..(25): Xaa is A or G
  MOD_RES (26)..(27)..(28)..(29): Xaa is A or G or is absent
STPPTXXVPTRLSNITIQIMXXXXXXXXXIGEMSDMVVE

SEQ ID NO: 73386 - protein, 36 aa, Artificial Sequence
  GFR-binding peptide
  MOD_RES (1)..(35): Xaa is C or S
  MOD_RES (15)..(16)..(17)..(18)..(19): Xaa is A or G
  MOD_RES (20)..(21)..(22)..(23): Xaa is A or G or is absent
XAPTKLSNITVQIMXXXXXXXXXLGEMSNMVVRSXG

SEQ ID NO: 73387 - protein, 39 aa, Artificial Sequence
  GFR-binding peptide
  MOD_RES (2)..(3)..(37)..(39): Xaa is C or S
  MOD_RES (17)..(18)..(19)..(20)..(21): Xaa is A or G
  MOD_RES (22)..(23)..(24)..(25): Xaa is A or G or is absent
PXXAPTKLSNITVQIMXXXXXXXXXLGEMSNMVVRSXGX

SEQ ID NO: 73388 - protein, 38 aa, Artificial Sequence; identical to SEQ ID NO: 55332
  GFR-binding peptide
  MOD_RES (3)..(4)..(37): Xaa is C or S
  MOD_RES (18)..(19)..(20)..(21)..(22): Xaa is A or G
  MOD_RES (23)..(24)..(25)..(26): Xaa is A or G or is absent

SEQ ID NO: 73389 - protein, 36 aa, Artificial Sequence; identical to SEQ ID NO: 19638
  GFR-binding peptide
  MOD_RES (2)..(2): Xaa is C or S
  MOD_RES (18)..(19)..(20)..(21)..(22): Xaa is A or G
  MOD_RES (23)..(24)..(25)..(26): Xaa is A or G or is absent

SEQ ID NO: 73390 - protein, 41 aa, Artificial Sequence; identical to SEQ ID NO: 19639
  GFR-binding peptide
  MOD_RES (1)..(38)..(40): Xaa is C or S

SEQ ID NO: 73391 - protein, 39 aa, Artificial Sequence
  GFR-binding peptide
  MOD_RES (4)..(5)..(39): Xaa is C or S
  MOD_RES (19)..(20)..(21)..(22)..(23): Xaa is A or G
  MOD_RES (24)..(25)..(26)..(27): Xaa is A or G or is absent
PASXXVPARLSNITIQIMXXXXXXXXXLGEMSDMVVEAX

SEQ ID NO: 73392 - protein, 39 aa, Artificial Sequence
  GFR-binding peptide
  MOD_RES (3)..(4)..(38): Xaa is C or S
  MOD_RES (18)..(19)..(20)..(21)..(22): Xaa is A or G
  MOD_RES (23)..(24)..(25)..(26): Xaa is A or G or is absent
ASXXVPARLSNITIQIMXXXXXXXXXIGEMSDMVVEAXG

SEQ ID NO: 73393 - protein, 42 aa, Artificial Sequence; identical to SEQ ID NO: 55336
  GFR-binding peptide
  MOD_RES (6)..(7)..(40)..(42): Xaa is C or S
  MOD_RES (21)..(22)..(23)..(24)..(25): Xaa is A or G
  MOD_RES (26)..(27)..(28)..(29): Xaa is A or G or is absent

SEQ ID NO: 73394 - protein, 38 aa, Artificial Sequence
  GFR-binding peptide
  MOD_RES (5)..(6): Xaa is C or S
  MOD_RES (20)..(21)..(22)..(23)..(24): Xaa is A or G
  MOD_RES (25)..(26)..(27)..(28): Xaa is A or G or is absent
SASPXXVSQDLSNITIQIMXXXXXXXXXLGEMSMIVKS

SEQ ID NO: 73395 - protein, 34 aa, Artificial Sequence; identical to SEQ ID NO: 55338
  GFR-binding peptide
  MOD_RES (1)..(2): Xaa is C or S
  MOD_RES (16)..(17)..(18)..(19)..(20): Xaa is A or G
  MOD_RES (21)..(22)..(23)..(24): Xaa is A or G or is absent

SEQ ID NO: 73396 - protein, 40 aa, Artificial Sequence
  GFR-binding peptide
  MOD_RES (4)..(5)..(39): Xaa is C or S
  MOD_RES (19)..(20)..(21)..(22)..(23): Xaa is A or G
  MOD_RES (24)..(25)..(26)..(27): Xaa is A or G or is absent
PKPXXAPTKLSNITVQIMXXXXXXXXXLGEMSNMVVRSXG

SEQ ID NO: 73397 - protein, 44 aa, Artificial Sequence
  GFR-binding peptide
  MOD_RES (6)..(7)..(41)..(43): Xaa is C or S
  MOD_RES (21)..(22)..(23)..(24)..(25): Xaa is A or G
  MOD_RES (26)..(27)..(28)..(29): Xaa is A or G or is absent
STPPTXXVPTRLSNITIQIMXXXXXXXXXIGEMSDMVVESXGXR

SEQ ID NO: 73398 - protein, 38 aa, Artificial Sequence; identical to SEQ ID NO: 19644
  GFR-binding peptide
  MOD_RES (1)..(35)..(37): Xaa is C or S
  MOD_RES (15)..(16)..(17)..(18)..(19): Xaa is A or G
  MOD_RES (20)..(21)..(22)..(23): Xaa is A or G or is absent

SEQ ID NO: 73399 - protein, 36 aa, Artificial Sequence
  GFR-binding peptide
  MOD_RES (5)..(6): Xaa is C or S
SAAPXXVPQALSNITIQIMVGRKPKVLGEMSMIVRS

SEQ ID NO: 73400 - protein, 38 aa, Artificial Sequence
  GFR-binding peptide
  MOD_RES (4)..(5): Xaa is C or S
  MOD_RES (19)..(20)..(21)..(22)..(23): Xaa is A or G
  MOD_RES (24)..(25)..(26)..(27): Xaa is A or G or is absent
AGPXXTPTKMSNITMQIMXXXXXXXXXLGEMSGMVVDR

SEQ ID NO: 73401 - protein, 38 aa, Artificial Sequence; identical to SEQ ID NO: 55343
  GFR-binding peptide
  MOD_RES (5)..(6): Xaa is C or S
  MOD_RES (20)..(21)..(22)..(23)..(24): Xaa is A or G
  MOD_RES (25)..(26)..(27)..(28): Xaa is A or G or is absent

SEQ ID NO: 73402 - protein, 37 aa, Artificial Sequence
  GFR-binding peptide
  MOD_RES (5)..(6)..(37): Xaa is C or S
VPSTXXAPVKTSNITMQIMDNGRVLLLGEMSMIVEEX

SEQ ID NO: 73403 - protein, 35 aa, Artificial Sequence
  GFR-binding peptide
  MOD_RES (3)..(4)..(35): Xaa is C or S
APXXVPQALSNITIQIMVGRKPKVLGEMSMIVRSX

SEQ ID NO: 73404 - protein, 30 aa, Artificial Sequence
  GFR-binding peptide
VPARLSNITIQIMDAANNVVIGEMSDMVVE

SEQ ID NO: 73405 - protein, 33 aa, Artificial Sequence
  GFR-binding peptide
  MOD_RES (1)..(2)..(33): Xaa is C or S
XXAPVKTSNITMQIMDNGRVLLIGEMSMIVEEX

SEQ ID NO: 73406 - protein, 44 aa, Artificial Sequence; identical to SEQ ID NO: 19646
  GFR-binding peptide
  MOD_RES (4)..(41)..(43): Xaa is C or S
  MOD_RES (20)..(21)..(22)..(23)..(24): Xaa is A or G
  MOD_RES (25)..(26)..(27)..(28): Xaa is A or G or is absent

SEQ ID NO: 73407 - protein, 34 aa, Artificial Sequence
  GFR-binding peptide
  MOD_RES (3)..(4): Xaa is C or S
STXXAPVKTSNITMQIMDNGRVLLIGEMSMIVEE

SEQ ID NO: 73408 - protein, 37 aa, Artificial Sequence; identical to SEQ ID NO: 19648
  GFR-binding peptide
  MOD_RES (35)..(37): Xaa is C or S

SEQ ID NO: 73409 - protein, 38 aa, Artificial Sequence
  GFR-binding peptide
  MOD_RES (3)..(4)..(35)..(37): Xaa is C or S
STXXAPVKTSNITMQIMDNGRVLLLGEMSMIVEEXGXL

SEQ ID NO: 73410 - protein, 40 aa, Artificial Sequence; identical to SEQ ID NO: 19649
  GFR-binding peptide
  MOD_RES (3)..(37)..(39): Xaa is C or S
  MOD_RES (17)..(18)..(19)..(20)..(21): Xaa is A or G
  MOD_RES (22)..(23)..(24)..(25): Xaa is A or G or is absent

SEQ ID NO: 73411 - protein, 39 aa, Artificial Sequence
  GFR-binding peptide
  MOD_RES (6)..(7): Xaa is C or S
  MOD_RES (21)..(22)..(23)..(24)..(25): Xaa is A or G
  MOD_RES (26)..(27)..(28)..(29): Xaa is A or G or is absent
HVPKPXXAPTKLSNITVQIMXXXXXXXXXIGEMSNMVVR

SEQ ID NO: 73412 - protein, 44 aa, Artificial Sequence; identical to SEQ ID NO: 19651
  GFR-binding peptide
  MOD_RES (7)..(41)..(43): Xaa is C or S
  MOD_RES (21)..(22)..(23)..(24)..(25): Xaa is A or G
  MOD_RES (26)..(27)..(28)..(29): Xaa is A or G or is absent

SEQ ID NO: 73413 - protein, 41 aa, Artificial Sequence
  GFR-binding peptide
  MOD_RES (5)..(6)..(38)..(40): Xaa is C or S
TPPTXXVPTRLSNITIQIMDSANNVVIGEMSDMVVESXGXR

SEQ ID NO: 73414 - protein, 40 aa, Artificial Sequence; identical to SEQ ID NO: 19653
  GFR-binding peptide
  MOD_RES (7)..(7): Xaa is C or S

SEQ ID NO: 73415 - protein, 41 aa, Artificial Sequence
  GFR-binding peptide
  MOD_RES (3)..(4)..(38)..(40): Xaa is C or S
  MOD_RES (18)..(19)..(20)..(21)..(22): Xaa is A or G
  MOD_RES (23)..(24)..(25)..(26): Xaa is A or G or is absent
GPXXTPTKMSNITMQIMXXXXXXXXXIGEMSGMVVDRXGXS

SEQ ID NO: 73416 - protein, 40 aa, Artificial Sequence
  GFR-binding peptide
  MOD_RES (2)..(3)..(37)..(39): Xaa is C or S
  MOD_RES (17)..(18)..(19)..(20)..(21): Xaa is A or G
  MOD_RES (22)..(23)..(24)..(25): Xaa is A or G or is absent
SXXVPARLSNITIQIMXXXXXXXXXLGEMSDMVVEAXGXR

SEQ ID NO: 73417 - protein, 40 aa, Artificial Sequence; identical to SEQ ID NO: 19655
  GFR-binding peptide
  MOD_RES (5)..(39): Xaa is C or S

SEQ ID NO: 73418 - protein, 41 aa, Artificial Sequence; identical to SEQ ID NO: 19657
  GFR-binding peptide
  MOD_RES (4)..(41): Xaa is C or S

SEQ ID NO: 73419 - protein, 33 aa, Artificial Sequence
  GFR-binding peptide
  MOD_RES (1)..(1): Xaa is C or S
  MOD_RES (15)..(16)..(17)..(18)..(19): Xaa is A or G
  MOD_RES (20)..(21)..(22)..(23): Xaa is A or G or is absent
XTPTKMSNITMQIMXXXXXXXXXIGEMSGMVVD

SEQ ID NO: 73420 - protein, 43 aa, Artificial Sequence; identical to SEQ ID NO: 19658
  GFR-binding peptide
  MOD_RES (4)..(41)..(43): Xaa is C or S
  MOD_RES (20)..(21)..(22)..(23)..(24): Xaa is A or G
  MOD_RES (25)..(26)..(27)..(28): Xaa is A or G or is absent

SEQ ID NO: 73421 - protein, 41 aa, Artificial Sequence; identical to SEQ ID NO: 19659
  GFR-binding peptide
  MOD_RES (4)..(41): Xaa is C or S
  MOD_RES (20)..(21)..(22)..(23)..(24): Xaa is A or G
  MOD_RES (25)..(26)..(27)..(28): Xaa is A or G or is absent

SEQ ID NO: 73422 - protein, 39 aa, Artificial Sequence
  GFR-binding peptide
  MOD_RES (5)..(6): Xaa is C or S
  MOD_RES (20)..(21)..(22)..(23)..(24): Xaa is A or G
  MOD_RES (25)..(26)..(27)..(28): Xaa is A or G or is absent
SAGPXXTPTKMSNITMQIMXXXXXXXXXIGEMSGMVVDR

SEQ ID NO: 73423 - protein, 40 aa, Artificial Sequence
  GFR-binding peptide
  MOD_RES (4)..(5)..(37)..(39): Xaa is C or S
AGPXXTPTKMSNITMQIMNDKQQIILGEMSGMVVDRXGXS

SEQ ID NO: 73424 - protein, 37 aa, Artificial Sequence
  GFR-binding peptide
  MOD_RES (4)..(5): Xaa is C or S
  MOD_RES (19)..(20)..(21)..(22)..(23): Xaa is A or G
  MOD_RES (24)..(25)..(26)..(27): Xaa is A or G or is absent
AAPXXVPQALSNITIQIMXXXXXXXXXLGEMSMIVRS

SEQ ID NO: 73425 - protein, 38 aa, Artificial Sequence
  GFR-binding peptide
  MOD_RES (3)..(4)..(35)..(37): Xaa is C or S
STXXAPVKTSNITMQIMDNGRVLLIGEMSMIVEEXGXL

SEQ ID NO: 73426 - protein, 36 aa, Artificial Sequence
  GFR-binding peptide
  MOD_RES (1)..(2)..(33)..(35): Xaa is C or S
XXAPVKTSNITMQIMDNGRVLLIGEMSMIVEEXGXL

SEQ ID NO: 73427 - protein, 39 aa, Artificial Sequence
  GFR-binding peptide
  MOD_RES (1)..(2)..(36)..(38): Xaa is C or S
  MOD_RES (16)..(17)..(18)..(19)..(20): Xaa is A or G
  MOD_RES (21)..(22)..(23)..(24): Xaa is A or G or is absent
XXTPTKMSNITMQIMXXXXXXXXXLGEMSGMVVDRXGXS

SEQ ID NO: 73428 - protein, 37 aa, Artificial Sequence
  GFR-binding peptide
  MOD_RES (3)..(4)..(35)..(37): Xaa is C or S
APXXVPQALSNITIQIMVGRKPKVLGEMSMIVRSXKX

SEQ ID NO: 73429 - protein, 36 aa, Artificial Sequence; identical to SEQ ID NO: 52966
  GFR-binding peptide
  MOD_RES (2)..(3): Xaa is C or S
  MOD_RES (17)..(18)..(19)..(20)..(21): Xaa is A or G
  MOD_RES (22)..(23)..(24)..(25): Xaa is A or G or is absent

SEQ ID NO: 73430 - protein, 41 aa, Artificial Sequence
  GFR-binding peptide
  MOD_RES (3)..(4)..(38)..(40): Xaa is C or S
  MOD_RES (18)..(19)..(20)..(21)..(22): Xaa is A or G
  MOD_RES (23)..(24)..(25)..(26): Xaa is A or G or is absent
ASXXVPARLSNITIQIMXXXXXXXXXLGEMSDMVVEAXGXR

SEQ ID NO: 73431 - protein, 33 aa, Artificial Sequence; identical to SEQ ID NO: 19662
  GFR-binding peptide
  MOD_RES (15)..(16)..(17)..(18)..(19): Xaa is A or G
  MOD_RES (20)..(21)..(22)..(23): Xaa is A or G or is absent

SEQ ID NO: 73432 - protein, 32 aa, Artificial Sequence
  GFR-binding peptide
  MOD_RES (1)..(1): Xaa is C or S
XVPARLSNITIQIMDAANNVVLGEMSDMVVEA

SEQ ID NO: 73433 - protein, 37 aa, Artificial Sequence; identical to SEQ ID NO: 55379
  GFR-binding peptide
  MOD_RES (34)..(36): Xaa is C or S
  MOD_RES (14)..(15)..(16)..(17)..(18): Xaa is A or G
  MOD_RES (19)..(20)..(21)..(22): Xaa is A or G or is absent

SEQ ID NO: 73434 - protein, 38 aa, Artificial Sequence; identical to SEQ ID NO: 55381
  GFR-binding peptide
  MOD_RES (6)..(7)..(38): Xaa is C or S

SEQ ID NO: 73435 - protein, 36 aa, Artificial Sequence
  GFR-binding peptide
  MOD_RES (1)..(2)..(33)..(35): Xaa is C or S
XXVSQDLSNITIQIMIGKTPKILGEMSMIVKSXKXS

SEQ ID NO: 73436 - protein, 34 aa, Artificial Sequence
  GFR-binding peptide
  MOD_RES (1)..(2)..(34): Xaa is C or S
XXVPTRLSNITIQIMDSANNVVLGEMSDMVVESX

SEQ ID NO: 73437 - protein, 36 aa, Artificial Sequence; identical to SEQ ID NO: 19664
  GFR-binding peptide
  MOD_RES (36)..(36): Xaa is C or S

SEQ ID NO: 73438 - protein, 40 aa, Artificial Sequence
  GFR-binding peptide
  MOD_RES (5)..(6)..(40): Xaa is C or S
  MOD_RES (20)..(21)..(22)..(23)..(24): Xaa is A or G
  MOD_RES (25)..(26)..(27)..(28): Xaa is A or G or is absent
SAGPXXTPTKMSNITMQIMXXXXXXXXXIGEMSGMVVDRX

SEQ ID NO: 73439 - protein, 40 aa, Artificial Sequence; identical to SEQ ID NO: 19665
  GFR-binding peptide
  MOD_RES (6)..(40): Xaa is C or S
  MOD_RES (20)..(21)..(22)..(23)..(24): Xaa is A or G
  MOD_RES (25)..(26)..(27)..(28): Xaa is A or G or is absent

SEQ ID NO: 73440 - protein, 42 aa, Artificial Sequence; identical to SEQ ID NO: 19666
  GFR-binding peptide
  MOD_RES (7)..(41): Xaa is C or S

SEQ ID NO: 73441 - protein, 34 aa, Artificial Sequence; identical to SEQ ID NO: 52982
  GFR-binding peptide
  MOD_RES (1)..(34): Xaa is C or S
  MOD_RES (15)..(16)..(17)..(18)..(19): Xaa is A or G
  MOD_RES (20)..(21)..(22)..(23): Xaa is A or G or is absent

SEQ ID NO: 73442 - protein, 39 aa, Artificial Sequence; identical to SEQ ID NO: 19668
  GFR-binding peptide
  MOD_RES (37)..(39): Xaa is C or S
  MOD_RES (16)..(17)..(18)..(19)..(20): Xaa is A or G
  MOD_RES (21)..(22)..(23)..(24): Xaa is A or G or is absent

SEQ ID NO: 73443 - protein, 38 aa, Artificial Sequence; identical to SEQ ID NO: 19669
  GFR-binding peptide
  MOD_RES (36)..(38): Xaa is C or S

SEQ ID NO: 73444 - protein, 40 aa, Artificial Sequence; identical to SEQ ID NO: 19672
  GFR-binding peptide
  MOD_RES (1)..(38)..(40): Xaa is C or S
  MOD_RES (17)..(18)..(19)..(20)..(21): Xaa is A or G
  MOD_RES (22)..(23)..(24)..(25): Xaa is A or G or is absent

SEQ ID NO: 73445 - protein, 39 aa, Artificial Sequence
  GFR-binding peptide
  MOD_RES (6)..(7): Xaa is C or S
  MOD_RES (21)..(22)..(23)..(24)..(25): Xaa is A or G
  MOD_RES (26)..(27)..(28)..(29): Xaa is A or G or is absent
GSAGPXXTPTKMSNITMQIMXXXXXXXXXLGEMSGMVVD

SEQ ID NO: 73446 - protein, 36 aa, Artificial Sequence
  GFR-binding peptide
  MOD_RES (5)..(6): Xaa is C or S
SAGPXXTPTKMSNITMQIMNDKQQIILGEMSGMVVD

SEQ ID NO: 73447 - protein, 34 aa, Artificial Sequence
  GFR-binding peptide
  MOD_RES (2)..(3)..(34): Xaa is C or S
PXXVPQDLSNITIQIMVGRTPKVLGEMSMVVKSX

SEQ ID NO: 73448 - protein, 39 aa, Artificial Sequence; identical to SEQ ID NO: 52991
  GFR-binding peptide
  MOD_RES (6)..(7): Xaa is C or S
  MOD_RES (21)..(22)..(23)..(24)..(25): Xaa is A or G
  MOD_RES (26)..(27)..(28)..(29): Xaa is A or G or is absent

SEQ ID NO: 73449 - protein, 40 aa, Artificial Sequence; identical to SEQ ID NO: 19676
  GFR-binding peptide
  MOD_RES (4)..(38)..(40): Xaa is C or S

SEQ ID NO: 73450 - protein, 33 aa, Artificial Sequence; identical to SEQ ID NO: 19677
  GFR-binding peptide
  MOD_RES (14)..(15)..(16)..(17)..(18): Xaa is A or G
  MOD_RES (19)..(20)..(21)..(22): Xaa is A or G or is absent

SEQ ID NO: 73451 - protein, 43 aa, Artificial Sequence; identical to SEQ ID NO: 19678
  GFR-binding peptide
  MOD_RES (6)..(40)..(42): Xaa is C or S

SEQ ID NO: 73452 - protein, 30 aa, Artificial Sequence; identical to SEQ ID NO: 55395
  GFR-binding peptide

SEQ ID NO: 73453 - protein, 41 aa, Artificial Sequence
  GFR-binding peptide
  MOD_RES (6)..(7)..(40): Xaa is C or S
  MOD_RES (21)..(22)..(23)..(24)..(25): Xaa is A or G
  MOD_RES (26)..(27)..(28)..(29): Xaa is A or G or is absent
ASASPXXVSQDLSNITIQIMXXXXXXXXXLGEMSMIVKSXK

SEQ ID NO: 73454 - protein, 34 aa, Artificial Sequence; identical to SEQ ID NO: 53000
  GFR-binding peptide
  MOD_RES (1)..(2)..(33): Xaa is C or S

SEQ ID NO: 73455 - protein, 40 aa, Artificial Sequence
  GFR-binding peptide
  MOD_RES (5)..(6)..(40): Xaa is C or S
  MOD_RES (20)..(21)..(22)..(23)..(24): Xaa is A or G
  MOD_RES (25)..(26)..(27)..(28): Xaa is A or G or is absent
TPPTXXVPTRLSNITIQIMXXXXXXXXXLGEMSDMVVESX

SEQ ID NO: 73456 - protein, 35 aa, Artificial Sequence; identical to SEQ ID NO: 55401
  GFR-binding peptide
  MOD_RES (1)..(2)..(35): Xaa is C or S
  MOD_RES (16)..(17)..(18)..(19)..(20): Xaa is A or G
  MOD_RES (21)..(22)..(23)..(24): Xaa is A or G or is absent

SEQ ID NO: 73457 - protein, 37 aa, Artificial Sequence
  GFR-binding peptide
  MOD_RES (5)..(6): Xaa is C or S
APASXXVPARLSNITIQIMDAANNVVIGEMSDMVVEA

SEQ ID NO: 73458 - protein, 39 aa, Artificial Sequence
  GFR-binding peptide
  MOD_RES (6)..(7): Xaa is C or S
  MOD_RES (21)..(22)..(23)..(24)..(25): Xaa is A or G
  MOD_RES (26)..(27)..(28)..(29): Xaa is A or G or is absent
RVPSTXXAPVKTSNITMQIMXXXXXXXXXIGEMSMIVEE

SEQ ID NO: 73459 - protein, 32 aa, Artificial Sequence; identical to SEQ ID NO: 55407
  GFR-binding peptide
  MOD_RES (31)..(31): Xaa is C or S

SEQ ID NO: 73460 - protein, 35 aa, Artificial Sequence; identical to SEQ ID NO: 53005
  GFR-binding peptide
  MOD_RES (1)..(2)..(35): Xaa is C or S
  MOD_RES (16)..(17)..(18)..(19)..(20): Xaa is A or G
  MOD_RES (21)..(22)..(23)..(24): Xaa is A or G or is absent

SEQ ID NO: 73461 - protein, 40 aa, Artificial Sequence; identical to SEQ ID NO: 19680
  GFR-binding peptide
  MOD_RES (7)..(7): Xaa is C or S
  MOD_RES (21)..(22)..(23)..(24)..(25): Xaa is A or G
  MOD_RES (26)..(27)..(28)..(29): Xaa is A or G or is absent

SEQ ID NO: 73462 - protein, 40 aa, Artificial Sequence; identical to SEQ ID NO: 55410
  GFR-binding peptide
  MOD_RES (5)..(6)..(39): Xaa is C or S
  MOD_RES (20)..(21)..(22)..(23)..(24): Xaa is A or G
  MOD_RES (25)..(26)..(27)..(28): Xaa is A or G or is absent

SEQ ID NO: 73463 - protein, 37 aa, Artificial Sequence; identical to SEQ ID NO: 19681
  GFR-binding peptide
  MOD_RES (2)..(36): Xaa is C or S
  MOD_RES (16)..(17)..(18)..(19)..(20): Xaa is A or G
  MOD_RES (21)..(22)..(23)..(24): Xaa is A or G or is absent

SEQ ID NO: 73464 - protein, 43 aa, Artificial Sequence
  GFR-binding peptide
  MOD_RES (5)..(6)..(40)..(42): Xaa is C or S
  MOD_RES (20)..(21)..(22)..(23)..(24): Xaa is A or G
  MOD_RES (25)..(26)..(27)..(28): Xaa is A or G or is absent
TPPTXXVPTRLSNITIQIMXXXXXXXXXIGEMSDMVVESXGXR

SEQ ID NO: 73465 - protein, 40 aa, Artificial Sequence; identical to SEQ ID NO: 53010
  GFR-binding peptide
  MOD_RES (5)..(6)..(38)..(40): Xaa is C or S

SEQ ID NO: 73466 - protein, 41 aa, Artificial Sequence; identical to SEQ ID NO: 19682
  GFR-binding peptide
  MOD_RES (7)..(41): Xaa is C or S
  MOD_RES (21)..(22)..(23)..(24)..(25): Xaa is A or G
  MOD_RES (26)..(27)..(28)..(29): Xaa is A or G or is absent

SEQ ID NO: 73467 - protein, 38 aa, Artificial Sequence; identical to SEQ ID NO: 53015
  GFR-binding peptide
  MOD_RES (1)..(35)..(37): Xaa is C or S
  MOD_RES (15)..(16)..(17)..(18)..(19): Xaa is A or G
  MOD_RES (20)..(21)..(22)..(23): Xaa is A or G or is absent

SEQ ID NO: 73468 - protein, 36 aa, Artificial Sequence; identical to SEQ ID NO: 55416
  GFR-binding peptide
  MOD_RES (5)..(6): Xaa is C or S

SEQ ID NO: 73469 - protein, 38 aa, Artificial Sequence; identical to SEQ ID NO: 19683
  GFR-binding peptide
  MOD_RES (4)..(4): Xaa is C or S

SEQ ID NO: 73470 - protein, 40 aa, Artificial Sequence
  GFR-binding peptide
  MOD_RES (5)..(6)..(40): Xaa is C or S
  MOD_RES (20)..(21)..(22)..(23)..(24): Xaa is A or G
  MOD_RES (25)..(26)..(27)..(28): Xaa is A or G or is absent
VPKPXXAPTKLSNITVQIMXXXXXXXXXLGEMSNMVVRSX

SEQ ID NO: 73471 - protein, 40 aa, Artificial Sequence
  GFR-binding peptide
  MOD_RES (4)..(5)..(37)..(39): Xaa is C or S
PPTXXVPTRLSNITIQIMDSANNVVIGEMSDMVVESXGXR

SEQ ID NO: 73472 - protein, 38 aa, Artificial Sequence
  GFR-binding peptide
  MOD_RES (3)..(4)..(36)..(38): Xaa is C or S
ASXXVPARLSNITIQIMDAANNVVLGEMSDMVVEAXGX

SEQ ID NO: 73473 - protein, 37 aa, Artificial Sequence; identical to SEQ ID NO: 53019
  GFR-binding peptide
  MOD_RES (1)..(34)..(36): Xaa is C or S
  MOD_RES (15)..(16)..(17)..(18)..(19): Xaa is A or G
  MOD_RES (20)..(21)..(22)..(23): Xaa is A or G or is absent

SEQ ID NO: 73474 - protein, 36 aa, Artificial Sequence; identical to SEQ ID NO: 19686
  GFR-binding peptide
  MOD_RES (1)..(35): Xaa is C or S
  MOD_RES (15)..(16)..(17)..(18)..(19): Xaa is A or G
  MOD_RES (20)..(21)..(22)..(23): Xaa is A or G or is absent

SEQ ID NO: 73475 - protein, 35 aa, Artificial Sequence; identical to SEQ ID NO: 19687
  GFR-binding peptide
  MOD_RES (35)..(35): Xaa is C or S

SEQ ID NO: 73476 - protein, 37 aa, Artificial Sequence
  GFR-binding peptide
  MOD_RES (3)..(4)..(37): Xaa is C or S
  MOD_RES (18)..(19)..(20)..(21)..(22): Xaa is A or G
  MOD_RES (23)..(24)..(25)..(26): Xaa is A or G or is absent
STXXAPVKTSNITMQIMXXXXXXXXXLGEMSMIVEEX

SEQ ID NO: 73477 - protein, 41 aa, Artificial Sequence; identical to SEQ ID NO: 19688
  GFR-binding peptide
  MOD_RES (5)..(39)..(41): Xaa is C or S

SEQ ID NO: 73478 - protein, 38 aa, Artificial Sequence; identical to SEQ ID NO: 19689
  GFR-binding peptide
  MOD_RES (35)..(37): Xaa is C or S
  MOD_RES (14)..(15)..(16)..(17)..(18): Xaa is A or G
  MOD_RES (19)..(20)..(21)..(22): Xaa is A or G or is absent

SEQ ID NO: 73479 - protein, 37 aa, Artificial Sequence; identical to SEQ ID NO: 55426
  GFR-binding peptide
  MOD_RES (5)..(6)..(37): Xaa is C or S

SEQ ID NO: 73480 - protein, 37 aa, Artificial Sequence
  GFR-binding peptide
  MOD_RES (3)..(4): Xaa is C or S
  MOD_RES (18)..(19)..(20)..(21)..(22): Xaa is A or G
  MOD_RES (23)..(24)..(25)..(26): Xaa is A or G or is absent
ASXXVPARLSNITIQIMXXXXXXXXXLGEMSDMVVEA

SEQ ID NO: 73481 - protein, 35 aa, Artificial Sequence
  GFR-binding peptide
  MOD_RES (32)..(34): Xaa is C or S
APTKLSNITVQIMDDSSNVILGEMSNMVVRSXGXH

SEQ ID NO: 73482 - protein, 39 aa, Artificial Sequence; identical to SEQ ID NO: 19690
  GFR-binding peptide
  MOD_RES (5)..(5): Xaa is C or S

SEQ ID NO: 73483 - protein, 40 aa, Artificial Sequence; identical to SEQ ID NO: 19691
  GFR-binding peptide
  MOD_RES (2)..(39): Xaa is C or S

SEQ ID NO: 73484 - protein, 38 aa, Artificial Sequence; identical to SEQ ID NO: 19692
  GFR-binding peptide
  MOD_RES (37)..(37): Xaa is C or S

SEQ ID NO: 73485 - protein, 35 aa, Artificial Sequence
  GFR-binding peptide
  MOD_RES (2)..(3)..(35): Xaa is C or S
PXXTPTKMSNITMQIMNDKQQIIIGEMSGMVVDRX

SEQ ID NO: 73486 - protein, 38 aa, Artificial Sequence; identical to SEQ ID NO: 19693
  GFR-binding peptide
  MOD_RES (2)..(36)..(38): Xaa is C or S
  MOD_RES (16)..(17)..(18)..(19)..(20): Xaa is A or G
  MOD_RES (21)..(22)..(23)..(24): Xaa is A or G or is absent

SEQ ID NO: 73487 - protein, 35 aa, Artificial Sequence; identical to SEQ ID NO: 19695
  GFR-binding peptide
  MOD_RES (1)..(35): Xaa is C or S
  MOD_RES (15)..(16)..(17)..(18)..(19): Xaa is A or G
  MOD_RES (20)..(21)..(22)..(23): Xaa is A or G or is absent

SEQ ID NO: 73488 - protein, 38 aa, Artificial Sequence
  GFR-binding peptide
  MOD_RES (1)..(2)..(36)..(38): Xaa is C or S
  MOD_RES (16)..(17)..(18)..(19)..(20): Xaa is A or G
  MOD_RES (21)..(22)..(23)..(24): Xaa is A or G or is absent
XXVPTRLSNITIQIMXXXXXXXXXLGEMSDMVVESXGX

SEQ ID NO: 73489 - protein, 39 aa, Artificial Sequence
  GFR-binding peptide
  MOD_RES (2)..(3)..(36)..(38): Xaa is C or S
  MOD_RES (17)..(18)..(19)..(20)..(21): Xaa is A or G
  MOD_RES (22)..(23)..(24)..(25): Xaa is A or G or is absent
TXXAPVKTSNITMQIMXXXXXXXXXIGEMSMIVEEXGXL

SEQ ID NO: 73490 - protein, 39 aa, Artificial Sequence; identical to SEQ ID NO: 19696
  GFR-binding peptide
  MOD_RES (5)..(5): Xaa is C or S

SEQ ID NO: 73491 - protein, 33 aa, Artificial Sequence; identical to SEQ ID NO: 53031
  GFR-binding peptide
  MOD_RES (1)..(32): Xaa is C or S

SEQ ID NO: 73492 - protein, 40 aa, Artificial Sequence; identical to SEQ ID NO: 19697
  GFR-binding peptide
  MOD_RES (5)..(5): Xaa is C or S

SEQ ID NO: 73493 - protein, 40 aa, Artificial Sequence; identical to SEQ ID NO: 19698
  GFR-binding peptide
  MOD_RES (1)..(38)..(40): Xaa is C or S

SEQ ID NO: 73494 - protein, 38 aa, Artificial Sequence; identical to SEQ ID NO: 19699
  GFR-binding peptide
  MOD_RES (1)..(38): Xaa is C or S
  MOD_RES (17)..(18)..(19)..(20)..(21): Xaa is A or G
  MOD_RES (22)..(23)..(24)..(25): Xaa is A or G or is absent

SEQ ID NO: 73495 - protein, 41 aa, Artificial Sequence; identical to SEQ ID NO: 19700
  GFR-binding peptide
  MOD_RES (1)..(38)..(40): Xaa is C or S

SEQ ID NO: 73496 - protein, 38 aa, Artificial Sequence
  GFR-binding peptide
  MOD_RES (1)..(2)..(36)..(38): Xaa is C or S
  MOD_RES (16)..(17)..(18)..(19)..(20): Xaa is A or G
  MOD_RES (21)..(22)..(23)..(24): Xaa is A or G or is absent
XXVPARLSNITIQIMXXXXXXXXXIGEMSDMVVEAXGX

SEQ ID NO: 73497 - protein, 30 aa, Artificial Sequence; identical to SEQ ID NO: 55439
  GFR-binding peptide

SEQ ID NO: 73498 - protein, 37 aa, Artificial Sequence; identical to SEQ ID NO: 19701
  GFR-binding peptide
  MOD_RES (1)..(35)..(37): Xaa is C or S
  MOD_RES (15)..(16)..(17)..(18)..(19): Xaa is A or G
  MOD_RES (20)..(21)..(22)..(23): Xaa is A or G or is absent

SEQ ID NO: 73499 - protein, 42 aa, Artificial Sequence; identical to SEQ ID NO: 19702
  GFR-binding peptide
  MOD_RES (5)..(39)..(41): Xaa is C or S
  MOD_RES (19)..(20)..(21)..(22)..(23): Xaa is A or G
  MOD_RES (24)..(25)..(26)..(27): Xaa is A or G or is absent

SEQ ID NO: 73500 - protein, 37 aa, Artificial Sequence; identical to SEQ ID NO: 19703
  GFR-binding peptide
  MOD_RES (1)..(1): Xaa is C or S

SEQ ID NO: 73501 - protein, 33 aa, Artificial Sequence; identical to SEQ ID NO: 19704
  GFR-binding peptide
  MOD_RES (14)..(15)..(16)..(17)..(18): Xaa is A or G
  MOD_RES (19)..(20)..(21)..(22): Xaa is A or G or is absent

SEQ ID NO: 73502 - protein, 33 aa, Artificial Sequence
  GFR-binding peptide
  MOD_RES (1)..(2)..(33): Xaa is C or S
XXVPQALSNITIQIMVGRKPKVLGEMSMIVRSX

SEQ ID NO: 73503 - protein, 39 aa, Artificial Sequence; identical to SEQ ID NO: 19706
  GFR-binding peptide
  MOD_RES (36)..(38): Xaa is C or S
  MOD_RES (15)..(16)..(17)..(18)..(19): Xaa is A or G
  MOD_RES (20)..(21)..(22)..(23): Xaa is A or G or is absent

SEQ ID NO: 73504 - protein, 35 aa, Artificial Sequence
  GFR-binding peptide
  MOD_RES (34)..(34): Xaa is C or S
  MOD_RES (14)..(15)..(16)..(17)..(18): Xaa is A or G
  MOD_RES (19)..(20)..(21)..(22): Xaa is A or G or is absent
VPARLSNITIQIMXXXXXXXXXLGEMSDMVVEAXG

SEQ ID NO: 73505 - protein, 36 aa, Artificial Sequence
  GFR-binding peptide
  MOD_RES (3)..(4)..(36): Xaa is C or S
PTXXVPTRLSNITIQIMDSANNVVIGEMSDMVVESX

SEQ ID NO: 73506 - protein, 36 aa, Artificial Sequence; identical to SEQ ID NO: 19707
  GFR-binding peptide
  MOD_RES (35)..(35): Xaa is C or S

SEQ ID NO: 73507 - protein, 34 aa, Artificial Sequence; identical to SEQ ID NO: 53039
  GFR-binding peptide
  MOD_RES (1)..(2): Xaa is C or S
  MOD_RES (16)..(17)..(18)..(19)..(20): Xaa is A or G
  MOD_RES (21)..(22)..(23)..(24): Xaa is A or G or is absent

SEQ ID NO: 73508 - protein, 39 aa, Artificial Sequence
  GFR-binding peptide
  MOD_RES (2)..(3)..(37)..(39): Xaa is C or S
  MOD_RES (17)..(18)..(19)..(20)..(21): Xaa is A or G
  MOD_RES (22)..(23)..(24)..(25): Xaa is A or G or is absent
TXXVPTRLSNITIQIMXXXXXXXXXLGEMSDMVVESXGX

SEQ ID NO: 73509 - protein, 33 aa, Artificial Sequence; identical to SEQ ID NO: 19708
  GFR-binding peptide
  MOD_RES (14)..(15)..(16)..(17)..(18): Xaa is A or G
  MOD_RES (19)..(20)..(21)..(22): Xaa is A or G or is absent

SEQ ID NO: 73510 - protein, 41 aa, Artificial Sequence; identical to SEQ ID NO: 53045
  GFR-binding peptide
  MOD_RES (6)..(7)..(38)..(40): Xaa is C or S

SEQ ID NO: 73511 - protein, 36 aa, Artificial Sequence; identical to SEQ ID NO: 53046
  GFR-binding peptide
  MOD_RES (1)..(2)..(33)..(35): Xaa is C or S

SEQ ID NO: 73512 - protein, 37 aa, Artificial Sequence; identical to SEQ ID NO: 19709
  GFR-binding peptide
  MOD_RES (4)..(4): Xaa is C or S
  MOD_RES (18)..(19)..(20)..(21)..(22): Xaa is A or G
  MOD_RES (23)..(24)..(25)..(26): Xaa is A or G or is absent

SEQ ID NO: 73513 - protein, 38 aa, Artificial Sequence; identical to SEQ ID NO: 55454
  GFR-binding peptide
  MOD_RES (5)..(6)..(37): Xaa is C or S

SEQ ID NO: 73514 - protein, 37 aa, Artificial Sequence
  GFR-binding peptide
  MOD_RES (1)..(2)..(35)..(37): Xaa is C or S
  MOD_RES (16)..(17)..(18)..(19)..(20): Xaa is A or G
  MOD_RES (21)..(22)..(23)..(24): Xaa is A or G or is absent
XXAPVKTSNITMQIMXXXXXXXXXLGEMSMIVEEXGX

SEQ ID NO: 73515 - protein, 38 aa, Artificial Sequence; identical to SEQ ID NO: 19711
  GFR-binding peptide
  MOD_RES (2)..(2): Xaa is C or S
  MOD_RES (18)..(19)..(20)..(21)..(22): Xaa is A or G
  MOD_RES (23)..(24)..(25)..(26): Xaa is A or G or is absent

SEQ ID NO: 73516 - protein, 40 aa, Artificial Sequence
  GFR-binding peptide
  MOD_RES (4)..(5)..(39): Xaa is C or S
  MOD_RES (19)..(20)..(21)..(22)..(23): Xaa is A or G
  MOD_RES (24)..(25)..(26)..(27): Xaa is A or G or is absent
AGPXXTPTKMSNITMQIMXXXXXXXXXIGEMSGMVVDRXG

SEQ ID NO: 73517 - protein, 35 aa, Artificial Sequence
  GFR-binding peptide
  MOD_RES (3)..(4): Xaa is C or S
GPXXTPTKMSNITMQIMNDKQQIIIGEMSGMVVDR

SEQ ID NO: 73518 - protein, 38 aa, Artificial Sequence
  GFR-binding peptide
  MOD_RES (5)..(6)..(38): Xaa is C or S
TPPTXXVPTRLSNITIQIMDSANNVVIGEMSDMVVESX

SEQ ID NO: 73519 - protein, 41 aa, Artificial Sequence; identical to SEQ ID NO: 19712
  GFR-binding peptide
  MOD_RES (2)..(39)..(41): Xaa is C or S

SEQ ID NO: 73520 - protein, 39 aa, Artificial Sequence
  GFR-binding peptide
  MOD_RES (4)..(5)..(37)..(39): Xaa is C or S
AGPXXTPTKMSNITMQIMNDKQQIIIGEMSGMVVDRXGX

SEQ ID NO: 73521 - protein, 34 aa, Artificial Sequence; identical to SEQ ID NO: 19714
  GFR-binding peptide
  MOD_RES (34)..(34): Xaa is C or S

SEQ ID NO: 73522 - protein, 42 aa, Artificial Sequence; identical to SEQ ID NO: 19716
  GFR-binding peptide
  MOD_RES (6)..(40)..(42): Xaa is C or S
  MOD_RES (20)..(21)..(22)..(23)..(24): Xaa is A or G
  MOD_RES (25)..(26)..(27)..(28): Xaa is A or G or is absent

SEQ ID NO: 73523 - protein, 39 aa, Artificial Sequence; identical to SEQ ID NO: 19717
  GFR-binding peptide
  MOD_RES (36)..(38): Xaa is C or S

SEQ ID NO: 73524 - protein, 30 aa, Artificial Sequence
  GFR-binding peptide
VPTRLSNITIQIMDSANNVVLGEMSDMVVE

SEQ ID NO: 73525 - protein, 38 aa, Artificial Sequence; identical to SEQ ID NO: 19719
  GFR-binding peptide
  MOD_RES (6)..(6): Xaa is C or S
  MOD_RES (20)..(21)..(22)..(23)..(24): Xaa is A or G
  MOD_RES (25)..(26)..(27)..(28): Xaa is A or G or is absent

SEQ ID NO: 73526 - protein, 34 aa, Artificial Sequence
  GFR-binding peptide
  MOD_RES (1)..(2): Xaa is C or S
  MOD_RES (16)..(17)..(18)..(19)..(20): Xaa is A or G
  MOD_RES (21)..(22)..(23)..(24): Xaa is A or G or is absent
XXTPTKMSNITMQIMXXXXXXXXXIGEMSGMVVD

SEQ ID NO: 73527 - protein, 36 aa, Artificial Sequence
  GFR-binding peptide
  MOD_RES (1)..(2)..(34)..(36): Xaa is C or S
XXVPARLSNITIQIMDAANNVVLGEMSDMVVEAXGX

SEQ ID NO: 73528 - protein, 36 aa, Artificial Sequence
  GFR-binding peptide
  MOD_RES (1)..(35): Xaa is C or S
  MOD_RES (15)..(16)..(17)..(18)..(19): Xaa is A or G
  MOD_RES (20)..(21)..(22)..(23): Xaa is A or G or is absent
XVPTRLSNITIQIMXXXXXXXXXLGEMSDMVVESXG

SEQ ID NO: 73529 - protein, 38 aa, Artificial Sequence; identical to SEQ ID NO: 53065
  GFR-binding peptide
  MOD_RES (1)..(2)..(36)..(38): Xaa is C or S
  MOD_RES (16)..(17)..(18)..(19)..(20): Xaa is A or G
  MOD_RES (21)..(22)..(23)..(24): Xaa is A or G or is absent

SEQ ID NO: 73530 - protein, 34 aa, Artificial Sequence; identical to SEQ ID NO: 19721
  GFR-binding peptide
  MOD_RES (1)..(1): Xaa is C or S

SEQ ID NO: 73531 - protein, 38 aa, Artificial Sequence; identical to SEQ ID NO: 19722
  GFR-binding peptide
  MOD_RES (1)..(38): Xaa is C or S

SEQ ID NO: 73532 - protein, 38 aa, Artificial Sequence; identical to SEQ ID NO: 19723
  GFR-binding peptide
  MOD_RES (4)..(38): Xaa is C or S

SEQ ID NO: 73533 - protein, 37 aa, Artificial Sequence
  GFR-binding peptide
  MOD_RES (3)..(4): Xaa is C or S
  MOD_RES (18)..(19)..(20)..(21)..(22): Xaa is A or G
  MOD_RES (23)..(24)..(25)..(26): Xaa is A or G or is absent
GPXXTPTKMSNITMQIMXXXXXXXXXIGEMSGMVVDR

SEQ ID NO: 73534 - protein, 40 aa, Artificial Sequence; identical to SEQ ID NO: 19724
  GFR-binding peptide
  MOD_RES (4)..(38)..(40): Xaa is C or S
  MOD_RES (18)..(19)..(20)..(21)..(22): Xaa is A or G
  MOD_RES (23)..(24)..(25)..(26): Xaa is A or G or is absent

SEQ ID NO: 73535 - protein, 38 aa, Artificial Sequence
  GFR-binding peptide
  MOD_RES (1)..(2)..(35)..(37): Xaa is C or S
  MOD_RES (16)..(17)..(18)..(19)..(20): Xaa is A or G
  MOD_RES (21)..(22)..(23)..(24): Xaa is A or G or is absent
XXAPVKTSNITMQIMXXXXXXXXXIGEMSMIVEEXGXL

SEQ ID NO: 73536 - protein, 34 aa, Artificial Sequence; identical to SEQ ID NO: 19727
  GFR-binding peptide
  MOD_RES (2)..(2): Xaa is C or S

SEQ ID NO: 73537 - protein, 38 aa, Artificial Sequence; identical to SEQ ID NO: 55485
  GFR-binding peptide
  MOD_RES (6)..(7)..(38): Xaa is C or S

SEQ ID NO: 73538 - protein, 42 aa, Artificial Sequence
  GFR-binding peptide
  MOD_RES (5)..(6)..(40)..(42): Xaa is C or S
  MOD_RES (20)..(21)..(22)..(23)..(24): Xaa is A or G
  MOD_RES (25)..(26)..(27)..(28): Xaa is A or G or is absent
SAGPXXTPTKMSNITMQIMXXXXXXXXXIGEMSGMVVDRXGX

SEQ ID NO: 73539 - protein, 42 aa, Artificial Sequence
  GFR-binding peptide
  MOD_RES (6)..(7)..(39)..(41): Xaa is C or S
STPPTXXVPTRLSNITIQIMDSANNVVLGEMSDMVVESXGXR

SEQ ID NO: 73540 - protein, 38 aa, Artificial Sequence
  GFR-binding peptide
  MOD_RES (3)..(4)..(38): Xaa is C or S
  MOD_RES (18)..(19)..(20)..(21)..(22): Xaa is A or G
  MOD_RES (23)..(24)..(25)..(26): Xaa is A or G or is absent
PTXXVPTRLSNITIQIMXXXXXXXXXIGEMSDMVVESX

SEQ ID NO: 73541 - protein, 40 aa, Artificial Sequence; identical to SEQ ID NO: 19730
  GFR-binding peptide
  MOD_RES (5)..(5): Xaa is C or S
  MOD_RES (21)..(22)..(23)..(24)..(25): Xaa is A or G
  MOD_RES (26)..(27)..(28)..(29): Xaa is A or G or is absent

SEQ ID NO: 73542 - protein, 39 aa, Artificial Sequence; identical to SEQ ID NO: 19731
  GFR-binding peptide
  MOD_RES (7)..(7): Xaa is C or S
  MOD_RES (21)..(22)..(23)..(24)..(25): Xaa is A or G
  MOD_RES (26)..(27)..(28)..(29): Xaa is A or G or is absent

SEQ ID NO: 73543 - protein, 41 aa, Artificial Sequence; identical to SEQ ID NO: 19732
  GFR-binding peptide
  MOD_RES (2)..(39)..(41): Xaa is C or S

SEQ ID NO: 73544 - protein, 37 aa, Artificial Sequence; identical to SEQ ID NO: 19733
  GFR-binding peptide
  MOD_RES (3)..(37): Xaa is C or S

SEQ ID NO: 73545 - protein, 35 aa, Artificial Sequence; identical to SEQ ID NO: 19734
  GFR-binding peptide
  MOD_RES (1)..(35): Xaa is C or S

SEQ ID NO: 73546 - protein, 35 aa, Artificial Sequence; identical to SEQ ID NO: 19735
  GFR-binding peptide
  MOD_RES (3)..(3): Xaa is C or S
  MOD_RES (17)..(18)..(19)..(20)..(21): Xaa is A or G
  MOD_RES (22)..(23)..(24)..(25): Xaa is A or G or is absent

SEQ ID NO: 73547 - protein, 39 aa, Artificial Sequence; identical to SEQ ID NO: 19736
  GFR-binding peptide
  MOD_RES (4)..(38): Xaa is C or S

SEQ ID NO: 73548 - protein, 40 aa, Artificial Sequence
  GFR-binding peptide
  MOD_RES (6)..(7)..(39): Xaa is C or S
AAPASXXVPARLSNITIQIMDAANNVVIGEMSDMVVEAXG

SEQ ID NO: 73549 - protein, 34 aa, Artificial Sequence
  GFR-binding peptide
  MOD_RES (1)..(33): Xaa is C or S
XTPTKMSNITMQIMNDKQQIIIGEMSGMVVDRXG

SEQ ID NO: 73550 - protein, 34 aa, Artificial Sequence; identical to SEQ ID NO: 19737
  GFR-binding peptide
  MOD_RES (34)..(34): Xaa is C or S
  MOD_RES (14)..(15)..(16)..(17)..(18): Xaa is A or G
  MOD_RES (19)..(20)..(21)..(22): Xaa is A or G or is absent

SEQ ID NO: 73551 - protein, 41 aa, Artificial Sequence; identical to SEQ ID NO: 19738
  GFR-binding peptide
  MOD_RES (7)..(41): Xaa is C or S
  MOD_RES (21)..(22)..(23)..(24)..(25): Xaa is A or G
  MOD_RES (26)..(27)..(28)..(29): Xaa is A or G or is absent

SEQ ID NO: 73552 - protein, 37 aa, Artificial Sequence; identical to SEQ ID NO: 19739
  GFR-binding peptide
  MOD_RES (2)..(36): Xaa is C or S
  MOD_RES (16)..(17)..(18)..(19)..(20): Xaa is A or G
  MOD_RES (21)..(22)..(23)..(24): Xaa is A or G or is absent

SEQ ID NO: 73553 - protein, 35 aa, Artificial Sequence; identical to SEQ ID NO: 55498
  GFR-binding peptide
  MOD_RES (1)..(2)..(35): Xaa is C or S
  MOD_RES (16)..(17)..(18)..(19)..(20): Xaa is A or G
  MOD_RES (21)..(22)..(23)..(24): Xaa is A or G or is absent

SEQ ID NO: 73554 - protein, 43 aa, Artificial Sequence; identical to SEQ ID NO: 19741
  GFR-binding peptide
  MOD_RES (5)..(42): Xaa is C or S
  MOD_RES (21)..(22)..(23)..(24)..(25): Xaa is A or G
  MOD_RES (26)..(27)..(28)..(29): Xaa is A or G or is absent

SEQ ID NO: 73555 - protein, 37 aa, Artificial Sequence
  GFR-binding peptide
  MOD_RES (2)..(3)..(34)..(36): Xaa is C or S
TXXAPVKTSNITMQIMDNGRVLLLGEMSMIVEEXGXL

SEQ ID NO: 73556 - protein, 37 aa, Artificial Sequence
  GFR-binding peptide
  MOD_RES (6)..(7): Xaa is C or S
RVPSTXXAPVKTSNITMQIMDNGRVLLIGEMSMIVEE

SEQ ID NO: 73557 - protein, 38 aa, Artificial Sequence
  GFR-binding peptide
  MOD_RES (2)..(3)..(35)..(37): Xaa is C or S
TXXVPTRLSNITIQIMDSANNVVIGEMSDMVVESXGXR

SEQ ID NO: 73558 - protein, 45 aa, Artificial Sequence; identical to SEQ ID NO: 19744
  GFR-binding peptide
  MOD_RES (5)..(42)..(44): Xaa is C or S
  MOD_RES (21)..(22)..(23)..(24)..(25): Xaa is A or G
  MOD_RES (26)..(27)..(28)..(29): Xaa is A or G or is absent

SEQ ID NO: 73559 - protein, 37 aa, Artificial Sequence; identical to SEQ ID NO: 55509
  GFR-binding peptide
  MOD_RES (3)..(4)..(35)..(37): Xaa is C or S

SEQ ID NO: 73560 - protein, 42 aa, Artificial Sequence
  GFR-binding peptide
  MOD_RES (5)..(6)..(40)..(42): Xaa is C or S
  MOD_RES (20)..(21)..(22)..(23)..(24): Xaa is A or G
  MOD_RES (25)..(26)..(27)..(28): Xaa is A or G or is absent
TPPTXXVPTRLSNITIQIMXXXXXXXXXIGEMSDMVVESXGX

SEQ ID NO: 73561 - protein, 37 aa, Artificial Sequence; identical to SEQ ID NO: 19745
  GFR-binding peptide
  MOD_RES (37)..(37): Xaa is C or S
  MOD_RES (16)..(17)..(18)..(19)..(20): Xaa is A or G
  MOD_RES (21)..(22)..(23)..(24): Xaa is A or G or is absent

SEQ ID NO: 73562 - protein, 41 aa, Artificial Sequence; identical to SEQ ID NO: 19746
  GFR-binding peptide
  MOD_RES (6)..(40): Xaa is C or S
  MOD_RES (20)..(21)..(22)..(23)..(24): Xaa is A or G
  MOD_RES (25)..(26)..(27)..(28): Xaa is A or G or is absent

SEQ ID NO: 73563 - protein, 40 aa, Artificial Sequence; identical to SEQ ID NO: 53102
  GFR-binding peptide
  MOD_RES (6)..(7)..(40): Xaa is C or S
  MOD_RES (21)..(22)..(23)..(24)..(25): Xaa is A or G
  MOD_RES (26)..(27)..(28)..(29): Xaa is A or G or is absent

SEQ ID NO: 73564 - protein, 32 aa, Artificial Sequence
  GFR-binding peptide
  MOD_RES (1)..(1): Xaa is C or S
XVPTRLSNITIQIMDSANNVVLGEMSDMVVES

SEQ ID NO: 73565 - protein, 35 aa, Artificial Sequence
  GFR-binding peptide
  MOD_RES (2)..(3): Xaa is C or S
  MOD_RES (17)..(18)..(19)..(20)..(21): Xaa is A or G
  MOD_RES (22)..(23)..(24)..(25): Xaa is A or G or is absent
PXXAPTKLSNITVQIMXXXXXXXXXLGEMSNMVVR

SEQ ID NO: 73566 - protein, 42 aa, Artificial Sequence; identical to SEQ ID NO: 19747
  GFR-binding peptide
  MOD_RES (5)..(39)..(41): Xaa is C or S

SEQ ID NO: 73567 - protein, 36 aa, Artificial Sequence
  GFR-binding peptide
  MOD_RES (2)..(3)..(35): Xaa is C or S
TXXVPTRLSNITIQIMDSANNVVIGEMSDMVVESXG

SEQ ID NO: 73568 - protein, 37 aa, Artificial Sequence; identical to SEQ ID NO: 53111
  GFR-binding peptide
  MOD_RES (5)..(6)..(37): Xaa is C or S

SEQ ID NO: 73569 - protein, 37 aa, Artificial Sequence; identical to SEQ ID NO: 55518
  GFR-binding peptide
  MOD_RES (3)..(4)..(35)..(37): Xaa is C or S

SEQ ID NO: 73570 - protein, 36 aa, Artificial Sequence
  GFR-binding peptide
  MOD_RES (1)..(2)..(36): Xaa is C or S
  MOD_RES (16)..(17)..(18)..(19)..(20): Xaa is A or G
  MOD_RES (21)..(22)..(23)..(24): Xaa is A or G or is absent
XXVPARLSNITIQIMXXXXXXXXXIGEMSDMVVEAX

SEQ ID NO: 73571 - protein, 41 aa, Artificial Sequence; identical to SEQ ID NO: 19748
  GFR-binding peptide
  MOD_RES (5)..(39)..(41): Xaa is C or S
  MOD_RES (19)..(20)..(21)..(22)..(23): Xaa is A or G
  MOD_RES (24)..(25)..(26)..(27): Xaa is A or G or is absent

SEQ ID NO: 73572 - protein, 37 aa, Artificial Sequence
  GFR-binding peptide
  MOD_RES (3)..(4)..(36): Xaa is C or S
GPXXTPTKMSNITMQIMNDKQQIILGEMSGMVVDRXG

SEQ ID NO: 73573 - protein, 39 aa, Artificial Sequence
  GFR-binding peptide
  MOD_RES (5)..(6)..(39): Xaa is C or S
  MOD_RES (20)..(21)..(22)..(23)..(24): Xaa is A or G
  MOD_RES (25)..(26)..(27)..(28): Xaa is A or G or is absent
VPSTXXAPVKTSNITMQIMXXXXXXXXXIGEMSMIVEEX

SEQ ID NO: 73574 - protein, 34 aa, Artificial Sequence
  GFR-binding peptide
  MOD_RES (3)..(4): Xaa is C or S
GPXXTPTKMSNITMQIMNDKQQIILGEMSGMVVD

SEQ ID NO: 73575 - protein, 39 aa, Artificial Sequence; identical to SEQ ID NO: 19750
  GFR-binding peptide
  MOD_RES (3)..(3): Xaa is C or S

SEQ ID NO: 73576 - protein, 41 aa, Artificial Sequence; identical to SEQ ID NO: 19752
  GFR-binding peptide
  MOD_RES (4)..(38)..(40): Xaa is C or S
  MOD_RES (18)..(19)..(20)..(21)..(22): Xaa is A or G
  MOD_RES (23)..(24)..(25)..(26): Xaa is A or G or is absent

SEQ ID NO: 73577 - protein, 35 aa, Artificial Sequence
  GFR-binding peptide
  MOD_RES (1)..(2)..(33)..(35): Xaa is C or S
XXVPQALSNITIQIMVGRKPKVLGEMSMIVRSXKX

SEQ ID NO: 73578 - protein, 40 aa, Artificial Sequence
  GFR-binding peptide
  MOD_RES (6)..(7): Xaa is C or S
  MOD_RES (21)..(22)..(23)..(24)..(25): Xaa is A or G
  MOD_RES (26)..(27)..(28)..(29): Xaa is A or G or is absent
HVPKPXXAPTKLSNITVQIMXXXXXXXXXLGEMSNMVVRS

SEQ ID NO: 73579 - protein, 36 aa, Artificial Sequence
  GFR-binding peptide
  MOD_RES (4)..(5)..(36): Xaa is C or S
AAPXXVPQALSNITIQIMVGRKPKVLGEMSMIVRSX

SEQ ID NO: 73580 - protein, 38 aa, Artificial Sequence
  GFR-binding peptide
  MOD_RES (3)..(4)..(35)..(37): Xaa is C or S
SPXXVSQDLSNITIQIMIGKTPKILGEMSMIVKSXKXS

SEQ ID NO: 73581 - protein, 38 aa, Artificial Sequence
  GFR-binding peptide
  MOD_RES (4)..(5)..(37): Xaa is C or S
AGPXXTPTKMSNITMQIMNDKQQIILGEMSGMVVDRXG

SEQ ID NO: 73582 - protein, 38 aa, Artificial Sequence; identical to SEQ ID NO: 55534
  GFR-binding peptide
  MOD_RES (2)..(3)..(36)..(38): Xaa is C or S
  MOD_RES (17)..(18)..(19)..(20)..(21): Xaa is A or G
  MOD_RES (22)..(23)..(24)..(25): Xaa is A or G or is absent

SEQ ID NO: 73583 - protein, 39 aa, Artificial Sequence
  GFR-binding peptide
  MOD_RES (6)..(7)..(39): Xaa is C or S
HVPKPXXAPTKLSNITVQIMDDSSNVILGEMSNMVVRSX

SEQ ID NO: 73584 - protein, 34 aa, Artificial Sequence; identical to SEQ ID NO: 19755
  GFR-binding peptide

SEQ ID NO: 73585 - protein, 40 aa, Artificial Sequence; identical to SEQ ID NO: 19758
  GFR-binding peptide
  MOD_RES (4)..(4): Xaa is C or S

SEQ ID NO: 73586 - protein, 42 aa, Artificial Sequence; identical to SEQ ID NO: 19759
  GFR-binding peptide
  MOD_RES (2)..(39)..(41): Xaa is C or S

SEQ ID NO: 73587 - protein, 35 aa, Artificial Sequence; identical to SEQ ID NO: 19760
  GFR-binding peptide
  MOD_RES (35)..(35): Xaa is C or S

SEQ ID NO: 73588 - protein, 36 aa, Artificial Sequence; identical to SEQ ID NO: 55542
  GFR-binding peptide
  MOD_RES (4)..(5)..(36): Xaa is C or S

SEQ ID NO: 73589 - protein, 41 aa, Artificial Sequence
  GFR-binding peptide
  MOD_RES (6)..(7)..(41): Xaa is C or S
  MOD_RES (21)..(22)..(23)..(24)..(25): Xaa is A or G
  MOD_RES (26)..(27)..(28)..(29): Xaa is A or G or is absent
GSAGPXXTPTKMSNITMQIMXXXXXXXXXIGEMSGMVVDRX

SEQ ID NO: 73590 - protein, 34 aa, Artificial Sequence
  GFR-binding peptide
  MOD_RES (2)..(3)..(34): Xaa is C or S
TXXAPVKTSNITMQIMDNGRVLLLGEMSMIVEEX

SEQ ID NO: 73591 - protein, 33 aa, Artificial Sequence
  GFR-binding peptide
  MOD_RES (2)..(3): Xaa is C or S
TXXAPVKTSNITMQIMDNGRVLLLGEMSMIVEE

SEQ ID NO: 73592 - protein, 36 aa, Artificial Sequence
  GFR-binding peptide
  MOD_RES (4)..(5)..(36): Xaa is C or S
ASPXXVSQDLSNITIQIMIGKTPKILGEMSMIVKSX

SEQ ID NO: 73593 - protein, 33 aa, Artificial Sequence
  GFR-binding peptide
  MOD_RES (14)..(15)..(16)..(17)..(18): Xaa is A or G
  MOD_RES (19)..(20)..(21)..(22): Xaa is A or G or is absent
VPARLSNITIQIMXXXXXXXXXIGEMSDMVVEA

SEQ ID NO: 73594 - protein, 44 aa, Artificial Sequence; identical to SEQ ID NO: 19764
  GFR-binding peptide
  MOD_RES (4)..(41)..(43): Xaa is C or S
  MOD_RES (20)..(21)..(22)..(23)..(24): Xaa is A or G
  MOD_RES (25)..(26)..(27)..(28): Xaa is A or G or is absent

SEQ ID NO: 73595 - protein, 39 aa, Artificial Sequence
  GFR-binding peptide
  MOD_RES (4)..(5)..(39): Xaa is C or S
  MOD_RES (19)..(20)..(21)..(22)..(23): Xaa is A or G
  MOD_RES (24)..(25)..(26)..(27): Xaa is A or G or is absent
PKPXXAPTKLSNITVQIMXXXXXXXXXLGEMSNMVVRSX

SEQ ID NO: 73596 - protein, 38 aa, Artificial Sequence; identical to SEQ ID NO: 55552
  GFR-binding peptide
  MOD_RES (4)..(5)..(36)..(38): Xaa is C or S

SEQ ID NO: 73597 - protein, 37 aa, Artificial Sequence; identical to SEQ ID NO: 19768
  GFR-binding peptide
  MOD_RES (34)..(36): Xaa is C or S
  MOD_RES (14)..(15)..(16)..(17)..(18): Xaa is A or G
  MOD_RES (19)..(20)..(21)..(22): Xaa is A or G or is absent

SEQ ID NO: 73598 - protein, 41 aa, Artificial Sequence; identical to SEQ ID NO: 19770
  GFR-binding peptide
  MOD_RES (3)..(40): Xaa is C or S
  MOD_RES (19)..(20)..(21)..(22)..(23): Xaa is A or G
  MOD_RES (24)..(25)..(26)..(27): Xaa is A or G or is absent

SEQ ID NO: 73599 - protein, 33 aa, Artificial Sequence
  GFR-binding peptide
  MOD_RES (33)..(33): Xaa is C or S
  MOD_RES (14)..(15)..(16)..(17)..(18): Xaa is A or G
  MOD_RES (19)..(20)..(21)..(22): Xaa is A or G or is absent
APVKTSNITMQIMXXXXXXXXXLGEMSMIVEEX

SEQ ID NO: 73600 - protein, 41 aa, Artificial Sequence; identical to SEQ ID NO: 55559
  GFR-binding peptide
  MOD_RES (3)..(4)..(38)..(40): Xaa is C or S
  MOD_RES (18)..(19)..(20)..(21)..(22): Xaa is A or G
  MOD_RES (23)..(24)..(25)..(26): Xaa is A or G or is absent

SEQ ID NO: 73601 - protein, 38 aa, Artificial Sequence
  GFR-binding peptide
  MOD_RES (3)..(4)..(37): Xaa is C or S
  MOD_RES (18)..(19)..(20)..(21)..(22): Xaa is A or G
  MOD_RES (23)..(24)..(25)..(26): Xaa is A or G or is absent
STXXAPVKTSNITMQIMXXXXXXXXXIGEMSMIVEEXG

SEQ ID NO: 73602 - protein, 40 aa, Artificial Sequence
  GFR-binding peptide
  MOD_RES (4)..(5)..(37)..(39): Xaa is C or S
PKPXXAPTKLSNITVQIMDDSSNVILGEMSNMVVRSXGXH

SEQ ID NO: 73603 - protein, 36 aa, Artificial Sequence
  GFR-binding peptide
  MOD_RES (2)..(3)..(35): Xaa is C or S
TXXVPTRLSNITIQIMDSANNVVLGEMSDMVVESXG

SEQ ID NO: 73604 - protein, 38 aa, Artificial Sequence; identical to SEQ ID NO: 19772
  GFR-binding peptide
  MOD_RES (4)..(4): Xaa is C or S
  MOD_RES (20)..(21)..(22)..(23)..(24): Xaa is A or G
  MOD_RES (25)..(26)..(27)..(28): Xaa is A or G or is absent

SEQ ID NO: 73605 - protein, 37 aa, Artificial Sequence; identical to SEQ ID NO: 19775
  GFR-binding peptide
  MOD_RES (36)..(36): Xaa is C or S
  MOD_RES (15)..(16)..(17)..(18)..(19): Xaa is A or G
  MOD_RES (20)..(21)..(22)..(23): Xaa is A or G or is absent

SEQ ID NO: 73606 - protein, 32 aa, Artificial Sequence
  GFR-binding peptide
  MOD_RES (1)..(2): Xaa is C or S
XXVPARLSNITIQIMDAANNVVIGEMSDMVVE

SEQ ID NO: 73607 - protein, 32 aa, Artificial Sequence
  GFR-binding peptide
  MOD_RES (14)..(15)..(16)..(17)..(18): Xaa is A or G
  MOD_RES (19)..(20)..(21)..(22): Xaa is A or G or is absent
VSQDLSNITIQIMXXXXXXXXXLGEMSMIVKS

SEQ ID NO: 73608 - protein, 37 aa, Artificial Sequence
  GFR-binding peptide
  MOD_RES (4)..(5): Xaa is C or S
  MOD_RES (19)..(20)..(21)..(22)..(23): Xaa is A or G
  MOD_RES (24)..(25)..(26)..(27): Xaa is A or G or is absent
AGPXXTPTKMSNITMQIMXXXXXXXXXLGEMSGMVVD

SEQ ID NO: 73609 - protein, 43 aa, Artificial Sequence
  GFR-binding peptide
  MOD_RES (6)..(7)..(40)..(42): Xaa is C or S
  MOD_RES (21)..(22)..(23)..(24)..(25): Xaa is A or G
  MOD_RES (26)..(27)..(28)..(29): Xaa is A or G or is absent
ASASPXXVSQDLSNITIQIMXXXXXXXXXLGEMSMIVKSXKXS

SEQ ID NO: 73610 - protein, 36 aa, Artificial Sequence; identical to SEQ ID NO: 53160
  GFR-binding peptide
  MOD_RES (34)..(36): Xaa is C or S
  MOD_RES (14)..(15)..(16)..(17)..(18): Xaa is A or G
  MOD_RES (19)..(20)..(21)..(22): Xaa is A or G or is absent

SEQ ID NO: 73611 - protein, 38 aa, Artificial Sequence; identical to SEQ ID NO: 19779
  GFR-binding peptide
  MOD_RES (5)..(5): Xaa is C or S
  MOD_RES (19)..(20)..(21)..(22)..(23): Xaa is A or G
  MOD_RES (24)..(25)..(26)..(27): Xaa is A or G or is absent

SEQ ID NO: 73612 - protein, 36 aa, Artificial Sequence
  GFR-binding peptide
  MOD_RES (1)..(33)..(35): Xaa is C or S
XTPTKMSNITMQIMNDKQQIIIGEMSGMVVDRXGXS

SEQ ID NO: 73613 - protein, 36 aa, Artificial Sequence; identical to SEQ ID NO: 19780
  GFR-binding peptide
  MOD_RES (35)..(35): Xaa is C or S

SEQ ID NO: 73614 - protein, 41 aa, Artificial Sequence; identical to SEQ ID NO: 19781
  GFR-binding peptide
  MOD_RES (5)..(5): Xaa is C or S
  MOD_RES (21)..(22)..(23)..(24)..(25): Xaa is A or G
  MOD_RES (26)..(27)..(28)..(29): Xaa is A or G or is absent

SEQ ID NO: 73615 - protein, 38 aa, Artificial Sequence
  GFR-binding peptide
  MOD_RES (3)..(4)..(37): Xaa is C or S
  MOD_RES (18)..(19)..(20)..(21)..(22): Xaa is A or G
  MOD_RES (23)..(24)..(25)..(26): Xaa is A or G or is absent
STXXAPVKTSNITMQIMXXXXXXXXXLGEMSMIVEEXG

SEQ ID NO: 73616 - protein, 34 aa, Artificial Sequence
  GFR-binding peptide
  MOD_RES (3)..(4): Xaa is C or S
SPXXVPQDLSNITIQIMVGRTPKVLGEMSMVVKS

SEQ ID NO: 73617 - protein, 34 aa, Artificial Sequence
  GFR-binding peptide
  MOD_RES (34)..(34): Xaa is C or S
  MOD_RES (14)..(15)..(16)..(17)..(18): Xaa is A or G
  MOD_RES (19)..(20)..(21)..(22): Xaa is A or G or is absent
VPARLSNITIQIMXXXXXXXXXLGEMSDMVVEAX

SEQ ID NO: 73618 - protein, 39 aa, Artificial Sequence; identical to SEQ ID NO: 19782
  GFR-binding peptide
  MOD_RES (3)..(3): Xaa is C or S
  MOD_RES (19)..(20)..(21)..(22)..(23): Xaa is A or G
  MOD_RES (24)..(25)..(26)..(27): Xaa is A or G or is absent

SEQ ID NO: 73619 - protein, 38 aa, Artificial Sequence; identical to SEQ ID NO: 19783
  GFR-binding peptide
  MOD_RES (3)..(3): Xaa is C or S
  MOD_RES (19)..(20)..(21)..(22)..(23): Xaa is A or G
  MOD_RES (24)..(25)..(26)..(27): Xaa is A or G or is absent

SEQ ID NO: 73620 - protein, 36 aa, Artificial Sequence; identical to SEQ ID NO: 53167
  GFR-binding peptide
  MOD_RES (3)..(4)..(35): Xaa is C or S

SEQ ID NO: 73621 - protein, 38 aa, Artificial Sequence; identical to SEQ ID NO: 19784
  GFR-binding peptide
  MOD_RES (2)..(2): Xaa is C or S
  MOD_RES (18)..(19)..(20)..(21)..(22): Xaa is A or G
  MOD_RES (23)..(24)..(25)..(26): Xaa is A or G or is absent

SEQ ID NO: 73622 - protein, 38 aa, Artificial Sequence
  GFR-binding peptide
  MOD_RES (6)..(7): Xaa is C or S
GSAGPXXTPTKMSNITMQIMNDKQQIILGEMSGMVVDR

SEQ ID NO: 73623 - protein, 41 aa, Artificial Sequence; identical to SEQ ID NO: 19786
  GFR-binding peptide
  MOD_RES (5)..(5): Xaa is C or S

SEQ ID NO: 73624 - protein, 35 aa, Artificial Sequence; identical to SEQ ID NO: 19787
  GFR-binding peptide
  MOD_RES (2)..(2): Xaa is C or S
  MOD_RES (16)..(17)..(18)..(19)..(20): Xaa is A or G
  MOD_RES (21)..(22)..(23)..(24): Xaa is A or G or is absent

SEQ ID NO: 73625 - protein, 30 aa, Artificial Sequence
  GFR-binding peptide
VSQDLSNITIQIMIGKTPKILGEMSMIVKS

SEQ ID NO: 73626 - protein, 36 aa, Artificial Sequence; identical to SEQ ID NO: 19790
  GFR-binding peptide
  MOD_RES (35)..(35): Xaa is C or S
  MOD_RES (14)..(15)..(16)..(17)..(18): Xaa is A or G
  MOD_RES (19)..(20)..(21)..(22): Xaa is A or G or is absent

SEQ ID NO: 73627 - protein, 39 aa, Artificial Sequence
  GFR-binding peptide
  MOD_RES (2)..(3)..(37)..(39): Xaa is C or S
  MOD_RES (17)..(18)..(19)..(20)..(21): Xaa is A or G
  MOD_RES (22)..(23)..(24)..(25): Xaa is A or G or is absent
TXXVPTRLSNITIQIMXXXXXXXXXIGEMSDMVVESXGX

SEQ ID NO: 73628 - protein, 34 aa, Artificial Sequence
  GFR-binding peptide
  MOD_RES (1)..(33): Xaa is C or S
XVPTRLSNITIQIMDSANNVVLGEMSDMVVESXG

SEQ ID NO: 73629 - protein, 39 aa, Artificial Sequence
  GFR-binding peptide
  MOD_RES (4)..(5)..(38): Xaa is C or S
  MOD_RES (19)..(20)..(21)..(22)..(23): Xaa is A or G
  MOD_RES (24)..(25)..(26)..(27): Xaa is A or G or is absent
AAPXXVPQALSNITIQIMXXXXXXXXXLGEMSMIVRSXK

SEQ ID NO: 73630 - protein, 44 aa, Artificial Sequence; identical to SEQ ID NO: 19792
  GFR-binding peptide
  MOD_RES (7)..(41)..(43): Xaa is C or S
  MOD_RES (21)..(22)..(23)..(24)..(25): Xaa is A or G
  MOD_RES (26)..(27)..(28)..(29): Xaa is A or G or is absent

SEQ ID NO: 73631 - protein, 39 aa, Artificial Sequence; identical to SEQ ID NO: 55587
  GFR-binding peptide
  MOD_RES (4)..(5)..(38): Xaa is C or S
  MOD_RES (19)..(20)..(21)..(22)..(23): Xaa is A or G
  MOD_RES (24)..(25)..(26)..(27): Xaa is A or G or is absent

SEQ ID NO: 73632 - protein, 35 aa, Artificial Sequence
  GFR-binding peptide
  MOD_RES (4)..(5): Xaa is C or S
AAPXXVPQALSNITIQIMVGRKPKVLGEMSMIVRS

SEQ ID NO: 73633 - protein, 42 aa, Artificial Sequence; identical to SEQ ID NO: 19794
  GFR-binding peptide
  MOD_RES (3)..(40)..(42): Xaa is C or S

SEQ ID NO: 73634 - protein, 38 aa, Artificial Sequence
  GFR-binding peptide
  MOD_RES (6)..(7): Xaa is C or S
HVPKPXXAPTKLSNITVQIMDDSSNVIIGEMSNMVVRS

SEQ ID NO: 73635 - protein, 32 aa, Artificial Sequence; identical to SEQ ID NO: 53190
  GFR-binding peptide
  MOD_RES (14)..(15)..(16)..(17)..(18): Xaa is A or G
  MOD_RES (19)..(20)..(21)..(22): Xaa is A or G or is absent

SEQ ID NO: 73636 - protein, 42 aa, Artificial Sequence
  GFR-binding peptide
  MOD_RES (6)..(7)..(40)..(42): Xaa is C or S
  MOD_RES (21)..(22)..(23)..(24)..(25): Xaa is A or G
  MOD_RES (26)..(27)..(28)..(29): Xaa is A or G or is absent
RVPSTXXAPVKTSNITMQIMXXXXXXXXXLGEMSMIVEEXGX

SEQ ID NO: 73637 - protein, 40 aa, Artificial Sequence
  GFR-binding peptide
  MOD_RES (6)..(7)..(40): Xaa is C or S
  MOD_RES (21)..(22)..(23)..(24)..(25): Xaa is A or G
  MOD_RES (26)..(27)..(28)..(29): Xaa is A or G or is absent
ASASPXXVPQDLSNITIQIMXXXXXXXXXLGEMSMVVKSX

SEQ ID NO: 73638 - protein, 39 aa, Artificial Sequence
  GFR-binding peptide
  MOD_RES (4)..(5)..(38): Xaa is C or S
  MOD_RES (19)..(20)..(21)..(22)..(23): Xaa is A or G
  MOD_RES (24)..(25)..(26)..(27): Xaa is A or G or is absent
ASPXXVPQDLSNITIQIMXXXXXXXXXLGEMSMVVKSXK

SEQ ID NO: 73639 - protein, 37 aa, Artificial Sequence
  GFR-binding peptide
  MOD_RES (2)..(3)..(37): Xaa is C or S
  MOD_RES (17)..(18)..(19)..(20)..(21): Xaa is A or G
  MOD_RES (22)..(23)..(24)..(25): Xaa is A or G or is absent
TXXVPTRLSNITIQIMXXXXXXXXXIGEMSDMVVESX

SEQ ID NO: 73640 - protein, 40 aa, Artificial Sequence; identical to SEQ ID NO: 53195
  GFR-binding peptide
  MOD_RES (6)..(7)..(40): Xaa is C or S
  MOD_RES (21)..(22)..(23)..(24)..(25): Xaa is A or G
  MOD_RES (26)..(27)..(28)..(29): Xaa is A or G or is absent

SEQ ID NO: 73641 - protein, 39 aa, Artificial Sequence; identical to SEQ ID NO: 53198
  GFR-binding peptide
  MOD_RES (4)..(5)..(38): Xaa is C or S
  MOD_RES (19)..(20)..(21)..(22)..(23): Xaa is A or G
  MOD_RES (24)..(25)..(26)..(27): Xaa is A or G or is absent

SEQ ID NO: 73642 - protein, 35 aa, Artificial Sequence
  GFR-binding peptide
  MOD_RES (1)..(33)..(35): Xaa is C or S
XVPARLSNITIQIMDAANNVVIGEMSDMVVEAXGX

SEQ ID NO: 73643 - protein, 41 aa, Artificial Sequence
  GFR-binding peptide
  MOD_RES (5)..(6)..(40): Xaa is C or S
  MOD_RES (20)..(21)..(22)..(23)..(24): Xaa is A or G
  MOD_RES (25)..(26)..(27)..(28): Xaa is A or G or is absent
TPPTXXVPTRLSNITIQIMXXXXXXXXXIGEMSDMVVESXG

SEQ ID NO: 73644 - protein, 34 aa, Artificial Sequence
  GFR-binding peptide
  MOD_RES (1)..(2): Xaa is C or S
  MOD_RES (16)..(17)..(18)..(19)..(20): Xaa is A or G
  MOD_RES (21)..(22)..(23)..(24): Xaa is A or G or is absent
XXVPARLSNITIQIMXXXXXXXXXLGEMSDMVVE

SEQ ID NO: 73645 - protein, 37 aa, Artificial Sequence
  GFR-binding peptide
  MOD_RES (4)..(5): Xaa is C or S
  MOD_RES (19)..(20)..(21)..(22)..(23): Xaa is A or G
  MOD_RES (24)..(25)..(26)..(27): Xaa is A or G or is absent
ASPXXVPQDLSNITIQIMXXXXXXXXXLGEMSMVVKS

SEQ ID NO: 73646 - protein, 40 aa, Artificial Sequence; identical to SEQ ID NO: 19799
  GFR-binding peptide
  MOD_RES (5)..(39): Xaa is C or S
  MOD_RES (19)..(20)..(21)..(22)..(23): Xaa is A or G
  MOD_RES (24)..(25)..(26)..(27): Xaa is A or G or is absent

SEQ ID NO: 73647 - protein, 33 aa, Artificial Sequence
  GFR-binding peptide
  MOD_RES (33)..(33): Xaa is C or S
  MOD_RES (14)..(15)..(16)..(17)..(18): Xaa is A or G
  MOD_RES (19)..(20)..(21)..(22): Xaa is A or G or is absent
VPQALSNITIQIMXXXXXXXXXLGEMSMIVRSX

SEQ ID NO: 73648 - protein, 36 aa, Artificial Sequence; identical to SEQ ID NO: 19800
  GFR-binding peptide
  MOD_RES (2)..(2): Xaa is C or S

SEQ ID NO: 73649 - protein, 36 aa, Artificial Sequence
  GFR-binding peptide
  MOD_RES (5)..(6): Xaa is C or S
APASXXVPARLSNITIQIMDAANNVVLGEMSDMVVE

SEQ ID NO: 73650 - protein, 42 aa, Artificial Sequence
  GFR-binding peptide
  MOD_RES (6)..(7)..(39)..(41): Xaa is C or S
AAPASXXVPARLSNITIQIMDAANNVVLGEMSDMVVEAXGXR

SEQ ID NO: 73651 - protein, 34 aa, Artificial Sequence
  GFR-binding peptide
  MOD_RES (34)..(34): Xaa is C or S
  MOD_RES (14)..(15)..(16)..(17)..(18): Xaa is A or G
  MOD_RES (19)..(20)..(21)..(22): Xaa is A or G or is absent
VPARLSNITIQIMXXXXXXXXXIGEMSDMVVEAX

SEQ ID NO: 73652 - protein, 37 aa, Artificial Sequence; identical to SEQ ID NO: 53212
  GFR-binding peptide
  MOD_RES (4)..(5): Xaa is C or S
  MOD_RES (19)..(20)..(21)..(22)..(23): Xaa is A or G
  MOD_RES (24)..(25)..(26)..(27): Xaa is A or G or is absent

SEQ ID NO: 73653 - protein, 41 aa, Artificial Sequence
  GFR-binding peptide
  MOD_RES (6)..(7)..(39)..(41): Xaa is C or S
GSAGPXXTPTKMSNITMQIMNDKQQIIIGEMSGMVVDRXGX

SEQ ID NO: 73654 - protein, 38 aa, Artificial Sequence; identical to SEQ ID NO: 19808
  GFR-binding peptide
  MOD_RES (1)..(35)..(37): Xaa is C or S

SEQ ID NO: 73655 - protein, 38 aa, Artificial Sequence
  GFR-binding peptide
  MOD_RES (2)..(3)..(37): Xaa is C or S
  MOD_RES (17)..(18)..(19)..(20)..(21): Xaa is A or G
  MOD_RES (22)..(23)..(24)..(25): Xaa is A or G or is absent
TXXVPTRLSNITIQIMXXXXXXXXXIGEMSDMVVESXG

SEQ ID NO: 73656 - protein, 40 aa, Artificial Sequence; identical to SEQ ID NO: 19811
  GFR-binding peptide
  MOD_RES (2)..(39): Xaa is C or S
  MOD_RES (18)..(19)..(20)..(21)..(22): Xaa is A or G
  MOD_RES (23)..(24)..(25)..(26): Xaa is A or G or is absent

SEQ ID NO: 73657 - protein, 42 aa, Artificial Sequence
  GFR-binding peptide
  MOD_RES (6)..(7)..(40)..(42): Xaa is C or S
  MOD_RES (21)..(22)..(23)..(24)..(25): Xaa is A or G
  MOD_RES (26)..(27)..(28)..(29): Xaa is A or G or is absent
ASASPXXVPQDLSNITIQIMXXXXXXXXXLGEMSMVVKSXKX

SEQ ID NO: 73658 - protein, 41 aa, Artificial Sequence
  GFR-binding peptide
  MOD_RES (3)..(4)..(38)..(40): Xaa is C or S
  MOD_RES (18)..(19)..(20)..(21)..(22): Xaa is A or G
  MOD_RES (23)..(24)..(25)..(26): Xaa is A or G or is absent
KPXXAPTKLSNITVQIMXXXXXXXXXLGEMSNMVVRSXGXH

SEQ ID NO: 73659 - protein, 37 aa, Artificial Sequence
  GFR-binding peptide
  MOD_RES (2)..(3)..(37): Xaa is C or S
  MOD_RES (17)..(18)..(19)..(20)..(21): Xaa is A or G
  MOD_RES (22)..(23)..(24)..(25): Xaa is A or G or is absent
TXXVPTRLSNITIQIMXXXXXXXXXLGEMSDMVVESX

SEQ ID NO: 73660 - protein, 39 aa, Artificial Sequence; identical to SEQ ID NO: 19815
  GFR-binding peptide
  MOD_RES (4)..(38): Xaa is C or S

SEQ ID NO: 73661 - protein, 43 aa, Artificial Sequence; identical to SEQ ID NO: 19816
  GFR-binding peptide
  MOD_RES (3)..(40)..(42): Xaa is C or S

SEQ ID NO: 73662 - protein, 36 aa, Artificial Sequence; identical to SEQ ID NO: 19817
  GFR-binding peptide
  MOD_RES (2)..(36): Xaa is C or S

SEQ ID NO: 73663 - protein, 34 aa, Artificial Sequence
  GFR-binding peptide
  MOD_RES (34)..(34): Xaa is C or S
  MOD_RES (14)..(15)..(16)..(17)..(18): Xaa is A or G
  MOD_RES (19)..(20)..(21)..(22): Xaa is A or G or is absent
VPTRLSNITIQIMXXXXXXXXXLGEMSDMVVESX

SEQ ID NO: 73664 - protein, 42 aa, Artificial Sequence; identical to SEQ ID NO: 19818
  GFR-binding peptide
  MOD_RES (5)..(39)..(41): Xaa is C or S

SEQ ID NO: 73665 - protein, 39 aa, Artificial Sequence
  GFR-binding peptide
  MOD_RES (6)..(7)..(38): Xaa is C or S
ASASPXXVPQDLSNITIQIMVGRTPKVLGEMSMVVKSXK

SEQ ID NO: 73666 - protein, 41 aa, Artificial Sequence; identical to SEQ ID NO: 19819
  GFR-binding peptide
  MOD_RES (4)..(41): Xaa is C or S
  MOD_RES (20)..(21)..(22)..(23)..(24): Xaa is A or G
  MOD_RES (25)..(26)..(27)..(28): Xaa is A or G or is absent

SEQ ID NO: 73667 - protein, 37 aa, Artificial Sequence; identical to SEQ ID NO: 55634
  GFR-binding peptide
  MOD_RES (3)..(4): Xaa is C or S
  MOD_RES (18)..(19)..(20)..(21)..(22): Xaa is A or G
  MOD_RES (23)..(24)..(25)..(26): Xaa is A or G or is absent

SEQ ID NO: 73668 - protein, 39 aa, Artificial Sequence; identical to SEQ ID NO: 55635
  GFR-binding peptide
  MOD_RES (3)..(4)..(37)..(39): Xaa is C or S
  MOD_RES (18)..(19)..(20)..(21)..(22): Xaa is A or G
  MOD_RES (23)..(24)..(25)..(26): Xaa is A or G or is absent

SEQ ID NO: 73669 - protein, 37 aa, Artificial Sequence
  GFR-binding peptide
  MOD_RES (1)..(2)..(36): Xaa is C or S
  MOD_RES (16)..(17)..(18)..(19)..(20): Xaa is A or G
  MOD_RES (21)..(22)..(23)..(24): Xaa is A or G or is absent
XXVPTRLSNITIQIMXXXXXXXXXIGEMSDMVVESXG

SEQ ID NO: 73670 - protein, 34 aa, Artificial Sequence; identical to SEQ ID NO: 19821
  GFR-binding peptide
  MOD_RES (2)..(2): Xaa is C or S
  MOD_RES (16)..(17)..(18)..(19)..(20): Xaa is A or G
  MOD_RES (21)..(22)..(23)..(24): Xaa is A or G or is absent

SEQ ID NO: 73671 - protein, 40 aa, Artificial Sequence; identical to SEQ ID NO: 19822
  GFR-binding peptide
  MOD_RES (5)..(39): Xaa is C or S
  MOD_RES (19)..(20)..(21)..(22)..(23): Xaa is A or G
  MOD_RES (24)..(25)..(26)..(27): Xaa is A or G or is absent

SEQ ID NO: 73672 - protein, 42 aa, Artificial Sequence
  GFR-binding peptide
  MOD_RES (5)..(6)..(39)..(41): Xaa is C or S
  MOD_RES (20)..(21)..(22)..(23)..(24): Xaa is A or G
  MOD_RES (25)..(26)..(27)..(28): Xaa is A or G or is absent
VPSTXXAPVKTSNITMQIMXXXXXXXXXLGEMSMIVEEXGXL

SEQ ID NO: 73673 - protein, 38 aa, Artificial Sequence
  GFR-binding peptide
  MOD_RES (6)..(7)..(38): Xaa is C or S
RVPSTXXAPVKTSNITMQIMDNGRVLLIGEMSMIVEEX

SEQ ID NO: 73674 - protein, 30 aa, Artificial Sequence
  GFR-binding peptide
VPQALSNITIQIMVGRKPKVLGEMSMIVRS

SEQ ID NO: 73675 - protein, 35 aa, Artificial Sequence
  GFR-binding peptide
  MOD_RES (1)..(2)..(35): Xaa is C or S
  MOD_RES (16)..(17)..(18)..(19)..(20): Xaa is A or G
  MOD_RES (21)..(22)..(23)..(24): Xaa is A or G or is absent
XXVPQDLSNITIQIMXXXXXXXXXLGEMSMVVKSX

SEQ ID NO: 73676 - protein, 31 aa, Artificial Sequence
  GFR-binding peptide
  MOD_RES (31)..(31): Xaa is C or S
VSQDLSNITIQIMIGKTPKILGEMSMIVKSX

SEQ ID NO: 73677 - protein, 37 aa, Artificial Sequence; identical to SEQ ID NO: 19825
  GFR-binding peptide
  MOD_RES (36)..(36): Xaa is C or S

SEQ ID NO: 73678 - protein, 39 aa, Artificial Sequence
  GFR-binding peptide
  MOD_RES (4)..(5)..(39): Xaa is C or S
  MOD_RES (19)..(20)..(21)..(22)..(23): Xaa is A or G
  MOD_RES (24)..(25)..(26)..(27): Xaa is A or G or is absent
PPTXXVPTRLSNITIQIMXXXXXXXXXIGEMSDMVVESX

SEQ ID NO: 73679 - protein, 39 aa, Artificial Sequence
  GFR-binding peptide
  MOD_RES (2)..(3)..(37)..(39): Xaa is C or S
  MOD_RES (17)..(18)..(19)..(20)..(21): Xaa is A or G
  MOD_RES (22)..(23)..(24)..(25): Xaa is A or G or is absent
SXXVPARLSNITIQIMXXXXXXXXXLGEMSDMVVEAXGX

SEQ ID NO: 73680 - protein, 37 aa, Artificial Sequence
  GFR-binding peptide
  MOD_RES (3)..(4): Xaa is C or S
  MOD_RES (18)..(19)..(20)..(21)..(22): Xaa is A or G
  MOD_RES (23)..(24)..(25)..(26): Xaa is A or G or is absent
PTXXVPTRLSNITIQIMXXXXXXXXXLGEMSDMVVES

SEQ ID NO: 73681 - protein, 32 aa, Artificial Sequence
  GFR-binding peptide
  MOD_RES (1)..(2): Xaa is C or S
XXVPTRLSNITIQIMDSANNVVLGEMSDMVVE

SEQ ID NO: 73682 - protein, 34 aa, Artificial Sequence
  GFR-binding peptide
  MOD_RES (1)..(34): Xaa is C or S
  MOD_RES (15)..(16)..(17)..(18)..(19): Xaa is A or G
  MOD_RES (20)..(21)..(22)..(23): Xaa is A or G or is absent
XAPVKTSNITMQIMXXXXXXXXXIGEMSMIVEEX

SEQ ID NO: 73683 - protein, 38 aa, Artificial Sequence
  GFR-binding peptide
  MOD_RES (4)..(5)..(37): Xaa is C or S
PKPXXAPTKLSNITVQIMDDSSNVILGEMSNMVVRSXG

SEQ ID NO: 73684 - protein, 38 aa, Artificial Sequence; identical to SEQ ID NO: 19830
  GFR-binding peptide
  MOD_RES (3)..(37): Xaa is C or S
  MOD_RES (17)..(18)..(19)..(20)..(21): Xaa is A or G
  MOD_RES (22)..(23)..(24)..(25): Xaa is A or G or is absent

SEQ ID NO: 73685 - protein, 39 aa, Artificial Sequence; identical to SEQ ID NO: 19832
  GFR-binding peptide
  MOD_RES (1)..(38): Xaa is C or S

SEQ ID NO: 73686 - protein, 36 aa, Artificial Sequence
  GFR-binding peptide
  MOD_RES (1)..(35): Xaa is C or S
  MOD_RES (15)..(16)..(17)..(18)..(19): Xaa is A or G
  MOD_RES (20)..(21)..(22)..(23): Xaa is A or G or is absent
XVPARLSNITIQIMXXXXXXXXXLGEMSDMVVEAXG

SEQ ID NO: 73687 - protein, 38 aa, Artificial Sequence; identical to SEQ ID NO: 19833
  GFR-binding peptide
  MOD_RES (4)..(4): Xaa is C or S
  MOD_RES (20)..(21)..(22)..(23)..(24): Xaa is A or G
  MOD_RES (25)..(26)..(27)..(28): Xaa is A or G or is absent

SEQ ID NO: 73688 - protein, 34 aa, Artificial Sequence; identical to SEQ ID NO: 55658
  GFR-binding peptide
  MOD_RES (2)..(3)..(34): Xaa is C or S

SEQ ID NO: 73689 - protein, 34 aa, Artificial Sequence
  GFR-binding peptide
  MOD_RES (32)..(34): Xaa is C or S
APTKLSNITVQIMDDSSNVILGEMSNMVVRSXGX

SEQ ID NO: 73690 - protein, 34 aa, Artificial Sequence; identical to SEQ ID NO: 19835
  GFR-binding peptide
  MOD_RES (14)..(15)..(16)..(17)..(18): Xaa is A or G
  MOD_RES (19)..(20)..(21)..(22): Xaa is A or G or is absent

SEQ ID NO: 73691 - protein, 38 aa, Artificial Sequence
  GFR-binding peptide
  MOD_RES (3)..(4)..(35)..(37): Xaa is C or S
APXXVPQALSNITIQIMVGRKPKVLGEMSMIVRSXKXS

SEQ ID NO: 73692 - protein, 34 aa, Artificial Sequence
  GFR-binding peptide
  MOD_RES (34)..(34): Xaa is C or S
  MOD_RES (14)..(15)..(16)..(17)..(18): Xaa is A or G
  MOD_RES (19)..(20)..(21)..(22): Xaa is A or G or is absent
TPTKMSNITMQIMXXXXXXXXXLGEMSGMVVDRX

SEQ ID NO: 73693 - protein, 41 aa, Artificial Sequence; identical to SEQ ID NO: 19841
  GFR-binding peptide
  MOD_RES (4)..(41): Xaa is C or S
  MOD_RES (20)..(21)..(22)..(23)..(24): Xaa is A or G
  MOD_RES (25)..(26)..(27)..(28): Xaa is A or G or is absent

SEQ ID NO: 73694 - protein, 37 aa, Artificial Sequence; identical to SEQ ID NO: 19842
  GFR-binding peptide
  MOD_RES (35)..(37): Xaa is C or S
  MOD_RES (14)..(15)..(16)..(17)..(18): Xaa is A or G
  MOD_RES (19)..(20)..(21)..(22): Xaa is A or G or is absent

SEQ ID NO: 73695 - protein, 43 aa, Artificial Sequence
  GFR-binding peptide
  MOD_RES (5)..(6)..(40)..(42): Xaa is C or S
  MOD_RES (20)..(21)..(22)..(23)..(24): Xaa is A or G
  MOD_RES (25)..(26)..(27)..(28): Xaa is A or G or is absent
SAGPXXTPTKMSNITMQIMXXXXXXXXXLGEMSGMVVDRXGXS

SEQ ID NO: 73696 - protein, 36 aa, Artificial Sequence
  GFR-binding peptide
  MOD_RES (2)..(3): Xaa is C or S
  MOD_RES (17)..(18)..(19)..(20)..(21): Xaa is A or G
  MOD_RES (22)..(23)..(24)..(25): Xaa is A or G or is absent
PXXTPTKMSNITMQIMXXXXXXXXXLGEMSGMVVDR

SEQ ID NO: 73697 - protein, 43 aa, Artificial Sequence; identical to SEQ ID NO: 19844
  GFR-binding peptide
  MOD_RES (4)..(41)..(43): Xaa is C or S

SEQ ID NO: 73698 - protein, 37 aa, Artificial Sequence; identical to SEQ ID NO: 19847
  GFR-binding peptide
  MOD_RES (1)..(35)..(37): Xaa is C or S
  MOD_RES (15)..(16)..(17)..(18)..(19): Xaa is A or G
  MOD_RES (20)..(21)..(22)..(23): Xaa is A or G or is absent

SEQ ID NO: 73699 - protein, 37 aa, Artificial Sequence
  GFR-binding peptide
  MOD_RES (1)..(2)..(36): Xaa is C or S
  MOD_RES (16)..(17)..(18)..(19)..(20): Xaa is A or G
  MOD_RES (21)..(22)..(23)..(24): Xaa is A or G or is absent
XXVPTRLSNITIQIMXXXXXXXXXLGEMSDMVVESXG

SEQ ID NO: 73700 - protein, 37 aa, Artificial Sequence; identical to SEQ ID NO: 19850
  GFR-binding peptide
  MOD_RES (3)..(3): Xaa is C or S
  MOD_RES (19)..(20)..(21)..(22)..(23): Xaa is A or G
  MOD_RES (24)..(25)..(26)..(27): Xaa is A or G or is absent

SEQ ID NO: 73701 - protein, 35 aa, Artificial Sequence; identical to SEQ ID NO: 19851
  GFR-binding peptide
  MOD_RES (2)..(2): Xaa is C or S

SEQ ID NO: 73702 - protein, 36 aa, Artificial Sequence
  GFR-binding peptide
  MOD_RES (3)..(4)..(35): Xaa is C or S
SPXXVPQDLSNITIQIMVGRTPKVLGEMSMVVKSXK

SEQ ID NO: 73703 - protein, 38 aa, Artificial Sequence; identical to SEQ ID NO: 19852
  GFR-binding peptide
  MOD_RES (4)..(4): Xaa is C or S
  MOD_RES (20)..(21)..(22)..(23)..(24): Xaa is A or G
  MOD_RES (25)..(26)..(27)..(28): Xaa is A or G or is absent

SEQ ID NO: 73704 - protein, 37 aa, Artificial Sequence
  GFR-binding peptide
  MOD_RES (6)..(7): Xaa is C or S
AAPASXXVPARLSNITIQIMDAANNVVIGEMSDMVVE

SEQ ID NO: 73705 - protein, 33 aa, Artificial Sequence
  GFR-binding peptide
  MOD_RES (32)..(32): Xaa is C or S
APTKLSNITVQIMDDSSNVILGEMSNMVVRSXG

SEQ ID NO: 73706 - protein, 30 aa, Artificial Sequence
  GFR-binding peptide
VPARLSNITIQIMDAANNVVLGEMSDMVVE

SEQ ID NO: 73707 - protein, 41 aa, Artificial Sequence
  GFR-binding peptide
  MOD_RES (6)..(7)..(41): Xaa is C or S
  MOD_RES (21)..(22)..(23)..(24)..(25): Xaa is A or G
  MOD_RES (26)..(27)..(28)..(29): Xaa is A or G or is absent
GSAGPXXTPTKMSNITMQIMXXXXXXXXXLGEMSGMVVDRX

SEQ ID NO: 73708 - protein, 34 aa, Artificial Sequence
  GFR-binding peptide
  MOD_RES (32)..(34): Xaa is C or S
VPTRLSNITIQIMDSANNVVIGEMSDMVVESXGX

SEQ ID NO: 73709 - protein, 39 aa, Artificial Sequence
  GFR-binding peptide
  MOD_RES (6)..(7)..(38): Xaa is C or S
ASASPXXVSQDLSNITIQIMIGKTPKILGEMSMIVKSXK

SEQ ID NO: 73710 - protein, 39 aa, Artificial Sequence; identical to SEQ ID NO: 19858
  GFR-binding peptide
  MOD_RES (4)..(4): Xaa is C or S
  MOD_RES (20)..(21)..(22)..(23)..(24): Xaa is A or G
  MOD_RES (25)..(26)..(27)..(28): Xaa is A or G or is absent

SEQ ID NO: 73711 - protein, 40 aa, Artificial Sequence; identical to SEQ ID NO: 19859
  GFR-binding peptide
  MOD_RES (37)..(39): Xaa is C or S

SEQ ID NO: 73712 - protein, 37 aa, Artificial Sequence
  GFR-binding peptide
  MOD_RES (2)..(3)..(37): Xaa is C or S
  MOD_RES (17)..(18)..(19)..(20)..(21): Xaa is A or G
  MOD_RES (22)..(23)..(24)..(25): Xaa is A or G or is absent
PXXTPTKMSNITMQIMXXXXXXXXXIGEMSGMVVDRX

SEQ ID NO: 73713 - protein, 39 aa, Artificial Sequence
  GFR-binding peptide
  MOD_RES (6)..(7): Xaa is C or S
  MOD_RES (21)..(22)..(23)..(24)..(25): Xaa is A or G
  MOD_RES (26)..(27)..(28)..(29): Xaa is A or G or is absent
HVPKPXXAPTKLSNITVQIMXXXXXXXXXLGEMSNMVVR

SEQ ID NO: 73714 - protein, 38 aa, Artificial Sequence
  GFR-binding peptide
  MOD_RES (6)..(7)..(38): Xaa is C or S
ASASPXXVSQDLSNITIQIMIGKTPKILGEMSMIVKSX

SEQ ID NO: 73715 - protein, 37 aa, Artificial Sequence; identical to SEQ ID NO: 53297
  GFR-binding peptide
  MOD_RES (2)..(3)..(34)..(36): Xaa is C or S

SEQ ID NO: 73716 - protein, 37 aa, Artificial Sequence
  GFR-binding peptide
  MOD_RES (3)..(4)..(35)..(37): Xaa is C or S
STXXAPVKTSNITMQIMDNGRVLLIGEMSMIVEEXGX

SEQ ID NO: 73717 - protein, 33 aa, Artificial Sequence
  GFR-binding peptide
  MOD_RES (32)..(32): Xaa is C or S
VPARLSNITIQIMDAANNVVIGEMSDMVVEAXG

SEQ ID NO: 73718 - protein, 35 aa, Artificial Sequence; identical to SEQ ID NO: 19862
  GFR-binding peptide

SEQ ID NO: 73719 - protein, 39 aa, Artificial Sequence; identical to SEQ ID NO: 19863
  GFR-binding peptide
  MOD_RES (6)..(6): Xaa is C or S

SEQ ID NO: 73720 - protein, 35 aa, Artificial Sequence
  GFR-binding peptide
  MOD_RES (2)..(3): Xaa is C or S
  MOD_RES (17)..(18)..(19)..(20)..(21): Xaa is A or G
  MOD_RES (22)..(23)..(24)..(25): Xaa is A or G or is absent
PXXTPTKMSNITMQIMXXXXXXXXXIGEMSGMVVD

SEQ ID NO: 73721 - protein, 38 aa, Artificial Sequence; identical to SEQ ID NO: 19864
  GFR-binding peptide
  MOD_RES (35)..(37): Xaa is C or S
  MOD_RES (14)..(15)..(16)..(17)..(18): Xaa is A or G
  MOD_RES (19)..(20)..(21)..(22): Xaa is A or G or is absent

SEQ ID NO: 73722 - protein, 40 aa, Artificial Sequence; identical to SEQ ID NO: 19866
  GFR-binding peptide
  MOD_RES (1)..(38)..(40): Xaa is C or S

SEQ ID NO: 73723 - protein, 40 aa, Artificial Sequence; identical to SEQ ID NO: 19867
  GFR-binding peptide
  MOD_RES (1)..(38)..(40): Xaa is C or S

SEQ ID NO: 73724 - protein, 33 aa, Artificial Sequence; identical to SEQ ID NO: 55696
  GFR-binding peptide
  MOD_RES (1)..(1): Xaa is C or S
  MOD_RES (15)..(16)..(17)..(18)..(19): Xaa is A or G
  MOD_RES (20)..(21)..(22)..(23): Xaa is A or G or is absent

SEQ ID NO: 73725 - protein, 33 aa, Artificial Sequence; identical to SEQ ID NO: 19869
  GFR-binding peptide

SEQ ID NO: 73726 - protein, 36 aa, Artificial Sequence; identical to SEQ ID NO: 19870
  GFR-binding peptide
  MOD_RES (1)..(1): Xaa is C or S

SEQ ID NO: 73727 - protein, 36 aa, Artificial Sequence
  GFR-binding peptide
  MOD_RES (3)..(4)..(35): Xaa is C or S
SPXXVSQDLSNITIQIMIGKTPKILGEMSMIVKSXK

SEQ ID NO: 73728 - protein, 33 aa, Artificial Sequence; identical to SEQ ID NO: 53314
  GFR-binding peptide
  MOD_RES (32)..(32): Xaa is C or S

SEQ ID NO: 73729 - protein, 34 aa, Artificial Sequence; identical to SEQ ID NO: 19873
  GFR-binding peptide

SEQ ID NO: 73730 - protein, 37 aa, Artificial Sequence
  GFR-binding peptide
  MOD_RES (2)..(3)..(37): Xaa is C or S
  MOD_RES (17)..(18)..(19)..(20)..(21): Xaa is A or G
  MOD_RES (22)..(23)..(24)..(25): Xaa is A or G or is absent
PXXTPTKMSNITMQIMXXXXXXXXXLGEMSGMVVDRX

SEQ ID NO: 73731 - protein, 40 aa, Artificial Sequence; identical to SEQ ID NO: 19874
  GFR-binding peptide
  MOD_RES (4)..(4): Xaa is C or S

SEQ ID NO: 73732 - protein, 35 aa, Artificial Sequence
  GFR-binding peptide
  MOD_RES (4)..(5): Xaa is C or S
AGPXXTPTKMSNITMQIMNDKQQIIIGEMSGMVVD

SEQ ID NO: 73733 - protein, 31 aa, Artificial Sequence
  GFR-binding peptide
VPTRLSNITIQIMDSANNVVLGEMSDMVVES

SEQ ID NO: 73734 - protein, 35 aa, Artificial Sequence; identical to SEQ ID NO: 19875
  GFR-binding peptide
  MOD_RES (15)..(16)..(17)..(18)..(19): Xaa is A or G
  MOD_RES (20)..(21)..(22)..(23): Xaa is A or G or is absent

SEQ ID NO: 73735 - protein, 39 aa, Artificial Sequence; identical to SEQ ID NO: 55708
  GFR-binding peptide
  MOD_RES (5)..(6)..(37)..(39): Xaa is C or S

SEQ ID NO: 73736 - protein, 39 aa, Artificial Sequence
  GFR-binding peptide
  MOD_RES (3)..(4)..(37)..(39): Xaa is C or S
  MOD_RES (18)..(19)..(20)..(21)..(22): Xaa is A or G
  MOD_RES (23)..(24)..(25)..(26): Xaa is A or G or is absent
SPXXVPQDLSNITIQIMXXXXXXXXXLGEMSMVVKSXKX

SEQ ID NO: 73737 - protein, 38 aa, Artificial Sequence
  GFR-binding peptide
  MOD_RES (4)..(5)..(37): Xaa is C or S
PASXXVPARLSNITIQIMDAANNVVIGEMSDMVVEAXG

SEQ ID NO: 73738 - protein, 37 aa, Artificial Sequence
  GFR-binding peptide
  MOD_RES (4)..(5): Xaa is C or S
  MOD_RES (19)..(20)..(21)..(22)..(23): Xaa is A or G
  MOD_RES (24)..(25)..(26)..(27): Xaa is A or G or is absent
ASPXXVSQDLSNITIQIMXXXXXXXXXLGEMSMIVKS

SEQ ID NO: 73739 - protein, 40 aa, Artificial Sequence; identical to SEQ ID NO: 55710
  GFR-binding peptide
  MOD_RES (6)..(7)..(38)..(40): Xaa is C or S

SEQ ID NO: 73740 - protein, 34 aa, Artificial Sequence; identical to SEQ ID NO: 19878
  GFR-binding peptide
  MOD_RES (34)..(34): Xaa is C or S

SEQ ID NO: 73741 - protein, 37 aa, Artificial Sequence
  GFR-binding peptide
  MOD_RES (4)..(5): Xaa is C or S
  MOD_RES (19)..(20)..(21)..(22)..(23): Xaa is A or G
  MOD_RES (24)..(25)..(26)..(27): Xaa is A or G or is absent
PPTXXVPTRLSNITIQIMXXXXXXXXXIGEMSDMVVE

SEQ ID NO: 73742 - protein, 41 aa, Artificial Sequence
  GFR-binding peptide
  MOD_RES (5)..(6)..(40): Xaa is C or S
  MOD_RES (20)..(21)..(22)..(23)..(24): Xaa is A or G
  MOD_RES (25)..(26)..(27)..(28): Xaa is A or G or is absent
TPPTXXVPTRLSNITIQIMXXXXXXXXXLGEMSDMVVESXG

SEQ ID NO: 73743 - protein, 31 aa, Artificial Sequence
  GFR-binding peptide
  MOD_RES (1)..(1): Xaa is C or S
XVPARLSNITIQIMDAANNVVLGEMSDMVVE

SEQ ID NO: 73744 - protein, 36 aa, Artificial Sequence; identical to SEQ ID NO: 19879
  GFR-binding peptide
  MOD_RES (2)..(2): Xaa is C or S

SEQ ID NO: 73745 - protein, 33 aa, Artificial Sequence
  GFR-binding peptide
  MOD_RES (32)..(32): Xaa is C or S
TPTKMSNITMQIMNDKQQIIIGEMSGMVVDRXG

SEQ ID NO: 73746 - protein, 35 aa, Artificial Sequence; identical to SEQ ID NO: 53330
  GFR-binding peptide
  MOD_RES (1)..(34): Xaa is C or S
  MOD_RES (15)..(16)..(17)..(18)..(19): Xaa is A or G
  MOD_RES (20)..(21)..(22)..(23): Xaa is A or G or is absent

SEQ ID NO: 73747 - protein, 39 aa, Artificial Sequence
  GFR-binding peptide
  MOD_RES (5)..(6)..(39): Xaa is C or S
  MOD_RES (20)..(21)..(22)..(23)..(24): Xaa is A or G
  MOD_RES (25)..(26)..(27)..(28): Xaa is A or G or is absent
SASPXXVPQDLSNITIQIMXXXXXXXXXLGEMSMVVKSX

SEQ ID NO: 73748 - protein, 36 aa, Artificial Sequence
  GFR-binding peptide
  MOD_RES (1)..(2)..(35): Xaa is C or S
  MOD_RES (16)..(17)..(18)..(19)..(20): Xaa is A or G
  MOD_RES (21)..(22)..(23)..(24): Xaa is A or G or is absent
XXVPQALSNITIQIMXXXXXXXXXLGEMSMIVRSXK

SEQ ID NO: 73749 - protein, 37 aa, Artificial Sequence; identical to SEQ ID NO: 19883
  GFR-binding peptide
  MOD_RES (37)..(37): Xaa is C or S
  MOD_RES (16)..(17)..(18)..(19)..(20): Xaa is A or G
  MOD_RES (21)..(22)..(23)..(24): Xaa is A or G or is absent

SEQ ID NO: 73750 - protein, 40 aa, Artificial Sequence
  GFR-binding peptide
  MOD_RES (5)..(6)..(37)..(39): Xaa is C or S
VPSTXXAPVKTSNITMQIMDNGRVLLLGEMSMIVEEXGXL

SEQ ID NO: 73751 - protein, 32 aa, Artificial Sequence
  GFR-binding peptide
  MOD_RES (32)..(32): Xaa is C or S
VPTRLSNITIQIMDSANNVVIGEMSDMVVESX

SEQ ID NO: 73752 - protein, 34 aa, Artificial Sequence; identical to SEQ ID NO: 19884
  GFR-binding peptide
  MOD_RES (34)..(34): Xaa is C or S
  MOD_RES (14)..(15)..(16)..(17)..(18): Xaa is A or G
  MOD_RES (19)..(20)..(21)..(22): Xaa is A or G or is absent

SEQ ID NO: 73753 - protein, 34 aa, Artificial Sequence; identical to SEQ ID NO: 19885
  GFR-binding peptide
  MOD_RES (15)..(16)..(17)..(18)..(19): Xaa is A or G
  MOD_RES (20)..(21)..(22)..(23): Xaa is A or G or is absent

SEQ ID NO: 73754 - protein, 40 aa, Artificial Sequence; identical to SEQ ID NO: 19887
  GFR-binding peptide
  MOD_RES (2)..(39): Xaa is C or S

SEQ ID NO: 73755 - protein, 33 aa, Artificial Sequence
  GFR-binding peptide
  MOD_RES (1)..(1): Xaa is C or S
  MOD_RES (15)..(16)..(17)..(18)..(19): Xaa is A or G
  MOD_RES (20)..(21)..(22)..(23): Xaa is A or G or is absent
XAPVKTSNITMQIMXXXXXXXXXLGEMSMIVEE

SEQ ID NO: 73756 - protein, 35 aa, Artificial Sequence
  GFR-binding peptide
  MOD_RES (1)..(2): Xaa is C or S
  MOD_RES (16)..(17)..(18)..(19)..(20): Xaa is A or G
  MOD_RES (21)..(22)..(23)..(24): Xaa is A or G or is absent
XXTPTKMSNITMQIMXXXXXXXXXIGEMSGMVVDR

SEQ ID NO: 73757 - protein, 44 aa, Artificial Sequence
  GFR-binding peptide
  MOD_RES (6)..(7)..(41)..(43): Xaa is C or S
  MOD_RES (21)..(22)..(23)..(24)..(25): Xaa is A or G
  MOD_RES (26)..(27)..(28)..(29): Xaa is A or G or is absent
AAPASXXVPARLSNITIQIMXXXXXXXXXIGEMSDMVVEAXGXR

SEQ ID NO: 73758 - protein, 38 aa, Artificial Sequence; identical to SEQ ID NO: 19893
  GFR-binding peptide
  MOD_RES (1)..(35)..(37): Xaa is C or S

SEQ ID NO: 73759 - protein, 43 aa, Artificial Sequence; identical to SEQ ID NO: 19894
  GFR-binding peptide
  MOD_RES (4)..(41)..(43): Xaa is C or S

SEQ ID NO: 73760 - protein, 43 aa, Artificial Sequence; identical to SEQ ID NO: 19896
  GFR-binding peptide
  MOD_RES (4)..(41)..(43): Xaa is C or S

SEQ ID NO: 73761 - protein, 37 aa, Artificial Sequence
  GFR-binding peptide
  MOD_RES (2)..(3)..(35)..(37): Xaa is C or S
PXXTPTKMSNITMQIMNDKQQIIIGEMSGMVVDRXGX

SEQ ID NO: 73762 - protein, 34 aa, Artificial Sequence; identical to SEQ ID NO: 19897
  GFR-binding peptide
  MOD_RES (34)..(34): Xaa is C or S
  MOD_RES (14)..(15)..(16)..(17)..(18): Xaa is A or G
  MOD_RES (19)..(20)..(21)..(22): Xaa is A or G or is absent

SEQ ID NO: 73763 - protein, 33 aa, Artificial Sequence
  GFR-binding peptide
  MOD_RES (1)..(1): Xaa is C or S
  MOD_RES (15)..(16)..(17)..(18)..(19): Xaa is A or G
  MOD_RES (20)..(21)..(22)..(23): Xaa is A or G or is absent
XAPVKTSNITMQIMXXXXXXXXXIGEMSMIVEE

SEQ ID NO: 73764 - protein, 43 aa, Artificial Sequence
  GFR-binding peptide
  MOD_RES (6)..(7)..(41)..(43): Xaa is C or S
  MOD_RES (21)..(22)..(23)..(24)..(25): Xaa is A or G
  MOD_RES (26)..(27)..(28)..(29): Xaa is A or G or is absent
HVPKPXXAPTKLSNITVQIMXXXXXXXXXLGEMSNMVVRSXGX

SEQ ID NO: 73765 - protein, 35 aa, Artificial Sequence
  GFR-binding peptide
  MOD_RES (2)..(3)..(34): Xaa is C or S
PXXVPQDLSNITIQIMVGRTPKVLGEMSMVVKSXK

SEQ ID NO: 73766 - protein, 36 aa, Artificial Sequence
  GFR-binding peptide
  MOD_RES (2)..(3): Xaa is C or S
  MOD_RES (17)..(18)..(19)..(20)..(21): Xaa is A or G
  MOD_RES (22)..(23)..(24)..(25): Xaa is A or G or is absent
SXXVPARLSNITIQIMXXXXXXXXXLGEMSDMVVEA

SEQ ID NO: 73767 - protein, 43 aa, Artificial Sequence
  GFR-binding peptide
  MOD_RES (6)..(7)..(41)..(43): Xaa is C or S
  MOD_RES (21)..(22)..(23)..(24)..(25): Xaa is A or G
  MOD_RES (26)..(27)..(28)..(29): Xaa is A or G or is absent
STPPTXXVPTRLSNITIQIMXXXXXXXXXIGEMSDMVVESXGX

SEQ ID NO: 73768 - protein, 34 aa, Artificial Sequence
  GFR-binding peptide
  MOD_RES (2)..(3): Xaa is C or S
TXXVPTRLSNITIQIMDSANNVVLGEMSDMVVES

SEQ ID NO: 73769 - protein, 33 aa, Artificial Sequence; identical to SEQ ID NO: 55743
  GFR-binding peptide
  MOD_RES (1)..(1): Xaa is C or S
  MOD_RES (15)..(16)..(17)..(18)..(19): Xaa is A or G
  MOD_RES (20)..(21)..(22)..(23): Xaa is A or G or is absent

SEQ ID NO: 73770 - protein, 33 aa, Artificial Sequence
  GFR-binding peptide
  MOD_RES (32)..(32): Xaa is C or S
VPARLSNITIQIMDAANNVVLGEMSDMVVEAXG

SEQ ID NO: 73771 - protein, 40 aa, Artificial Sequence; identical to SEQ ID NO: 19901
  GFR-binding peptide
  MOD_RES (7)..(7): Xaa is C or S
  MOD_RES (21)..(22)..(23)..(24)..(25): Xaa is A or G
  MOD_RES (26)..(27)..(28)..(29): Xaa is A or G or is absent

SEQ ID NO: 73772 - protein, 40 aa, Artificial Sequence; identical to SEQ ID NO: 19902
  GFR-binding peptide
  MOD_RES (4)..(38)..(40): Xaa is C or S
  MOD_RES (18)..(19)..(20)..(21)..(22): Xaa is A or G
  MOD_RES (23)..(24)..(25)..(26): Xaa is A or G or is absent

SEQ ID NO: 73773 - protein, 33 aa, Artificial Sequence
  GFR-binding peptide
  MOD_RES (1)..(2)..(33): Xaa is C or S
XXAPVKTSNITMQIMDNGRVLLLGEMSMIVEEX

SEQ ID NO: 73774 - protein, 35 aa, Artificial Sequence
  GFR-binding peptide
  MOD_RES (4)..(5): Xaa is C or S
AGPXXTPTKMSNITMQIMNDKQQIILGEMSGMVVD

SEQ ID NO: 73775 - protein, 42 aa, Artificial Sequence; identical to SEQ ID NO: 55755
  GFR-binding peptide
  MOD_RES (6)..(7)..(40)..(42): Xaa is C or S
  MOD_RES (21)..(22)..(23)..(24)..(25): Xaa is A or G
  MOD_RES (26)..(27)..(28)..(29): Xaa is A or G or is absent

SEQ ID NO: 73776 - protein, 36 aa, Artificial Sequence; identical to SEQ ID NO: 55758
  GFR-binding peptide
  MOD_RES (2)..(3)..(34)..(36): Xaa is C or S

SEQ ID NO: 73777 - protein, 35 aa, Artificial Sequence; identical to SEQ ID NO: 19906
  GFR-binding peptide
  MOD_RES (1)..(1): Xaa is C or S
  MOD_RES (17)..(18)..(19)..(20)..(21): Xaa is A or G
  MOD_RES (22)..(23)..(24)..(25): Xaa is A or G or is absent

SEQ ID NO: 73778 - protein, 36 aa, Artificial Sequence; identical to SEQ ID NO: 19908
  GFR-binding peptide
  MOD_RES (1)..(35): Xaa is C or S

SEQ ID NO: 73779 - protein, 37 aa, Artificial Sequence
  GFR-binding peptide
  MOD_RES (4)..(5): Xaa is C or S
  MOD_RES (19)..(20)..(21)..(22)..(23): Xaa is A or G
  MOD_RES (24)..(25)..(26)..(27): Xaa is A or G or is absent
PPTXXVPTRLSNITIQIMXXXXXXXXXLGEMSDMVVE

SEQ ID NO: 73780 - protein, 37 aa, Artificial Sequence; identical to SEQ ID NO: 19911
  GFR-binding peptide
  MOD_RES (1)..(1): Xaa is C or S
  MOD_RES (17)..(18)..(19)..(20)..(21): Xaa is A or G
  MOD_RES (22)..(23)..(24)..(25): Xaa is A or G or is absent

SEQ ID NO: 73781 - protein, 35 aa, Artificial Sequence; identical to SEQ ID NO: 55765
  GFR-binding peptide
  MOD_RES (2)..(3)..(34): Xaa is C or S

SEQ ID NO: 73782 - protein, 31 aa, Artificial Sequence
  GFR-binding peptide
  MOD_RES (31)..(31): Xaa is C or S
APVKTSNITMQIMDNGRVLLIGEMSMIVEEX

SEQ ID NO: 73783 - protein, 40 aa, Artificial Sequence; identical to SEQ ID NO: 53378
  GFR-binding peptide
  MOD_RES (4)..(5)..(39): Xaa is C or S
  MOD_RES (19)..(20)..(21)..(22)..(23): Xaa is A or G
  MOD_RES (24)..(25)..(26)..(27): Xaa is A or G or is absent

SEQ ID NO: 73784 - protein, 30 aa, Artificial Sequence; identical to SEQ ID NO: 55768
  GFR-binding peptide

SEQ ID NO: 73785 - protein, 32 aa, Artificial Sequence
  GFR-binding peptide
  MOD_RES (1)..(32): Xaa is C or S
XVPQDLSNITIQIMVGRTPKVLGEMSMVVKSX

SEQ ID NO: 73786 - protein, 39 aa, Artificial Sequence; identical to SEQ ID NO: 55769
  GFR-binding peptide
  MOD_RES (6)..(7)..(38): Xaa is C or S

SEQ ID NO: 73787 - protein, 33 aa, Artificial Sequence; identical to SEQ ID NO: 19914
  GFR-binding peptide
  MOD_RES (14)..(15)..(16)..(17)..(18): Xaa is A or G
  MOD_RES (19)..(20)..(21)..(22): Xaa is A or G or is absent

SEQ ID NO: 73788 - protein, 35 aa, Artificial Sequence
  GFR-binding peptide
  MOD_RES (2)..(3): Xaa is C or S
  MOD_RES (17)..(18)..(19)..(20)..(21): Xaa is A or G
  MOD_RES (22)..(23)..(24)..(25): Xaa is A or G or is absent
PXXTPTKMSNITMQIMXXXXXXXXXLGEMSGMVVD

SEQ ID NO: 73789 - protein, 40 aa, Artificial Sequence; identical to SEQ ID NO: 19915
  GFR-binding peptide
  MOD_RES (4)..(4): Xaa is C or S
  MOD_RES (20)..(21)..(22)..(23)..(24): Xaa is A or G
  MOD_RES (25)..(26)..(27)..(28): Xaa is A or G or is absent

SEQ ID NO: 73790 - protein, 38 aa, Artificial Sequence
  GFR-binding peptide
  MOD_RES (4)..(5)..(37): Xaa is C or S
AGPXXTPTKMSNITMQIMNDKQQIIIGEMSGMVVDRXG

SEQ ID NO: 73791 - protein, 37 aa, Artificial Sequence
  GFR-binding peptide
  MOD_RES (2)..(3)..(34)..(36): Xaa is C or S
TXXAPVKTSNITMQIMDNGRVLLIGEMSMIVEEXGXL

SEQ ID NO: 73792 - protein, 42 aa, Artificial Sequence; identical to SEQ ID NO: 55776
  GFR-binding peptide
  MOD_RES (6)..(7)..(40)..(42): Xaa is C or S
  MOD_RES (21)..(22)..(23)..(24)..(25): Xaa is A or G
  MOD_RES (26)..(27)..(28)..(29): Xaa is A or G or is absent

SEQ ID NO: 73793 - protein, 33 aa, Artificial Sequence
  GFR-binding peptide
  MOD_RES (1)..(1): Xaa is C or S
  MOD_RES (15)..(16)..(17)..(18)..(19): Xaa is A or G
  MOD_RES (20)..(21)..(22)..(23): Xaa is A or G or is absent
XAPTKLSNITVQIMXXXXXXXXXLGEMSNMVVR

SEQ ID NO: 73794 - protein, 41 aa, Artificial Sequence; identical to SEQ ID NO: 19917
  GFR-binding peptide
  MOD_RES (5)..(39)..(41): Xaa is C or S

SEQ ID NO: 73795 - protein, 34 aa, Artificial Sequence; identical to SEQ ID NO: 55782
  GFR-binding peptide
  MOD_RES (3)..(4): Xaa is C or S

SEQ ID NO: 73796 - protein, 41 aa, Artificial Sequence; identical to SEQ ID NO: 55784
  GFR-binding peptide
  MOD_RES (4)..(5)..(39)..(41): Xaa is C or S
  MOD_RES (19)..(20)..(21)..(22)..(23): Xaa is A or G
  MOD_RES (24)..(25)..(26)..(27): Xaa is A or G or is absent

SEQ ID NO: 73797 - protein, 36 aa, Artificial Sequence
  GFR-binding peptide
  MOD_RES (2)..(3)..(36): Xaa is C or S
  MOD_RES (17)..(18)..(19)..(20)..(21): Xaa is A or G
  MOD_RES (22)..(23)..(24)..(25): Xaa is A or G or is absent
TXXAPVKTSNITMQIMXXXXXXXXXIGEMSMIVEEX

SEQ ID NO: 73798 - protein, 42 aa, Artificial Sequence
  GFR-binding peptide
  MOD_RES (4)..(5)..(39)..(41): Xaa is C or S
  MOD_RES (19)..(20)..(21)..(22)..(23): Xaa is A or G
  MOD_RES (24)..(25)..(26)..(27): Xaa is A or G or is absent
PASXXVPARLSNITIQIMXXXXXXXXXIGEMSDMVVEAXGXR

SEQ ID NO: 73799 - protein, 33 aa, Artificial Sequence
  GFR-binding peptide
  MOD_RES (14)..(15)..(16)..(17)..(18): Xaa is A or G
  MOD_RES (19)..(20)..(21)..(22): Xaa is A or G or is absent
VPTRLSNITIQIMXXXXXXXXXIGEMSDMVVES

SEQ ID NO: 73800 - protein, 37 aa, Artificial Sequence
  GFR-binding peptide
  MOD_RES (1)..(2)..(35)..(37): Xaa is C or S
  MOD_RES (16)..(17)..(18)..(19)..(20): Xaa is A or G
  MOD_RES (21)..(22)..(23)..(24): Xaa is A or G or is absent
XXVPQALSNITIQIMXXXXXXXXXLGEMSMIVRSXKX

SEQ ID NO: 73801 - protein, 34 aa, Artificial Sequence; identical to SEQ ID NO: 55792
  GFR-binding peptide
  MOD_RES (2)..(3)..(34): Xaa is C or S

SEQ ID NO: 73802 - protein, 40 aa, Artificial Sequence; identical to SEQ ID NO: 19926
  GFR-binding peptide
  MOD_RES (5)..(5): Xaa is C or S

SEQ ID NO: 73803 - protein, 42 aa, Artificial Sequence
  GFR-binding peptide
  MOD_RES (6)..(7)..(39)..(41): Xaa is C or S
HVPKPXXAPTKLSNITVQIMDDSSNVIIGEMSNMVVRSXGXH

SEQ ID NO: 73804 - protein, 40 aa, Artificial Sequence
  GFR-binding peptide
  MOD_RES (3)..(4)..(37)..(39): Xaa is C or S
  MOD_RES (18)..(19)..(20)..(21)..(22): Xaa is A or G
  MOD_RES (23)..(24)..(25)..(26): Xaa is A or G or is absent
APXXVPQALSNITIQIMXXXXXXXXXLGEMSMIVRSXKXS

SEQ ID NO: 73805 - protein, 39 aa, Artificial Sequence; identical to SEQ ID NO: 55800
  GFR-binding peptide
  MOD_RES (5)..(6)..(39): Xaa is C or S
  MOD_RES (20)..(21)..(22)..(23)..(24): Xaa is A or G
  MOD_RES (25)..(26)..(27)..(28): Xaa is A or G or is absent

SEQ ID NO: 73806 - protein, 42 aa, Artificial Sequence; identical to SEQ ID NO: 19930
  GFR-binding peptide
  MOD_RES (5)..(39)..(41): Xaa is C or S
  MOD_RES (19)..(20)..(21)..(22)..(23): Xaa is A or G
  MOD_RES (24)..(25)..(26)..(27): Xaa is A or G or is absent

SEQ ID NO: 73807 - protein, 39 aa, Artificial Sequence
  GFR-binding peptide
  MOD_RES (3)..(4)..(36)..(38): Xaa is C or S
ASXXVPARLSNITIQIMDAANNVVIGEMSDMVVEAXGXR

SEQ ID NO: 73808 - protein, 39 aa, Artificial Sequence; identical to SEQ ID NO: 53409
  GFR-binding peptide
  MOD_RES (4)..(5)..(37)..(39): Xaa is C or S

SEQ ID NO: 73809 - protein, 35 aa, Artificial Sequence; identical to SEQ ID NO: 19932
  GFR-binding peptide
  MOD_RES (1)..(1): Xaa is C or S
  MOD_RES (17)..(18)..(19)..(20)..(21): Xaa is A or G
  MOD_RES (22)..(23)..(24)..(25): Xaa is A or G or is absent

SEQ ID NO: 73810 - protein, 38 aa, Artificial Sequence; identical to SEQ ID NO: 55810
  GFR-binding peptide
  MOD_RES (4)..(5)..(36)..(38): Xaa is C or S

SEQ ID NO: 73811 - protein, 38 aa, Artificial Sequence; identical to SEQ ID NO: 19933
  GFR-binding peptide
  MOD_RES (1)..(38): Xaa is C or S
  MOD_RES (17)..(18)..(19)..(20)..(21): Xaa is A or G
  MOD_RES (22)..(23)..(24)..(25): Xaa is A or G or is absent

SEQ ID NO: 73812 - protein, 42 aa, Artificial Sequence; identical to SEQ ID NO: 19934
  GFR-binding peptide
  MOD_RES (2)..(39)..(41): Xaa is C or S

SEQ ID NO: 73813 - protein, 38 aa, Artificial Sequence
  GFR-binding peptide
  MOD_RES (1)..(2)..(35)..(37): Xaa is C or S
  MOD_RES (16)..(17)..(18)..(19)..(20): Xaa is A or G
  MOD_RES (21)..(22)..(23)..(24): Xaa is A or G or is absent
XXVPQALSNITIQIMXXXXXXXXXLGEMSMIVRSXKXS

SEQ ID NO: 73814 - protein, 39 aa, Artificial Sequence; identical to SEQ ID NO: 53419
  GFR-binding peptide
  MOD_RES (3)..(4)..(38): Xaa is C or S
  MOD_RES (18)..(19)..(20)..(21)..(22): Xaa is A or G
  MOD_RES (23)..(24)..(25)..(26): Xaa is A or G or is absent

SEQ ID NO: 73815 - protein, 34 aa, Artificial Sequence; identical to SEQ ID NO: 19937
  GFR-binding peptide
  MOD_RES (1)..(1): Xaa is C or S
  MOD_RES (15)..(16)..(17)..(18)..(19): Xaa is A or G
  MOD_RES (20)..(21)..(22)..(23): Xaa is A or G or is absent

SEQ ID NO: 73816 - protein, 41 aa, Artificial Sequence; identical to SEQ ID NO: 53420
  GFR-binding peptide
  MOD_RES (5)..(6)..(39)..(41): Xaa is C or S
  MOD_RES (20)..(21)..(22)..(23)..(24): Xaa is A or G
  MOD_RES (25)..(26)..(27)..(28): Xaa is A or G or is absent

SEQ ID NO: 73817 - protein, 42 aa, Artificial Sequence
  GFR-binding peptide
  MOD_RES (5)..(6)..(40)..(42): Xaa is C or S
  MOD_RES (20)..(21)..(22)..(23)..(24): Xaa is A or G
  MOD_RES (25)..(26)..(27)..(28): Xaa is A or G or is absent
VPKPXXAPTKLSNITVQIMXXXXXXXXXLGEMSNMVVRSXGX

SEQ ID NO: 73818 - protein, 40 aa, Artificial Sequence; identical to SEQ ID NO: 19939
  GFR-binding peptide
  MOD_RES (3)..(37)..(39): Xaa is C or S

SEQ ID NO: 73819 - protein, 40 aa, Artificial Sequence
  GFR-binding peptide
  MOD_RES (3)..(4)..(38)..(40): Xaa is C or S
  MOD_RES (18)..(19)..(20)..(21)..(22): Xaa is A or G
  MOD_RES (23)..(24)..(25)..(26): Xaa is A or G or is absent
GPXXTPTKMSNITMQIMXXXXXXXXXIGEMSGMVVDRXGX

SEQ ID NO: 73820 - protein, 41 aa, Artificial Sequence; identical to SEQ ID NO: 19940
  GFR-binding peptide
  MOD_RES (3)..(40): Xaa is C or S
  MOD_RES (19)..(20)..(21)..(22)..(23): Xaa is A or G
  MOD_RES (24)..(25)..(26)..(27): Xaa is A or G or is absent

SEQ ID NO: 73821 - protein, 34 aa, Artificial Sequence
  GFR-binding peptide
  MOD_RES (34)..(34): Xaa is C or S
  MOD_RES (14)..(15)..(16)..(17)..(18): Xaa is A or G
  MOD_RES (19)..(20)..(21)..(22): Xaa is A or G or is absent
TPTKMSNITMQIMXXXXXXXXXIGEMSGMVVDRX

SEQ ID NO: 73822 - protein, 42 aa, Artificial Sequence; identical to SEQ ID NO: 19941
  GFR-binding peptide
  MOD_RES (3)..(40)..(42): Xaa is C or S
  MOD_RES (19)..(20)..(21)..(22)..(23): Xaa is A or G
  MOD_RES (24)..(25)..(26)..(27): Xaa is A or G or is absent

SEQ ID NO: 73823 - protein, 35 aa, Artificial Sequence
  GFR-binding peptide
  MOD_RES (4)..(5): Xaa is C or S
PASXXVPARLSNITIQIMDAANNVVLGEMSDMVVE

SEQ ID NO: 73824 - protein, 42 aa, Artificial Sequence; identical to SEQ ID NO: 19942
  GFR-binding peptide
  MOD_RES (3)..(40)..(42): Xaa is C or S
  MOD_RES (19)..(20)..(21)..(22)..(23): Xaa is A or G
  MOD_RES (24)..(25)..(26)..(27): Xaa is A or G or is absent

SEQ ID NO: 73825 - protein, 34 aa, Artificial Sequence
  GFR-binding peptide
  MOD_RES (1)..(2)..(33): Xaa is C or S
XXVPQDLSNITIQIMVGRTPKVLGEMSMVVKSXK

SEQ ID NO: 73826 - protein, 40 aa, Artificial Sequence; identical to SEQ ID NO: 19943
  GFR-binding peptide
  MOD_RES (6)..(40): Xaa is C or S
  MOD_RES (20)..(21)..(22)..(23)..(24): Xaa is A or G
  MOD_RES (25)..(26)..(27)..(28): Xaa is A or G or is absent

SEQ ID NO: 73827 - protein, 36 aa, Artificial Sequence
  GFR-binding peptide
  MOD_RES (1)..(2)..(34)..(36): Xaa is C or S
XXAPTKLSNITVQIMDDSSNVILGEMSNMVVRSXGX

SEQ ID NO: 73828 - protein, 38 aa, Artificial Sequence; identical to SEQ ID NO: 19944
  GFR-binding peptide
  MOD_RES (35)..(37): Xaa is C or S
  MOD_RES (14)..(15)..(16)..(17)..(18): Xaa is A or G
  MOD_RES (19)..(20)..(21)..(22): Xaa is A or G or is absent

SEQ ID NO: 73829 - protein, 41 aa, Artificial Sequence; identical to SEQ ID NO: 19946
  GFR-binding peptide
  MOD_RES (2)..(39)..(41): Xaa is C or S
  MOD_RES (18)..(19)..(20)..(21)..(22): Xaa is A or G
  MOD_RES (23)..(24)..(25)..(26): Xaa is A or G or is absent

SEQ ID NO: 73830 - protein, 39 aa, Artificial Sequence; identical to SEQ ID NO: 55829
  GFR-binding peptide
  MOD_RES (6)..(7)..(38): Xaa is C or S

SEQ ID NO: 73831 - protein, 39 aa, Artificial Sequence; identical to SEQ ID NO: 19947
  GFR-binding peptide
  MOD_RES (37)..(39): Xaa is C or S
  MOD_RES (16)..(17)..(18)..(19)..(20): Xaa is A or G
  MOD_RES (21)..(22)..(23)..(24): Xaa is A or G or is absent

SEQ ID NO: 73832 - protein, 39 aa, Artificial Sequence
  GFR-binding peptide
  MOD_RES (5)..(6): Xaa is C or S
  MOD_RES (20)..(21)..(22)..(23)..(24): Xaa is A or G
  MOD_RES (25)..(26)..(27)..(28): Xaa is A or G or is absent
APASXXVPARLSNITIQIMXXXXXXXXXLGEMSDMVVEA

SEQ ID NO: 73833 - protein, 41 aa, Artificial Sequence; identical to SEQ ID NO: 19948
  GFR-binding peptide
  MOD_RES (5)..(39)..(41): Xaa is C or S
  MOD_RES (19)..(20)..(21)..(22)..(23): Xaa is A or G
  MOD_RES (24)..(25)..(26)..(27): Xaa is A or G or is absent

SEQ ID NO: 73834 - protein, 40 aa, Artificial Sequence
  GFR-binding peptide
  MOD_RES (6)..(7): Xaa is C or S
  MOD_RES (21)..(22)..(23)..(24)..(25): Xaa is A or G
  MOD_RES (26)..(27)..(28)..(29): Xaa is A or G or is absent
STPPTXXVPTRLSNITIQIMXXXXXXXXXLGEMSDMVVES

SEQ ID NO: 73835 - protein, 38 aa, Artificial Sequence
  GFR-binding peptide
  MOD_RES (4)..(5)..(36)..(38): Xaa is C or S
ASPXXVPQDLSNITIQIMVGRTPKVLGEMSMVVKSXKX

SEQ ID NO: 73836 - protein, 37 aa, Artificial Sequence
  GFR-binding peptide
  MOD_RES (2)..(3)..(34)..(36): Xaa is C or S
PXXVPQDLSNITIQIMVGRTPKVLGEMSMVVKSXKXS

SEQ ID NO: 73837 - protein, 40 aa, Artificial Sequence; identical to SEQ ID NO: 19950
  GFR-binding peptide
  MOD_RES (7)..(7): Xaa is C or S
  MOD_RES (21)..(22)..(23)..(24)..(25): Xaa is A or G
  MOD_RES (26)..(27)..(28)..(29): Xaa is A or G or is absent

SEQ ID NO: 73838 - protein, 34 aa, Artificial Sequence
  GFR-binding peptide
  MOD_RES (3)..(4): Xaa is C or S
APXXVPQALSNITIQIMVGRKPKVLGEMSMIVRS

SEQ ID NO: 73839 - protein, 40 aa, Artificial Sequence; identical to SEQ ID NO: 19952
  GFR-binding peptide
  MOD_RES (3)..(40): Xaa is C or S

SEQ ID NO: 73840 - protein, 40 aa, Artificial Sequence
  GFR-binding peptide
  MOD_RES (5)..(6)..(40): Xaa is C or S
  MOD_RES (20)..(21)..(22)..(23)..(24): Xaa is A or G
  MOD_RES (25)..(26)..(27)..(28): Xaa is A or G or is absent
TPPTXXVPTRLSNITIQIMXXXXXXXXXIGEMSDMVVESX

SEQ ID NO: 73841 - protein, 34 aa, Artificial Sequence
  GFR-binding peptide
  MOD_RES (2)..(3): Xaa is C or S
PXXTPTKMSNITMQIMNDKQQIILGEMSGMVVDR

SEQ ID NO: 73842 - protein, 37 aa, Artificial Sequence; identical to SEQ ID NO: 19954
  GFR-binding peptide
  MOD_RES (4)..(4): Xaa is C or S
  MOD_RES (18)..(19)..(20)..(21)..(22): Xaa is A or G
  MOD_RES (23)..(24)..(25)..(26): Xaa is A or G or is absent

SEQ ID NO: 73843 - protein, 39 aa, Artificial Sequence; identical to SEQ ID NO: 19955
  GFR-binding peptide
  MOD_RES (2)..(39): Xaa is C or S
  MOD_RES (18)..(19)..(20)..(21)..(22): Xaa is A or G
  MOD_RES (23)..(24)..(25)..(26): Xaa is A or G or is absent

SEQ ID NO: 73844 - protein, 38 aa, Artificial Sequence
  GFR-binding peptide
  MOD_RES (5)..(6)..(38): Xaa is C or S
SAGPXXTPTKMSNITMQIMNDKQQIILGEMSGMVVDRX

SEQ ID NO: 73845 - protein, 33 aa, Artificial Sequence; identical to SEQ ID NO: 19956
  GFR-binding peptide

SEQ ID NO: 73846 - protein, 40 aa, Artificial Sequence; identical to SEQ ID NO: 19957
  GFR-binding peptide
  MOD_RES (5)..(5): Xaa is C or S

SEQ ID NO: 73847 - protein, 36 aa, Artificial Sequence; identical to SEQ ID NO: 19958
  GFR-binding peptide
  MOD_RES (36)..(36): Xaa is C or S

SEQ ID NO: 73848 - protein, 37 aa, Artificial Sequence
  GFR-binding peptide
  MOD_RES (4)..(5): Xaa is C or S
  MOD_RES (19)..(20)..(21)..(22)..(23): Xaa is A or G
  MOD_RES (24)..(25)..(26)..(27): Xaa is A or G or is absent
PASXXVPARLSNITIQIMXXXXXXXXXLGEMSDMVVE

SEQ ID NO: 73849 - protein, 40 aa, Artificial Sequence
  GFR-binding peptide
  MOD_RES (6)..(7): Xaa is C or S
  MOD_RES (21)..(22)..(23)..(24)..(25): Xaa is A or G
  MOD_RES (26)..(27)..(28)..(29): Xaa is A or G or is absent
AAPASXXVPARLSNITIQIMXXXXXXXXXLGEMSDMVVEA

SEQ ID NO: 73850 - protein, 42 aa, Artificial Sequence; identical to SEQ ID NO: 19960
  GFR-binding peptide
  MOD_RES (3)..(40)..(42): Xaa is C or S
  MOD_RES (19)..(20)..(21)..(22)..(23): Xaa is A or G
  MOD_RES (24)..(25)..(26)..(27): Xaa is A or G or is absent

SEQ ID NO: 73851 - protein, 39 aa, Artificial Sequence
  GFR-binding peptide
  MOD_RES (4)..(5)..(39): Xaa is C or S
  MOD_RES (19)..(20)..(21)..(22)..(23): Xaa is A or G
  MOD_RES (24)..(25)..(26)..(27): Xaa is A or G or is absent
AGPXXTPTKMSNITMQIMXXXXXXXXXIGEMSGMVVDRX

SEQ ID NO: 73852 - protein, 34 aa, Artificial Sequence; identical to SEQ ID NO: 53462
  GFR-binding peptide
  MOD_RES (2)..(3)..(34): Xaa is C or S

SEQ ID NO: 73853 - protein, 39 aa, Artificial Sequence
  GFR-binding peptide
  MOD_RES (5)..(6)..(39): Xaa is C or S
  MOD_RES (20)..(21)..(22)..(23)..(24): Xaa is A or G
  MOD_RES (25)..(26)..(27)..(28): Xaa is A or G or is absent
SAAPXXVPQALSNITIQIMXXXXXXXXXLGEMSMIVRSX

SEQ ID NO: 73854 - protein, 37 aa, Artificial Sequence; identical to SEQ ID NO: 53466
  GFR-binding peptide
  MOD_RES (5)..(6): Xaa is C or S

SEQ ID NO: 73855 - protein, 34 aa, Artificial Sequence
  GFR-binding peptide
  MOD_RES (1)..(2)..(33): Xaa is C or S
XXAPVKTSNITMQIMDNGRVLLLGEMSMIVEEXG

SEQ ID NO: 73856 - protein, 32 aa, Artificial Sequence
  GFR-binding peptide
  MOD_RES (32)..(32): Xaa is C or S
VPARLSNITIQIMDAANNVVIGEMSDMVVEAX

SEQ ID NO: 73857 - protein, 32 aa, Artificial Sequence
  GFR-binding peptide
  MOD_RES (1)..(2): Xaa is C or S
XXVPTRLSNITIQIMDSANNVVIGEMSDMVVE

SEQ ID NO: 73858 - protein, 34 aa, Artificial Sequence
  GFR-binding peptide
  MOD_RES (2)..(3): Xaa is C or S
SXXVPARLSNITIQIMDAANNVVIGEMSDMVVEA

SEQ ID NO: 73859 - protein, 34 aa, Artificial Sequence; identical to SEQ ID NO: 53473
  GFR-binding peptide
  MOD_RES (1)..(1): Xaa is C or S
  MOD_RES (15)..(16)..(17)..(18)..(19): Xaa is A or G
  MOD_RES (20)..(21)..(22)..(23): Xaa is A or G or is absent

SEQ ID NO: 73860 - protein, 32 aa, Artificial Sequence; identical to SEQ ID NO: 19967
  GFR-binding peptide
  MOD_RES (14)..(15)..(16)..(17)..(18): Xaa is A or G
  MOD_RES (19)..(20)..(21)..(22): Xaa is A or G or is absent

SEQ ID NO: 73861 - protein, 34 aa, Artificial Sequence
  GFR-binding peptide
  MOD_RES (1)..(2)..(33): Xaa is C or S
XXAPVKTSNITMQIMDNGRVLLIGEMSMIVEEXG

SEQ ID NO: 73862 - protein, 37 aa, Artificial Sequence
  GFR-binding peptide
  MOD_RES (34)..(36): Xaa is C or S
  MOD_RES (14)..(15)..(16)..(17)..(18): Xaa is A or G
  MOD_RES (19)..(20)..(21)..(22): Xaa is A or G or is absent
VPTRLSNITIQIMXXXXXXXXXLGEMSDMVVESXGXR

SEQ ID NO: 73863 - protein, 41 aa, Artificial Sequence; identical to SEQ ID NO: 19968
  GFR-binding peptide
  MOD_RES (5)..(5): Xaa is C or S
  MOD_RES (21)..(22)..(23)..(24)..(25): Xaa is A or G
  MOD_RES (26)..(27)..(28)..(29): Xaa is A or G or is absent

SEQ ID NO: 73864 - protein, 38 aa, Artificial Sequence
  GFR-binding peptide
  MOD_RES (2)..(3)..(36)..(38): Xaa is C or S
  MOD_RES (17)..(18)..(19)..(20)..(21): Xaa is A or G
  MOD_RES (22)..(23)..(24)..(25): Xaa is A or G or is absent
TXXAPVKTSNITMQIMXXXXXXXXXLGEMSMIVEEXGX

SEQ ID NO: 73865 - protein, 37 aa, Artificial Sequence; identical to SEQ ID NO: 19969
  GFR-binding peptide
  MOD_RES (35)..(37): Xaa is C or S
  MOD_RES (14)..(15)..(16)..(17)..(18): Xaa is A or G
  MOD_RES (19)..(20)..(21)..(22): Xaa is A or G or is absent

SEQ ID NO: 73866 - protein, 37 aa, Artificial Sequence
  GFR-binding peptide
  MOD_RES (4)..(5): Xaa is C or S
  MOD_RES (19)..(20)..(21)..(22)..(23): Xaa is A or G
  MOD_RES (24)..(25)..(26)..(27): Xaa is A or G or is absent
PKPXXAPTKLSNITVQIMXXXXXXXXXLGEMSNMVVR

SEQ ID NO: 73867 - protein, 32 aa, Artificial Sequence; identical to SEQ ID NO: 55871
  GFR-binding peptide
  MOD_RES (31)..(31): Xaa is C or S

SEQ ID NO: 73868 - protein, 35 aa, Artificial Sequence
  GFR-binding peptide
  MOD_RES (2)..(3): Xaa is C or S
  MOD_RES (17)..(18)..(19)..(20)..(21): Xaa is A or G
  MOD_RES (22)..(23)..(24)..(25): Xaa is A or G or is absent
TXXAPVKTSNITMQIMXXXXXXXXXLGEMSMIVEE

SEQ ID NO: 73869 - protein, 44 aa, Artificial Sequence
  GFR-binding peptide
  MOD_RES (6)..(7)..(41)..(43): Xaa is C or S
  MOD_RES (21)..(22)..(23)..(24)..(25): Xaa is A or G
  MOD_RES (26)..(27)..(28)..(29): Xaa is A or G or is absent
GSAGPXXTPTKMSNITMQIMXXXXXXXXXLGEMSGMVVDRXGXS

SEQ ID NO: 73870 - protein, 43 aa, Artificial Sequence
  GFR-binding peptide
  MOD_RES (6)..(7)..(41)..(43): Xaa is C or S
  MOD_RES (21)..(22)..(23)..(24)..(25): Xaa is A or G
  MOD_RES (26)..(27)..(28)..(29): Xaa is A or G or is absent
AAPASXXVPARLSNITIQIMXXXXXXXXXLGEMSDMVVEAXGX

SEQ ID NO: 73871 - protein, 36 aa, Artificial Sequence; identical to SEQ ID NO: 19970
  GFR-binding peptide
  MOD_RES (34)..(36): Xaa is C or S
  MOD_RES (14)..(15)..(16)..(17)..(18): Xaa is A or G
  MOD_RES (19)..(20)..(21)..(22): Xaa is A or G or is absent

SEQ ID NO: 73872 - protein, 38 aa, Artificial Sequence; identical to SEQ ID NO: 19971
  GFR-binding peptide
  MOD_RES (36)..(38): Xaa is C or S

SEQ ID NO: 73873 - protein, 37 aa, Artificial Sequence
  GFR-binding peptide
  MOD_RES (3)..(4)..(36): Xaa is C or S
GPXXTPTKMSNITMQIMNDKQQIIIGEMSGMVVDRXG

SEQ ID NO: 73874 - protein, 40 aa, Artificial Sequence; identical to SEQ ID NO: 19972
  GFR-binding peptide
  MOD_RES (4)..(38)..(40): Xaa is C or S
  MOD_RES (18)..(19)..(20)..(21)..(22): Xaa is A or G
  MOD_RES (23)..(24)..(25)..(26): Xaa is A or G or is absent

SEQ ID NO: 73875 - protein, 41 aa, Artificial Sequence; identical to SEQ ID NO: 19974
  GFR-binding peptide
  MOD_RES (6)..(40): Xaa is C or S
  MOD_RES (20)..(21)..(22)..(23)..(24): Xaa is A or G
  MOD_RES (25)..(26)..(27)..(28): Xaa is A or G or is absent

SEQ ID NO: 73876 - protein, 37 aa, Artificial Sequence; identical to SEQ ID NO: 19975
  GFR-binding peptide
  MOD_RES (3)..(3): Xaa is C or S

SEQ ID NO: 73877 - protein, 33 aa, Artificial Sequence
  GFR-binding peptide
  MOD_RES (2)..(3): Xaa is C or S
SXXVPARLSNITIQIMDAANNVVLGEMSDMVVE

SEQ ID NO: 73878 - protein, 38 aa, Artificial Sequence
  GFR-binding peptide
  MOD_RES (3)..(4)..(38): Xaa is C or S
  MOD_RES (18)..(19)..(20)..(21)..(22): Xaa is A or G
  MOD_RES (23)..(24)..(25)..(26): Xaa is A or G or is absent
GPXXTPTKMSNITMQIMXXXXXXXXXIGEMSGMVVDRX

SEQ ID NO: 73879 - protein, 37 aa, Artificial Sequence
  GFR-binding peptide
  MOD_RES (3)..(4)..(36): Xaa is C or S
ASXXVPARLSNITIQIMDAANNVVLGEMSDMVVEAXG

SEQ ID NO: 73880 - protein, 40 aa, Artificial Sequence
  GFR-binding peptide
  MOD_RES (4)..(5)..(37)..(39): Xaa is C or S
PASXXVPARLSNITIQIMDAANNVVLGEMSDMVVEAXGXR

SEQ ID NO: 73881 - protein, 38 aa, Artificial Sequence; identical to SEQ ID NO: 19978
  GFR-binding peptide
  MOD_RES (5)..(5): Xaa is C or S
  MOD_RES (19)..(20)..(21)..(22)..(23): Xaa is A or G
  MOD_RES (24)..(25)..(26)..(27): Xaa is A or G or is absent

SEQ ID NO: 73882 - protein, 39 aa, Artificial Sequence
  GFR-binding peptide
  MOD_RES (2)..(3)..(36)..(38): Xaa is C or S
  MOD_RES (17)..(18)..(19)..(20)..(21): Xaa is A or G
  MOD_RES (22)..(23)..(24)..(25): Xaa is A or G or is absent
PXXVPQALSNITIQIMXXXXXXXXXLGEMSMIVRSXKXS

SEQ ID NO: 73883 - protein, 32 aa, Artificial Sequence
  GFR-binding peptide
  MOD_RES (1)..(32): Xaa is C or S
XAPVKTSNITMQIMDNGRVLLIGEMSMIVEEX

SEQ ID NO: 73884 - protein, 39 aa, Artificial Sequence
  GFR-binding peptide
  MOD_RES (3)..(4)..(38): Xaa is C or S
  MOD_RES (18)..(19)..(20)..(21)..(22): Xaa is A or G
  MOD_RES (23)..(24)..(25)..(26): Xaa is A or G or is absent
ASXXVPARLSNITIQIMXXXXXXXXXLGEMSDMVVEAXG

SEQ ID NO: 73885 - protein, 35 aa, Artificial Sequence; identical to SEQ ID NO: 19980
  GFR-binding peptide
  MOD_RES (35)..(35): Xaa is C or S

SEQ ID NO: 73886 - protein, 41 aa, Artificial Sequence
  GFR-binding peptide
  MOD_RES (4)..(5)..(39)..(41): Xaa is C or S
  MOD_RES (19)..(20)..(21)..(22)..(23): Xaa is A or G
  MOD_RES (24)..(25)..(26)..(27): Xaa is A or G or is absent
PPTXXVPTRLSNITIQIMXXXXXXXXXIGEMSDMVVESXGX

SEQ ID NO: 73887 - protein, 31 aa, Artificial Sequence
  GFR-binding peptide
  MOD_RES (31)..(31): Xaa is C or S
VPQDLSNITIQIMVGRTPKVLGEMSMVVKSX

SEQ ID NO: 73888 - protein, 38 aa, Artificial Sequence; identical to SEQ ID NO: 19981
  GFR-binding peptide
  MOD_RES (3)..(3): Xaa is C or S

SEQ ID NO: 73889 - protein, 36 aa, Artificial Sequence
  GFR-binding peptide
  MOD_RES (3)..(4): Xaa is C or S
  MOD_RES (18)..(19)..(20)..(21)..(22): Xaa is A or G
  MOD_RES (23)..(24)..(25)..(26): Xaa is A or G or is absent
GPXXTPTKMSNITMQIMXXXXXXXXXLGEMSGMVVD

SEQ ID NO: 73890 - protein, 39 aa, Artificial Sequence
  GFR-binding peptide
  MOD_RES (1)..(2)..(36)..(38): Xaa is C or S
  MOD_RES (16)..(17)..(18)..(19)..(20): Xaa is A or G
  MOD_RES (21)..(22)..(23)..(24): Xaa is A or G or is absent
XXVPTRLSNITIQIMXXXXXXXXXIGEMSDMVVESXGXR

SEQ ID NO: 73891 - protein, 42 aa, Artificial Sequence; identical to SEQ ID NO: 19984
  GFR-binding peptide
  MOD_RES (4)..(41): Xaa is C or S

SEQ ID NO: 73892 - protein, 40 aa, Artificial Sequence
  GFR-binding peptide
  MOD_RES (5)..(6)..(38)..(40): Xaa is C or S
VPKPXXAPTKLSNITVQIMDDSSNVILGEMSNMVVRSXGX

SEQ ID NO: 73893 - protein, 38 aa, Artificial Sequence
  GFR-binding peptide
  MOD_RES (1)..(35)..(37): Xaa is C or S
  MOD_RES (15)..(16)..(17)..(18)..(19): Xaa is A or G
  MOD_RES (20)..(21)..(22)..(23): Xaa is A or G or is absent
XVPARLSNITIQIMXXXXXXXXXIGEMSDMVVEAXGXR

SEQ ID NO: 73894 - protein, 38 aa, Artificial Sequence; identical to SEQ ID NO: 19985
  GFR-binding peptide
  MOD_RES (5)..(5): Xaa is C or S

SEQ ID NO: 73895 - protein, 33 aa, Artificial Sequence; identical to SEQ ID NO: 55895
  GFR-binding peptide
  MOD_RES (1)..(32): Xaa is C or S

SEQ ID NO: 73896 - protein, 36 aa, Artificial Sequence; identical to SEQ ID NO: 19987
  GFR-binding peptide
  MOD_RES (36)..(36): Xaa is C or S

SEQ ID NO: 73897 - protein, 36 aa, Artificial Sequence; identical to SEQ ID NO: 19990
  GFR-binding peptide
  MOD_RES (2)..(2): Xaa is C or S

SEQ ID NO: 73898 - protein, 37 aa, Artificial Sequence; identical to SEQ ID NO: 19991
  GFR-binding peptide
  MOD_RES (36)..(36): Xaa is C or S
  MOD_RES (15)..(16)..(17)..(18)..(19): Xaa is A or G
  MOD_RES (20)..(21)..(22)..(23): Xaa is A or G or is absent

SEQ ID NO: 73899 - protein, 33 aa, Artificial Sequence; identical to SEQ ID NO: 19992
  GFR-binding peptide

SEQ ID NO: 73900 - protein, 37 aa, Artificial Sequence
  GFR-binding peptide
  MOD_RES (3)..(4)..(36): Xaa is C or S
KPXXAPTKLSNITVQIMDDSSNVILGEMSNMVVRSXG

SEQ ID NO: 73901 - protein, 34 aa, Artificial Sequence; identical to SEQ ID NO: 19993
  GFR-binding peptide

SEQ ID NO: 73902 - protein, 34 aa, Artificial Sequence
  GFR-binding peptide
  MOD_RES (1)..(33): Xaa is C or S
XTPTKMSNITMQIMNDKQQIILGEMSGMVVDRXG

SEQ ID NO: 73903 - protein, 36 aa, Artificial Sequence; identical to SEQ ID NO: 19995
  GFR-binding peptide
  MOD_RES (2)..(2): Xaa is C or S

SEQ ID NO: 73904 - protein, 37 aa, Artificial Sequence; identical to SEQ ID NO: 55907
  GFR-binding peptide
  MOD_RES (4)..(5)..(36): Xaa is C or S

SEQ ID NO: 73905 - protein, 42 aa, Artificial Sequence
  GFR-binding peptide
  MOD_RES (5)..(6)..(39)..(41): Xaa is C or S
  MOD_RES (20)..(21)..(22)..(23)..(24): Xaa is A or G
  MOD_RES (25)..(26)..(27)..(28): Xaa is A or G or is absent
SAAPXXVPQALSNITIQIMXXXXXXXXXLGEMSMIVRSXKXS

SEQ ID NO: 73906 - protein, 38 aa, Artificial Sequence
  GFR-binding peptide
  MOD_RES (3)..(4)..(37): Xaa is C or S
  MOD_RES (18)..(19)..(20)..(21)..(22): Xaa is A or G
  MOD_RES (23)..(24)..(25)..(26): Xaa is A or G or is absent
SPXXVSQDLSNITIQIMXXXXXXXXXLGEMSMIVKSXK

SEQ ID NO: 73907 - protein, 38 aa, Artificial Sequence
  GFR-binding peptide
  MOD_RES (2)..(3)..(37): Xaa is C or S
  MOD_RES (17)..(18)..(19)..(20)..(21): Xaa is A or G
  MOD_RES (22)..(23)..(24)..(25): Xaa is A or G or is absent
SXXVPARLSNITIQIMXXXXXXXXXIGEMSDMVVEAXG

SEQ ID NO: 73908 - protein, 37 aa, Artificial Sequence
  GFR-binding peptide
  MOD_RES (4)..(5)..(36): Xaa is C or S
AAPXXVPQALSNITIQIMVGRKPKVLGEMSMIVRSXK

SEQ ID NO: 73909 - protein, 35 aa, Artificial Sequence
  GFR-binding peptide
  MOD_RES (1)..(32)..(34): Xaa is C or S
XAPVKTSNITMQIMDNGRVLLIGEMSMIVEEXGXL

SEQ ID NO: 73910 - protein, 38 aa, Artificial Sequence; identical to SEQ ID NO: 19998
  GFR-binding peptide
  MOD_RES (4)..(4): Xaa is C or S
  MOD_RES (20)..(21)..(22)..(23)..(24): Xaa is A or G
  MOD_RES (25)..(26)..(27)..(28): Xaa is A or G or is absent

SEQ ID NO: 73911 - protein, 33 aa, Artificial Sequence
  GFR-binding peptide
  MOD_RES (1)..(33): Xaa is C or S
XTPTKMSNITMQIMNDKQQIILGEMSGMVVDRX

SEQ ID NO: 73912 - protein, 32 aa, Artificial Sequence; identical to SEQ ID NO: 55917
  GFR-binding peptide
  MOD_RES (14)..(15)..(16)..(17)..(18): Xaa is A or G
  MOD_RES (19)..(20)..(21)..(22): Xaa is A or G or is absent

SEQ ID NO: 73913 - protein, 35 aa, Artificial Sequence
  GFR-binding peptide
  MOD_RES (34)..(34): Xaa is C or S
  MOD_RES (14)..(15)..(16)..(17)..(18): Xaa is A or G
  MOD_RES (19)..(20)..(21)..(22): Xaa is A or G or is absent
VPARLSNITIQIMXXXXXXXXXIGEMSDMVVEAXG

SEQ ID NO: 73914 - protein, 38 aa, Artificial Sequence; identical to SEQ ID NO: 55921
  GFR-binding peptide
  MOD_RES (1)..(2)..(35)..(37): Xaa is C or S
  MOD_RES (16)..(17)..(18)..(19)..(20): Xaa is A or G
  MOD_RES (21)..(22)..(23)..(24): Xaa is A or G or is absent

SEQ ID NO: 73915 - protein, 38 aa, Artificial Sequence; identical to SEQ ID NO: 20002
  GFR-binding peptide
  MOD_RES (1)..(35)..(37): Xaa is C or S
  MOD_RES (15)..(16)..(17)..(18)..(19): Xaa is A or G
  MOD_RES (20)..(21)..(22)..(23): Xaa is A or G or is absent

SEQ ID NO: 73916 - protein, 41 aa, Artificial Sequence; identical to SEQ ID NO: 53538
  GFR-binding peptide
  MOD_RES (5)..(6)..(39)..(41): Xaa is C or S
  MOD_RES (20)..(21)..(22)..(23)..(24): Xaa is A or G
  MOD_RES (25)..(26)..(27)..(28): Xaa is A or G or is absent

SEQ ID NO: 73917 - protein, 40 aa, Artificial Sequence; identical to SEQ ID NO: 20006
  GFR-binding peptide
  MOD_RES (3)..(37)..(39): Xaa is C or S
  MOD_RES (17)..(18)..(19)..(20)..(21): Xaa is A or G
  MOD_RES (22)..(23)..(24)..(25): Xaa is A or G or is absent

SEQ ID NO: 73918 - protein, 38 aa, Artificial Sequence
  GFR-binding peptide
  MOD_RES (3)..(4)..(36)..(38): Xaa is C or S
PTXXVPTRLSNITIQIMDSANNVVIGEMSDMVVESXGX

SEQ ID NO: 73919 - protein, 41 aa, Artificial Sequence; identical to SEQ ID NO: 20008
  GFR-binding peptide
  MOD_RES (4)..(38)..(40): Xaa is C or S
  MOD_RES (18)..(19)..(20)..(21)..(22): Xaa is A or G
  MOD_RES (23)..(24)..(25)..(26): Xaa is A or G or is absent

SEQ ID NO: 73920 - protein, 34 aa, Artificial Sequence
  GFR-binding peptide
  MOD_RES (1)..(2)..(34): Xaa is C or S
XXVPARLSNITIQIMDAANNVVIGEMSDMVVEAX

SEQ ID NO: 73921 - protein, 36 aa, Artificial Sequence
  GFR-binding peptide
  MOD_RES (1)..(33)..(35): Xaa is C or S
XVPARLSNITIQIMDAANNVVLGEMSDMVVEAXGXR

SEQ ID NO: 73922 - protein, 36 aa, Artificial Sequence
  GFR-binding peptide
  MOD_RES (3)..(4): Xaa is C or S
  MOD_RES (18)..(19)..(20)..(21)..(22): Xaa is A or G
  MOD_RES (23)..(24)..(25)..(26): Xaa is A or G or is absent
SPXXVPQDLSNITIQIMXXXXXXXXXLGEMSMVVKS

SEQ ID NO: 73923 - protein, 41 aa, Artificial Sequence; identical to SEQ ID NO: 20010
  GFR-binding peptide
  MOD_RES (6)..(40): Xaa is C or S

SEQ ID NO: 73924 - protein, 41 aa, Artificial Sequence
  GFR-binding peptide
  MOD_RES (3)..(4)..(38)..(40): Xaa is C or S
  MOD_RES (18)..(19)..(20)..(21)..(22): Xaa is A or G
  MOD_RES (23)..(24)..(25)..(26): Xaa is A or G or is absent
PTXXVPTRLSNITIQIMXXXXXXXXXLGEMSDMVVESXGXR

SEQ ID NO: 73925 - protein, 36 aa, Artificial Sequence; identical to SEQ ID NO: 20013
  GFR-binding peptide
  MOD_RES (1)..(1): Xaa is C or S
  MOD_RES (17)..(18)..(19)..(20)..(21): Xaa is A or G
  MOD_RES (22)..(23)..(24)..(25): Xaa is A or G or is absent

SEQ ID NO: 73926 - protein, 37 aa, Artificial Sequence; identical to SEQ ID NO: 20014
  GFR-binding peptide
  MOD_RES (35)..(37): Xaa is C or S

SEQ ID NO: 73927 - protein, 41 aa, Artificial Sequence
  GFR-binding peptide
  MOD_RES (4)..(5)..(39)..(41): Xaa is C or S
  MOD_RES (19)..(20)..(21)..(22)..(23): Xaa is A or G
  MOD_RES (24)..(25)..(26)..(27): Xaa is A or G or is absent
PPTXXVPTRLSNITIQIMXXXXXXXXXLGEMSDMVVESXGX

SEQ ID NO: 73928 - protein, 36 aa, Artificial Sequence
  GFR-binding peptide
  MOD_RES (4)..(5)..(36): Xaa is C or S
PSTXXAPVKTSNITMQIMDNGRVLLIGEMSMIVEEX

SEQ ID NO: 73929 - protein, 36 aa, Artificial Sequence; identical to SEQ ID NO: 53558
  GFR-binding peptide
  MOD_RES (1)..(2)..(33)..(35): Xaa is C or S

SEQ ID NO: 73930 - protein, 43 aa, Artificial Sequence; identical to SEQ ID NO: 20016
  GFR-binding peptide
  MOD_RES (7)..(41)..(43): Xaa is C or S

SEQ ID NO: 73931 - protein, 45 aa, Artificial Sequence; identical to SEQ ID NO: 20017
  GFR-binding peptide
  MOD_RES (5)..(42)..(44): Xaa is C or S

SEQ ID NO: 73932 - protein, 37 aa, Artificial Sequence
  GFR-binding peptide
  MOD_RES (3)..(4)..(36): Xaa is C or S
ASXXVPARLSNITIQIMDAANNVVIGEMSDMVVEAXG

SEQ ID NO: 73933 - protein, 38 aa, Artificial Sequence; identical to SEQ ID NO: 20018
  GFR-binding peptide
  MOD_RES (1)..(38): Xaa is C or S
  MOD_RES (17)..(18)..(19)..(20)..(21): Xaa is A or G
  MOD_RES (22)..(23)..(24)..(25): Xaa is A or G or is absent

SEQ ID NO: 73934 - protein, 34 aa, Artificial Sequence; identical to SEQ ID NO: 20021
  GFR-binding peptide

SEQ ID NO: 73935 - protein, 37 aa, Artificial Sequence; identical to SEQ ID NO: 20022
  GFR-binding peptide
  MOD_RES (4)..(4): Xaa is C or S

SEQ ID NO: 73936 - protein, 40 aa, Artificial Sequence
  GFR-binding peptide
  MOD_RES (2)..(3)..(37)..(39): Xaa is C or S
  MOD_RES (17)..(18)..(19)..(20)..(21): Xaa is A or G
  MOD_RES (22)..(23)..(24)..(25): Xaa is A or G or is absent
SXXVPARLSNITIQIMXXXXXXXXXIGEMSDMVVEAXGXR

SEQ ID NO: 73937 - protein, 37 aa, Artificial Sequence; identical to SEQ ID NO: 55949
  GFR-binding peptide
  MOD_RES (1)..(2)..(35)..(37): Xaa is C or S
  MOD_RES (16)..(17)..(18)..(19)..(20): Xaa is A or G
  MOD_RES (21)..(22)..(23)..(24): Xaa is A or G or is absent

SEQ ID NO: 73938 - protein, 38 aa, Artificial Sequence
  GFR-binding peptide
  MOD_RES (4)..(5)..(38): Xaa is C or S
  MOD_RES (19)..(20)..(21)..(22)..(23): Xaa is A or G
  MOD_RES (24)..(25)..(26)..(27): Xaa is A or G or is absent
PSTXXAPVKTSNITMQIMXXXXXXXXXLGEMSMIVEEX

SEQ ID NO: 73939 - protein, 42 aa, Artificial Sequence; identical to SEQ ID NO: 20025
  GFR-binding peptide
  MOD_RES (6)..(40)..(42): Xaa is C or S
  MOD_RES (20)..(21)..(22)..(23)..(24): Xaa is A or G
  MOD_RES (25)..(26)..(27)..(28): Xaa is A or G or is absent

SEQ ID NO: 73940 - protein, 39 aa, Artificial Sequence
  GFR-binding peptide
  MOD_RES (3)..(4)..(37)..(39): Xaa is C or S
  MOD_RES (18)..(19)..(20)..(21)..(22): Xaa is A or G
  MOD_RES (23)..(24)..(25)..(26): Xaa is A or G or is absent
STXXAPVKTSNITMQIMXXXXXXXXXIGEMSMIVEEXGX

SEQ ID NO: 73941 - protein, 32 aa, Artificial Sequence; identical to SEQ ID NO: 55951
  GFR-binding peptide
  MOD_RES (14)..(15)..(16)..(17)..(18): Xaa is A or G
  MOD_RES (19)..(20)..(21)..(22): Xaa is A or G or is absent

SEQ ID NO: 73942 - protein, 36 aa, Artificial Sequence; identical to SEQ ID NO: 53570
  GFR-binding peptide
  MOD_RES (2)..(3)..(36): Xaa is C or S
  MOD_RES (17)..(18)..(19)..(20)..(21): Xaa is A or G
  MOD_RES (22)..(23)..(24)..(25): Xaa is A or G or is absent

SEQ ID NO: 73943 - protein, 34 aa, Artificial Sequence; identical to SEQ ID NO: 20027
  GFR-binding peptide
  MOD_RES (14)..(15)..(16)..(17)..(18): Xaa is A or G
  MOD_RES (19)..(20)..(21)..(22): Xaa is A or G or is absent

SEQ ID NO: 73944 - protein, 44 aa, Artificial Sequence; identical to SEQ ID NO: 20028
  GFR-binding peptide
  MOD_RES (4)..(41)..(43): Xaa is C or S
  MOD_RES (20)..(21)..(22)..(23)..(24): Xaa is A or G
  MOD_RES (25)..(26)..(27)..(28): Xaa is A or G or is absent

SEQ ID NO: 73945 - protein, 38 aa, Artificial Sequence
  GFR-binding peptide
  MOD_RES (2)..(3)..(37): Xaa is C or S
  MOD_RES (17)..(18)..(19)..(20)..(21): Xaa is A or G
  MOD_RES (22)..(23)..(24)..(25): Xaa is A or G or is absent
PXXTPTKMSNITMQIMXXXXXXXXXIGEMSGMVVDRXG

SEQ ID NO: 73946 - protein, 42 aa, Artificial Sequence; identical to SEQ ID NO: 20029
  GFR-binding peptide
  MOD_RES (6)..(40)..(42): Xaa is C or S
  MOD_RES (20)..(21)..(22)..(23)..(24): Xaa is A or G
  MOD_RES (25)..(26)..(27)..(28): Xaa is A or G or is absent

SEQ ID NO: 73947 - protein, 39 aa, Artificial Sequence
  GFR-binding peptide
  MOD_RES (1)..(2)..(36)..(38): Xaa is C or S
  MOD_RES (16)..(17)..(18)..(19)..(20): Xaa is A or G
  MOD_RES (21)..(22)..(23)..(24): Xaa is A or G or is absent
XXVPARLSNITIQIMXXXXXXXXXLGEMSDMVVEAXGXR

SEQ ID NO: 73948 - protein, 39 aa, Artificial Sequence
  GFR-binding peptide
  MOD_RES (1)..(2)..(36)..(38): Xaa is C or S
  MOD_RES (16)..(17)..(18)..(19)..(20): Xaa is A or G
  MOD_RES (21)..(22)..(23)..(24): Xaa is A or G or is absent
XXTPTKMSNITMQIMXXXXXXXXXIGEMSGMVVDRXGXS

SEQ ID NO: 73949 - protein, 37 aa, Artificial Sequence
  GFR-binding peptide
  MOD_RES (1)..(2)..(36): Xaa is C or S
  MOD_RES (16)..(17)..(18)..(19)..(20): Xaa is A or G
  MOD_RES (21)..(22)..(23)..(24): Xaa is A or G or is absent
XXTPTKMSNITMQIMXXXXXXXXXLGEMSGMVVDRXG

SEQ ID NO: 73950 - protein, 35 aa, Artificial Sequence; identical to SEQ ID NO: 55961
  GFR-binding peptide
  MOD_RES (4)..(5): Xaa is C or S

SEQ ID NO: 73951 - protein, 34 aa, Artificial Sequence; identical to SEQ ID NO: 55962
  GFR-binding peptide
  MOD_RES (31)..(33): Xaa is C or S

SEQ ID NO: 73952 - protein, 31 aa, Artificial Sequence
  GFR-binding peptide
  MOD_RES (1)..(1): Xaa is C or S
XVPTRLSNITIQIMDSANNVVLGEMSDMVVE

SEQ ID NO: 73953 - protein, 34 aa, Artificial Sequence
  GFR-binding peptide
  MOD_RES (1)..(2): Xaa is C or S
  MOD_RES (16)..(17)..(18)..(19)..(20): Xaa is A or G
  MOD_RES (21)..(22)..(23)..(24): Xaa is A or G or is absent
XXVPARLSNITIQIMXXXXXXXXXIGEMSDMVVE

SEQ ID NO: 73954 - protein, 33 aa, Artificial Sequence
  GFR-binding peptide
  MOD_RES (1)..(32): Xaa is C or S
XAPVKTSNITMQIMDNGRVLLLGEMSMIVEEXG

SEQ ID NO: 73955 - protein, 36 aa, Artificial Sequence
  GFR-binding peptide
  MOD_RES (1)..(35): Xaa is C or S
  MOD_RES (15)..(16)..(17)..(18)..(19): Xaa is A or G
  MOD_RES (20)..(21)..(22)..(23): Xaa is A or G or is absent
XTPTKMSNITMQIMXXXXXXXXXIGEMSGMVVDRXG

SEQ ID NO: 73956 - protein, 35 aa, Artificial Sequence; identical to SEQ ID NO: 20032
  GFR-binding peptide
  MOD_RES (16)..(17)..(18)..(19)..(20): Xaa is A or G
  MOD_RES (21)..(22)..(23)..(24): Xaa is A or G or is absent

SEQ ID NO: 73957 - protein, 39 aa, Artificial Sequence; identical to SEQ ID NO: 20033
  GFR-binding peptide
  MOD_RES (37)..(39): Xaa is C or S
  MOD_RES (16)..(17)..(18)..(19)..(20): Xaa is A or G
  MOD_RES (21)..(22)..(23)..(24): Xaa is A or G or is absent

SEQ ID NO: 73958 - protein, 33 aa, Artificial Sequence; identical to SEQ ID NO: 55971
  GFR-binding peptide
  MOD_RES (1)..(2)..(33): Xaa is C or S

SEQ ID NO: 73959 - protein, 39 aa, Artificial Sequence
  GFR-binding peptide
  MOD_RES (4)..(5)..(38): Xaa is C or S
  MOD_RES (19)..(20)..(21)..(22)..(23): Xaa is A or G
  MOD_RES (24)..(25)..(26)..(27): Xaa is A or G or is absent
ASPXXVSQDLSNITIQIMXXXXXXXXXLGEMSMIVKSXK

SEQ ID NO: 73960 - protein, 36 aa, Artificial Sequence
  GFR-binding peptide
  MOD_RES (33)..(35): Xaa is C or S
  MOD_RES (14)..(15)..(16)..(17)..(18): Xaa is A or G
  MOD_RES (19)..(20)..(21)..(22): Xaa is A or G or is absent
VPQALSNITIQIMXXXXXXXXXLGEMSMIVRSXKXS

SEQ ID NO: 73961 - protein, 33 aa, Artificial Sequence
  GFR-binding peptide
  MOD_RES (1)..(2): Xaa is C or S
XXVPARLSNITIQIMDAANNVVLGEMSDMVVEA

SEQ ID NO: 73962 - protein, 39 aa, Artificial Sequence; identical to SEQ ID NO: 20034
  GFR-binding peptide
  MOD_RES (1)..(38): Xaa is C or S

SEQ ID NO: 73963 - protein, 37 aa, Artificial Sequence
  GFR-binding peptide
  MOD_RES (34)..(36): Xaa is C or S
  MOD_RES (14)..(15)..(16)..(17)..(18): Xaa is A or G
  MOD_RES (19)..(20)..(21)..(22): Xaa is A or G or is absent
APTKLSNITVQIMXXXXXXXXXLGEMSNMVVRSXGXH

SEQ ID NO: 73964 - protein, 41 aa, Artificial Sequence; identical to SEQ ID NO: 20035
  GFR-binding peptide
  MOD_RES (3)..(40): Xaa is C or S

SEQ ID NO: 73965 - protein, 39 aa, Artificial Sequence; identical to SEQ ID NO: 20036
  GFR-binding peptide
  MOD_RES (6)..(6): Xaa is C or S
  MOD_RES (20)..(21)..(22)..(23)..(24): Xaa is A or G
  MOD_RES (25)..(26)..(27)..(28): Xaa is A or G or is absent

SEQ ID NO: 73966 - protein, 39 aa, Artificial Sequence; identical to SEQ ID NO: 20037
  GFR-binding peptide
  MOD_RES (3)..(37)..(39): Xaa is C or S

SEQ ID NO: 73967 - protein, 39 aa, Artificial Sequence; identical to SEQ ID NO: 20038
  GFR-binding peptide
  MOD_RES (4)..(38): Xaa is C or S
  MOD_RES (18)..(19)..(20)..(21)..(22): Xaa is A or G
  MOD_RES (23)..(24)..(25)..(26): Xaa is A or G or is absent

SEQ ID NO: 73968 - protein, 38 aa, Artificial Sequence
  GFR-binding peptide
  MOD_RES (5)..(6)..(38): Xaa is C or S
SAGPXXTPTKMSNITMQIMNDKQQIIIGEMSGMVVDRX

SEQ ID NO: 73969 - protein, 33 aa, Artificial Sequence
  GFR-binding peptide
  MOD_RES (1)..(1): Xaa is C or S
  MOD_RES (15)..(16)..(17)..(18)..(19): Xaa is A or G
  MOD_RES (20)..(21)..(22)..(23): Xaa is A or G or is absent
XVPTRLSNITIQIMXXXXXXXXXIGEMSDMVVE

SEQ ID NO: 73970 - protein, 34 aa, Artificial Sequence; identical to SEQ ID NO: 55986
  GFR-binding peptide
  MOD_RES (1)..(2)..(33): Xaa is C or S

SEQ ID NO: 73971 - protein, 36 aa, Artificial Sequence
  GFR-binding peptide
  MOD_RES (1)..(2)..(33)..(35): Xaa is C or S
XXVPQALSNITIQIMVGRKPKVLGEMSMIVRSXKXS

SEQ ID NO: 73972 - protein, 38 aa, Artificial Sequence; identical to SEQ ID NO: 53592
  GFR-binding peptide
  MOD_RES (3)..(4)..(36)..(38): Xaa is C or S

SEQ ID NO: 73973 - protein, 38 aa, Artificial Sequence; identical to SEQ ID NO: 20039
  GFR-binding peptide
  MOD_RES (37)..(37): Xaa is C or S

SEQ ID NO: 73974 - protein, 35 aa, Artificial Sequence; identical to SEQ ID NO: 20040
  GFR-binding peptide
  MOD_RES (15)..(16)..(17)..(18)..(19): Xaa is A or G
  MOD_RES (20)..(21)..(22)..(23): Xaa is A or G or is absent

SEQ ID NO: 73975 - protein, 40 aa, Artificial Sequence; identical to SEQ ID NO: 20042
  GFR-binding peptide
  MOD_RES (1)..(38)..(40): Xaa is C or S
  MOD_RES (17)..(18)..(19)..(20)..(21): Xaa is A or G
  MOD_RES (22)..(23)..(24)..(25): Xaa is A or G or is absent

SEQ ID NO: 73976 - protein, 39 aa, Artificial Sequence; identical to SEQ ID NO: 20043
  GFR-binding peptide
  MOD_RES (36)..(38): Xaa is C or S
  MOD_RES (15)..(16)..(17)..(18)..(19): Xaa is A or G
  MOD_RES (20)..(21)..(22)..(23): Xaa is A or G or is absent

SEQ ID NO: 73977 - protein, 35 aa, Artificial Sequence
  GFR-binding peptide
  MOD_RES (1)..(32)..(34): Xaa is C or S
XAPVKTSNITMQIMDNGRVLLLGEMSMIVEEXGXL

SEQ ID NO: 73978 - protein, 34 aa, Artificial Sequence; identical to SEQ ID NO: 20048
  GFR-binding peptide
  MOD_RES (15)..(16)..(17)..(18)..(19): Xaa is A or G
  MOD_RES (20)..(21)..(22)..(23): Xaa is A or G or is absent

SEQ ID NO: 73979 - protein, 39 aa, Artificial Sequence; identical to SEQ ID NO: 20049
  GFR-binding peptide
  MOD_RES (2)..(39): Xaa is C or S

SEQ ID NO: 73980 - protein, 43 aa, Artificial Sequence
  GFR-binding peptide
  MOD_RES (5)..(6)..(40)..(42): Xaa is C or S
  MOD_RES (20)..(21)..(22)..(23)..(24): Xaa is A or G
  MOD_RES (25)..(26)..(27)..(28): Xaa is A or G or is absent
TPPTXXVPTRLSNITIQIMXXXXXXXXXLGEMSDMVVESXGXR

SEQ ID NO: 73981 - protein, 42 aa, Artificial Sequence; identical to SEQ ID NO: 20050
  GFR-binding peptide
  MOD_RES (5)..(42): Xaa is C or S

SEQ ID NO: 73982 - protein, 33 aa, Artificial Sequence; identical to SEQ ID NO: 20056
  GFR-binding peptide
  MOD_RES (14)..(15)..(16)..(17)..(18): Xaa is A or G
  MOD_RES (19)..(20)..(21)..(22): Xaa is A or G or is absent

SEQ ID NO: 73983 - protein, 37 aa, Artificial Sequence
  GFR-binding peptide
  MOD_RES (34)..(36): Xaa is C or S
  MOD_RES (14)..(15)..(16)..(17)..(18): Xaa is A or G
  MOD_RES (19)..(20)..(21)..(22): Xaa is A or G or is absent
TPTKMSNITMQIMXXXXXXXXXLGEMSGMVVDRXGXS

SEQ ID NO: 73984 - protein, 30 aa, Artificial Sequence; identical to SEQ ID NO: 53610
  GFR-binding peptide

SEQ ID NO: 73985 - protein, 32 aa, Artificial Sequence
  GFR-binding peptide
  MOD_RES (1)..(32): Xaa is C or S
XVSQDLSNITIQIMIGKTPKILGEMSMIVKSX

SEQ ID NO: 73986 - protein, 36 aa, Artificial Sequence; identical to SEQ ID NO: 20057
  GFR-binding peptide
  MOD_RES (2)..(36): Xaa is C or S
  MOD_RES (16)..(17)..(18)..(19)..(20): Xaa is A or G
  MOD_RES (21)..(22)..(23)..(24): Xaa is A or G or is absent

SEQ ID NO: 73987 - protein, 36 aa, Artificial Sequence; identical to SEQ ID NO: 53613
  GFR-binding peptide
  MOD_RES (3)..(4)..(35): Xaa is C or S

SEQ ID NO: 73988 - protein, 40 aa, Artificial Sequence; identical to SEQ ID NO: 20058
  GFR-binding peptide
  MOD_RES (3)..(37)..(39): Xaa is C or S

SEQ ID NO: 73989 - protein, 38 aa, Artificial Sequence; identical to SEQ ID NO: 56005
  GFR-binding peptide
  MOD_RES (4)..(5)..(37): Xaa is C or S

SEQ ID NO: 73990 - protein, 42 aa, Artificial Sequence; identical to SEQ ID NO: 20059
  GFR-binding peptide
  MOD_RES (5)..(39)..(41): Xaa is C or S
  MOD_RES (19)..(20)..(21)..(22)..(23): Xaa is A or G
  MOD_RES (24)..(25)..(26)..(27): Xaa is A or G or is absent

SEQ ID NO: 73991 - protein, 34 aa, Artificial Sequence; identical to SEQ ID NO: 20060
  GFR-binding peptide
  MOD_RES (16)..(17)..(18)..(19)..(20): Xaa is A or G
  MOD_RES (21)..(22)..(23)..(24): Xaa is A or G or is absent

SEQ ID NO: 73992 - protein, 35 aa, Artificial Sequence; identical to SEQ ID NO: 53620
  GFR-binding peptide
  MOD_RES (32)..(34): Xaa is C or S

SEQ ID NO: 73993 - protein, 35 aa, Artificial Sequence
  GFR-binding peptide
  MOD_RES (1)..(2): Xaa is C or S
  MOD_RES (16)..(17)..(18)..(19)..(20): Xaa is A or G
  MOD_RES (21)..(22)..(23)..(24): Xaa is A or G or is absent
XXVPTRLSNITIQIMXXXXXXXXXIGEMSDMVVES

SEQ ID NO: 73994 - protein, 35 aa, Artificial Sequence; identical to SEQ ID NO: 20061
  GFR-binding peptide
  MOD_RES (16)..(17)..(18)..(19)..(20): Xaa is A or G
  MOD_RES (21)..(22)..(23)..(24): Xaa is A or G or is absent

SEQ ID NO: 73995 - protein, 43 aa, Artificial Sequence; identical to SEQ ID NO: 20062
  GFR-binding peptide
  MOD_RES (3)..(40)..(42): Xaa is C or S
  MOD_RES (19)..(20)..(21)..(22)..(23): Xaa is A or G
  MOD_RES (24)..(25)..(26)..(27): Xaa is A or G or is absent

SEQ ID NO: 73996 - protein, 39 aa, Artificial Sequence; identical to SEQ ID NO: 20064
  GFR-binding peptide
  MOD_RES (2)..(36)..(38): Xaa is C or S

SEQ ID NO: 73997 - protein, 36 aa, Artificial Sequence; identical to SEQ ID NO: 20065
  GFR-binding peptide
  MOD_RES (2)..(36): Xaa is C or S
  MOD_RES (16)..(17)..(18)..(19)..(20): Xaa is A or G
  MOD_RES (21)..(22)..(23)..(24): Xaa is A or G or is absent

SEQ ID NO: 73998 - protein, 38 aa, Artificial Sequence
  GFR-binding peptide
  MOD_RES (3)..(4)..(35)..(37): Xaa is C or S
SPXXVPQDLSNITIQIMVGRTPKVLGEMSMVVKSXKXS

SEQ ID NO: 73999 - protein, 33 aa, Artificial Sequence
  GFR-binding peptide
  MOD_RES (1)..(1): Xaa is C or S
  MOD_RES (15)..(16)..(17)..(18)..(19): Xaa is A or G
  MOD_RES (20)..(21)..(22)..(23): Xaa is A or G or is absent
XVPTRLSNITIQIMXXXXXXXXXLGEMSDMVVE

SEQ ID NO: 74000 - protein, 34 aa, Artificial Sequence
  GFR-binding peptide
  MOD_RES (1)..(34): Xaa is C or S
  MOD_RES (15)..(16)..(17)..(18)..(19): Xaa is A or G
  MOD_RES (20)..(21)..(22)..(23): Xaa is A or G or is absent
XVSQDLSNITIQIMXXXXXXXXXLGEMSMIVKSX

SEQ ID NO: 74001 - protein, 39 aa, Artificial Sequence; identical to SEQ ID NO: 20069
  GFR-binding peptide
  MOD_RES (3)..(37)..(39): Xaa is C or S
  MOD_RES (17)..(18)..(19)..(20)..(21): Xaa is A or G
  MOD_RES (22)..(23)..(24)..(25): Xaa is A or G or is absent

SEQ ID NO: 74002 - protein, 40 aa, Artificial Sequence; identical to SEQ ID NO: 20070
  GFR-binding peptide
  MOD_RES (1)..(38)..(40): Xaa is C or S

SEQ ID NO: 74003 - protein, 39 aa, Artificial Sequence
  GFR-binding peptide
  MOD_RES (5)..(6)..(38): Xaa is C or S
APASXXVPARLSNITIQIMDAANNVVIGEMSDMVVEAXG

SEQ ID NO: 74004 - protein, 44 aa, Artificial Sequence; identical to SEQ ID NO: 20072
  GFR-binding peptide
  MOD_RES (5)..(42)..(44): Xaa is C or S

SEQ ID NO: 74005 - protein, 33 aa, Artificial Sequence; identical to SEQ ID NO: 53639
  GFR-binding peptide
  MOD_RES (33)..(33): Xaa is C or S
  MOD_RES (14)..(15)..(16)..(17)..(18): Xaa is A or G
  MOD_RES (19)..(20)..(21)..(22): Xaa is A or G or is absent

SEQ ID NO: 74006 - protein, 42 aa, Artificial Sequence; identical to SEQ ID NO: 20073
  GFR-binding peptide
  MOD_RES (7)..(41): Xaa is C or S
  MOD_RES (21)..(22)..(23)..(24)..(25): Xaa is A or G
  MOD_RES (26)..(27)..(28)..(29): Xaa is A or G or is absent

SEQ ID NO: 74007 - protein, 34 aa, Artificial Sequence
  GFR-binding peptide
  MOD_RES (1)..(2)..(34): Xaa is C or S
XXTPTKMSNITMQIMNDKQQIILGEMSGMVVDRX

SEQ ID NO: 74008 - protein, 42 aa, Artificial Sequence
  GFR-binding peptide
  MOD_RES (6)..(7)..(41): Xaa is C or S
  MOD_RES (21)..(22)..(23)..(24)..(25): Xaa is A or G
  MOD_RES (26)..(27)..(28)..(29): Xaa is A or G or is absent
GSAGPXXTPTKMSNITMQIMXXXXXXXXXLGEMSGMVVDRXG

SEQ ID NO: 74009 - protein, 34 aa, Artificial Sequence
  GFR-binding peptide
  MOD_RES (1)..(2)..(34): Xaa is C or S
XXTPTKMSNITMQIMNDKQQIIIGEMSGMVVDRX

SEQ ID NO: 74010 - protein, 33 aa, Artificial Sequence
  GFR-binding peptide
  MOD_RES (1)..(33): Xaa is C or S
XVPARLSNITIQIMDAANNVVIGEMSDMVVEAX

SEQ ID NO: 74011 - protein, 37 aa, Artificial Sequence
  GFR-binding peptide
  MOD_RES (1)..(2)..(34)..(36): Xaa is C or S
XXTPTKMSNITMQIMNDKQQIILGEMSGMVVDRXGXS

SEQ ID NO: 74012 - protein, 37 aa, Artificial Sequence
  GFR-binding peptide
  MOD_RES (1)..(35)..(37): Xaa is C or S
  MOD_RES (15)..(16)..(17)..(18)..(19): Xaa is A or G
  MOD_RES (20)..(21)..(22)..(23): Xaa is A or G or is absent
XVPARLSNITIQIMXXXXXXXXXIGEMSDMVVEAXGX

SEQ ID NO: 74013 - protein, 35 aa, Artificial Sequence
  GFR-binding peptide
  MOD_RES (1)..(35): Xaa is C or S
  MOD_RES (15)..(16)..(17)..(18)..(19): Xaa is A or G
  MOD_RES (20)..(21)..(22)..(23): Xaa is A or G or is absent
XVPTRLSNITIQIMXXXXXXXXXLGEMSDMVVESX

SEQ ID NO: 74014 - protein, 37 aa, Artificial Sequence; identical to SEQ ID NO: 20074
  GFR-binding peptide
  MOD_RES (3)..(3): Xaa is C or S

SEQ ID NO: 74015 - protein, 35 aa, Artificial Sequence
  GFR-binding peptide
  MOD_RES (1)..(35): Xaa is C or S
  MOD_RES (15)..(16)..(17)..(18)..(19): Xaa is A or G
  MOD_RES (20)..(21)..(22)..(23): Xaa is A or G or is absent
XVPTRLSNITIQIMXXXXXXXXXIGEMSDMVVESX

SEQ ID NO: 74016 - protein, 37 aa, Artificial Sequence; identical to SEQ ID NO: 20076
  GFR-binding peptide
  MOD_RES (3)..(3): Xaa is C or S

SEQ ID NO: 74017 - protein, 33 aa, Artificial Sequence
  GFR-binding peptide
  MOD_RES (1)..(33): Xaa is C or S
XVPARLSNITIQIMDAANNVVLGEMSDMVVEAX

SEQ ID NO: 74018 - protein, 36 aa, Artificial Sequence; identical to SEQ ID NO: 20077
  GFR-binding peptide
  MOD_RES (35)..(35): Xaa is C or S
  MOD_RES (14)..(15)..(16)..(17)..(18): Xaa is A or G
  MOD_RES (19)..(20)..(21)..(22): Xaa is A or G or is absent

SEQ ID NO: 74019 - protein, 37 aa, Artificial Sequence
  GFR-binding peptide
  MOD_RES (3)..(4)..(35)..(37): Xaa is C or S
STXXAPVKTSNITMQIMDNGRVLLLGEMSMIVEEXGX

SEQ ID NO: 74020 - protein, 35 aa, Artificial Sequence
  GFR-binding peptide
  MOD_RES (1)..(34): Xaa is C or S
  MOD_RES (15)..(16)..(17)..(18)..(19): Xaa is A or G
  MOD_RES (20)..(21)..(22)..(23): Xaa is A or G or is absent
XVPQALSNITIQIMXXXXXXXXXLGEMSMIVRSXK

SEQ ID NO: 74021 - protein, 32 aa, Artificial Sequence
  GFR-binding peptide
  MOD_RES (32)..(32): Xaa is C or S
VPTRLSNITIQIMDSANNVVLGEMSDMVVESX

SEQ ID NO: 74022 - protein, 41 aa, Artificial Sequence; identical to SEQ ID NO: 20078
  GFR-binding peptide
  MOD_RES (2)..(39)..(41): Xaa is C or S

SEQ ID NO: 74023 - protein, 39 aa, Artificial Sequence
  GFR-binding peptide
  MOD_RES (4)..(5)..(37)..(39): Xaa is C or S
PPTXXVPTRLSNITIQIMDSANNVVIGEMSDMVVESXGX

SEQ ID NO: 74024 - protein, 39 aa, Artificial Sequence
  GFR-binding peptide
  MOD_RES (3)..(4)..(36)..(38): Xaa is C or S
PTXXVPTRLSNITIQIMDSANNVVLGEMSDMVVESXGXR

SEQ ID NO: 74025 - protein, 36 aa, Artificial Sequence
  GFR-binding peptide
  MOD_RES (3)..(4): Xaa is C or S
  MOD_RES (18)..(19)..(20)..(21)..(22): Xaa is A or G
  MOD_RES (23)..(24)..(25)..(26): Xaa is A or G or is absent
GPXXTPTKMSNITMQIMXXXXXXXXXIGEMSGMVVD

SEQ ID NO: 74026 - protein, 36 aa, Artificial Sequence
  GFR-binding peptide
  MOD_RES (1)..(2)..(33)..(35): Xaa is C or S
XXVPQDLSNITIQIMVGRTPKVLGEMSMVVKSXKXS

SEQ ID NO: 74027 - protein, 41 aa, Artificial Sequence; identical to SEQ ID NO: 20081
  GFR-binding peptide
  MOD_RES (3)..(40): Xaa is C or S

SEQ ID NO: 74028 - protein, 33 aa, Artificial Sequence
  GFR-binding peptide
  MOD_RES (33)..(33): Xaa is C or S
  MOD_RES (14)..(15)..(16)..(17)..(18): Xaa is A or G
  MOD_RES (19)..(20)..(21)..(22): Xaa is A or G or is absent
VPQDLSNITIQIMXXXXXXXXXLGEMSMVVKSX

SEQ ID NO: 74029 - protein, 37 aa, Artificial Sequence; identical to SEQ ID NO: 20083
  GFR-binding peptide
  MOD_RES (2)..(2): Xaa is C or S
  MOD_RES (18)..(19)..(20)..(21)..(22): Xaa is A or G
  MOD_RES (23)..(24)..(25)..(26): Xaa is A or G or is absent

SEQ ID NO: 74030 - protein, 37 aa, Artificial Sequence; identical to SEQ ID NO: 53673
  GFR-binding peptide
  MOD_RES (4)..(5): Xaa is C or S
  MOD_RES (19)..(20)..(21)..(22)..(23): Xaa is A or G
  MOD_RES (24)..(25)..(26)..(27): Xaa is A or G or is absent

SEQ ID NO: 74031 - protein, 38 aa, Artificial Sequence; identical to SEQ ID NO: 20086
  GFR-binding peptide
  MOD_RES (4)..(38): Xaa is C or S

SEQ ID NO: 74032 - protein, 35 aa, Artificial Sequence
  GFR-binding peptide
  MOD_RES (2)..(3): Xaa is C or S
  MOD_RES (17)..(18)..(19)..(20)..(21): Xaa is A or G
  MOD_RES (22)..(23)..(24)..(25): Xaa is A or G or is absent
TXXAPVKTSNITMQIMXXXXXXXXXIGEMSMIVEE

SEQ ID NO: 74033 - protein, 38 aa, Artificial Sequence; identical to SEQ ID NO: 20089
  GFR-binding peptide
  MOD_RES (2)..(36)..(38): Xaa is C or S
  MOD_RES (16)..(17)..(18)..(19)..(20): Xaa is A or G
  MOD_RES (21)..(22)..(23)..(24): Xaa is A or G or is absent

SEQ ID NO: 74034 - protein, 37 aa, Artificial Sequence
  GFR-binding peptide
  MOD_RES (5)..(6): Xaa is C or S
TPPTXXVPTRLSNITIQIMDSANNVVLGEMSDMVVES

SEQ ID NO: 74035 - protein, 36 aa, Artificial Sequence; identical to SEQ ID NO: 20091
  GFR-binding peptide
  MOD_RES (34)..(36): Xaa is C or S
  MOD_RES (14)..(15)..(16)..(17)..(18): Xaa is A or G
  MOD_RES (19)..(20)..(21)..(22): Xaa is A or G or is absent

SEQ ID NO: 74036 - protein, 41 aa, Artificial Sequence; identical to SEQ ID NO: 20092
  GFR-binding peptide
  MOD_RES (5)..(39)..(41): Xaa is C or S
  MOD_RES (19)..(20)..(21)..(22)..(23): Xaa is A or G
  MOD_RES (24)..(25)..(26)..(27): Xaa is A or G or is absent

SEQ ID NO: 74037 - protein, 39 aa, Artificial Sequence; identical to SEQ ID NO: 20096
  GFR-binding peptide
  MOD_RES (36)..(38): Xaa is C or S
  MOD_RES (15)..(16)..(17)..(18)..(19): Xaa is A or G
  MOD_RES (20)..(21)..(22)..(23): Xaa is A or G or is absent

SEQ ID NO: 74038 - protein, 41 aa, Artificial Sequence
  GFR-binding peptide
  MOD_RES (5)..(6)..(40): Xaa is C or S
  MOD_RES (20)..(21)..(22)..(23)..(24): Xaa is A or G
  MOD_RES (25)..(26)..(27)..(28): Xaa is A or G or is absent
APASXXVPARLSNITIQIMXXXXXXXXXLGEMSDMVVEAXG

SEQ ID NO: 74039 - protein, 33 aa, Artificial Sequence; identical to SEQ ID NO: 53683
  GFR-binding peptide
  MOD_RES (14)..(15)..(16)..(17)..(18): Xaa is A or G
  MOD_RES (19)..(20)..(21)..(22): Xaa is A or G or is absent

SEQ ID NO: 74040 - protein, 35 aa, Artificial Sequence; identical to SEQ ID NO: 20097
  GFR-binding peptide

SEQ ID NO: 74041 - protein, 41 aa, Artificial Sequence; identical to SEQ ID NO: 53684
  GFR-binding peptide
  MOD_RES (5)..(6)..(38)..(40): Xaa is C or S

SEQ ID NO: 74042 - protein, 38 aa, Artificial Sequence
  GFR-binding peptide
  MOD_RES (6)..(7): Xaa is C or S
STPPTXXVPTRLSNITIQIMDSANNVVIGEMSDMVVES

SEQ ID NO: 74043 - protein, 40 aa, Artificial Sequence; identical to SEQ ID NO: 20098
  GFR-binding peptide
  MOD_RES (5)..(5): Xaa is C or S
  MOD_RES (21)..(22)..(23)..(24)..(25): Xaa is A or G
  MOD_RES (26)..(27)..(28)..(29): Xaa is A or G or is absent

SEQ ID NO: 74044 - protein, 35 aa, Artificial Sequence; identical to SEQ ID NO: 56051
  GFR-binding peptide
  MOD_RES (1)..(2)..(33)..(35): Xaa is C or S

SEQ ID NO: 74045 - protein, 41 aa, Artificial Sequence
  GFR-binding peptide
  MOD_RES (4)..(5)..(39)..(41): Xaa is C or S
  MOD_RES (19)..(20)..(21)..(22)..(23): Xaa is A or G
  MOD_RES (24)..(25)..(26)..(27): Xaa is A or G or is absent
PKPXXAPTKLSNITVQIMXXXXXXXXXLGEMSNMVVRSXGX

SEQ ID NO: 74046 - protein, 43 aa, Artificial Sequence; identical to SEQ ID NO: 20100
  GFR-binding peptide
  MOD_RES (5)..(42): Xaa is C or S
  MOD_RES (21)..(22)..(23)..(24)..(25): Xaa is A or G
  MOD_RES (26)..(27)..(28)..(29): Xaa is A or G or is absent

SEQ ID NO: 74047 - protein, 35 aa, Artificial Sequence
  GFR-binding peptide
  MOD_RES (1)..(2)..(35): Xaa is C or S
  MOD_RES (16)..(17)..(18)..(19)..(20): Xaa is A or G
  MOD_RES (21)..(22)..(23)..(24): Xaa is A or G or is absent
XXAPVKTSNITMQIMXXXXXXXXXLGEMSMIVEEX

SEQ ID NO: 74048 - protein, 41 aa, Artificial Sequence; identical to SEQ ID NO: 20101
  GFR-binding peptide
  MOD_RES (4)..(41): Xaa is C or S
  MOD_RES (20)..(21)..(22)..(23)..(24): Xaa is A or G
  MOD_RES (25)..(26)..(27)..(28): Xaa is A or G or is absent

SEQ ID NO: 74049 - protein, 38 aa, Artificial Sequence; identical to SEQ ID NO: 56061
  GFR-binding peptide
  MOD_RES (5)..(6)..(37): Xaa is C or S

SEQ ID NO: 74050 - protein, 38 aa, Artificial Sequence
  GFR-binding peptide
  MOD_RES (2)..(3)..(35)..(37): Xaa is C or S
TXXVPTRLSNITIQIMDSANNVVLGEMSDMVVESXGXR

SEQ ID NO: 74051 - protein, 37 aa, Artificial Sequence
  GFR-binding peptide
  MOD_RES (4)..(5): Xaa is C or S
  MOD_RES (19)..(20)..(21)..(22)..(23): Xaa is A or G
  MOD_RES (24)..(25)..(26)..(27): Xaa is A or G or is absent
AGPXXTPTKMSNITMQIMXXXXXXXXXIGEMSGMVVD

SEQ ID NO: 74052 - protein, 41 aa, Artificial Sequence
  GFR-binding peptide
  MOD_RES (5)..(6)..(39)..(41): Xaa is C or S
  MOD_RES (20)..(21)..(22)..(23)..(24): Xaa is A or G
  MOD_RES (25)..(26)..(27)..(28): Xaa is A or G or is absent
VPSTXXAPVKTSNITMQIMXXXXXXXXXIGEMSMIVEEXGX

SEQ ID NO: 74053 - protein, 38 aa, Artificial Sequence; identical to SEQ ID NO: 20103
  GFR-binding peptide
  MOD_RES (37)..(37): Xaa is C or S
  MOD_RES (16)..(17)..(18)..(19)..(20): Xaa is A or G
  MOD_RES (21)..(22)..(23)..(24): Xaa is A or G or is absent

SEQ ID NO: 74054 - protein, 34 aa, Artificial Sequence
  GFR-binding peptide
  MOD_RES (1)..(2)..(34): Xaa is C or S
XXVPARLSNITIQIMDAANNVVLGEMSDMVVEAX

SEQ ID NO: 74055 - protein, 41 aa, Artificial Sequence; identical to SEQ ID NO: 20106
  GFR-binding peptide
  MOD_RES (3)..(40): Xaa is C or S
  MOD_RES (19)..(20)..(21)..(22)..(23): Xaa is A or G
  MOD_RES (24)..(25)..(26)..(27): Xaa is A or G or is absent

SEQ ID NO: 74056 - protein, 35 aa, Artificial Sequence
  GFR-binding peptide
  MOD_RES (1)..(33)..(35): Xaa is C or S
XTPTKMSNITMQIMNDKQQIIIGEMSGMVVDRXGX

SEQ ID NO: 74057 - protein, 40 aa, Artificial Sequence
  GFR-binding peptide
  MOD_RES (6)..(7)..(39): Xaa is C or S
GSAGPXXTPTKMSNITMQIMNDKQQIILGEMSGMVVDRXG

SEQ ID NO: 74058 - protein, 38 aa, Artificial Sequence
  GFR-binding peptide
  MOD_RES (4)..(5)..(37): Xaa is C or S
PPTXXVPTRLSNITIQIMDSANNVVLGEMSDMVVESXG

SEQ ID NO: 74059 - protein, 39 aa, Artificial Sequence; identical to SEQ ID NO: 20108
  GFR-binding peptide
  MOD_RES (4)..(4): Xaa is C or S

SEQ ID NO: 74060 - protein, 37 aa, Artificial Sequence
  GFR-binding peptide
  MOD_RES (4)..(5): Xaa is C or S
  MOD_RES (19)..(20)..(21)..(22)..(23): Xaa is A or G
  MOD_RES (24)..(25)..(26)..(27): Xaa is A or G or is absent
PASXXVPARLSNITIQIMXXXXXXXXXIGEMSDMVVE

SEQ ID NO: 74061 - protein, 33 aa, Artificial Sequence
  GFR-binding peptide
  MOD_RES (1)..(33): Xaa is C or S
XTPTKMSNITMQIMNDKQQIIIGEMSGMVVDRX

SEQ ID NO: 74062 - protein, 37 aa, Artificial Sequence
  GFR-binding peptide
  MOD_RES (3)..(4)..(35)..(37): Xaa is C or S
SPXXVSQDLSNITIQIMIGKTPKILGEMSMIVKSXKX

SEQ ID NO: 74063 - protein, 37 aa, Artificial Sequence; identical to SEQ ID NO: 20111
  GFR-binding peptide
  MOD_RES (36)..(36): Xaa is C or S

SEQ ID NO: 74064 - protein, 40 aa, Artificial Sequence
  GFR-binding peptide
  MOD_RES (4)..(5)..(39): Xaa is C or S
  MOD_RES (19)..(20)..(21)..(22)..(23): Xaa is A or G
  MOD_RES (24)..(25)..(26)..(27): Xaa is A or G or is absent
PASXXVPARLSNITIQIMXXXXXXXXXLGEMSDMVVEAXG

SEQ ID NO: 74065 - protein, 42 aa, Artificial Sequence; identical to SEQ ID NO: 20112
  GFR-binding peptide
  MOD_RES (7)..(41): Xaa is C or S

SEQ ID NO: 74066 - protein, 41 aa, Artificial Sequence; identical to SEQ ID NO: 20113
  GFR-binding peptide
  MOD_RES (1)..(38)..(40): Xaa is C or S
  MOD_RES (17)..(18)..(19)..(20)..(21): Xaa is A or G
  MOD_RES (22)..(23)..(24)..(25): Xaa is A or G or is absent

SEQ ID NO: 74067 - protein, 40 aa, Artificial Sequence; identical to SEQ ID NO: 56076
  GFR-binding peptide
  MOD_RES (4)..(5)..(38)..(40): Xaa is C or S
  MOD_RES (19)..(20)..(21)..(22)..(23): Xaa is A or G
  MOD_RES (24)..(25)..(26)..(27): Xaa is A or G or is absent

SEQ ID NO: 74068 - protein, 38 aa, Artificial Sequence
  GFR-binding peptide
  MOD_RES (2)..(3)..(36)..(38): Xaa is C or S
  MOD_RES (17)..(18)..(19)..(20)..(21): Xaa is A or G
  MOD_RES (22)..(23)..(24)..(25): Xaa is A or G or is absent
PXXVSQDLSNITIQIMXXXXXXXXXLGEMSMIVKSXKX

SEQ ID NO: 74069 - protein, 35 aa, Artificial Sequence
  GFR-binding peptide
  MOD_RES (32)..(34): Xaa is C or S
VPTRLSNITIQIMDSANNVVIGEMSDMVVESXGXR

SEQ ID NO: 74070 - protein, 40 aa, Artificial Sequence
  GFR-binding peptide
  MOD_RES (3)..(4)..(38)..(40): Xaa is C or S
  MOD_RES (18)..(19)..(20)..(21)..(22): Xaa is A or G
  MOD_RES (23)..(24)..(25)..(26): Xaa is A or G or is absent
ASXXVPARLSNITIQIMXXXXXXXXXIGEMSDMVVEAXGX

SEQ ID NO: 74071 - protein, 39 aa, Artificial Sequence; identical to SEQ ID NO: 56079
  GFR-binding peptide
  MOD_RES (2)..(3)..(36)..(38): Xaa is C or S
  MOD_RES (17)..(18)..(19)..(20)..(21): Xaa is A or G
  MOD_RES (22)..(23)..(24)..(25): Xaa is A or G or is absent

SEQ ID NO: 74072 - protein, 35 aa, Artificial Sequence; identical to SEQ ID NO: 56080
  GFR-binding peptide
  MOD_RES (3)..(4): Xaa is C or S

SEQ ID NO: 74073 - protein, 36 aa, Artificial Sequence; identical to SEQ ID NO: 20114
  GFR-binding peptide
  MOD_RES (34)..(36): Xaa is C or S

SEQ ID NO: 74074 - protein, 37 aa, Artificial Sequence; identical to SEQ ID NO: 20115
  GFR-binding peptide
  MOD_RES (1)..(1): Xaa is C or S
  MOD_RES (17)..(18)..(19)..(20)..(21): Xaa is A or G
  MOD_RES (22)..(23)..(24)..(25): Xaa is A or G or is absent

SEQ ID NO: 74075 - protein, 34 aa, Artificial Sequence
  GFR-binding peptide
  MOD_RES (34)..(34): Xaa is C or S
  MOD_RES (14)..(15)..(16)..(17)..(18): Xaa is A or G
  MOD_RES (19)..(20)..(21)..(22): Xaa is A or G or is absent
VPTRLSNITIQIMXXXXXXXXXIGEMSDMVVESX

SEQ ID NO: 74076 - protein, 39 aa, Artificial Sequence; identical to SEQ ID NO: 53719
  GFR-binding peptide
  MOD_RES (5)..(6): Xaa is C or S
  MOD_RES (20)..(21)..(22)..(23)..(24): Xaa is A or G
  MOD_RES (25)..(26)..(27)..(28): Xaa is A or G or is absent

SEQ ID NO: 74077 - protein, 35 aa, Artificial Sequence; identical to SEQ ID NO: 53720
  GFR-binding peptide
  MOD_RES (4)..(5): Xaa is C or S

SEQ ID NO: 74078 - protein, 40 aa, Artificial Sequence
  GFR-binding peptide
  MOD_RES (3)..(4)..(38)..(40): Xaa is C or S
  MOD_RES (18)..(19)..(20)..(21)..(22): Xaa is A or G
  MOD_RES (23)..(24)..(25)..(26): Xaa is A or G or is absent
GPXXTPTKMSNITMQIMXXXXXXXXXLGEMSGMVVDRXGX

SEQ ID NO: 74079 - protein, 36 aa, Artificial Sequence
  GFR-binding peptide
  MOD_RES (1)..(34)..(36): Xaa is C or S
  MOD_RES (15)..(16)..(17)..(18)..(19): Xaa is A or G
  MOD_RES (20)..(21)..(22)..(23): Xaa is A or G or is absent
XAPVKTSNITMQIMXXXXXXXXXIGEMSMIVEEXGX

SEQ ID NO: 74080 - protein, 43 aa, Artificial Sequence; identical to SEQ ID NO: 20119
  GFR-binding peptide
  MOD_RES (5)..(42): Xaa is C or S

SEQ ID NO: 74081 - protein, 43 aa, Artificial Sequence
  GFR-binding peptide
  MOD_RES (6)..(7)..(40)..(42): Xaa is C or S
  MOD_RES (21)..(22)..(23)..(24)..(25): Xaa is A or G
  MOD_RES (26)..(27)..(28)..(29): Xaa is A or G or is absent
ASASPXXVPQDLSNITIQIMXXXXXXXXXLGEMSMVVKSXKXS

SEQ ID NO: 74082 - protein, 33 aa, Artificial Sequence
  GFR-binding peptide
  MOD_RES (1)..(32): Xaa is C or S
XAPVKTSNITMQIMDNGRVLLIGEMSMIVEEXG

SEQ ID NO: 74083 - protein, 39 aa, Artificial Sequence; identical to SEQ ID NO: 20124
  GFR-binding peptide
  MOD_RES (5)..(5): Xaa is C or S
  MOD_RES (21)..(22)..(23)..(24)..(25): Xaa is A or G
  MOD_RES (26)..(27)..(28)..(29): Xaa is A or G or is absent

SEQ ID NO: 74084 - protein, 40 aa, Artificial Sequence
  GFR-binding peptide
  MOD_RES (5)..(6)..(37)..(39): Xaa is C or S
SAAPXXVPQALSNITIQIMVGRKPKVLGEMSMIVRSXKXS

SEQ ID NO: 74085 - protein, 36 aa, Artificial Sequence; identical to SEQ ID NO: 20126
  GFR-binding peptide
  MOD_RES (3)..(3): Xaa is C or S

SEQ ID NO: 74086 - protein, 37 aa, Artificial Sequence
  GFR-binding peptide
  MOD_RES (6)..(7): Xaa is C or S
STPPTXXVPTRLSNITIQIMDSANNVVLGEMSDMVVE

SEQ ID NO: 74087 - protein, 37 aa, Artificial Sequence; identical to SEQ ID NO: 20127
  GFR-binding peptide
  MOD_RES (37)..(37): Xaa is C or S
  MOD_RES (16)..(17)..(18)..(19)..(20): Xaa is A or G
  MOD_RES (21)..(22)..(23)..(24): Xaa is A or G or is absent

SEQ ID NO: 74088 - protein, 39 aa, Artificial Sequence; identical to SEQ ID NO: 20128
  GFR-binding peptide
  MOD_RES (5)..(5): Xaa is C or S
  MOD_RES (21)..(22)..(23)..(24)..(25): Xaa is A or G
  MOD_RES (26)..(27)..(28)..(29): Xaa is A or G or is absent

SEQ ID NO: 74089 - protein, 38 aa, Artificial Sequence
  GFR-binding peptide
  MOD_RES (3)..(4)..(38): Xaa is C or S
  MOD_RES (18)..(19)..(20)..(21)..(22): Xaa is A or G
  MOD_RES (23)..(24)..(25)..(26): Xaa is A or G or is absent
GPXXTPTKMSNITMQIMXXXXXXXXXLGEMSGMVVDRX

SEQ ID NO: 74090 - protein, 43 aa, Artificial Sequence
  GFR-binding peptide
  MOD_RES (6)..(7)..(41)..(43): Xaa is C or S
  MOD_RES (21)..(22)..(23)..(24)..(25): Xaa is A or G
  MOD_RES (26)..(27)..(28)..(29): Xaa is A or G or is absent
HVPKPXXAPTKLSNITVQIMXXXXXXXXXIGEMSNMVVRSXGX

SEQ ID NO: 74091 - protein, 36 aa, Artificial Sequence; identical to SEQ ID NO: 20130
  GFR-binding peptide

SEQ ID NO: 74092 - protein, 32 aa, Artificial Sequence
  GFR-binding peptide
  MOD_RES (31)..(31): Xaa is C or S
VPQDLSNITIQIMVGRTPKVLGEMSMVVKSXK

SEQ ID NO: 74093 - protein, 34 aa, Artificial Sequence; identical to SEQ ID NO: 56104
  GFR-binding peptide
  MOD_RES (3)..(4): Xaa is C or S

SEQ ID NO: 74094 - protein, 42 aa, Artificial Sequence; identical to SEQ ID NO: 20133
  GFR-binding peptide
  MOD_RES (2)..(39)..(41): Xaa is C or S

SEQ ID NO: 74095 - protein, 34 aa, Artificial Sequence; identical to SEQ ID NO: 20135
  GFR-binding peptide
  MOD_RES (16)..(17)..(18)..(19)..(20): Xaa is A or G
  MOD_RES (21)..(22)..(23)..(24): Xaa is A or G or is absent

SEQ ID NO: 74096 - protein, 36 aa, Artificial Sequence; identical to SEQ ID NO: 20137
  GFR-binding peptide
  MOD_RES (1)..(1): Xaa is C or S
  MOD_RES (17)..(18)..(19)..(20)..(21): Xaa is A or G
  MOD_RES (22)..(23)..(24)..(25): Xaa is A or G or is absent

SEQ ID NO: 74097 - protein, 36 aa, Artificial Sequence; identical to SEQ ID NO: 20139
  GFR-binding peptide
  MOD_RES (3)..(3): Xaa is C or S
  MOD_RES (17)..(18)..(19)..(20)..(21): Xaa is A or G
  MOD_RES (22)..(23)..(24)..(25): Xaa is A or G or is absent

SEQ ID NO: 74098 - protein, 37 aa, Artificial Sequence
  GFR-binding peptide
  MOD_RES (3)..(4)..(37): Xaa is C or S
  MOD_RES (18)..(19)..(20)..(21)..(22): Xaa is A or G
  MOD_RES (23)..(24)..(25)..(26): Xaa is A or G or is absent
APXXVPQALSNITIQIMXXXXXXXXXLGEMSMIVRSX

SEQ ID NO: 74099 - protein, 39 aa, Artificial Sequence; identical to SEQ ID NO: 56112
  GFR-binding peptide
  MOD_RES (3)..(4)..(37)..(39): Xaa is C or S
  MOD_RES (18)..(19)..(20)..(21)..(22): Xaa is A or G
  MOD_RES (23)..(24)..(25)..(26): Xaa is A or G or is absent

SEQ ID NO: 74100 - protein, 39 aa, Artificial Sequence; identical to SEQ ID NO: 20140
  GFR-binding peptide
  MOD_RES (3)..(3): Xaa is C or S

SEQ ID NO: 74101 - protein, 40 aa, Artificial Sequence; identical to SEQ ID NO: 20141
  GFR-binding peptide
  MOD_RES (3)..(40): Xaa is C or S
  MOD_RES (19)..(20)..(21)..(22)..(23): Xaa is A or G
  MOD_RES (24)..(25)..(26)..(27): Xaa is A or G or is absent

SEQ ID NO: 74102 - protein, 39 aa, Artificial Sequence; identical to SEQ ID NO: 56119
  GFR-binding peptide
  MOD_RES (4)..(5)..(38): Xaa is C or S
  MOD_RES (19)..(20)..(21)..(22)..(23): Xaa is A or G
  MOD_RES (24)..(25)..(26)..(27): Xaa is A or G or is absent

SEQ ID NO: 74103 - protein, 39 aa, Artificial Sequence
  GFR-binding peptide
  MOD_RES (4)..(5)..(37)..(39): Xaa is C or S
PKPXXAPTKLSNITVQIMDDSSNVILGEMSNMVVRSXGX

SEQ ID NO: 74104 - protein, 38 aa, Artificial Sequence
  GFR-binding peptide
  MOD_RES (2)..(3)..(37): Xaa is C or S
  MOD_RES (17)..(18)..(19)..(20)..(21): Xaa is A or G
  MOD_RES (22)..(23)..(24)..(25): Xaa is A or G or is absent
TXXVPTRLSNITIQIMXXXXXXXXXLGEMSDMVVESXG

SEQ ID NO: 74105 - protein, 35 aa, Artificial Sequence; identical to SEQ ID NO: 20142
  GFR-binding peptide
  MOD_RES (35)..(35): Xaa is C or S
  MOD_RES (14)..(15)..(16)..(17)..(18): Xaa is A or G
  MOD_RES (19)..(20)..(21)..(22): Xaa is A or G or is absent

SEQ ID NO: 74106 - protein, 38 aa, Artificial Sequence
  GFR-binding peptide
  MOD_RES (4)..(5)..(38): Xaa is C or S
  MOD_RES (19)..(20)..(21)..(22)..(23): Xaa is A or G
  MOD_RES (24)..(25)..(26)..(27): Xaa is A or G or is absent
AAPXXVPQALSNITIQIMXXXXXXXXXLGEMSMIVRSX

SEQ ID NO: 74107 - protein, 35 aa, Artificial Sequence
  GFR-binding peptide
  MOD_RES (4)..(5): Xaa is C or S
ASPXXVPQDLSNITIQIMVGRTPKVLGEMSMVVKS

SEQ ID NO: 74108 - protein, 34 aa, Artificial Sequence
  GFR-binding peptide
  MOD_RES (1)..(1): Xaa is C or S
  MOD_RES (15)..(16)..(17)..(18)..(19): Xaa is A or G
  MOD_RES (20)..(21)..(22)..(23): Xaa is A or G or is absent
XVPTRLSNITIQIMXXXXXXXXXIGEMSDMVVES

SEQ ID NO: 74109 - protein, 37 aa, Artificial Sequence
  GFR-binding peptide
  MOD_RES (6)..(7): Xaa is C or S
STPPTXXVPTRLSNITIQIMDSANNVVIGEMSDMVVE

SEQ ID NO: 74110 - protein, 35 aa, Artificial Sequence; identical to SEQ ID NO: 20146
  GFR-binding peptide
  MOD_RES (34)..(34): Xaa is C or S
  MOD_RES (14)..(15)..(16)..(17)..(18): Xaa is A or G
  MOD_RES (19)..(20)..(21)..(22): Xaa is A or G or is absent

SEQ ID NO: 74111 - protein, 39 aa, Artificial Sequence; identical to SEQ ID NO: 20147
  GFR-binding peptide
  MOD_RES (5)..(39): Xaa is C or S
  MOD_RES (19)..(20)..(21)..(22)..(23): Xaa is A or G
  MOD_RES (24)..(25)..(26)..(27): Xaa is A or G or is absent

SEQ ID NO: 74112 - protein, 34 aa, Artificial Sequence
  GFR-binding peptide
  MOD_RES (33)..(33): Xaa is C or S
  MOD_RES (14)..(15)..(16)..(17)..(18): Xaa is A or G
  MOD_RES (19)..(20)..(21)..(22): Xaa is A or G or is absent
VPQALSNITIQIMXXXXXXXXXLGEMSMIVRSXK

SEQ ID NO: 74113 - protein, 37 aa, Artificial Sequence; identical to SEQ ID NO: 48857
  GFR-binding peptide
  MOD_RES (31)..(32): Xaa is C or S

SEQ ID NO: 74114 - protein, 36 aa, Artificial Sequence
  GFR-binding peptide
  MOD_RES (1)..(3)..(36): Xaa is C or S
  MOD_RES (14)..(15)..(16)..(17)..(18): Xaa is A or G
  MOD_RES (19)..(20)..(21)..(22): Xaa is A or G or is absent
XKXSKVIMSMEGLXXXXXXXXXMIQITINSLDQSVX

SEQ ID NO: 74115 - protein, 35 aa, Artificial Sequence
  GFR-binding peptide
  MOD_RES (31)..(32): Xaa is C or S
EVVMDSMEGIVVNNASDMIQITINSLRTPVXXTPP

SEQ ID NO: 74116 - protein, 40 aa, Artificial Sequence
  GFR-binding peptide
  MOD_RES (1)..(3)..(36)..(37): Xaa is C or S
  MOD_RES (14)..(15)..(16)..(17)..(18): Xaa is A or G
  MOD_RES (19)..(20)..(21)..(22): Xaa is A or G or is absent
XKXSKVVMSMEGLXXXXXXXXXMIQITINSLDQPVXXPSA

SEQ ID NO: 74117 - protein, 37 aa, Artificial Sequence; identical to SEQ ID NO: 17048
  GFR-binding peptide
  MOD_RES (1)..(1): Xaa is C or S
  MOD_RES (14)..(15)..(16)..(17)..(18): Xaa is A or G
  MOD_RES (19)..(20)..(21)..(22): Xaa is A or G or is absent

SEQ ID NO: 74118 - protein, 37 aa, Artificial Sequence
  GFR-binding peptide
  MOD_RES (32)..(33): Xaa is C or S
AEVVMDSMEGLVVNNAADMIQITINSLRAPVXXSAPA

SEQ ID NO: 74119 - protein, 38 aa, Artificial Sequence; identical to SEQ ID NO: 48860
  GFR-binding peptide
  MOD_RES (33)..(34): Xaa is C or S
  MOD_RES (11)..(12)..(13)..(14)..(15): Xaa is A or G
  MOD_RES (16)..(17)..(18)..(19): Xaa is A or G or is absent

SEQ ID NO: 74120 - protein, 40 aa, Artificial Sequence
  GFR-binding peptide
  MOD_RES (2)..(4)..(37)..(38): Xaa is C or S
  MOD_RES (15)..(16)..(17)..(18)..(19): Xaa is A or G
  MOD_RES (20)..(21)..(22)..(23): Xaa is A or G or is absent
SXKXSKVVMSMEGLXXXXXXXXXMIQITINSLDQPVXXPS

SEQ ID NO: 74121 - protein, 38 aa, Artificial Sequence
  GFR-binding peptide
  MOD_RES (1)..(3)..(37)..(38): Xaa is C or S
  MOD_RES (15)..(16)..(17)..(18)..(19): Xaa is A or G
  MOD_RES (20)..(21)..(22)..(23): Xaa is A or G or is absent
XGXAEVVMDSMEGLXXXXXXXXXMIQITINSLRAPVXX

SEQ ID NO: 74122 - protein, 37 aa, Artificial Sequence
  GFR-binding peptide
  MOD_RES (31)..(32): Xaa is C or S
EEVIMSMEGLLLVRGNDMIQMTINSTKVPAXXTSPVR

SEQ ID NO: 74123 - protein, 36 aa, Artificial Sequence; identical to SEQ ID NO: 17049
  GFR-binding peptide
  MOD_RES (1)..(3): Xaa is C or S

SEQ ID NO: 74124 - protein, 40 aa, Artificial Sequence; identical to SEQ ID NO: 17050
  GFR-binding peptide
  MOD_RES (1)..(35): Xaa is C or S
  MOD_RES (13)..(14)..(15)..(16)..(17): Xaa is A or G
  MOD_RES (18)..(19)..(20)..(21): Xaa is A or G or is absent

SEQ ID NO: 74125 - protein, 43 aa, Artificial Sequence
  GFR-binding peptide
  MOD_RES (2)..(4)..(38)..(39): Xaa is C or S
  MOD_RES (16)..(17)..(18)..(19)..(20): Xaa is A or G
  MOD_RES (21)..(22)..(23)..(24): Xaa is A or G or is absent
RXGXAEVVMDSMEGIXXXXXXXXXMIQITINSLRAPVXXSAPA

SEQ ID NO: 74126 - protein, 41 aa, Artificial Sequence
  GFR-binding peptide
  MOD_RES (2)..(4)..(37)..(38): Xaa is C or S
  MOD_RES (15)..(16)..(17)..(18)..(19): Xaa is A or G
  MOD_RES (20)..(21)..(22)..(23): Xaa is A or G or is absent
SXKXSKVVMSMEGLXXXXXXXXXMIQITINSLDQPVXXPSA

SEQ ID NO: 74127 - protein, 43 aa, Artificial Sequence; identical to SEQ ID NO: 17051
  GFR-binding peptide
  MOD_RES (1)..(3)..(37): Xaa is C or S

SEQ ID NO: 74128 - protein, 35 aa, Artificial Sequence; identical to SEQ ID NO: 17052
  GFR-binding peptide
  MOD_RES (1)..(35): Xaa is C or S

SEQ ID NO: 74129 - protein, 34 aa, Artificial Sequence
  GFR-binding peptide
  MOD_RES (31)..(32): Xaa is C or S
EEVIMSMEGLLLVRGNDMIQMTINSTKVPAXXTS

SEQ ID NO: 74130 - protein, 42 aa, Artificial Sequence; identical to SEQ ID NO: 17053
  GFR-binding peptide
  MOD_RES (2)..(4)..(41): Xaa is C or S
  MOD_RES (17)..(18)..(19)..(20)..(21): Xaa is A or G
  MOD_RES (22)..(23)..(24)..(25): Xaa is A or G or is absent

SEQ ID NO: 74131 - protein, 38 aa, Artificial Sequence; identical to SEQ ID NO: 17054
  GFR-binding peptide
  MOD_RES (1)..(3): Xaa is C or S
  MOD_RES (16)..(17)..(18)..(19)..(20): Xaa is A or G
  MOD_RES (21)..(22)..(23)..(24): Xaa is A or G or is absent

SEQ ID NO: 74132 - protein, 41 aa, Artificial Sequence; identical to SEQ ID NO: 17055
  GFR-binding peptide
  MOD_RES (1)..(3)..(40): Xaa is C or S
  MOD_RES (16)..(17)..(18)..(19)..(20): Xaa is A or G
  MOD_RES (21)..(22)..(23)..(24): Xaa is A or G or is absent

SEQ ID NO: 74133 - protein, 38 aa, Artificial Sequence
  GFR-binding peptide
  MOD_RES (33)..(34): Xaa is C or S
  MOD_RES (11)..(12)..(13)..(14)..(15): Xaa is A or G
  MOD_RES (16)..(17)..(18)..(19): Xaa is A or G or is absent
EVVMDSMEGIXXXXXXXXXMIQITINSLRTPVXXTPPT

SEQ ID NO: 74134 - protein, 38 aa, Artificial Sequence
  GFR-binding peptide
  MOD_RES (2)..(35)..(36): Xaa is C or S
  MOD_RES (13)..(14)..(15)..(16)..(17): Xaa is A or G
  MOD_RES (18)..(19)..(20)..(21): Xaa is A or G or is absent
KXSKVVMSMEGLXXXXXXXXXMIQITINSLDQPVXXPS

SEQ ID NO: 74135 - protein, 32 aa, Artificial Sequence; identical to SEQ ID NO: 48882
  GFR-binding peptide
  MOD_RES (1)..(32): Xaa is C or S

SEQ ID NO: 74136 - protein, 43 aa, Artificial Sequence
  GFR-binding peptide
  MOD_RES (1)..(3)..(37)..(38): Xaa is C or S
  MOD_RES (15)..(16)..(17)..(18)..(19): Xaa is A or G
  MOD_RES (20)..(21)..(22)..(23): Xaa is A or G or is absent
XGXSEVVMDSMEGLXXXXXXXXXMIQITINSLRTPVXXTPPTS

SEQ ID NO: 74137 - protein, 36 aa, Artificial Sequence; identical to SEQ ID NO: 17061
  GFR-binding peptide
  MOD_RES (35)..(35): Xaa is C or S
  MOD_RES (11)..(12)..(13)..(14)..(15): Xaa is A or G
  MOD_RES (16)..(17)..(18)..(19): Xaa is A or G or is absent

SEQ ID NO: 74138 - protein, 34 aa, Artificial Sequence; identical to SEQ ID NO: 48883
  GFR-binding peptide
  MOD_RES (32)..(33): Xaa is C or S

SEQ ID NO: 74139 - protein, 39 aa, Artificial Sequence
  GFR-binding peptide
  MOD_RES (33)..(34): Xaa is C or S
  MOD_RES (11)..(12)..(13)..(14)..(15): Xaa is A or G
  MOD_RES (16)..(17)..(18)..(19): Xaa is A or G or is absent
EVVMDSMEGLXXXXXXXXXMIQITINSLRTPVXXTPPTS

SEQ ID NO: 74140 - protein, 35 aa, Artificial Sequence
  GFR-binding peptide
  MOD_RES (32)..(33): Xaa is C or S
AEVVMDSMEGIVVNNAADMIQITINSLRAPVXXSA

SEQ ID NO: 74141 - protein, 31 aa, Artificial Sequence
  GFR-binding peptide
AEVVMDSMEGLVVNNAADMIQITINSLRAPV

SEQ ID NO: 74142 - protein, 39 aa, Artificial Sequence
  GFR-binding peptide
  MOD_RES (2)..(36)..(37): Xaa is C or S
  MOD_RES (14)..(15)..(16)..(17)..(18): Xaa is A or G
  MOD_RES (19)..(20)..(21)..(22): Xaa is A or G or is absent
GXRDVVMGSMEGIXXXXXXXXXMIQMTINSMKTPTXXPG

SEQ ID NO: 74143 - protein, 31 aa, Artificial Sequence
  GFR-binding peptide
  MOD_RES (31)..(31): Xaa is C or S
EEVIMSMEGLLLVRGNDMIQMTINSTKVPAX

SEQ ID NO: 74144 - protein, 36 aa, Artificial Sequence; identical to SEQ ID NO: 17067
  GFR-binding peptide
  MOD_RES (2)..(36): Xaa is C or S
  MOD_RES (14)..(15)..(16)..(17)..(18): Xaa is A or G
  MOD_RES (19)..(20)..(21)..(22): Xaa is A or G or is absent

SEQ ID NO: 74145 - protein, 35 aa, Artificial Sequence; identical to SEQ ID NO: 17068
  GFR-binding peptide
  MOD_RES (2)..(2): Xaa is C or S

SEQ ID NO: 74146 - protein, 39 aa, Artificial Sequence; identical to SEQ ID NO: 17069
  GFR-binding peptide
  MOD_RES (1)..(38): Xaa is C or S

SEQ ID NO: 74147 - protein, 38 aa, Artificial Sequence; identical to SEQ ID NO: 17070
  GFR-binding peptide
  MOD_RES (1)..(35): Xaa is C or S
  MOD_RES (13)..(14)..(15)..(16)..(17): Xaa is A or G
  MOD_RES (18)..(19)..(20)..(21): Xaa is A or G or is absent

SEQ ID NO: 74148 - protein, 39 aa, Artificial Sequence
  GFR-binding peptide
  MOD_RES (2)..(4)..(35)..(36): Xaa is C or S
SXKXSKVVMSMEGLVKPTRGVMIQITINSLDQPVXXPSA

SEQ ID NO: 74149 - protein, 38 aa, Artificial Sequence; identical to SEQ ID NO: 46345
  GFR-binding peptide
  MOD_RES (34)..(35): Xaa is C or S
  MOD_RES (12)..(13)..(14)..(15)..(16): Xaa is A or G
  MOD_RES (17)..(18)..(19)..(20): Xaa is A or G or is absent

SEQ ID NO: 74150 - protein, 39 aa, Artificial Sequence; identical to SEQ ID NO: 46350
  GFR-binding peptide
  MOD_RES (2)..(4)..(36)..(37): Xaa is C or S

SEQ ID NO: 74151 - protein, 30 aa, Artificial Sequence
  GFR-binding peptide
EVVMDSMEGIVVNNASDMIQITINSLRTPV

SEQ ID NO: 74152 - protein, 42 aa, Artificial Sequence; identical to SEQ ID NO: 17077
  GFR-binding peptide
  MOD_RES (1)..(38): Xaa is C or S
  MOD_RES (14)..(15)..(16)..(17)..(18): Xaa is A or G
  MOD_RES (19)..(20)..(21)..(22): Xaa is A or G or is absent

SEQ ID NO: 74153 - protein, 36 aa, Artificial Sequence; identical to SEQ ID NO: 17079
  GFR-binding peptide
  MOD_RES (36)..(36): Xaa is C or S

SEQ ID NO: 74154 - protein, 36 aa, Artificial Sequence
  GFR-binding peptide
  MOD_RES (2)..(4)..(35)..(36): Xaa is C or S
LXGXEEVIMSMEGLLLVRGNDMIQMTINSTKVPAXX

SEQ ID NO: 74155 - protein, 35 aa, Artificial Sequence
  GFR-binding peptide
  MOD_RES (1)..(32)..(33): Xaa is C or S
XSKVVMSMEGLVKPTRGVMIQITINSLDQPVXXPS

SEQ ID NO: 74156 - protein, 33 aa, Artificial Sequence; identical to SEQ ID NO: 46355
  GFR-binding peptide
  MOD_RES (1)..(33): Xaa is C or S

SEQ ID NO: 74157 - protein, 45 aa, Artificial Sequence; identical to SEQ ID NO: 17080
  GFR-binding peptide
  MOD_RES (2)..(4)..(41): Xaa is C or S

SEQ ID NO: 74158 - protein, 34 aa, Artificial Sequence
  GFR-binding peptide
  MOD_RES (1)..(3): Xaa is C or S
XGXRDVVMGSMEGIIIQQKDNMIQMTINSMKTPT

SEQ ID NO: 74159 - protein, 39 aa, Artificial Sequence; identical to SEQ ID NO: 48918
  GFR-binding peptide
  MOD_RES (2)..(4)..(35)..(36): Xaa is C or S

SEQ ID NO: 74160 - protein, 34 aa, Artificial Sequence; identical to SEQ ID NO: 48922
  GFR-binding peptide
  MOD_RES (1)..(34): Xaa is C or S
  MOD_RES (12)..(13)..(14)..(15)..(16): Xaa is A or G
  MOD_RES (17)..(18)..(19)..(20): Xaa is A or G or is absent

SEQ ID NO: 74161 - protein, 35 aa, Artificial Sequence; identical to SEQ ID NO: 17083
  GFR-binding peptide
  MOD_RES (35)..(35): Xaa is C or S

SEQ ID NO: 74162 - protein, 42 aa, Artificial Sequence; identical to SEQ ID NO: 46365
  GFR-binding peptide
  MOD_RES (1)..(3)..(37)..(38): Xaa is C or S
  MOD_RES (15)..(16)..(17)..(18)..(19): Xaa is A or G
  MOD_RES (20)..(21)..(22)..(23): Xaa is A or G or is absent

SEQ ID NO: 74163 - protein, 37 aa, Artificial Sequence; identical to SEQ ID NO: 46369
  GFR-binding peptide
  MOD_RES (1)..(35)..(36): Xaa is C or S
  MOD_RES (13)..(14)..(15)..(16)..(17): Xaa is A or G
  MOD_RES (18)..(19)..(20)..(21): Xaa is A or G or is absent

SEQ ID NO: 74164 - protein, 34 aa, Artificial Sequence; identical to SEQ ID NO: 17085
  GFR-binding peptide
  MOD_RES (1)..(1): Xaa is C or S
  MOD_RES (13)..(14)..(15)..(16)..(17): Xaa is A or G
  MOD_RES (18)..(19)..(20)..(21): Xaa is A or G or is absent

SEQ ID NO: 74165 - protein, 33 aa, Artificial Sequence; identical to SEQ ID NO: 17086
  GFR-binding peptide

SEQ ID NO: 74166 - protein, 42 aa, Artificial Sequence
  GFR-binding peptide
  MOD_RES (2)..(4)..(38)..(39): Xaa is C or S
  MOD_RES (16)..(17)..(18)..(19)..(20): Xaa is A or G
  MOD_RES (21)..(22)..(23)..(24): Xaa is A or G or is absent
HXGXSRVVMNSMEGLXXXXXXXXXMIQVTINSLKTPAXXPKP

SEQ ID NO: 74167 - protein, 33 aa, Artificial Sequence; identical to SEQ ID NO: 48926
  GFR-binding peptide
  MOD_RES (1)..(1): Xaa is C or S
  MOD_RES (12)..(13)..(14)..(15)..(16): Xaa is A or G
  MOD_RES (17)..(18)..(19)..(20): Xaa is A or G or is absent

SEQ ID NO: 74168 - protein, 44 aa, Artificial Sequence; identical to SEQ ID NO: 17087
  GFR-binding peptide
  MOD_RES (2)..(4)..(41): Xaa is C or S

SEQ ID NO: 74169 - protein, 40 aa, Artificial Sequence; identical to SEQ ID NO: 48929
  GFR-binding peptide
  MOD_RES (2)..(35)..(36): Xaa is C or S
  MOD_RES (13)..(14)..(15)..(16)..(17): Xaa is A or G
  MOD_RES (18)..(19)..(20)..(21): Xaa is A or G or is absent

SEQ ID NO: 74170 - protein, 37 aa, Artificial Sequence
  GFR-binding peptide
  MOD_RES (34)..(35): Xaa is C or S
  MOD_RES (12)..(13)..(14)..(15)..(16): Xaa is A or G
  MOD_RES (17)..(18)..(19)..(20): Xaa is A or G or is absent
RDVVMGSMEGLXXXXXXXXXMIQMTINSMKTPTXXPG

SEQ ID NO: 74171 - protein, 39 aa, Artificial Sequence; identical to SEQ ID NO: 17089
  GFR-binding peptide
  MOD_RES (2)..(36): Xaa is C or S
  MOD_RES (14)..(15)..(16)..(17)..(18): Xaa is A or G
  MOD_RES (19)..(20)..(21)..(22): Xaa is A or G or is absent

SEQ ID NO: 74172 - protein, 38 aa, Artificial Sequence; identical to SEQ ID NO: 17090
  GFR-binding peptide
  MOD_RES (1)..(3)..(37): Xaa is C or S
  MOD_RES (15)..(16)..(17)..(18)..(19): Xaa is A or G
  MOD_RES (20)..(21)..(22)..(23): Xaa is A or G or is absent

SEQ ID NO: 74173 - protein, 32 aa, Artificial Sequence
  GFR-binding peptide
  MOD_RES (1)..(1): Xaa is C or S
XRDVVMGSMEGIIIQQKDNMIQMTINSMKTPT

SEQ ID NO: 74174 - protein, 42 aa, Artificial Sequence; identical to SEQ ID NO: 17093
  GFR-binding peptide
  MOD_RES (2)..(39): Xaa is C or S
  MOD_RES (15)..(16)..(17)..(18)..(19): Xaa is A or G
  MOD_RES (20)..(21)..(22)..(23): Xaa is A or G or is absent

SEQ ID NO: 74175 - protein, 35 aa, Artificial Sequence
  GFR-binding peptide
  MOD_RES (1)..(3)..(34)..(35): Xaa is C or S
XGXEEVIMSMEGLLLVRGNDMIQMTINSTKVPAXX

SEQ ID NO: 74176 - protein, 41 aa, Artificial Sequence
  GFR-binding peptide
  MOD_RES (1)..(3)..(35)..(36): Xaa is C or S
XGXRDVVMGSMEGLIIQQKDNMIQMTINSMKTPTXXPGASG

SEQ ID NO: 74177 - protein, 38 aa, Artificial Sequence; identical to SEQ ID NO: 46384
  GFR-binding peptide
  MOD_RES (1)..(3)..(34)..(35): Xaa is C or S

SEQ ID NO: 74178 - protein, 40 aa, Artificial Sequence; identical to SEQ ID NO: 17097
  GFR-binding peptide
  MOD_RES (1)..(35): Xaa is C or S

SEQ ID NO: 74179 - protein, 36 aa, Artificial Sequence
  GFR-binding peptide
  MOD_RES (1)..(3)..(35)..(36): Xaa is C or S
XGXSEVVMDSMEGLVVNNASDMIQITINSLRTPVXX

SEQ ID NO: 74180 - protein, 36 aa, Artificial Sequence; identical to SEQ ID NO: 48946
  GFR-binding peptide
  MOD_RES (2)..(4): Xaa is C or S
  MOD_RES (15)..(16)..(17)..(18)..(19): Xaa is A or G
  MOD_RES (20)..(21)..(22)..(23): Xaa is A or G or is absent

SEQ ID NO: 74181 - protein, 37 aa, Artificial Sequence; identical to SEQ ID NO: 17098
  GFR-binding peptide
  MOD_RES (2)..(4): Xaa is C or S
  MOD_RES (16)..(17)..(18)..(19)..(20): Xaa is A or G
  MOD_RES (21)..(22)..(23)..(24): Xaa is A or G or is absent

SEQ ID NO: 74182 - protein, 37 aa, Artificial Sequence; identical to SEQ ID NO: 17100
  GFR-binding peptide
  MOD_RES (35)..(35): Xaa is C or S

SEQ ID NO: 74183 - protein, 39 aa, Artificial Sequence
  GFR-binding peptide
  MOD_RES (1)..(3)..(37)..(38): Xaa is C or S
  MOD_RES (15)..(16)..(17)..(18)..(19): Xaa is A or G
  MOD_RES (20)..(21)..(22)..(23): Xaa is A or G or is absent
XGXAEVVMDSMEGIXXXXXXXXXMIQITINSLRAPVXXS

SEQ ID NO: 74184 - protein, 34 aa, Artificial Sequence; identical to SEQ ID NO: 46391
  GFR-binding peptide
  MOD_RES (2)..(2): Xaa is C or S
  MOD_RES (13)..(14)..(15)..(16)..(17): Xaa is A or G
  MOD_RES (18)..(19)..(20)..(21): Xaa is A or G or is absent

SEQ ID NO: 74185 - protein, 42 aa, Artificial Sequence
  GFR-binding peptide
  MOD_RES (2)..(36)..(37): Xaa is C or S
  MOD_RES (14)..(15)..(16)..(17)..(18): Xaa is A or G
  MOD_RES (19)..(20)..(21)..(22): Xaa is A or G or is absent
GXRDVVMGSMEGIXXXXXXXXXMIQMTINSMKTPTXXPGASG

SEQ ID NO: 74186 - protein, 37 aa, Artificial Sequence
  GFR-binding peptide
  MOD_RES (2)..(4)..(35)..(36): Xaa is C or S
SXKXSRVIMSMEGLVKPKRGVMIQITINSLAQPVXXP

SEQ ID NO: 74187 - protein, 41 aa, Artificial Sequence; identical to SEQ ID NO: 17105
  GFR-binding peptide
  MOD_RES (1)..(38): Xaa is C or S

SEQ ID NO: 74188 - protein, 33 aa, Artificial Sequence; identical to SEQ ID NO: 48961
  GFR-binding peptide
  MOD_RES (2)..(33): Xaa is C or S

SEQ ID NO: 74189 - protein, 40 aa, Artificial Sequence
  GFR-binding peptide
  MOD_RES (34)..(35): Xaa is C or S
  MOD_RES (12)..(13)..(14)..(15)..(16): Xaa is A or G
  MOD_RES (17)..(18)..(19)..(20): Xaa is A or G or is absent
SRVVMNSMEGIXXXXXXXXXMIQVTINSLKTPAXXPKPVH

SEQ ID NO: 74190 - protein, 38 aa, Artificial Sequence
  GFR-binding peptide
  MOD_RES (2)..(33)..(34): Xaa is C or S
KXSKVIMSMEGLIKPTKGIMIQITINSLDQSVXXPSAS

SEQ ID NO: 74191 - protein, 33 aa, Artificial Sequence
  GFR-binding peptide
  MOD_RES (12)..(13)..(14)..(15)..(16): Xaa is A or G
  MOD_RES (17)..(18)..(19)..(20): Xaa is A or G or is absent
AEVVMDSMEGLXXXXXXXXXMIQITINSLRAPV

SEQ ID NO: 74192 - protein, 41 aa, Artificial Sequence
  GFR-binding peptide
  MOD_RES (2)..(35)..(36): Xaa is C or S
  MOD_RES (13)..(14)..(15)..(16)..(17): Xaa is A or G
  MOD_RES (18)..(19)..(20)..(21): Xaa is A or G or is absent
GXEEVIMSMEGIXXXXXXXXXMIQMTINSTKVPAXXTSPVR

SEQ ID NO: 74193 - protein, 40 aa, Artificial Sequence; identical to SEQ ID NO: 17110
  GFR-binding peptide
  MOD_RES (1)..(3)..(37): Xaa is C or S
  MOD_RES (15)..(16)..(17)..(18)..(19): Xaa is A or G
  MOD_RES (20)..(21)..(22)..(23): Xaa is A or G or is absent

SEQ ID NO: 74194 - protein, 43 aa, Artificial Sequence; identical to SEQ ID NO: 17111
  GFR-binding peptide
  MOD_RES (2)..(4)..(38): Xaa is C or S
  MOD_RES (16)..(17)..(18)..(19)..(20): Xaa is A or G
  MOD_RES (21)..(22)..(23)..(24): Xaa is A or G or is absent

SEQ ID NO: 74195 - protein, 34 aa, Artificial Sequence
  GFR-binding peptide
  MOD_RES (33)..(34): Xaa is C or S
  MOD_RES (11)..(12)..(13)..(14)..(15): Xaa is A or G
  MOD_RES (16)..(17)..(18)..(19): Xaa is A or G or is absent
DVVMGSMEGLXXXXXXXXXMIQMTINSMKTPTXX

SEQ ID NO: 74196 - protein, 39 aa, Artificial Sequence; identical to SEQ ID NO: 17113
  GFR-binding peptide
  MOD_RES (2)..(4)..(38): Xaa is C or S

SEQ ID NO: 74197 - protein, 35 aa, Artificial Sequence
  GFR-binding peptide
  MOD_RES (2)..(35): Xaa is C or S
  MOD_RES (13)..(14)..(15)..(16)..(17): Xaa is A or G
  MOD_RES (18)..(19)..(20)..(21): Xaa is A or G or is absent
GXEEVIMSMEGLXXXXXXXXXMIQMTINSTKVPAX

SEQ ID NO: 74198 - protein, 40 aa, Artificial Sequence
  GFR-binding peptide
  MOD_RES (2)..(36)..(37): Xaa is C or S
  MOD_RES (14)..(15)..(16)..(17)..(18): Xaa is A or G
  MOD_RES (19)..(20)..(21)..(22): Xaa is A or G or is absent
GXRDVVMGSMEGLXXXXXXXXXMIQMTINSMKTPTXXPGA

SEQ ID NO: 74199 - protein, 34 aa, Artificial Sequence
  GFR-binding peptide
  MOD_RES (1)..(3)..(34): Xaa is C or S
XGXEEVIMSMEGILLVRGNDMIQMTINSTKVPAX

SEQ ID NO: 74200 - protein, 35 aa, Artificial Sequence
  GFR-binding peptide
  MOD_RES (1)..(3): Xaa is C or S
  MOD_RES (14)..(15)..(16)..(17)..(18): Xaa is A or G
  MOD_RES (19)..(20)..(21)..(22): Xaa is A or G or is absent
XKXSKVVMSMEGLXXXXXXXXXMIQITINSLDQPV

SEQ ID NO: 74201 - protein, 34 aa, Artificial Sequence; identical to SEQ ID NO: 17116
  GFR-binding peptide
  MOD_RES (34)..(34): Xaa is C or S
  MOD_RES (12)..(13)..(14)..(15)..(16): Xaa is A or G
  MOD_RES (17)..(18)..(19)..(20): Xaa is A or G or is absent

SEQ ID NO: 74202 - protein, 33 aa, Artificial Sequence; identical to SEQ ID NO: 48978
  GFR-binding peptide
  MOD_RES (33)..(33): Xaa is C or S
  MOD_RES (11)..(12)..(13)..(14)..(15): Xaa is A or G
  MOD_RES (16)..(17)..(18)..(19): Xaa is A or G or is absent

SEQ ID NO: 74203 - protein, 40 aa, Artificial Sequence; identical to SEQ ID NO: 17117
  GFR-binding peptide
  MOD_RES (37)..(37): Xaa is C or S

SEQ ID NO: 74204 - protein, 41 aa, Artificial Sequence
  GFR-binding peptide
  MOD_RES (2)..(4)..(36)..(37): Xaa is C or S
SXGXRDVVMGSMEGIIIQQKDNMIQMTINSMKTPTXXPGAS

SEQ ID NO: 74205 - protein, 36 aa, Artificial Sequence; identical to SEQ ID NO: 48981
  GFR-binding peptide
  MOD_RES (2)..(4)..(35)..(36): Xaa is C or S

SEQ ID NO: 74206 - protein, 35 aa, Artificial Sequence
  GFR-binding peptide
  MOD_RES (1)..(3)..(34)..(35): Xaa is C or S
XGXEEVIMSMEGILLVRGNDMIQMTINSTKVPAXX

SEQ ID NO: 74207 - protein, 42 aa, Artificial Sequence; identical to SEQ ID NO: 17119
  GFR-binding peptide
  MOD_RES (2)..(36): Xaa is C or S
  MOD_RES (14)..(15)..(16)..(17)..(18): Xaa is A or G
  MOD_RES (19)..(20)..(21)..(22): Xaa is A or G or is absent

SEQ ID NO: 74208 - protein, 36 aa, Artificial Sequence
  GFR-binding peptide
  MOD_RES (31)..(32): Xaa is C or S
EEVIMSMEGLLLVRGNDMIQMTINSTKVPAXXTSPV

SEQ ID NO: 74209 - protein, 35 aa, Artificial Sequence
  GFR-binding peptide
  MOD_RES (1)..(32)..(33): Xaa is C or S
XEEVIMSMEGLLLVRGNDMIQMTINSTKVPAXXTS

SEQ ID NO: 74210 - protein, 32 aa, Artificial Sequence
  GFR-binding peptide
  MOD_RES (11)..(12)..(13)..(14)..(15): Xaa is A or G
  MOD_RES (16)..(17)..(18)..(19): Xaa is A or G or is absent
EVVMDSMEGIXXXXXXXXXMIQITINSLRAPV

SEQ ID NO: 74211 - protein, 39 aa, Artificial Sequence; identical to SEQ ID NO: 17120
  GFR-binding peptide
  MOD_RES (1)..(3)..(37): Xaa is C or S

SEQ ID NO: 74212 - protein, 35 aa, Artificial Sequence
  GFR-binding peptide
  MOD_RES (1)..(3)..(35): Xaa is C or S
XGXRDVVMGSMEGLIIQQKDNMIQMTINSMKTPTX

SEQ ID NO: 74213 - protein, 40 aa, Artificial Sequence
  GFR-binding peptide
  MOD_RES (34)..(35): Xaa is C or S
  MOD_RES (12)..(13)..(14)..(15)..(16): Xaa is A or G
  MOD_RES (17)..(18)..(19)..(20): Xaa is A or G or is absent
AEVVMDSMEGIXXXXXXXXXMIQITINSLRAPVXXSAPAA

SEQ ID NO: 74214 - protein, 45 aa, Artificial Sequence; identical to SEQ ID NO: 17121
  GFR-binding peptide
  MOD_RES (2)..(4)..(41): Xaa is C or S

SEQ ID NO: 74215 - protein, 33 aa, Artificial Sequence
  GFR-binding peptide
  MOD_RES (33)..(33): Xaa is C or S
  MOD_RES (11)..(12)..(13)..(14)..(15): Xaa is A or G
  MOD_RES (16)..(17)..(18)..(19): Xaa is A or G or is absent
DVVMGSMEGLXXXXXXXXXMIQMTINSMKTPTX

SEQ ID NO: 74216 - protein, 37 aa, Artificial Sequence; identical to SEQ ID NO: 46416
  GFR-binding peptide
  MOD_RES (33)..(34): Xaa is C or S
  MOD_RES (11)..(12)..(13)..(14)..(15): Xaa is A or G
  MOD_RES (16)..(17)..(18)..(19): Xaa is A or G or is absent

SEQ ID NO: 74217 - protein, 40 aa, Artificial Sequence; identical to SEQ ID NO: 48989
  GFR-binding peptide
  MOD_RES (1)..(3)..(36)..(37): Xaa is C or S
  MOD_RES (14)..(15)..(16)..(17)..(18): Xaa is A or G
  MOD_RES (19)..(20)..(21)..(22): Xaa is A or G or is absent

SEQ ID NO: 74218 - protein, 36 aa, Artificial Sequence
  GFR-binding peptide
  MOD_RES (1)..(35)..(36): Xaa is C or S
  MOD_RES (13)..(14)..(15)..(16)..(17): Xaa is A or G
  MOD_RES (18)..(19)..(20)..(21): Xaa is A or G or is absent
XAEVVMDSMEGLXXXXXXXXXMIQITINSLRAPVXX

SEQ ID NO: 74219 - protein, 39 aa, Artificial Sequence; identical to SEQ ID NO: 17123
  GFR-binding peptide
  MOD_RES (34)..(34): Xaa is C or S

SEQ ID NO: 74220 - protein, 34 aa, Artificial Sequence
  GFR-binding peptide
  MOD_RES (33)..(34): Xaa is C or S
  MOD_RES (11)..(12)..(13)..(14)..(15): Xaa is A or G
  MOD_RES (16)..(17)..(18)..(19): Xaa is A or G or is absent
SKVVMSMEGLXXXXXXXXXMIQITINSLDQPVXX

SEQ ID NO: 74221 - protein, 39 aa, Artificial Sequence; identical to SEQ ID NO: 17124
  GFR-binding peptide
  MOD_RES (1)..(35): Xaa is C or S

SEQ ID NO: 74222 - protein, 36 aa, Artificial Sequence; identical to SEQ ID NO: 17125
  GFR-binding peptide
  MOD_RES (1)..(35): Xaa is C or S
  MOD_RES (13)..(14)..(15)..(16)..(17): Xaa is A or G
  MOD_RES (18)..(19)..(20)..(21): Xaa is A or G or is absent

SEQ ID NO: 74223 - protein, 42 aa, Artificial Sequence; identical to SEQ ID NO: 17127
  GFR-binding peptide
  MOD_RES (1)..(38): Xaa is C or S

SEQ ID NO: 74224 - protein, 37 aa, Artificial Sequence; identical to SEQ ID NO: 17128
  GFR-binding peptide
  MOD_RES (2)..(36): Xaa is C or S
  MOD_RES (14)..(15)..(16)..(17)..(18): Xaa is A or G
  MOD_RES (19)..(20)..(21)..(22): Xaa is A or G or is absent

SEQ ID NO: 74225 - protein, 41 aa, Artificial Sequence
  GFR-binding peptide
  MOD_RES (2)..(36)..(37): Xaa is C or S
  MOD_RES (14)..(15)..(16)..(17)..(18): Xaa is A or G
  MOD_RES (19)..(20)..(21)..(22): Xaa is A or G or is absent
GXRDVVMGSMEGIXXXXXXXXXMIQMTINSMKTPTXXPGAS

SEQ ID NO: 74226 - protein, 38 aa, Artificial Sequence; identical to SEQ ID NO: 17131
  GFR-binding peptide
  MOD_RES (34)..(34): Xaa is C or S
  MOD_RES (12)..(13)..(14)..(15)..(16): Xaa is A or G
  MOD_RES (17)..(18)..(19)..(20): Xaa is A or G or is absent

SEQ ID NO: 74227 - protein, 32 aa, Artificial Sequence
  GFR-binding peptide
  MOD_RES (11)..(12)..(13)..(14)..(15): Xaa is A or G
  MOD_RES (16)..(17)..(18)..(19): Xaa is A or G or is absent
EVVMDSMEGIXXXXXXXXXMIQITINSLRTPV

SEQ ID NO: 74228 - protein, 37 aa, Artificial Sequence; identical to SEQ ID NO: 17132
  GFR-binding peptide
  MOD_RES (1)..(3)..(37): Xaa is C or S
  MOD_RES (15)..(16)..(17)..(18)..(19): Xaa is A or G
  MOD_RES (20)..(21)..(22)..(23): Xaa is A or G or is absent

SEQ ID NO: 74229 - protein, 39 aa, Artificial Sequence; identical to SEQ ID NO: 17133
  GFR-binding peptide
  MOD_RES (2)..(4): Xaa is C or S
  MOD_RES (17)..(18)..(19)..(20)..(21): Xaa is A or G
  MOD_RES (22)..(23)..(24)..(25): Xaa is A or G or is absent

SEQ ID NO: 74230 - protein, 37 aa, Artificial Sequence; identical to SEQ ID NO: 46428
  GFR-binding peptide
  MOD_RES (1)..(3)..(37): Xaa is C or S
  MOD_RES (15)..(16)..(17)..(18)..(19): Xaa is A or G
  MOD_RES (20)..(21)..(22)..(23): Xaa is A or G or is absent

SEQ ID NO: 74231 - protein, 37 aa, Artificial Sequence
  GFR-binding peptide
  MOD_RES (1)..(3)..(36)..(37): Xaa is C or S
  MOD_RES (14)..(15)..(16)..(17)..(18): Xaa is A or G
  MOD_RES (19)..(20)..(21)..(22): Xaa is A or G or is absent
XKXSKVIMSMEGLXXXXXXXXXMIQITINSLDQSVXX

SEQ ID NO: 74232 - protein, 36 aa, Artificial Sequence
  GFR-binding peptide
  MOD_RES (2)..(35)..(36): Xaa is C or S
  MOD_RES (13)..(14)..(15)..(16)..(17): Xaa is A or G
  MOD_RES (18)..(19)..(20)..(21): Xaa is A or G or is absent
GXEEVIMSMEGLXXXXXXXXXMIQMTINSTKVPAXX

SEQ ID NO: 74233 - protein, 34 aa, Artificial Sequence; identical to SEQ ID NO: 46433
  GFR-binding peptide
  MOD_RES (33)..(34): Xaa is C or S
  MOD_RES (11)..(12)..(13)..(14)..(15): Xaa is A or G
  MOD_RES (16)..(17)..(18)..(19): Xaa is A or G or is absent

SEQ ID NO: 74234 - protein, 38 aa, Artificial Sequence; identical to SEQ ID NO: 17136
  GFR-binding peptide
  MOD_RES (2)..(36): Xaa is C or S

SEQ ID NO: 74235 - protein, 35 aa, Artificial Sequence
  GFR-binding peptide
  MOD_RES (1)..(35): Xaa is C or S
  MOD_RES (13)..(14)..(15)..(16)..(17): Xaa is A or G
  MOD_RES (18)..(19)..(20)..(21): Xaa is A or G or is absent
XAEVVMDSMEGLXXXXXXXXXMIQITINSLRAPVX

SEQ ID NO: 74236 - protein, 40 aa, Artificial Sequence; identical to SEQ ID NO: 17137
  GFR-binding peptide
  MOD_RES (36)..(36): Xaa is C or S

SEQ ID NO: 74237 - protein, 33 aa, Artificial Sequence
  GFR-binding peptide
  MOD_RES (33)..(33): Xaa is C or S
  MOD_RES (11)..(12)..(13)..(14)..(15): Xaa is A or G
  MOD_RES (16)..(17)..(18)..(19): Xaa is A or G or is absent
SKVVMSMEGLXXXXXXXXXMIQITINSLDQPVX

SEQ ID NO: 74238 - protein, 35 aa, Artificial Sequence; identical to SEQ ID NO: 46435
  GFR-binding peptide
  MOD_RES (2)..(4)..(35): Xaa is C or S

SEQ ID NO: 74239 - protein, 37 aa, Artificial Sequence; identical to SEQ ID NO: 46439
  GFR-binding peptide
  MOD_RES (2)..(33)..(34): Xaa is C or S

SEQ ID NO: 74240 - protein, 36 aa, Artificial Sequence
  GFR-binding peptide
  MOD_RES (2)..(36): Xaa is C or S
  MOD_RES (14)..(15)..(16)..(17)..(18): Xaa is A or G
  MOD_RES (19)..(20)..(21)..(22): Xaa is A or G or is absent
GXSEVVMDSMEGIXXXXXXXXXMIQITINSLRTPVX

SEQ ID NO: 74241 - protein, 36 aa, Artificial Sequence
  GFR-binding peptide
  MOD_RES (2)..(34)..(35): Xaa is C or S
GXRDVVMGSMEGLIIQQKDNMIQMTINSMKTPTXXP

SEQ ID NO: 74242 - protein, 39 aa, Artificial Sequence
  GFR-binding peptide
  MOD_RES (34)..(35): Xaa is C or S
  MOD_RES (12)..(13)..(14)..(15)..(16): Xaa is A or G
  MOD_RES (17)..(18)..(19)..(20): Xaa is A or G or is absent
SEVVMDSMEGLXXXXXXXXXMIQITINSLRTPVXXTPPT

SEQ ID NO: 74243 - protein, 36 aa, Artificial Sequence
  GFR-binding peptide
  MOD_RES (2)..(4): Xaa is C or S
  MOD_RES (15)..(16)..(17)..(18)..(19): Xaa is A or G
  MOD_RES (20)..(21)..(22)..(23): Xaa is A or G or is absent
LXGXEEVIMSMEGLXXXXXXXXXMIQMTINSTKVPA

SEQ ID NO: 74244 - protein, 31 aa, Artificial Sequence; identical to SEQ ID NO: 49011
  GFR-binding peptide
  MOD_RES (31)..(31): Xaa is C or S

SEQ ID NO: 74245 - protein, 39 aa, Artificial Sequence; identical to SEQ ID NO: 17144
  GFR-binding peptide
  MOD_RES (2)..(39): Xaa is C or S
  MOD_RES (15)..(16)..(17)..(18)..(19): Xaa is A or G
  MOD_RES (20)..(21)..(22)..(23): Xaa is A or G or is absent

SEQ ID NO: 74246 - protein, 39 aa, Artificial Sequence
  GFR-binding peptide
  MOD_RES (2)..(34)..(35): Xaa is C or S
GXSEVVMDSMEGIVVNNASDMIQITINSLRTPVXXTPPT

SEQ ID NO: 74247 - protein, 38 aa, Artificial Sequence; identical to SEQ ID NO: 49014
  GFR-binding peptide
  MOD_RES (1)..(34)..(35): Xaa is C or S
  MOD_RES (12)..(13)..(14)..(15)..(16): Xaa is A or G
  MOD_RES (17)..(18)..(19)..(20): Xaa is A or G or is absent

SEQ ID NO: 74248 - protein, 44 aa, Artificial Sequence; identical to SEQ ID NO: 17146
  GFR-binding peptide
  MOD_RES (1)..(3)..(40): Xaa is C or S
  MOD_RES (16)..(17)..(18)..(19)..(20): Xaa is A or G
  MOD_RES (21)..(22)..(23)..(24): Xaa is A or G or is absent

SEQ ID NO: 74249 - protein, 37 aa, Artificial Sequence; identical to SEQ ID NO: 49015
  GFR-binding peptide
  MOD_RES (1)..(32)..(33): Xaa is C or S

SEQ ID NO: 74250 - protein, 35 aa, Artificial Sequence
  GFR-binding peptide
  MOD_RES (1)..(3)..(35): Xaa is C or S
XGXAEVVMDSMEGLVVNNAADMIQITINSLRAPVX

SEQ ID NO: 74251 - protein, 39 aa, Artificial Sequence
  GFR-binding peptide
  MOD_RES (2)..(34)..(35): Xaa is C or S
GXRDVVMGSMEGLIIQQKDNMIQMTINSMKTPTXXPGAS

SEQ ID NO: 74252 - protein, 39 aa, Artificial Sequence; identical to SEQ ID NO: 49016
  GFR-binding peptide
  MOD_RES (1)..(35)..(36): Xaa is C or S
  MOD_RES (13)..(14)..(15)..(16)..(17): Xaa is A or G
  MOD_RES (18)..(19)..(20)..(21): Xaa is A or G or is absent

SEQ ID NO: 74253 - protein, 33 aa, Artificial Sequence
  GFR-binding peptide
  MOD_RES (31)..(32): Xaa is C or S
EVVMDSMEGIVVNNAADMIQITINSLRAPVXXS

SEQ ID NO: 74254 - protein, 40 aa, Artificial Sequence
  GFR-binding peptide
  MOD_RES (1)..(3)..(35)..(36): Xaa is C or S
XGXAEVVMDSMEGIVVNNAADMIQITINSLRAPVXXSAPA

SEQ ID NO: 74255 - protein, 30 aa, Artificial Sequence
  GFR-binding peptide
SKVVMSMEGLVKPTRGVMIQITINSLDQPV

SEQ ID NO: 74256 - protein, 34 aa, Artificial Sequence
  GFR-binding peptide
  MOD_RES (2)..(2): Xaa is C or S
  MOD_RES (13)..(14)..(15)..(16)..(17): Xaa is A or G
  MOD_RES (18)..(19)..(20)..(21): Xaa is A or G or is absent
KXSKVIMSMEGLXXXXXXXXXMIQITINSLDQSV

SEQ ID NO: 74257 - protein, 35 aa, Artificial Sequence
  GFR-binding peptide
  MOD_RES (2)..(34)..(35): Xaa is C or S
GXSEVVMDSMEGLVVNNASDMIQITINSLRTPVXX

SEQ ID NO: 74258 - protein, 41 aa, Artificial Sequence; identical to SEQ ID NO: 17148
  GFR-binding peptide
  MOD_RES (1)..(38): Xaa is C or S

SEQ ID NO: 74259 - protein, 38 aa, Artificial Sequence
  GFR-binding peptide
  MOD_RES (2)..(4)..(37)..(38): Xaa is C or S
  MOD_RES (15)..(16)..(17)..(18)..(19): Xaa is A or G
  MOD_RES (20)..(21)..(22)..(23): Xaa is A or G or is absent
SXKXSKVVMSMEGLXXXXXXXXXMIQITINSLDQPVXX

SEQ ID NO: 74260 - protein, 35 aa, Artificial Sequence
  GFR-binding peptide
  MOD_RES (1)..(35): Xaa is C or S
  MOD_RES (13)..(14)..(15)..(16)..(17): Xaa is A or G
  MOD_RES (18)..(19)..(20)..(21): Xaa is A or G or is absent
XRDVVMGSMEGIXXXXXXXXXMIQMTINSMKTPTX

SEQ ID NO: 74261 - protein, 40 aa, Artificial Sequence; identical to SEQ ID NO: 17150
  GFR-binding peptide
  MOD_RES (2)..(4): Xaa is C or S
  MOD_RES (17)..(18)..(19)..(20)..(21): Xaa is A or G
  MOD_RES (22)..(23)..(24)..(25): Xaa is A or G or is absent

SEQ ID NO: 74262 - protein, 34 aa, Artificial Sequence; identical to SEQ ID NO: 46470
  GFR-binding peptide
  MOD_RES (1)..(3)..(34): Xaa is C or S

SEQ ID NO: 74263 - protein, 36 aa, Artificial Sequence; identical to SEQ ID NO: 17151
  GFR-binding peptide
  MOD_RES (13)..(14)..(15)..(16)..(17): Xaa is A or G
  MOD_RES (18)..(19)..(20)..(21): Xaa is A or G or is absent

SEQ ID NO: 74264 - protein, 37 aa, Artificial Sequence
  GFR-binding peptide
  MOD_RES (1)..(34)..(35): Xaa is C or S
  MOD_RES (12)..(13)..(14)..(15)..(16): Xaa is A or G
  MOD_RES (17)..(18)..(19)..(20): Xaa is A or G or is absent
XSKVVMSMEGLXXXXXXXXXMIQITINSLDQPVXXPS

SEQ ID NO: 74265 - protein, 35 aa, Artificial Sequence
  GFR-binding peptide
  MOD_RES (33)..(34): Xaa is C or S
  MOD_RES (11)..(12)..(13)..(14)..(15): Xaa is A or G
  MOD_RES (16)..(17)..(18)..(19): Xaa is A or G or is absent
EVVMDSMEGIXXXXXXXXXMIQITINSLRTPVXXT

SEQ ID NO: 74266 - protein, 43 aa, Artificial Sequence; identical to SEQ ID NO: 49020
  GFR-binding peptide
  MOD_RES (2)..(4)..(37)..(38): Xaa is C or S
  MOD_RES (15)..(16)..(17)..(18)..(19): Xaa is A or G
  MOD_RES (20)..(21)..(22)..(23): Xaa is A or G or is absent

SEQ ID NO: 74267 - protein, 32 aa, Artificial Sequence
  GFR-binding peptide
  MOD_RES (31)..(32): Xaa is C or S
SRVIMSMEGLVKPKRGVMIQITINSLAQPVXX

SEQ ID NO: 74268 - protein, 33 aa, Artificial Sequence
  GFR-binding peptide
  MOD_RES (12)..(13)..(14)..(15)..(16): Xaa is A or G
  MOD_RES (17)..(18)..(19)..(20): Xaa is A or G or is absent
SEVVMDSMEGLXXXXXXXXXMIQITINSLRTPV

SEQ ID NO: 74269 - protein, 38 aa, Artificial Sequence
  GFR-binding peptide
  MOD_RES (2)..(4)..(36)..(37): Xaa is C or S
RXGXAEVVMDSMEGIVVNNAADMIQITINSLRAPVXXS

SEQ ID NO: 74270 - protein, 38 aa, Artificial Sequence
  GFR-binding peptide
  MOD_RES (32)..(33): Xaa is C or S
SEVVMDSMEGLVVNNASDMIQITINSLRTPVXXTPPTS

SEQ ID NO: 74271 - protein, 41 aa, Artificial Sequence
  GFR-binding peptide
  MOD_RES (1)..(3)..(35)..(36): Xaa is C or S
XGXSRVVMNSMEGLIVNSSDDMIQVTINSLKTPAXXPKPVH

SEQ ID NO: 74272 - protein, 40 aa, Artificial Sequence; identical to SEQ ID NO: 17159
  GFR-binding peptide
  MOD_RES (1)..(3)..(37): Xaa is C or S

SEQ ID NO: 74273 - protein, 38 aa, Artificial Sequence
  GFR-binding peptide
  MOD_RES (33)..(34): Xaa is C or S
  MOD_RES (11)..(12)..(13)..(14)..(15): Xaa is A or G
  MOD_RES (16)..(17)..(18)..(19): Xaa is A or G or is absent
RVVMNSMEGLXXXXXXXXXMIQVTINSLKTPAXXPKPV

SEQ ID NO: 74274 - protein, 33 aa, Artificial Sequence; identical to SEQ ID NO: 17160
  GFR-binding peptide
  MOD_RES (11)..(12)..(13)..(14)..(15): Xaa is A or G
  MOD_RES (16)..(17)..(18)..(19): Xaa is A or G or is absent

SEQ ID NO: 74275 - protein, 37 aa, Artificial Sequence; identical to SEQ ID NO: 17163
  GFR-binding peptide
  MOD_RES (37)..(37): Xaa is C or S

SEQ ID NO: 74276 - protein, 34 aa, Artificial Sequence
  GFR-binding peptide
  MOD_RES (1)..(3)..(34): Xaa is C or S
XGXEEVIMSMEGLLLVRGNDMIQMTINSTKVPAX

SEQ ID NO: 74277 - protein, 35 aa, Artificial Sequence; identical to SEQ ID NO: 46488
  GFR-binding peptide
  MOD_RES (34)..(35): Xaa is C or S
  MOD_RES (12)..(13)..(14)..(15)..(16): Xaa is A or G
  MOD_RES (17)..(18)..(19)..(20): Xaa is A or G or is absent

SEQ ID NO: 74278 - protein, 40 aa, Artificial Sequence; identical to SEQ ID NO: 17164
  GFR-binding peptide
  MOD_RES (2)..(4): Xaa is C or S
  MOD_RES (17)..(18)..(19)..(20)..(21): Xaa is A or G
  MOD_RES (22)..(23)..(24)..(25): Xaa is A or G or is absent

SEQ ID NO: 74279 - protein, 40 aa, Artificial Sequence
  GFR-binding peptide
  MOD_RES (1)..(3)..(36)..(37): Xaa is C or S
  MOD_RES (14)..(15)..(16)..(17)..(18): Xaa is A or G
  MOD_RES (19)..(20)..(21)..(22): Xaa is A or G or is absent
XGXEEVIMSMEGIXXXXXXXXXMIQMTINSTKVPAXXTSP

SEQ ID NO: 74280 - protein, 36 aa, Artificial Sequence; identical to SEQ ID NO: 17166
  GFR-binding peptide
  MOD_RES (1)..(35): Xaa is C or S

SEQ ID NO: 74281 - protein, 34 aa, Artificial Sequence; identical to SEQ ID NO: 46493
  GFR-binding peptide
  MOD_RES (31)..(32): Xaa is C or S

SEQ ID NO: 74282 - protein, 39 aa, Artificial Sequence; identical to SEQ ID NO: 46494
  GFR-binding peptide
  MOD_RES (1)..(3)..(37)..(38): Xaa is C or S
  MOD_RES (15)..(16)..(17)..(18)..(19): Xaa is A or G
  MOD_RES (20)..(21)..(22)..(23): Xaa is A or G or is absent

SEQ ID NO: 74283 - protein, 37 aa, Artificial Sequence
  GFR-binding peptide
  MOD_RES (2)..(36)..(37): Xaa is C or S
  MOD_RES (14)..(15)..(16)..(17)..(18): Xaa is A or G
  MOD_RES (19)..(20)..(21)..(22): Xaa is A or G or is absent
GXAEVVMDSMEGIXXXXXXXXXMIQITINSLRAPVXX

SEQ ID NO: 74284 - protein, 38 aa, Artificial Sequence; identical to SEQ ID NO: 17167
  GFR-binding peptide
  MOD_RES (36)..(36): Xaa is C or S
  MOD_RES (12)..(13)..(14)..(15)..(16): Xaa is A or G
  MOD_RES (17)..(18)..(19)..(20): Xaa is A or G or is absent

SEQ ID NO: 74285 - protein, 34 aa, Artificial Sequence
  GFR-binding peptide
  MOD_RES (1)..(1): Xaa is C or S
  MOD_RES (13)..(14)..(15)..(16)..(17): Xaa is A or G
  MOD_RES (18)..(19)..(20)..(21): Xaa is A or G or is absent
XSRVVMNSMEGLXXXXXXXXXMIQVTINSLKTPA

SEQ ID NO: 74286 - protein, 42 aa, Artificial Sequence; identical to SEQ ID NO: 49053
  GFR-binding peptide
  MOD_RES (2)..(4)..(37)..(38): Xaa is C or S
  MOD_RES (15)..(16)..(17)..(18)..(19): Xaa is A or G
  MOD_RES (20)..(21)..(22)..(23): Xaa is A or G or is absent

SEQ ID NO: 74287 - protein, 40 aa, Artificial Sequence; identical to SEQ ID NO: 46496
  GFR-binding peptide
  MOD_RES (1)..(35)..(36): Xaa is C or S
  MOD_RES (13)..(14)..(15)..(16)..(17): Xaa is A or G
  MOD_RES (18)..(19)..(20)..(21): Xaa is A or G or is absent

SEQ ID NO: 74288 - protein, 34 aa, Artificial Sequence
  GFR-binding peptide
  MOD_RES (1)..(3): Xaa is C or S
XGXSEVVMDSMEGLVVNNASDMIQITINSLRTPV

SEQ ID NO: 74289 - protein, 37 aa, Artificial Sequence
  GFR-binding peptide
  MOD_RES (2)..(35)..(36): Xaa is C or S
  MOD_RES (13)..(14)..(15)..(16)..(17): Xaa is A or G
  MOD_RES (18)..(19)..(20)..(21): Xaa is A or G or is absent
KXSRVIMSMEGLXXXXXXXXXMIQITINSLAQPVXXP

SEQ ID NO: 74290 - protein, 32 aa, Artificial Sequence
  GFR-binding peptide
  MOD_RES (1)..(1): Xaa is C or S
XSRVVMNSMEGLIVNSSDDMIQVTINSLKTPA

SEQ ID NO: 74291 - protein, 37 aa, Artificial Sequence; identical to SEQ ID NO: 46504
  GFR-binding peptide
  MOD_RES (2)..(35)..(36): Xaa is C or S
  MOD_RES (13)..(14)..(15)..(16)..(17): Xaa is A or G
  MOD_RES (18)..(19)..(20)..(21): Xaa is A or G or is absent

SEQ ID NO: 74292 - protein, 36 aa, Artificial Sequence
  GFR-binding peptide
  MOD_RES (1)..(33)..(34): Xaa is C or S
XSEVVMDSMEGLVVNNASDMIQITINSLRTPVXXTP

SEQ ID NO: 74293 - protein, 38 aa, Artificial Sequence
  GFR-binding peptide
  MOD_RES (1)..(3)..(35)..(36): Xaa is C or S
XGXRDVVMGSMEGLIIQQKDNMIQMTINSMKTPTXXPG

SEQ ID NO: 74294 - protein, 38 aa, Artificial Sequence; identical to SEQ ID NO: 46510
  GFR-binding peptide
  MOD_RES (33)..(34): Xaa is C or S
  MOD_RES (11)..(12)..(13)..(14)..(15): Xaa is A or G
  MOD_RES (16)..(17)..(18)..(19): Xaa is A or G or is absent

SEQ ID NO: 74295 - protein, 44 aa, Artificial Sequence; identical to SEQ ID NO: 17171
  GFR-binding peptide
  MOD_RES (2)..(4)..(41): Xaa is C or S

SEQ ID NO: 74296 - protein, 43 aa, Artificial Sequence; identical to SEQ ID NO: 17172
  GFR-binding peptide
  MOD_RES (2)..(39): Xaa is C or S

SEQ ID NO: 74297 - protein, 40 aa, Artificial Sequence; identical to SEQ ID NO: 17173
  GFR-binding peptide
  MOD_RES (2)..(36): Xaa is C or S

SEQ ID NO: 74298 - protein, 40 aa, Artificial Sequence; identical to SEQ ID NO: 17174
  GFR-binding peptide
  MOD_RES (34)..(34): Xaa is C or S

SEQ ID NO: 74299 - protein, 38 aa, Artificial Sequence; identical to SEQ ID NO: 17176
  GFR-binding peptide
  MOD_RES (34)..(34): Xaa is C or S

SEQ ID NO: 74300 - protein, 32 aa, Artificial Sequence; identical to SEQ ID NO: 49081
  GFR-binding peptide
  MOD_RES (11)..(12)..(13)..(14)..(15): Xaa is A or G
  MOD_RES (16)..(17)..(18)..(19): Xaa is A or G or is absent

SEQ ID NO: 74301 - protein, 40 aa, Artificial Sequence
  GFR-binding peptide
  MOD_RES (1)..(3)..(35)..(36): Xaa is C or S
XGXRDVVMGSMEGLIIQQKDNMIQMTINSMKTPTXXPGAS

SEQ ID NO: 74302 - protein, 35 aa, Artificial Sequence; identical to SEQ ID NO: 17179
  GFR-binding peptide

SEQ ID NO: 74303 - protein, 38 aa, Artificial Sequence
  GFR-binding peptide
  MOD_RES (2)..(34)..(35): Xaa is C or S
GXSEVVMDSMEGIVVNNASDMIQITINSLRTPVXXTPP

SEQ ID NO: 74304 - protein, 35 aa, Artificial Sequence
  GFR-binding peptide
  MOD_RES (1)..(3)..(35): Xaa is C or S
XGXSRVVMNSMEGLIVNSSDDMIQVTINSLKTPAX

SEQ ID NO: 74305 - protein, 36 aa, Artificial Sequence
  GFR-binding peptide
  MOD_RES (2)..(4)..(36): Xaa is C or S
RXGXSEVVMDSMEGLVVNNASDMIQITINSLRTPVX

SEQ ID NO: 74306 - protein, 35 aa, Artificial Sequence
  GFR-binding peptide
  MOD_RES (33)..(34): Xaa is C or S
  MOD_RES (11)..(12)..(13)..(14)..(15): Xaa is A or G
  MOD_RES (16)..(17)..(18)..(19): Xaa is A or G or is absent
EVVMDSMEGIXXXXXXXXXMIQITINSLRAPVXXS

SEQ ID NO: 74307 - protein, 41 aa, Artificial Sequence
  GFR-binding peptide
  MOD_RES (1)..(3)..(36)..(37): Xaa is C or S
  MOD_RES (14)..(15)..(16)..(17)..(18): Xaa is A or G
  MOD_RES (19)..(20)..(21)..(22): Xaa is A or G or is absent
XKXSRVIMSMEGLXXXXXXXXXMIQITINSLAQPVXXPAAS

SEQ ID NO: 74308 - protein, 36 aa, Artificial Sequence; identical to SEQ ID NO: 17180
  GFR-binding peptide
  MOD_RES (1)..(3): Xaa is C or S
  MOD_RES (15)..(16)..(17)..(18)..(19): Xaa is A or G
  MOD_RES (20)..(21)..(22)..(23): Xaa is A or G or is absent

SEQ ID NO: 74309 - protein, 35 aa, Artificial Sequence
  GFR-binding peptide
  MOD_RES (2)..(4): Xaa is C or S
RXGXAEVVMDSMEGIVVNNAADMIQITINSLRAPV

SEQ ID NO: 74310 - protein, 42 aa, Artificial Sequence
  GFR-binding peptide
  MOD_RES (2)..(36)..(37): Xaa is C or S
  MOD_RES (14)..(15)..(16)..(17)..(18): Xaa is A or G
  MOD_RES (19)..(20)..(21)..(22): Xaa is A or G or is absent
GXAEVVMDSMEGIXXXXXXXXXMIQITINSLRAPVXXSAPAA

SEQ ID NO: 74311 - protein, 36 aa, Artificial Sequence
  GFR-binding peptide
  MOD_RES (33)..(34): Xaa is C or S
  MOD_RES (11)..(12)..(13)..(14)..(15): Xaa is A or G
  MOD_RES (16)..(17)..(18)..(19): Xaa is A or G or is absent
SKVIMSMEGLXXXXXXXXXMIQITINSLDQSVXXPS

SEQ ID NO: 74312 - protein, 36 aa, Artificial Sequence; identical to SEQ ID NO: 49089
  GFR-binding peptide
  MOD_RES (2)..(4): Xaa is C or S
  MOD_RES (15)..(16)..(17)..(18)..(19): Xaa is A or G
  MOD_RES (20)..(21)..(22)..(23): Xaa is A or G or is absent

SEQ ID NO: 74313 - protein, 41 aa, Artificial Sequence
  GFR-binding peptide
  MOD_RES (1)..(3)..(35)..(36): Xaa is C or S
XGXAEVVMDSMEGIVVNNAADMIQITINSLRAPVXXSAPAA

SEQ ID NO: 74314 - protein, 39 aa, Artificial Sequence; identical to SEQ ID NO: 17185
  GFR-binding peptide
  MOD_RES (2)..(4)..(38): Xaa is C or S
  MOD_RES (16)..(17)..(18)..(19)..(20): Xaa is A or G
  MOD_RES (21)..(22)..(23)..(24): Xaa is A or G or is absent

SEQ ID NO: 74315 - protein, 37 aa, Artificial Sequence
  GFR-binding peptide
  MOD_RES (2)..(4)..(37): Xaa is C or S
  MOD_RES (15)..(16)..(17)..(18)..(19): Xaa is A or G
  MOD_RES (20)..(21)..(22)..(23): Xaa is A or G or is absent
SXKXSKVIMSMEGLXXXXXXXXXMIQITINSLDQSVX

SEQ ID NO: 74316 - protein, 34 aa, Artificial Sequence; identical to SEQ ID NO: 17186
  GFR-binding peptide

SEQ ID NO: 74317 - protein, 40 aa, Artificial Sequence
  GFR-binding peptide
  MOD_RES (2)..(35)..(36): Xaa is C or S
  MOD_RES (13)..(14)..(15)..(16)..(17): Xaa is A or G
  MOD_RES (18)..(19)..(20)..(21): Xaa is A or G or is absent
GXEEVIMSMEGIXXXXXXXXXMIQMTINSTKVPAXXTSPV

SEQ ID NO: 74318 - protein, 39 aa, Artificial Sequence
  GFR-binding peptide
  MOD_RES (1)..(33)..(34): Xaa is C or S
XSEVVMDSMEGIVVNNASDMIQITINSLRTPVXXTPPTS

SEQ ID NO: 74319 - protein, 36 aa, Artificial Sequence
  GFR-binding peptide
  MOD_RES (1)..(35)..(36): Xaa is C or S
  MOD_RES (13)..(14)..(15)..(16)..(17): Xaa is A or G
  MOD_RES (18)..(19)..(20)..(21): Xaa is A or G or is absent
XSEVVMDSMEGLXXXXXXXXXMIQITINSLRTPVXX

SEQ ID NO: 74320 - protein, 40 aa, Artificial Sequence; identical to SEQ ID NO: 17189
  GFR-binding peptide
  MOD_RES (37)..(37): Xaa is C or S
  MOD_RES (13)..(14)..(15)..(16)..(17): Xaa is A or G
  MOD_RES (18)..(19)..(20)..(21): Xaa is A or G or is absent

SEQ ID NO: 74321 - protein, 36 aa, Artificial Sequence
  GFR-binding peptide
  MOD_RES (1)..(33)..(34): Xaa is C or S
XRDVVMGSMEGIIIQQKDNMIQMTINSMKTPTXXPG

SEQ ID NO: 74322 - protein, 37 aa, Artificial Sequence
  GFR-binding peptide
  MOD_RES (1)..(32)..(33): Xaa is C or S
XEEVIMSMEGILLVRGNDMIQMTINSTKVPAXXTSPV

SEQ ID NO: 74323 - protein, 40 aa, Artificial Sequence; identical to SEQ ID NO: 17192
  GFR-binding peptide
  MOD_RES (34)..(34): Xaa is C or S

SEQ ID NO: 74324 - protein, 35 aa, Artificial Sequence
  GFR-binding peptide
  MOD_RES (2)..(2): Xaa is C or S
  MOD_RES (14)..(15)..(16)..(17)..(18): Xaa is A or G
  MOD_RES (19)..(20)..(21)..(22): Xaa is A or G or is absent
GXSRVVMNSMEGLXXXXXXXXXMIQVTINSLKTPA

SEQ ID NO: 74325 - protein, 36 aa, Artificial Sequence; identical to SEQ ID NO: 17193
  GFR-binding peptide
  MOD_RES (1)..(1): Xaa is C or S
  MOD_RES (14)..(15)..(16)..(17)..(18): Xaa is A or G
  MOD_RES (19)..(20)..(21)..(22): Xaa is A or G or is absent

SEQ ID NO: 74326 - protein, 35 aa, Artificial Sequence; identical to SEQ ID NO: 17194
  GFR-binding peptide
  MOD_RES (1)..(35): Xaa is C or S
  MOD_RES (13)..(14)..(15)..(16)..(17): Xaa is A or G
  MOD_RES (18)..(19)..(20)..(21): Xaa is A or G or is absent

SEQ ID NO: 74327 - protein, 41 aa, Artificial Sequence
  GFR-binding peptide
  MOD_RES (1)..(3)..(36)..(37): Xaa is C or S
  MOD_RES (14)..(15)..(16)..(17)..(18): Xaa is A or G
  MOD_RES (19)..(20)..(21)..(22): Xaa is A or G or is absent
XKXSKVIMSMEGLXXXXXXXXXMIQITINSLDQSVXXPSAS

SEQ ID NO: 74328 - protein, 35 aa, Artificial Sequence
  GFR-binding peptide
  MOD_RES (32)..(33): Xaa is C or S
SEVVMDSMEGLVVNNASDMIQITINSLRTPVXXTP

SEQ ID NO: 74329 - protein, 37 aa, Artificial Sequence
  GFR-binding peptide
  MOD_RES (31)..(32): Xaa is C or S
RVVMNSMEGLIVNSSDDMIQVTINSLKTPAXXPKPVH

SEQ ID NO: 74330 - protein, 39 aa, Artificial Sequence
  GFR-binding peptide
  MOD_RES (2)..(4)..(38)..(39): Xaa is C or S
  MOD_RES (16)..(17)..(18)..(19)..(20): Xaa is A or G
  MOD_RES (21)..(22)..(23)..(24): Xaa is A or G or is absent
HXGXSRVVMNSMEGLXXXXXXXXXMIQVTINSLKTPAXX

SEQ ID NO: 74331 - protein, 34 aa, Artificial Sequence; identical to SEQ ID NO: 46564
  GFR-binding peptide
  MOD_RES (1)..(3): Xaa is C or S

SEQ ID NO: 74332 - protein, 37 aa, Artificial Sequence; identical to SEQ ID NO: 17202
  GFR-binding peptide
  MOD_RES (34)..(34): Xaa is C or S

SEQ ID NO: 74333 - protein, 39 aa, Artificial Sequence; identical to SEQ ID NO: 49123
  GFR-binding peptide
  MOD_RES (33)..(34): Xaa is C or S
  MOD_RES (11)..(12)..(13)..(14)..(15): Xaa is A or G
  MOD_RES (16)..(17)..(18)..(19): Xaa is A or G or is absent

SEQ ID NO: 74334 - protein, 35 aa, Artificial Sequence
  GFR-binding peptide
  MOD_RES (1)..(3): Xaa is C or S
  MOD_RES (14)..(15)..(16)..(17)..(18): Xaa is A or G
  MOD_RES (19)..(20)..(21)..(22): Xaa is A or G or is absent
XKXSKVIMSMEGLXXXXXXXXXMIQITINSLDQSV

SEQ ID NO: 74335 - protein, 34 aa, Artificial Sequence
  GFR-binding peptide
  MOD_RES (34)..(34): Xaa is C or S
  MOD_RES (12)..(13)..(14)..(15)..(16): Xaa is A or G
  MOD_RES (17)..(18)..(19)..(20): Xaa is A or G or is absent
RDVVMGSMEGIXXXXXXXXXMIQMTINSMKTPTX

SEQ ID NO: 74336 - protein, 34 aa, Artificial Sequence; identical to SEQ ID NO: 17203
  GFR-binding peptide
  MOD_RES (34)..(34): Xaa is C or S
  MOD_RES (12)..(13)..(14)..(15)..(16): Xaa is A or G
  MOD_RES (17)..(18)..(19)..(20): Xaa is A or G or is absent

SEQ ID NO: 74337 - protein, 33 aa, Artificial Sequence
  GFR-binding peptide
  MOD_RES (33)..(33): Xaa is C or S
  MOD_RES (11)..(12)..(13)..(14)..(15): Xaa is A or G
  MOD_RES (16)..(17)..(18)..(19): Xaa is A or G or is absent
SKVIMSMEGLXXXXXXXXXMIQITINSLDQSVX

SEQ ID NO: 74338 - protein, 35 aa, Artificial Sequence; identical to SEQ ID NO: 17206
  GFR-binding peptide
  MOD_RES (1)..(1): Xaa is C or S

SEQ ID NO: 74339 - protein, 43 aa, Artificial Sequence; identical to SEQ ID NO: 17207
  GFR-binding peptide
  MOD_RES (1)..(3)..(37): Xaa is C or S
  MOD_RES (15)..(16)..(17)..(18)..(19): Xaa is A or G
  MOD_RES (20)..(21)..(22)..(23): Xaa is A or G or is absent

SEQ ID NO: 74340 - protein, 37 aa, Artificial Sequence
  GFR-binding peptide
  MOD_RES (1)..(34)..(35): Xaa is C or S
  MOD_RES (12)..(13)..(14)..(15)..(16): Xaa is A or G
  MOD_RES (17)..(18)..(19)..(20): Xaa is A or G or is absent
XSKVIMSMEGLXXXXXXXXXMIQITINSLDQSVXXPS

SEQ ID NO: 74341 - protein, 39 aa, Artificial Sequence
  GFR-binding peptide
  MOD_RES (2)..(4)..(36)..(37): Xaa is C or S
SXGXRDVVMGSMEGIIIQQKDNMIQMTINSMKTPTXXPG

SEQ ID NO: 74342 - protein, 40 aa, Artificial Sequence
  GFR-binding peptide
  MOD_RES (2)..(35)..(36): Xaa is C or S
  MOD_RES (13)..(14)..(15)..(16)..(17): Xaa is A or G
  MOD_RES (18)..(19)..(20)..(21): Xaa is A or G or is absent
KXSKVVMSMEGLXXXXXXXXXMIQITINSLDQPVXXPSAS

SEQ ID NO: 74343 - protein, 42 aa, Artificial Sequence
  GFR-binding peptide
  MOD_RES (1)..(3)..(37)..(38): Xaa is C or S
  MOD_RES (15)..(16)..(17)..(18)..(19): Xaa is A or G
  MOD_RES (20)..(21)..(22)..(23): Xaa is A or G or is absent
XGXRDVVMGSMEGLXXXXXXXXXMIQMTINSMKTPTXXPGAS

SEQ ID NO: 74344 - protein, 38 aa, Artificial Sequence
  GFR-binding peptide
  MOD_RES (33)..(34): Xaa is C or S
  MOD_RES (11)..(12)..(13)..(14)..(15): Xaa is A or G
  MOD_RES (16)..(17)..(18)..(19): Xaa is A or G or is absent
SRVIMSMEGLXXXXXXXXXMIQITINSLAQPVXXPAAS

SEQ ID NO: 74345 - protein, 40 aa, Artificial Sequence
  GFR-binding peptide
  MOD_RES (2)..(34)..(35): Xaa is C or S
GXAEVVMDSMEGLVVNNAADMIQITINSLRAPVXXSAPAA

SEQ ID NO: 74346 - protein, 36 aa, Artificial Sequence; identical to SEQ ID NO: 46583
  GFR-binding peptide
  MOD_RES (33)..(34): Xaa is C or S
  MOD_RES (11)..(12)..(13)..(14)..(15): Xaa is A or G
  MOD_RES (16)..(17)..(18)..(19): Xaa is A or G or is absent

SEQ ID NO: 74347 - protein, 34 aa, Artificial Sequence; identical to SEQ ID NO: 17210
  GFR-binding peptide
  MOD_RES (33)..(33): Xaa is C or S
  MOD_RES (11)..(12)..(13)..(14)..(15): Xaa is A or G
  MOD_RES (16)..(17)..(18)..(19): Xaa is A or G or is absent

SEQ ID NO: 74348 - protein, 39 aa, Artificial Sequence
  GFR-binding peptide
  MOD_RES (1)..(33)..(34): Xaa is C or S
XAEVVMDSMEGLVVNNAADMIQITINSLRAPVXXSAPAA

SEQ ID NO: 74349 - protein, 38 aa, Artificial Sequence
  GFR-binding peptide
  MOD_RES (1)..(35)..(36): Xaa is C or S
  MOD_RES (13)..(14)..(15)..(16)..(17): Xaa is A or G
  MOD_RES (18)..(19)..(20)..(21): Xaa is A or G or is absent
XAEVVMDSMEGLXXXXXXXXXMIQITINSLRAPVXXSA

SEQ ID NO: 74350 - protein, 38 aa, Artificial Sequence
  GFR-binding peptide
  MOD_RES (1)..(3)..(34)..(35): Xaa is C or S
XKXSKVIMSMEGLIKPTKGIMIQITINSLDQSVXXPSA

SEQ ID NO: 74351 - protein, 36 aa, Artificial Sequence
  GFR-binding peptide
  MOD_RES (1)..(3)..(35)..(36): Xaa is C or S
XGXAEVVMDSMEGIVVNNAADMIQITINSLRAPVXX

SEQ ID NO: 74352 - protein, 34 aa, Artificial Sequence; identical to SEQ ID NO: 17213
  GFR-binding peptide

SEQ ID NO: 74353 - protein, 34 aa, Artificial Sequence; identical to SEQ ID NO: 46589
  GFR-binding peptide
  MOD_RES (1)..(34): Xaa is C or S
  MOD_RES (12)..(13)..(14)..(15)..(16): Xaa is A or G
  MOD_RES (17)..(18)..(19)..(20): Xaa is A or G or is absent

SEQ ID NO: 74354 - protein, 43 aa, Artificial Sequence; identical to SEQ ID NO: 17214
  GFR-binding peptide
  MOD_RES (2)..(39): Xaa is C or S

SEQ ID NO: 74355 - protein, 40 aa, Artificial Sequence; identical to SEQ ID NO: 17216
  GFR-binding peptide
  MOD_RES (2)..(36): Xaa is C or S

SEQ ID NO: 74356 - protein, 36 aa, Artificial Sequence
  GFR-binding peptide
  MOD_RES (1)..(33)..(34): Xaa is C or S
XAEVVMDSMEGLVVNNAADMIQITINSLRAPVXXSA

SEQ ID NO: 74357 - protein, 35 aa, Artificial Sequence
  GFR-binding peptide
  MOD_RES (31)..(32): Xaa is C or S
SKVIMSMEGLIKPTKGIMIQITINSLDQSVXXPSA

SEQ ID NO: 74358 - protein, 37 aa, Artificial Sequence; identical to SEQ ID NO: 17217
  GFR-binding peptide
  MOD_RES (34)..(34): Xaa is C or S

SEQ ID NO: 74359 - protein, 38 aa, Artificial Sequence; identical to SEQ ID NO: 49143
  GFR-binding peptide
  MOD_RES (2)..(33)..(34): Xaa is C or S

SEQ ID NO: 74360 - protein, 38 aa, Artificial Sequence; identical to SEQ ID NO: 17218
  GFR-binding peptide
  MOD_RES (37)..(37): Xaa is C or S
  MOD_RES (13)..(14)..(15)..(16)..(17): Xaa is A or G
  MOD_RES (18)..(19)..(20)..(21): Xaa is A or G or is absent

SEQ ID NO: 74361 - protein, 36 aa, Artificial Sequence; identical to SEQ ID NO: 49145
  GFR-binding peptide
  MOD_RES (2)..(4)..(36): Xaa is C or S

SEQ ID NO: 74362 - protein, 37 aa, Artificial Sequence
  GFR-binding peptide
  MOD_RES (1)..(3)..(35)..(36): Xaa is C or S
XGXAEVVMDSMEGLVVNNAADMIQITINSLRAPVXXS

SEQ ID NO: 74363 - protein, 38 aa, Artificial Sequence; identical to SEQ ID NO: 17222
  GFR-binding peptide
  MOD_RES (37)..(37): Xaa is C or S

SEQ ID NO: 74364 - protein, 32 aa, Artificial Sequence; identical to SEQ ID NO: 17223
  GFR-binding peptide
  MOD_RES (11)..(12)..(13)..(14)..(15): Xaa is A or G
  MOD_RES (16)..(17)..(18)..(19): Xaa is A or G or is absent

SEQ ID NO: 74365 - protein, 38 aa, Artificial Sequence; identical to SEQ ID NO: 46601
  GFR-binding peptide
  MOD_RES (2)..(35)..(36): Xaa is C or S
  MOD_RES (13)..(14)..(15)..(16)..(17): Xaa is A or G
  MOD_RES (18)..(19)..(20)..(21): Xaa is A or G or is absent

SEQ ID NO: 74366 - protein, 37 aa, Artificial Sequence; identical to SEQ ID NO: 17224
  GFR-binding peptide
  MOD_RES (36)..(36): Xaa is C or S

SEQ ID NO: 74367 - protein, 35 aa, Artificial Sequence; identical to SEQ ID NO: 17226
  GFR-binding peptide
  MOD_RES (12)..(13)..(14)..(15)..(16): Xaa is A or G
  MOD_RES (17)..(18)..(19)..(20): Xaa is A or G or is absent

SEQ ID NO: 74368 - protein, 42 aa, Artificial Sequence
  GFR-binding peptide
  MOD_RES (2)..(4)..(38)..(39): Xaa is C or S
  MOD_RES (16)..(17)..(18)..(19)..(20): Xaa is A or G
  MOD_RES (21)..(22)..(23)..(24): Xaa is A or G or is absent
RXGXSEVVMDSMEGLXXXXXXXXXMIQITINSLRTPVXXTPP

SEQ ID NO: 74369 - protein, 38 aa, Artificial Sequence; identical to SEQ ID NO: 17227
  GFR-binding peptide
  MOD_RES (2)..(2): Xaa is C or S
  MOD_RES (15)..(16)..(17)..(18)..(19): Xaa is A or G
  MOD_RES (20)..(21)..(22)..(23): Xaa is A or G or is absent

SEQ ID NO: 74370 - protein, 35 aa, Artificial Sequence; identical to SEQ ID NO: 49159
  GFR-binding peptide
  MOD_RES (1)..(3): Xaa is C or S
  MOD_RES (14)..(15)..(16)..(17)..(18): Xaa is A or G
  MOD_RES (19)..(20)..(21)..(22): Xaa is A or G or is absent

SEQ ID NO: 74371 - protein, 35 aa, Artificial Sequence
  GFR-binding peptide
  MOD_RES (31)..(32): Xaa is C or S
EVVMDSMEGIVVNNAADMIQITINSLRAPVXXSAP

SEQ ID NO: 74372 - protein, 38 aa, Artificial Sequence
  GFR-binding peptide
  MOD_RES (2)..(4)..(36)..(37): Xaa is C or S
HXGXSRVVMNSMEGLIVNSSDDMIQVTINSLKTPAXXP

SEQ ID NO: 74373 - protein, 38 aa, Artificial Sequence
  GFR-binding peptide
  MOD_RES (1)..(32)..(33): Xaa is C or S
XSKVVMSMEGLVKPTRGVMIQITINSLDQPVXXPSASA

SEQ ID NO: 74374 - protein, 38 aa, Artificial Sequence; identical to SEQ ID NO: 17229
  GFR-binding peptide
  MOD_RES (1)..(38): Xaa is C or S

SEQ ID NO: 74375 - protein, 33 aa, Artificial Sequence; identical to SEQ ID NO: 17231
  GFR-binding peptide

SEQ ID NO: 74376 - protein, 36 aa, Artificial Sequence
  GFR-binding peptide
  MOD_RES (33)..(34): Xaa is C or S
  MOD_RES (11)..(12)..(13)..(14)..(15): Xaa is A or G
  MOD_RES (16)..(17)..(18)..(19): Xaa is A or G or is absent
EVVMDSMEGLXXXXXXXXXMIQITINSLRTPVXXTP

SEQ ID NO: 74377 - protein, 33 aa, Artificial Sequence; identical to SEQ ID NO: 17232
  GFR-binding peptide
  MOD_RES (33)..(33): Xaa is C or S
  MOD_RES (11)..(12)..(13)..(14)..(15): Xaa is A or G
  MOD_RES (16)..(17)..(18)..(19): Xaa is A or G or is absent

SEQ ID NO: 74378 - protein, 44 aa, Artificial Sequence
  GFR-binding peptide
  MOD_RES (2)..(4)..(38)..(39): Xaa is C or S
  MOD_RES (16)..(17)..(18)..(19)..(20): Xaa is A or G
  MOD_RES (21)..(22)..(23)..(24): Xaa is A or G or is absent
HXGXSRVVMNSMEGIXXXXXXXXXMIQVTINSLKTPAXXPKPVH

SEQ ID NO: 74379 - protein, 36 aa, Artificial Sequence; identical to SEQ ID NO: 17235
  GFR-binding peptide
  MOD_RES (2)..(36): Xaa is C or S
  MOD_RES (14)..(15)..(16)..(17)..(18): Xaa is A or G
  MOD_RES (19)..(20)..(21)..(22): Xaa is A or G or is absent

SEQ ID NO: 74380 - protein, 40 aa, Artificial Sequence
  GFR-binding peptide
  MOD_RES (2)..(36)..(37): Xaa is C or S
  MOD_RES (14)..(15)..(16)..(17)..(18): Xaa is A or G
  MOD_RES (19)..(20)..(21)..(22): Xaa is A or G or is absent
GXAEVVMDSMEGIXXXXXXXXXMIQITINSLRAPVXXSAP

SEQ ID NO: 74381 - protein, 36 aa, Artificial Sequence; identical to SEQ ID NO: 17236
  GFR-binding peptide
  MOD_RES (13)..(14)..(15)..(16)..(17): Xaa is A or G
  MOD_RES (18)..(19)..(20)..(21): Xaa is A or G or is absent

SEQ ID NO: 74382 - protein, 41 aa, Artificial Sequence
  GFR-binding peptide
  MOD_RES (1)..(3)..(35)..(36): Xaa is C or S
XGXSEVVMDSMEGIVVNNASDMIQITINSLRTPVXXTPPTS

SEQ ID NO: 74383 - protein, 42 aa, Artificial Sequence; identical to SEQ ID NO: 17239
  GFR-binding peptide
  MOD_RES (1)..(3)..(40): Xaa is C or S

SEQ ID NO: 74384 - protein, 40 aa, Artificial Sequence; identical to SEQ ID NO: 17240
  GFR-binding peptide
  MOD_RES (2)..(4): Xaa is C or S

SEQ ID NO: 74385 - protein, 34 aa, Artificial Sequence
  GFR-binding peptide
  MOD_RES (1)..(3)..(34): Xaa is C or S
XKXSKVIMSMEGLIKPTKGIMIQITINSLDQSVX

SEQ ID NO: 74386 - protein, 36 aa, Artificial Sequence
  GFR-binding peptide
  MOD_RES (33)..(34): Xaa is C or S
  MOD_RES (11)..(12)..(13)..(14)..(15): Xaa is A or G
  MOD_RES (16)..(17)..(18)..(19): Xaa is A or G or is absent
EEVIMSMEGIXXXXXXXXXMIQMTINSTKVPAXXTS

SEQ ID NO: 74387 - protein, 39 aa, Artificial Sequence; identical to SEQ ID NO: 17243
  GFR-binding peptide
  MOD_RES (37)..(37): Xaa is C or S
  MOD_RES (13)..(14)..(15)..(16)..(17): Xaa is A or G
  MOD_RES (18)..(19)..(20)..(21): Xaa is A or G or is absent

SEQ ID NO: 74388 - protein, 34 aa, Artificial Sequence; identical to SEQ ID NO: 46629
  GFR-binding peptide
  MOD_RES (1)..(3)..(34): Xaa is C or S

SEQ ID NO: 74389 - protein, 33 aa, Artificial Sequence; identical to SEQ ID NO: 46631
  GFR-binding peptide
  MOD_RES (1)..(32)..(33): Xaa is C or S

SEQ ID NO: 74390 - protein, 34 aa, Artificial Sequence
  GFR-binding peptide
  MOD_RES (2)..(4): Xaa is C or S
LXGXEEVIMSMEGLLLVRGNDMIQMTINSTKVPA

SEQ ID NO: 74391 - protein, 42 aa, Artificial Sequence
  GFR-binding peptide
  MOD_RES (1)..(3)..(37)..(38): Xaa is C or S
  MOD_RES (15)..(16)..(17)..(18)..(19): Xaa is A or G
  MOD_RES (20)..(21)..(22)..(23): Xaa is A or G or is absent
XGXSEVVMDSMEGLXXXXXXXXXMIQITINSLRTPVXXTPPT

SEQ ID NO: 74392 - protein, 37 aa, Artificial Sequence
  GFR-binding peptide
  MOD_RES (32)..(33): Xaa is C or S
RDVVMGSMEGLIIQQKDNMIQMTINSMKTPTXXPGAS

SEQ ID NO: 74393 - protein, 38 aa, Artificial Sequence
  GFR-binding peptide
  MOD_RES (2)..(36)..(37): Xaa is C or S
  MOD_RES (14)..(15)..(16)..(17)..(18): Xaa is A or G
  MOD_RES (19)..(20)..(21)..(22): Xaa is A or G or is absent
GXAEVVMDSMEGLXXXXXXXXXMIQITINSLRAPVXXS

SEQ ID NO: 74394 - protein, 34 aa, Artificial Sequence; identical to SEQ ID NO: 17247
  GFR-binding peptide
  MOD_RES (33)..(33): Xaa is C or S
  MOD_RES (11)..(12)..(13)..(14)..(15): Xaa is A or G
  MOD_RES (16)..(17)..(18)..(19): Xaa is A or G or is absent

SEQ ID NO: 74395 - protein, 36 aa, Artificial Sequence; identical to SEQ ID NO: 46636
  GFR-binding peptide
  MOD_RES (33)..(34): Xaa is C or S
  MOD_RES (11)..(12)..(13)..(14)..(15): Xaa is A or G
  MOD_RES (16)..(17)..(18)..(19): Xaa is A or G or is absent

SEQ ID NO: 74396 - protein, 42 aa, Artificial Sequence; identical to SEQ ID NO: 17249
  GFR-binding peptide
  MOD_RES (1)..(3)..(40): Xaa is C or S
  MOD_RES (16)..(17)..(18)..(19)..(20): Xaa is A or G
  MOD_RES (21)..(22)..(23)..(24): Xaa is A or G or is absent

SEQ ID NO: 74397 - protein, 38 aa, Artificial Sequence
  GFR-binding peptide
  MOD_RES (1)..(35)..(36): Xaa is C or S
  MOD_RES (13)..(14)..(15)..(16)..(17): Xaa is A or G
  MOD_RES (18)..(19)..(20)..(21): Xaa is A or G or is absent
XSRVVMNSMEGLXXXXXXXXXMIQVTINSLKTPAXXPK

SEQ ID NO: 74398 - protein, 39 aa, Artificial Sequence; identical to SEQ ID NO: 17250
  GFR-binding peptide
  MOD_RES (1)..(3)..(37): Xaa is C or S
  MOD_RES (15)..(16)..(17)..(18)..(19): Xaa is A or G
  MOD_RES (20)..(21)..(22)..(23): Xaa is A or G or is absent

SEQ ID NO: 74399 - protein, 32 aa, Artificial Sequence
  GFR-binding peptide
  MOD_RES (31)..(32): Xaa is C or S
RVVMNSMEGLIVNSSDDMIQVTINSLKTPAXX

SEQ ID NO: 74400 - protein, 36 aa, Artificial Sequence
  GFR-binding peptide
  MOD_RES (34)..(35): Xaa is C or S
  MOD_RES (12)..(13)..(14)..(15)..(16): Xaa is A or G
  MOD_RES (17)..(18)..(19)..(20): Xaa is A or G or is absent
SEVVMDSMEGIXXXXXXXXXMIQITINSLRTPVXXT

SEQ ID NO: 74401 - protein, 37 aa, Artificial Sequence
  GFR-binding peptide
  MOD_RES (1)..(3)..(35)..(36): Xaa is C or S
XGXSRVVMNSMEGLIVNSSDDMIQVTINSLKTPAXXP

SEQ ID NO: 74402 - protein, 35 aa, Artificial Sequence; identical to SEQ ID NO: 17252
  GFR-binding peptide
  MOD_RES (33)..(33): Xaa is C or S

SEQ ID NO: 74403 - protein, 35 aa, Artificial Sequence; identical to SEQ ID NO: 17253
  GFR-binding peptide
  MOD_RES (33)..(33): Xaa is C or S
  MOD_RES (11)..(12)..(13)..(14)..(15): Xaa is A or G
  MOD_RES (16)..(17)..(18)..(19): Xaa is A or G or is absent

SEQ ID NO: 74404 - protein, 37 aa, Artificial Sequence
  GFR-binding peptide
  MOD_RES (1)..(34)..(35): Xaa is C or S
  MOD_RES (12)..(13)..(14)..(15)..(16): Xaa is A or G
  MOD_RES (17)..(18)..(19)..(20): Xaa is A or G or is absent
XEEVIMSMEGIXXXXXXXXXMIQMTINSTKVPAXXTS

SEQ ID NO: 74405 - protein, 37 aa, Artificial Sequence
  GFR-binding peptide
  MOD_RES (1)..(32)..(33): Xaa is C or S
XSKVIMSMEGLIKPTKGIMIQITINSLDQSVXXPSAS

SEQ ID NO: 74406 - protein, 37 aa, Artificial Sequence; identical to SEQ ID NO: 17254
  GFR-binding peptide
  MOD_RES (1)..(3)..(37): Xaa is C or S

SEQ ID NO: 74407 - protein, 37 aa, Artificial Sequence; identical to SEQ ID NO: 46641
  GFR-binding peptide
  MOD_RES (2)..(33)..(34): Xaa is C or S

SEQ ID NO: 74408 - protein, 34 aa, Artificial Sequence; identical to SEQ ID NO: 17257
  GFR-binding peptide

SEQ ID NO: 74409 - protein, 37 aa, Artificial Sequence; identical to SEQ ID NO: 17258
  GFR-binding peptide
  MOD_RES (1)..(35): Xaa is C or S
  MOD_RES (13)..(14)..(15)..(16)..(17): Xaa is A or G
  MOD_RES (18)..(19)..(20)..(21): Xaa is A or G or is absent

SEQ ID NO: 74410 - protein, 39 aa, Artificial Sequence
  GFR-binding peptide
  MOD_RES (1)..(35)..(36): Xaa is C or S
  MOD_RES (13)..(14)..(15)..(16)..(17): Xaa is A or G
  MOD_RES (18)..(19)..(20)..(21): Xaa is A or G or is absent
XRDVVMGSMEGLXXXXXXXXXMIQMTINSMKTPTXXPGA

SEQ ID NO: 74411 - protein, 41 aa, Artificial Sequence
  GFR-binding peptide
  MOD_RES (2)..(4)..(36)..(37): Xaa is C or S
RXGXAEVVMDSMEGIVVNNAADMIQITINSLRAPVXXSAPA

SEQ ID NO: 74412 - protein, 37 aa, Artificial Sequence
  GFR-binding peptide
  MOD_RES (1)..(35)..(36): Xaa is C or S
  MOD_RES (13)..(14)..(15)..(16)..(17): Xaa is A or G
  MOD_RES (18)..(19)..(20)..(21): Xaa is A or G or is absent
XAEVVMDSMEGIXXXXXXXXXMIQITINSLRAPVXXS

SEQ ID NO: 74413 - protein, 36 aa, Artificial Sequence
  GFR-binding peptide
  MOD_RES (1)..(3): Xaa is C or S
  MOD_RES (15)..(16)..(17)..(18)..(19): Xaa is A or G
  MOD_RES (20)..(21)..(22)..(23): Xaa is A or G or is absent
XGXSEVVMDSMEGLXXXXXXXXXMIQITINSLRTPV

SEQ ID NO: 74414 - protein, 39 aa, Artificial Sequence
  GFR-binding peptide
  MOD_RES (1)..(3)..(35)..(36): Xaa is C or S
XGXAEVVMDSMEGIVVNNAADMIQITINSLRAPVXXSAP

SEQ ID NO: 74415 - protein, 39 aa, Artificial Sequence; identical to SEQ ID NO: 17262
  GFR-binding peptide
  MOD_RES (2)..(39): Xaa is C or S
  MOD_RES (15)..(16)..(17)..(18)..(19): Xaa is A or G
  MOD_RES (20)..(21)..(22)..(23): Xaa is A or G or is absent

SEQ ID NO: 74416 - protein, 44 aa, Artificial Sequence
  GFR-binding peptide
  MOD_RES (2)..(4)..(38)..(39): Xaa is C or S
  MOD_RES (16)..(17)..(18)..(19)..(20): Xaa is A or G
  MOD_RES (21)..(22)..(23)..(24): Xaa is A or G or is absent
SXGXRDVVMGSMEGIXXXXXXXXXMIQMTINSMKTPTXXPGASG

SEQ ID NO: 74417 - protein, 39 aa, Artificial Sequence
  GFR-binding peptide
  MOD_RES (1)..(3)..(36)..(37): Xaa is C or S
  MOD_RES (14)..(15)..(16)..(17)..(18): Xaa is A or G
  MOD_RES (19)..(20)..(21)..(22): Xaa is A or G or is absent
XKXSRVIMSMEGLXXXXXXXXXMIQITINSLAQPVXXPA

SEQ ID NO: 74418 - protein, 40 aa, Artificial Sequence; identical to SEQ ID NO: 17263
  GFR-binding peptide
  MOD_RES (37)..(37): Xaa is C or S

SEQ ID NO: 74419 - protein, 37 aa, Artificial Sequence; identical to SEQ ID NO: 17264
  GFR-binding peptide
  MOD_RES (1)..(3): Xaa is C or S
  MOD_RES (16)..(17)..(18)..(19)..(20): Xaa is A or G
  MOD_RES (21)..(22)..(23)..(24): Xaa is A or G or is absent

SEQ ID NO: 74420 - protein, 35 aa, Artificial Sequence; identical to SEQ ID NO: 17265
  GFR-binding peptide
  MOD_RES (2)..(2): Xaa is C or S

SEQ ID NO: 74421 - protein, 34 aa, Artificial Sequence
  GFR-binding peptide
  MOD_RES (1)..(33)..(34): Xaa is C or S
XSEVVMDSMEGIVVNNASDMIQITINSLRTPVXX

SEQ ID NO: 74422 - protein, 35 aa, Artificial Sequence
  GFR-binding peptide
  MOD_RES (1)..(34)..(35): Xaa is C or S
  MOD_RES (12)..(13)..(14)..(15)..(16): Xaa is A or G
  MOD_RES (17)..(18)..(19)..(20): Xaa is A or G or is absent
XSRVIMSMEGLXXXXXXXXXMIQITINSLAQPVXX

SEQ ID NO: 74423 - protein, 40 aa, Artificial Sequence; identical to SEQ ID NO: 17266
  GFR-binding peptide
  MOD_RES (1)..(38): Xaa is C or S
  MOD_RES (14)..(15)..(16)..(17)..(18): Xaa is A or G
  MOD_RES (19)..(20)..(21)..(22): Xaa is A or G or is absent

SEQ ID NO: 74424 - protein, 40 aa, Artificial Sequence
  GFR-binding peptide
  MOD_RES (2)..(4)..(36)..(37): Xaa is C or S
RXGXAEVVMDSMEGIVVNNAADMIQITINSLRAPVXXSAP

SEQ ID NO: 74425 - protein, 32 aa, Artificial Sequence
  GFR-binding peptide
  MOD_RES (32)..(32): Xaa is C or S
SEVVMDSMEGIVVNNASDMIQITINSLRTPVX

SEQ ID NO: 74426 - protein, 34 aa, Artificial Sequence; identical to SEQ ID NO: 49212
  GFR-binding peptide
  MOD_RES (2)..(4): Xaa is C or S

SEQ ID NO: 74427 - protein, 37 aa, Artificial Sequence
  GFR-binding peptide
  MOD_RES (1)..(33)..(34): Xaa is C or S
XAEVVMDSMEGLVVNNAADMIQITINSLRAPVXXSAP

SEQ ID NO: 74428 - protein, 43 aa, Artificial Sequence; identical to SEQ ID NO: 17269
  GFR-binding peptide
  MOD_RES (2)..(4)..(41): Xaa is C or S
  MOD_RES (17)..(18)..(19)..(20)..(21): Xaa is A or G
  MOD_RES (22)..(23)..(24)..(25): Xaa is A or G or is absent

SEQ ID NO: 74429 - protein, 31 aa, Artificial Sequence; identical to SEQ ID NO: 46668
  GFR-binding peptide
  MOD_RES (31)..(31): Xaa is C or S

SEQ ID NO: 74430 - protein, 41 aa, Artificial Sequence; identical to SEQ ID NO: 17270
  GFR-binding peptide
  MOD_RES (1)..(3)..(37): Xaa is C or S
  MOD_RES (15)..(16)..(17)..(18)..(19): Xaa is A or G
  MOD_RES (20)..(21)..(22)..(23): Xaa is A or G or is absent

SEQ ID NO: 74431 - protein, 32 aa, Artificial Sequence; identical to SEQ ID NO: 17271
  GFR-binding peptide

SEQ ID NO: 74432 - protein, 38 aa, Artificial Sequence
  GFR-binding peptide
  MOD_RES (1)..(3)..(37)..(38): Xaa is C or S
  MOD_RES (15)..(16)..(17)..(18)..(19): Xaa is A or G
  MOD_RES (20)..(21)..(22)..(23): Xaa is A or G or is absent
XGXSRVVMNSMEGLXXXXXXXXXMIQVTINSLKTPAXX

SEQ ID NO: 74433 - protein, 38 aa, Artificial Sequence; identical to SEQ ID NO: 17273
  GFR-binding peptide
  MOD_RES (2)..(4): Xaa is C or S

SEQ ID NO: 74434 - protein, 34 aa, Artificial Sequence
  GFR-binding peptide
  MOD_RES (2)..(2): Xaa is C or S
  MOD_RES (13)..(14)..(15)..(16)..(17): Xaa is A or G
  MOD_RES (18)..(19)..(20)..(21): Xaa is A or G or is absent
KXSKVVMSMEGLXXXXXXXXXMIQITINSLDQPV

SEQ ID NO: 74435 - protein, 35 aa, Artificial Sequence; identical to SEQ ID NO: 17274
  GFR-binding peptide
  MOD_RES (34)..(34): Xaa is C or S
  MOD_RES (12)..(13)..(14)..(15)..(16): Xaa is A or G
  MOD_RES (17)..(18)..(19)..(20): Xaa is A or G or is absent

SEQ ID NO: 74436 - protein, 38 aa, Artificial Sequence; identical to SEQ ID NO: 17278
  GFR-binding peptide
  MOD_RES (2)..(2): Xaa is C or S
  MOD_RES (15)..(16)..(17)..(18)..(19): Xaa is A or G
  MOD_RES (20)..(21)..(22)..(23): Xaa is A or G or is absent

SEQ ID NO: 74437 - protein, 38 aa, Artificial Sequence; identical to SEQ ID NO: 17279
  GFR-binding peptide
  MOD_RES (33)..(33): Xaa is C or S

SEQ ID NO: 74438 - protein, 36 aa, Artificial Sequence; identical to SEQ ID NO: 17280
  GFR-binding peptide
  MOD_RES (35)..(35): Xaa is C or S
  MOD_RES (11)..(12)..(13)..(14)..(15): Xaa is A or G
  MOD_RES (16)..(17)..(18)..(19): Xaa is A or G or is absent

SEQ ID NO: 74439 - protein, 33 aa, Artificial Sequence; identical to SEQ ID NO: 17281
  GFR-binding peptide
  MOD_RES (33)..(33): Xaa is C or S

SEQ ID NO: 74440 - protein, 39 aa, Artificial Sequence
  GFR-binding peptide
  MOD_RES (2)..(4)..(38)..(39): Xaa is C or S
  MOD_RES (16)..(17)..(18)..(19)..(20): Xaa is A or G
  MOD_RES (21)..(22)..(23)..(24): Xaa is A or G or is absent
RXGXSEVVMDSMEGLXXXXXXXXXMIQITINSLRTPVXX

SEQ ID NO: 74441 - protein, 38 aa, Artificial Sequence
  GFR-binding peptide
  MOD_RES (2)..(4)..(38): Xaa is C or S
  MOD_RES (16)..(17)..(18)..(19)..(20): Xaa is A or G
  MOD_RES (21)..(22)..(23)..(24): Xaa is A or G or is absent
SXGXRDVVMGSMEGIXXXXXXXXXMIQMTINSMKTPTX

SEQ ID NO: 74442 - protein, 37 aa, Artificial Sequence
  GFR-binding peptide
  MOD_RES (1)..(3)..(35)..(36): Xaa is C or S
XGXRDVVMGSMEGLIIQQKDNMIQMTINSMKTPTXXP

SEQ ID NO: 74443 - protein, 39 aa, Artificial Sequence; identical to SEQ ID NO: 17282
  GFR-binding peptide
  MOD_RES (36)..(36): Xaa is C or S

SEQ ID NO: 74444 - protein, 39 aa, Artificial Sequence; identical to SEQ ID NO: 17283
  GFR-binding peptide
  MOD_RES (1)..(38): Xaa is C or S
  MOD_RES (14)..(15)..(16)..(17)..(18): Xaa is A or G
  MOD_RES (19)..(20)..(21)..(22): Xaa is A or G or is absent

SEQ ID NO: 74445 - protein, 35 aa, Artificial Sequence
  GFR-binding peptide
  MOD_RES (2)..(34)..(35): Xaa is C or S
GXAEVVMDSMEGIVVNNAADMIQITINSLRAPVXX

SEQ ID NO: 74446 - protein, 38 aa, Artificial Sequence
  GFR-binding peptide
  MOD_RES (2)..(4)..(38): Xaa is C or S
  MOD_RES (16)..(17)..(18)..(19)..(20): Xaa is A or G
  MOD_RES (21)..(22)..(23)..(24): Xaa is A or G or is absent
RXGXAEVVMDSMEGLXXXXXXXXXMIQITINSLRAPVX

SEQ ID NO: 74447 - protein, 35 aa, Artificial Sequence
  GFR-binding peptide
  MOD_RES (2)..(4)..(35): Xaa is C or S
SXKXSRVIMSMEGLVKPKRGVMIQITINSLAQPVX

SEQ ID NO: 74448 - protein, 33 aa, Artificial Sequence
  GFR-binding peptide
  MOD_RES (33)..(33): Xaa is C or S
  MOD_RES (11)..(12)..(13)..(14)..(15): Xaa is A or G
  MOD_RES (16)..(17)..(18)..(19): Xaa is A or G or is absent
EVVMDSMEGIXXXXXXXXXMIQITINSLRAPVX

SEQ ID NO: 74449 - protein, 33 aa, Artificial Sequence
  GFR-binding peptide
  MOD_RES (32)..(33): Xaa is C or S
SEVVMDSMEGLVVNNASDMIQITINSLRTPVXX

SEQ ID NO: 74450 - protein, 43 aa, Artificial Sequence; identical to SEQ ID NO: 17287
  GFR-binding peptide
  MOD_RES (1)..(3)..(37): Xaa is C or S
  MOD_RES (15)..(16)..(17)..(18)..(19): Xaa is A or G
  MOD_RES (20)..(21)..(22)..(23): Xaa is A or G or is absent

SEQ ID NO: 74451 - protein, 39 aa, Artificial Sequence; identical to SEQ ID NO: 17289
  GFR-binding peptide
  MOD_RES (1)..(38): Xaa is C or S

SEQ ID NO: 74452 - protein, 34 aa, Artificial Sequence
  GFR-binding peptide
  MOD_RES (31)..(32): Xaa is C or S
EVVMDSMEGLVVNNAADMIQITINSLRAPVXXSA

SEQ ID NO: 74453 - protein, 40 aa, Artificial Sequence
  GFR-binding peptide
  MOD_RES (34)..(35): Xaa is C or S
  MOD_RES (12)..(13)..(14)..(15)..(16): Xaa is A or G
  MOD_RES (17)..(18)..(19)..(20): Xaa is A or G or is absent
RDVVMGSMEGLXXXXXXXXXMIQMTINSMKTPTXXPGASG

SEQ ID NO: 74454 - protein, 35 aa, Artificial Sequence; identical to SEQ ID NO: 17294
  GFR-binding peptide
  MOD_RES (2)..(2): Xaa is C or S
  MOD_RES (14)..(15)..(16)..(17)..(18): Xaa is A or G
  MOD_RES (19)..(20)..(21)..(22): Xaa is A or G or is absent

SEQ ID NO: 74455 - protein, 39 aa, Artificial Sequence
  GFR-binding peptide
  MOD_RES (2)..(4)..(35)..(36): Xaa is C or S
LXGXEEVIMSMEGILLVRGNDMIQMTINSTKVPAXXTSP

SEQ ID NO: 74456 - protein, 37 aa, Artificial Sequence; identical to SEQ ID NO: 49245
  GFR-binding peptide
  MOD_RES (1)..(3)..(36)..(37): Xaa is C or S
  MOD_RES (14)..(15)..(16)..(17)..(18): Xaa is A or G
  MOD_RES (19)..(20)..(21)..(22): Xaa is A or G or is absent

SEQ ID NO: 74457 - protein, 42 aa, Artificial Sequence; identical to SEQ ID NO: 17298
  GFR-binding peptide
  MOD_RES (2)..(39): Xaa is C or S

SEQ ID NO: 74458 - protein, 35 aa, Artificial Sequence; identical to SEQ ID NO: 17300
  GFR-binding peptide
  MOD_RES (1)..(1): Xaa is C or S
  MOD_RES (14)..(15)..(16)..(17)..(18): Xaa is A or G
  MOD_RES (19)..(20)..(21)..(22): Xaa is A or G or is absent

SEQ ID NO: 74459 - protein, 32 aa, Artificial Sequence
  GFR-binding peptide
  MOD_RES (11)..(12)..(13)..(14)..(15): Xaa is A or G
  MOD_RES (16)..(17)..(18)..(19): Xaa is A or G or is absent
EEVIMSMEGLXXXXXXXXXMIQMTINSTKVPA

SEQ ID NO: 74460 - protein, 39 aa, Artificial Sequence; identical to SEQ ID NO: 17303
  GFR-binding peptide
  MOD_RES (2)..(4)..(38): Xaa is C or S
  MOD_RES (16)..(17)..(18)..(19)..(20): Xaa is A or G
  MOD_RES (21)..(22)..(23)..(24): Xaa is A or G or is absent

SEQ ID NO: 74461 - protein, 38 aa, Artificial Sequence; identical to SEQ ID NO: 17304
  GFR-binding peptide
  MOD_RES (36)..(36): Xaa is C or S

SEQ ID NO: 74462 - protein, 38 aa, Artificial Sequence; identical to SEQ ID NO: 46705
  GFR-binding peptide
  MOD_RES (2)..(4)..(35)..(36): Xaa is C or S

SEQ ID NO: 74463 - protein, 36 aa, Artificial Sequence
  GFR-binding peptide
  MOD_RES (1)..(34)..(35): Xaa is C or S
  MOD_RES (12)..(13)..(14)..(15)..(16): Xaa is A or G
  MOD_RES (17)..(18)..(19)..(20): Xaa is A or G or is absent
XEEVIMSMEGLXXXXXXXXXMIQMTINSTKVPAXXT

SEQ ID NO: 74464 - protein, 34 aa, Artificial Sequence; identical to SEQ ID NO: 17305
  GFR-binding peptide
  MOD_RES (34)..(34): Xaa is C or S

SEQ ID NO: 74465 - protein, 40 aa, Artificial Sequence; identical to SEQ ID NO: 17306
  GFR-binding peptide
  MOD_RES (37)..(37): Xaa is C or S
  MOD_RES (13)..(14)..(15)..(16)..(17): Xaa is A or G
  MOD_RES (18)..(19)..(20)..(21): Xaa is A or G or is absent

SEQ ID NO: 74466 - protein, 34 aa, Artificial Sequence; identical to SEQ ID NO: 17307
  GFR-binding peptide

SEQ ID NO: 74467 - protein, 39 aa, Artificial Sequence
  GFR-binding peptide
  MOD_RES (33)..(34): Xaa is C or S
  MOD_RES (11)..(12)..(13)..(14)..(15): Xaa is A or G
  MOD_RES (16)..(17)..(18)..(19): Xaa is A or G or is absent
EEVIMSMEGLXXXXXXXXXMIQMTINSTKVPAXXTSPVR

SEQ ID NO: 74468 - protein, 33 aa, Artificial Sequence
  GFR-binding peptide
  MOD_RES (2)..(2): Xaa is C or S
GXSEVVMDSMEGIVVNNASDMIQITINSLRTPV

SEQ ID NO: 74469 - protein, 38 aa, Artificial Sequence; identical to SEQ ID NO: 17309
  GFR-binding peptide
  MOD_RES (34)..(34): Xaa is C or S
  MOD_RES (12)..(13)..(14)..(15)..(16): Xaa is A or G
  MOD_RES (17)..(18)..(19)..(20): Xaa is A or G or is absent

SEQ ID NO: 74470 - protein, 39 aa, Artificial Sequence; identical to SEQ ID NO: 49256
  GFR-binding peptide
  MOD_RES (2)..(34)..(35): Xaa is C or S

SEQ ID NO: 74471 - protein, 32 aa, Artificial Sequence; identical to SEQ ID NO: 46712
  GFR-binding peptide
  MOD_RES (2)..(2): Xaa is C or S

SEQ ID NO: 74472 - protein, 39 aa, Artificial Sequence; identical to SEQ ID NO: 17311
  GFR-binding peptide
  MOD_RES (36)..(36): Xaa is C or S
  MOD_RES (12)..(13)..(14)..(15)..(16): Xaa is A or G
  MOD_RES (17)..(18)..(19)..(20): Xaa is A or G or is absent

SEQ ID NO: 74473 - protein, 41 aa, Artificial Sequence; identical to SEQ ID NO: 17312
  GFR-binding peptide
  MOD_RES (2)..(4)..(38): Xaa is C or S
  MOD_RES (16)..(17)..(18)..(19)..(20): Xaa is A or G
  MOD_RES (21)..(22)..(23)..(24): Xaa is A or G or is absent

SEQ ID NO: 74474 - protein, 42 aa, Artificial Sequence; identical to SEQ ID NO: 17313
  GFR-binding peptide
  MOD_RES (2)..(36): Xaa is C or S

SEQ ID NO: 74475 - protein, 37 aa, Artificial Sequence; identical to SEQ ID NO: 17314
  GFR-binding peptide
  MOD_RES (1)..(35): Xaa is C or S

SEQ ID NO: 74476 - protein, 35 aa, Artificial Sequence; identical to SEQ ID NO: 17315
  GFR-binding peptide
  MOD_RES (1)..(35): Xaa is C or S

SEQ ID NO: 74477 - protein, 36 aa, Artificial Sequence
  GFR-binding peptide
  MOD_RES (2)..(4)..(36): Xaa is C or S
RXGXAEVVMDSMEGIVVNNAADMIQITINSLRAPVX

SEQ ID NO: 74478 - protein, 32 aa, Artificial Sequence
  GFR-binding peptide
  MOD_RES (31)..(32): Xaa is C or S
EVVMDSMEGLVVNNAADMIQITINSLRAPVXX

SEQ ID NO: 74479 - protein, 42 aa, Artificial Sequence
  GFR-binding peptide
  MOD_RES (2)..(4)..(37)..(38): Xaa is C or S
  MOD_RES (15)..(16)..(17)..(18)..(19): Xaa is A or G
  MOD_RES (20)..(21)..(22)..(23): Xaa is A or G or is absent
SXKXSKVIMSMEGLXXXXXXXXXMIQITINSLDQSVXXPSAS

SEQ ID NO: 74480 - protein, 38 aa, Artificial Sequence
  GFR-binding peptide
  MOD_RES (1)..(35)..(36): Xaa is C or S
  MOD_RES (13)..(14)..(15)..(16)..(17): Xaa is A or G
  MOD_RES (18)..(19)..(20)..(21): Xaa is A or G or is absent
XSEVVMDSMEGLXXXXXXXXXMIQITINSLRTPVXXTP

SEQ ID NO: 74481 - protein, 38 aa, Artificial Sequence; identical to SEQ ID NO: 17316
  GFR-binding peptide
  MOD_RES (35)..(35): Xaa is C or S

SEQ ID NO: 74482 - protein, 37 aa, Artificial Sequence
  GFR-binding peptide
  MOD_RES (31)..(32): Xaa is C or S
EVVMDSMEGLVVNNAADMIQITINSLRAPVXXSAPAA

SEQ ID NO: 74483 - protein, 43 aa, Artificial Sequence
  GFR-binding peptide
  MOD_RES (1)..(3)..(37)..(38): Xaa is C or S
  MOD_RES (15)..(16)..(17)..(18)..(19): Xaa is A or G
  MOD_RES (20)..(21)..(22)..(23): Xaa is A or G or is absent
XGXRDVVMGSMEGIXXXXXXXXXMIQMTINSMKTPTXXPGASG

SEQ ID NO: 74484 - protein, 34 aa, Artificial Sequence; identical to SEQ ID NO: 17318
  GFR-binding peptide
  MOD_RES (33)..(33): Xaa is C or S

SEQ ID NO: 74485 - protein, 37 aa, Artificial Sequence; identical to SEQ ID NO: 17319
  GFR-binding peptide
  MOD_RES (35)..(35): Xaa is C or S
  MOD_RES (11)..(12)..(13)..(14)..(15): Xaa is A or G
  MOD_RES (16)..(17)..(18)..(19): Xaa is A or G or is absent

SEQ ID NO: 74486 - protein, 36 aa, Artificial Sequence
  GFR-binding peptide
  MOD_RES (31)..(32): Xaa is C or S
DVVMGSMEGIIIQQKDNMIQMTINSMKTPTXXPGAS

SEQ ID NO: 74487 - protein, 36 aa, Artificial Sequence
  GFR-binding peptide
  MOD_RES (1)..(32)..(33): Xaa is C or S
XSKVVMSMEGLVKPTRGVMIQITINSLDQPVXXPSA

SEQ ID NO: 74488 - protein, 37 aa, Artificial Sequence; identical to SEQ ID NO: 17320
  GFR-binding peptide
  MOD_RES (36)..(36): Xaa is C or S
  MOD_RES (12)..(13)..(14)..(15)..(16): Xaa is A or G
  MOD_RES (17)..(18)..(19)..(20): Xaa is A or G or is absent

SEQ ID NO: 74489 - protein, 41 aa, Artificial Sequence
  GFR-binding peptide
  MOD_RES (2)..(4)..(37)..(38): Xaa is C or S
  MOD_RES (15)..(16)..(17)..(18)..(19): Xaa is A or G
  MOD_RES (20)..(21)..(22)..(23): Xaa is A or G or is absent
LXGXEEVIMSMEGIXXXXXXXXXMIQMTINSTKVPAXXTSP

SEQ ID NO: 74490 - protein, 37 aa, Artificial Sequence
  GFR-binding peptide
  MOD_RES (1)..(3)..(37): Xaa is C or S
  MOD_RES (15)..(16)..(17)..(18)..(19): Xaa is A or G
  MOD_RES (20)..(21)..(22)..(23): Xaa is A or G or is absent
XGXRDVVMGSMEGLXXXXXXXXXMIQMTINSMKTPTX

SEQ ID NO: 74491 - protein, 41 aa, Artificial Sequence; identical to SEQ ID NO: 17322
  GFR-binding peptide
  MOD_RES (1)..(35): Xaa is C or S

SEQ ID NO: 74492 - protein, 36 aa, Artificial Sequence
  GFR-binding peptide
  MOD_RES (32)..(33): Xaa is C or S
AEVVMDSMEGLVVNNAADMIQITINSLRAPVXXSAP

SEQ ID NO: 74493 - protein, 41 aa, Artificial Sequence
  GFR-binding peptide
  MOD_RES (1)..(3)..(36)..(37): Xaa is C or S
  MOD_RES (14)..(15)..(16)..(17)..(18): Xaa is A or G
  MOD_RES (19)..(20)..(21)..(22): Xaa is A or G or is absent
XKXSKVVMSMEGLXXXXXXXXXMIQITINSLDQPVXXPSAS

SEQ ID NO: 74494 - protein, 33 aa, Artificial Sequence
  GFR-binding peptide
  MOD_RES (2)..(2): Xaa is C or S
GXRDVVMGSMEGLIIQQKDNMIQMTINSMKTPT

SEQ ID NO: 74495 - protein, 33 aa, Artificial Sequence; identical to SEQ ID NO: 17325
  GFR-binding peptide
  MOD_RES (12)..(13)..(14)..(15)..(16): Xaa is A or G
  MOD_RES (17)..(18)..(19)..(20): Xaa is A or G or is absent

SEQ ID NO: 74496 - protein, 39 aa, Artificial Sequence; identical to SEQ ID NO: 17328
  GFR-binding peptide
  MOD_RES (33)..(33): Xaa is C or S

SEQ ID NO: 74497 - protein, 32 aa, Artificial Sequence
  GFR-binding peptide
  MOD_RES (2)..(2): Xaa is C or S
GXEEVIMSMEGLLLVRGNDMIQMTINSTKVPA

SEQ ID NO: 74498 - protein, 34 aa, Artificial Sequence
  GFR-binding peptide
  MOD_RES (31)..(32): Xaa is C or S
EVVMDSMEGLVVNNASDMIQITINSLRTPVXXTP

SEQ ID NO: 74499 - protein, 41 aa, Artificial Sequence
  GFR-binding peptide
  MOD_RES (2)..(4)..(37)..(38): Xaa is C or S
  MOD_RES (15)..(16)..(17)..(18)..(19): Xaa is A or G
  MOD_RES (20)..(21)..(22)..(23): Xaa is A or G or is absent
SXKXSRVIMSMEGLXXXXXXXXXMIQITINSLAQPVXXPAA

SEQ ID NO: 74500 - protein, 35 aa, Artificial Sequence
  GFR-binding peptide
  MOD_RES (2)..(34)..(35): Xaa is C or S
GXSRVVMNSMEGLIVNSSDDMIQVTINSLKTPAXX

SEQ ID NO: 74501 - protein, 32 aa, Artificial Sequence; identical to SEQ ID NO: 49285
  GFR-binding peptide
  MOD_RES (1)..(32): Xaa is C or S

SEQ ID NO: 74502 - protein, 38 aa, Artificial Sequence; identical to SEQ ID NO: 17329
  GFR-binding peptide
  MOD_RES (33)..(33): Xaa is C or S
  MOD_RES (11)..(12)..(13)..(14)..(15): Xaa is A or G
  MOD_RES (16)..(17)..(18)..(19): Xaa is A or G or is absent

SEQ ID NO: 74503 - protein, 38 aa, Artificial Sequence
  GFR-binding peptide
  MOD_RES (34)..(35): Xaa is C or S
  MOD_RES (12)..(13)..(14)..(15)..(16): Xaa is A or G
  MOD_RES (17)..(18)..(19)..(20): Xaa is A or G or is absent
AEVVMDSMEGIXXXXXXXXXMIQITINSLRAPVXXSAP

SEQ ID NO: 74504 - protein, 37 aa, Artificial Sequence; identical to SEQ ID NO: 17331
  GFR-binding peptide
  MOD_RES (33)..(33): Xaa is C or S
  MOD_RES (11)..(12)..(13)..(14)..(15): Xaa is A or G
  MOD_RES (16)..(17)..(18)..(19): Xaa is A or G or is absent

SEQ ID NO: 74505 - protein, 32 aa, Artificial Sequence
  GFR-binding peptide
  MOD_RES (11)..(12)..(13)..(14)..(15): Xaa is A or G
  MOD_RES (16)..(17)..(18)..(19): Xaa is A or G or is absent
SKVVMSMEGLXXXXXXXXXMIQITINSLDQPV

SEQ ID NO: 74506 - protein, 39 aa, Artificial Sequence
  GFR-binding peptide
  MOD_RES (1)..(34)..(35): Xaa is C or S
  MOD_RES (12)..(13)..(14)..(15)..(16): Xaa is A or G
  MOD_RES (17)..(18)..(19)..(20): Xaa is A or G or is absent
XEEVIMSMEGLXXXXXXXXXMIQMTINSTKVPAXXTSPV

SEQ ID NO: 74507 - protein, 33 aa, Artificial Sequence
  GFR-binding peptide
  MOD_RES (1)..(1): Xaa is C or S
  MOD_RES (12)..(13)..(14)..(15)..(16): Xaa is A or G
  MOD_RES (17)..(18)..(19)..(20): Xaa is A or G or is absent
XEEVIMSMEGIXXXXXXXXXMIQMTINSTKVPA

SEQ ID NO: 74508 - protein, 38 aa, Artificial Sequence
  GFR-binding peptide
  MOD_RES (2)..(4)..(36)..(37): Xaa is C or S
SXGXRDVVMGSMEGIIIQQKDNMIQMTINSMKTPTXXP

SEQ ID NO: 74509 - protein, 42 aa, Artificial Sequence; identical to SEQ ID NO: 17333
  GFR-binding peptide
  MOD_RES (2)..(36): Xaa is C or S
  MOD_RES (14)..(15)..(16)..(17)..(18): Xaa is A or G
  MOD_RES (19)..(20)..(21)..(22): Xaa is A or G or is absent

SEQ ID NO: 74510 - protein, 39 aa, Artificial Sequence; identical to SEQ ID NO: 46744
  GFR-binding peptide
  MOD_RES (2)..(4)..(35)..(36): Xaa is C or S

SEQ ID NO: 74511 - protein, 37 aa, Artificial Sequence; identical to SEQ ID NO: 17335
  GFR-binding peptide
  MOD_RES (2)..(2): Xaa is C or S
  MOD_RES (15)..(16)..(17)..(18)..(19): Xaa is A or G
  MOD_RES (20)..(21)..(22)..(23): Xaa is A or G or is absent

SEQ ID NO: 74512 - protein, 31 aa, Artificial Sequence
  GFR-binding peptide
SRVVMNSMEGLIVNSSDDMIQVTINSLKTPA

SEQ ID NO: 74513 - protein, 33 aa, Artificial Sequence; identical to SEQ ID NO: 17336
  GFR-binding peptide
  MOD_RES (11)..(12)..(13)..(14)..(15): Xaa is A or G
  MOD_RES (16)..(17)..(18)..(19): Xaa is A or G or is absent

SEQ ID NO: 74514 - protein, 37 aa, Artificial Sequence; identical to SEQ ID NO: 49295
  GFR-binding peptide
  MOD_RES (31)..(32): Xaa is C or S

SEQ ID NO: 74515 - protein, 36 aa, Artificial Sequence
  GFR-binding peptide
  MOD_RES (32)..(33): Xaa is C or S
SEVVMDSMEGIVVNNASDMIQITINSLRTPVXXTPP

SEQ ID NO: 74516 - protein, 43 aa, Artificial Sequence; identical to SEQ ID NO: 17338
  GFR-binding peptide
  MOD_RES (2)..(4)..(41): Xaa is C or S
  MOD_RES (17)..(18)..(19)..(20)..(21): Xaa is A or G
  MOD_RES (22)..(23)..(24)..(25): Xaa is A or G or is absent

SEQ ID NO: 74517 - protein, 40 aa, Artificial Sequence
  GFR-binding peptide
  MOD_RES (1)..(3)..(36)..(37): Xaa is C or S
  MOD_RES (14)..(15)..(16)..(17)..(18): Xaa is A or G
  MOD_RES (19)..(20)..(21)..(22): Xaa is A or G or is absent
XGXEEVIMSMEGLXXXXXXXXXMIQMTINSTKVPAXXTSP

SEQ ID NO: 74518 - protein, 37 aa, Artificial Sequence
  GFR-binding peptide
  MOD_RES (1)..(32)..(33): Xaa is C or S
XSRVIMSMEGLVKPKRGVMIQITINSLAQPVXXPAAS

SEQ ID NO: 74519 - protein, 36 aa, Artificial Sequence; identical to SEQ ID NO: 49302
  GFR-binding peptide
  MOD_RES (31)..(32): Xaa is C or S

SEQ ID NO: 74520 - protein, 41 aa, Artificial Sequence
  GFR-binding peptide
  MOD_RES (2)..(4)..(38)..(39): Xaa is C or S
  MOD_RES (16)..(17)..(18)..(19)..(20): Xaa is A or G
  MOD_RES (21)..(22)..(23)..(24): Xaa is A or G or is absent
RXGXSEVVMDSMEGIXXXXXXXXXMIQITINSLRTPVXXTP

SEQ ID NO: 74521 - protein, 40 aa, Artificial Sequence; identical to SEQ ID NO: 17339
  GFR-binding peptide
  MOD_RES (1)..(35): Xaa is C or S

SEQ ID NO: 74522 - protein, 36 aa, Artificial Sequence; identical to SEQ ID NO: 49309
  GFR-binding peptide
  MOD_RES (1)..(3)..(34)..(35): Xaa is C or S

SEQ ID NO: 74523 - protein, 36 aa, Artificial Sequence
  GFR-binding peptide
  MOD_RES (1)..(3): Xaa is C or S
  MOD_RES (15)..(16)..(17)..(18)..(19): Xaa is A or G
  MOD_RES (20)..(21)..(22)..(23): Xaa is A or G or is absent
XGXAEVVMDSMEGIXXXXXXXXXMIQITINSLRAPV

SEQ ID NO: 74524 - protein, 37 aa, Artificial Sequence; identical to SEQ ID NO: 17341
  GFR-binding peptide
  MOD_RES (2)..(2): Xaa is C or S

SEQ ID NO: 74525 - protein, 36 aa, Artificial Sequence; identical to SEQ ID NO: 46760
  GFR-binding peptide
  MOD_RES (1)..(32)..(33): Xaa is C or S

SEQ ID NO: 74526 - protein, 38 aa, Artificial Sequence
  GFR-binding peptide
  MOD_RES (1)..(3)..(35)..(36): Xaa is C or S
XGXSEVVMDSMEGLVVNNASDMIQITINSLRTPVXXTP

SEQ ID NO: 74527 - protein, 34 aa, Artificial Sequence
  GFR-binding peptide
  MOD_RES (2)..(2): Xaa is C or S
  MOD_RES (13)..(14)..(15)..(16)..(17): Xaa is A or G
  MOD_RES (18)..(19)..(20)..(21): Xaa is A or G or is absent
GXEEVIMSMEGLXXXXXXXXXMIQMTINSTKVPA

SEQ ID NO: 74528 - protein, 31 aa, Artificial Sequence
  GFR-binding peptide
  MOD_RES (31)..(31): Xaa is C or S
EVVMDSMEGIVVNNAADMIQITINSLRAPVX

SEQ ID NO: 74529 - protein, 38 aa, Artificial Sequence; identical to SEQ ID NO: 17342
  GFR-binding peptide
  MOD_RES (37)..(37): Xaa is C or S

SEQ ID NO: 74530 - protein, 37 aa, Artificial Sequence
  GFR-binding peptide
  MOD_RES (31)..(32): Xaa is C or S
DVVMGSMEGIIIQQKDNMIQMTINSMKTPTXXPGASG

SEQ ID NO: 74531 - protein, 33 aa, Artificial Sequence; identical to SEQ ID NO: 17344
  GFR-binding peptide
  MOD_RES (33)..(33): Xaa is C or S

SEQ ID NO: 74532 - protein, 41 aa, Artificial Sequence; identical to SEQ ID NO: 17346
  GFR-binding peptide
  MOD_RES (1)..(35): Xaa is C or S
  MOD_RES (13)..(14)..(15)..(16)..(17): Xaa is A or G
  MOD_RES (18)..(19)..(20)..(21): Xaa is A or G or is absent

SEQ ID NO: 74533 - protein, 39 aa, Artificial Sequence; identical to SEQ ID NO: 17347
  GFR-binding peptide
  MOD_RES (35)..(35): Xaa is C or S

SEQ ID NO: 74534 - protein, 39 aa, Artificial Sequence
  GFR-binding peptide
  MOD_RES (1)..(33)..(34): Xaa is C or S
XSRVVMNSMEGIIVNSSDDMIQVTINSLKTPAXXPKPVH

SEQ ID NO: 74535 - protein, 37 aa, Artificial Sequence; identical to SEQ ID NO: 17349
  GFR-binding peptide
  MOD_RES (2)..(2): Xaa is C or S
  MOD_RES (15)..(16)..(17)..(18)..(19): Xaa is A or G
  MOD_RES (20)..(21)..(22)..(23): Xaa is A or G or is absent

SEQ ID NO: 74536 - protein, 32 aa, Artificial Sequence
  GFR-binding peptide
  MOD_RES (11)..(12)..(13)..(14)..(15): Xaa is A or G
  MOD_RES (16)..(17)..(18)..(19): Xaa is A or G or is absent
DVVMGSMEGLXXXXXXXXXMIQMTINSMKTPT

SEQ ID NO: 74537 - protein, 42 aa, Artificial Sequence; identical to SEQ ID NO: 17350
  GFR-binding peptide
  MOD_RES (2)..(39): Xaa is C or S

SEQ ID NO: 74538 - protein, 33 aa, Artificial Sequence; identical to SEQ ID NO: 46765
  GFR-binding peptide
  MOD_RES (1)..(32)..(33): Xaa is C or S

SEQ ID NO: 74539 - protein, 35 aa, Artificial Sequence
  GFR-binding peptide
  MOD_RES (34)..(35): Xaa is C or S
  MOD_RES (12)..(13)..(14)..(15)..(16): Xaa is A or G
  MOD_RES (17)..(18)..(19)..(20): Xaa is A or G or is absent
AEVVMDSMEGLXXXXXXXXXMIQITINSLRAPVXX

SEQ ID NO: 74540 - protein, 39 aa, Artificial Sequence
  GFR-binding peptide
  MOD_RES (1)..(3)..(36)..(37): Xaa is C or S
  MOD_RES (14)..(15)..(16)..(17)..(18): Xaa is A or G
  MOD_RES (19)..(20)..(21)..(22): Xaa is A or G or is absent
XKXSKVIMSMEGLXXXXXXXXXMIQITINSLDQSVXXPS

SEQ ID NO: 74541 - protein, 38 aa, Artificial Sequence; identical to SEQ ID NO: 17352
  GFR-binding peptide
  MOD_RES (34)..(34): Xaa is C or S

SEQ ID NO: 74542 - protein, 42 aa, Artificial Sequence; identical to SEQ ID NO: 17353
  GFR-binding peptide
  MOD_RES (2)..(39): Xaa is C or S
  MOD_RES (15)..(16)..(17)..(18)..(19): Xaa is A or G
  MOD_RES (20)..(21)..(22)..(23): Xaa is A or G or is absent

SEQ ID NO: 74543 - protein, 41 aa, Artificial Sequence
  GFR-binding peptide
  MOD_RES (2)..(36)..(37): Xaa is C or S
  MOD_RES (14)..(15)..(16)..(17)..(18): Xaa is A or G
  MOD_RES (19)..(20)..(21)..(22): Xaa is A or G or is absent
GXAEVVMDSMEGIXXXXXXXXXMIQITINSLRAPVXXSAPA

SEQ ID NO: 74544 - protein, 34 aa, Artificial Sequence; identical to SEQ ID NO: 49327
  GFR-binding peptide
  MOD_RES (2)..(33)..(34): Xaa is C or S

SEQ ID NO: 74545 - protein, 41 aa, Artificial Sequence
  GFR-binding peptide
  MOD_RES (1)..(35)..(36): Xaa is C or S
  MOD_RES (13)..(14)..(15)..(16)..(17): Xaa is A or G
  MOD_RES (18)..(19)..(20)..(21): Xaa is A or G or is absent
XSRVVMNSMEGIXXXXXXXXXMIQVTINSLKTPAXXPKPVH

SEQ ID NO: 74546 - protein, 37 aa, Artificial Sequence; identical to SEQ ID NO: 17354
  GFR-binding peptide
  MOD_RES (33)..(33): Xaa is C or S
  MOD_RES (11)..(12)..(13)..(14)..(15): Xaa is A or G
  MOD_RES (16)..(17)..(18)..(19): Xaa is A or G or is absent

SEQ ID NO: 74547 - protein, 41 aa, Artificial Sequence; identical to SEQ ID NO: 17355
  GFR-binding peptide
  MOD_RES (1)..(35): Xaa is C or S

SEQ ID NO: 74548 - protein, 40 aa, Artificial Sequence
  GFR-binding peptide
  MOD_RES (2)..(35)..(36): Xaa is C or S
  MOD_RES (13)..(14)..(15)..(16)..(17): Xaa is A or G
  MOD_RES (18)..(19)..(20)..(21): Xaa is A or G or is absent
KXSKVIMSMEGLXXXXXXXXXMIQITINSLDQSVXXPSAS

SEQ ID NO: 74549 - protein, 41 aa, Artificial Sequence; identical to SEQ ID NO: 17356
  GFR-binding peptide
  MOD_RES (2)..(4)..(41): Xaa is C or S
  MOD_RES (17)..(18)..(19)..(20)..(21): Xaa is A or G
  MOD_RES (22)..(23)..(24)..(25): Xaa is A or G or is absent

SEQ ID NO: 74550 - protein, 37 aa, Artificial Sequence
  GFR-binding peptide
  MOD_RES (2)..(36)..(37): Xaa is C or S
  MOD_RES (14)..(15)..(16)..(17)..(18): Xaa is A or G
  MOD_RES (19)..(20)..(21)..(22): Xaa is A or G or is absent
GXRDVVMGSMEGIXXXXXXXXXMIQMTINSMKTPTXX

SEQ ID NO: 74551 - protein, 32 aa, Artificial Sequence
  GFR-binding peptide
  MOD_RES (32)..(32): Xaa is C or S
RDVVMGSMEGIIIQQKDNMIQMTINSMKTPTX

SEQ ID NO: 74552 - protein, 34 aa, Artificial Sequence; identical to SEQ ID NO: 17358
  GFR-binding peptide
  MOD_RES (33)..(33): Xaa is C or S

SEQ ID NO: 74553 - protein, 36 aa, Artificial Sequence
  GFR-binding peptide
  MOD_RES (34)..(35): Xaa is C or S
  MOD_RES (12)..(13)..(14)..(15)..(16): Xaa is A or G
  MOD_RES (17)..(18)..(19)..(20): Xaa is A or G or is absent
AEVVMDSMEGIXXXXXXXXXMIQITINSLRAPVXXS

SEQ ID NO: 74554 - protein, 39 aa, Artificial Sequence; identical to SEQ ID NO: 17359
  GFR-binding peptide
  MOD_RES (37)..(37): Xaa is C or S
  MOD_RES (13)..(14)..(15)..(16)..(17): Xaa is A or G
  MOD_RES (18)..(19)..(20)..(21): Xaa is A or G or is absent

SEQ ID NO: 74555 - protein, 34 aa, Artificial Sequence; identical to SEQ ID NO: 46781
  GFR-binding peptide
  MOD_RES (2)..(4): Xaa is C or S

SEQ ID NO: 74556 - protein, 34 aa, Artificial Sequence
  GFR-binding peptide
  MOD_RES (33)..(34): Xaa is C or S
  MOD_RES (11)..(12)..(13)..(14)..(15): Xaa is A or G
  MOD_RES (16)..(17)..(18)..(19): Xaa is A or G or is absent
SKVIMSMEGLXXXXXXXXXMIQITINSLDQSVXX

SEQ ID NO: 74557 - protein, 32 aa, Artificial Sequence
  GFR-binding peptide
  MOD_RES (2)..(2): Xaa is C or S
KXSKVIMSMEGLIKPTKGIMIQITINSLDQSV

SEQ ID NO: 74558 - protein, 42 aa, Artificial Sequence; identical to SEQ ID NO: 17360
  GFR-binding peptide
  MOD_RES (2)..(4)..(41): Xaa is C or S
  MOD_RES (17)..(18)..(19)..(20)..(21): Xaa is A or G
  MOD_RES (22)..(23)..(24)..(25): Xaa is A or G or is absent

SEQ ID NO: 74559 - protein, 35 aa, Artificial Sequence; identical to SEQ ID NO: 49345
  GFR-binding peptide
  MOD_RES (1)..(32)..(33): Xaa is C or S

SEQ ID NO: 74560 - protein, 37 aa, Artificial Sequence
  GFR-binding peptide
  MOD_RES (2)..(4): Xaa is C or S
  MOD_RES (16)..(17)..(18)..(19)..(20): Xaa is A or G
  MOD_RES (21)..(22)..(23)..(24): Xaa is A or G or is absent
SXGXRDVVMGSMEGIXXXXXXXXXMIQMTINSMKTPT

SEQ ID NO: 74561 - protein, 36 aa, Artificial Sequence; identical to SEQ ID NO: 49348
  GFR-binding peptide
  MOD_RES (31)..(32): Xaa is C or S

SEQ ID NO: 74562 - protein, 36 aa, Artificial Sequence
  GFR-binding peptide
  MOD_RES (1)..(3): Xaa is C or S
  MOD_RES (15)..(16)..(17)..(18)..(19): Xaa is A or G
  MOD_RES (20)..(21)..(22)..(23): Xaa is A or G or is absent
XGXSRVVMNSMEGLXXXXXXXXXMIQVTINSLKTPA

SEQ ID NO: 74563 - protein, 35 aa, Artificial Sequence
  GFR-binding peptide
  MOD_RES (2)..(33)..(34): Xaa is C or S
GXEEVIMSMEGILLVRGNDMIQMTINSTKVPAXXT

SEQ ID NO: 74564 - protein, 33 aa, Artificial Sequence
  GFR-binding peptide
  MOD_RES (31)..(32): Xaa is C or S
EEVIMSMEGILLVRGNDMIQMTINSTKVPAXXT

SEQ ID NO: 74565 - protein, 38 aa, Artificial Sequence; identical to SEQ ID NO: 17361
  GFR-binding peptide
  MOD_RES (1)..(38): Xaa is C or S

SEQ ID NO: 74566 - protein, 40 aa, Artificial Sequence; identical to SEQ ID NO: 17362
  GFR-binding peptide
  MOD_RES (36)..(36): Xaa is C or S
  MOD_RES (12)..(13)..(14)..(15)..(16): Xaa is A or G
  MOD_RES (17)..(18)..(19)..(20): Xaa is A or G or is absent

SEQ ID NO: 74567 - protein, 42 aa, Artificial Sequence; identical to SEQ ID NO: 17363
  GFR-binding peptide
  MOD_RES (1)..(38): Xaa is C or S
  MOD_RES (14)..(15)..(16)..(17)..(18): Xaa is A or G
  MOD_RES (19)..(20)..(21)..(22): Xaa is A or G or is absent

SEQ ID NO: 74568 - protein, 36 aa, Artificial Sequence; identical to SEQ ID NO: 49351
  GFR-binding peptide
  MOD_RES (1)..(3)..(35)..(36): Xaa is C or S

SEQ ID NO: 74569 - protein, 35 aa, Artificial Sequence; identical to SEQ ID NO: 17366
  GFR-binding peptide
  MOD_RES (1)..(35): Xaa is C or S
  MOD_RES (13)..(14)..(15)..(16)..(17): Xaa is A or G
  MOD_RES (18)..(19)..(20)..(21): Xaa is A or G or is absent

SEQ ID NO: 74570 - protein, 38 aa, Artificial Sequence
  GFR-binding peptide
  MOD_RES (34)..(35): Xaa is C or S
  MOD_RES (12)..(13)..(14)..(15)..(16): Xaa is A or G
  MOD_RES (17)..(18)..(19)..(20): Xaa is A or G or is absent
RDVVMGSMEGIXXXXXXXXXMIQMTINSMKTPTXXPGA

SEQ ID NO: 74571 - protein, 37 aa, Artificial Sequence
  GFR-binding peptide
  MOD_RES (1)..(33)..(34): Xaa is C or S
XRDVVMGSMEGLIIQQKDNMIQMTINSMKTPTXXPGA

SEQ ID NO: 74572 - protein, 34 aa, Artificial Sequence
  GFR-binding peptide
  MOD_RES (2)..(34): Xaa is C or S
GXSEVVMDSMEGIVVNNASDMIQITINSLRTPVX

SEQ ID NO: 74573 - protein, 36 aa, Artificial Sequence; identical to SEQ ID NO: 17369
  GFR-binding peptide

SEQ ID NO: 74574 - protein, 31 aa, Artificial Sequence; identical to SEQ ID NO: 46801
  GFR-binding peptide
  MOD_RES (1)..(1): Xaa is C or S

SEQ ID NO: 74575 - protein, 36 aa, Artificial Sequence; identical to SEQ ID NO: 46803
  GFR-binding peptide
  MOD_RES (2)..(35)..(36): Xaa is C or S
  MOD_RES (13)..(14)..(15)..(16)..(17): Xaa is A or G
  MOD_RES (18)..(19)..(20)..(21): Xaa is A or G or is absent

SEQ ID NO: 74576 - protein, 41 aa, Artificial Sequence; identical to SEQ ID NO: 17370
  GFR-binding peptide
  MOD_RES (2)..(4)..(41): Xaa is C or S
  MOD_RES (17)..(18)..(19)..(20)..(21): Xaa is A or G
  MOD_RES (22)..(23)..(24)..(25): Xaa is A or G or is absent

SEQ ID NO: 74577 - protein, 36 aa, Artificial Sequence; identical to SEQ ID NO: 17372
  GFR-binding peptide
  MOD_RES (1)..(1): Xaa is C or S
  MOD_RES (14)..(15)..(16)..(17)..(18): Xaa is A or G
  MOD_RES (19)..(20)..(21)..(22): Xaa is A or G or is absent

SEQ ID NO: 74578 - protein, 44 aa, Artificial Sequence; identical to SEQ ID NO: 17373
  GFR-binding peptide
  MOD_RES (1)..(3)..(40): Xaa is C or S

SEQ ID NO: 74579 - protein, 36 aa, Artificial Sequence
  GFR-binding peptide
  MOD_RES (1)..(3): Xaa is C or S
  MOD_RES (15)..(16)..(17)..(18)..(19): Xaa is A or G
  MOD_RES (20)..(21)..(22)..(23): Xaa is A or G or is absent
XGXAEVVMDSMEGLXXXXXXXXXMIQITINSLRAPV

SEQ ID NO: 74580 - protein, 37 aa, Artificial Sequence
  GFR-binding peptide
  MOD_RES (2)..(34)..(35): Xaa is C or S
GXSEVVMDSMEGIVVNNASDMIQITINSLRTPVXXTP

SEQ ID NO: 74581 - protein, 36 aa, Artificial Sequence; identical to SEQ ID NO: 49363
  GFR-binding peptide
  MOD_RES (1)..(3)..(36): Xaa is C or S
  MOD_RES (14)..(15)..(16)..(17)..(18): Xaa is A or G
  MOD_RES (19)..(20)..(21)..(22): Xaa is A or G or is absent

SEQ ID NO: 74582 - protein, 42 aa, Artificial Sequence
  GFR-binding peptide
  MOD_RES (2)..(36)..(37): Xaa is C or S
  MOD_RES (14)..(15)..(16)..(17)..(18): Xaa is A or G
  MOD_RES (19)..(20)..(21)..(22): Xaa is A or G or is absent
GXSEVVMDSMEGLXXXXXXXXXMIQITINSLRTPVXXTPPTS

SEQ ID NO: 74583 - protein, 33 aa, Artificial Sequence
  GFR-binding peptide
  MOD_RES (2)..(33): Xaa is C or S
KXSRVIMSMEGLVKPKRGVMIQITINSLAQPVX

SEQ ID NO: 74584 - protein, 35 aa, Artificial Sequence
  GFR-binding peptide
  MOD_RES (1)..(33)..(34): Xaa is C or S
XRDVVMGSMEGLIIQQKDNMIQMTINSMKTPTXXP

SEQ ID NO: 74585 - protein, 36 aa, Artificial Sequence
  GFR-binding peptide
  MOD_RES (1)..(3)..(36): Xaa is C or S
  MOD_RES (14)..(15)..(16)..(17)..(18): Xaa is A or G
  MOD_RES (19)..(20)..(21)..(22): Xaa is A or G or is absent
XKXSKVVMSMEGLXXXXXXXXXMIQITINSLDQPVX

SEQ ID NO: 74586 - protein, 34 aa, Artificial Sequence
  GFR-binding peptide
  MOD_RES (1)..(32)..(33): Xaa is C or S
XEEVIMSMEGILLVRGNDMIQMTINSTKVPAXXT

SEQ ID NO: 74587 - protein, 33 aa, Artificial Sequence
  GFR-binding peptide
  MOD_RES (32)..(33): Xaa is C or S
RDVVMGSMEGLIIQQKDNMIQMTINSMKTPTXX

SEQ ID NO: 74588 - protein, 38 aa, Artificial Sequence; identical to SEQ ID NO: 46820
  GFR-binding peptide
  MOD_RES (1)..(3)..(36)..(37): Xaa is C or S
  MOD_RES (14)..(15)..(16)..(17)..(18): Xaa is A or G
  MOD_RES (19)..(20)..(21)..(22): Xaa is A or G or is absent

SEQ ID NO: 74589 - protein, 39 aa, Artificial Sequence
  GFR-binding peptide
  MOD_RES (2)..(4)..(36)..(37): Xaa is C or S
RXGXSEVVMDSMEGIVVNNASDMIQITINSLRTPVXXTP

SEQ ID NO: 74590 - protein, 39 aa, Artificial Sequence; identical to SEQ ID NO: 17378
  GFR-binding peptide
  MOD_RES (1)..(3)..(37): Xaa is C or S

SEQ ID NO: 74591 - protein, 34 aa, Artificial Sequence; identical to SEQ ID NO: 17379
  GFR-binding peptide
  MOD_RES (1)..(1): Xaa is C or S

SEQ ID NO: 74592 - protein, 37 aa, Artificial Sequence; identical to SEQ ID NO: 49373
  GFR-binding peptide
  MOD_RES (2)..(4)..(35)..(36): Xaa is C or S

SEQ ID NO: 74593 - protein, 40 aa, Artificial Sequence
  GFR-binding peptide
  MOD_RES (2)..(4)..(38)..(39): Xaa is C or S
  MOD_RES (16)..(17)..(18)..(19)..(20): Xaa is A or G
  MOD_RES (21)..(22)..(23)..(24): Xaa is A or G or is absent
RXGXSEVVMDSMEGLXXXXXXXXXMIQITINSLRTPVXXT

SEQ ID NO: 74594 - protein, 36 aa, Artificial Sequence
  GFR-binding peptide
  MOD_RES (32)..(33): Xaa is C or S
RDVVMGSMEGLIIQQKDNMIQMTINSMKTPTXXPGA

SEQ ID NO: 74595 - protein, 37 aa, Artificial Sequence
  GFR-binding peptide
  MOD_RES (2)..(4)..(36)..(37): Xaa is C or S
SXGXRDVVMGSMEGIIIQQKDNMIQMTINSMKTPTXX

SEQ ID NO: 74596 - protein, 38 aa, Artificial Sequence
  GFR-binding peptide
  MOD_RES (2)..(33)..(34): Xaa is C or S
KXSKVVMSMEGLVKPTRGVMIQITINSLDQPVXXPSAS

SEQ ID NO: 74597 - protein, 32 aa, Artificial Sequence; identical to SEQ ID NO: 46830
  GFR-binding peptide
  MOD_RES (32)..(32): Xaa is C or S

SEQ ID NO: 74598 - protein, 34 aa, Artificial Sequence; identical to SEQ ID NO: 17380
  GFR-binding peptide

SEQ ID NO: 74599 - protein, 38 aa, Artificial Sequence; identical to SEQ ID NO: 17382
  GFR-binding peptide
  MOD_RES (1)..(3)..(37): Xaa is C or S

SEQ ID NO: 74600 - protein, 33 aa, Artificial Sequence
  GFR-binding peptide
  MOD_RES (12)..(13)..(14)..(15)..(16): Xaa is A or G
  MOD_RES (17)..(18)..(19)..(20): Xaa is A or G or is absent
RDVVMGSMEGLXXXXXXXXXMIQMTINSMKTPT

SEQ ID NO: 74601 - protein, 39 aa, Artificial Sequence; identical to SEQ ID NO: 17386
  GFR-binding peptide
  MOD_RES (33)..(33): Xaa is C or S
  MOD_RES (11)..(12)..(13)..(14)..(15): Xaa is A or G
  MOD_RES (16)..(17)..(18)..(19): Xaa is A or G or is absent

SEQ ID NO: 74602 - protein, 38 aa, Artificial Sequence; identical to SEQ ID NO: 17387
  GFR-binding peptide
  MOD_RES (1)..(35): Xaa is C or S
  MOD_RES (13)..(14)..(15)..(16)..(17): Xaa is A or G
  MOD_RES (18)..(19)..(20)..(21): Xaa is A or G or is absent

SEQ ID NO: 74603 - protein, 40 aa, Artificial Sequence
  GFR-binding peptide
  MOD_RES (1)..(34)..(35): Xaa is C or S
  MOD_RES (12)..(13)..(14)..(15)..(16): Xaa is A or G
  MOD_RES (17)..(18)..(19)..(20): Xaa is A or G or is absent
XSRVIMSMEGLXXXXXXXXXMIQITINSLAQPVXXPAASA

SEQ ID NO: 74604 - protein, 40 aa, Artificial Sequence
  GFR-binding peptide
  MOD_RES (1)..(3)..(36)..(37): Xaa is C or S
  MOD_RES (14)..(15)..(16)..(17)..(18): Xaa is A or G
  MOD_RES (19)..(20)..(21)..(22): Xaa is A or G or is absent
XKXSRVIMSMEGLXXXXXXXXXMIQITINSLAQPVXXPAA

SEQ ID NO: 74605 - protein, 35 aa, Artificial Sequence; identical to SEQ ID NO: 17389
  GFR-binding peptide
  MOD_RES (33)..(33): Xaa is C or S
  MOD_RES (11)..(12)..(13)..(14)..(15): Xaa is A or G
  MOD_RES (16)..(17)..(18)..(19): Xaa is A or G or is absent

SEQ ID NO: 74606 - protein, 35 aa, Artificial Sequence; identical to SEQ ID NO: 46840
  GFR-binding peptide
  MOD_RES (31)..(32): Xaa is C or S

SEQ ID NO: 74607 - protein, 40 aa, Artificial Sequence; identical to SEQ ID NO: 46841
  GFR-binding peptide
  MOD_RES (1)..(3)..(36)..(37): Xaa is C or S
  MOD_RES (14)..(15)..(16)..(17)..(18): Xaa is A or G
  MOD_RES (19)..(20)..(21)..(22): Xaa is A or G or is absent

SEQ ID NO: 74608 - protein, 35 aa, Artificial Sequence; identical to SEQ ID NO: 46843
  GFR-binding peptide
  MOD_RES (1)..(3)..(34)..(35): Xaa is C or S

SEQ ID NO: 74609 - protein, 40 aa, Artificial Sequence; identical to SEQ ID NO: 17392
  GFR-binding peptide
  MOD_RES (1)..(38): Xaa is C or S

SEQ ID NO: 74610 - protein, 41 aa, Artificial Sequence
  GFR-binding peptide
  MOD_RES (2)..(4)..(36)..(37): Xaa is C or S
HXGXSRVVMNSMEGLIVNSSDDMIQVTINSLKTPAXXPKPV

SEQ ID NO: 74611 - protein, 33 aa, Artificial Sequence
  GFR-binding peptide
  MOD_RES (1)..(33): Xaa is C or S
XSEVVMDSMEGIVVNNASDMIQITINSLRTPVX

SEQ ID NO: 74612 - protein, 39 aa, Artificial Sequence
  GFR-binding peptide
  MOD_RES (2)..(4)..(35)..(36): Xaa is C or S
LXGXEEVIMSMEGLLLVRGNDMIQMTINSTKVPAXXTSP

SEQ ID NO: 74613 - protein, 40 aa, Artificial Sequence; identical to SEQ ID NO: 46851
  GFR-binding peptide
  MOD_RES (2)..(4)..(35)..(36): Xaa is C or S

SEQ ID NO: 74614 - protein, 35 aa, Artificial Sequence
  GFR-binding peptide
  MOD_RES (1)..(33)..(34): Xaa is C or S
XSRVVMNSMEGLIVNSSDDMIQVTINSLKTPAXXP

SEQ ID NO: 74615 - protein, 39 aa, Artificial Sequence
  GFR-binding peptide
  MOD_RES (1)..(3)..(36)..(37): Xaa is C or S
  MOD_RES (14)..(15)..(16)..(17)..(18): Xaa is A or G
  MOD_RES (19)..(20)..(21)..(22): Xaa is A or G or is absent
XGXEEVIMSMEGLXXXXXXXXXMIQMTINSTKVPAXXTS

SEQ ID NO: 74616 - protein, 39 aa, Artificial Sequence
  GFR-binding peptide
  MOD_RES (1)..(35)..(36): Xaa is C or S
  MOD_RES (13)..(14)..(15)..(16)..(17): Xaa is A or G
  MOD_RES (18)..(19)..(20)..(21): Xaa is A or G or is absent
XAEVVMDSMEGIXXXXXXXXXMIQITINSLRAPVXXSAP

SEQ ID NO: 74617 - protein, 38 aa, Artificial Sequence; identical to SEQ ID NO: 17396
  GFR-binding peptide
  MOD_RES (36)..(36): Xaa is C or S
  MOD_RES (12)..(13)..(14)..(15)..(16): Xaa is A or G
  MOD_RES (17)..(18)..(19)..(20): Xaa is A or G or is absent

SEQ ID NO: 74618 - protein, 37 aa, Artificial Sequence
  GFR-binding peptide
  MOD_RES (2)..(4)..(36)..(37): Xaa is C or S
RXGXSEVVMDSMEGLVVNNASDMIQITINSLRTPVXX

SEQ ID NO: 74619 - protein, 37 aa, Artificial Sequence
  GFR-binding peptide
  MOD_RES (1)..(3)..(36)..(37): Xaa is C or S
  MOD_RES (14)..(15)..(16)..(17)..(18): Xaa is A or G
  MOD_RES (19)..(20)..(21)..(22): Xaa is A or G or is absent
XKXSKVVMSMEGLXXXXXXXXXMIQITINSLDQPVXX

SEQ ID NO: 74620 - protein, 39 aa, Artificial Sequence
  GFR-binding peptide
  MOD_RES (1)..(35)..(36): Xaa is C or S
  MOD_RES (13)..(14)..(15)..(16)..(17): Xaa is A or G
  MOD_RES (18)..(19)..(20)..(21): Xaa is A or G or is absent
XSEVVMDSMEGLXXXXXXXXXMIQITINSLRTPVXXTPP

SEQ ID NO: 74621 - protein, 37 aa, Artificial Sequence
  GFR-binding peptide
  MOD_RES (2)..(4): Xaa is C or S
  MOD_RES (16)..(17)..(18)..(19)..(20): Xaa is A or G
  MOD_RES (21)..(22)..(23)..(24): Xaa is A or G or is absent
RXGXAEVVMDSMEGLXXXXXXXXXMIQITINSLRAPV

SEQ ID NO: 74622 - protein, 40 aa, Artificial Sequence
  GFR-binding peptide
  MOD_RES (1)..(3)..(37)..(38): Xaa is C or S
  MOD_RES (15)..(16)..(17)..(18)..(19): Xaa is A or G
  MOD_RES (20)..(21)..(22)..(23): Xaa is A or G or is absent
XGXSEVVMDSMEGLXXXXXXXXXMIQITINSLRTPVXXTP

SEQ ID NO: 74623 - protein, 37 aa, Artificial Sequence; identical to SEQ ID NO: 49426
  GFR-binding peptide
  MOD_RES (2)..(4)..(37): Xaa is C or S
  MOD_RES (15)..(16)..(17)..(18)..(19): Xaa is A or G
  MOD_RES (20)..(21)..(22)..(23): Xaa is A or G or is absent

SEQ ID NO: 74624 - protein, 35 aa, Artificial Sequence; identical to SEQ ID NO: 46861
  GFR-binding peptide
  MOD_RES (1)..(3)..(34)..(35): Xaa is C or S

SEQ ID NO: 74625 - protein, 40 aa, Artificial Sequence
  GFR-binding peptide
  MOD_RES (2)..(4)..(38)..(39): Xaa is C or S
  MOD_RES (16)..(17)..(18)..(19)..(20): Xaa is A or G
  MOD_RES (21)..(22)..(23)..(24): Xaa is A or G or is absent
SXGXRDVVMGSMEGLXXXXXXXXXMIQMTINSMKTPTXXP

SEQ ID NO: 74626 - protein, 36 aa, Artificial Sequence; identical to SEQ ID NO: 17399
  GFR-binding peptide
  MOD_RES (1)..(3): Xaa is C or S
  MOD_RES (15)..(16)..(17)..(18)..(19): Xaa is A or G
  MOD_RES (20)..(21)..(22)..(23): Xaa is A or G or is absent

SEQ ID NO: 74627 - protein, 36 aa, Artificial Sequence
  GFR-binding peptide
  MOD_RES (31)..(32): Xaa is C or S
RVVMNSMEGLIVNSSDDMIQVTINSLKTPAXXPKPV

SEQ ID NO: 74628 - protein, 36 aa, Artificial Sequence; identical to SEQ ID NO: 17400
  GFR-binding peptide
  MOD_RES (34)..(34): Xaa is C or S
  MOD_RES (12)..(13)..(14)..(15)..(16): Xaa is A or G
  MOD_RES (17)..(18)..(19)..(20): Xaa is A or G or is absent

SEQ ID NO: 74629 - protein, 35 aa, Artificial Sequence; identical to SEQ ID NO: 46865
  GFR-binding peptide
  MOD_RES (1)..(32)..(33): Xaa is C or S

SEQ ID NO: 74630 - protein, 39 aa, Artificial Sequence
  GFR-binding peptide
  MOD_RES (2)..(36)..(37): Xaa is C or S
  MOD_RES (14)..(15)..(16)..(17)..(18): Xaa is A or G
  MOD_RES (19)..(20)..(21)..(22): Xaa is A or G or is absent
GXSRVVMNSMEGLXXXXXXXXXMIQVTINSLKTPAXXPK

SEQ ID NO: 74631 - protein, 38 aa, Artificial Sequence
  GFR-binding peptide
  MOD_RES (32)..(33): Xaa is C or S
AEVVMDSMEGIVVNNAADMIQITINSLRAPVXXSAPAA

SEQ ID NO: 74632 - protein, 41 aa, Artificial Sequence; identical to SEQ ID NO: 49435
  GFR-binding peptide
  MOD_RES (2)..(35)..(36): Xaa is C or S
  MOD_RES (13)..(14)..(15)..(16)..(17): Xaa is A or G
  MOD_RES (18)..(19)..(20)..(21): Xaa is A or G or is absent

SEQ ID NO: 74633 - protein, 36 aa, Artificial Sequence
  GFR-binding peptide
  MOD_RES (31)..(32): Xaa is C or S
EVVMDSMEGIVVNNAADMIQITINSLRAPVXXSAPA

SEQ ID NO: 74634 - protein, 33 aa, Artificial Sequence
  GFR-binding peptide
  MOD_RES (32)..(33): Xaa is C or S
SRVVMNSMEGLIVNSSDDMIQVTINSLKTPAXX

SEQ ID NO: 74635 - protein, 40 aa, Artificial Sequence
  GFR-binding peptide
  MOD_RES (1)..(3)..(34)..(35): Xaa is C or S
XKXSRVIMSMEGLVKPKRGVMIQITINSLAQPVXXPAASA

SEQ ID NO: 74636 - protein, 35 aa, Artificial Sequence
  GFR-binding peptide
  MOD_RES (2)..(4): Xaa is C or S
RXGXSEVVMDSMEGLVVNNASDMIQITINSLRTPV

SEQ ID NO: 74637 - protein, 41 aa, Artificial Sequence; identical to SEQ ID NO: 17404
  GFR-binding peptide
  MOD_RES (37)..(37): Xaa is C or S

SEQ ID NO: 74638 - protein, 37 aa, Artificial Sequence; identical to SEQ ID NO: 17405
  GFR-binding peptide
  MOD_RES (2)..(36): Xaa is C or S

SEQ ID NO: 74639 - protein, 33 aa, Artificial Sequence
  GFR-binding peptide
  MOD_RES (31)..(32): Xaa is C or S
DVVMGSMEGLIIQQKDNMIQMTINSMKTPTXXP

SEQ ID NO: 74640 - protein, 39 aa, Artificial Sequence; identical to SEQ ID NO: 17408
  GFR-binding peptide
  MOD_RES (1)..(3): Xaa is C or S

SEQ ID NO: 74641 - protein, 37 aa, Artificial Sequence
  GFR-binding peptide
  MOD_RES (34)..(35): Xaa is C or S
  MOD_RES (12)..(13)..(14)..(15)..(16): Xaa is A or G
  MOD_RES (17)..(18)..(19)..(20): Xaa is A or G or is absent
AEVVMDSMEGIXXXXXXXXXMIQITINSLRAPVXXSA

SEQ ID NO: 74642 - protein, 36 aa, Artificial Sequence; identical to SEQ ID NO: 17409
  GFR-binding peptide
  MOD_RES (34)..(34): Xaa is C or S

SEQ ID NO: 74643 - protein, 43 aa, Artificial Sequence; identical to SEQ ID NO: 49454
  GFR-binding peptide
  MOD_RES (2)..(4)..(37)..(38): Xaa is C or S
  MOD_RES (15)..(16)..(17)..(18)..(19): Xaa is A or G
  MOD_RES (20)..(21)..(22)..(23): Xaa is A or G or is absent

SEQ ID NO: 74644 - protein, 36 aa, Artificial Sequence
  GFR-binding peptide
  MOD_RES (33)..(34): Xaa is C or S
  MOD_RES (11)..(12)..(13)..(14)..(15): Xaa is A or G
  MOD_RES (16)..(17)..(18)..(19): Xaa is A or G or is absent
EVVMDSMEGIXXXXXXXXXMIQITINSLRAPVXXSA

SEQ ID NO: 74645 - protein, 40 aa, Artificial Sequence; identical to SEQ ID NO: 17412
  GFR-binding peptide
  MOD_RES (2)..(4)..(38): Xaa is C or S
  MOD_RES (16)..(17)..(18)..(19)..(20): Xaa is A or G
  MOD_RES (21)..(22)..(23)..(24): Xaa is A or G or is absent

SEQ ID NO: 74646 - protein, 43 aa, Artificial Sequence; identical to SEQ ID NO: 17414
  GFR-binding peptide
  MOD_RES (1)..(3)..(40): Xaa is C or S
  MOD_RES (16)..(17)..(18)..(19)..(20): Xaa is A or G
  MOD_RES (21)..(22)..(23)..(24): Xaa is A or G or is absent

SEQ ID NO: 74647 - protein, 39 aa, Artificial Sequence
  GFR-binding peptide
  MOD_RES (1)..(3)..(35)..(36): Xaa is C or S
XGXAEVVMDSMEGLVVNNAADMIQITINSLRAPVXXSAP

SEQ ID NO: 74648 - protein, 41 aa, Artificial Sequence; identical to SEQ ID NO: 46881
  GFR-binding peptide
  MOD_RES (2)..(36)..(37): Xaa is C or S
  MOD_RES (14)..(15)..(16)..(17)..(18): Xaa is A or G
  MOD_RES (19)..(20)..(21)..(22): Xaa is A or G or is absent

SEQ ID NO: 74649 - protein, 34 aa, Artificial Sequence
  GFR-binding peptide
  MOD_RES (31)..(32): Xaa is C or S
DVVMGSMEGIIIQQKDNMIQMTINSMKTPTXXPG

SEQ ID NO: 74650 - protein, 43 aa, Artificial Sequence; identical to SEQ ID NO: 17420
  GFR-binding peptide
  MOD_RES (2)..(4)..(41): Xaa is C or S

SEQ ID NO: 74651 - protein, 37 aa, Artificial Sequence; identical to SEQ ID NO: 17421
  GFR-binding peptide
  MOD_RES (2)..(2): Xaa is C or S

SEQ ID NO: 74652 - protein, 36 aa, Artificial Sequence
  GFR-binding peptide
  MOD_RES (34)..(35): Xaa is C or S
  MOD_RES (12)..(13)..(14)..(15)..(16): Xaa is A or G
  MOD_RES (17)..(18)..(19)..(20): Xaa is A or G or is absent
SRVVMNSMEGLXXXXXXXXXMIQVTINSLKTPAXXP

SEQ ID NO: 74653 - protein, 38 aa, Artificial Sequence; identical to SEQ ID NO: 49474
  GFR-binding peptide
  MOD_RES (1)..(32)..(33): Xaa is C or S

SEQ ID NO: 74654 - protein, 40 aa, Artificial Sequence; identical to SEQ ID NO: 17423
  GFR-binding peptide
  MOD_RES (1)..(38): Xaa is C or S

SEQ ID NO: 74655 - protein, 40 aa, Artificial Sequence
  GFR-binding peptide
  MOD_RES (1)..(3)..(36)..(37): Xaa is C or S
  MOD_RES (14)..(15)..(16)..(17)..(18): Xaa is A or G
  MOD_RES (19)..(20)..(21)..(22): Xaa is A or G or is absent
XKXSKVIMSMEGLXXXXXXXXXMIQITINSLDQSVXXPSA

SEQ ID NO: 74656 - protein, 38 aa, Artificial Sequence; identical to SEQ ID NO: 17424
  GFR-binding peptide
  MOD_RES (2)..(4)..(38): Xaa is C or S
  MOD_RES (16)..(17)..(18)..(19)..(20): Xaa is A or G
  MOD_RES (21)..(22)..(23)..(24): Xaa is A or G or is absent

SEQ ID NO: 74657 - protein, 38 aa, Artificial Sequence; identical to SEQ ID NO: 17425
  GFR-binding peptide
  MOD_RES (33)..(33): Xaa is C or S
  MOD_RES (11)..(12)..(13)..(14)..(15): Xaa is A or G
  MOD_RES (16)..(17)..(18)..(19): Xaa is A or G or is absent

SEQ ID NO: 74658 - protein, 40 aa, Artificial Sequence
  GFR-binding peptide
  MOD_RES (1)..(34)..(35): Xaa is C or S
  MOD_RES (12)..(13)..(14)..(15)..(16): Xaa is A or G
  MOD_RES (17)..(18)..(19)..(20): Xaa is A or G or is absent
XEEVIMSMEGLXXXXXXXXXMIQMTINSTKVPAXXTSPVR

SEQ ID NO: 74659 - protein, 35 aa, Artificial Sequence; identical to SEQ ID NO: 17428
  GFR-binding peptide
  MOD_RES (1)..(1): Xaa is C or S
  MOD_RES (14)..(15)..(16)..(17)..(18): Xaa is A or G
  MOD_RES (19)..(20)..(21)..(22): Xaa is A or G or is absent

SEQ ID NO: 74660 - protein, 39 aa, Artificial Sequence; identical to SEQ ID NO: 17429
  GFR-binding peptide
  MOD_RES (35)..(35): Xaa is C or S

SEQ ID NO: 74661 - protein, 41 aa, Artificial Sequence; identical to SEQ ID NO: 17430
  GFR-binding peptide
  MOD_RES (2)..(36): Xaa is C or S

SEQ ID NO: 74662 - protein, 39 aa, Artificial Sequence
  GFR-binding peptide
  MOD_RES (34)..(35): Xaa is C or S
  MOD_RES (12)..(13)..(14)..(15)..(16): Xaa is A or G
  MOD_RES (17)..(18)..(19)..(20): Xaa is A or G or is absent
RDVVMGSMEGLXXXXXXXXXMIQMTINSMKTPTXXPGAS

SEQ ID NO: 74663 - protein, 32 aa, Artificial Sequence
  GFR-binding peptide
  MOD_RES (31)..(32): Xaa is C or S
DVVMGSMEGIIIQQKDNMIQMTINSMKTPTXX

SEQ ID NO: 74664 - protein, 34 aa, Artificial Sequence
  GFR-binding peptide
  MOD_RES (2)..(33)..(34): Xaa is C or S
KXSRVIMSMEGLVKPKRGVMIQITINSLAQPVXX

SEQ ID NO: 74665 - protein, 38 aa, Artificial Sequence; identical to SEQ ID NO: 17431
  GFR-binding peptide
  MOD_RES (33)..(33): Xaa is C or S

SEQ ID NO: 74666 - protein, 36 aa, Artificial Sequence
  GFR-binding peptide
  MOD_RES (1)..(3)..(35)..(36): Xaa is C or S
XGXRDVVMGSMEGIIIQQKDNMIQMTINSMKTPTXX

SEQ ID NO: 74667 - protein, 40 aa, Artificial Sequence; identical to SEQ ID NO: 17433
  GFR-binding peptide
  MOD_RES (1)..(3)..(40): Xaa is C or S
  MOD_RES (16)..(17)..(18)..(19)..(20): Xaa is A or G
  MOD_RES (21)..(22)..(23)..(24): Xaa is A or G or is absent

SEQ ID NO: 74668 - protein, 31 aa, Artificial Sequence
  GFR-binding peptide
  MOD_RES (31)..(31): Xaa is C or S
DVVMGSMEGIIIQQKDNMIQMTINSMKTPTX

SEQ ID NO: 74669 - protein, 35 aa, Artificial Sequence; identical to SEQ ID NO: 17434
  GFR-binding peptide
  MOD_RES (33)..(33): Xaa is C or S

SEQ ID NO: 74670 - protein, 35 aa, Artificial Sequence; identical to SEQ ID NO: 46914
  GFR-binding peptide
  MOD_RES (33)..(34): Xaa is C or S
  MOD_RES (11)..(12)..(13)..(14)..(15): Xaa is A or G
  MOD_RES (16)..(17)..(18)..(19): Xaa is A or G or is absent

SEQ ID NO: 74671 - protein, 35 aa, Artificial Sequence
  GFR-binding peptide
  MOD_RES (2)..(4)..(35): Xaa is C or S
SXKXSKVVMSMEGLVKPTRGVMIQITINSLDQPVX

SEQ ID NO: 74672 - protein, 36 aa, Artificial Sequence
  GFR-binding peptide
  MOD_RES (1)..(35)..(36): Xaa is C or S
  MOD_RES (13)..(14)..(15)..(16)..(17): Xaa is A or G
  MOD_RES (18)..(19)..(20)..(21): Xaa is A or G or is absent
XRDVVMGSMEGIXXXXXXXXXMIQMTINSMKTPTXX

SEQ ID NO: 74673 - protein, 41 aa, Artificial Sequence; identical to SEQ ID NO: 49494
  GFR-binding peptide
  MOD_RES (2)..(35)..(36): Xaa is C or S
  MOD_RES (13)..(14)..(15)..(16)..(17): Xaa is A or G
  MOD_RES (18)..(19)..(20)..(21): Xaa is A or G or is absent

SEQ ID NO: 74674 - protein, 41 aa, Artificial Sequence
  GFR-binding peptide
  MOD_RES (1)..(3)..(35)..(36): Xaa is C or S
XGXSRVVMNSMEGIIVNSSDDMIQVTINSLKTPAXXPKPVH

SEQ ID NO: 74675 - protein, 37 aa, Artificial Sequence; identical to SEQ ID NO: 17437
  GFR-binding peptide
  MOD_RES (37)..(37): Xaa is C or S

SEQ ID NO: 74676 - protein, 36 aa, Artificial Sequence
  GFR-binding peptide
  MOD_RES (2)..(4): Xaa is C or S
  MOD_RES (15)..(16)..(17)..(18)..(19): Xaa is A or G
  MOD_RES (20)..(21)..(22)..(23): Xaa is A or G or is absent
SXKXSKVVMSMEGLXXXXXXXXXMIQITINSLDQPV

SEQ ID NO: 74677 - protein, 42 aa, Artificial Sequence; identical to SEQ ID NO: 17438
  GFR-binding peptide
  MOD_RES (1)..(3)..(37): Xaa is C or S

SEQ ID NO: 74678 - protein, 38 aa, Artificial Sequence; identical to SEQ ID NO: 17439
  GFR-binding peptide
  MOD_RES (35)..(35): Xaa is C or S

SEQ ID NO: 74679 - protein, 39 aa, Artificial Sequence; identical to SEQ ID NO: 46919
  GFR-binding peptide
  MOD_RES (2)..(4)..(37)..(38): Xaa is C or S
  MOD_RES (15)..(16)..(17)..(18)..(19): Xaa is A or G
  MOD_RES (20)..(21)..(22)..(23): Xaa is A or G or is absent

SEQ ID NO: 74680 - protein, 40 aa, Artificial Sequence; identical to SEQ ID NO: 46920
  GFR-binding peptide
  MOD_RES (2)..(4)..(36)..(37): Xaa is C or S

SEQ ID NO: 74681 - protein, 36 aa, Artificial Sequence
  GFR-binding peptide
  MOD_RES (2)..(4)..(36): Xaa is C or S
SXGXRDVVMGSMEGLIIQQKDNMIQMTINSMKTPTX

SEQ ID NO: 74682 - protein, 39 aa, Artificial Sequence; identical to SEQ ID NO: 17441
  GFR-binding peptide
  MOD_RES (33)..(33): Xaa is C or S
  MOD_RES (11)..(12)..(13)..(14)..(15): Xaa is A or G
  MOD_RES (16)..(17)..(18)..(19): Xaa is A or G or is absent

SEQ ID NO: 74683 - protein, 41 aa, Artificial Sequence; identical to SEQ ID NO: 17442
  GFR-binding peptide
  MOD_RES (2)..(39): Xaa is C or S

SEQ ID NO: 74684 - protein, 36 aa, Artificial Sequence
  GFR-binding peptide
  MOD_RES (1)..(3)..(35)..(36): Xaa is C or S
XGXRDVVMGSMEGLIIQQKDNMIQMTINSMKTPTXX

SEQ ID NO: 74685 - protein, 41 aa, Artificial Sequence; identical to SEQ ID NO: 17443
  GFR-binding peptide
  MOD_RES (1)..(3)..(37): Xaa is C or S

SEQ ID NO: 74686 - protein, 40 aa, Artificial Sequence; identical to SEQ ID NO: 17444
  GFR-binding peptide
  MOD_RES (2)..(4): Xaa is C or S

SEQ ID NO: 74687 - protein, 36 aa, Artificial Sequence
  GFR-binding peptide
  MOD_RES (2)..(33)..(34): Xaa is C or S
KXSRVIMSMEGLVKPKRGVMIQITINSLAQPVXXPA

SEQ ID NO: 74688 - protein, 38 aa, Artificial Sequence
  GFR-binding peptide
  MOD_RES (33)..(34): Xaa is C or S
  MOD_RES (11)..(12)..(13)..(14)..(15): Xaa is A or G
  MOD_RES (16)..(17)..(18)..(19): Xaa is A or G or is absent
EVVMDSMEGLXXXXXXXXXMIQITINSLRAPVXXSAPA

SEQ ID NO: 74689 - protein, 37 aa, Artificial Sequence; identical to SEQ ID NO: 17445
  GFR-binding peptide
  MOD_RES (1)..(1): Xaa is C or S

SEQ ID NO: 74690 - protein, 36 aa, Artificial Sequence
  GFR-binding peptide
  MOD_RES (1)..(3): Xaa is C or S
  MOD_RES (15)..(16)..(17)..(18)..(19): Xaa is A or G
  MOD_RES (20)..(21)..(22)..(23): Xaa is A or G or is absent
XGXRDVVMGSMEGIXXXXXXXXXMIQMTINSMKTPT

SEQ ID NO: 74691 - protein, 35 aa, Artificial Sequence
  GFR-binding peptide
  MOD_RES (1)..(3)..(35): Xaa is C or S
XGXSEVVMDSMEGLVVNNASDMIQITINSLRTPVX

SEQ ID NO: 74692 - protein, 36 aa, Artificial Sequence; identical to SEQ ID NO: 17448
  GFR-binding peptide
  MOD_RES (36)..(36): Xaa is C or S
  MOD_RES (12)..(13)..(14)..(15)..(16): Xaa is A or G
  MOD_RES (17)..(18)..(19)..(20): Xaa is A or G or is absent

SEQ ID NO: 74693 - protein, 35 aa, Artificial Sequence
  GFR-binding peptide
  MOD_RES (1)..(34)..(35): Xaa is C or S
  MOD_RES (12)..(13)..(14)..(15)..(16): Xaa is A or G
  MOD_RES (17)..(18)..(19)..(20): Xaa is A or G or is absent
XSKVIMSMEGLXXXXXXXXXMIQITINSLDQSVXX

SEQ ID NO: 74694 - protein, 32 aa, Artificial Sequence; identical to SEQ ID NO: 17450
  GFR-binding peptide
  MOD_RES (11)..(12)..(13)..(14)..(15): Xaa is A or G
  MOD_RES (16)..(17)..(18)..(19): Xaa is A or G or is absent

SEQ ID NO: 74695 - protein, 36 aa, Artificial Sequence
  GFR-binding peptide
  MOD_RES (1)..(3)..(34)..(35): Xaa is C or S
XKXSKVIMSMEGLIKPTKGIMIQITINSLDQSVXXP

SEQ ID NO: 74696 - protein, 33 aa, Artificial Sequence; identical to SEQ ID NO: 49512
  GFR-binding peptide
  MOD_RES (31)..(32): Xaa is C or S

SEQ ID NO: 74697 - protein, 41 aa, Artificial Sequence; identical to SEQ ID NO: 17451
  GFR-binding peptide
  MOD_RES (2)..(4)..(38): Xaa is C or S

SEQ ID NO: 74698 - protein, 38 aa, Artificial Sequence
  GFR-binding peptide
  MOD_RES (2)..(34)..(35): Xaa is C or S
GXAEVVMDSMEGLVVNNAADMIQITINSLRAPVXXSAP

SEQ ID NO: 74699 - protein, 33 aa, Artificial Sequence
  GFR-binding peptide
  MOD_RES (1)..(3): Xaa is C or S
XGXEEVIMSMEGLLLVRGNDMIQMTINSTKVPA

SEQ ID NO: 74700 - protein, 42 aa, Artificial Sequence; identical to SEQ ID NO: 17452
  GFR-binding peptide
  MOD_RES (1)..(3)..(40): Xaa is C or S

SEQ ID NO: 74701 - protein, 36 aa, Artificial Sequence
  GFR-binding peptide
  MOD_RES (31)..(32): Xaa is C or S
SKVVMSMEGLVKPTRGVMIQITINSLDQPVXXPSAS

SEQ ID NO: 74702 - protein, 37 aa, Artificial Sequence; identical to SEQ ID NO: 17453
  GFR-binding peptide
  MOD_RES (1)..(35): Xaa is C or S

SEQ ID NO: 74703 - protein, 38 aa, Artificial Sequence; identical to SEQ ID NO: 49519
  GFR-binding peptide
  MOD_RES (2)..(4)..(37)..(38): Xaa is C or S
  MOD_RES (15)..(16)..(17)..(18)..(19): Xaa is A or G
  MOD_RES (20)..(21)..(22)..(23): Xaa is A or G or is absent

SEQ ID NO: 74704 - protein, 32 aa, Artificial Sequence
  GFR-binding peptide
  MOD_RES (11)..(12)..(13)..(14)..(15): Xaa is A or G
  MOD_RES (16)..(17)..(18)..(19): Xaa is A or G or is absent
DVVMGSMEGIXXXXXXXXXMIQMTINSMKTPT

SEQ ID NO: 74705 - protein, 40 aa, Artificial Sequence
  GFR-binding peptide
  MOD_RES (1)..(35)..(36): Xaa is C or S
  MOD_RES (13)..(14)..(15)..(16)..(17): Xaa is A or G
  MOD_RES (18)..(19)..(20)..(21): Xaa is A or G or is absent
XAEVVMDSMEGLXXXXXXXXXMIQITINSLRAPVXXSAPA

SEQ ID NO: 74706 - protein, 39 aa, Artificial Sequence; identical to SEQ ID NO: 17454
  GFR-binding peptide
  MOD_RES (35)..(35): Xaa is C or S
  MOD_RES (11)..(12)..(13)..(14)..(15): Xaa is A or G
  MOD_RES (16)..(17)..(18)..(19): Xaa is A or G or is absent

SEQ ID NO: 74707 - protein, 34 aa, Artificial Sequence
  GFR-binding peptide
  MOD_RES (33)..(34): Xaa is C or S
  MOD_RES (11)..(12)..(13)..(14)..(15): Xaa is A or G
  MOD_RES (16)..(17)..(18)..(19): Xaa is A or G or is absent
EEVIMSMEGIXXXXXXXXXMIQMTINSTKVPAXX

SEQ ID NO: 74708 - protein, 40 aa, Artificial Sequence
  GFR-binding peptide
  MOD_RES (1)..(35)..(36): Xaa is C or S
  MOD_RES (13)..(14)..(15)..(16)..(17): Xaa is A or G
  MOD_RES (18)..(19)..(20)..(21): Xaa is A or G or is absent
XAEVVMDSMEGIXXXXXXXXXMIQITINSLRAPVXXSAPA

SEQ ID NO: 74709 - protein, 39 aa, Artificial Sequence
  GFR-binding peptide
  MOD_RES (33)..(34): Xaa is C or S
  MOD_RES (11)..(12)..(13)..(14)..(15): Xaa is A or G
  MOD_RES (16)..(17)..(18)..(19): Xaa is A or G or is absent
DVVMGSMEGIXXXXXXXXXMIQMTINSMKTPTXXPGASG

SEQ ID NO: 74710 - protein, 39 aa, Artificial Sequence; identical to SEQ ID NO: 17457
  GFR-binding peptide
  MOD_RES (36)..(36): Xaa is C or S

SEQ ID NO: 74711 - protein, 35 aa, Artificial Sequence; identical to SEQ ID NO: 46941
  GFR-binding peptide
  MOD_RES (2)..(4)..(35): Xaa is C or S

SEQ ID NO: 74712 - protein, 42 aa, Artificial Sequence; identical to SEQ ID NO: 17460
  GFR-binding peptide
  MOD_RES (2)..(4)..(41): Xaa is C or S

SEQ ID NO: 74713 - protein, 44 aa, Artificial Sequence; identical to SEQ ID NO: 17461
  GFR-binding peptide
  MOD_RES (2)..(4)..(38): Xaa is C or S
  MOD_RES (16)..(17)..(18)..(19)..(20): Xaa is A or G
  MOD_RES (21)..(22)..(23)..(24): Xaa is A or G or is absent

SEQ ID NO: 74714 - protein, 35 aa, Artificial Sequence; identical to SEQ ID NO: 17462
  GFR-binding peptide
  MOD_RES (33)..(33): Xaa is C or S

SEQ ID NO: 74715 - protein, 42 aa, Artificial Sequence
  GFR-binding peptide
  MOD_RES (2)..(36)..(37): Xaa is C or S
  MOD_RES (14)..(15)..(16)..(17)..(18): Xaa is A or G
  MOD_RES (19)..(20)..(21)..(22): Xaa is A or G or is absent
GXSRVVMNSMEGLXXXXXXXXXMIQVTINSLKTPAXXPKPVH

SEQ ID NO: 74716 - protein, 35 aa, Artificial Sequence
  GFR-binding peptide
  MOD_RES (31)..(32): Xaa is C or S
RVVMNSMEGLIVNSSDDMIQVTINSLKTPAXXPKP

SEQ ID NO: 74717 - protein, 40 aa, Artificial Sequence
  GFR-binding peptide
  MOD_RES (2)..(34)..(35): Xaa is C or S
GXSEVVMDSMEGLVVNNASDMIQITINSLRTPVXXTPPTS

SEQ ID NO: 74718 - protein, 36 aa, Artificial Sequence; identical to SEQ ID NO: 49538
  GFR-binding peptide
  MOD_RES (2)..(33)..(34): Xaa is C or S

SEQ ID NO: 74719 - protein, 41 aa, Artificial Sequence; identical to SEQ ID NO: 46950
  GFR-binding peptide
  MOD_RES (2)..(4)..(37)..(38): Xaa is C or S
  MOD_RES (15)..(16)..(17)..(18)..(19): Xaa is A or G
  MOD_RES (20)..(21)..(22)..(23): Xaa is A or G or is absent

SEQ ID NO: 74720 - protein, 42 aa, Artificial Sequence; identical to SEQ ID NO: 17464
  GFR-binding peptide
  MOD_RES (2)..(39): Xaa is C or S
  MOD_RES (15)..(16)..(17)..(18)..(19): Xaa is A or G
  MOD_RES (20)..(21)..(22)..(23): Xaa is A or G or is absent

SEQ ID NO: 74721 - protein, 37 aa, Artificial Sequence; identical to SEQ ID NO: 17466
  GFR-binding peptide
  MOD_RES (1)..(35): Xaa is C or S
  MOD_RES (13)..(14)..(15)..(16)..(17): Xaa is A or G
  MOD_RES (18)..(19)..(20)..(21): Xaa is A or G or is absent

SEQ ID NO: 74722 - protein, 37 aa, Artificial Sequence; identical to SEQ ID NO: 17467
  GFR-binding peptide
  MOD_RES (1)..(1): Xaa is C or S

SEQ ID NO: 74723 - protein, 42 aa, Artificial Sequence
  GFR-binding peptide
  MOD_RES (2)..(4)..(38)..(39): Xaa is C or S
  MOD_RES (16)..(17)..(18)..(19)..(20): Xaa is A or G
  MOD_RES (21)..(22)..(23)..(24): Xaa is A or G or is absent
SXGXRDVVMGSMEGLXXXXXXXXXMIQMTINSMKTPTXXPGA

SEQ ID NO: 74724 - protein, 37 aa, Artificial Sequence; identical to SEQ ID NO: 17468
  GFR-binding peptide
  MOD_RES (1)..(35): Xaa is C or S
  MOD_RES (13)..(14)..(15)..(16)..(17): Xaa is A or G
  MOD_RES (18)..(19)..(20)..(21): Xaa is A or G or is absent

SEQ ID NO: 74725 - protein, 33 aa, Artificial Sequence; identical to SEQ ID NO: 17469
  GFR-binding peptide
  MOD_RES (33)..(33): Xaa is C or S

SEQ ID NO: 74726 - protein, 39 aa, Artificial Sequence; identical to SEQ ID NO: 46962
  GFR-binding peptide
  MOD_RES (1)..(3)..(36)..(37): Xaa is C or S
  MOD_RES (14)..(15)..(16)..(17)..(18): Xaa is A or G
  MOD_RES (19)..(20)..(21)..(22): Xaa is A or G or is absent

SEQ ID NO: 74727 - protein, 38 aa, Artificial Sequence; identical to SEQ ID NO: 17471
  GFR-binding peptide
  MOD_RES (33)..(33): Xaa is C or S

SEQ ID NO: 74728 - protein, 34 aa, Artificial Sequence
  GFR-binding peptide
  MOD_RES (34)..(34): Xaa is C or S
  MOD_RES (12)..(13)..(14)..(15)..(16): Xaa is A or G
  MOD_RES (17)..(18)..(19)..(20): Xaa is A or G or is absent
SRVVMNSMEGLXXXXXXXXXMIQVTINSLKTPAX

SEQ ID NO: 74729 - protein, 40 aa, Artificial Sequence; identical to SEQ ID NO: 46967
  GFR-binding peptide
  MOD_RES (2)..(4)..(37)..(38): Xaa is C or S
  MOD_RES (15)..(16)..(17)..(18)..(19): Xaa is A or G
  MOD_RES (20)..(21)..(22)..(23): Xaa is A or G or is absent

SEQ ID NO: 74730 - protein, 39 aa, Artificial Sequence
  GFR-binding peptide
  MOD_RES (2)..(33)..(34): Xaa is C or S
GXEEVIMSMEGLLLVRGNDMIQMTINSTKVPAXXTSPVR

SEQ ID NO: 74731 - protein, 37 aa, Artificial Sequence
  GFR-binding peptide
  MOD_RES (31)..(32): Xaa is C or S
SRVIMSMEGLVKPKRGVMIQITINSLAQPVXXPAASA

SEQ ID NO: 74732 - protein, 42 aa, Artificial Sequence; identical to SEQ ID NO: 46974
  GFR-binding peptide
  MOD_RES (2)..(4)..(37)..(38): Xaa is C or S
  MOD_RES (15)..(16)..(17)..(18)..(19): Xaa is A or G
  MOD_RES (20)..(21)..(22)..(23): Xaa is A or G or is absent

SEQ ID NO: 74733 - protein, 35 aa, Artificial Sequence
  GFR-binding peptide
  MOD_RES (33)..(34): Xaa is C or S
  MOD_RES (11)..(12)..(13)..(14)..(15): Xaa is A or G
  MOD_RES (16)..(17)..(18)..(19): Xaa is A or G or is absent
SKVVMSMEGLXXXXXXXXXMIQITINSLDQPVXXP

SEQ ID NO: 74734 - protein, 36 aa, Artificial Sequence
  GFR-binding peptide
  MOD_RES (1)..(3)..(35)..(36): Xaa is C or S
XGXSEVVMDSMEGIVVNNASDMIQITINSLRTPVXX

SEQ ID NO: 74735 - protein, 39 aa, Artificial Sequence; identical to SEQ ID NO: 17478
  GFR-binding peptide
  MOD_RES (2)..(39): Xaa is C or S

SEQ ID NO: 74736 - protein, 37 aa, Artificial Sequence; identical to SEQ ID NO: 17479
  GFR-binding peptide
  MOD_RES (1)..(35): Xaa is C or S

SEQ ID NO: 74737 - protein, 43 aa, Artificial Sequence; identical to SEQ ID NO: 17480
  GFR-binding peptide
  MOD_RES (2)..(4)..(41): Xaa is C or S

SEQ ID NO: 74738 - protein, 33 aa, Artificial Sequence; identical to SEQ ID NO: 17482
  GFR-binding peptide
  MOD_RES (12)..(13)..(14)..(15)..(16): Xaa is A or G
  MOD_RES (17)..(18)..(19)..(20): Xaa is A or G or is absent

SEQ ID NO: 74739 - protein, 34 aa, Artificial Sequence
  GFR-binding peptide
  MOD_RES (31)..(32): Xaa is C or S
EVVMDSMEGIVVNNASDMIQITINSLRTPVXXTP

SEQ ID NO: 74740 - protein, 42 aa, Artificial Sequence
  GFR-binding peptide
  MOD_RES (2)..(4)..(36)..(37): Xaa is C or S
RXGXAEVVMDSMEGIVVNNAADMIQITINSLRAPVXXSAPAA

SEQ ID NO: 74741 - protein, 39 aa, Artificial Sequence
  GFR-binding peptide
  MOD_RES (2)..(33)..(34): Xaa is C or S
GXEEVIMSMEGILLVRGNDMIQMTINSTKVPAXXTSPVR

SEQ ID NO: 74742 - protein, 39 aa, Artificial Sequence
  GFR-binding peptide
  MOD_RES (33)..(34): Xaa is C or S
  MOD_RES (11)..(12)..(13)..(14)..(15): Xaa is A or G
  MOD_RES (16)..(17)..(18)..(19): Xaa is A or G or is absent
SKVVMSMEGLXXXXXXXXXMIQITINSLDQPVXXPSASA

SEQ ID NO: 74743 - protein, 38 aa, Artificial Sequence; identical to SEQ ID NO: 17485
  GFR-binding peptide
  MOD_RES (2)..(4)..(38): Xaa is C or S

SEQ ID NO: 74744 - protein, 37 aa, Artificial Sequence
  GFR-binding peptide
  MOD_RES (32)..(33): Xaa is C or S
SEVVMDSMEGIVVNNASDMIQITINSLRTPVXXTPPT

SEQ ID NO: 74745 - protein, 39 aa, Artificial Sequence; identical to SEQ ID NO: 17486
  GFR-binding peptide
  MOD_RES (36)..(36): Xaa is C or S

SEQ ID NO: 74746 - protein, 39 aa, Artificial Sequence; identical to SEQ ID NO: 17487
  GFR-binding peptide
  MOD_RES (1)..(38): Xaa is C or S
  MOD_RES (14)..(15)..(16)..(17)..(18): Xaa is A or G
  MOD_RES (19)..(20)..(21)..(22): Xaa is A or G or is absent

SEQ ID NO: 74747 - protein, 35 aa, Artificial Sequence; identical to SEQ ID NO: 49585
  GFR-binding peptide
  MOD_RES (1)..(35): Xaa is C or S
  MOD_RES (13)..(14)..(15)..(16)..(17): Xaa is A or G
  MOD_RES (18)..(19)..(20)..(21): Xaa is A or G or is absent

SEQ ID NO: 74748 - protein, 37 aa, Artificial Sequence
  GFR-binding peptide
  MOD_RES (2)..(4)..(37): Xaa is C or S
  MOD_RES (15)..(16)..(17)..(18)..(19): Xaa is A or G
  MOD_RES (20)..(21)..(22)..(23): Xaa is A or G or is absent
LXGXEEVIMSMEGLXXXXXXXXXMIQMTINSTKVPAX

SEQ ID NO: 74749 - protein, 36 aa, Artificial Sequence
  GFR-binding peptide
  MOD_RES (2)..(34)..(35): Xaa is C or S
GXAEVVMDSMEGLVVNNAADMIQITINSLRAPVXXS

SEQ ID NO: 74750 - protein, 35 aa, Artificial Sequence
  GFR-binding peptide
  MOD_RES (1)..(35): Xaa is C or S
  MOD_RES (13)..(14)..(15)..(16)..(17): Xaa is A or G
  MOD_RES (18)..(19)..(20)..(21): Xaa is A or G or is absent
XSRVVMNSMEGLXXXXXXXXXMIQVTINSLKTPAX

SEQ ID NO: 74751 - protein, 38 aa, Artificial Sequence
  GFR-binding peptide
  MOD_RES (1)..(34)..(35): Xaa is C or S
  MOD_RES (12)..(13)..(14)..(15)..(16): Xaa is A or G
  MOD_RES (17)..(18)..(19)..(20): Xaa is A or G or is absent
XEEVIMSMEGIXXXXXXXXXMIQMTINSTKVPAXXTSP

SEQ ID NO: 74752 - protein, 42 aa, Artificial Sequence
  GFR-binding peptide
  MOD_RES (2)..(4)..(38)..(39): Xaa is C or S
  MOD_RES (16)..(17)..(18)..(19)..(20): Xaa is A or G
  MOD_RES (21)..(22)..(23)..(24): Xaa is A or G or is absent
SXGXRDVVMGSMEGIXXXXXXXXXMIQMTINSMKTPTXXPGA

SEQ ID NO: 74753 - protein, 31 aa, Artificial Sequence
  GFR-binding peptide
  MOD_RES (31)..(31): Xaa is C or S
RVVMNSMEGLIVNSSDDMIQVTINSLKTPAX

SEQ ID NO: 74754 - protein, 38 aa, Artificial Sequence; identical to SEQ ID NO: 17490
  GFR-binding peptide
  MOD_RES (2)..(2): Xaa is C or S

SEQ ID NO: 74755 - protein, 36 aa, Artificial Sequence; identical to SEQ ID NO: 17491
  GFR-binding peptide
  MOD_RES (2)..(36): Xaa is C or S

SEQ ID NO: 74756 - protein, 38 aa, Artificial Sequence
  GFR-binding peptide
  MOD_RES (33)..(34): Xaa is C or S
  MOD_RES (11)..(12)..(13)..(14)..(15): Xaa is A or G
  MOD_RES (16)..(17)..(18)..(19): Xaa is A or G or is absent
EEVIMSMEGIXXXXXXXXXMIQMTINSTKVPAXXTSPV

SEQ ID NO: 74757 - protein, 39 aa, Artificial Sequence
  GFR-binding peptide
  MOD_RES (33)..(34): Xaa is C or S
  MOD_RES (11)..(12)..(13)..(14)..(15): Xaa is A or G
  MOD_RES (16)..(17)..(18)..(19): Xaa is A or G or is absent
EVVMDSMEGIXXXXXXXXXMIQITINSLRAPVXXSAPAA

SEQ ID NO: 74758 - protein, 40 aa, Artificial Sequence; identical to SEQ ID NO: 46995
  GFR-binding peptide
  MOD_RES (1)..(3)..(37)..(38): Xaa is C or S
  MOD_RES (15)..(16)..(17)..(18)..(19): Xaa is A or G
  MOD_RES (20)..(21)..(22)..(23): Xaa is A or G or is absent

SEQ ID NO: 74759 - protein, 37 aa, Artificial Sequence; identical to SEQ ID NO: 17493
  GFR-binding peptide
  MOD_RES (2)..(36): Xaa is C or S

SEQ ID NO: 74760 - protein, 35 aa, Artificial Sequence
  GFR-binding peptide
  MOD_RES (2)..(2): Xaa is C or S
  MOD_RES (14)..(15)..(16)..(17)..(18): Xaa is A or G
  MOD_RES (19)..(20)..(21)..(22): Xaa is A or G or is absent
GXRDVVMGSMEGIXXXXXXXXXMIQMTINSMKTPT

SEQ ID NO: 74761 - protein, 40 aa, Artificial Sequence; identical to SEQ ID NO: 17495
  GFR-binding peptide
  MOD_RES (1)..(38): Xaa is C or S

SEQ ID NO: 74762 - protein, 42 aa, Artificial Sequence; identical to SEQ ID NO: 17496
  GFR-binding peptide
  MOD_RES (1)..(3)..(37): Xaa is C or S

SEQ ID NO: 74763 - protein, 32 aa, Artificial Sequence; identical to SEQ ID NO: 49595
  GFR-binding peptide
  MOD_RES (31)..(32): Xaa is C or S

SEQ ID NO: 74764 - protein, 42 aa, Artificial Sequence
  GFR-binding peptide
  MOD_RES (1)..(3)..(36)..(37): Xaa is C or S
  MOD_RES (14)..(15)..(16)..(17)..(18): Xaa is A or G
  MOD_RES (19)..(20)..(21)..(22): Xaa is A or G or is absent
XKXSKVIMSMEGLXXXXXXXXXMIQITINSLDQSVXXPSASA

SEQ ID NO: 74765 - protein, 37 aa, Artificial Sequence; identical to SEQ ID NO: 17497
  GFR-binding peptide
  MOD_RES (1)..(3)..(37): Xaa is C or S

SEQ ID NO: 74766 - protein, 36 aa, Artificial Sequence; identical to SEQ ID NO: 49597
  GFR-binding peptide
  MOD_RES (32)..(33): Xaa is C or S

SEQ ID NO: 74767 - protein, 36 aa, Artificial Sequence
  GFR-binding peptide
  MOD_RES (31)..(32): Xaa is C or S
EVVMDSMEGLVVNNASDMIQITINSLRTPVXXTPPT

SEQ ID NO: 74768 - protein, 32 aa, Artificial Sequence
  GFR-binding peptide
  MOD_RES (32)..(32): Xaa is C or S
RDVVMGSMEGLIIQQKDNMIQMTINSMKTPTX

SEQ ID NO: 74769 - protein, 33 aa, Artificial Sequence; identical to SEQ ID NO: 49604
  GFR-binding peptide
  MOD_RES (31)..(32): Xaa is C or S

SEQ ID NO: 74770 - protein, 41 aa, Artificial Sequence; identical to SEQ ID NO: 17500
  GFR-binding peptide
  MOD_RES (2)..(39): Xaa is C or S

SEQ ID NO: 74771 - protein, 34 aa, Artificial Sequence
  GFR-binding peptide
  MOD_RES (1)..(3): Xaa is C or S
XGXRDVVMGSMEGLIIQQKDNMIQMTINSMKTPT

SEQ ID NO: 74772 - protein, 35 aa, Artificial Sequence; identical to SEQ ID NO: 47014
  GFR-binding peptide
  MOD_RES (1)..(33)..(34): Xaa is C or S

SEQ ID NO: 74773 - protein, 39 aa, Artificial Sequence; identical to SEQ ID NO: 17501
  GFR-binding peptide
  MOD_RES (1)..(3)..(37): Xaa is C or S
  MOD_RES (15)..(16)..(17)..(18)..(19): Xaa is A or G
  MOD_RES (20)..(21)..(22)..(23): Xaa is A or G or is absent

SEQ ID NO: 74774 - protein, 39 aa, Artificial Sequence; identical to SEQ ID NO: 49608
  GFR-binding peptide
  MOD_RES (2)..(33)..(34): Xaa is C or S

SEQ ID NO: 74775 - protein, 42 aa, Artificial Sequence; identical to SEQ ID NO: 17502
  GFR-binding peptide
  MOD_RES (1)..(38): Xaa is C or S
  MOD_RES (14)..(15)..(16)..(17)..(18): Xaa is A or G
  MOD_RES (19)..(20)..(21)..(22): Xaa is A or G or is absent

SEQ ID NO: 74776 - protein, 41 aa, Artificial Sequence
  GFR-binding peptide
  MOD_RES (2)..(35)..(36): Xaa is C or S
  MOD_RES (13)..(14)..(15)..(16)..(17): Xaa is A or G
  MOD_RES (18)..(19)..(20)..(21): Xaa is A or G or is absent
KXSRVIMSMEGLXXXXXXXXXMIQITINSLAQPVXXPAASA

SEQ ID NO: 74777 - protein, 39 aa, Artificial Sequence; identical to SEQ ID NO: 17503
  GFR-binding peptide
  MOD_RES (1)..(3): Xaa is C or S

SEQ ID NO: 74778 - protein, 43 aa, Artificial Sequence; identical to SEQ ID NO: 17504
  GFR-binding peptide
  MOD_RES (1)..(3)..(40): Xaa is C or S

SEQ ID NO: 74779 - protein, 42 aa, Artificial Sequence
  GFR-binding peptide
  MOD_RES (1)..(3)..(37)..(38): Xaa is C or S
  MOD_RES (15)..(16)..(17)..(18)..(19): Xaa is A or G
  MOD_RES (20)..(21)..(22)..(23): Xaa is A or G or is absent
XGXAEVVMDSMEGLXXXXXXXXXMIQITINSLRAPVXXSAPA

SEQ ID NO: 74780 - protein, 37 aa, Artificial Sequence
  GFR-binding peptide
  MOD_RES (1)..(3)..(35)..(36): Xaa is C or S
XGXSEVVMDSMEGIVVNNASDMIQITINSLRTPVXXT

SEQ ID NO: 74781 - protein, 39 aa, Artificial Sequence; identical to SEQ ID NO: 17506
  GFR-binding peptide
  MOD_RES (34)..(34): Xaa is C or S
  MOD_RES (12)..(13)..(14)..(15)..(16): Xaa is A or G
  MOD_RES (17)..(18)..(19)..(20): Xaa is A or G or is absent

SEQ ID NO: 74782 - protein, 44 aa, Artificial Sequence; identical to SEQ ID NO: 17507
  GFR-binding peptide
  MOD_RES (1)..(3)..(40): Xaa is C or S

SEQ ID NO: 74783 - protein, 44 aa, Artificial Sequence; identical to SEQ ID NO: 17508
  GFR-binding peptide
  MOD_RES (1)..(3)..(40): Xaa is C or S

SEQ ID NO: 74784 - protein, 38 aa, Artificial Sequence
  GFR-binding peptide
  MOD_RES (1)..(33)..(34): Xaa is C or S
XAEVVMDSMEGLVVNNAADMIQITINSLRAPVXXSAPA

SEQ ID NO: 74785 - protein, 38 aa, Artificial Sequence; identical to SEQ ID NO: 17509
  GFR-binding peptide
  MOD_RES (2)..(4): Xaa is C or S

SEQ ID NO: 74786 - protein, 34 aa, Artificial Sequence
  GFR-binding peptide
  MOD_RES (31)..(32): Xaa is C or S
EVVMDSMEGIVVNNAADMIQITINSLRAPVXXSA

SEQ ID NO: 74787 - protein, 35 aa, Artificial Sequence; identical to SEQ ID NO: 17511
  GFR-binding peptide
  MOD_RES (34)..(34): Xaa is C or S
  MOD_RES (12)..(13)..(14)..(15)..(16): Xaa is A or G
  MOD_RES (17)..(18)..(19)..(20): Xaa is A or G or is absent

SEQ ID NO: 74788 - protein, 38 aa, Artificial Sequence
  GFR-binding peptide
  MOD_RES (1)..(33)..(34): Xaa is C or S
XSEVVMDSMEGLVVNNASDMIQITINSLRTPVXXTPPT

SEQ ID NO: 74789 - protein, 36 aa, Artificial Sequence
  GFR-binding peptide
  MOD_RES (2)..(36): Xaa is C or S
  MOD_RES (14)..(15)..(16)..(17)..(18): Xaa is A or G
  MOD_RES (19)..(20)..(21)..(22): Xaa is A or G or is absent
GXAEVVMDSMEGIXXXXXXXXXMIQITINSLRAPVX

SEQ ID NO: 74790 - protein, 40 aa, Artificial Sequence
  GFR-binding peptide
  MOD_RES (2)..(4)..(37)..(38): Xaa is C or S
  MOD_RES (15)..(16)..(17)..(18)..(19): Xaa is A or G
  MOD_RES (20)..(21)..(22)..(23): Xaa is A or G or is absent
LXGXEEVIMSMEGIXXXXXXXXXMIQMTINSTKVPAXXTS

SEQ ID NO: 74791 - protein, 41 aa, Artificial Sequence
  GFR-binding peptide
  MOD_RES (2)..(35)..(36): Xaa is C or S
  MOD_RES (13)..(14)..(15)..(16)..(17): Xaa is A or G
  MOD_RES (18)..(19)..(20)..(21): Xaa is A or G or is absent
KXSKVVMSMEGLXXXXXXXXXMIQITINSLDQPVXXPSASA

SEQ ID NO: 74792 - protein, 39 aa, Artificial Sequence
  GFR-binding peptide
  MOD_RES (2)..(4)..(35)..(36): Xaa is C or S
SXKXSKVIMSMEGLIKPTKGIMIQITINSLDQSVXXPSA

SEQ ID NO: 74793 - protein, 33 aa, Artificial Sequence; identical to SEQ ID NO: 17514
  GFR-binding peptide

SEQ ID NO: 74794 - protein, 40 aa, Artificial Sequence
  GFR-binding peptide
  MOD_RES (1)..(34)..(35): Xaa is C or S
  MOD_RES (12)..(13)..(14)..(15)..(16): Xaa is A or G
  MOD_RES (17)..(18)..(19)..(20): Xaa is A or G or is absent
XEEVIMSMEGIXXXXXXXXXMIQMTINSTKVPAXXTSPVR

SEQ ID NO: 74795 - protein, 34 aa, Artificial Sequence; identical to SEQ ID NO: 49619
  GFR-binding peptide
  MOD_RES (33)..(34): Xaa is C or S
  MOD_RES (11)..(12)..(13)..(14)..(15): Xaa is A or G
  MOD_RES (16)..(17)..(18)..(19): Xaa is A or G or is absent

SEQ ID NO: 74796 - protein, 36 aa, Artificial Sequence
  GFR-binding peptide
  MOD_RES (2)..(35)..(36): Xaa is C or S
  MOD_RES (13)..(14)..(15)..(16)..(17): Xaa is A or G
  MOD_RES (18)..(19)..(20)..(21): Xaa is A or G or is absent
KXSKVIMSMEGLXXXXXXXXXMIQITINSLDQSVXX

SEQ ID NO: 74797 - protein, 30 aa, Artificial Sequence
  GFR-binding peptide
RVVMNSMEGLIVNSSDDMIQVTINSLKTPA

SEQ ID NO: 74798 - protein, 31 aa, Artificial Sequence; identical to SEQ ID NO: 49622
  GFR-binding peptide
  MOD_RES (1)..(1): Xaa is C or S

SEQ ID NO: 74799 - protein, 37 aa, Artificial Sequence
  GFR-binding peptide
  MOD_RES (1)..(33)..(34): Xaa is C or S
XSEVVMDSMEGIVVNNASDMIQITINSLRTPVXXTPP

SEQ ID NO: 74800 - protein, 37 aa, Artificial Sequence
  GFR-binding peptide
  MOD_RES (33)..(34): Xaa is C or S
  MOD_RES (11)..(12)..(13)..(14)..(15): Xaa is A or G
  MOD_RES (16)..(17)..(18)..(19): Xaa is A or G or is absent
EEVIMSMEGLXXXXXXXXXMIQMTINSTKVPAXXTSP

SEQ ID NO: 74801 - protein, 41 aa, Artificial Sequence
  GFR-binding peptide
  MOD_RES (2)..(4)..(35)..(36): Xaa is C or S
SXKXSKVIMSMEGLIKPTKGIMIQITINSLDQSVXXPSASA

SEQ ID NO: 74802 - protein, 39 aa, Artificial Sequence; identical to SEQ ID NO: 17517
  GFR-binding peptide
  MOD_RES (2)..(4): Xaa is C or S

SEQ ID NO: 74803 - protein, 37 aa, Artificial Sequence; identical to SEQ ID NO: 17519
  GFR-binding peptide
  MOD_RES (2)..(36): Xaa is C or S

SEQ ID NO: 74804 - protein, 43 aa, Artificial Sequence
  GFR-binding peptide
  MOD_RES (2)..(4)..(37)..(38): Xaa is C or S
  MOD_RES (15)..(16)..(17)..(18)..(19): Xaa is A or G
  MOD_RES (20)..(21)..(22)..(23): Xaa is A or G or is absent
LXGXEEVIMSMEGLXXXXXXXXXMIQMTINSTKVPAXXTSPVR

SEQ ID NO: 74805 - protein, 39 aa, Artificial Sequence
  GFR-binding peptide
  MOD_RES (1)..(3)..(34)..(35): Xaa is C or S
XKXSRVIMSMEGLVKPKRGVMIQITINSLAQPVXXPAAS

SEQ ID NO: 74806 - protein, 35 aa, Artificial Sequence
  GFR-binding peptide
  MOD_RES (1)..(33)..(34): Xaa is C or S
XSEVVMDSMEGIVVNNASDMIQITINSLRTPVXXT

SEQ ID NO: 74807 - protein, 36 aa, Artificial Sequence; identical to SEQ ID NO: 17520
  GFR-binding peptide
  MOD_RES (36)..(36): Xaa is C or S
  MOD_RES (12)..(13)..(14)..(15)..(16): Xaa is A or G
  MOD_RES (17)..(18)..(19)..(20): Xaa is A or G or is absent

SEQ ID NO: 74808 - protein, 34 aa, Artificial Sequence; identical to SEQ ID NO: 17522
  GFR-binding peptide
  MOD_RES (34)..(34): Xaa is C or S

SEQ ID NO: 74809 - protein, 39 aa, Artificial Sequence
  GFR-binding peptide
  MOD_RES (34)..(35): Xaa is C or S
  MOD_RES (12)..(13)..(14)..(15)..(16): Xaa is A or G
  MOD_RES (17)..(18)..(19)..(20): Xaa is A or G or is absent
AEVVMDSMEGIXXXXXXXXXMIQITINSLRAPVXXSAPA

SEQ ID NO: 74810 - protein, 40 aa, Artificial Sequence
  GFR-binding peptide
  MOD_RES (2)..(4)..(35)..(36): Xaa is C or S
SXKXSKVIMSMEGLIKPTKGIMIQITINSLDQSVXXPSAS

SEQ ID NO: 74811 - protein, 37 aa, Artificial Sequence; identical to SEQ ID NO: 17524
  GFR-binding peptide
  MOD_RES (37)..(37): Xaa is C or S
  MOD_RES (13)..(14)..(15)..(16)..(17): Xaa is A or G
  MOD_RES (18)..(19)..(20)..(21): Xaa is A or G or is absent

SEQ ID NO: 74812 - protein, 43 aa, Artificial Sequence
  GFR-binding peptide
  MOD_RES (2)..(4)..(38)..(39): Xaa is C or S
  MOD_RES (16)..(17)..(18)..(19)..(20): Xaa is A or G
  MOD_RES (21)..(22)..(23)..(24): Xaa is A or G or is absent
SXGXRDVVMGSMEGIXXXXXXXXXMIQMTINSMKTPTXXPGAS

SEQ ID NO: 74813 - protein, 36 aa, Artificial Sequence; identical to SEQ ID NO: 49641
  GFR-binding peptide
  MOD_RES (1)..(32)..(33): Xaa is C or S

SEQ ID NO: 74814 - protein, 39 aa, Artificial Sequence; identical to SEQ ID NO: 49642
  GFR-binding peptide
  MOD_RES (2)..(4)..(35)..(36): Xaa is C or S

SEQ ID NO: 74815 - protein, 38 aa, Artificial Sequence; identical to SEQ ID NO: 17527
  GFR-binding peptide
  MOD_RES (2)..(4): Xaa is C or S

SEQ ID NO: 74816 - protein, 37 aa, Artificial Sequence; identical to SEQ ID NO: 17529
  GFR-binding peptide
  MOD_RES (1)..(3): Xaa is C or S
  MOD_RES (16)..(17)..(18)..(19)..(20): Xaa is A or G
  MOD_RES (21)..(22)..(23)..(24): Xaa is A or G or is absent

SEQ ID NO: 74817 - protein, 36 aa, Artificial Sequence
  GFR-binding peptide
  MOD_RES (2)..(4): Xaa is C or S
  MOD_RES (15)..(16)..(17)..(18)..(19): Xaa is A or G
  MOD_RES (20)..(21)..(22)..(23): Xaa is A or G or is absent
SXKXSKVIMSMEGLXXXXXXXXXMIQITINSLDQSV

SEQ ID NO: 74818 - protein, 40 aa, Artificial Sequence; identical to SEQ ID NO: 47051
  GFR-binding peptide
  MOD_RES (1)..(34)..(35): Xaa is C or S
  MOD_RES (12)..(13)..(14)..(15)..(16): Xaa is A or G
  MOD_RES (17)..(18)..(19)..(20): Xaa is A or G or is absent

SEQ ID NO: 74819 - protein, 36 aa, Artificial Sequence; identical to SEQ ID NO: 49645
  GFR-binding peptide
  MOD_RES (2)..(34)..(35): Xaa is C or S

SEQ ID NO: 74820 - protein, 34 aa, Artificial Sequence
  GFR-binding peptide
  MOD_RES (2)..(34): Xaa is C or S
GXSRVVMNSMEGLIVNSSDDMIQVTINSLKTPAX

SEQ ID NO: 74821 - protein, 45 aa, Artificial Sequence; identical to SEQ ID NO: 17530
  GFR-binding peptide
  MOD_RES (2)..(4)..(41): Xaa is C or S
  MOD_RES (17)..(18)..(19)..(20)..(21): Xaa is A or G
  MOD_RES (22)..(23)..(24)..(25): Xaa is A or G or is absent

SEQ ID NO: 74822 - protein, 38 aa, Artificial Sequence; identical to SEQ ID NO: 17531
  GFR-binding peptide
  MOD_RES (1)..(3)..(37): Xaa is C or S

SEQ ID NO: 74823 - protein, 36 aa, Artificial Sequence
  GFR-binding peptide
  MOD_RES (1)..(3)..(34)..(35): Xaa is C or S
XKXSRVIMSMEGLVKPKRGVMIQITINSLAQPVXXP

SEQ ID NO: 74824 - protein, 39 aa, Artificial Sequence; identical to SEQ ID NO: 17532
  GFR-binding peptide
  MOD_RES (37)..(37): Xaa is C or S

SEQ ID NO: 74825 - protein, 45 aa, Artificial Sequence; identical to SEQ ID NO: 17534
  GFR-binding peptide
  MOD_RES (2)..(4)..(41): Xaa is C or S
  MOD_RES (17)..(18)..(19)..(20)..(21): Xaa is A or G
  MOD_RES (22)..(23)..(24)..(25): Xaa is A or G or is absent

SEQ ID NO: 74826 - protein, 39 aa, Artificial Sequence; identical to SEQ ID NO: 17536
  GFR-binding peptide
  MOD_RES (1)..(35): Xaa is C or S

SEQ ID NO: 74827 - protein, 34 aa, Artificial Sequence
  GFR-binding peptide
  MOD_RES (32)..(33): Xaa is C or S
RDVVMGSMEGIIIQQKDNMIQMTINSMKTPTXXP

SEQ ID NO: 74828 - protein, 35 aa, Artificial Sequence
  GFR-binding peptide
  MOD_RES (2)..(4): Xaa is C or S
SXGXRDVVMGSMEGIIIQQKDNMIQMTINSMKTPT

SEQ ID NO: 74829 - protein, 35 aa, Artificial Sequence
  GFR-binding peptide
  MOD_RES (2)..(4): Xaa is C or S
SXGXRDVVMGSMEGLIIQQKDNMIQMTINSMKTPT

SEQ ID NO: 74830 - protein, 34 aa, Artificial Sequence
  GFR-binding peptide
  MOD_RES (1)..(33)..(34): Xaa is C or S
XSRVVMNSMEGLIVNSSDDMIQVTINSLKTPAXX

SEQ ID NO: 74831 - protein, 41 aa, Artificial Sequence; identical to SEQ ID NO: 47075
  GFR-binding peptide
  MOD_RES (2)..(4)..(37)..(38): Xaa is C or S
  MOD_RES (15)..(16)..(17)..(18)..(19): Xaa is A or G
  MOD_RES (20)..(21)..(22)..(23): Xaa is A or G or is absent

SEQ ID NO: 74832 - protein, 39 aa, Artificial Sequence
  GFR-binding peptide
  MOD_RES (1)..(34)..(35): Xaa is C or S
  MOD_RES (12)..(13)..(14)..(15)..(16): Xaa is A or G
  MOD_RES (17)..(18)..(19)..(20): Xaa is A or G or is absent
XSKVIMSMEGLXXXXXXXXXMIQITINSLDQSVXXPSAS

SEQ ID NO: 74833 - protein, 35 aa, Artificial Sequence; identical to SEQ ID NO: 17539
  GFR-binding peptide
  MOD_RES (2)..(2): Xaa is C or S
  MOD_RES (14)..(15)..(16)..(17)..(18): Xaa is A or G
  MOD_RES (19)..(20)..(21)..(22): Xaa is A or G or is absent

SEQ ID NO: 74834 - protein, 31 aa, Artificial Sequence
  GFR-binding peptide
  MOD_RES (31)..(31): Xaa is C or S
SKVIMSMEGLIKPTKGIMIQITINSLDQSVX

SEQ ID NO: 74835 - protein, 34 aa, Artificial Sequence; identical to SEQ ID NO: 17541
  GFR-binding peptide
  MOD_RES (12)..(13)..(14)..(15)..(16): Xaa is A or G
  MOD_RES (17)..(18)..(19)..(20): Xaa is A or G or is absent

SEQ ID NO: 74836 - protein, 35 aa, Artificial Sequence
  GFR-binding peptide
  MOD_RES (1)..(33)..(34): Xaa is C or S
XAEVVMDSMEGLVVNNAADMIQITINSLRAPVXXS

SEQ ID NO: 74837 - protein, 38 aa, Artificial Sequence
  GFR-binding peptide
  MOD_RES (1)..(3)..(35)..(36): Xaa is C or S
XGXRDVVMGSMEGIIIQQKDNMIQMTINSMKTPTXXPG

SEQ ID NO: 74838 - protein, 37 aa, Artificial Sequence; identical to SEQ ID NO: 47084
  GFR-binding peptide
  MOD_RES (2)..(4)..(37): Xaa is C or S
  MOD_RES (15)..(16)..(17)..(18)..(19): Xaa is A or G
  MOD_RES (20)..(21)..(22)..(23): Xaa is A or G or is absent

SEQ ID NO: 74839 - protein, 34 aa, Artificial Sequence
  GFR-binding peptide
  MOD_RES (1)..(32)..(33): Xaa is C or S
XSRVIMSMEGLVKPKRGVMIQITINSLAQPVXXP

SEQ ID NO: 74840 - protein, 39 aa, Artificial Sequence; identical to SEQ ID NO: 17542
  GFR-binding peptide
  MOD_RES (33)..(33): Xaa is C or S

SEQ ID NO: 74841 - protein, 34 aa, Artificial Sequence
  GFR-binding peptide
  MOD_RES (33)..(34): Xaa is C or S
  MOD_RES (11)..(12)..(13)..(14)..(15): Xaa is A or G
  MOD_RES (16)..(17)..(18)..(19): Xaa is A or G or is absent
EVVMDSMEGLXXXXXXXXXMIQITINSLRTPVXX

SEQ ID NO: 74842 - protein, 36 aa, Artificial Sequence; identical to SEQ ID NO: 17543
  GFR-binding peptide
  MOD_RES (2)..(36): Xaa is C or S

SEQ ID NO: 74843 - protein, 33 aa, Artificial Sequence
  GFR-binding peptide
  MOD_RES (12)..(13)..(14)..(15)..(16): Xaa is A or G
  MOD_RES (17)..(18)..(19)..(20): Xaa is A or G or is absent
SRVVMNSMEGLXXXXXXXXXMIQVTINSLKTPA

SEQ ID NO: 74844 - protein, 41 aa, Artificial Sequence
  GFR-binding peptide
  MOD_RES (2)..(36)..(37): Xaa is C or S
  MOD_RES (14)..(15)..(16)..(17)..(18): Xaa is A or G
  MOD_RES (19)..(20)..(21)..(22): Xaa is A or G or is absent
GXSRVVMNSMEGLXXXXXXXXXMIQVTINSLKTPAXXPKPV

SEQ ID NO: 74845 - protein, 36 aa, Artificial Sequence
  GFR-binding peptide
  MOD_RES (31)..(32): Xaa is C or S
EVVMDSMEGIVVNNASDMIQITINSLRTPVXXTPPT

SEQ ID NO: 74846 - protein, 41 aa, Artificial Sequence; identical to SEQ ID NO: 17544
  GFR-binding peptide
  MOD_RES (1)..(35): Xaa is C or S

SEQ ID NO: 74847 - protein, 37 aa, Artificial Sequence
  GFR-binding peptide
  MOD_RES (31)..(32): Xaa is C or S
RVVMNSMEGIIVNSSDDMIQVTINSLKTPAXXPKPVH

SEQ ID NO: 74848 - protein, 41 aa, Artificial Sequence; identical to SEQ ID NO: 17546
  GFR-binding peptide
  MOD_RES (1)..(35): Xaa is C or S
  MOD_RES (13)..(14)..(15)..(16)..(17): Xaa is A or G
  MOD_RES (18)..(19)..(20)..(21): Xaa is A or G or is absent

SEQ ID NO: 74849 - protein, 37 aa, Artificial Sequence; identical to SEQ ID NO: 49675
  GFR-binding peptide
  MOD_RES (2)..(4)..(35)..(36): Xaa is C or S

SEQ ID NO: 74850 - protein, 34 aa, Artificial Sequence
  GFR-binding peptide
  MOD_RES (32)..(33): Xaa is C or S
SEVVMDSMEGIVVNNASDMIQITINSLRTPVXXT

SEQ ID NO: 74851 - protein, 36 aa, Artificial Sequence; identical to SEQ ID NO: 47092
  GFR-binding peptide
  MOD_RES (2)..(36): Xaa is C or S
  MOD_RES (14)..(15)..(16)..(17)..(18): Xaa is A or G
  MOD_RES (19)..(20)..(21)..(22): Xaa is A or G or is absent

SEQ ID NO: 74852 - protein, 35 aa, Artificial Sequence
  GFR-binding peptide
  MOD_RES (2)..(34)..(35): Xaa is C or S
GXAEVVMDSMEGLVVNNAADMIQITINSLRAPVXX

SEQ ID NO: 74853 - protein, 36 aa, Artificial Sequence; identical to SEQ ID NO: 17548
  GFR-binding peptide
  MOD_RES (33)..(33): Xaa is C or S
  MOD_RES (11)..(12)..(13)..(14)..(15): Xaa is A or G
  MOD_RES (16)..(17)..(18)..(19): Xaa is A or G or is absent

SEQ ID NO: 74854 - protein, 42 aa, Artificial Sequence; identical to SEQ ID NO: 17549
  GFR-binding peptide
  MOD_RES (2)..(39): Xaa is C or S
  MOD_RES (15)..(16)..(17)..(18)..(19): Xaa is A or G
  MOD_RES (20)..(21)..(22)..(23): Xaa is A or G or is absent

SEQ ID NO: 74855 - protein, 41 aa, Artificial Sequence; identical to SEQ ID NO: 17550
  GFR-binding peptide
  MOD_RES (37)..(37): Xaa is C or S
  MOD_RES (13)..(14)..(15)..(16)..(17): Xaa is A or G
  MOD_RES (18)..(19)..(20)..(21): Xaa is A or G or is absent

SEQ ID NO: 74856 - protein, 39 aa, Artificial Sequence; identical to SEQ ID NO: 17551
  GFR-binding peptide
  MOD_RES (33)..(33): Xaa is C or S

SEQ ID NO: 74857 - protein, 40 aa, Artificial Sequence; identical to SEQ ID NO: 17552
  GFR-binding peptide
  MOD_RES (2)..(39): Xaa is C or S
  MOD_RES (15)..(16)..(17)..(18)..(19): Xaa is A or G
  MOD_RES (20)..(21)..(22)..(23): Xaa is A or G or is absent

SEQ ID NO: 74858 - protein, 42 aa, Artificial Sequence
  GFR-binding peptide
  MOD_RES (1)..(3)..(36)..(37): Xaa is C or S
  MOD_RES (14)..(15)..(16)..(17)..(18): Xaa is A or G
  MOD_RES (19)..(20)..(21)..(22): Xaa is A or G or is absent
XGXEEVIMSMEGIXXXXXXXXXMIQMTINSTKVPAXXTSPVR

SEQ ID NO: 74859 - protein, 35 aa, Artificial Sequence; identical to SEQ ID NO: 49687
  GFR-binding peptide
  MOD_RES (33)..(34): Xaa is C or S
  MOD_RES (11)..(12)..(13)..(14)..(15): Xaa is A or G
  MOD_RES (16)..(17)..(18)..(19): Xaa is A or G or is absent

SEQ ID NO: 74860 - protein, 34 aa, Artificial Sequence
  GFR-binding peptide
  MOD_RES (2)..(2): Xaa is C or S
  MOD_RES (13)..(14)..(15)..(16)..(17): Xaa is A or G
  MOD_RES (18)..(19)..(20)..(21): Xaa is A or G or is absent
GXEEVIMSMEGIXXXXXXXXXMIQMTINSTKVPA

SEQ ID NO: 74861 - protein, 38 aa, Artificial Sequence; identical to SEQ ID NO: 17556
  GFR-binding peptide
  MOD_RES (2)..(2): Xaa is C or S

SEQ ID NO: 74862 - protein, 32 aa, Artificial Sequence
  GFR-binding peptide
  MOD_RES (32)..(32): Xaa is C or S
AEVVMDSMEGIVVNNAADMIQITINSLRAPVX

SEQ ID NO: 74863 - protein, 41 aa, Artificial Sequence; identical to SEQ ID NO: 17557
  GFR-binding peptide
  MOD_RES (2)..(4)..(41): Xaa is C or S

SEQ ID NO: 74864 - protein, 37 aa, Artificial Sequence; identical to SEQ ID NO: 17559
  GFR-binding peptide
  MOD_RES (2)..(4): Xaa is C or S

SEQ ID NO: 74865 - protein, 39 aa, Artificial Sequence; identical to SEQ ID NO: 17560
  GFR-binding peptide
  MOD_RES (2)..(4): Xaa is C or S

SEQ ID NO: 74866 - protein, 34 aa, Artificial Sequence
  GFR-binding peptide
  MOD_RES (1)..(3)..(34): Xaa is C or S
XKXSKVVMSMEGLVKPTRGVMIQITINSLDQPVX

SEQ ID NO: 74867 - protein, 33 aa, Artificial Sequence; identical to SEQ ID NO: 47110
  GFR-binding peptide
  MOD_RES (1)..(1): Xaa is C or S
  MOD_RES (12)..(13)..(14)..(15)..(16): Xaa is A or G
  MOD_RES (17)..(18)..(19)..(20): Xaa is A or G or is absent

SEQ ID NO: 74868 - protein, 39 aa, Artificial Sequence
  GFR-binding peptide
  MOD_RES (33)..(34): Xaa is C or S
  MOD_RES (11)..(12)..(13)..(14)..(15): Xaa is A or G
  MOD_RES (16)..(17)..(18)..(19): Xaa is A or G or is absent
SKVIMSMEGLXXXXXXXXXMIQITINSLDQSVXXPSASA

SEQ ID NO: 74869 - protein, 41 aa, Artificial Sequence; identical to SEQ ID NO: 17563
  GFR-binding peptide
  MOD_RES (2)..(4)..(38): Xaa is C or S

SEQ ID NO: 74870 - protein, 41 aa, Artificial Sequence; identical to SEQ ID NO: 17566
  GFR-binding peptide
  MOD_RES (2)..(39): Xaa is C or S
  MOD_RES (15)..(16)..(17)..(18)..(19): Xaa is A or G
  MOD_RES (20)..(21)..(22)..(23): Xaa is A or G or is absent

SEQ ID NO: 74871 - protein, 38 aa, Artificial Sequence; identical to SEQ ID NO: 17567
  GFR-binding peptide
  MOD_RES (2)..(36): Xaa is C or S
  MOD_RES (14)..(15)..(16)..(17)..(18): Xaa is A or G
  MOD_RES (19)..(20)..(21)..(22): Xaa is A or G or is absent

SEQ ID NO: 74872 - protein, 36 aa, Artificial Sequence
  GFR-binding peptide
  MOD_RES (34)..(35): Xaa is C or S
  MOD_RES (12)..(13)..(14)..(15)..(16): Xaa is A or G
  MOD_RES (17)..(18)..(19)..(20): Xaa is A or G or is absent
RDVVMGSMEGIXXXXXXXXXMIQMTINSMKTPTXXP

SEQ ID NO: 74873 - protein, 35 aa, Artificial Sequence
  GFR-binding peptide
  MOD_RES (2)..(2): Xaa is C or S
  MOD_RES (14)..(15)..(16)..(17)..(18): Xaa is A or G
  MOD_RES (19)..(20)..(21)..(22): Xaa is A or G or is absent
GXRDVVMGSMEGLXXXXXXXXXMIQMTINSMKTPT

SEQ ID NO: 74874 - protein, 37 aa, Artificial Sequence; identical to SEQ ID NO: 49703
  GFR-binding peptide
  MOD_RES (1)..(3)..(35)..(36): Xaa is C or S

SEQ ID NO: 74875 - protein, 44 aa, Artificial Sequence; identical to SEQ ID NO: 17571
  GFR-binding peptide
  MOD_RES (1)..(3)..(40): Xaa is C or S
  MOD_RES (16)..(17)..(18)..(19)..(20): Xaa is A or G
  MOD_RES (21)..(22)..(23)..(24): Xaa is A or G or is absent

SEQ ID NO: 74876 - protein, 38 aa, Artificial Sequence
  GFR-binding peptide
  MOD_RES (33)..(34): Xaa is C or S
  MOD_RES (11)..(12)..(13)..(14)..(15): Xaa is A or G
  MOD_RES (16)..(17)..(18)..(19): Xaa is A or G or is absent
SKVVMSMEGLXXXXXXXXXMIQITINSLDQPVXXPSAS

SEQ ID NO: 74877 - protein, 34 aa, Artificial Sequence
  GFR-binding peptide
  MOD_RES (1)..(34): Xaa is C or S
  MOD_RES (12)..(13)..(14)..(15)..(16): Xaa is A or G
  MOD_RES (17)..(18)..(19)..(20): Xaa is A or G or is absent
XSRVIMSMEGLXXXXXXXXXMIQITINSLAQPVX

SEQ ID NO: 74878 - protein, 35 aa, Artificial Sequence; identical to SEQ ID NO: 49707
  GFR-binding peptide
  MOD_RES (2)..(35): Xaa is C or S
  MOD_RES (13)..(14)..(15)..(16)..(17): Xaa is A or G
  MOD_RES (18)..(19)..(20)..(21): Xaa is A or G or is absent

SEQ ID NO: 74879 - protein, 37 aa, Artificial Sequence; identical to SEQ ID NO: 17574
  GFR-binding peptide
  MOD_RES (35)..(35): Xaa is C or S
  MOD_RES (11)..(12)..(13)..(14)..(15): Xaa is A or G
  MOD_RES (16)..(17)..(18)..(19): Xaa is A or G or is absent

SEQ ID NO: 74880 - protein, 35 aa, Artificial Sequence
  GFR-binding peptide
  MOD_RES (2)..(35): Xaa is C or S
  MOD_RES (13)..(14)..(15)..(16)..(17): Xaa is A or G
  MOD_RES (18)..(19)..(20)..(21): Xaa is A or G or is absent
KXSKVVMSMEGLXXXXXXXXXMIQITINSLDQPVX

SEQ ID NO: 74881 - protein, 41 aa, Artificial Sequence
  GFR-binding peptide
  MOD_RES (2)..(4)..(35)..(36): Xaa is C or S
SXKXSRVIMSMEGLVKPKRGVMIQITINSLAQPVXXPAASA

SEQ ID NO: 74882 - protein, 44 aa, Artificial Sequence
  GFR-binding peptide
  MOD_RES (2)..(4)..(38)..(39): Xaa is C or S
  MOD_RES (16)..(17)..(18)..(19)..(20): Xaa is A or G
  MOD_RES (21)..(22)..(23)..(24): Xaa is A or G or is absent
RXGXAEVVMDSMEGLXXXXXXXXXMIQITINSLRAPVXXSAPAA

SEQ ID NO: 74883 - protein, 38 aa, Artificial Sequence
  GFR-binding peptide
  MOD_RES (2)..(4)..(38): Xaa is C or S
  MOD_RES (16)..(17)..(18)..(19)..(20): Xaa is A or G
  MOD_RES (21)..(22)..(23)..(24): Xaa is A or G or is absent
RXGXSEVVMDSMEGLXXXXXXXXXMIQITINSLRTPVX

SEQ ID NO: 74884 - protein, 44 aa, Artificial Sequence; identical to SEQ ID NO: 17578
  GFR-binding peptide
  MOD_RES (1)..(3)..(40): Xaa is C or S
  MOD_RES (16)..(17)..(18)..(19)..(20): Xaa is A or G
  MOD_RES (21)..(22)..(23)..(24): Xaa is A or G or is absent

SEQ ID NO: 74885 - protein, 38 aa, Artificial Sequence
  GFR-binding peptide
  MOD_RES (2)..(4)..(38): Xaa is C or S
  MOD_RES (16)..(17)..(18)..(19)..(20): Xaa is A or G
  MOD_RES (21)..(22)..(23)..(24): Xaa is A or G or is absent
RXGXSEVVMDSMEGIXXXXXXXXXMIQITINSLRTPVX

SEQ ID NO: 74886 - protein, 37 aa, Artificial Sequence; identical to SEQ ID NO: 17579
  GFR-binding peptide
  MOD_RES (34)..(34): Xaa is C or S
  MOD_RES (12)..(13)..(14)..(15)..(16): Xaa is A or G
  MOD_RES (17)..(18)..(19)..(20): Xaa is A or G or is absent

SEQ ID NO: 74887 - protein, 33 aa, Artificial Sequence; identical to SEQ ID NO: 47135
  GFR-binding peptide
  MOD_RES (1)..(3): Xaa is C or S

SEQ ID NO: 74888 - protein, 38 aa, Artificial Sequence; identical to SEQ ID NO: 17580
  GFR-binding peptide
  MOD_RES (2)..(4)..(38): Xaa is C or S

SEQ ID NO: 74889 - protein, 42 aa, Artificial Sequence
  GFR-binding peptide
  MOD_RES (2)..(36)..(37): Xaa is C or S
  MOD_RES (14)..(15)..(16)..(17)..(18): Xaa is A or G
  MOD_RES (19)..(20)..(21)..(22): Xaa is A or G or is absent
GXSRVVMNSMEGIXXXXXXXXXMIQVTINSLKTPAXXPKPVH

SEQ ID NO: 74890 - protein, 39 aa, Artificial Sequence; identical to SEQ ID NO: 49718
  GFR-binding peptide
  MOD_RES (33)..(34): Xaa is C or S
  MOD_RES (11)..(12)..(13)..(14)..(15): Xaa is A or G
  MOD_RES (16)..(17)..(18)..(19): Xaa is A or G or is absent

SEQ ID NO: 74891 - protein, 35 aa, Artificial Sequence
  GFR-binding peptide
  MOD_RES (34)..(35): Xaa is C or S
  MOD_RES (12)..(13)..(14)..(15)..(16): Xaa is A or G
  MOD_RES (17)..(18)..(19)..(20): Xaa is A or G or is absent
RDVVMGSMEGLXXXXXXXXXMIQMTINSMKTPTXX

SEQ ID NO: 74892 - protein, 33 aa, Artificial Sequence
  GFR-binding peptide
  MOD_RES (2)..(2): Xaa is C or S
GXSEVVMDSMEGLVVNNASDMIQITINSLRTPV

SEQ ID NO: 74893 - protein, 40 aa, Artificial Sequence
  GFR-binding peptide
  MOD_RES (1)..(34)..(35): Xaa is C or S
  MOD_RES (12)..(13)..(14)..(15)..(16): Xaa is A or G
  MOD_RES (17)..(18)..(19)..(20): Xaa is A or G or is absent
XSKVIMSMEGLXXXXXXXXXMIQITINSLDQSVXXPSASA

SEQ ID NO: 74894 - protein, 39 aa, Artificial Sequence; identical to SEQ ID NO: 17583
  GFR-binding peptide
  MOD_RES (1)..(3): Xaa is C or S

SEQ ID NO: 74895 - protein, 40 aa, Artificial Sequence; identical to SEQ ID NO: 47151
  GFR-binding peptide
  MOD_RES (2)..(4)..(38)..(39): Xaa is C or S
  MOD_RES (16)..(17)..(18)..(19)..(20): Xaa is A or G
  MOD_RES (21)..(22)..(23)..(24): Xaa is A or G or is absent

SEQ ID NO: 74896 - protein, 40 aa, Artificial Sequence
  GFR-binding peptide
  MOD_RES (2)..(4)..(38)..(39): Xaa is C or S
  MOD_RES (16)..(17)..(18)..(19)..(20): Xaa is A or G
  MOD_RES (21)..(22)..(23)..(24): Xaa is A or G or is absent
HXGXSRVVMNSMEGLXXXXXXXXXMIQVTINSLKTPAXXP

SEQ ID NO: 74897 - protein, 31 aa, Artificial Sequence; identical to SEQ ID NO: 47152
  GFR-binding peptide
  MOD_RES (31)..(31): Xaa is C or S

SEQ ID NO: 74898 - protein, 43 aa, Artificial Sequence; identical to SEQ ID NO: 47154
  GFR-binding peptide
  MOD_RES (2)..(4)..(38)..(39): Xaa is C or S
  MOD_RES (16)..(17)..(18)..(19)..(20): Xaa is A or G
  MOD_RES (21)..(22)..(23)..(24): Xaa is A or G or is absent

SEQ ID NO: 74899 - protein, 40 aa, Artificial Sequence; identical to SEQ ID NO: 47155
  GFR-binding peptide
  MOD_RES (2)..(4)..(37)..(38): Xaa is C or S
  MOD_RES (15)..(16)..(17)..(18)..(19): Xaa is A or G
  MOD_RES (20)..(21)..(22)..(23): Xaa is A or G or is absent

SEQ ID NO: 74900 - protein, 43 aa, Artificial Sequence; identical to SEQ ID NO: 17586
  GFR-binding peptide
  MOD_RES (1)..(3)..(37): Xaa is C or S

SEQ ID NO: 74901 - protein, 32 aa, Artificial Sequence
  GFR-binding peptide
  MOD_RES (31)..(32): Xaa is C or S
EEVIMSMEGLLLVRGNDMIQMTINSTKVPAXX

SEQ ID NO: 74902 - protein, 38 aa, Artificial Sequence; identical to SEQ ID NO: 17587
  GFR-binding peptide
  MOD_RES (1)..(35): Xaa is C or S
  MOD_RES (13)..(14)..(15)..(16)..(17): Xaa is A or G
  MOD_RES (18)..(19)..(20)..(21): Xaa is A or G or is absent

SEQ ID NO: 74903 - protein, 37 aa, Artificial Sequence
  GFR-binding peptide
  MOD_RES (33)..(34): Xaa is C or S
  MOD_RES (11)..(12)..(13)..(14)..(15): Xaa is A or G
  MOD_RES (16)..(17)..(18)..(19): Xaa is A or G or is absent
EEVIMSMEGIXXXXXXXXXMIQMTINSTKVPAXXTSP

SEQ ID NO: 74904 - protein, 37 aa, Artificial Sequence; identical to SEQ ID NO: 17588
  GFR-binding peptide
  MOD_RES (33)..(33): Xaa is C or S

SEQ ID NO: 74905 - protein, 34 aa, Artificial Sequence
  GFR-binding peptide
  MOD_RES (2)..(4): Xaa is C or S
SXKXSRVIMSMEGLVKPKRGVMIQITINSLAQPV

SEQ ID NO: 74906 - protein, 38 aa, Artificial Sequence; identical to SEQ ID NO: 17590
  GFR-binding peptide
  MOD_RES (2)..(2): Xaa is C or S
  MOD_RES (15)..(16)..(17)..(18)..(19): Xaa is A or G
  MOD_RES (20)..(21)..(22)..(23): Xaa is A or G or is absent

SEQ ID NO: 74907 - protein, 35 aa, Artificial Sequence; identical to SEQ ID NO: 17591
  GFR-binding peptide
  MOD_RES (1)..(1): Xaa is C or S
  MOD_RES (14)..(15)..(16)..(17)..(18): Xaa is A or G
  MOD_RES (19)..(20)..(21)..(22): Xaa is A or G or is absent

SEQ ID NO: 74908 - protein, 33 aa, Artificial Sequence
  GFR-binding peptide
  MOD_RES (31)..(32): Xaa is C or S
RVVMNSMEGLIVNSSDDMIQVTINSLKTPAXXP

SEQ ID NO: 74909 - protein, 43 aa, Artificial Sequence
  GFR-binding peptide
  MOD_RES (2)..(4)..(38)..(39): Xaa is C or S
  MOD_RES (16)..(17)..(18)..(19)..(20): Xaa is A or G
  MOD_RES (21)..(22)..(23)..(24): Xaa is A or G or is absent
HXGXSRVVMNSMEGLXXXXXXXXXMIQVTINSLKTPAXXPKPV

SEQ ID NO: 74910 - protein, 33 aa, Artificial Sequence
  GFR-binding peptide
  MOD_RES (33)..(33): Xaa is C or S
  MOD_RES (11)..(12)..(13)..(14)..(15): Xaa is A or G
  MOD_RES (16)..(17)..(18)..(19): Xaa is A or G or is absent
EVVMDSMEGLXXXXXXXXXMIQITINSLRAPVX

SEQ ID NO: 74911 - protein, 42 aa, Artificial Sequence; identical to SEQ ID NO: 49732
  GFR-binding peptide
  MOD_RES (2)..(4)..(37)..(38): Xaa is C or S
  MOD_RES (15)..(16)..(17)..(18)..(19): Xaa is A or G
  MOD_RES (20)..(21)..(22)..(23): Xaa is A or G or is absent

SEQ ID NO: 74912 - protein, 36 aa, Artificial Sequence; identical to SEQ ID NO: 49737
  GFR-binding peptide
  MOD_RES (1)..(3)..(34)..(35): Xaa is C or S

SEQ ID NO: 74913 - protein, 38 aa, Artificial Sequence
  GFR-binding peptide
  MOD_RES (2)..(36)..(37): Xaa is C or S
  MOD_RES (14)..(15)..(16)..(17)..(18): Xaa is A or G
  MOD_RES (19)..(20)..(21)..(22): Xaa is A or G or is absent
GXSRVVMNSMEGLXXXXXXXXXMIQVTINSLKTPAXXP

SEQ ID NO: 74914 - protein, 41 aa, Artificial Sequence; identical to SEQ ID NO: 17597
  GFR-binding peptide
  MOD_RES (37)..(37): Xaa is C or S

SEQ ID NO: 74915 - protein, 40 aa, Artificial Sequence
  GFR-binding peptide
  MOD_RES (2)..(34)..(35): Xaa is C or S
GXSRVVMNSMEGIIVNSSDDMIQVTINSLKTPAXXPKPVH

SEQ ID NO: 74916 - protein, 33 aa, Artificial Sequence; identical to SEQ ID NO: 49742
  GFR-binding peptide
  MOD_RES (31)..(32): Xaa is C or S

SEQ ID NO: 74917 - protein, 38 aa, Artificial Sequence; identical to SEQ ID NO: 17600
  GFR-binding peptide
  MOD_RES (1)..(35): Xaa is C or S

SEQ ID NO: 74918 - protein, 40 aa, Artificial Sequence
  GFR-binding peptide
  MOD_RES (2)..(36)..(37): Xaa is C or S
  MOD_RES (14)..(15)..(16)..(17)..(18): Xaa is A or G
  MOD_RES (19)..(20)..(21)..(22): Xaa is A or G or is absent
GXSEVVMDSMEGLXXXXXXXXXMIQITINSLRTPVXXTPP

SEQ ID NO: 74919 - protein, 41 aa, Artificial Sequence; identical to SEQ ID NO: 49748
  GFR-binding peptide
  MOD_RES (1)..(3)..(36)..(37): Xaa is C or S
  MOD_RES (14)..(15)..(16)..(17)..(18): Xaa is A or G
  MOD_RES (19)..(20)..(21)..(22): Xaa is A or G or is absent

SEQ ID NO: 74920 - protein, 36 aa, Artificial Sequence; identical to SEQ ID NO: 17601
  GFR-binding peptide
  MOD_RES (2)..(2): Xaa is C or S
  MOD_RES (15)..(16)..(17)..(18)..(19): Xaa is A or G
  MOD_RES (20)..(21)..(22)..(23): Xaa is A or G or is absent

SEQ ID NO: 74921 - protein, 36 aa, Artificial Sequence; identical to SEQ ID NO: 17602
  GFR-binding peptide
  MOD_RES (2)..(2): Xaa is C or S

SEQ ID NO: 74922 - protein, 32 aa, Artificial Sequence; identical to SEQ ID NO: 17603
  GFR-binding peptide
  MOD_RES (11)..(12)..(13)..(14)..(15): Xaa is A or G
  MOD_RES (16)..(17)..(18)..(19): Xaa is A or G or is absent

SEQ ID NO: 74923 - protein, 39 aa, Artificial Sequence; identical to SEQ ID NO: 17604
  GFR-binding peptide
  MOD_RES (2)..(39): Xaa is C or S
  MOD_RES (15)..(16)..(17)..(18)..(19): Xaa is A or G
  MOD_RES (20)..(21)..(22)..(23): Xaa is A or G or is absent

SEQ ID NO: 74924 - protein, 38 aa, Artificial Sequence
  GFR-binding peptide
  MOD_RES (33)..(34): Xaa is C or S
  MOD_RES (11)..(12)..(13)..(14)..(15): Xaa is A or G
  MOD_RES (16)..(17)..(18)..(19): Xaa is A or G or is absent
EEVIMSMEGLXXXXXXXXXMIQMTINSTKVPAXXTSPV

SEQ ID NO: 74925 - protein, 34 aa, Artificial Sequence
  GFR-binding peptide
  MOD_RES (34)..(34): Xaa is C or S
  MOD_RES (12)..(13)..(14)..(15)..(16): Xaa is A or G
  MOD_RES (17)..(18)..(19)..(20): Xaa is A or G or is absent
AEVVMDSMEGIXXXXXXXXXMIQITINSLRAPVX

SEQ ID NO: 74926 - protein, 38 aa, Artificial Sequence; identical to SEQ ID NO: 17606
  GFR-binding peptide
  MOD_RES (35)..(35): Xaa is C or S

SEQ ID NO: 74927 - protein, 40 aa, Artificial Sequence; identical to SEQ ID NO: 17607
  GFR-binding peptide
  MOD_RES (36)..(36): Xaa is C or S
  MOD_RES (12)..(13)..(14)..(15)..(16): Xaa is A or G
  MOD_RES (17)..(18)..(19)..(20): Xaa is A or G or is absent

SEQ ID NO: 74928 - protein, 33 aa, Artificial Sequence
  GFR-binding peptide
  MOD_RES (1)..(3): Xaa is C or S
XKXSRVIMSMEGLVKPKRGVMIQITINSLAQPV

SEQ ID NO: 74929 - protein, 42 aa, Artificial Sequence
  GFR-binding peptide
  MOD_RES (2)..(4)..(36)..(37): Xaa is C or S
HXGXSRVVMNSMEGLIVNSSDDMIQVTINSLKTPAXXPKPVH

SEQ ID NO: 74930 - protein, 33 aa, Artificial Sequence
  GFR-binding peptide
  MOD_RES (1)..(3): Xaa is C or S
XKXSKVIMSMEGLIKPTKGIMIQITINSLDQSV

SEQ ID NO: 74931 - protein, 37 aa, Artificial Sequence
  GFR-binding peptide
  MOD_RES (1)..(3)..(37): Xaa is C or S
  MOD_RES (15)..(16)..(17)..(18)..(19): Xaa is A or G
  MOD_RES (20)..(21)..(22)..(23): Xaa is A or G or is absent
XGXSEVVMDSMEGIXXXXXXXXXMIQITINSLRTPVX

SEQ ID NO: 74932 - protein, 32 aa, Artificial Sequence; identical to SEQ ID NO: 17608
  GFR-binding peptide

SEQ ID NO: 74933 - protein, 40 aa, Artificial Sequence; identical to SEQ ID NO: 17609
  GFR-binding peptide
  MOD_RES (2)..(36): Xaa is C or S
  MOD_RES (14)..(15)..(16)..(17)..(18): Xaa is A or G
  MOD_RES (19)..(20)..(21)..(22): Xaa is A or G or is absent

SEQ ID NO: 74934 - protein, 39 aa, Artificial Sequence
  GFR-binding peptide
  MOD_RES (2)..(33)..(34): Xaa is C or S
KXSRVIMSMEGLVKPKRGVMIQITINSLAQPVXXPAASA

SEQ ID NO: 74935 - protein, 38 aa, Artificial Sequence
  GFR-binding peptide
  MOD_RES (1)..(33)..(34): Xaa is C or S
XAEVVMDSMEGIVVNNAADMIQITINSLRAPVXXSAPA

SEQ ID NO: 74936 - protein, 35 aa, Artificial Sequence
  GFR-binding peptide
  MOD_RES (1)..(3): Xaa is C or S
  MOD_RES (14)..(15)..(16)..(17)..(18): Xaa is A or G
  MOD_RES (19)..(20)..(21)..(22): Xaa is A or G or is absent
XKXSRVIMSMEGLXXXXXXXXXMIQITINSLAQPV

SEQ ID NO: 74937 - protein, 37 aa, Artificial Sequence
  GFR-binding peptide
  MOD_RES (2)..(35)..(36): Xaa is C or S
  MOD_RES (13)..(14)..(15)..(16)..(17): Xaa is A or G
  MOD_RES (18)..(19)..(20)..(21): Xaa is A or G or is absent
GXEEVIMSMEGLXXXXXXXXXMIQMTINSTKVPAXXT

SEQ ID NO: 74938 - protein, 39 aa, Artificial Sequence; identical to SEQ ID NO: 17610
  GFR-binding peptide
  MOD_RES (33)..(33): Xaa is C or S

SEQ ID NO: 74939 - protein, 32 aa, Artificial Sequence
  GFR-binding peptide
  MOD_RES (2)..(2): Xaa is C or S
KXSRVIMSMEGLVKPKRGVMIQITINSLAQPV

SEQ ID NO: 74940 - protein, 34 aa, Artificial Sequence; identical to SEQ ID NO: 47185
  GFR-binding peptide
  MOD_RES (1)..(33)..(34): Xaa is C or S

SEQ ID NO: 74941 - protein, 42 aa, Artificial Sequence; identical to SEQ ID NO: 17611
  GFR-binding peptide
  MOD_RES (2)..(4)..(38): Xaa is C or S
  MOD_RES (16)..(17)..(18)..(19)..(20): Xaa is A or G
  MOD_RES (21)..(22)..(23)..(24): Xaa is A or G or is absent

SEQ ID NO: 74942 - protein, 42 aa, Artificial Sequence
  GFR-binding peptide
  MOD_RES (2)..(4)..(38)..(39): Xaa is C or S
  MOD_RES (16)..(17)..(18)..(19)..(20): Xaa is A or G
  MOD_RES (21)..(22)..(23)..(24): Xaa is A or G or is absent
RXGXAEVVMDSMEGLXXXXXXXXXMIQITINSLRAPVXXSAP

SEQ ID NO: 74943 - protein, 31 aa, Artificial Sequence
  GFR-binding peptide
  MOD_RES (31)..(31): Xaa is C or S
SRVIMSMEGLVKPKRGVMIQITINSLAQPVX

SEQ ID NO: 74944 - protein, 37 aa, Artificial Sequence; identical to SEQ ID NO: 49764
  GFR-binding peptide
  MOD_RES (31)..(32): Xaa is C or S

SEQ ID NO: 74945 - protein, 35 aa, Artificial Sequence
  GFR-binding peptide
  MOD_RES (2)..(2): Xaa is C or S
  MOD_RES (14)..(15)..(16)..(17)..(18): Xaa is A or G
  MOD_RES (19)..(20)..(21)..(22): Xaa is A or G or is absent
GXSEVVMDSMEGLXXXXXXXXXMIQITINSLRTPV

SEQ ID NO: 74946 - protein, 34 aa, Artificial Sequence
  GFR-binding peptide
  MOD_RES (1)..(34): Xaa is C or S
  MOD_RES (12)..(13)..(14)..(15)..(16): Xaa is A or G
  MOD_RES (17)..(18)..(19)..(20): Xaa is A or G or is absent
XEEVIMSMEGLXXXXXXXXXMIQMTINSTKVPAX

SEQ ID NO: 74947 - protein, 34 aa, Artificial Sequence
  GFR-binding peptide
  MOD_RES (32)..(33): Xaa is C or S
AEVVMDSMEGLVVNNAADMIQITINSLRAPVXXS

SEQ ID NO: 74948 - protein, 31 aa, Artificial Sequence
  GFR-binding peptide
RDVVMGSMEGIIIQQKDNMIQMTINSMKTPT

SEQ ID NO: 74949 - protein, 39 aa, Artificial Sequence
  GFR-binding peptide
  MOD_RES (2)..(4)..(36)..(37): Xaa is C or S
RXGXAEVVMDSMEGLVVNNAADMIQITINSLRAPVXXSA

SEQ ID NO: 74950 - protein, 40 aa, Artificial Sequence
  GFR-binding peptide
  MOD_RES (2)..(34)..(35): Xaa is C or S
GXSEVVMDSMEGIVVNNASDMIQITINSLRTPVXXTPPTS

SEQ ID NO: 74951 - protein, 37 aa, Artificial Sequence; identical to SEQ ID NO: 17616
  GFR-binding peptide
  MOD_RES (33)..(33): Xaa is C or S

SEQ ID NO: 74952 - protein, 37 aa, Artificial Sequence
  GFR-binding peptide
  MOD_RES (1)..(33)..(34): Xaa is C or S
XSEVVMDSMEGLVVNNASDMIQITINSLRTPVXXTPP

SEQ ID NO: 74953 - protein, 35 aa, Artificial Sequence
  GFR-binding peptide
  MOD_RES (32)..(33): Xaa is C or S
RDVVMGSMEGLIIQQKDNMIQMTINSMKTPTXXPG

SEQ ID NO: 74954 - protein, 36 aa, Artificial Sequence; identical to SEQ ID NO: 17618
  GFR-binding peptide
  MOD_RES (1)..(1): Xaa is C or S
  MOD_RES (14)..(15)..(16)..(17)..(18): Xaa is A or G
  MOD_RES (19)..(20)..(21)..(22): Xaa is A or G or is absent

SEQ ID NO: 74955 - protein, 39 aa, Artificial Sequence; identical to SEQ ID NO: 17620
  GFR-binding peptide
  MOD_RES (1)..(38): Xaa is C or S
  MOD_RES (14)..(15)..(16)..(17)..(18): Xaa is A or G
  MOD_RES (19)..(20)..(21)..(22): Xaa is A or G or is absent

SEQ ID NO: 74956 - protein, 38 aa, Artificial Sequence; identical to SEQ ID NO: 17621
  GFR-binding peptide
  MOD_RES (2)..(36): Xaa is C or S
  MOD_RES (14)..(15)..(16)..(17)..(18): Xaa is A or G
  MOD_RES (19)..(20)..(21)..(22): Xaa is A or G or is absent

SEQ ID NO: 74957 - protein, 36 aa, Artificial Sequence
  GFR-binding peptide
  MOD_RES (1)..(3)..(34)..(35): Xaa is C or S
XGXEEVIMSMEGILLVRGNDMIQMTINSTKVPAXXT

SEQ ID NO: 74958 - protein, 41 aa, Artificial Sequence; identical to SEQ ID NO: 17622
  GFR-binding peptide
  MOD_RES (1)..(35): Xaa is C or S

SEQ ID NO: 74959 - protein, 38 aa, Artificial Sequence
  GFR-binding peptide
  MOD_RES (32)..(33): Xaa is C or S
RDVVMGSMEGIIIQQKDNMIQMTINSMKTPTXXPGASG

SEQ ID NO: 74960 - protein, 41 aa, Artificial Sequence; identical to SEQ ID NO: 17624
  GFR-binding peptide
  MOD_RES (2)..(36): Xaa is C or S
  MOD_RES (14)..(15)..(16)..(17)..(18): Xaa is A or G
  MOD_RES (19)..(20)..(21)..(22): Xaa is A or G or is absent

SEQ ID NO: 74961 - protein, 41 aa, Artificial Sequence; identical to SEQ ID NO: 49777
  GFR-binding peptide
  MOD_RES (2)..(35)..(36): Xaa is C or S
  MOD_RES (13)..(14)..(15)..(16)..(17): Xaa is A or G
  MOD_RES (18)..(19)..(20)..(21): Xaa is A or G or is absent

SEQ ID NO: 74962 - protein, 36 aa, Artificial Sequence; identical to SEQ ID NO: 49778
  GFR-binding peptide
  MOD_RES (2)..(35)..(36): Xaa is C or S
  MOD_RES (13)..(14)..(15)..(16)..(17): Xaa is A or G
  MOD_RES (18)..(19)..(20)..(21): Xaa is A or G or is absent

SEQ ID NO: 74963 - protein, 39 aa, Artificial Sequence; identical to SEQ ID NO: 17625
  GFR-binding peptide
  MOD_RES (1)..(35): Xaa is C or S
  MOD_RES (13)..(14)..(15)..(16)..(17): Xaa is A or G
  MOD_RES (18)..(19)..(20)..(21): Xaa is A or G or is absent

SEQ ID NO: 74964 - protein, 37 aa, Artificial Sequence
  GFR-binding peptide
  MOD_RES (2)..(4)..(36)..(37): Xaa is C or S
RXGXAEVVMDSMEGIVVNNAADMIQITINSLRAPVXX

SEQ ID NO: 74965 - protein, 37 aa, Artificial Sequence; identical to SEQ ID NO: 17626
  GFR-binding peptide
  MOD_RES (35)..(35): Xaa is C or S
  MOD_RES (11)..(12)..(13)..(14)..(15): Xaa is A or G
  MOD_RES (16)..(17)..(18)..(19): Xaa is A or G or is absent

SEQ ID NO: 74966 - protein, 37 aa, Artificial Sequence; identical to SEQ ID NO: 17628
  GFR-binding peptide
  MOD_RES (1)..(3): Xaa is C or S

SEQ ID NO: 74967 - protein, 37 aa, Artificial Sequence; identical to SEQ ID NO: 17629
  GFR-binding peptide
  MOD_RES (33)..(33): Xaa is C or S

SEQ ID NO: 74968 - protein, 40 aa, Artificial Sequence; identical to SEQ ID NO: 17630
  GFR-binding peptide
  MOD_RES (2)..(4)..(38): Xaa is C or S

SEQ ID NO: 74969 - protein, 37 aa, Artificial Sequence
  GFR-binding peptide
  MOD_RES (2)..(4)..(36)..(37): Xaa is C or S
RXGXAEVVMDSMEGLVVNNAADMIQITINSLRAPVXX

SEQ ID NO: 74970 - protein, 35 aa, Artificial Sequence
  GFR-binding peptide
  MOD_RES (1)..(33)..(34): Xaa is C or S
XAEVVMDSMEGIVVNNAADMIQITINSLRAPVXXS

SEQ ID NO: 74971 - protein, 34 aa, Artificial Sequence; identical to SEQ ID NO: 17631
  GFR-binding peptide
  MOD_RES (13)..(14)..(15)..(16)..(17): Xaa is A or G
  MOD_RES (18)..(19)..(20)..(21): Xaa is A or G or is absent

SEQ ID NO: 74972 - protein, 39 aa, Artificial Sequence; identical to SEQ ID NO: 17632
  GFR-binding peptide
  MOD_RES (2)..(36): Xaa is C or S

SEQ ID NO: 74973 - protein, 38 aa, Artificial Sequence
  GFR-binding peptide
  MOD_RES (2)..(4)..(37)..(38): Xaa is C or S
  MOD_RES (15)..(16)..(17)..(18)..(19): Xaa is A or G
  MOD_RES (20)..(21)..(22)..(23): Xaa is A or G or is absent
LXGXEEVIMSMEGLXXXXXXXXXMIQMTINSTKVPAXX

SEQ ID NO: 74974 - protein, 36 aa, Artificial Sequence
  GFR-binding peptide
  MOD_RES (1)..(32)..(33): Xaa is C or S
XEEVIMSMEGLLLVRGNDMIQMTINSTKVPAXXTSP

SEQ ID NO: 74975 - protein, 40 aa, Artificial Sequence
  GFR-binding peptide
  MOD_RES (1)..(35)..(36): Xaa is C or S
  MOD_RES (13)..(14)..(15)..(16)..(17): Xaa is A or G
  MOD_RES (18)..(19)..(20)..(21): Xaa is A or G or is absent
XRDVVMGSMEGLXXXXXXXXXMIQMTINSMKTPTXXPGAS

SEQ ID NO: 74976 - protein, 42 aa, Artificial Sequence
  GFR-binding peptide
  MOD_RES (1)..(3)..(36)..(37): Xaa is C or S
  MOD_RES (14)..(15)..(16)..(17)..(18): Xaa is A or G
  MOD_RES (19)..(20)..(21)..(22): Xaa is A or G or is absent
XKXSRVIMSMEGLXXXXXXXXXMIQITINSLAQPVXXPAASA

SEQ ID NO: 74977 - protein, 35 aa, Artificial Sequence
  GFR-binding peptide
  MOD_RES (1)..(33)..(34): Xaa is C or S
XSEVVMDSMEGLVVNNASDMIQITINSLRTPVXXT

SEQ ID NO: 74978 - protein, 43 aa, Artificial Sequence; identical to SEQ ID NO: 17636
  GFR-binding peptide
  MOD_RES (2)..(4)..(38): Xaa is C or S

SEQ ID NO: 74979 - protein, 36 aa, Artificial Sequence; identical to SEQ ID NO: 17637
  GFR-binding peptide
  MOD_RES (2)..(2): Xaa is C or S

SEQ ID NO: 74980 - protein, 43 aa, Artificial Sequence; identical to SEQ ID NO: 17638
  GFR-binding peptide
  MOD_RES (2)..(4)..(38): Xaa is C or S

SEQ ID NO: 74981 - protein, 39 aa, Artificial Sequence; identical to SEQ ID NO: 17641
  GFR-binding peptide
  MOD_RES (36)..(36): Xaa is C or S
  MOD_RES (12)..(13)..(14)..(15)..(16): Xaa is A or G
  MOD_RES (17)..(18)..(19)..(20): Xaa is A or G or is absent

SEQ ID NO: 74982 - protein, 39 aa, Artificial Sequence; identical to SEQ ID NO: 17642
  GFR-binding peptide
  MOD_RES (1)..(3): Xaa is C or S
  MOD_RES (16)..(17)..(18)..(19)..(20): Xaa is A or G
  MOD_RES (21)..(22)..(23)..(24): Xaa is A or G or is absent

SEQ ID NO: 74983 - protein, 32 aa, Artificial Sequence; identical to SEQ ID NO: 17643
  GFR-binding peptide

SEQ ID NO: 74984 - protein, 37 aa, Artificial Sequence
  GFR-binding peptide
  MOD_RES (31)..(32): Xaa is C or S
SKVVMSMEGLVKPTRGVMIQITINSLDQPVXXPSASA

SEQ ID NO: 74985 - protein, 41 aa, Artificial Sequence; identical to SEQ ID NO: 17645
  GFR-binding peptide
  MOD_RES (1)..(3)..(40): Xaa is C or S
  MOD_RES (16)..(17)..(18)..(19)..(20): Xaa is A or G
  MOD_RES (21)..(22)..(23)..(24): Xaa is A or G or is absent

SEQ ID NO: 74986 - protein, 35 aa, Artificial Sequence; identical to SEQ ID NO: 17646
  GFR-binding peptide
  MOD_RES (13)..(14)..(15)..(16)..(17): Xaa is A or G
  MOD_RES (18)..(19)..(20)..(21): Xaa is A or G or is absent

SEQ ID NO: 74987 - protein, 35 aa, Artificial Sequence
  GFR-binding peptide
  MOD_RES (2)..(34)..(35): Xaa is C or S
GXRDVVMGSMEGIIIQQKDNMIQMTINSMKTPTXX

SEQ ID NO: 74988 - protein, 38 aa, Artificial Sequence; identical to SEQ ID NO: 17647
  GFR-binding peptide
  MOD_RES (37)..(37): Xaa is C or S

SEQ ID NO: 74989 - protein, 39 aa, Artificial Sequence; identical to SEQ ID NO: 17648
  GFR-binding peptide
  MOD_RES (2)..(36): Xaa is C or S
  MOD_RES (14)..(15)..(16)..(17)..(18): Xaa is A or G
  MOD_RES (19)..(20)..(21)..(22): Xaa is A or G or is absent

SEQ ID NO: 74990 - protein, 39 aa, Artificial Sequence; identical to SEQ ID NO: 17649
  GFR-binding peptide
  MOD_RES (1)..(35): Xaa is C or S

SEQ ID NO: 74991 - protein, 33 aa, Artificial Sequence; identical to SEQ ID NO: 17651
  GFR-binding peptide
  MOD_RES (33)..(33): Xaa is C or S
  MOD_RES (11)..(12)..(13)..(14)..(15): Xaa is A or G
  MOD_RES (16)..(17)..(18)..(19): Xaa is A or G or is absent

SEQ ID NO: 74992 - protein, 36 aa, Artificial Sequence
  GFR-binding peptide
  MOD_RES (1)..(3)..(34)..(35): Xaa is C or S
XGXEEVIMSMEGLLLVRGNDMIQMTINSTKVPAXXT

SEQ ID NO: 74993 - protein, 40 aa, Artificial Sequence
  GFR-binding peptide
  MOD_RES (1)..(3)..(34)..(35): Xaa is C or S
XKXSKVVMSMEGLVKPTRGVMIQITINSLDQPVXXPSASA

SEQ ID NO: 74994 - protein, 32 aa, Artificial Sequence; identical to SEQ ID NO: 17653
  GFR-binding peptide
  MOD_RES (11)..(12)..(13)..(14)..(15): Xaa is A or G
  MOD_RES (16)..(17)..(18)..(19): Xaa is A or G or is absent

SEQ ID NO: 74995 - protein, 39 aa, Artificial Sequence
  GFR-binding peptide
  MOD_RES (1)..(3)..(35)..(36): Xaa is C or S
XGXRDVVMGSMEGLIIQQKDNMIQMTINSMKTPTXXPGA

SEQ ID NO: 74996 - protein, 39 aa, Artificial Sequence; identical to SEQ ID NO: 17656
  GFR-binding peptide
  MOD_RES (35)..(35): Xaa is C or S
  MOD_RES (11)..(12)..(13)..(14)..(15): Xaa is A or G
  MOD_RES (16)..(17)..(18)..(19): Xaa is A or G or is absent

SEQ ID NO: 74997 - protein, 37 aa, Artificial Sequence; identical to SEQ ID NO: 17657
  GFR-binding peptide
  MOD_RES (1)..(3): Xaa is C or S

SEQ ID NO: 74998 - protein, 34 aa, Artificial Sequence
  GFR-binding peptide
  MOD_RES (1)..(32)..(33): Xaa is C or S
XSKVIMSMEGLIKPTKGIMIQITINSLDQSVXXP

SEQ ID NO: 74999 - protein, 35 aa, Artificial Sequence; identical to SEQ ID NO: 17660
  GFR-binding peptide
  MOD_RES (35)..(35): Xaa is C or S
  MOD_RES (11)..(12)..(13)..(14)..(15): Xaa is A or G
  MOD_RES (16)..(17)..(18)..(19): Xaa is A or G or is absent

SEQ ID NO: 75000 - protein, 34 aa, Artificial Sequence; identical to SEQ ID NO: 49812
  GFR-binding peptide
  MOD_RES (2)..(2): Xaa is C or S
  MOD_RES (13)..(14)..(15)..(16)..(17): Xaa is A or G
  MOD_RES (18)..(19)..(20)..(21): Xaa is A or G or is absent

SEQ ID NO: 75001 - protein, 35 aa, Artificial Sequence; identical to SEQ ID NO: 17662
  GFR-binding peptide
  MOD_RES (35)..(35): Xaa is C or S
  MOD_RES (11)..(12)..(13)..(14)..(15): Xaa is A or G
  MOD_RES (16)..(17)..(18)..(19): Xaa is A or G or is absent

SEQ ID NO: 75002 - protein, 38 aa, Artificial Sequence
  GFR-binding peptide
  MOD_RES (1)..(3)..(37)..(38): Xaa is C or S
  MOD_RES (15)..(16)..(17)..(18)..(19): Xaa is A or G
  MOD_RES (20)..(21)..(22)..(23): Xaa is A or G or is absent
XGXRDVVMGSMEGLXXXXXXXXXMIQMTINSMKTPTXX

SEQ ID NO: 75003 - protein, 33 aa, Artificial Sequence
  GFR-binding peptide
  MOD_RES (31)..(32): Xaa is C or S
SKVIMSMEGLIKPTKGIMIQITINSLDQSVXXP

SEQ ID NO: 75004 - protein, 38 aa, Artificial Sequence; identical to SEQ ID NO: 17665
  GFR-binding peptide
  MOD_RES (1)..(3)..(37): Xaa is C or S

SEQ ID NO: 75005 - protein, 39 aa, Artificial Sequence
  GFR-binding peptide
  MOD_RES (2)..(35)..(36): Xaa is C or S
  MOD_RES (13)..(14)..(15)..(16)..(17): Xaa is A or G
  MOD_RES (18)..(19)..(20)..(21): Xaa is A or G or is absent
GXEEVIMSMEGLXXXXXXXXXMIQMTINSTKVPAXXTSP

SEQ ID NO: 75006 - protein, 37 aa, Artificial Sequence
  GFR-binding peptide
  MOD_RES (34)..(35): Xaa is C or S
  MOD_RES (12)..(13)..(14)..(15)..(16): Xaa is A or G
  MOD_RES (17)..(18)..(19)..(20): Xaa is A or G or is absent
SEVVMDSMEGIXXXXXXXXXMIQITINSLRTPVXXTP

SEQ ID NO: 75007 - protein, 39 aa, Artificial Sequence; identical to SEQ ID NO: 49817
  GFR-binding peptide
  MOD_RES (1)..(3)..(34)..(35): Xaa is C or S

SEQ ID NO: 75008 - protein, 39 aa, Artificial Sequence
  GFR-binding peptide
  MOD_RES (34)..(35): Xaa is C or S
  MOD_RES (12)..(13)..(14)..(15)..(16): Xaa is A or G
  MOD_RES (17)..(18)..(19)..(20): Xaa is A or G or is absent
SEVVMDSMEGIXXXXXXXXXMIQITINSLRTPVXXTPPT

SEQ ID NO: 75009 - protein, 36 aa, Artificial Sequence; identical to SEQ ID NO: 47261
  GFR-binding peptide
  MOD_RES (1)..(3)..(36): Xaa is C or S
  MOD_RES (14)..(15)..(16)..(17)..(18): Xaa is A or G
  MOD_RES (19)..(20)..(21)..(22): Xaa is A or G or is absent

SEQ ID NO: 75010 - protein, 45 aa, Artificial Sequence; identical to SEQ ID NO: 17671
  GFR-binding peptide
  MOD_RES (2)..(4)..(41): Xaa is C or S
  MOD_RES (17)..(18)..(19)..(20)..(21): Xaa is A or G
  MOD_RES (22)..(23)..(24)..(25): Xaa is A or G or is absent

SEQ ID NO: 75011 - protein, 39 aa, Artificial Sequence
  GFR-binding peptide
  MOD_RES (2)..(35)..(36): Xaa is C or S
  MOD_RES (13)..(14)..(15)..(16)..(17): Xaa is A or G
  MOD_RES (18)..(19)..(20)..(21): Xaa is A or G or is absent
GXEEVIMSMEGIXXXXXXXXXMIQMTINSTKVPAXXTSP

SEQ ID NO: 75012 - protein, 39 aa, Artificial Sequence
  GFR-binding peptide
  MOD_RES (34)..(35): Xaa is C or S
  MOD_RES (12)..(13)..(14)..(15)..(16): Xaa is A or G
  MOD_RES (17)..(18)..(19)..(20): Xaa is A or G or is absent
SRVVMNSMEGLXXXXXXXXXMIQVTINSLKTPAXXPKPV

SEQ ID NO: 75013 - protein, 32 aa, Artificial Sequence; identical to SEQ ID NO: 17672
  GFR-binding peptide

SEQ ID NO: 75014 - protein, 35 aa, Artificial Sequence
  GFR-binding peptide
  MOD_RES (33)..(34): Xaa is C or S
  MOD_RES (11)..(12)..(13)..(14)..(15): Xaa is A or G
  MOD_RES (16)..(17)..(18)..(19): Xaa is A or G or is absent
SRVIMSMEGLXXXXXXXXXMIQITINSLAQPVXXP

SEQ ID NO: 75015 - protein, 38 aa, Artificial Sequence; identical to SEQ ID NO: 49827
  GFR-binding peptide
  MOD_RES (1)..(33)..(34): Xaa is C or S

SEQ ID NO: 75016 - protein, 34 aa, Artificial Sequence
  GFR-binding peptide
  MOD_RES (1)..(3): Xaa is C or S
XGXAEVVMDSMEGLVVNNAADMIQITINSLRAPV

SEQ ID NO: 75017 - protein, 37 aa, Artificial Sequence
  GFR-binding peptide
  MOD_RES (2)..(33)..(34): Xaa is C or S
GXEEVIMSMEGLLLVRGNDMIQMTINSTKVPAXXTSP

SEQ ID NO: 75018 - protein, 32 aa, Artificial Sequence; identical to SEQ ID NO: 17675
  GFR-binding peptide

SEQ ID NO: 75019 - protein, 37 aa, Artificial Sequence; identical to SEQ ID NO: 17676
  GFR-binding peptide
  MOD_RES (37)..(37): Xaa is C or S
  MOD_RES (13)..(14)..(15)..(16)..(17): Xaa is A or G
  MOD_RES (18)..(19)..(20)..(21): Xaa is A or G or is absent

SEQ ID NO: 75020 - protein, 35 aa, Artificial Sequence; identical to SEQ ID NO: 17677
  GFR-binding peptide

SEQ ID NO: 75021 - protein, 39 aa, Artificial Sequence
  GFR-binding peptide
  MOD_RES (1)..(3)..(37)..(38): Xaa is C or S
  MOD_RES (15)..(16)..(17)..(18)..(19): Xaa is A or G
  MOD_RES (20)..(21)..(22)..(23): Xaa is A or G or is absent
XGXRDVVMGSMEGLXXXXXXXXXMIQMTINSMKTPTXXP

SEQ ID NO: 75022 - protein, 36 aa, Artificial Sequence; identical to SEQ ID NO: 17679
  GFR-binding peptide
  MOD_RES (34)..(34): Xaa is C or S

SEQ ID NO: 75023 - protein, 41 aa, Artificial Sequence; identical to SEQ ID NO: 17682
  GFR-binding peptide
  MOD_RES (2)..(4)..(41): Xaa is C or S
  MOD_RES (17)..(18)..(19)..(20)..(21): Xaa is A or G
  MOD_RES (22)..(23)..(24)..(25): Xaa is A or G or is absent

SEQ ID NO: 75024 - protein, 36 aa, Artificial Sequence
  GFR-binding peptide
  MOD_RES (1)..(34)..(35): Xaa is C or S
  MOD_RES (12)..(13)..(14)..(15)..(16): Xaa is A or G
  MOD_RES (17)..(18)..(19)..(20): Xaa is A or G or is absent
XSRVIMSMEGLXXXXXXXXXMIQITINSLAQPVXXP

SEQ ID NO: 75025 - protein, 41 aa, Artificial Sequence
  GFR-binding peptide
  MOD_RES (2)..(4)..(36)..(37): Xaa is C or S
RXGXAEVVMDSMEGLVVNNAADMIQITINSLRAPVXXSAPA

SEQ ID NO: 75026 - protein, 43 aa, Artificial Sequence; identical to SEQ ID NO: 17683
  GFR-binding peptide
  MOD_RES (2)..(4)..(38): Xaa is C or S
  MOD_RES (16)..(17)..(18)..(19)..(20): Xaa is A or G
  MOD_RES (21)..(22)..(23)..(24): Xaa is A or G or is absent

SEQ ID NO: 75027 - protein, 40 aa, Artificial Sequence; identical to SEQ ID NO: 17684
  GFR-binding peptide
  MOD_RES (2)..(39): Xaa is C or S

SEQ ID NO: 75028 - protein, 32 aa, Artificial Sequence; identical to SEQ ID NO: 17685
  GFR-binding peptide
  MOD_RES (11)..(12)..(13)..(14)..(15): Xaa is A or G
  MOD_RES (16)..(17)..(18)..(19): Xaa is A or G or is absent

SEQ ID NO: 75029 - protein, 35 aa, Artificial Sequence
  GFR-binding peptide
  MOD_RES (32)..(33): Xaa is C or S
AEVVMDSMEGLVVNNAADMIQITINSLRAPVXXSA

SEQ ID NO: 75030 - protein, 35 aa, Artificial Sequence; identical to SEQ ID NO: 17686
  GFR-binding peptide
  MOD_RES (13)..(14)..(15)..(16)..(17): Xaa is A or G
  MOD_RES (18)..(19)..(20)..(21): Xaa is A or G or is absent

SEQ ID NO: 75031 - protein, 37 aa, Artificial Sequence; identical to SEQ ID NO: 17687
  GFR-binding peptide
  MOD_RES (2)..(4): Xaa is C or S

SEQ ID NO: 75032 - protein, 33 aa, Artificial Sequence; identical to SEQ ID NO: 47299
  GFR-binding peptide
  MOD_RES (1)..(3): Xaa is C or S

SEQ ID NO: 75033 - protein, 38 aa, Artificial Sequence; identical to SEQ ID NO: 17690
  GFR-binding peptide
  MOD_RES (1)..(3): Xaa is C or S
  MOD_RES (16)..(17)..(18)..(19)..(20): Xaa is A or G
  MOD_RES (21)..(22)..(23)..(24): Xaa is A or G or is absent

SEQ ID NO: 75034 - protein, 37 aa, Artificial Sequence; identical to SEQ ID NO: 17693
  GFR-binding peptide
  MOD_RES (2)..(36): Xaa is C or S
  MOD_RES (14)..(15)..(16)..(17)..(18): Xaa is A or G
  MOD_RES (19)..(20)..(21)..(22): Xaa is A or G or is absent

SEQ ID NO: 75035 - protein, 37 aa, Artificial Sequence; identical to SEQ ID NO: 49857
  GFR-binding peptide
  MOD_RES (2)..(4)..(36)..(37): Xaa is C or S

SEQ ID NO: 75036 - protein, 35 aa, Artificial Sequence; identical to SEQ ID NO: 47309
  GFR-binding peptide
  MOD_RES (1)..(3)..(35): Xaa is C or S

SEQ ID NO: 75037 - protein, 43 aa, Artificial Sequence; identical to SEQ ID NO: 17694
  GFR-binding peptide
  MOD_RES (2)..(39): Xaa is C or S
  MOD_RES (15)..(16)..(17)..(18)..(19): Xaa is A or G
  MOD_RES (20)..(21)..(22)..(23): Xaa is A or G or is absent

SEQ ID NO: 75038 - protein, 35 aa, Artificial Sequence
  GFR-binding peptide
  MOD_RES (2)..(33)..(34): Xaa is C or S
KXSRVIMSMEGLVKPKRGVMIQITINSLAQPVXXP

SEQ ID NO: 75039 - protein, 38 aa, Artificial Sequence
  GFR-binding peptide
  MOD_RES (2)..(4)..(38): Xaa is C or S
  MOD_RES (16)..(17)..(18)..(19)..(20): Xaa is A or G
  MOD_RES (21)..(22)..(23)..(24): Xaa is A or G or is absent
SXGXRDVVMGSMEGLXXXXXXXXXMIQMTINSMKTPTX

SEQ ID NO: 75040 - protein, 40 aa, Artificial Sequence
  GFR-binding peptide
  MOD_RES (2)..(36)..(37): Xaa is C or S
  MOD_RES (14)..(15)..(16)..(17)..(18): Xaa is A or G
  MOD_RES (19)..(20)..(21)..(22): Xaa is A or G or is absent
GXSEVVMDSMEGIXXXXXXXXXMIQITINSLRTPVXXTPP

SEQ ID NO: 75041 - protein, 35 aa, Artificial Sequence
  GFR-binding peptide
  MOD_RES (32)..(33): Xaa is C or S
SRVVMNSMEGLIVNSSDDMIQVTINSLKTPAXXPK

SEQ ID NO: 75042 - protein, 36 aa, Artificial Sequence; identical to SEQ ID NO: 49865
  GFR-binding peptide
  MOD_RES (2)..(35)..(36): Xaa is C or S
  MOD_RES (13)..(14)..(15)..(16)..(17): Xaa is A or G
  MOD_RES (18)..(19)..(20)..(21): Xaa is A or G or is absent

SEQ ID NO: 75043 - protein, 42 aa, Artificial Sequence; identical to SEQ ID NO: 17696
  GFR-binding peptide
  MOD_RES (2)..(4)..(41): Xaa is C or S
  MOD_RES (17)..(18)..(19)..(20)..(21): Xaa is A or G
  MOD_RES (22)..(23)..(24)..(25): Xaa is A or G or is absent

SEQ ID NO: 75044 - protein, 41 aa, Artificial Sequence
  GFR-binding peptide
  MOD_RES (1)..(3)..(37)..(38): Xaa is C or S
  MOD_RES (15)..(16)..(17)..(18)..(19): Xaa is A or G
  MOD_RES (20)..(21)..(22)..(23): Xaa is A or G or is absent
XGXAEVVMDSMEGLXXXXXXXXXMIQITINSLRAPVXXSAP

SEQ ID NO: 75045 - protein, 39 aa, Artificial Sequence; identical to SEQ ID NO: 17698
  GFR-binding peptide
  MOD_RES (2)..(36): Xaa is C or S
  MOD_RES (14)..(15)..(16)..(17)..(18): Xaa is A or G
  MOD_RES (19)..(20)..(21)..(22): Xaa is A or G or is absent

SEQ ID NO: 75046 - protein, 38 aa, Artificial Sequence; identical to SEQ ID NO: 17699
  GFR-binding peptide
  MOD_RES (2)..(4): Xaa is C or S
  MOD_RES (17)..(18)..(19)..(20)..(21): Xaa is A or G
  MOD_RES (22)..(23)..(24)..(25): Xaa is A or G or is absent

SEQ ID NO: 75047 - protein, 38 aa, Artificial Sequence
  GFR-binding peptide
  MOD_RES (32)..(33): Xaa is C or S
SRVVMNSMEGLIVNSSDDMIQVTINSLKTPAXXPKPVH

SEQ ID NO: 75048 - protein, 41 aa, Artificial Sequence
  GFR-binding peptide
  MOD_RES (1)..(35)..(36): Xaa is C or S
  MOD_RES (13)..(14)..(15)..(16)..(17): Xaa is A or G
  MOD_RES (18)..(19)..(20)..(21): Xaa is A or G or is absent
XSEVVMDSMEGLXXXXXXXXXMIQITINSLRTPVXXTPPTS

SEQ ID NO: 75049 - protein, 39 aa, Artificial Sequence; identical to SEQ ID NO: 49875
  GFR-binding peptide
  MOD_RES (1)..(34)..(35): Xaa is C or S
  MOD_RES (12)..(13)..(14)..(15)..(16): Xaa is A or G
  MOD_RES (17)..(18)..(19)..(20): Xaa is A or G or is absent

SEQ ID NO: 75050 - protein, 37 aa, Artificial Sequence
  GFR-binding peptide
  MOD_RES (1)..(3)..(37): Xaa is C or S
  MOD_RES (15)..(16)..(17)..(18)..(19): Xaa is A or G
  MOD_RES (20)..(21)..(22)..(23): Xaa is A or G or is absent
XGXSRVVMNSMEGLXXXXXXXXXMIQVTINSLKTPAX

SEQ ID NO: 75051 - protein, 39 aa, Artificial Sequence
  GFR-binding peptide
  MOD_RES (2)..(4)..(37)..(38): Xaa is C or S
  MOD_RES (15)..(16)..(17)..(18)..(19): Xaa is A or G
  MOD_RES (20)..(21)..(22)..(23): Xaa is A or G or is absent
SXKXSKVIMSMEGLXXXXXXXXXMIQITINSLDQSVXXP

SEQ ID NO: 75052 - protein, 39 aa, Artificial Sequence; identical to SEQ ID NO: 17702
  GFR-binding peptide
  MOD_RES (2)..(4): Xaa is C or S

SEQ ID NO: 75053 - protein, 39 aa, Artificial Sequence; identical to SEQ ID NO: 17703
  GFR-binding peptide
  MOD_RES (2)..(4)..(38): Xaa is C or S
  MOD_RES (16)..(17)..(18)..(19)..(20): Xaa is A or G
  MOD_RES (21)..(22)..(23)..(24): Xaa is A or G or is absent

SEQ ID NO: 75054 - protein, 35 aa, Artificial Sequence
  GFR-binding peptide
  MOD_RES (31)..(32): Xaa is C or S
EVVMDSMEGLVVNNASDMIQITINSLRTPVXXTPP

SEQ ID NO: 75055 - protein, 35 aa, Artificial Sequence; identical to SEQ ID NO: 49877
  GFR-binding peptide
  MOD_RES (2)..(33)..(34): Xaa is C or S

SEQ ID NO: 75056 - protein, 36 aa, Artificial Sequence
  GFR-binding peptide
  MOD_RES (2)..(35)..(36): Xaa is C or S
  MOD_RES (13)..(14)..(15)..(16)..(17): Xaa is A or G
  MOD_RES (18)..(19)..(20)..(21): Xaa is A or G or is absent
KXSKVVMSMEGLXXXXXXXXXMIQITINSLDQPVXX

SEQ ID NO: 75057 - protein, 35 aa, Artificial Sequence; identical to SEQ ID NO: 47338
  GFR-binding peptide
  MOD_RES (1)..(3): Xaa is C or S
  MOD_RES (14)..(15)..(16)..(17)..(18): Xaa is A or G
  MOD_RES (19)..(20)..(21)..(22): Xaa is A or G or is absent

SEQ ID NO: 75058 - protein, 38 aa, Artificial Sequence
  GFR-binding peptide
  MOD_RES (1)..(32)..(33): Xaa is C or S
XEEVIMSMEGLLLVRGNDMIQMTINSTKVPAXXTSPVR

SEQ ID NO: 75059 - protein, 37 aa, Artificial Sequence
  GFR-binding peptide
  MOD_RES (1)..(3)..(35)..(36): Xaa is C or S
XGXAEVVMDSMEGIVVNNAADMIQITINSLRAPVXXS

SEQ ID NO: 75060 - protein, 35 aa, Artificial Sequence
  GFR-binding peptide
  MOD_RES (2)..(33)..(34): Xaa is C or S
KXSKVIMSMEGLIKPTKGIMIQITINSLDQSVXXP

SEQ ID NO: 75061 - protein, 36 aa, Artificial Sequence
  GFR-binding peptide
  MOD_RES (1)..(33)..(34): Xaa is C or S
XAEVVMDSMEGIVVNNAADMIQITINSLRAPVXXSA

SEQ ID NO: 75062 - protein, 32 aa, Artificial Sequence; identical to SEQ ID NO: 49884
  GFR-binding peptide
  MOD_RES (31)..(32): Xaa is C or S

SEQ ID NO: 75063 - protein, 31 aa, Artificial Sequence
  GFR-binding peptide
AEVVMDSMEGIVVNNAADMIQITINSLRAPV

SEQ ID NO: 75064 - protein, 39 aa, Artificial Sequence; identical to SEQ ID NO: 17708
  GFR-binding peptide
  MOD_RES (1)..(3)..(37): Xaa is C or S
  MOD_RES (15)..(16)..(17)..(18)..(19): Xaa is A or G
  MOD_RES (20)..(21)..(22)..(23): Xaa is A or G or is absent

SEQ ID NO: 75065 - protein, 44 aa, Artificial Sequence
  GFR-binding peptide
  MOD_RES (2)..(4)..(38)..(39): Xaa is C or S
  MOD_RES (16)..(17)..(18)..(19)..(20): Xaa is A or G
  MOD_RES (21)..(22)..(23)..(24): Xaa is A or G or is absent
RXGXSEVVMDSMEGLXXXXXXXXXMIQITINSLRTPVXXTPPTS

SEQ ID NO: 75066 - protein, 36 aa, Artificial Sequence
  GFR-binding peptide
  MOD_RES (2)..(34)..(35): Xaa is C or S
GXSRVVMNSMEGLIVNSSDDMIQVTINSLKTPAXXP

SEQ ID NO: 75067 - protein, 37 aa, Artificial Sequence; identical to SEQ ID NO: 17711
  GFR-binding peptide
  MOD_RES (36)..(36): Xaa is C or S
  MOD_RES (12)..(13)..(14)..(15)..(16): Xaa is A or G
  MOD_RES (17)..(18)..(19)..(20): Xaa is A or G or is absent

SEQ ID NO: 75068 - protein, 38 aa, Artificial Sequence
  GFR-binding peptide
  MOD_RES (33)..(34): Xaa is C or S
  MOD_RES (11)..(12)..(13)..(14)..(15): Xaa is A or G
  MOD_RES (16)..(17)..(18)..(19): Xaa is A or G or is absent
DVVMGSMEGLXXXXXXXXXMIQMTINSMKTPTXXPGAS

SEQ ID NO: 75069 - protein, 41 aa, Artificial Sequence; identical to SEQ ID NO: 47360
  GFR-binding peptide
  MOD_RES (2)..(4)..(35)..(36): Xaa is C or S

SEQ ID NO: 75070 - protein, 34 aa, Artificial Sequence
  GFR-binding peptide
  MOD_RES (33)..(34): Xaa is C or S
  MOD_RES (11)..(12)..(13)..(14)..(15): Xaa is A or G
  MOD_RES (16)..(17)..(18)..(19): Xaa is A or G or is absent
EEVIMSMEGLXXXXXXXXXMIQMTINSTKVPAXX

SEQ ID NO: 75071 - protein, 35 aa, Artificial Sequence; identical to SEQ ID NO: 17714
  GFR-binding peptide
  MOD_RES (12)..(13)..(14)..(15)..(16): Xaa is A or G
  MOD_RES (17)..(18)..(19)..(20): Xaa is A or G or is absent

SEQ ID NO: 75072 - protein, 36 aa, Artificial Sequence; identical to SEQ ID NO: 17715
  GFR-binding peptide
  MOD_RES (33)..(33): Xaa is C or S
  MOD_RES (11)..(12)..(13)..(14)..(15): Xaa is A or G
  MOD_RES (16)..(17)..(18)..(19): Xaa is A or G or is absent

SEQ ID NO: 75073 - protein, 35 aa, Artificial Sequence; identical to SEQ ID NO: 17716
  GFR-binding peptide
  MOD_RES (34)..(34): Xaa is C or S

SEQ ID NO: 75074 - protein, 39 aa, Artificial Sequence
  GFR-binding peptide
  MOD_RES (2)..(36)..(37): Xaa is C or S
  MOD_RES (14)..(15)..(16)..(17)..(18): Xaa is A or G
  MOD_RES (19)..(20)..(21)..(22): Xaa is A or G or is absent
GXSEVVMDSMEGLXXXXXXXXXMIQITINSLRTPVXXTP

SEQ ID NO: 75075 - protein, 31 aa, Artificial Sequence
  GFR-binding peptide
  MOD_RES (1)..(1): Xaa is C or S
XEEVIMSMEGLLLVRGNDMIQMTINSTKVPA

SEQ ID NO: 75076 - protein, 38 aa, Artificial Sequence
  GFR-binding peptide
  MOD_RES (2)..(33)..(34): Xaa is C or S
GXEEVIMSMEGLLLVRGNDMIQMTINSTKVPAXXTSPV

SEQ ID NO: 75077 - protein, 39 aa, Artificial Sequence
  GFR-binding peptide
  MOD_RES (2)..(36)..(37): Xaa is C or S
  MOD_RES (14)..(15)..(16)..(17)..(18): Xaa is A or G
  MOD_RES (19)..(20)..(21)..(22): Xaa is A or G or is absent
GXSEVVMDSMEGIXXXXXXXXXMIQITINSLRTPVXXTP

SEQ ID NO: 75078 - protein, 36 aa, Artificial Sequence; identical to SEQ ID NO: 17719
  GFR-binding peptide
  MOD_RES (36)..(36): Xaa is C or S

SEQ ID NO: 75079 - protein, 41 aa, Artificial Sequence; identical to SEQ ID NO: 17720
  GFR-binding peptide
  MOD_RES (2)..(36): Xaa is C or S
  MOD_RES (14)..(15)..(16)..(17)..(18): Xaa is A or G
  MOD_RES (19)..(20)..(21)..(22): Xaa is A or G or is absent

SEQ ID NO: 75080 - protein, 33 aa, Artificial Sequence
  GFR-binding peptide
  MOD_RES (31)..(32): Xaa is C or S
SKVVMSMEGLVKPTRGVMIQITINSLDQPVXXP

SEQ ID NO: 75081 - protein, 38 aa, Artificial Sequence; identical to SEQ ID NO: 17722
  GFR-binding peptide
  MOD_RES (2)..(4): Xaa is C or S

SEQ ID NO: 75082 - protein, 35 aa, Artificial Sequence; identical to SEQ ID NO: 47374
  GFR-binding peptide
  MOD_RES (1)..(3): Xaa is C or S
  MOD_RES (14)..(15)..(16)..(17)..(18): Xaa is A or G
  MOD_RES (19)..(20)..(21)..(22): Xaa is A or G or is absent

SEQ ID NO: 75083 - protein, 32 aa, Artificial Sequence; identical to SEQ ID NO: 47375
  GFR-binding peptide
  MOD_RES (1)..(32): Xaa is C or S

SEQ ID NO: 75084 - protein, 38 aa, Artificial Sequence; identical to SEQ ID NO: 17724
  GFR-binding peptide
  MOD_RES (1)..(38): Xaa is C or S
  MOD_RES (14)..(15)..(16)..(17)..(18): Xaa is A or G
  MOD_RES (19)..(20)..(21)..(22): Xaa is A or G or is absent

SEQ ID NO: 75085 - protein, 31 aa, Artificial Sequence; identical to SEQ ID NO: 49910
  GFR-binding peptide
  MOD_RES (31)..(31): Xaa is C or S

SEQ ID NO: 75086 - protein, 37 aa, Artificial Sequence
  GFR-binding peptide
  MOD_RES (1)..(33)..(34): Xaa is C or S
XSRVVMNSMEGLIVNSSDDMIQVTINSLKTPAXXPKP

SEQ ID NO: 75087 - protein, 38 aa, Artificial Sequence
  GFR-binding peptide
  MOD_RES (34)..(35): Xaa is C or S
  MOD_RES (12)..(13)..(14)..(15)..(16): Xaa is A or G
  MOD_RES (17)..(18)..(19)..(20): Xaa is A or G or is absent
SEVVMDSMEGIXXXXXXXXXMIQITINSLRTPVXXTPP

SEQ ID NO: 75088 - protein, 34 aa, Artificial Sequence
  GFR-binding peptide
  MOD_RES (33)..(34): Xaa is C or S
  MOD_RES (11)..(12)..(13)..(14)..(15): Xaa is A or G
  MOD_RES (16)..(17)..(18)..(19): Xaa is A or G or is absent
EVVMDSMEGIXXXXXXXXXMIQITINSLRTPVXX

SEQ ID NO: 75089 - protein, 41 aa, Artificial Sequence
  GFR-binding peptide
  MOD_RES (2)..(4)..(36)..(37): Xaa is C or S
RXGXSEVVMDSMEGLVVNNASDMIQITINSLRTPVXXTPPT

SEQ ID NO: 75090 - protein, 35 aa, Artificial Sequence
  GFR-binding peptide
  MOD_RES (34)..(35): Xaa is C or S
  MOD_RES (12)..(13)..(14)..(15)..(16): Xaa is A or G
  MOD_RES (17)..(18)..(19)..(20): Xaa is A or G or is absent
SEVVMDSMEGLXXXXXXXXXMIQITINSLRTPVXX

SEQ ID NO: 75091 - protein, 39 aa, Artificial Sequence; identical to SEQ ID NO: 17728
  GFR-binding peptide
  MOD_RES (2)..(39): Xaa is C or S
  MOD_RES (15)..(16)..(17)..(18)..(19): Xaa is A or G
  MOD_RES (20)..(21)..(22)..(23): Xaa is A or G or is absent

SEQ ID NO: 75092 - protein, 38 aa, Artificial Sequence; identical to SEQ ID NO: 47391
  GFR-binding peptide
  MOD_RES (1)..(34)..(35): Xaa is C or S
  MOD_RES (12)..(13)..(14)..(15)..(16): Xaa is A or G
  MOD_RES (17)..(18)..(19)..(20): Xaa is A or G or is absent

SEQ ID NO: 75093 - protein, 41 aa, Artificial Sequence
  GFR-binding peptide
  MOD_RES (2)..(4)..(38)..(39): Xaa is C or S
  MOD_RES (16)..(17)..(18)..(19)..(20): Xaa is A or G
  MOD_RES (21)..(22)..(23)..(24): Xaa is A or G or is absent
SXGXRDVVMGSMEGLXXXXXXXXXMIQMTINSMKTPTXXPG

SEQ ID NO: 75094 - protein, 33 aa, Artificial Sequence; identical to SEQ ID NO: 17731
  GFR-binding peptide

SEQ ID NO: 75095 - protein, 40 aa, Artificial Sequence
  GFR-binding peptide
  MOD_RES (2)..(4)..(36)..(37): Xaa is C or S
SXGXRDVVMGSMEGIIIQQKDNMIQMTINSMKTPTXXPGA

SEQ ID NO: 75096 - protein, 43 aa, Artificial Sequence; identical to SEQ ID NO: 17732
  GFR-binding peptide
  MOD_RES (1)..(3)..(40): Xaa is C or S
  MOD_RES (16)..(17)..(18)..(19)..(20): Xaa is A or G
  MOD_RES (21)..(22)..(23)..(24): Xaa is A or G or is absent

SEQ ID NO: 75097 - protein, 34 aa, Artificial Sequence
  GFR-binding peptide
  MOD_RES (34)..(34): Xaa is C or S
  MOD_RES (12)..(13)..(14)..(15)..(16): Xaa is A or G
  MOD_RES (17)..(18)..(19)..(20): Xaa is A or G or is absent
SEVVMDSMEGLXXXXXXXXXMIQITINSLRTPVX

SEQ ID NO: 75098 - protein, 39 aa, Artificial Sequence; identical to SEQ ID NO: 17733
  GFR-binding peptide
  MOD_RES (1)..(35): Xaa is C or S
  MOD_RES (13)..(14)..(15)..(16)..(17): Xaa is A or G
  MOD_RES (18)..(19)..(20)..(21): Xaa is A or G or is absent

SEQ ID NO: 75099 - protein, 36 aa, Artificial Sequence; identical to SEQ ID NO: 49921
  GFR-binding peptide
  MOD_RES (31)..(32): Xaa is C or S

SEQ ID NO: 75100 - protein, 44 aa, Artificial Sequence; identical to SEQ ID NO: 17735
  GFR-binding peptide
  MOD_RES (2)..(4)..(38): Xaa is C or S
  MOD_RES (16)..(17)..(18)..(19)..(20): Xaa is A or G
  MOD_RES (21)..(22)..(23)..(24): Xaa is A or G or is absent

SEQ ID NO: 75101 - protein, 40 aa, Artificial Sequence
  GFR-binding peptide
  MOD_RES (2)..(4)..(37)..(38): Xaa is C or S
  MOD_RES (15)..(16)..(17)..(18)..(19): Xaa is A or G
  MOD_RES (20)..(21)..(22)..(23): Xaa is A or G or is absent
LXGXEEVIMSMEGLXXXXXXXXXMIQMTINSTKVPAXXTS

SEQ ID NO: 75102 - protein, 41 aa, Artificial Sequence
  GFR-binding peptide
  MOD_RES (2)..(4)..(38)..(39): Xaa is C or S
  MOD_RES (16)..(17)..(18)..(19)..(20): Xaa is A or G
  MOD_RES (21)..(22)..(23)..(24): Xaa is A or G or is absent
RXGXAEVVMDSMEGIXXXXXXXXXMIQITINSLRAPVXXSA

SEQ ID NO: 75103 - protein, 36 aa, Artificial Sequence; identical to SEQ ID NO: 17739
  GFR-binding peptide
  MOD_RES (1)..(1): Xaa is C or S
  MOD_RES (14)..(15)..(16)..(17)..(18): Xaa is A or G
  MOD_RES (19)..(20)..(21)..(22): Xaa is A or G or is absent

SEQ ID NO: 75104 - protein, 35 aa, Artificial Sequence; identical to SEQ ID NO: 17740
  GFR-binding peptide
  MOD_RES (34)..(34): Xaa is C or S
  MOD_RES (12)..(13)..(14)..(15)..(16): Xaa is A or G
  MOD_RES (17)..(18)..(19)..(20): Xaa is A or G or is absent

SEQ ID NO: 75105 - protein, 33 aa, Artificial Sequence
  GFR-binding peptide
  MOD_RES (1)..(1): Xaa is C or S
  MOD_RES (12)..(13)..(14)..(15)..(16): Xaa is A or G
  MOD_RES (17)..(18)..(19)..(20): Xaa is A or G or is absent
XSKVIMSMEGLXXXXXXXXXMIQITINSLDQSV

SEQ ID NO: 75106 - protein, 40 aa, Artificial Sequence; identical to SEQ ID NO: 47400
  GFR-binding peptide
  MOD_RES (2)..(4)..(35)..(36): Xaa is C or S

SEQ ID NO: 75107 - protein, 33 aa, Artificial Sequence
  GFR-binding peptide
  MOD_RES (31)..(32): Xaa is C or S
EVVMDSMEGIVVNNASDMIQITINSLRTPVXXT

SEQ ID NO: 75108 - protein, 41 aa, Artificial Sequence
  GFR-binding peptide
  MOD_RES (1)..(3)..(35)..(36): Xaa is C or S
XGXAEVVMDSMEGLVVNNAADMIQITINSLRAPVXXSAPAA

SEQ ID NO: 75109 - protein, 37 aa, Artificial Sequence
  GFR-binding peptide
  MOD_RES (2)..(35)..(36): Xaa is C or S
  MOD_RES (13)..(14)..(15)..(16)..(17): Xaa is A or G
  MOD_RES (18)..(19)..(20)..(21): Xaa is A or G or is absent
GXEEVIMSMEGIXXXXXXXXXMIQMTINSTKVPAXXT

SEQ ID NO: 75110 - protein, 32 aa, Artificial Sequence; identical to SEQ ID NO: 47416
  GFR-binding peptide
  MOD_RES (31)..(32): Xaa is C or S

SEQ ID NO: 75111 - protein, 38 aa, Artificial Sequence
  GFR-binding peptide
  MOD_RES (1)..(33)..(34): Xaa is C or S
XSRVVMNSMEGLIVNSSDDMIQVTINSLKTPAXXPKPV

SEQ ID NO: 75112 - protein, 40 aa, Artificial Sequence
  GFR-binding peptide
  MOD_RES (34)..(35): Xaa is C or S
  MOD_RES (12)..(13)..(14)..(15)..(16): Xaa is A or G
  MOD_RES (17)..(18)..(19)..(20): Xaa is A or G or is absent
SEVVMDSMEGIXXXXXXXXXMIQITINSLRTPVXXTPPTS

SEQ ID NO: 75113 - protein, 38 aa, Artificial Sequence; identical to SEQ ID NO: 49944
  GFR-binding peptide
  MOD_RES (2)..(36)..(37): Xaa is C or S
  MOD_RES (14)..(15)..(16)..(17)..(18): Xaa is A or G
  MOD_RES (19)..(20)..(21)..(22): Xaa is A or G or is absent

SEQ ID NO: 75114 - protein, 42 aa, Artificial Sequence
  GFR-binding peptide
  MOD_RES (1)..(3)..(37)..(38): Xaa is C or S
  MOD_RES (15)..(16)..(17)..(18)..(19): Xaa is A or G
  MOD_RES (20)..(21)..(22)..(23): Xaa is A or G or is absent
XGXAEVVMDSMEGIXXXXXXXXXMIQITINSLRAPVXXSAPA

SEQ ID NO: 75115 - protein, 32 aa, Artificial Sequence
  GFR-binding peptide
  MOD_RES (31)..(32): Xaa is C or S
SKVIMSMEGLIKPTKGIMIQITINSLDQSVXX

SEQ ID NO: 75116 - protein, 36 aa, Artificial Sequence
  GFR-binding peptide
  MOD_RES (2)..(33)..(34): Xaa is C or S
GXEEVIMSMEGILLVRGNDMIQMTINSTKVPAXXTS

SEQ ID NO: 75117 - protein, 36 aa, Artificial Sequence; identical to SEQ ID NO: 17752
  GFR-binding peptide
  MOD_RES (34)..(34): Xaa is C or S
  MOD_RES (12)..(13)..(14)..(15)..(16): Xaa is A or G
  MOD_RES (17)..(18)..(19)..(20): Xaa is A or G or is absent

SEQ ID NO: 75118 - protein, 38 aa, Artificial Sequence
  GFR-binding peptide
  MOD_RES (2)..(4)..(36)..(37): Xaa is C or S
SXGXRDVVMGSMEGLIIQQKDNMIQMTINSMKTPTXXP

SEQ ID NO: 75119 - protein, 43 aa, Artificial Sequence; identical to SEQ ID NO: 17753
  GFR-binding peptide
  MOD_RES (2)..(4)..(41): Xaa is C or S
  MOD_RES (17)..(18)..(19)..(20)..(21): Xaa is A or G
  MOD_RES (22)..(23)..(24)..(25): Xaa is A or G or is absent

SEQ ID NO: 75120 - protein, 37 aa, Artificial Sequence; identical to SEQ ID NO: 17755
  GFR-binding peptide
  MOD_RES (1)..(3)..(37): Xaa is C or S

SEQ ID NO: 75121 - protein, 38 aa, Artificial Sequence; identical to SEQ ID NO: 17757
  GFR-binding peptide
  MOD_RES (1)..(3): Xaa is C or S

SEQ ID NO: 75122 - protein, 35 aa, Artificial Sequence
  GFR-binding peptide
  MOD_RES (1)..(3)..(35): Xaa is C or S
XGXSEVVMDSMEGIVVNNASDMIQITINSLRTPVX

SEQ ID NO: 75123 - protein, 41 aa, Artificial Sequence
  GFR-binding peptide
  MOD_RES (1)..(35)..(36): Xaa is C or S
  MOD_RES (13)..(14)..(15)..(16)..(17): Xaa is A or G
  MOD_RES (18)..(19)..(20)..(21): Xaa is A or G or is absent
XAEVVMDSMEGIXXXXXXXXXMIQITINSLRAPVXXSAPAA

SEQ ID NO: 75124 - protein, 36 aa, Artificial Sequence
  GFR-binding peptide
  MOD_RES (1)..(3): Xaa is C or S
  MOD_RES (15)..(16)..(17)..(18)..(19): Xaa is A or G
  MOD_RES (20)..(21)..(22)..(23): Xaa is A or G or is absent
XGXRDVVMGSMEGLXXXXXXXXXMIQMTINSMKTPT

SEQ ID NO: 75125 - protein, 36 aa, Artificial Sequence; identical to SEQ ID NO: 47433
  GFR-binding peptide
  MOD_RES (1)..(34)..(35): Xaa is C or S
  MOD_RES (12)..(13)..(14)..(15)..(16): Xaa is A or G
  MOD_RES (17)..(18)..(19)..(20): Xaa is A or G or is absent

SEQ ID NO: 75126 - protein, 41 aa, Artificial Sequence; identical to SEQ ID NO: 17760
  GFR-binding peptide
  MOD_RES (37)..(37): Xaa is C or S
  MOD_RES (13)..(14)..(15)..(16)..(17): Xaa is A or G
  MOD_RES (18)..(19)..(20)..(21): Xaa is A or G or is absent

SEQ ID NO: 75127 - protein, 32 aa, Artificial Sequence; identical to SEQ ID NO: 47440
  GFR-binding peptide
  MOD_RES (31)..(32): Xaa is C or S

SEQ ID NO: 75128 - protein, 34 aa, Artificial Sequence
  GFR-binding peptide
  MOD_RES (2)..(34): Xaa is C or S
GXAEVVMDSMEGIVVNNAADMIQITINSLRAPVX

SEQ ID NO: 75129 - protein, 36 aa, Artificial Sequence; identical to SEQ ID NO: 17763
  GFR-binding peptide
  MOD_RES (33)..(33): Xaa is C or S

SEQ ID NO: 75130 - protein, 35 aa, Artificial Sequence
  GFR-binding peptide
  MOD_RES (2)..(4)..(35): Xaa is C or S
SXKXSKVIMSMEGLIKPTKGIMIQITINSLDQSVX

SEQ ID NO: 75131 - protein, 34 aa, Artificial Sequence
  GFR-binding peptide
  MOD_RES (1)..(3): Xaa is C or S
XGXAEVVMDSMEGIVVNNAADMIQITINSLRAPV

SEQ ID NO: 75132 - protein, 37 aa, Artificial Sequence
  GFR-binding peptide
  MOD_RES (2)..(36)..(37): Xaa is C or S
  MOD_RES (14)..(15)..(16)..(17)..(18): Xaa is A or G
  MOD_RES (19)..(20)..(21)..(22): Xaa is A or G or is absent
GXSRVVMNSMEGLXXXXXXXXXMIQVTINSLKTPAXX

SEQ ID NO: 75133 - protein, 37 aa, Artificial Sequence; identical to SEQ ID NO: 47450
  GFR-binding peptide
  MOD_RES (1)..(34)..(35): Xaa is C or S
  MOD_RES (12)..(13)..(14)..(15)..(16): Xaa is A or G
  MOD_RES (17)..(18)..(19)..(20): Xaa is A or G or is absent

SEQ ID NO: 75134 - protein, 40 aa, Artificial Sequence
  GFR-binding peptide
  MOD_RES (1)..(3)..(35)..(36): Xaa is C or S
XGXSEVVMDSMEGIVVNNASDMIQITINSLRTPVXXTPPT

SEQ ID NO: 75135 - protein, 35 aa, Artificial Sequence
  GFR-binding peptide
  MOD_RES (32)..(33): Xaa is C or S
SEVVMDSMEGIVVNNASDMIQITINSLRTPVXXTP

SEQ ID NO: 75136 - protein, 39 aa, Artificial Sequence; identical to SEQ ID NO: 49963
  GFR-binding peptide
  MOD_RES (1)..(34)..(35): Xaa is C or S
  MOD_RES (12)..(13)..(14)..(15)..(16): Xaa is A or G
  MOD_RES (17)..(18)..(19)..(20): Xaa is A or G or is absent

SEQ ID NO: 75137 - protein, 38 aa, Artificial Sequence
  GFR-binding peptide
  MOD_RES (33)..(34): Xaa is C or S
  MOD_RES (11)..(12)..(13)..(14)..(15): Xaa is A or G
  MOD_RES (16)..(17)..(18)..(19): Xaa is A or G or is absent
DVVMGSMEGIXXXXXXXXXMIQMTINSMKTPTXXPGAS

SEQ ID NO: 75138 - protein, 38 aa, Artificial Sequence
  GFR-binding peptide
  MOD_RES (1)..(3)..(34)..(35): Xaa is C or S
XKXSRVIMSMEGLVKPKRGVMIQITINSLAQPVXXPAA

SEQ ID NO: 75139 - protein, 36 aa, Artificial Sequence; identical to SEQ ID NO: 17767
  GFR-binding peptide
  MOD_RES (2)..(36): Xaa is C or S
  MOD_RES (14)..(15)..(16)..(17)..(18): Xaa is A or G
  MOD_RES (19)..(20)..(21)..(22): Xaa is A or G or is absent

SEQ ID NO: 75140 - protein, 39 aa, Artificial Sequence; identical to SEQ ID NO: 17768
  GFR-binding peptide
  MOD_RES (37)..(37): Xaa is C or S

SEQ ID NO: 75141 - protein, 39 aa, Artificial Sequence
  GFR-binding peptide
  MOD_RES (2)..(4)..(37)..(38): Xaa is C or S
  MOD_RES (15)..(16)..(17)..(18)..(19): Xaa is A or G
  MOD_RES (20)..(21)..(22)..(23): Xaa is A or G or is absent
SXKXSKVVMSMEGLXXXXXXXXXMIQITINSLDQPVXXP

SEQ ID NO: 75142 - protein, 35 aa, Artificial Sequence; identical to SEQ ID NO: 49972
  GFR-binding peptide
  MOD_RES (2)..(35): Xaa is C or S
  MOD_RES (13)..(14)..(15)..(16)..(17): Xaa is A or G
  MOD_RES (18)..(19)..(20)..(21): Xaa is A or G or is absent

SEQ ID NO: 75143 - protein, 40 aa, Artificial Sequence
  GFR-binding peptide
  MOD_RES (2)..(4)..(36)..(37): Xaa is C or S
RXGXSEVVMDSMEGLVVNNASDMIQITINSLRTPVXXTPP

SEQ ID NO: 75144 - protein, 38 aa, Artificial Sequence
  GFR-binding peptide
  MOD_RES (1)..(3)..(37)..(38): Xaa is C or S
  MOD_RES (15)..(16)..(17)..(18)..(19): Xaa is A or G
  MOD_RES (20)..(21)..(22)..(23): Xaa is A or G or is absent
XGXRDVVMGSMEGIXXXXXXXXXMIQMTINSMKTPTXX

SEQ ID NO: 75145 - protein, 37 aa, Artificial Sequence
  GFR-binding peptide
  MOD_RES (2)..(4)..(37): Xaa is C or S
  MOD_RES (15)..(16)..(17)..(18)..(19): Xaa is A or G
  MOD_RES (20)..(21)..(22)..(23): Xaa is A or G or is absent
LXGXEEVIMSMEGIXXXXXXXXXMIQMTINSTKVPAX

SEQ ID NO: 75146 - protein, 35 aa, Artificial Sequence
  GFR-binding peptide
  MOD_RES (2)..(35): Xaa is C or S
  MOD_RES (13)..(14)..(15)..(16)..(17): Xaa is A or G
  MOD_RES (18)..(19)..(20)..(21): Xaa is A or G or is absent
KXSKVIMSMEGLXXXXXXXXXMIQITINSLDQSVX

SEQ ID NO: 75147 - protein, 35 aa, Artificial Sequence
  GFR-binding peptide
  MOD_RES (33)..(34): Xaa is C or S
  MOD_RES (11)..(12)..(13)..(14)..(15): Xaa is A or G
  MOD_RES (16)..(17)..(18)..(19): Xaa is A or G or is absent
SKVIMSMEGLXXXXXXXXXMIQITINSLDQSVXXP

SEQ ID NO: 75148 - protein, 36 aa, Artificial Sequence; identical to SEQ ID NO: 17772
  GFR-binding peptide
  MOD_RES (33)..(33): Xaa is C or S
  MOD_RES (11)..(12)..(13)..(14)..(15): Xaa is A or G
  MOD_RES (16)..(17)..(18)..(19): Xaa is A or G or is absent

SEQ ID NO: 75149 - protein, 32 aa, Artificial Sequence; identical to SEQ ID NO: 47461
  GFR-binding peptide
  MOD_RES (1)..(1): Xaa is C or S

SEQ ID NO: 75150 - protein, 32 aa, Artificial Sequence
  GFR-binding peptide
  MOD_RES (31)..(32): Xaa is C or S
SKVVMSMEGLVKPTRGVMIQITINSLDQPVXX

SEQ ID NO: 75151 - protein, 35 aa, Artificial Sequence
  GFR-binding peptide
  MOD_RES (2)..(2): Xaa is C or S
  MOD_RES (14)..(15)..(16)..(17)..(18): Xaa is A or G
  MOD_RES (19)..(20)..(21)..(22): Xaa is A or G or is absent
GXSEVVMDSMEGIXXXXXXXXXMIQITINSLRTPV

SEQ ID NO: 75152 - protein, 36 aa, Artificial Sequence
  GFR-binding peptide
  MOD_RES (1)..(3)..(34)..(35): Xaa is C or S
XKXSKVVMSMEGLVKPTRGVMIQITINSLDQPVXXP

SEQ ID NO: 75153 - protein, 37 aa, Artificial Sequence
  GFR-binding peptide
  MOD_RES (2)..(35)..(36): Xaa is C or S
  MOD_RES (13)..(14)..(15)..(16)..(17): Xaa is A or G
  MOD_RES (18)..(19)..(20)..(21): Xaa is A or G or is absent
KXSKVIMSMEGLXXXXXXXXXMIQITINSLDQSVXXP

SEQ ID NO: 75154 - protein, 43 aa, Artificial Sequence; identical to SEQ ID NO: 17775
  GFR-binding peptide
  MOD_RES (1)..(3)..(40): Xaa is C or S
  MOD_RES (16)..(17)..(18)..(19)..(20): Xaa is A or G
  MOD_RES (21)..(22)..(23)..(24): Xaa is A or G or is absent

SEQ ID NO: 75155 - protein, 34 aa, Artificial Sequence; identical to SEQ ID NO: 17777
  GFR-binding peptide
  MOD_RES (13)..(14)..(15)..(16)..(17): Xaa is A or G
  MOD_RES (18)..(19)..(20)..(21): Xaa is A or G or is absent

SEQ ID NO: 75156 - protein, 36 aa, Artificial Sequence
  GFR-binding peptide
  MOD_RES (1)..(33)..(34): Xaa is C or S
XSRVVMNSMEGLIVNSSDDMIQVTINSLKTPAXXPK

SEQ ID NO: 75157 - protein, 39 aa, Artificial Sequence
  GFR-binding peptide
  MOD_RES (2)..(34)..(35): Xaa is C or S
GXSRVVMNSMEGLIVNSSDDMIQVTINSLKTPAXXPKPV

SEQ ID NO: 75158 - protein, 32 aa, Artificial Sequence
  GFR-binding peptide
  MOD_RES (1)..(32): Xaa is C or S
XEEVIMSMEGLLLVRGNDMIQMTINSTKVPAX

SEQ ID NO: 75159 - protein, 36 aa, Artificial Sequence; identical to SEQ ID NO: 49990
  GFR-binding peptide
  MOD_RES (1)..(33)..(34): Xaa is C or S

SEQ ID NO: 75160 - protein, 36 aa, Artificial Sequence; identical to SEQ ID NO: 17781
  GFR-binding peptide

SEQ ID NO: 75161 - protein, 40 aa, Artificial Sequence
  GFR-binding peptide
  MOD_RES (2)..(4)..(38)..(39): Xaa is C or S
  MOD_RES (16)..(17)..(18)..(19)..(20): Xaa is A or G
  MOD_RES (21)..(22)..(23)..(24): Xaa is A or G or is absent
RXGXSEVVMDSMEGIXXXXXXXXXMIQITINSLRTPVXXT

SEQ ID NO: 75162 - protein, 44 aa, Artificial Sequence; identical to SEQ ID NO: 17783
  GFR-binding peptide
  MOD_RES (2)..(4)..(41): Xaa is C or S

SEQ ID NO: 75163 - protein, 33 aa, Artificial Sequence
  GFR-binding peptide
  MOD_RES (1)..(32)..(33): Xaa is C or S
XSKVVMSMEGLVKPTRGVMIQITINSLDQPVXX

SEQ ID NO: 75164 - protein, 31 aa, Artificial Sequence
  GFR-binding peptide
SEVVMDSMEGIVVNNASDMIQITINSLRTPV

SEQ ID NO: 75165 - protein, 36 aa, Artificial Sequence; identical to SEQ ID NO: 17784
  GFR-binding peptide
  MOD_RES (33)..(33): Xaa is C or S

SEQ ID NO: 75166 - protein, 36 aa, Artificial Sequence; identical to SEQ ID NO: 49998
  GFR-binding peptide
  MOD_RES (1)..(35)..(36): Xaa is C or S
  MOD_RES (13)..(14)..(15)..(16)..(17): Xaa is A or G
  MOD_RES (18)..(19)..(20)..(21): Xaa is A or G or is absent

SEQ ID NO: 75167 - protein, 34 aa, Artificial Sequence
  GFR-binding peptide
  MOD_RES (2)..(4): Xaa is C or S
LXGXEEVIMSMEGILLVRGNDMIQMTINSTKVPA

SEQ ID NO: 75168 - protein, 39 aa, Artificial Sequence
  GFR-binding peptide
  MOD_RES (1)..(33)..(34): Xaa is C or S
XRDVVMGSMEGIIIQQKDNMIQMTINSMKTPTXXPGASG

SEQ ID NO: 75169 - protein, 38 aa, Artificial Sequence
  GFR-binding peptide
  MOD_RES (1)..(3)..(34)..(35): Xaa is C or S
XGXEEVIMSMEGLLLVRGNDMIQMTINSTKVPAXXTSP

SEQ ID NO: 75170 - protein, 38 aa, Artificial Sequence; identical to SEQ ID NO: 17787
  GFR-binding peptide
  MOD_RES (2)..(36): Xaa is C or S

SEQ ID NO: 75171 - protein, 37 aa, Artificial Sequence; identical to SEQ ID NO: 17788
  GFR-binding peptide
  MOD_RES (36)..(36): Xaa is C or S

SEQ ID NO: 75172 - protein, 38 aa, Artificial Sequence; identical to SEQ ID NO: 47489
  GFR-binding peptide
  MOD_RES (1)..(3)..(36)..(37): Xaa is C or S
  MOD_RES (14)..(15)..(16)..(17)..(18): Xaa is A or G
  MOD_RES (19)..(20)..(21)..(22): Xaa is A or G or is absent

SEQ ID NO: 75173 - protein, 36 aa, Artificial Sequence
  GFR-binding peptide
  MOD_RES (1)..(3)..(36): Xaa is C or S
  MOD_RES (14)..(15)..(16)..(17)..(18): Xaa is A or G
  MOD_RES (19)..(20)..(21)..(22): Xaa is A or G or is absent
XKXSRVIMSMEGLXXXXXXXXXMIQITINSLAQPVX

SEQ ID NO: 75174 - protein, 35 aa, Artificial Sequence
  GFR-binding peptide
  MOD_RES (2)..(34)..(35): Xaa is C or S
GXRDVVMGSMEGLIIQQKDNMIQMTINSMKTPTXX

SEQ ID NO: 75175 - protein, 41 aa, Artificial Sequence
  GFR-binding peptide
  MOD_RES (2)..(4)..(37)..(38): Xaa is C or S
  MOD_RES (15)..(16)..(17)..(18)..(19): Xaa is A or G
  MOD_RES (20)..(21)..(22)..(23): Xaa is A or G or is absent
SXKXSKVIMSMEGLXXXXXXXXXMIQITINSLDQSVXXPSA

SEQ ID NO: 75176 - protein, 34 aa, Artificial Sequence; identical to SEQ ID NO: 17790
  GFR-binding peptide
  MOD_RES (12)..(13)..(14)..(15)..(16): Xaa is A or G
  MOD_RES (17)..(18)..(19)..(20): Xaa is A or G or is absent

SEQ ID NO: 75177 - protein, 36 aa, Artificial Sequence; identical to SEQ ID NO: 17793
  GFR-binding peptide
  MOD_RES (36)..(36): Xaa is C or S

SEQ ID NO: 75178 - protein, 38 aa, Artificial Sequence; identical to SEQ ID NO: 50015
  GFR-binding peptide
  MOD_RES (2)..(4)..(37)..(38): Xaa is C or S
  MOD_RES (15)..(16)..(17)..(18)..(19): Xaa is A or G
  MOD_RES (20)..(21)..(22)..(23): Xaa is A or G or is absent

SEQ ID NO: 75179 - protein, 33 aa, Artificial Sequence
  GFR-binding peptide
  MOD_RES (1)..(3): Xaa is C or S
XGXEEVIMSMEGILLVRGNDMIQMTINSTKVPA

SEQ ID NO: 75180 - protein, 36 aa, Artificial Sequence
  GFR-binding peptide
  MOD_RES (1)..(35)..(36): Xaa is C or S
  MOD_RES (13)..(14)..(15)..(16)..(17): Xaa is A or G
  MOD_RES (18)..(19)..(20)..(21): Xaa is A or G or is absent
XSRVVMNSMEGLXXXXXXXXXMIQVTINSLKTPAXX

SEQ ID NO: 75181 - protein, 35 aa, Artificial Sequence; identical to SEQ ID NO: 17794
  GFR-binding peptide
  MOD_RES (35)..(35): Xaa is C or S

SEQ ID NO: 75182 - protein, 41 aa, Artificial Sequence
  GFR-binding peptide
  MOD_RES (2)..(4)..(35)..(36): Xaa is C or S
SXKXSKVVMSMEGLVKPTRGVMIQITINSLDQPVXXPSASA

SEQ ID NO: 75183 - protein, 41 aa, Artificial Sequence
  GFR-binding peptide
  MOD_RES (1)..(3)..(37)..(38): Xaa is C or S
  MOD_RES (15)..(16)..(17)..(18)..(19): Xaa is A or G
  MOD_RES (20)..(21)..(22)..(23): Xaa is A or G or is absent
XGXRDVVMGSMEGIXXXXXXXXXMIQMTINSMKTPTXXPGA

SEQ ID NO: 75184 - protein, 35 aa, Artificial Sequence; identical to SEQ ID NO: 17795
  GFR-binding peptide
  MOD_RES (2)..(2): Xaa is C or S
  MOD_RES (14)..(15)..(16)..(17)..(18): Xaa is A or G
  MOD_RES (19)..(20)..(21)..(22): Xaa is A or G or is absent

SEQ ID NO: 75185 - protein, 36 aa, Artificial Sequence; identical to SEQ ID NO: 17796
  GFR-binding peptide
  MOD_RES (33)..(33): Xaa is C or S
  MOD_RES (11)..(12)..(13)..(14)..(15): Xaa is A or G
  MOD_RES (16)..(17)..(18)..(19): Xaa is A or G or is absent

SEQ ID NO: 75186 - protein, 42 aa, Artificial Sequence
  GFR-binding peptide
  MOD_RES (2)..(4)..(36)..(37): Xaa is C or S
RXGXSEVVMDSMEGIVVNNASDMIQITINSLRTPVXXTPPTS

SEQ ID NO: 75187 - protein, 37 aa, Artificial Sequence
  GFR-binding peptide
  MOD_RES (34)..(35): Xaa is C or S
  MOD_RES (12)..(13)..(14)..(15)..(16): Xaa is A or G
  MOD_RES (17)..(18)..(19)..(20): Xaa is A or G or is absent
SRVVMNSMEGLXXXXXXXXXMIQVTINSLKTPAXXPK

SEQ ID NO: 75188 - protein, 34 aa, Artificial Sequence
  GFR-binding peptide
  MOD_RES (33)..(34): Xaa is C or S
  MOD_RES (11)..(12)..(13)..(14)..(15): Xaa is A or G
  MOD_RES (16)..(17)..(18)..(19): Xaa is A or G or is absent
RVVMNSMEGLXXXXXXXXXMIQVTINSLKTPAXX

SEQ ID NO: 75189 - protein, 40 aa, Artificial Sequence; identical to SEQ ID NO: 17797
  GFR-binding peptide
  MOD_RES (34)..(34): Xaa is C or S
  MOD_RES (12)..(13)..(14)..(15)..(16): Xaa is A or G
  MOD_RES (17)..(18)..(19)..(20): Xaa is A or G or is absent

SEQ ID NO: 75190 - protein, 35 aa, Artificial Sequence
  GFR-binding peptide
  MOD_RES (1)..(34)..(35): Xaa is C or S
  MOD_RES (12)..(13)..(14)..(15)..(16): Xaa is A or G
  MOD_RES (17)..(18)..(19)..(20): Xaa is A or G or is absent
XEEVIMSMEGIXXXXXXXXXMIQMTINSTKVPAXX

SEQ ID NO: 75191 - protein, 37 aa, Artificial Sequence; identical to SEQ ID NO: 47496
  GFR-binding peptide
  MOD_RES (2)..(35)..(36): Xaa is C or S
  MOD_RES (13)..(14)..(15)..(16)..(17): Xaa is A or G
  MOD_RES (18)..(19)..(20)..(21): Xaa is A or G or is absent

SEQ ID NO: 75192 - protein, 37 aa, Artificial Sequence
  GFR-binding peptide
  MOD_RES (31)..(32): Xaa is C or S
SKVIMSMEGLIKPTKGIMIQITINSLDQSVXXPSASA

SEQ ID NO: 75193 - protein, 37 aa, Artificial Sequence
  GFR-binding peptide
  MOD_RES (32)..(33): Xaa is C or S
SRVVMNSMEGLIVNSSDDMIQVTINSLKTPAXXPKPV

SEQ ID NO: 75194 - protein, 37 aa, Artificial Sequence
  GFR-binding peptide
  MOD_RES (2)..(4): Xaa is C or S
  MOD_RES (16)..(17)..(18)..(19)..(20): Xaa is A or G
  MOD_RES (21)..(22)..(23)..(24): Xaa is A or G or is absent
RXGXAEVVMDSMEGIXXXXXXXXXMIQITINSLRAPV

SEQ ID NO: 75195 - protein, 37 aa, Artificial Sequence
  GFR-binding peptide
  MOD_RES (2)..(4)..(36)..(37): Xaa is C or S
RXGXSEVVMDSMEGIVVNNASDMIQITINSLRTPVXX

SEQ ID NO: 75196 - protein, 38 aa, Artificial Sequence
  GFR-binding peptide
  MOD_RES (1)..(3)..(36)..(37): Xaa is C or S
  MOD_RES (14)..(15)..(16)..(17)..(18): Xaa is A or G
  MOD_RES (19)..(20)..(21)..(22): Xaa is A or G or is absent
XKXSRVIMSMEGLXXXXXXXXXMIQITINSLAQPVXXP

SEQ ID NO: 75197 - protein, 37 aa, Artificial Sequence
  GFR-binding peptide
  MOD_RES (1)..(3)..(37): Xaa is C or S
  MOD_RES (15)..(16)..(17)..(18)..(19): Xaa is A or G
  MOD_RES (20)..(21)..(22)..(23): Xaa is A or G or is absent
XGXSEVVMDSMEGLXXXXXXXXXMIQITINSLRTPVX

SEQ ID NO: 75198 - protein, 34 aa, Artificial Sequence; identical to SEQ ID NO: 47505
  GFR-binding peptide
  MOD_RES (2)..(34): Xaa is C or S

SEQ ID NO: 75199 - protein, 42 aa, Artificial Sequence; identical to SEQ ID NO: 17798
  GFR-binding peptide
  MOD_RES (2)..(36): Xaa is C or S
  MOD_RES (14)..(15)..(16)..(17)..(18): Xaa is A or G
  MOD_RES (19)..(20)..(21)..(22): Xaa is A or G or is absent

SEQ ID NO: 75200 - protein, 37 aa, Artificial Sequence; identical to SEQ ID NO: 17799
  GFR-binding peptide
  MOD_RES (1)..(1): Xaa is C or S

SEQ ID NO: 75201 - protein, 43 aa, Artificial Sequence; identical to SEQ ID NO: 17800
  GFR-binding peptide
  MOD_RES (2)..(4)..(41): Xaa is C or S

SEQ ID NO: 75202 - protein, 36 aa, Artificial Sequence
  GFR-binding peptide
  MOD_RES (2)..(34)..(35): Xaa is C or S
GXAEVVMDSMEGIVVNNAADMIQITINSLRAPVXXS

SEQ ID NO: 75203 - protein, 34 aa, Artificial Sequence; identical to SEQ ID NO: 17802
  GFR-binding peptide

SEQ ID NO: 75204 - protein, 38 aa, Artificial Sequence
  GFR-binding peptide
  MOD_RES (33)..(34): Xaa is C or S
  MOD_RES (11)..(12)..(13)..(14)..(15): Xaa is A or G
  MOD_RES (16)..(17)..(18)..(19): Xaa is A or G or is absent
EVVMDSMEGIXXXXXXXXXMIQITINSLRAPVXXSAPA

SEQ ID NO: 75205 - protein, 35 aa, Artificial Sequence; identical to SEQ ID NO: 50039
  GFR-binding peptide
  MOD_RES (33)..(34): Xaa is C or S
  MOD_RES (11)..(12)..(13)..(14)..(15): Xaa is A or G
  MOD_RES (16)..(17)..(18)..(19): Xaa is A or G or is absent

SEQ ID NO: 75206 - protein, 41 aa, Artificial Sequence
  GFR-binding peptide
  MOD_RES (1)..(3)..(35)..(36): Xaa is C or S
XGXSEVVMDSMEGLVVNNASDMIQITINSLRTPVXXTPPTS

SEQ ID NO: 75207 - protein, 31 aa, Artificial Sequence; identical to SEQ ID NO: 47513
  GFR-binding peptide
  MOD_RES (1)..(1): Xaa is C or S

SEQ ID NO: 75208 - protein, 40 aa, Artificial Sequence
  GFR-binding peptide
  MOD_RES (2)..(4)..(38)..(39): Xaa is C or S
  MOD_RES (16)..(17)..(18)..(19)..(20): Xaa is A or G
  MOD_RES (21)..(22)..(23)..(24): Xaa is A or G or is absent
SXGXRDVVMGSMEGIXXXXXXXXXMIQMTINSMKTPTXXP

SEQ ID NO: 75209 - protein, 40 aa, Artificial Sequence; identical to SEQ ID NO: 17806
  GFR-binding peptide
  MOD_RES (1)..(38): Xaa is C or S
  MOD_RES (14)..(15)..(16)..(17)..(18): Xaa is A or G
  MOD_RES (19)..(20)..(21)..(22): Xaa is A or G or is absent

SEQ ID NO: 75210 - protein, 39 aa, Artificial Sequence
  GFR-binding peptide
  MOD_RES (33)..(34): Xaa is C or S
  MOD_RES (11)..(12)..(13)..(14)..(15): Xaa is A or G
  MOD_RES (16)..(17)..(18)..(19): Xaa is A or G or is absent
EVVMDSMEGLXXXXXXXXXMIQITINSLRAPVXXSAPAA

SEQ ID NO: 75211 - protein, 42 aa, Artificial Sequence; identical to SEQ ID NO: 17807
  GFR-binding peptide
  MOD_RES (1)..(3)..(37): Xaa is C or S

SEQ ID NO: 75212 - protein, 39 aa, Artificial Sequence; identical to SEQ ID NO: 17809
  GFR-binding peptide
  MOD_RES (1)..(3): Xaa is C or S

SEQ ID NO: 75213 - protein, 38 aa, Artificial Sequence; identical to SEQ ID NO: 47525
  GFR-binding peptide
  MOD_RES (1)..(34)..(35): Xaa is C or S
  MOD_RES (12)..(13)..(14)..(15)..(16): Xaa is A or G
  MOD_RES (17)..(18)..(19)..(20): Xaa is A or G or is absent

SEQ ID NO: 75214 - protein, 35 aa, Artificial Sequence; identical to SEQ ID NO: 17810
  GFR-binding peptide
  MOD_RES (35)..(35): Xaa is C or S

SEQ ID NO: 75215 - protein, 36 aa, Artificial Sequence; identical to SEQ ID NO: 17811
  GFR-binding peptide
  MOD_RES (33)..(33): Xaa is C or S

SEQ ID NO: 75216 - protein, 39 aa, Artificial Sequence; identical to SEQ ID NO: 50052
  GFR-binding peptide
  MOD_RES (2)..(4)..(37)..(38): Xaa is C or S
  MOD_RES (15)..(16)..(17)..(18)..(19): Xaa is A or G
  MOD_RES (20)..(21)..(22)..(23): Xaa is A or G or is absent

SEQ ID NO: 75217 - protein, 38 aa, Artificial Sequence
  GFR-binding peptide
  MOD_RES (2)..(33)..(34): Xaa is C or S
GXEEVIMSMEGILLVRGNDMIQMTINSTKVPAXXTSPV

SEQ ID NO: 75218 - protein, 34 aa, Artificial Sequence; identical to SEQ ID NO: 50053
  GFR-binding peptide
  MOD_RES (31)..(32): Xaa is C or S

SEQ ID NO: 75219 - protein, 34 aa, Artificial Sequence; identical to SEQ ID NO: 17812
  GFR-binding peptide
  MOD_RES (11)..(12)..(13)..(14)..(15): Xaa is A or G
  MOD_RES (16)..(17)..(18)..(19): Xaa is A or G or is absent

SEQ ID NO: 75220 - protein, 38 aa, Artificial Sequence; identical to SEQ ID NO: 17814
  GFR-binding peptide
  MOD_RES (2)..(36): Xaa is C or S
  MOD_RES (14)..(15)..(16)..(17)..(18): Xaa is A or G
  MOD_RES (19)..(20)..(21)..(22): Xaa is A or G or is absent

SEQ ID NO: 75221 - protein, 37 aa, Artificial Sequence; identical to SEQ ID NO: 47538
  GFR-binding peptide
  MOD_RES (1)..(33)..(34): Xaa is C or S

SEQ ID NO: 75222 - protein, 38 aa, Artificial Sequence; identical to SEQ ID NO: 17817
  GFR-binding peptide
  MOD_RES (36)..(36): Xaa is C or S

SEQ ID NO: 75223 - protein, 40 aa, Artificial Sequence; identical to SEQ ID NO: 17818
  GFR-binding peptide
  MOD_RES (2)..(4)..(38): Xaa is C or S
  MOD_RES (16)..(17)..(18)..(19)..(20): Xaa is A or G
  MOD_RES (21)..(22)..(23)..(24): Xaa is A or G or is absent

SEQ ID NO: 75224 - protein, 35 aa, Artificial Sequence; identical to SEQ ID NO: 17819
  GFR-binding peptide

SEQ ID NO: 75225 - protein, 42 aa, Artificial Sequence; identical to SEQ ID NO: 17820
  GFR-binding peptide
  MOD_RES (2)..(39): Xaa is C or S

SEQ ID NO: 75226 - protein, 35 aa, Artificial Sequence
  GFR-binding peptide
  MOD_RES (31)..(32): Xaa is C or S
EEVIMSMEGILLVRGNDMIQMTINSTKVPAXXTSP

SEQ ID NO: 75227 - protein, 35 aa, Artificial Sequence
  GFR-binding peptide
  MOD_RES (1)..(3)..(34)..(35): Xaa is C or S
XKXSKVVMSMEGLVKPTRGVMIQITINSLDQPVXX

SEQ ID NO: 75228 - protein, 43 aa, Artificial Sequence; identical to SEQ ID NO: 17824
  GFR-binding peptide
  MOD_RES (1)..(3)..(37): Xaa is C or S
  MOD_RES (15)..(16)..(17)..(18)..(19): Xaa is A or G
  MOD_RES (20)..(21)..(22)..(23): Xaa is A or G or is absent

SEQ ID NO: 75229 - protein, 36 aa, Artificial Sequence
  GFR-binding peptide
  MOD_RES (2)..(35)..(36): Xaa is C or S
  MOD_RES (13)..(14)..(15)..(16)..(17): Xaa is A or G
  MOD_RES (18)..(19)..(20)..(21): Xaa is A or G or is absent
GXEEVIMSMEGIXXXXXXXXXMIQMTINSTKVPAXX

SEQ ID NO: 75230 - protein, 41 aa, Artificial Sequence; identical to SEQ ID NO: 17825
  GFR-binding peptide
  MOD_RES (2)..(4)..(41): Xaa is C or S

SEQ ID NO: 75231 - protein, 44 aa, Artificial Sequence; identical to SEQ ID NO: 17826
  GFR-binding peptide
  MOD_RES (2)..(4)..(41): Xaa is C or S
  MOD_RES (17)..(18)..(19)..(20)..(21): Xaa is A or G
  MOD_RES (22)..(23)..(24)..(25): Xaa is A or G or is absent

SEQ ID NO: 75232 - protein, 36 aa, Artificial Sequence
  GFR-binding peptide
  MOD_RES (2)..(33)..(34): Xaa is C or S
GXEEVIMSMEGLLLVRGNDMIQMTINSTKVPAXXTS

SEQ ID NO: 75233 - protein, 33 aa, Artificial Sequence
  GFR-binding peptide
  MOD_RES (32)..(33): Xaa is C or S
AEVVMDSMEGIVVNNAADMIQITINSLRAPVXX

SEQ ID NO: 75234 - protein, 35 aa, Artificial Sequence
  GFR-binding peptide
  MOD_RES (1)..(3)..(34)..(35): Xaa is C or S
XKXSKVIMSMEGLIKPTKGIMIQITINSLDQSVXX

SEQ ID NO: 75235 - protein, 40 aa, Artificial Sequence; identical to SEQ ID NO: 17827
  GFR-binding peptide
  MOD_RES (2)..(36): Xaa is C or S
  MOD_RES (14)..(15)..(16)..(17)..(18): Xaa is A or G
  MOD_RES (19)..(20)..(21)..(22): Xaa is A or G or is absent

SEQ ID NO: 75236 - protein, 39 aa, Artificial Sequence; identical to SEQ ID NO: 17828
  GFR-binding peptide
  MOD_RES (2)..(39): Xaa is C or S

SEQ ID NO: 75237 - protein, 41 aa, Artificial Sequence; identical to SEQ ID NO: 17831
  GFR-binding peptide
  MOD_RES (2)..(4)..(38): Xaa is C or S
  MOD_RES (16)..(17)..(18)..(19)..(20): Xaa is A or G
  MOD_RES (21)..(22)..(23)..(24): Xaa is A or G or is absent

SEQ ID NO: 75238 - protein, 42 aa, Artificial Sequence; identical to SEQ ID NO: 17832
  GFR-binding peptide
  MOD_RES (2)..(4)..(38): Xaa is C or S

SEQ ID NO: 75239 - protein, 38 aa, Artificial Sequence; identical to SEQ ID NO: 17833
  GFR-binding peptide
  MOD_RES (2)..(4)..(38): Xaa is C or S
  MOD_RES (16)..(17)..(18)..(19)..(20): Xaa is A or G
  MOD_RES (21)..(22)..(23)..(24): Xaa is A or G or is absent

SEQ ID NO: 75240 - protein, 37 aa, Artificial Sequence; identical to SEQ ID NO: 17834
  GFR-binding peptide
  MOD_RES (1)..(1): Xaa is C or S

SEQ ID NO: 75241 - protein, 36 aa, Artificial Sequence; identical to SEQ ID NO: 17835
  GFR-binding peptide
  MOD_RES (33)..(33): Xaa is C or S

SEQ ID NO: 75242 - protein, 35 aa, Artificial Sequence
  GFR-binding peptide
  MOD_RES (31)..(32): Xaa is C or S
EEVIMSMEGLLLVRGNDMIQMTINSTKVPAXXTSP

SEQ ID NO: 75243 - protein, 34 aa, Artificial Sequence; identical to SEQ ID NO: 47567
  GFR-binding peptide
  MOD_RES (2)..(2): Xaa is C or S
  MOD_RES (13)..(14)..(15)..(16)..(17): Xaa is A or G
  MOD_RES (18)..(19)..(20)..(21): Xaa is A or G or is absent

SEQ ID NO: 75244 - protein, 37 aa, Artificial Sequence
  GFR-binding peptide
  MOD_RES (2)..(33)..(34): Xaa is C or S
GXEEVIMSMEGILLVRGNDMIQMTINSTKVPAXXTSP

SEQ ID NO: 75245 - protein, 35 aa, Artificial Sequence; identical to SEQ ID NO: 47569
  GFR-binding peptide
  MOD_RES (33)..(34): Xaa is C or S
  MOD_RES (11)..(12)..(13)..(14)..(15): Xaa is A or G
  MOD_RES (16)..(17)..(18)..(19): Xaa is A or G or is absent

SEQ ID NO: 75246 - protein, 38 aa, Artificial Sequence
  GFR-binding peptide
  MOD_RES (2)..(4)..(38): Xaa is C or S
  MOD_RES (16)..(17)..(18)..(19)..(20): Xaa is A or G
  MOD_RES (21)..(22)..(23)..(24): Xaa is A or G or is absent
HXGXSRVVMNSMEGLXXXXXXXXXMIQVTINSLKTPAX

SEQ ID NO: 75247 - protein, 40 aa, Artificial Sequence
  GFR-binding peptide
  MOD_RES (1)..(3)..(35)..(36): Xaa is C or S
XGXRDVVMGSMEGIIIQQKDNMIQMTINSMKTPTXXPGAS

SEQ ID NO: 75248 - protein, 40 aa, Artificial Sequence
  GFR-binding peptide
  MOD_RES (2)..(34)..(35): Xaa is C or S
GXSRVVMNSMEGLIVNSSDDMIQVTINSLKTPAXXPKPVH

SEQ ID NO: 75249 - protein, 41 aa, Artificial Sequence; identical to SEQ ID NO: 17838
  GFR-binding peptide
  MOD_RES (1)..(3)..(40): Xaa is C or S

SEQ ID NO: 75250 - protein, 36 aa, Artificial Sequence
  GFR-binding peptide
  MOD_RES (1)..(34)..(35): Xaa is C or S
  MOD_RES (12)..(13)..(14)..(15)..(16): Xaa is A or G
  MOD_RES (17)..(18)..(19)..(20): Xaa is A or G or is absent
XSKVVMSMEGLXXXXXXXXXMIQITINSLDQPVXXP

SEQ ID NO: 75251 - protein, 34 aa, Artificial Sequence
  GFR-binding peptide
  MOD_RES (31)..(32): Xaa is C or S
RVVMNSMEGLIVNSSDDMIQVTINSLKTPAXXPK

SEQ ID NO: 75252 - protein, 34 aa, Artificial Sequence; identical to SEQ ID NO: 17839
  GFR-binding peptide
  MOD_RES (11)..(12)..(13)..(14)..(15): Xaa is A or G
  MOD_RES (16)..(17)..(18)..(19): Xaa is A or G or is absent

SEQ ID NO: 75253 - protein, 40 aa, Artificial Sequence; identical to SEQ ID NO: 50095
  GFR-binding peptide
  MOD_RES (1)..(3)..(34)..(35): Xaa is C or S

SEQ ID NO: 75254 - protein, 40 aa, Artificial Sequence; identical to SEQ ID NO: 17842
  GFR-binding peptide
  MOD_RES (1)..(3)..(40): Xaa is C or S
  MOD_RES (16)..(17)..(18)..(19)..(20): Xaa is A or G
  MOD_RES (21)..(22)..(23)..(24): Xaa is A or G or is absent

SEQ ID NO: 75255 - protein, 39 aa, Artificial Sequence; identical to SEQ ID NO: 17844
  GFR-binding peptide
  MOD_RES (34)..(34): Xaa is C or S
  MOD_RES (12)..(13)..(14)..(15)..(16): Xaa is A or G
  MOD_RES (17)..(18)..(19)..(20): Xaa is A or G or is absent

SEQ ID NO: 75256 - protein, 37 aa, Artificial Sequence; identical to SEQ ID NO: 17845
  GFR-binding peptide
  MOD_RES (2)..(4): Xaa is C or S
  MOD_RES (16)..(17)..(18)..(19)..(20): Xaa is A or G
  MOD_RES (21)..(22)..(23)..(24): Xaa is A or G or is absent

SEQ ID NO: 75257 - protein, 37 aa, Artificial Sequence; identical to SEQ ID NO: 50104
  GFR-binding peptide
  MOD_RES (1)..(34)..(35): Xaa is C or S
  MOD_RES (12)..(13)..(14)..(15)..(16): Xaa is A or G
  MOD_RES (17)..(18)..(19)..(20): Xaa is A or G or is absent

SEQ ID NO: 75258 - protein, 34 aa, Artificial Sequence; identical to SEQ ID NO: 17848
  GFR-binding peptide
  MOD_RES (34)..(34): Xaa is C or S
  MOD_RES (12)..(13)..(14)..(15)..(16): Xaa is A or G
  MOD_RES (17)..(18)..(19)..(20): Xaa is A or G or is absent

SEQ ID NO: 75259 - protein, 37 aa, Artificial Sequence
  GFR-binding peptide
  MOD_RES (1)..(3)..(36)..(37): Xaa is C or S
  MOD_RES (14)..(15)..(16)..(17)..(18): Xaa is A or G
  MOD_RES (19)..(20)..(21)..(22): Xaa is A or G or is absent
XGXEEVIMSMEGIXXXXXXXXXMIQMTINSTKVPAXX

SEQ ID NO: 75260 - protein, 38 aa, Artificial Sequence; identical to SEQ ID NO: 17850
  GFR-binding peptide
  MOD_RES (34)..(34): Xaa is C or S

SEQ ID NO: 75261 - protein, 37 aa, Artificial Sequence; identical to SEQ ID NO: 17851
  GFR-binding peptide
  MOD_RES (34)..(34): Xaa is C or S

SEQ ID NO: 75262 - protein, 35 aa, Artificial Sequence; identical to SEQ ID NO: 17852
  GFR-binding peptide

SEQ ID NO: 75263 - protein, 34 aa, Artificial Sequence
  GFR-binding peptide
  MOD_RES (34)..(34): Xaa is C or S
  MOD_RES (12)..(13)..(14)..(15)..(16): Xaa is A or G
  MOD_RES (17)..(18)..(19)..(20): Xaa is A or G or is absent
RDVVMGSMEGLXXXXXXXXXMIQMTINSMKTPTX

SEQ ID NO: 75264 - protein, 36 aa, Artificial Sequence; identical to SEQ ID NO: 17853
  GFR-binding peptide
  MOD_RES (13)..(14)..(15)..(16)..(17): Xaa is A or G
  MOD_RES (18)..(19)..(20)..(21): Xaa is A or G or is absent

SEQ ID NO: 75265 - protein, 38 aa, Artificial Sequence; identical to SEQ ID NO: 17855
  GFR-binding peptide
  MOD_RES (1)..(3): Xaa is C or S
  MOD_RES (16)..(17)..(18)..(19)..(20): Xaa is A or G
  MOD_RES (21)..(22)..(23)..(24): Xaa is A or G or is absent

SEQ ID NO: 75266 - protein, 40 aa, Artificial Sequence; identical to SEQ ID NO: 17856
  GFR-binding peptide
  MOD_RES (34)..(34): Xaa is C or S

SEQ ID NO: 75267 - protein, 43 aa, Artificial Sequence
  GFR-binding peptide
  MOD_RES (2)..(4)..(38)..(39): Xaa is C or S
  MOD_RES (16)..(17)..(18)..(19)..(20): Xaa is A or G
  MOD_RES (21)..(22)..(23)..(24): Xaa is A or G or is absent
RXGXAEVVMDSMEGLXXXXXXXXXMIQITINSLRAPVXXSAPA

SEQ ID NO: 75268 - protein, 41 aa, Artificial Sequence; identical to SEQ ID NO: 17857
  GFR-binding peptide
  MOD_RES (1)..(3)..(40): Xaa is C or S
  MOD_RES (16)..(17)..(18)..(19)..(20): Xaa is A or G
  MOD_RES (21)..(22)..(23)..(24): Xaa is A or G or is absent

SEQ ID NO: 75269 - protein, 39 aa, Artificial Sequence; identical to SEQ ID NO: 17858
  GFR-binding peptide
  MOD_RES (36)..(36): Xaa is C or S
  MOD_RES (12)..(13)..(14)..(15)..(16): Xaa is A or G
  MOD_RES (17)..(18)..(19)..(20): Xaa is A or G or is absent

SEQ ID NO: 75270 - protein, 36 aa, Artificial Sequence; identical to SEQ ID NO: 47603
  GFR-binding peptide
  MOD_RES (33)..(34): Xaa is C or S
  MOD_RES (11)..(12)..(13)..(14)..(15): Xaa is A or G
  MOD_RES (16)..(17)..(18)..(19): Xaa is A or G or is absent

SEQ ID NO: 75271 - protein, 38 aa, Artificial Sequence
  GFR-binding peptide
  MOD_RES (34)..(35): Xaa is C or S
  MOD_RES (12)..(13)..(14)..(15)..(16): Xaa is A or G
  MOD_RES (17)..(18)..(19)..(20): Xaa is A or G or is absent
SEVVMDSMEGLXXXXXXXXXMIQITINSLRTPVXXTPP

SEQ ID NO: 75272 - protein, 35 aa, Artificial Sequence; identical to SEQ ID NO: 17861
  GFR-binding peptide
  MOD_RES (1)..(35): Xaa is C or S

SEQ ID NO: 75273 - protein, 36 aa, Artificial Sequence; identical to SEQ ID NO: 17864
  GFR-binding peptide
  MOD_RES (34)..(34): Xaa is C or S

SEQ ID NO: 75274 - protein, 40 aa, Artificial Sequence; identical to SEQ ID NO: 50137
  GFR-binding peptide
  MOD_RES (1)..(3)..(34)..(35): Xaa is C or S

SEQ ID NO: 75275 - protein, 35 aa, Artificial Sequence; identical to SEQ ID NO: 17865
  GFR-binding peptide
  MOD_RES (34)..(34): Xaa is C or S

SEQ ID NO: 75276 - protein, 35 aa, Artificial Sequence; identical to SEQ ID NO: 17867
  GFR-binding peptide
  MOD_RES (33)..(33): Xaa is C or S
  MOD_RES (11)..(12)..(13)..(14)..(15): Xaa is A or G
  MOD_RES (16)..(17)..(18)..(19): Xaa is A or G or is absent

SEQ ID NO: 75277 - protein, 38 aa, Artificial Sequence; identical to SEQ ID NO: 47618
  GFR-binding peptide
  MOD_RES (2)..(35)..(36): Xaa is C or S
  MOD_RES (13)..(14)..(15)..(16)..(17): Xaa is A or G
  MOD_RES (18)..(19)..(20)..(21): Xaa is A or G or is absent

SEQ ID NO: 75278 - protein, 36 aa, Artificial Sequence
  GFR-binding peptide
  MOD_RES (1)..(34)..(35): Xaa is C or S
  MOD_RES (12)..(13)..(14)..(15)..(16): Xaa is A or G
  MOD_RES (17)..(18)..(19)..(20): Xaa is A or G or is absent
XSKVIMSMEGLXXXXXXXXXMIQITINSLDQSVXXP

SEQ ID NO: 75279 - protein, 32 aa, Artificial Sequence
  GFR-binding peptide
  MOD_RES (31)..(32): Xaa is C or S
DVVMGSMEGLIIQQKDNMIQMTINSMKTPTXX

SEQ ID NO: 75280 - protein, 37 aa, Artificial Sequence
  GFR-binding peptide
  MOD_RES (2)..(4)..(35)..(36): Xaa is C or S
SXKXSKVIMSMEGLIKPTKGIMIQITINSLDQSVXXP

SEQ ID NO: 75281 - protein, 37 aa, Artificial Sequence
  GFR-binding peptide
  MOD_RES (2)..(36)..(37): Xaa is C or S
  MOD_RES (14)..(15)..(16)..(17)..(18): Xaa is A or G
  MOD_RES (19)..(20)..(21)..(22): Xaa is A or G or is absent
GXAEVVMDSMEGLXXXXXXXXXMIQITINSLRAPVXX

SEQ ID NO: 75282 - protein, 36 aa, Artificial Sequence
  GFR-binding peptide
  MOD_RES (32)..(33): Xaa is C or S
AEVVMDSMEGIVVNNAADMIQITINSLRAPVXXSAP

SEQ ID NO: 75283 - protein, 39 aa, Artificial Sequence
  GFR-binding peptide
  MOD_RES (2)..(34)..(35): Xaa is C or S
GXRDVVMGSMEGIIIQQKDNMIQMTINSMKTPTXXPGAS

SEQ ID NO: 75284 - protein, 35 aa, Artificial Sequence
  GFR-binding peptide
  MOD_RES (2)..(34)..(35): Xaa is C or S
GXSEVVMDSMEGIVVNNASDMIQITINSLRTPVXX

SEQ ID NO: 75285 - protein, 37 aa, Artificial Sequence; identical to SEQ ID NO: 17870
  GFR-binding peptide
  MOD_RES (33)..(33): Xaa is C or S
  MOD_RES (11)..(12)..(13)..(14)..(15): Xaa is A or G
  MOD_RES (16)..(17)..(18)..(19): Xaa is A or G or is absent

SEQ ID NO: 75286 - protein, 38 aa, Artificial Sequence; identical to SEQ ID NO: 17872
  GFR-binding peptide
  MOD_RES (33)..(33): Xaa is C or S
  MOD_RES (11)..(12)..(13)..(14)..(15): Xaa is A or G
  MOD_RES (16)..(17)..(18)..(19): Xaa is A or G or is absent

SEQ ID NO: 75287 - protein, 40 aa, Artificial Sequence
  GFR-binding peptide
  MOD_RES (2)..(35)..(36): Xaa is C or S
  MOD_RES (13)..(14)..(15)..(16)..(17): Xaa is A or G
  MOD_RES (18)..(19)..(20)..(21): Xaa is A or G or is absent
KXSRVIMSMEGLXXXXXXXXXMIQITINSLAQPVXXPAAS

SEQ ID NO: 75288 - protein, 33 aa, Artificial Sequence; identical to SEQ ID NO: 17873
  GFR-binding peptide

SEQ ID NO: 75289 - protein, 42 aa, Artificial Sequence; identical to SEQ ID NO: 17874
  GFR-binding peptide
  MOD_RES (1)..(38): Xaa is C or S

SEQ ID NO: 75290 - protein, 39 aa, Artificial Sequence
  GFR-binding peptide
  MOD_RES (2)..(34)..(35): Xaa is C or S
GXAEVVMDSMEGLVVNNAADMIQITINSLRAPVXXSAPA

SEQ ID NO: 75291 - protein, 32 aa, Artificial Sequence
  GFR-binding peptide
  MOD_RES (1)..(32): Xaa is C or S
XSRVIMSMEGLVKPKRGVMIQITINSLAQPVX

SEQ ID NO: 75292 - protein, 39 aa, Artificial Sequence
  GFR-binding peptide
  MOD_RES (2)..(4)..(36)..(37): Xaa is C or S
HXGXSRVVMNSMEGLIVNSSDDMIQVTINSLKTPAXXPK

SEQ ID NO: 75293 - protein, 31 aa, Artificial Sequence
  GFR-binding peptide
  MOD_RES (31)..(31): Xaa is C or S
EVVMDSMEGIVVNNASDMIQITINSLRTPVX

SEQ ID NO: 75294 - protein, 32 aa, Artificial Sequence
  GFR-binding peptide
  MOD_RES (1)..(1): Xaa is C or S
XRDVVMGSMEGLIIQQKDNMIQMTINSMKTPT

SEQ ID NO: 75295 - protein, 40 aa, Artificial Sequence
  GFR-binding peptide
  MOD_RES (1)..(3)..(35)..(36): Xaa is C or S
XGXSEVVMDSMEGLVVNNASDMIQITINSLRTPVXXTPPT

SEQ ID NO: 75296 - protein, 38 aa, Artificial Sequence; identical to SEQ ID NO: 47639
  GFR-binding peptide
  MOD_RES (2)..(4)..(35)..(36): Xaa is C or S

SEQ ID NO: 75297 - protein, 37 aa, Artificial Sequence
  GFR-binding peptide
  MOD_RES (1)..(3)..(35)..(36): Xaa is C or S
XGXSEVVMDSMEGLVVNNASDMIQITINSLRTPVXXT

SEQ ID NO: 75298 - protein, 36 aa, Artificial Sequence; identical to SEQ ID NO: 50154
  GFR-binding peptide
  MOD_RES (2)..(4): Xaa is C or S
  MOD_RES (15)..(16)..(17)..(18)..(19): Xaa is A or G
  MOD_RES (20)..(21)..(22)..(23): Xaa is A or G or is absent

SEQ ID NO: 75299 - protein, 37 aa, Artificial Sequence; identical to SEQ ID NO: 47641
  GFR-binding peptide
  MOD_RES (2)..(36)..(37): Xaa is C or S
  MOD_RES (14)..(15)..(16)..(17)..(18): Xaa is A or G
  MOD_RES (19)..(20)..(21)..(22): Xaa is A or G or is absent

SEQ ID NO: 75300 - protein, 39 aa, Artificial Sequence
  GFR-binding peptide
  MOD_RES (2)..(4)..(36)..(37): Xaa is C or S
SXGXRDVVMGSMEGLIIQQKDNMIQMTINSMKTPTXXPG

SEQ ID NO: 75301 - protein, 41 aa, Artificial Sequence; identical to SEQ ID NO: 17880
  GFR-binding peptide
  MOD_RES (1)..(38): Xaa is C or S

SEQ ID NO: 75302 - protein, 33 aa, Artificial Sequence; identical to SEQ ID NO: 17881
  GFR-binding peptide
  MOD_RES (33)..(33): Xaa is C or S
  MOD_RES (11)..(12)..(13)..(14)..(15): Xaa is A or G
  MOD_RES (16)..(17)..(18)..(19): Xaa is A or G or is absent

SEQ ID NO: 75303 - protein, 34 aa, Artificial Sequence
  GFR-binding peptide
  MOD_RES (31)..(32): Xaa is C or S
SKVIMSMEGLIKPTKGIMIQITINSLDQSVXXPS

SEQ ID NO: 75304 - protein, 35 aa, Artificial Sequence; identical to SEQ ID NO: 17882
  GFR-binding peptide

SEQ ID NO: 75305 - protein, 38 aa, Artificial Sequence; identical to SEQ ID NO: 17883
  GFR-binding peptide
  MOD_RES (1)..(35): Xaa is C or S
  MOD_RES (13)..(14)..(15)..(16)..(17): Xaa is A or G
  MOD_RES (18)..(19)..(20)..(21): Xaa is A or G or is absent

SEQ ID NO: 75306 - protein, 39 aa, Artificial Sequence; identical to SEQ ID NO: 17884
  GFR-binding peptide
  MOD_RES (1)..(3)..(37): Xaa is C or S

SEQ ID NO: 75307 - protein, 33 aa, Artificial Sequence; identical to SEQ ID NO: 17885
  GFR-binding peptide

SEQ ID NO: 75308 - protein, 35 aa, Artificial Sequence
  GFR-binding peptide
  MOD_RES (33)..(34): Xaa is C or S
  MOD_RES (11)..(12)..(13)..(14)..(15): Xaa is A or G
  MOD_RES (16)..(17)..(18)..(19): Xaa is A or G or is absent
EVVMDSMEGLXXXXXXXXXMIQITINSLRAPVXXS

SEQ ID NO: 75309 - protein, 34 aa, Artificial Sequence; identical to SEQ ID NO: 17887
  GFR-binding peptide
  MOD_RES (33)..(33): Xaa is C or S
  MOD_RES (11)..(12)..(13)..(14)..(15): Xaa is A or G
  MOD_RES (16)..(17)..(18)..(19): Xaa is A or G or is absent

SEQ ID NO: 75310 - protein, 41 aa, Artificial Sequence
  GFR-binding peptide
  MOD_RES (1)..(3)..(36)..(37): Xaa is C or S
  MOD_RES (14)..(15)..(16)..(17)..(18): Xaa is A or G
  MOD_RES (19)..(20)..(21)..(22): Xaa is A or G or is absent
XGXEEVIMSMEGLXXXXXXXXXMIQMTINSTKVPAXXTSPV

SEQ ID NO: 75311 - protein, 33 aa, Artificial Sequence
  GFR-binding peptide
  MOD_RES (1)..(33): Xaa is C or S
XSRVVMNSMEGLIVNSSDDMIQVTINSLKTPAX

SEQ ID NO: 75312 - protein, 38 aa, Artificial Sequence; identical to SEQ ID NO: 17891
  GFR-binding peptide
  MOD_RES (2)..(36): Xaa is C or S

SEQ ID NO: 75313 - protein, 36 aa, Artificial Sequence; identical to SEQ ID NO: 17892
  GFR-binding peptide
  MOD_RES (1)..(3): Xaa is C or S

SEQ ID NO: 75314 - protein, 39 aa, Artificial Sequence
  GFR-binding peptide
  MOD_RES (1)..(3)..(34)..(35): Xaa is C or S
XGXEEVIMSMEGLLLVRGNDMIQMTINSTKVPAXXTSPV

SEQ ID NO: 75315 - protein, 42 aa, Artificial Sequence; identical to SEQ ID NO: 50172
  GFR-binding peptide
  MOD_RES (2)..(4)..(38)..(39): Xaa is C or S
  MOD_RES (16)..(17)..(18)..(19)..(20): Xaa is A or G
  MOD_RES (21)..(22)..(23)..(24): Xaa is A or G or is absent

SEQ ID NO: 75316 - protein, 37 aa, Artificial Sequence; identical to SEQ ID NO: 17895
  GFR-binding peptide
  MOD_RES (37)..(37): Xaa is C or S

SEQ ID NO: 75317 - protein, 37 aa, Artificial Sequence; identical to SEQ ID NO: 17897
  GFR-binding peptide
  MOD_RES (1)..(3)..(37): Xaa is C or S
  MOD_RES (15)..(16)..(17)..(18)..(19): Xaa is A or G
  MOD_RES (20)..(21)..(22)..(23): Xaa is A or G or is absent

SEQ ID NO: 75318 - protein, 39 aa, Artificial Sequence; identical to SEQ ID NO: 50175
  GFR-binding peptide
  MOD_RES (1)..(3)..(34)..(35): Xaa is C or S

SEQ ID NO: 75319 - protein, 43 aa, Artificial Sequence; identical to SEQ ID NO: 17899
  GFR-binding peptide
  MOD_RES (1)..(3)..(37): Xaa is C or S

SEQ ID NO: 75320 - protein, 39 aa, Artificial Sequence
  GFR-binding peptide
  MOD_RES (2)..(34)..(35): Xaa is C or S
GXSEVVMDSMEGLVVNNASDMIQITINSLRTPVXXTPPT

SEQ ID NO: 75321 - protein, 33 aa, Artificial Sequence
  GFR-binding peptide
  MOD_RES (12)..(13)..(14)..(15)..(16): Xaa is A or G
  MOD_RES (17)..(18)..(19)..(20): Xaa is A or G or is absent
RDVVMGSMEGIXXXXXXXXXMIQMTINSMKTPT

SEQ ID NO: 75322 - protein, 36 aa, Artificial Sequence
  GFR-binding peptide
  MOD_RES (34)..(35): Xaa is C or S
  MOD_RES (12)..(13)..(14)..(15)..(16): Xaa is A or G
  MOD_RES (17)..(18)..(19)..(20): Xaa is A or G or is absent
SEVVMDSMEGLXXXXXXXXXMIQITINSLRTPVXXT

SEQ ID NO: 75323 - protein, 35 aa, Artificial Sequence; identical to SEQ ID NO: 47657
  GFR-binding peptide
  MOD_RES (31)..(32): Xaa is C or S

SEQ ID NO: 75324 - protein, 37 aa, Artificial Sequence
  GFR-binding peptide
  MOD_RES (1)..(35)..(36): Xaa is C or S
  MOD_RES (13)..(14)..(15)..(16)..(17): Xaa is A or G
  MOD_RES (18)..(19)..(20)..(21): Xaa is A or G or is absent
XSRVVMNSMEGLXXXXXXXXXMIQVTINSLKTPAXXP

SEQ ID NO: 75325 - protein, 37 aa, Artificial Sequence; identical to SEQ ID NO: 17903
  GFR-binding peptide
  MOD_RES (2)..(4): Xaa is C or S
  MOD_RES (16)..(17)..(18)..(19)..(20): Xaa is A or G
  MOD_RES (21)..(22)..(23)..(24): Xaa is A or G or is absent

SEQ ID NO: 75326 - protein, 43 aa, Artificial Sequence; identical to SEQ ID NO: 17905
  GFR-binding peptide
  MOD_RES (2)..(39): Xaa is C or S

SEQ ID NO: 75327 - protein, 37 aa, Artificial Sequence
  GFR-binding peptide
  MOD_RES (1)..(3)..(34)..(35): Xaa is C or S
XKXSKVVMSMEGLVKPTRGVMIQITINSLDQPVXXPS

SEQ ID NO: 75328 - protein, 42 aa, Artificial Sequence; identical to SEQ ID NO: 17907
  GFR-binding peptide
  MOD_RES (1)..(38): Xaa is C or S
  MOD_RES (14)..(15)..(16)..(17)..(18): Xaa is A or G
  MOD_RES (19)..(20)..(21)..(22): Xaa is A or G or is absent

SEQ ID NO: 75329 - protein, 34 aa, Artificial Sequence; identical to SEQ ID NO: 17908
  GFR-binding peptide

SEQ ID NO: 75330 - protein, 38 aa, Artificial Sequence
  GFR-binding peptide
  MOD_RES (1)..(3)..(35)..(36): Xaa is C or S
XGXSRVVMNSMEGLIVNSSDDMIQVTINSLKTPAXXPK

SEQ ID NO: 75331 - protein, 38 aa, Artificial Sequence; identical to SEQ ID NO: 17909
  GFR-binding peptide
  MOD_RES (37)..(37): Xaa is C or S
  MOD_RES (13)..(14)..(15)..(16)..(17): Xaa is A or G
  MOD_RES (18)..(19)..(20)..(21): Xaa is A or G or is absent

SEQ ID NO: 75332 - protein, 35 aa, Artificial Sequence; identical to SEQ ID NO: 17910
  GFR-binding peptide
  MOD_RES (1)..(35): Xaa is C or S
  MOD_RES (13)..(14)..(15)..(16)..(17): Xaa is A or G
  MOD_RES (18)..(19)..(20)..(21): Xaa is A or G or is absent

SEQ ID NO: 75333 - protein, 43 aa, Artificial Sequence
  GFR-binding peptide
  MOD_RES (1)..(3)..(37)..(38): Xaa is C or S
  MOD_RES (15)..(16)..(17)..(18)..(19): Xaa is A or G
  MOD_RES (20)..(21)..(22)..(23): Xaa is A or G or is absent
XGXRDVVMGSMEGLXXXXXXXXXMIQMTINSMKTPTXXPGASG

SEQ ID NO: 75334 - protein, 35 aa, Artificial Sequence
  GFR-binding peptide
  MOD_RES (34)..(35): Xaa is C or S
  MOD_RES (12)..(13)..(14)..(15)..(16): Xaa is A or G
  MOD_RES (17)..(18)..(19)..(20): Xaa is A or G or is absent
SRVVMNSMEGLXXXXXXXXXMIQVTINSLKTPAXX

SEQ ID NO: 75335 - protein, 40 aa, Artificial Sequence; identical to SEQ ID NO: 50201
  GFR-binding peptide
  MOD_RES (2)..(4)..(37)..(38): Xaa is C or S
  MOD_RES (15)..(16)..(17)..(18)..(19): Xaa is A or G
  MOD_RES (20)..(21)..(22)..(23): Xaa is A or G or is absent

SEQ ID NO: 75336 - protein, 33 aa, Artificial Sequence; identical to SEQ ID NO: 17917
  GFR-binding peptide
  MOD_RES (33)..(33): Xaa is C or S

SEQ ID NO: 75337 - protein, 32 aa, Artificial Sequence; identical to SEQ ID NO: 17919
  GFR-binding peptide
  MOD_RES (11)..(12)..(13)..(14)..(15): Xaa is A or G
  MOD_RES (16)..(17)..(18)..(19): Xaa is A or G or is absent

SEQ ID NO: 75338 - protein, 38 aa, Artificial Sequence
  GFR-binding peptide
  MOD_RES (1)..(3)..(36)..(37): Xaa is C or S
  MOD_RES (14)..(15)..(16)..(17)..(18): Xaa is A or G
  MOD_RES (19)..(20)..(21)..(22): Xaa is A or G or is absent
XKXSKVVMSMEGLXXXXXXXXXMIQITINSLDQPVXXP

SEQ ID NO: 75339 - protein, 38 aa, Artificial Sequence
  GFR-binding peptide
  MOD_RES (1)..(34)..(35): Xaa is C or S
  MOD_RES (12)..(13)..(14)..(15)..(16): Xaa is A or G
  MOD_RES (17)..(18)..(19)..(20): Xaa is A or G or is absent
XSKVVMSMEGLXXXXXXXXXMIQITINSLDQPVXXPSA

SEQ ID NO: 75340 - protein, 33 aa, Artificial Sequence; identical to SEQ ID NO: 17923
  GFR-binding peptide
  MOD_RES (12)..(13)..(14)..(15)..(16): Xaa is A or G
  MOD_RES (17)..(18)..(19)..(20): Xaa is A or G or is absent

SEQ ID NO: 75341 - protein, 33 aa, Artificial Sequence
  GFR-binding peptide
  MOD_RES (32)..(33): Xaa is C or S
SEVVMDSMEGIVVNNASDMIQITINSLRTPVXX

SEQ ID NO: 75342 - protein, 37 aa, Artificial Sequence; identical to SEQ ID NO: 17924
  GFR-binding peptide
  MOD_RES (33)..(33): Xaa is C or S
  MOD_RES (11)..(12)..(13)..(14)..(15): Xaa is A or G
  MOD_RES (16)..(17)..(18)..(19): Xaa is A or G or is absent

SEQ ID NO: 75343 - protein, 35 aa, Artificial Sequence; identical to SEQ ID NO: 47692
  GFR-binding peptide
  MOD_RES (1)..(32)..(33): Xaa is C or S

SEQ ID NO: 75344 - protein, 33 aa, Artificial Sequence
  GFR-binding peptide
  MOD_RES (31)..(32): Xaa is C or S
EVVMDSMEGLVVNNASDMIQITINSLRTPVXXT

SEQ ID NO: 75345 - protein, 43 aa, Artificial Sequence
  GFR-binding peptide
  MOD_RES (2)..(4)..(37)..(38): Xaa is C or S
  MOD_RES (15)..(16)..(17)..(18)..(19): Xaa is A or G
  MOD_RES (20)..(21)..(22)..(23): Xaa is A or G or is absent
LXGXEEVIMSMEGIXXXXXXXXXMIQMTINSTKVPAXXTSPVR

SEQ ID NO: 75346 - protein, 37 aa, Artificial Sequence
  GFR-binding peptide
  MOD_RES (2)..(4)..(37): Xaa is C or S
  MOD_RES (15)..(16)..(17)..(18)..(19): Xaa is A or G
  MOD_RES (20)..(21)..(22)..(23): Xaa is A or G or is absent
SXKXSKVVMSMEGLXXXXXXXXXMIQITINSLDQPVX

SEQ ID NO: 75347 - protein, 31 aa, Artificial Sequence
  GFR-binding peptide
  MOD_RES (31)..(31): Xaa is C or S
SKVVMSMEGLVKPTRGVMIQITINSLDQPVX

SEQ ID NO: 75348 - protein, 40 aa, Artificial Sequence; identical to SEQ ID NO: 17931
  GFR-binding peptide
  MOD_RES (2)..(36): Xaa is C or S

SEQ ID NO: 75349 - protein, 40 aa, Artificial Sequence; identical to SEQ ID NO: 17933
  GFR-binding peptide
  MOD_RES (37)..(37): Xaa is C or S
  MOD_RES (13)..(14)..(15)..(16)..(17): Xaa is A or G
  MOD_RES (18)..(19)..(20)..(21): Xaa is A or G or is absent

SEQ ID NO: 75350 - protein, 40 aa, Artificial Sequence
  GFR-binding peptide
  MOD_RES (1)..(3)..(34)..(35): Xaa is C or S
XGXEEVIMSMEGILLVRGNDMIQMTINSTKVPAXXTSPVR

SEQ ID NO: 75351 - protein, 41 aa, Artificial Sequence; identical to SEQ ID NO: 50216
  GFR-binding peptide
  MOD_RES (2)..(4)..(35)..(36): Xaa is C or S

SEQ ID NO: 75352 - protein, 39 aa, Artificial Sequence
  GFR-binding peptide
  MOD_RES (1)..(33)..(34): Xaa is C or S
XAEVVMDSMEGIVVNNAADMIQITINSLRAPVXXSAPAA

SEQ ID NO: 75353 - protein, 37 aa, Artificial Sequence
  GFR-binding peptide
  MOD_RES (1)..(3)..(37): Xaa is C or S
  MOD_RES (15)..(16)..(17)..(18)..(19): Xaa is A or G
  MOD_RES (20)..(21)..(22)..(23): Xaa is A or G or is absent
XGXAEVVMDSMEGLXXXXXXXXXMIQITINSLRAPVX

SEQ ID NO: 75354 - protein, 38 aa, Artificial Sequence
  GFR-binding peptide
  MOD_RES (2)..(33)..(34): Xaa is C or S
KXSRVIMSMEGLVKPKRGVMIQITINSLAQPVXXPAAS

SEQ ID NO: 75355 - protein, 41 aa, Artificial Sequence
  GFR-binding peptide
  MOD_RES (2)..(36)..(37): Xaa is C or S
  MOD_RES (14)..(15)..(16)..(17)..(18): Xaa is A or G
  MOD_RES (19)..(20)..(21)..(22): Xaa is A or G or is absent
GXRDVVMGSMEGLXXXXXXXXXMIQMTINSMKTPTXXPGAS

SEQ ID NO: 75356 - protein, 33 aa, Artificial Sequence
  GFR-binding peptide
  MOD_RES (1)..(32)..(33): Xaa is C or S
XSKVIMSMEGLIKPTKGIMIQITINSLDQSVXX

SEQ ID NO: 75357 - protein, 41 aa, Artificial Sequence
  GFR-binding peptide
  MOD_RES (2)..(4)..(36)..(37): Xaa is C or S
SXGXRDVVMGSMEGLIIQQKDNMIQMTINSMKTPTXXPGAS

SEQ ID NO: 75358 - protein, 39 aa, Artificial Sequence; identical to SEQ ID NO: 17935
  GFR-binding peptide
  MOD_RES (2)..(4)..(38): Xaa is C or S

SEQ ID NO: 75359 - protein, 38 aa, Artificial Sequence
  GFR-binding peptide
  MOD_RES (1)..(35)..(36): Xaa is C or S
  MOD_RES (13)..(14)..(15)..(16)..(17): Xaa is A or G
  MOD_RES (18)..(19)..(20)..(21): Xaa is A or G or is absent
XAEVVMDSMEGIXXXXXXXXXMIQITINSLRAPVXXSA

SEQ ID NO: 75360 - protein, 39 aa, Artificial Sequence; identical to SEQ ID NO: 17937
  GFR-binding peptide
  MOD_RES (37)..(37): Xaa is C or S
  MOD_RES (13)..(14)..(15)..(16)..(17): Xaa is A or G
  MOD_RES (18)..(19)..(20)..(21): Xaa is A or G or is absent

SEQ ID NO: 75361 - protein, 43 aa, Artificial Sequence; identical to SEQ ID NO: 17938
  GFR-binding peptide
  MOD_RES (2)..(4)..(38): Xaa is C or S
  MOD_RES (16)..(17)..(18)..(19)..(20): Xaa is A or G
  MOD_RES (21)..(22)..(23)..(24): Xaa is A or G or is absent

SEQ ID NO: 75362 - protein, 36 aa, Artificial Sequence
  GFR-binding peptide
  MOD_RES (31)..(32): Xaa is C or S
SKVIMSMEGLIKPTKGIMIQITINSLDQSVXXPSAS

SEQ ID NO: 75363 - protein, 38 aa, Artificial Sequence
  GFR-binding peptide
  MOD_RES (2)..(35)..(36): Xaa is C or S
  MOD_RES (13)..(14)..(15)..(16)..(17): Xaa is A or G
  MOD_RES (18)..(19)..(20)..(21): Xaa is A or G or is absent
KXSRVIMSMEGLXXXXXXXXXMIQITINSLAQPVXXPA

SEQ ID NO: 75364 - protein, 40 aa, Artificial Sequence; identical to SEQ ID NO: 17943
  GFR-binding peptide
  MOD_RES (2)..(39): Xaa is C or S
  MOD_RES (15)..(16)..(17)..(18)..(19): Xaa is A or G
  MOD_RES (20)..(21)..(22)..(23): Xaa is A or G or is absent

SEQ ID NO: 75365 - protein, 35 aa, Artificial Sequence; identical to SEQ ID NO: 50224
  GFR-binding peptide
  MOD_RES (2)..(4)..(35): Xaa is C or S

SEQ ID NO: 75366 - protein, 35 aa, Artificial Sequence; identical to SEQ ID NO: 50226
  GFR-binding peptide
  MOD_RES (2)..(2): Xaa is C or S
  MOD_RES (14)..(15)..(16)..(17)..(18): Xaa is A or G
  MOD_RES (19)..(20)..(21)..(22): Xaa is A or G or is absent

SEQ ID NO: 75367 - protein, 32 aa, Artificial Sequence
  GFR-binding peptide
  MOD_RES (11)..(12)..(13)..(14)..(15): Xaa is A or G
  MOD_RES (16)..(17)..(18)..(19): Xaa is A or G or is absent
EVVMDSMEGLXXXXXXXXXMIQITINSLRTPV

SEQ ID NO: 75368 - protein, 37 aa, Artificial Sequence; identical to SEQ ID NO: 17947
  GFR-binding peptide
  MOD_RES (36)..(36): Xaa is C or S

SEQ ID NO: 75369 - protein, 33 aa, Artificial Sequence; identical to SEQ ID NO: 50241
  GFR-binding peptide
  MOD_RES (31)..(32): Xaa is C or S

SEQ ID NO: 75370 - protein, 38 aa, Artificial Sequence; identical to SEQ ID NO: 17950
  GFR-binding peptide
  MOD_RES (37)..(37): Xaa is C or S

SEQ ID NO: 75371 - protein, 42 aa, Artificial Sequence
  GFR-binding peptide
  MOD_RES (2)..(4)..(37)..(38): Xaa is C or S
  MOD_RES (15)..(16)..(17)..(18)..(19): Xaa is A or G
  MOD_RES (20)..(21)..(22)..(23): Xaa is A or G or is absent
LXGXEEVIMSMEGIXXXXXXXXXMIQMTINSTKVPAXXTSPV

SEQ ID NO: 75372 - protein, 40 aa, Artificial Sequence; identical to SEQ ID NO: 47732
  GFR-binding peptide
  MOD_RES (2)..(35)..(36): Xaa is C or S
  MOD_RES (13)..(14)..(15)..(16)..(17): Xaa is A or G
  MOD_RES (18)..(19)..(20)..(21): Xaa is A or G or is absent

SEQ ID NO: 75373 - protein, 36 aa, Artificial Sequence; identical to SEQ ID NO: 17953
  GFR-binding peptide
  MOD_RES (1)..(1): Xaa is C or S

SEQ ID NO: 75374 - protein, 41 aa, Artificial Sequence; identical to SEQ ID NO: 50248
  GFR-binding peptide
  MOD_RES (2)..(4)..(37)..(38): Xaa is C or S
  MOD_RES (15)..(16)..(17)..(18)..(19): Xaa is A or G
  MOD_RES (20)..(21)..(22)..(23): Xaa is A or G or is absent

SEQ ID NO: 75375 - protein, 38 aa, Artificial Sequence
  GFR-binding peptide
  MOD_RES (1)..(32)..(33): Xaa is C or S
XSRVIMSMEGLVKPKRGVMIQITINSLAQPVXXPAASA

SEQ ID NO: 75376 - protein, 40 aa, Artificial Sequence; identical to SEQ ID NO: 17955
  GFR-binding peptide
  MOD_RES (1)..(35): Xaa is C or S
  MOD_RES (13)..(14)..(15)..(16)..(17): Xaa is A or G
  MOD_RES (18)..(19)..(20)..(21): Xaa is A or G or is absent

SEQ ID NO: 75377 - protein, 40 aa, Artificial Sequence
  GFR-binding peptide
  MOD_RES (2)..(4)..(35)..(36): Xaa is C or S
LXGXEEVIMSMEGILLVRGNDMIQMTINSTKVPAXXTSPV

SEQ ID NO: 75378 - protein, 37 aa, Artificial Sequence; identical to SEQ ID NO: 50255
  GFR-binding peptide
  MOD_RES (1)..(34)..(35): Xaa is C or S
  MOD_RES (12)..(13)..(14)..(15)..(16): Xaa is A or G
  MOD_RES (17)..(18)..(19)..(20): Xaa is A or G or is absent

SEQ ID NO: 75379 - protein, 42 aa, Artificial Sequence
  GFR-binding peptide
  MOD_RES (2)..(36)..(37): Xaa is C or S
  MOD_RES (14)..(15)..(16)..(17)..(18): Xaa is A or G
  MOD_RES (19)..(20)..(21)..(22): Xaa is A or G or is absent
GXAEVVMDSMEGLXXXXXXXXXMIQITINSLRAPVXXSAPAA

SEQ ID NO: 75380 - protein, 36 aa, Artificial Sequence; identical to SEQ ID NO: 17958
  GFR-binding peptide
  MOD_RES (13)..(14)..(15)..(16)..(17): Xaa is A or G
  MOD_RES (18)..(19)..(20)..(21): Xaa is A or G or is absent

SEQ ID NO: 75381 - protein, 39 aa, Artificial Sequence; identical to SEQ ID NO: 17959
  GFR-binding peptide
  MOD_RES (1)..(35): Xaa is C or S
  MOD_RES (13)..(14)..(15)..(16)..(17): Xaa is A or G
  MOD_RES (18)..(19)..(20)..(21): Xaa is A or G or is absent

SEQ ID NO: 75382 - protein, 36 aa, Artificial Sequence
  GFR-binding peptide
  MOD_RES (1)..(35)..(36): Xaa is C or S
  MOD_RES (13)..(14)..(15)..(16)..(17): Xaa is A or G
  MOD_RES (18)..(19)..(20)..(21): Xaa is A or G or is absent
XRDVVMGSMEGLXXXXXXXXXMIQMTINSMKTPTXX

SEQ ID NO: 75383 - protein, 36 aa, Artificial Sequence
  GFR-binding peptide
  MOD_RES (31)..(32): Xaa is C or S
EEVIMSMEGILLVRGNDMIQMTINSTKVPAXXTSPV

SEQ ID NO: 75384 - protein, 44 aa, Artificial Sequence; identical to SEQ ID NO: 17960
  GFR-binding peptide
  MOD_RES (1)..(3)..(40): Xaa is C or S
  MOD_RES (16)..(17)..(18)..(19)..(20): Xaa is A or G
  MOD_RES (21)..(22)..(23)..(24): Xaa is A or G or is absent

SEQ ID NO: 75385 - protein, 37 aa, Artificial Sequence; identical to SEQ ID NO: 17963
  GFR-binding peptide
  MOD_RES (34)..(34): Xaa is C or S
  MOD_RES (12)..(13)..(14)..(15)..(16): Xaa is A or G
  MOD_RES (17)..(18)..(19)..(20): Xaa is A or G or is absent

SEQ ID NO: 75386 - protein, 37 aa, Artificial Sequence
  GFR-binding peptide
  MOD_RES (1)..(3)..(37): Xaa is C or S
  MOD_RES (15)..(16)..(17)..(18)..(19): Xaa is A or G
  MOD_RES (20)..(21)..(22)..(23): Xaa is A or G or is absent
XGXRDVVMGSMEGIXXXXXXXXXMIQMTINSMKTPTX

SEQ ID NO: 75387 - protein, 40 aa, Artificial Sequence
  GFR-binding peptide
  MOD_RES (2)..(4)..(37)..(38): Xaa is C or S
  MOD_RES (15)..(16)..(17)..(18)..(19): Xaa is A or G
  MOD_RES (20)..(21)..(22)..(23): Xaa is A or G or is absent
SXKXSKVIMSMEGLXXXXXXXXXMIQITINSLDQSVXXPS

SEQ ID NO: 75388 - protein, 41 aa, Artificial Sequence; identical to SEQ ID NO: 17965
  GFR-binding peptide
  MOD_RES (37)..(37): Xaa is C or S

SEQ ID NO: 75389 - protein, 34 aa, Artificial Sequence; identical to SEQ ID NO: 17966
  GFR-binding peptide
  MOD_RES (33)..(33): Xaa is C or S

SEQ ID NO: 75390 - protein, 37 aa, Artificial Sequence; identical to SEQ ID NO: 17967
  GFR-binding peptide
  MOD_RES (36)..(36): Xaa is C or S
  MOD_RES (12)..(13)..(14)..(15)..(16): Xaa is A or G
  MOD_RES (17)..(18)..(19)..(20): Xaa is A or G or is absent

SEQ ID NO: 75391 - protein, 39 aa, Artificial Sequence
  GFR-binding peptide
  MOD_RES (1)..(3)..(34)..(35): Xaa is C or S
XKXSKVVMSMEGLVKPTRGVMIQITINSLDQPVXXPSAS

SEQ ID NO: 75392 - protein, 42 aa, Artificial Sequence; identical to SEQ ID NO: 17969
  GFR-binding peptide
  MOD_RES (1)..(38): Xaa is C or S

SEQ ID NO: 75393 - protein, 39 aa, Artificial Sequence
  GFR-binding peptide
  MOD_RES (1)..(3)..(37)..(38): Xaa is C or S
  MOD_RES (15)..(16)..(17)..(18)..(19): Xaa is A or G
  MOD_RES (20)..(21)..(22)..(23): Xaa is A or G or is absent
XGXRDVVMGSMEGIXXXXXXXXXMIQMTINSMKTPTXXP

SEQ ID NO: 75394 - protein, 39 aa, Artificial Sequence
  GFR-binding peptide
  MOD_RES (2)..(36)..(37): Xaa is C or S
  MOD_RES (14)..(15)..(16)..(17)..(18): Xaa is A or G
  MOD_RES (19)..(20)..(21)..(22): Xaa is A or G or is absent
GXRDVVMGSMEGLXXXXXXXXXMIQMTINSMKTPTXXPG

SEQ ID NO: 75395 - protein, 34 aa, Artificial Sequence; identical to SEQ ID NO: 50272
  GFR-binding peptide
  MOD_RES (1)..(1): Xaa is C or S
  MOD_RES (13)..(14)..(15)..(16)..(17): Xaa is A or G
  MOD_RES (18)..(19)..(20)..(21): Xaa is A or G or is absent

SEQ ID NO: 75396 - protein, 35 aa, Artificial Sequence; identical to SEQ ID NO: 17971
  GFR-binding peptide
  MOD_RES (2)..(2): Xaa is C or S

SEQ ID NO: 75397 - protein, 34 aa, Artificial Sequence; identical to SEQ ID NO: 47754
  GFR-binding peptide
  MOD_RES (1)..(3)..(34): Xaa is C or S

SEQ ID NO: 75398 - protein, 38 aa, Artificial Sequence
  GFR-binding peptide
  MOD_RES (2)..(4)..(36)..(37): Xaa is C or S
RXGXAEVVMDSMEGLVVNNAADMIQITINSLRAPVXXS

SEQ ID NO: 75399 - protein, 36 aa, Artificial Sequence; identical to SEQ ID NO: 17972
  GFR-binding peptide
  MOD_RES (34)..(34): Xaa is C or S
  MOD_RES (12)..(13)..(14)..(15)..(16): Xaa is A or G
  MOD_RES (17)..(18)..(19)..(20): Xaa is A or G or is absent

SEQ ID NO: 75400 - protein, 35 aa, Artificial Sequence
  GFR-binding peptide
  MOD_RES (2)..(33)..(34): Xaa is C or S
GXEEVIMSMEGLLLVRGNDMIQMTINSTKVPAXXT

SEQ ID NO: 75401 - protein, 36 aa, Artificial Sequence; identical to SEQ ID NO: 47757
  GFR-binding peptide
  MOD_RES (1)..(34)..(35): Xaa is C or S
  MOD_RES (12)..(13)..(14)..(15)..(16): Xaa is A or G
  MOD_RES (17)..(18)..(19)..(20): Xaa is A or G or is absent

SEQ ID NO: 75402 - protein, 39 aa, Artificial Sequence
  GFR-binding peptide
  MOD_RES (33)..(34): Xaa is C or S
  MOD_RES (11)..(12)..(13)..(14)..(15): Xaa is A or G
  MOD_RES (16)..(17)..(18)..(19): Xaa is A or G or is absent
SRVIMSMEGLXXXXXXXXXMIQITINSLAQPVXXPAASA

SEQ ID NO: 75403 - protein, 37 aa, Artificial Sequence
  GFR-binding peptide
  MOD_RES (2)..(33)..(34): Xaa is C or S
KXSKVIMSMEGLIKPTKGIMIQITINSLDQSVXXPSA

SEQ ID NO: 75404 - protein, 39 aa, Artificial Sequence; identical to SEQ ID NO: 17975
  GFR-binding peptide
  MOD_RES (1)..(38): Xaa is C or S

SEQ ID NO: 75405 - protein, 35 aa, Artificial Sequence
  GFR-binding peptide
  MOD_RES (1)..(35): Xaa is C or S
  MOD_RES (13)..(14)..(15)..(16)..(17): Xaa is A or G
  MOD_RES (18)..(19)..(20)..(21): Xaa is A or G or is absent
XRDVVMGSMEGLXXXXXXXXXMIQMTINSMKTPTX

SEQ ID NO: 75406 - protein, 32 aa, Artificial Sequence
  GFR-binding peptide
  MOD_RES (32)..(32): Xaa is C or S
SRVVMNSMEGLIVNSSDDMIQVTINSLKTPAX

SEQ ID NO: 75407 - protein, 39 aa, Artificial Sequence
  GFR-binding peptide
  MOD_RES (1)..(3)..(34)..(35): Xaa is C or S
XGXEEVIMSMEGILLVRGNDMIQMTINSTKVPAXXTSPV

SEQ ID NO: 75408 - protein, 41 aa, Artificial Sequence
  GFR-binding peptide
  MOD_RES (1)..(35)..(36): Xaa is C or S
  MOD_RES (13)..(14)..(15)..(16)..(17): Xaa is A or G
  MOD_RES (18)..(19)..(20)..(21): Xaa is A or G or is absent
XAEVVMDSMEGLXXXXXXXXXMIQITINSLRAPVXXSAPAA

SEQ ID NO: 75409 - protein, 36 aa, Artificial Sequence; identical to SEQ ID NO: 17982
  GFR-binding peptide
  MOD_RES (1)..(35): Xaa is C or S

SEQ ID NO: 75410 - protein, 44 aa, Artificial Sequence
  GFR-binding peptide
  MOD_RES (2)..(4)..(38)..(39): Xaa is C or S
  MOD_RES (16)..(17)..(18)..(19)..(20): Xaa is A or G
  MOD_RES (21)..(22)..(23)..(24): Xaa is A or G or is absent
HXGXSRVVMNSMEGLXXXXXXXXXMIQVTINSLKTPAXXPKPVH

SEQ ID NO: 75411 - protein, 36 aa, Artificial Sequence; identical to SEQ ID NO: 50292
  GFR-binding peptide
  MOD_RES (33)..(34): Xaa is C or S
  MOD_RES (11)..(12)..(13)..(14)..(15): Xaa is A or G
  MOD_RES (16)..(17)..(18)..(19): Xaa is A or G or is absent

SEQ ID NO: 75412 - protein, 43 aa, Artificial Sequence; identical to SEQ ID NO: 17984
  GFR-binding peptide
  MOD_RES (1)..(3)..(37): Xaa is C or S
  MOD_RES (15)..(16)..(17)..(18)..(19): Xaa is A or G
  MOD_RES (20)..(21)..(22)..(23): Xaa is A or G or is absent

SEQ ID NO: 75413 - protein, 35 aa, Artificial Sequence
  GFR-binding peptide
  MOD_RES (1)..(3): Xaa is C or S
  MOD_RES (14)..(15)..(16)..(17)..(18): Xaa is A or G
  MOD_RES (19)..(20)..(21)..(22): Xaa is A or G or is absent
XGXEEVIMSMEGIXXXXXXXXXMIQMTINSTKVPA

SEQ ID NO: 75414 - protein, 39 aa, Artificial Sequence; identical to SEQ ID NO: 17988
  GFR-binding peptide
  MOD_RES (34)..(34): Xaa is C or S

SEQ ID NO: 75415 - protein, 32 aa, Artificial Sequence
  GFR-binding peptide
  MOD_RES (11)..(12)..(13)..(14)..(15): Xaa is A or G
  MOD_RES (16)..(17)..(18)..(19): Xaa is A or G or is absent
EEVIMSMEGIXXXXXXXXXMIQMTINSTKVPA

SEQ ID NO: 75416 - protein, 36 aa, Artificial Sequence
  GFR-binding peptide
  MOD_RES (33)..(34): Xaa is C or S
  MOD_RES (11)..(12)..(13)..(14)..(15): Xaa is A or G
  MOD_RES (16)..(17)..(18)..(19): Xaa is A or G or is absent
EVVMDSMEGIXXXXXXXXXMIQITINSLRTPVXXTP

SEQ ID NO: 75417 - protein, 37 aa, Artificial Sequence
  GFR-binding peptide
  MOD_RES (31)..(32): Xaa is C or S
DVVMGSMEGLIIQQKDNMIQMTINSMKTPTXXPGASG

SEQ ID NO: 75418 - protein, 39 aa, Artificial Sequence
  GFR-binding peptide
  MOD_RES (1)..(33)..(34): Xaa is C or S
XRDVVMGSMEGLIIQQKDNMIQMTINSMKTPTXXPGASG

SEQ ID NO: 75419 - protein, 37 aa, Artificial Sequence; identical to SEQ ID NO: 50301
  GFR-binding peptide
  MOD_RES (2)..(35)..(36): Xaa is C or S
  MOD_RES (13)..(14)..(15)..(16)..(17): Xaa is A or G
  MOD_RES (18)..(19)..(20)..(21): Xaa is A or G or is absent

SEQ ID NO: 75420 - protein, 37 aa, Artificial Sequence
  GFR-binding peptide
  MOD_RES (1)..(33)..(34): Xaa is C or S
XRDVVMGSMEGIIIQQKDNMIQMTINSMKTPTXXPGA

SEQ ID NO: 75421 - protein, 42 aa, Artificial Sequence
  GFR-binding peptide
  MOD_RES (2)..(4)..(37)..(38): Xaa is C or S
  MOD_RES (15)..(16)..(17)..(18)..(19): Xaa is A or G
  MOD_RES (20)..(21)..(22)..(23): Xaa is A or G or is absent
SXKXSKVVMSMEGLXXXXXXXXXMIQITINSLDQPVXXPSAS

SEQ ID NO: 75422 - protein, 31 aa, Artificial Sequence
  GFR-binding peptide
  MOD_RES (31)..(31): Xaa is C or S
EEVIMSMEGILLVRGNDMIQMTINSTKVPAX

SEQ ID NO: 75423 - protein, 36 aa, Artificial Sequence
  GFR-binding peptide
  MOD_RES (32)..(33): Xaa is C or S
RDVVMGSMEGIIIQQKDNMIQMTINSMKTPTXXPGA

SEQ ID NO: 75424 - protein, 35 aa, Artificial Sequence; identical to SEQ ID NO: 47795
  GFR-binding peptide
  MOD_RES (2)..(34)..(35): Xaa is C or S

SEQ ID NO: 75425 - protein, 37 aa, Artificial Sequence; identical to SEQ ID NO: 17994
  GFR-binding peptide
  MOD_RES (36)..(36): Xaa is C or S

SEQ ID NO: 75426 - protein, 40 aa, Artificial Sequence
  GFR-binding peptide
  MOD_RES (34)..(35): Xaa is C or S
  MOD_RES (12)..(13)..(14)..(15)..(16): Xaa is A or G
  MOD_RES (17)..(18)..(19)..(20): Xaa is A or G or is absent
RDVVMGSMEGIXXXXXXXXXMIQMTINSMKTPTXXPGASG

SEQ ID NO: 75427 - protein, 36 aa, Artificial Sequence
  GFR-binding peptide
  MOD_RES (2)..(4)..(36): Xaa is C or S
RXGXSEVVMDSMEGIVVNNASDMIQITINSLRTPVX

SEQ ID NO: 75428 - protein, 41 aa, Artificial Sequence; identical to SEQ ID NO: 17996
  GFR-binding peptide
  MOD_RES (2)..(36): Xaa is C or S

SEQ ID NO: 75429 - protein, 40 aa, Artificial Sequence
  GFR-binding peptide
  MOD_RES (1)..(3)..(34)..(35): Xaa is C or S
XKXSKVIMSMEGLIKPTKGIMIQITINSLDQSVXXPSASA

SEQ ID NO: 75430 - protein, 41 aa, Artificial Sequence
  GFR-binding peptide
  MOD_RES (2)..(4)..(37)..(38): Xaa is C or S
  MOD_RES (15)..(16)..(17)..(18)..(19): Xaa is A or G
  MOD_RES (20)..(21)..(22)..(23): Xaa is A or G or is absent
LXGXEEVIMSMEGLXXXXXXXXXMIQMTINSTKVPAXXTSP

SEQ ID NO: 75431 - protein, 32 aa, Artificial Sequence
  GFR-binding peptide
  MOD_RES (31)..(32): Xaa is C or S
EEVIMSMEGILLVRGNDMIQMTINSTKVPAXX

SEQ ID NO: 75432 - protein, 38 aa, Artificial Sequence; identical to SEQ ID NO: 17999
  GFR-binding peptide
  MOD_RES (36)..(36): Xaa is C or S

SEQ ID NO: 75433 - protein, 36 aa, Artificial Sequence
  GFR-binding peptide
  MOD_RES (1)..(33)..(34): Xaa is C or S
XRDVVMGSMEGLIIQQKDNMIQMTINSMKTPTXXPG

SEQ ID NO: 75434 - protein, 40 aa, Artificial Sequence; identical to SEQ ID NO: 18001
  GFR-binding peptide
  MOD_RES (1)..(38): Xaa is C or S
  MOD_RES (14)..(15)..(16)..(17)..(18): Xaa is A or G
  MOD_RES (19)..(20)..(21)..(22): Xaa is A or G or is absent

SEQ ID NO: 75435 - protein, 40 aa, Artificial Sequence
  GFR-binding peptide
  MOD_RES (1)..(3)..(34)..(35): Xaa is C or S
XGXEEVIMSMEGLLLVRGNDMIQMTINSTKVPAXXTSPVR

SEQ ID NO: 75436 - protein, 40 aa, Artificial Sequence
  GFR-binding peptide
  MOD_RES (2)..(35)..(36): Xaa is C or S
  MOD_RES (13)..(14)..(15)..(16)..(17): Xaa is A or G
  MOD_RES (18)..(19)..(20)..(21): Xaa is A or G or is absent
GXEEVIMSMEGLXXXXXXXXXMIQMTINSTKVPAXXTSPV

SEQ ID NO: 75437 - protein, 34 aa, Artificial Sequence; identical to SEQ ID NO: 18002
  GFR-binding peptide

SEQ ID NO: 75438 - protein, 35 aa, Artificial Sequence
  GFR-binding peptide
  MOD_RES (2)..(4): Xaa is C or S
RXGXAEVVMDSMEGLVVNNAADMIQITINSLRAPV

SEQ ID NO: 75439 - protein, 33 aa, Artificial Sequence
  GFR-binding peptide
  MOD_RES (33)..(33): Xaa is C or S
  MOD_RES (11)..(12)..(13)..(14)..(15): Xaa is A or G
  MOD_RES (16)..(17)..(18)..(19): Xaa is A or G or is absent
SRVIMSMEGLXXXXXXXXXMIQITINSLAQPVX

SEQ ID NO: 75440 - protein, 34 aa, Artificial Sequence
  GFR-binding peptide
  MOD_RES (1)..(34): Xaa is C or S
  MOD_RES (12)..(13)..(14)..(15)..(16): Xaa is A or G
  MOD_RES (17)..(18)..(19)..(20): Xaa is A or G or is absent
XSKVVMSMEGLXXXXXXXXXMIQITINSLDQPVX

SEQ ID NO: 75441 - protein, 36 aa, Artificial Sequence
  GFR-binding peptide
  MOD_RES (2)..(34)..(35): Xaa is C or S
GXRDVVMGSMEGIIIQQKDNMIQMTINSMKTPTXXP

SEQ ID NO: 75442 - protein, 33 aa, Artificial Sequence
  GFR-binding peptide
  MOD_RES (1)..(33): Xaa is C or S
XSEVVMDSMEGLVVNNASDMIQITINSLRTPVX

SEQ ID NO: 75443 - protein, 36 aa, Artificial Sequence; identical to SEQ ID NO: 18007
  GFR-binding peptide
  MOD_RES (2)..(2): Xaa is C or S
  MOD_RES (15)..(16)..(17)..(18)..(19): Xaa is A or G
  MOD_RES (20)..(21)..(22)..(23): Xaa is A or G or is absent

SEQ ID NO: 75444 - protein, 38 aa, Artificial Sequence
  GFR-binding peptide
  MOD_RES (33)..(34): Xaa is C or S
  MOD_RES (11)..(12)..(13)..(14)..(15): Xaa is A or G
  MOD_RES (16)..(17)..(18)..(19): Xaa is A or G or is absent
EVVMDSMEGLXXXXXXXXXMIQITINSLRTPVXXTPPT

SEQ ID NO: 75445 - protein, 39 aa, Artificial Sequence
  GFR-binding peptide
  MOD_RES (1)..(33)..(34): Xaa is C or S
XSEVVMDSMEGLVVNNASDMIQITINSLRTPVXXTPPTS

SEQ ID NO: 75446 - protein, 43 aa, Artificial Sequence
  GFR-binding peptide
  MOD_RES (1)..(3)..(37)..(38): Xaa is C or S
  MOD_RES (15)..(16)..(17)..(18)..(19): Xaa is A or G
  MOD_RES (20)..(21)..(22)..(23): Xaa is A or G or is absent
XGXAEVVMDSMEGIXXXXXXXXXMIQITINSLRAPVXXSAPAA

SEQ ID NO: 75447 - protein, 38 aa, Artificial Sequence
  GFR-binding peptide
  MOD_RES (1)..(3)..(36)..(37): Xaa is C or S
  MOD_RES (14)..(15)..(16)..(17)..(18): Xaa is A or G
  MOD_RES (19)..(20)..(21)..(22): Xaa is A or G or is absent
XGXEEVIMSMEGIXXXXXXXXXMIQMTINSTKVPAXXT

SEQ ID NO: 75448 - protein, 37 aa, Artificial Sequence
  GFR-binding peptide
  MOD_RES (2)..(35)..(36): Xaa is C or S
  MOD_RES (13)..(14)..(15)..(16)..(17): Xaa is A or G
  MOD_RES (18)..(19)..(20)..(21): Xaa is A or G or is absent
KXSKVVMSMEGLXXXXXXXXXMIQITINSLDQPVXXP

SEQ ID NO: 75449 - protein, 36 aa, Artificial Sequence
  GFR-binding peptide
  MOD_RES (1)..(3): Xaa is C or S
  MOD_RES (15)..(16)..(17)..(18)..(19): Xaa is A or G
  MOD_RES (20)..(21)..(22)..(23): Xaa is A or G or is absent
XGXSEVVMDSMEGIXXXXXXXXXMIQITINSLRTPV

SEQ ID NO: 75450 - protein, 36 aa, Artificial Sequence
  GFR-binding peptide
  MOD_RES (1)..(35)..(36): Xaa is C or S
  MOD_RES (13)..(14)..(15)..(16)..(17): Xaa is A or G
  MOD_RES (18)..(19)..(20)..(21): Xaa is A or G or is absent
XSEVVMDSMEGIXXXXXXXXXMIQITINSLRTPVXX

SEQ ID NO: 75451 - protein, 32 aa, Artificial Sequence
  GFR-binding peptide
  MOD_RES (11)..(12)..(13)..(14)..(15): Xaa is A or G
  MOD_RES (16)..(17)..(18)..(19): Xaa is A or G or is absent
SRVIMSMEGLXXXXXXXXXMIQITINSLAQPV

SEQ ID NO: 75452 - protein, 38 aa, Artificial Sequence
  GFR-binding peptide
  MOD_RES (34)..(35): Xaa is C or S
  MOD_RES (12)..(13)..(14)..(15)..(16): Xaa is A or G
  MOD_RES (17)..(18)..(19)..(20): Xaa is A or G or is absent
SRVVMNSMEGLXXXXXXXXXMIQVTINSLKTPAXXPKP

SEQ ID NO: 75453 - protein, 32 aa, Artificial Sequence
  GFR-binding peptide
  MOD_RES (11)..(12)..(13)..(14)..(15): Xaa is A or G
  MOD_RES (16)..(17)..(18)..(19): Xaa is A or G or is absent
EVVMDSMEGLXXXXXXXXXMIQITINSLRAPV

SEQ ID NO: 75454 - protein, 38 aa, Artificial Sequence; identical to SEQ ID NO: 18013
  GFR-binding peptide
  MOD_RES (1)..(35): Xaa is C or S

SEQ ID NO: 75455 - protein, 39 aa, Artificial Sequence; identical to SEQ ID NO: 50357
  GFR-binding peptide
  MOD_RES (2)..(4)..(38)..(39): Xaa is C or S
  MOD_RES (16)..(17)..(18)..(19)..(20): Xaa is A or G
  MOD_RES (21)..(22)..(23)..(24): Xaa is A or G or is absent

SEQ ID NO: 75456 - protein, 38 aa, Artificial Sequence
  GFR-binding peptide
  MOD_RES (2)..(36)..(37): Xaa is C or S
  MOD_RES (14)..(15)..(16)..(17)..(18): Xaa is A or G
  MOD_RES (19)..(20)..(21)..(22): Xaa is A or G or is absent
GXRDVVMGSMEGLXXXXXXXXXMIQMTINSMKTPTXXP

SEQ ID NO: 75457 - protein, 36 aa, Artificial Sequence
  GFR-binding peptide
  MOD_RES (33)..(34): Xaa is C or S
  MOD_RES (11)..(12)..(13)..(14)..(15): Xaa is A or G
  MOD_RES (16)..(17)..(18)..(19): Xaa is A or G or is absent
SRVIMSMEGLXXXXXXXXXMIQITINSLAQPVXXPA

SEQ ID NO: 75458 - protein, 40 aa, Artificial Sequence
  GFR-binding peptide
  MOD_RES (1)..(3)..(37)..(38): Xaa is C or S
  MOD_RES (15)..(16)..(17)..(18)..(19): Xaa is A or G
  MOD_RES (20)..(21)..(22)..(23): Xaa is A or G or is absent
XGXAEVVMDSMEGLXXXXXXXXXMIQITINSLRAPVXXSA

SEQ ID NO: 75459 - protein, 33 aa, Artificial Sequence
  GFR-binding peptide
  MOD_RES (2)..(33): Xaa is C or S
KXSKVVMSMEGLVKPTRGVMIQITINSLDQPVX

SEQ ID NO: 75460 - protein, 40 aa, Artificial Sequence; identical to SEQ ID NO: 18021
  GFR-binding peptide
  MOD_RES (2)..(4): Xaa is C or S

SEQ ID NO: 75461 - protein, 39 aa, Artificial Sequence; identical to SEQ ID NO: 18022
  GFR-binding peptide
  MOD_RES (2)..(4)..(38): Xaa is C or S
  MOD_RES (16)..(17)..(18)..(19)..(20): Xaa is A or G
  MOD_RES (21)..(22)..(23)..(24): Xaa is A or G or is absent

SEQ ID NO: 75462 - protein, 42 aa, Artificial Sequence
  GFR-binding peptide
  MOD_RES (2)..(36)..(37): Xaa is C or S
  MOD_RES (14)..(15)..(16)..(17)..(18): Xaa is A or G
  MOD_RES (19)..(20)..(21)..(22): Xaa is A or G or is absent
GXSEVVMDSMEGIXXXXXXXXXMIQITINSLRTPVXXTPPTS

SEQ ID NO: 75463 - protein, 34 aa, Artificial Sequence
  GFR-binding peptide
  MOD_RES (32)..(33): Xaa is C or S
SRVVMNSMEGLIVNSSDDMIQVTINSLKTPAXXP

SEQ ID NO: 75464 - protein, 37 aa, Artificial Sequence; identical to SEQ ID NO: 50367
  GFR-binding peptide
  MOD_RES (1)..(3)..(34)..(35): Xaa is C or S

SEQ ID NO: 75465 - protein, 42 aa, Artificial Sequence; identical to SEQ ID NO: 18023
  GFR-binding peptide
  MOD_RES (2)..(4)..(41): Xaa is C or S
  MOD_RES (17)..(18)..(19)..(20)..(21): Xaa is A or G
  MOD_RES (22)..(23)..(24)..(25): Xaa is A or G or is absent

SEQ ID NO: 75466 - protein, 45 aa, Artificial Sequence; identical to SEQ ID NO: 18024
  GFR-binding peptide
  MOD_RES (2)..(4)..(41): Xaa is C or S

SEQ ID NO: 75467 - protein, 32 aa, Artificial Sequence
  GFR-binding peptide
  MOD_RES (2)..(2): Xaa is C or S
GXEEVIMSMEGILLVRGNDMIQMTINSTKVPA

SEQ ID NO: 75468 - protein, 35 aa, Artificial Sequence; identical to SEQ ID NO: 18027
  GFR-binding peptide
  MOD_RES (2)..(2): Xaa is C or S

SEQ ID NO: 75469 - protein, 38 aa, Artificial Sequence; identical to SEQ ID NO: 18028
  GFR-binding peptide
  MOD_RES (2)..(36): Xaa is C or S

SEQ ID NO: 75470 - protein, 35 aa, Artificial Sequence
  GFR-binding peptide
  MOD_RES (33)..(34): Xaa is C or S
  MOD_RES (11)..(12)..(13)..(14)..(15): Xaa is A or G
  MOD_RES (16)..(17)..(18)..(19): Xaa is A or G or is absent
EVVMDSMEGLXXXXXXXXXMIQITINSLRTPVXXT

SEQ ID NO: 75471 - protein, 41 aa, Artificial Sequence
  GFR-binding peptide
  MOD_RES (1)..(35)..(36): Xaa is C or S
  MOD_RES (13)..(14)..(15)..(16)..(17): Xaa is A or G
  MOD_RES (18)..(19)..(20)..(21): Xaa is A or G or is absent
XSEVVMDSMEGIXXXXXXXXXMIQITINSLRTPVXXTPPTS

SEQ ID NO: 75472 - protein, 40 aa, Artificial Sequence
  GFR-binding peptide
  MOD_RES (1)..(3)..(37)..(38): Xaa is C or S
  MOD_RES (15)..(16)..(17)..(18)..(19): Xaa is A or G
  MOD_RES (20)..(21)..(22)..(23): Xaa is A or G or is absent
XGXSRVVMNSMEGLXXXXXXXXXMIQVTINSLKTPAXXPK

SEQ ID NO: 75473 - protein, 35 aa, Artificial Sequence
  GFR-binding peptide
  MOD_RES (2)..(35): Xaa is C or S
  MOD_RES (13)..(14)..(15)..(16)..(17): Xaa is A or G
  MOD_RES (18)..(19)..(20)..(21): Xaa is A or G or is absent
GXEEVIMSMEGIXXXXXXXXXMIQMTINSTKVPAX

SEQ ID NO: 75474 - protein, 36 aa, Artificial Sequence
  GFR-binding peptide
  MOD_RES (33)..(34): Xaa is C or S
  MOD_RES (11)..(12)..(13)..(14)..(15): Xaa is A or G
  MOD_RES (16)..(17)..(18)..(19): Xaa is A or G or is absent
EEVIMSMEGLXXXXXXXXXMIQMTINSTKVPAXXTS

SEQ ID NO: 75475 - protein, 36 aa, Artificial Sequence
  GFR-binding peptide
  MOD_RES (32)..(33): Xaa is C or S
SEVVMDSMEGLVVNNASDMIQITINSLRTPVXXTPP

SEQ ID NO: 75476 - protein, 40 aa, Artificial Sequence; identical to SEQ ID NO: 18032
  GFR-binding peptide
  MOD_RES (2)..(4): Xaa is C or S
  MOD_RES (17)..(18)..(19)..(20)..(21): Xaa is A or G
  MOD_RES (22)..(23)..(24)..(25): Xaa is A or G or is absent

SEQ ID NO: 75477 - protein, 40 aa, Artificial Sequence; identical to SEQ ID NO: 50386
  GFR-binding peptide
  MOD_RES (2)..(4)..(35)..(36): Xaa is C or S

SEQ ID NO: 75478 - protein, 41 aa, Artificial Sequence
  GFR-binding peptide
  MOD_RES (1)..(3)..(37)..(38): Xaa is C or S
  MOD_RES (15)..(16)..(17)..(18)..(19): Xaa is A or G
  MOD_RES (20)..(21)..(22)..(23): Xaa is A or G or is absent
XGXRDVVMGSMEGLXXXXXXXXXMIQMTINSMKTPTXXPGA

SEQ ID NO: 75479 - protein, 41 aa, Artificial Sequence
  GFR-binding peptide
  MOD_RES (2)..(35)..(36): Xaa is C or S
  MOD_RES (13)..(14)..(15)..(16)..(17): Xaa is A or G
  MOD_RES (18)..(19)..(20)..(21): Xaa is A or G or is absent
GXEEVIMSMEGLXXXXXXXXXMIQMTINSTKVPAXXTSPVR

SEQ ID NO: 75480 - protein, 35 aa, Artificial Sequence; identical to SEQ ID NO: 18033
  GFR-binding peptide
  MOD_RES (35)..(35): Xaa is C or S

SEQ ID NO: 75481 - protein, 33 aa, Artificial Sequence
  GFR-binding peptide
  MOD_RES (2)..(33): Xaa is C or S
KXSKVIMSMEGLIKPTKGIMIQITINSLDQSVX

SEQ ID NO: 75482 - protein, 41 aa, Artificial Sequence
  GFR-binding peptide
  MOD_RES (1)..(3)..(37)..(38): Xaa is C or S
  MOD_RES (15)..(16)..(17)..(18)..(19): Xaa is A or G
  MOD_RES (20)..(21)..(22)..(23): Xaa is A or G or is absent
XGXAEVVMDSMEGIXXXXXXXXXMIQITINSLRAPVXXSAP

SEQ ID NO: 75483 - protein, 40 aa, Artificial Sequence; identical to SEQ ID NO: 18034
  GFR-binding peptide
  MOD_RES (1)..(3)..(37): Xaa is C or S

SEQ ID NO: 75484 - protein, 39 aa, Artificial Sequence; identical to SEQ ID NO: 18036
  GFR-binding peptide
  MOD_RES (34)..(34): Xaa is C or S

SEQ ID NO: 75485 - protein, 38 aa, Artificial Sequence
  GFR-binding peptide
  MOD_RES (2)..(4)..(37)..(38): Xaa is C or S
  MOD_RES (15)..(16)..(17)..(18)..(19): Xaa is A or G
  MOD_RES (20)..(21)..(22)..(23): Xaa is A or G or is absent
SXKXSKVIMSMEGLXXXXXXXXXMIQITINSLDQSVXX

SEQ ID NO: 75486 - protein, 33 aa, Artificial Sequence
  GFR-binding peptide
  MOD_RES (31)..(32): Xaa is C or S
SRVIMSMEGLVKPKRGVMIQITINSLAQPVXXP

SEQ ID NO: 75487 - protein, 33 aa, Artificial Sequence; identical to SEQ ID NO: 18039
  GFR-binding peptide
  MOD_RES (33)..(33): Xaa is C or S
  MOD_RES (11)..(12)..(13)..(14)..(15): Xaa is A or G
  MOD_RES (16)..(17)..(18)..(19): Xaa is A or G or is absent

SEQ ID NO: 75488 - protein, 33 aa, Artificial Sequence; identical to SEQ ID NO: 18040
  GFR-binding peptide

SEQ ID NO: 75489 - protein, 40 aa, Artificial Sequence
  GFR-binding peptide
  MOD_RES (1)..(3)..(37)..(38): Xaa is C or S
  MOD_RES (15)..(16)..(17)..(18)..(19): Xaa is A or G
  MOD_RES (20)..(21)..(22)..(23): Xaa is A or G or is absent
XGXSEVVMDSMEGIXXXXXXXXXMIQITINSLRTPVXXTP

SEQ ID NO: 75490 - protein, 37 aa, Artificial Sequence
  GFR-binding peptide
  MOD_RES (2)..(34)..(35): Xaa is C or S
GXSEVVMDSMEGLVVNNASDMIQITINSLRTPVXXTP

SEQ ID NO: 75491 - protein, 36 aa, Artificial Sequence
  GFR-binding peptide
  MOD_RES (2)..(4)..(36): Xaa is C or S
HXGXSRVVMNSMEGLIVNSSDDMIQVTINSLKTPAX

SEQ ID NO: 75492 - protein, 38 aa, Artificial Sequence; identical to SEQ ID NO: 18042
  GFR-binding peptide
  MOD_RES (36)..(36): Xaa is C or S
  MOD_RES (12)..(13)..(14)..(15)..(16): Xaa is A or G
  MOD_RES (17)..(18)..(19)..(20): Xaa is A or G or is absent

SEQ ID NO: 75493 - protein, 40 aa, Artificial Sequence; identical to SEQ ID NO: 18044
  GFR-binding peptide
  MOD_RES (2)..(39): Xaa is C or S

SEQ ID NO: 75494 - protein, 38 aa, Artificial Sequence; identical to SEQ ID NO: 47863
  GFR-binding peptide
  MOD_RES (2)..(4)..(35)..(36): Xaa is C or S

SEQ ID NO: 75495 - protein, 37 aa, Artificial Sequence; identical to SEQ ID NO: 18046
  GFR-binding peptide
  MOD_RES (33)..(33): Xaa is C or S

SEQ ID NO: 75496 - protein, 35 aa, Artificial Sequence; identical to SEQ ID NO: 18047
  GFR-binding peptide

SEQ ID NO: 75497 - protein, 36 aa, Artificial Sequence; identical to SEQ ID NO: 18050
  GFR-binding peptide
  MOD_RES (35)..(35): Xaa is C or S
  MOD_RES (11)..(12)..(13)..(14)..(15): Xaa is A or G
  MOD_RES (16)..(17)..(18)..(19): Xaa is A or G or is absent

SEQ ID NO: 75498 - protein, 37 aa, Artificial Sequence
  GFR-binding peptide
  MOD_RES (1)..(32)..(33): Xaa is C or S
XSKVVMSMEGLVKPTRGVMIQITINSLDQPVXXPSAS

SEQ ID NO: 75499 - protein, 38 aa, Artificial Sequence
  GFR-binding peptide
  MOD_RES (34)..(35): Xaa is C or S
  MOD_RES (12)..(13)..(14)..(15)..(16): Xaa is A or G
  MOD_RES (17)..(18)..(19)..(20): Xaa is A or G or is absent
AEVVMDSMEGLXXXXXXXXXMIQITINSLRAPVXXSAP

SEQ ID NO: 75500 - protein, 42 aa, Artificial Sequence
  GFR-binding peptide
  MOD_RES (2)..(4)..(38)..(39): Xaa is C or S
  MOD_RES (16)..(17)..(18)..(19)..(20): Xaa is A or G
  MOD_RES (21)..(22)..(23)..(24): Xaa is A or G or is absent
RXGXSEVVMDSMEGIXXXXXXXXXMIQITINSLRTPVXXTPP

SEQ ID NO: 75501 - protein, 34 aa, Artificial Sequence
  GFR-binding peptide
  MOD_RES (1)..(3)..(34): Xaa is C or S
XKXSRVIMSMEGLVKPKRGVMIQITINSLAQPVX

SEQ ID NO: 75502 - protein, 38 aa, Artificial Sequence
  GFR-binding peptide
  MOD_RES (1)..(34)..(35): Xaa is C or S
  MOD_RES (12)..(13)..(14)..(15)..(16): Xaa is A or G
  MOD_RES (17)..(18)..(19)..(20): Xaa is A or G or is absent
XSKVIMSMEGLXXXXXXXXXMIQITINSLDQSVXXPSA

SEQ ID NO: 75503 - protein, 43 aa, Artificial Sequence; identical to SEQ ID NO: 50415
  GFR-binding peptide
  MOD_RES (2)..(4)..(37)..(38): Xaa is C or S
  MOD_RES (15)..(16)..(17)..(18)..(19): Xaa is A or G
  MOD_RES (20)..(21)..(22)..(23): Xaa is A or G or is absent

SEQ ID NO: 75504 - protein, 37 aa, Artificial Sequence
  GFR-binding peptide
  MOD_RES (1)..(35)..(36): Xaa is C or S
  MOD_RES (13)..(14)..(15)..(16)..(17): Xaa is A or G
  MOD_RES (18)..(19)..(20)..(21): Xaa is A or G or is absent
XAEVVMDSMEGLXXXXXXXXXMIQITINSLRAPVXXS

SEQ ID NO: 75505 - protein, 36 aa, Artificial Sequence; identical to SEQ ID NO: 18058
  GFR-binding peptide
  MOD_RES (1)..(35): Xaa is C or S
  MOD_RES (13)..(14)..(15)..(16)..(17): Xaa is A or G
  MOD_RES (18)..(19)..(20)..(21): Xaa is A or G or is absent

SEQ ID NO: 75506 - protein, 35 aa, Artificial Sequence
  GFR-binding peptide
  MOD_RES (1)..(35): Xaa is C or S
  MOD_RES (13)..(14)..(15)..(16)..(17): Xaa is A or G
  MOD_RES (18)..(19)..(20)..(21): Xaa is A or G or is absent
XAEVVMDSMEGIXXXXXXXXXMIQITINSLRAPVX

SEQ ID NO: 75507 - protein, 38 aa, Artificial Sequence; identical to SEQ ID NO: 18060
  GFR-binding peptide
  MOD_RES (1)..(3)..(37): Xaa is C or S
  MOD_RES (15)..(16)..(17)..(18)..(19): Xaa is A or G
  MOD_RES (20)..(21)..(22)..(23): Xaa is A or G or is absent

SEQ ID NO: 75508 - protein, 38 aa, Artificial Sequence; identical to SEQ ID NO: 47876
  GFR-binding peptide
  MOD_RES (2)..(4)..(36)..(37): Xaa is C or S

SEQ ID NO: 75509 - protein, 35 aa, Artificial Sequence
  GFR-binding peptide
  MOD_RES (34)..(35): Xaa is C or S
  MOD_RES (12)..(13)..(14)..(15)..(16): Xaa is A or G
  MOD_RES (17)..(18)..(19)..(20): Xaa is A or G or is absent
AEVVMDSMEGIXXXXXXXXXMIQITINSLRAPVXX

SEQ ID NO: 75510 - protein, 40 aa, Artificial Sequence
  GFR-binding peptide
  MOD_RES (2)..(4)..(35)..(36): Xaa is C or S
SXKXSKVVMSMEGLVKPTRGVMIQITINSLDQPVXXPSAS

SEQ ID NO: 75511 - protein, 33 aa, Artificial Sequence; identical to SEQ ID NO: 18062
  GFR-binding peptide
  MOD_RES (11)..(12)..(13)..(14)..(15): Xaa is A or G
  MOD_RES (16)..(17)..(18)..(19): Xaa is A or G or is absent

SEQ ID NO: 75512 - protein, 33 aa, Artificial Sequence
  GFR-binding peptide
  MOD_RES (1)..(3): Xaa is C or S
XKXSKVVMSMEGLVKPTRGVMIQITINSLDQPV

SEQ ID NO: 75513 - protein, 38 aa, Artificial Sequence; identical to SEQ ID NO: 18063
  GFR-binding peptide
  MOD_RES (1)..(38): Xaa is C or S

SEQ ID NO: 75514 - protein, 42 aa, Artificial Sequence; identical to SEQ ID NO: 18064
  GFR-binding peptide
  MOD_RES (1)..(3)..(40): Xaa is C or S

SEQ ID NO: 75515 - protein, 40 aa, Artificial Sequence; identical to SEQ ID NO: 18065
  GFR-binding peptide
  MOD_RES (1)..(35): Xaa is C or S

SEQ ID NO: 75516 - protein, 35 aa, Artificial Sequence
  GFR-binding peptide
  MOD_RES (1)..(32)..(33): Xaa is C or S
XEEVIMSMEGILLVRGNDMIQMTINSTKVPAXXTS

SEQ ID NO: 75517 - protein, 41 aa, Artificial Sequence
  GFR-binding peptide
  MOD_RES (1)..(35)..(36): Xaa is C or S
  MOD_RES (13)..(14)..(15)..(16)..(17): Xaa is A or G
  MOD_RES (18)..(19)..(20)..(21): Xaa is A or G or is absent
XSRVVMNSMEGLXXXXXXXXXMIQVTINSLKTPAXXPKPVH

SEQ ID NO: 75518 - protein, 36 aa, Artificial Sequence
  GFR-binding peptide
  MOD_RES (33)..(34): Xaa is C or S
  MOD_RES (11)..(12)..(13)..(14)..(15): Xaa is A or G
  MOD_RES (16)..(17)..(18)..(19): Xaa is A or G or is absent
RVVMNSMEGLXXXXXXXXXMIQVTINSLKTPAXXPK

SEQ ID NO: 75519 - protein, 37 aa, Artificial Sequence; identical to SEQ ID NO: 50425
  GFR-binding peptide
  MOD_RES (33)..(34): Xaa is C or S
  MOD_RES (11)..(12)..(13)..(14)..(15): Xaa is A or G
  MOD_RES (16)..(17)..(18)..(19): Xaa is A or G or is absent

SEQ ID NO: 75520 - protein, 43 aa, Artificial Sequence
  GFR-binding peptide
  MOD_RES (2)..(4)..(37)..(38): Xaa is C or S
  MOD_RES (15)..(16)..(17)..(18)..(19): Xaa is A or G
  MOD_RES (20)..(21)..(22)..(23): Xaa is A or G or is absent
SXKXSRVIMSMEGLXXXXXXXXXMIQITINSLAQPVXXPAASA

SEQ ID NO: 75521 - protein, 31 aa, Artificial Sequence; identical to SEQ ID NO: 50427
  GFR-binding peptide

SEQ ID NO: 75522 - protein, 37 aa, Artificial Sequence; identical to SEQ ID NO: 50431
  GFR-binding peptide
  MOD_RES (1)..(3)..(36)..(37): Xaa is C or S
  MOD_RES (14)..(15)..(16)..(17)..(18): Xaa is A or G
  MOD_RES (19)..(20)..(21)..(22): Xaa is A or G or is absent

SEQ ID NO: 75523 - protein, 38 aa, Artificial Sequence; identical to SEQ ID NO: 50434
  GFR-binding peptide
  MOD_RES (33)..(34): Xaa is C or S
  MOD_RES (11)..(12)..(13)..(14)..(15): Xaa is A or G
  MOD_RES (16)..(17)..(18)..(19): Xaa is A or G or is absent

SEQ ID NO: 75524 - protein, 37 aa, Artificial Sequence; identical to SEQ ID NO: 50436
  GFR-binding peptide
  MOD_RES (2)..(34)..(35): Xaa is C or S

SEQ ID NO: 75525 - protein, 34 aa, Artificial Sequence
  GFR-binding peptide
  MOD_RES (2)..(33)..(34): Xaa is C or S
KXSKVIMSMEGLIKPTKGIMIQITINSLDQSVXX

SEQ ID NO: 75526 - protein, 37 aa, Artificial Sequence
  GFR-binding peptide
  MOD_RES (32)..(33): Xaa is C or S
RDVVMGSMEGIIIQQKDNMIQMTINSMKTPTXXPGAS

SEQ ID NO: 75527 - protein, 37 aa, Artificial Sequence
  GFR-binding peptide
  MOD_RES (2)..(4)..(37): Xaa is C or S
  MOD_RES (15)..(16)..(17)..(18)..(19): Xaa is A or G
  MOD_RES (20)..(21)..(22)..(23): Xaa is A or G or is absent
SXKXSRVIMSMEGLXXXXXXXXXMIQITINSLAQPVX

SEQ ID NO: 75528 - protein, 38 aa, Artificial Sequence
  GFR-binding peptide
  MOD_RES (1)..(3)..(35)..(36): Xaa is C or S
XGXAEVVMDSMEGIVVNNAADMIQITINSLRAPVXXSA

SEQ ID NO: 75529 - protein, 33 aa, Artificial Sequence; identical to SEQ ID NO: 47891
  GFR-binding peptide
  MOD_RES (32)..(33): Xaa is C or S

SEQ ID NO: 75530 - protein, 38 aa, Artificial Sequence
  GFR-binding peptide
  MOD_RES (1)..(3)..(37)..(38): Xaa is C or S
  MOD_RES (15)..(16)..(17)..(18)..(19): Xaa is A or G
  MOD_RES (20)..(21)..(22)..(23): Xaa is A or G or is absent
XGXSEVVMDSMEGIXXXXXXXXXMIQITINSLRTPVXX

SEQ ID NO: 75531 - protein, 32 aa, Artificial Sequence
  GFR-binding peptide
  MOD_RES (1)..(1): Xaa is C or S
XAEVVMDSMEGLVVNNAADMIQITINSLRAPV

SEQ ID NO: 75532 - protein, 36 aa, Artificial Sequence
  GFR-binding peptide
  MOD_RES (33)..(34): Xaa is C or S
  MOD_RES (11)..(12)..(13)..(14)..(15): Xaa is A or G
  MOD_RES (16)..(17)..(18)..(19): Xaa is A or G or is absent
EVVMDSMEGLXXXXXXXXXMIQITINSLRAPVXXSA

SEQ ID NO: 75533 - protein, 38 aa, Artificial Sequence
  GFR-binding peptide
  MOD_RES (32)..(33): Xaa is C or S
AEVVMDSMEGLVVNNAADMIQITINSLRAPVXXSAPAA

SEQ ID NO: 75534 - protein, 38 aa, Artificial Sequence; identical to SEQ ID NO: 50443
  GFR-binding peptide
  MOD_RES (1)..(35)..(36): Xaa is C or S
  MOD_RES (13)..(14)..(15)..(16)..(17): Xaa is A or G
  MOD_RES (18)..(19)..(20)..(21): Xaa is A or G or is absent

SEQ ID NO: 75535 - protein, 39 aa, Artificial Sequence
  GFR-binding peptide
  MOD_RES (2)..(4)..(37)..(38): Xaa is C or S
  MOD_RES (15)..(16)..(17)..(18)..(19): Xaa is A or G
  MOD_RES (20)..(21)..(22)..(23): Xaa is A or G or is absent
LXGXEEVIMSMEGLXXXXXXXXXMIQMTINSTKVPAXXT

SEQ ID NO: 75536 - protein, 35 aa, Artificial Sequence; identical to SEQ ID NO: 18073
  GFR-binding peptide
  MOD_RES (34)..(34): Xaa is C or S

SEQ ID NO: 75537 - protein, 36 aa, Artificial Sequence
  GFR-binding peptide
  MOD_RES (1)..(3)..(36): Xaa is C or S
  MOD_RES (14)..(15)..(16)..(17)..(18): Xaa is A or G
  MOD_RES (19)..(20)..(21)..(22): Xaa is A or G or is absent
XGXEEVIMSMEGLXXXXXXXXXMIQMTINSTKVPAX

SEQ ID NO: 75538 - protein, 33 aa, Artificial Sequence
  GFR-binding peptide
  MOD_RES (31)..(32): Xaa is C or S
DVVMGSMEGIIIQQKDNMIQMTINSMKTPTXXP

SEQ ID NO: 75539 - protein, 37 aa, Artificial Sequence
  GFR-binding peptide
  MOD_RES (2)..(33)..(34): Xaa is C or S
KXSKVVMSMEGLVKPTRGVMIQITINSLDQPVXXPSA

SEQ ID NO: 75540 - protein, 37 aa, Artificial Sequence
  GFR-binding peptide
  MOD_RES (2)..(4): Xaa is C or S
  MOD_RES (16)..(17)..(18)..(19)..(20): Xaa is A or G
  MOD_RES (21)..(22)..(23)..(24): Xaa is A or G or is absent
RXGXSEVVMDSMEGIXXXXXXXXXMIQITINSLRTPV

SEQ ID NO: 75541 - protein, 36 aa, Artificial Sequence
  GFR-binding peptide
  MOD_RES (32)..(33): Xaa is C or S
SRVVMNSMEGLIVNSSDDMIQVTINSLKTPAXXPKP

SEQ ID NO: 75542 - protein, 43 aa, Artificial Sequence; identical to SEQ ID NO: 18079
  GFR-binding peptide
  MOD_RES (2)..(4)..(38): Xaa is C or S
  MOD_RES (16)..(17)..(18)..(19)..(20): Xaa is A or G
  MOD_RES (21)..(22)..(23)..(24): Xaa is A or G or is absent

SEQ ID NO: 75543 - protein, 33 aa, Artificial Sequence; identical to SEQ ID NO: 47912
  GFR-binding peptide
  MOD_RES (33)..(33): Xaa is C or S
  MOD_RES (11)..(12)..(13)..(14)..(15): Xaa is A or G
  MOD_RES (16)..(17)..(18)..(19): Xaa is A or G or is absent

SEQ ID NO: 75544 - protein, 34 aa, Artificial Sequence
  GFR-binding peptide
  MOD_RES (2)..(4): Xaa is C or S
SXKXSKVVMSMEGLVKPTRGVMIQITINSLDQPV

SEQ ID NO: 75545 - protein, 37 aa, Artificial Sequence; identical to SEQ ID NO: 18080
  GFR-binding peptide
  MOD_RES (2)..(4): Xaa is C or S

SEQ ID NO: 75546 - protein, 40 aa, Artificial Sequence
  GFR-binding peptide
  MOD_RES (2)..(34)..(35): Xaa is C or S
GXRDVVMGSMEGIIIQQKDNMIQMTINSMKTPTXXPGASG

SEQ ID NO: 75547 - protein, 38 aa, Artificial Sequence
  GFR-binding peptide
  MOD_RES (1)..(3)..(34)..(35): Xaa is C or S
XGXEEVIMSMEGILLVRGNDMIQMTINSTKVPAXXTSP

SEQ ID NO: 75548 - protein, 40 aa, Artificial Sequence; identical to SEQ ID NO: 18083
  GFR-binding peptide
  MOD_RES (2)..(39): Xaa is C or S
  MOD_RES (15)..(16)..(17)..(18)..(19): Xaa is A or G
  MOD_RES (20)..(21)..(22)..(23): Xaa is A or G or is absent

SEQ ID NO: 75549 - protein, 40 aa, Artificial Sequence
  GFR-binding peptide
  MOD_RES (1)..(3)..(35)..(36): Xaa is C or S
XGXAEVVMDSMEGLVVNNAADMIQITINSLRAPVXXSAPA

SEQ ID NO: 75550 - protein, 39 aa, Artificial Sequence; identical to SEQ ID NO: 18084
  GFR-binding peptide
  MOD_RES (33)..(33): Xaa is C or S
  MOD_RES (11)..(12)..(13)..(14)..(15): Xaa is A or G
  MOD_RES (16)..(17)..(18)..(19): Xaa is A or G or is absent

SEQ ID NO: 75551 - protein, 35 aa, Artificial Sequence
  GFR-binding peptide
  MOD_RES (1)..(32)..(33): Xaa is C or S
XSKVIMSMEGLIKPTKGIMIQITINSLDQSVXXPS

SEQ ID NO: 75552 - protein, 39 aa, Artificial Sequence
  GFR-binding peptide
  MOD_RES (2)..(4)..(38)..(39): Xaa is C or S
  MOD_RES (16)..(17)..(18)..(19)..(20): Xaa is A or G
  MOD_RES (21)..(22)..(23)..(24): Xaa is A or G or is absent
RXGXAEVVMDSMEGIXXXXXXXXXMIQITINSLRAPVXX

SEQ ID NO: 75553 - protein, 31 aa, Artificial Sequence
  GFR-binding peptide
RDVVMGSMEGLIIQQKDNMIQMTINSMKTPT

SEQ ID NO: 75554 - protein, 40 aa, Artificial Sequence; identical to SEQ ID NO: 18085
  GFR-binding peptide
  MOD_RES (2)..(4): Xaa is C or S
  MOD_RES (17)..(18)..(19)..(20)..(21): Xaa is A or G
  MOD_RES (22)..(23)..(24)..(25): Xaa is A or G or is absent

SEQ ID NO: 75555 - protein, 31 aa, Artificial Sequence
  GFR-binding peptide
  MOD_RES (31)..(31): Xaa is C or S
DVVMGSMEGLIIQQKDNMIQMTINSMKTPTX

SEQ ID NO: 75556 - protein, 37 aa, Artificial Sequence
  GFR-binding peptide
  MOD_RES (1)..(33)..(34): Xaa is C or S
XAEVVMDSMEGIVVNNAADMIQITINSLRAPVXXSAP

SEQ ID NO: 75557 - protein, 38 aa, Artificial Sequence; identical to SEQ ID NO: 18086
  GFR-binding peptide
  MOD_RES (1)..(3): Xaa is C or S

SEQ ID NO: 75558 - protein, 36 aa, Artificial Sequence; identical to SEQ ID NO: 50471
  GFR-binding peptide
  MOD_RES (1)..(3)..(36): Xaa is C or S
  MOD_RES (14)..(15)..(16)..(17)..(18): Xaa is A or G
  MOD_RES (19)..(20)..(21)..(22): Xaa is A or G or is absent

SEQ ID NO: 75559 - protein, 42 aa, Artificial Sequence; identical to SEQ ID NO: 18088
  GFR-binding peptide
  MOD_RES (1)..(3)..(37): Xaa is C or S
  MOD_RES (15)..(16)..(17)..(18)..(19): Xaa is A or G
  MOD_RES (20)..(21)..(22)..(23): Xaa is A or G or is absent

SEQ ID NO: 75560 - protein, 34 aa, Artificial Sequence
  GFR-binding peptide
  MOD_RES (34)..(34): Xaa is C or S
  MOD_RES (12)..(13)..(14)..(15)..(16): Xaa is A or G
  MOD_RES (17)..(18)..(19)..(20): Xaa is A or G or is absent
AEVVMDSMEGLXXXXXXXXXMIQITINSLRAPVX

SEQ ID NO: 75561 - protein, 38 aa, Artificial Sequence; identical to SEQ ID NO: 18090
  GFR-binding peptide
  MOD_RES (1)..(3): Xaa is C or S
  MOD_RES (16)..(17)..(18)..(19)..(20): Xaa is A or G
  MOD_RES (21)..(22)..(23)..(24): Xaa is A or G or is absent

SEQ ID NO: 75562 - protein, 37 aa, Artificial Sequence
  GFR-binding peptide
  MOD_RES (2)..(4)..(36)..(37): Xaa is C or S
HXGXSRVVMNSMEGLIVNSSDDMIQVTINSLKTPAXX

SEQ ID NO: 75563 - protein, 33 aa, Artificial Sequence; identical to SEQ ID NO: 47933
  GFR-binding peptide
  MOD_RES (1)..(3): Xaa is C or S

SEQ ID NO: 75564 - protein, 34 aa, Artificial Sequence
  GFR-binding peptide
  MOD_RES (33)..(34): Xaa is C or S
  MOD_RES (11)..(12)..(13)..(14)..(15): Xaa is A or G
  MOD_RES (16)..(17)..(18)..(19): Xaa is A or G or is absent
SRVIMSMEGLXXXXXXXXXMIQITINSLAQPVXX

SEQ ID NO: 75565 - protein, 34 aa, Artificial Sequence
  GFR-binding peptide
  MOD_RES (2)..(34): Xaa is C or S
GXAEVVMDSMEGLVVNNAADMIQITINSLRAPVX

SEQ ID NO: 75566 - protein, 39 aa, Artificial Sequence; identical to SEQ ID NO: 18096
  GFR-binding peptide
  MOD_RES (34)..(34): Xaa is C or S
  MOD_RES (12)..(13)..(14)..(15)..(16): Xaa is A or G
  MOD_RES (17)..(18)..(19)..(20): Xaa is A or G or is absent

SEQ ID NO: 75567 - protein, 35 aa, Artificial Sequence
  GFR-binding peptide
  MOD_RES (1)..(3): Xaa is C or S
  MOD_RES (14)..(15)..(16)..(17)..(18): Xaa is A or G
  MOD_RES (19)..(20)..(21)..(22): Xaa is A or G or is absent
XGXEEVIMSMEGLXXXXXXXXXMIQMTINSTKVPA

SEQ ID NO: 75568 - protein, 39 aa, Artificial Sequence
  GFR-binding peptide
  MOD_RES (1)..(3)..(35)..(36): Xaa is C or S
XGXSEVVMDSMEGLVVNNASDMIQITINSLRTPVXXTPP

SEQ ID NO: 75569 - protein, 32 aa, Artificial Sequence; identical to SEQ ID NO: 18098
  GFR-binding peptide
  MOD_RES (11)..(12)..(13)..(14)..(15): Xaa is A or G
  MOD_RES (16)..(17)..(18)..(19): Xaa is A or G or is absent

SEQ ID NO: 75570 - protein, 34 aa, Artificial Sequence
  GFR-binding peptide
  MOD_RES (2)..(4): Xaa is C or S
SXKXSKVIMSMEGLIKPTKGIMIQITINSLDQSV

SEQ ID NO: 75571 - protein, 33 aa, Artificial Sequence
  GFR-binding peptide
  MOD_RES (32)..(33): Xaa is C or S
RDVVMGSMEGIIIQQKDNMIQMTINSMKTPTXX

SEQ ID NO: 75572 - protein, 36 aa, Artificial Sequence
  GFR-binding peptide
  MOD_RES (2)..(4): Xaa is C or S
  MOD_RES (15)..(16)..(17)..(18)..(19): Xaa is A or G
  MOD_RES (20)..(21)..(22)..(23): Xaa is A or G or is absent
LXGXEEVIMSMEGIXXXXXXXXXMIQMTINSTKVPA

SEQ ID NO: 75573 - protein, 32 aa, Artificial Sequence
  GFR-binding peptide
  MOD_RES (11)..(12)..(13)..(14)..(15): Xaa is A or G
  MOD_RES (16)..(17)..(18)..(19): Xaa is A or G or is absent
RVVMNSMEGLXXXXXXXXXMIQVTINSLKTPA

SEQ ID NO: 75574 - protein, 36 aa, Artificial Sequence; identical to SEQ ID NO: 18102
  GFR-binding peptide

SEQ ID NO: 75575 - protein, 31 aa, Artificial Sequence
  GFR-binding peptide
  MOD_RES (1)..(1): Xaa is C or S
XSRVIMSMEGLVKPKRGVMIQITINSLAQPV

SEQ ID NO: 75576 - protein, 39 aa, Artificial Sequence
  GFR-binding peptide
  MOD_RES (2)..(4)..(35)..(36): Xaa is C or S
SXKXSRVIMSMEGLVKPKRGVMIQITINSLAQPVXXPAA

SEQ ID NO: 75577 - protein, 36 aa, Artificial Sequence
  GFR-binding peptide
  MOD_RES (2)..(36): Xaa is C or S
  MOD_RES (14)..(15)..(16)..(17)..(18): Xaa is A or G
  MOD_RES (19)..(20)..(21)..(22): Xaa is A or G or is absent
GXRDVVMGSMEGLXXXXXXXXXMIQMTINSMKTPTX

SEQ ID NO: 75578 - protein, 43 aa, Artificial Sequence; identical to SEQ ID NO: 18105
  GFR-binding peptide
  MOD_RES (2)..(39): Xaa is C or S
  MOD_RES (15)..(16)..(17)..(18)..(19): Xaa is A or G
  MOD_RES (20)..(21)..(22)..(23): Xaa is A or G or is absent

SEQ ID NO: 75579 - protein, 44 aa, Artificial Sequence; identical to SEQ ID NO: 18107
  GFR-binding peptide
  MOD_RES (2)..(4)..(41): Xaa is C or S

SEQ ID NO: 75580 - protein, 37 aa, Artificial Sequence; identical to SEQ ID NO: 18109
  GFR-binding peptide
  MOD_RES (1)..(35): Xaa is C or S
  MOD_RES (13)..(14)..(15)..(16)..(17): Xaa is A or G
  MOD_RES (18)..(19)..(20)..(21): Xaa is A or G or is absent

SEQ ID NO: 75581 - protein, 35 aa, Artificial Sequence; identical to SEQ ID NO: 50509
  GFR-binding peptide
  MOD_RES (2)..(33)..(34): Xaa is C or S

SEQ ID NO: 75582 - protein, 38 aa, Artificial Sequence; identical to SEQ ID NO: 18111
  GFR-binding peptide
  MOD_RES (1)..(3)..(37): Xaa is C or S

SEQ ID NO: 75583 - protein, 39 aa, Artificial Sequence
  GFR-binding peptide
  MOD_RES (1)..(3)..(34)..(35): Xaa is C or S
XKXSKVIMSMEGLIKPTKGIMIQITINSLDQSVXXPSAS

SEQ ID NO: 75584 - protein, 39 aa, Artificial Sequence
  GFR-binding peptide
  MOD_RES (33)..(34): Xaa is C or S
  MOD_RES (11)..(12)..(13)..(14)..(15): Xaa is A or G
  MOD_RES (16)..(17)..(18)..(19): Xaa is A or G or is absent
EVVMDSMEGIXXXXXXXXXMIQITINSLRTPVXXTPPTS

SEQ ID NO: 75585 - protein, 36 aa, Artificial Sequence
  GFR-binding peptide
  MOD_RES (2)..(36): Xaa is C or S
  MOD_RES (14)..(15)..(16)..(17)..(18): Xaa is A or G
  MOD_RES (19)..(20)..(21)..(22): Xaa is A or G or is absent
GXSRVVMNSMEGLXXXXXXXXXMIQVTINSLKTPAX

SEQ ID NO: 75586 - protein, 39 aa, Artificial Sequence
  GFR-binding peptide
  MOD_RES (1)..(3)..(37)..(38): Xaa is C or S
  MOD_RES (15)..(16)..(17)..(18)..(19): Xaa is A or G
  MOD_RES (20)..(21)..(22)..(23): Xaa is A or G or is absent
XGXSRVVMNSMEGLXXXXXXXXXMIQVTINSLKTPAXXP

SEQ ID NO: 75587 - protein, 38 aa, Artificial Sequence; identical to SEQ ID NO: 50513
  GFR-binding peptide
  MOD_RES (2)..(35)..(36): Xaa is C or S
  MOD_RES (13)..(14)..(15)..(16)..(17): Xaa is A or G
  MOD_RES (18)..(19)..(20)..(21): Xaa is A or G or is absent

SEQ ID NO: 75588 - protein, 36 aa, Artificial Sequence; identical to SEQ ID NO: 18115
  GFR-binding peptide
  MOD_RES (35)..(35): Xaa is C or S
  MOD_RES (11)..(12)..(13)..(14)..(15): Xaa is A or G
  MOD_RES (16)..(17)..(18)..(19): Xaa is A or G or is absent

SEQ ID NO: 75589 - protein, 41 aa, Artificial Sequence; identical to SEQ ID NO: 18116
  GFR-binding peptide
  MOD_RES (2)..(4)..(41): Xaa is C or S

SEQ ID NO: 75590 - protein, 39 aa, Artificial Sequence
  GFR-binding peptide
  MOD_RES (1)..(35)..(36): Xaa is C or S
  MOD_RES (13)..(14)..(15)..(16)..(17): Xaa is A or G
  MOD_RES (18)..(19)..(20)..(21): Xaa is A or G or is absent
XAEVVMDSMEGLXXXXXXXXXMIQITINSLRAPVXXSAP

SEQ ID NO: 75591 - protein, 39 aa, Artificial Sequence
  GFR-binding peptide
  MOD_RES (2)..(36)..(37): Xaa is C or S
  MOD_RES (14)..(15)..(16)..(17)..(18): Xaa is A or G
  MOD_RES (19)..(20)..(21)..(22): Xaa is A or G or is absent
GXAEVVMDSMEGIXXXXXXXXXMIQITINSLRAPVXXSA

SEQ ID NO: 75592 - protein, 42 aa, Artificial Sequence; identical to SEQ ID NO: 50517
  GFR-binding peptide
  MOD_RES (1)..(3)..(36)..(37): Xaa is C or S
  MOD_RES (14)..(15)..(16)..(17)..(18): Xaa is A or G
  MOD_RES (19)..(20)..(21)..(22): Xaa is A or G or is absent

SEQ ID NO: 75593 - protein, 38 aa, Artificial Sequence
  GFR-binding peptide
  MOD_RES (33)..(34): Xaa is C or S
  MOD_RES (11)..(12)..(13)..(14)..(15): Xaa is A or G
  MOD_RES (16)..(17)..(18)..(19): Xaa is A or G or is absent
SKVIMSMEGLXXXXXXXXXMIQITINSLDQSVXXPSAS

SEQ ID NO: 75594 - protein, 34 aa, Artificial Sequence; identical to SEQ ID NO: 50519
  GFR-binding peptide
  MOD_RES (33)..(34): Xaa is C or S
  MOD_RES (11)..(12)..(13)..(14)..(15): Xaa is A or G
  MOD_RES (16)..(17)..(18)..(19): Xaa is A or G or is absent

SEQ ID NO: 75595 - protein, 40 aa, Artificial Sequence
  GFR-binding peptide
  MOD_RES (2)..(36)..(37): Xaa is C or S
  MOD_RES (14)..(15)..(16)..(17)..(18): Xaa is A or G
  MOD_RES (19)..(20)..(21)..(22): Xaa is A or G or is absent
GXSRVVMNSMEGLXXXXXXXXXMIQVTINSLKTPAXXPKP

SEQ ID NO: 75596 - protein, 44 aa, Artificial Sequence
  GFR-binding peptide
  MOD_RES (2)..(4)..(38)..(39): Xaa is C or S
  MOD_RES (16)..(17)..(18)..(19)..(20): Xaa is A or G
  MOD_RES (21)..(22)..(23)..(24): Xaa is A or G or is absent
RXGXSEVVMDSMEGIXXXXXXXXXMIQITINSLRTPVXXTPPTS

SEQ ID NO: 75597 - protein, 38 aa, Artificial Sequence; identical to SEQ ID NO: 18122
  GFR-binding peptide
  MOD_RES (2)..(4)..(38): Xaa is C or S
  MOD_RES (16)..(17)..(18)..(19)..(20): Xaa is A or G
  MOD_RES (21)..(22)..(23)..(24): Xaa is A or G or is absent

SEQ ID NO: 75598 - protein, 36 aa, Artificial Sequence
  GFR-binding peptide
  MOD_RES (31)..(32): Xaa is C or S
SRVIMSMEGLVKPKRGVMIQITINSLAQPVXXPAAS

SEQ ID NO: 75599 - protein, 38 aa, Artificial Sequence
  GFR-binding peptide
  MOD_RES (34)..(35): Xaa is C or S
  MOD_RES (12)..(13)..(14)..(15)..(16): Xaa is A or G
  MOD_RES (17)..(18)..(19)..(20): Xaa is A or G or is absent
RDVVMGSMEGLXXXXXXXXXMIQMTINSMKTPTXXPGA

SEQ ID NO: 75600 - protein, 38 aa, Artificial Sequence; identical to SEQ ID NO: 50524
  GFR-binding peptide
  MOD_RES (33)..(34): Xaa is C or S
  MOD_RES (11)..(12)..(13)..(14)..(15): Xaa is A or G
  MOD_RES (16)..(17)..(18)..(19): Xaa is A or G or is absent

SEQ ID NO: 75601 - protein, 37 aa, Artificial Sequence
  GFR-binding peptide
  MOD_RES (1)..(32)..(33): Xaa is C or S
XEEVIMSMEGLLLVRGNDMIQMTINSTKVPAXXTSPV

SEQ ID NO: 75602 - protein, 35 aa, Artificial Sequence
  GFR-binding peptide
  MOD_RES (1)..(32)..(33): Xaa is C or S
XSRVIMSMEGLVKPKRGVMIQITINSLAQPVXXPA

SEQ ID NO: 75603 - protein, 30 aa, Artificial Sequence
  GFR-binding peptide
EVVMDSMEGIVVNNAADMIQITINSLRAPV

SEQ ID NO: 75604 - protein, 33 aa, Artificial Sequence
  GFR-binding peptide
  MOD_RES (1)..(32)..(33): Xaa is C or S
XEEVIMSMEGILLVRGNDMIQMTINSTKVPAXX

SEQ ID NO: 75605 - protein, 44 aa, Artificial Sequence; identical to SEQ ID NO: 18124
  GFR-binding peptide
  MOD_RES (2)..(4)..(41): Xaa is C or S
  MOD_RES (17)..(18)..(19)..(20)..(21): Xaa is A or G
  MOD_RES (22)..(23)..(24)..(25): Xaa is A or G or is absent

SEQ ID NO: 75606 - protein, 34 aa, Artificial Sequence
  GFR-binding peptide
  MOD_RES (31)..(32): Xaa is C or S
EEVIMSMEGILLVRGNDMIQMTINSTKVPAXXTS

SEQ ID NO: 75607 - protein, 37 aa, Artificial Sequence; identical to SEQ ID NO: 18127
  GFR-binding peptide
  MOD_RES (1)..(3): Xaa is C or S

SEQ ID NO: 75608 - protein, 38 aa, Artificial Sequence
  GFR-binding peptide
  MOD_RES (2)..(4)..(35)..(36): Xaa is C or S
LXGXEEVIMSMEGLLLVRGNDMIQMTINSTKVPAXXTS

SEQ ID NO: 75609 - protein, 40 aa, Artificial Sequence; identical to SEQ ID NO: 18128
  GFR-binding peptide
  MOD_RES (2)..(4)..(38): Xaa is C or S
  MOD_RES (16)..(17)..(18)..(19)..(20): Xaa is A or G
  MOD_RES (21)..(22)..(23)..(24): Xaa is A or G or is absent

SEQ ID NO: 75610 - protein, 39 aa, Artificial Sequence
  GFR-binding peptide
  MOD_RES (33)..(34): Xaa is C or S
  MOD_RES (11)..(12)..(13)..(14)..(15): Xaa is A or G
  MOD_RES (16)..(17)..(18)..(19): Xaa is A or G or is absent
RVVMNSMEGIXXXXXXXXXMIQVTINSLKTPAXXPKPVH

SEQ ID NO: 75611 - protein, 44 aa, Artificial Sequence; identical to SEQ ID NO: 18130
  GFR-binding peptide
  MOD_RES (2)..(4)..(38): Xaa is C or S
  MOD_RES (16)..(17)..(18)..(19)..(20): Xaa is A or G
  MOD_RES (21)..(22)..(23)..(24): Xaa is A or G or is absent

SEQ ID NO: 75612 - protein, 41 aa, Artificial Sequence
  GFR-binding peptide
  MOD_RES (2)..(4)..(36)..(37): Xaa is C or S
RXGXSEVVMDSMEGIVVNNASDMIQITINSLRTPVXXTPPT

SEQ ID NO: 75613 - protein, 40 aa, Artificial Sequence; identical to SEQ ID NO: 18133
  GFR-binding peptide
  MOD_RES (34)..(34): Xaa is C or S

SEQ ID NO: 75614 - protein, 41 aa, Artificial Sequence
  GFR-binding peptide
  MOD_RES (2)..(4)..(38)..(39): Xaa is C or S
  MOD_RES (16)..(17)..(18)..(19)..(20): Xaa is A or G
  MOD_RES (21)..(22)..(23)..(24): Xaa is A or G or is absent
SXGXRDVVMGSMEGIXXXXXXXXXMIQMTINSMKTPTXXPG

SEQ ID NO: 75615 - protein, 40 aa, Artificial Sequence
  GFR-binding peptide
  MOD_RES (2)..(4)..(38)..(39): Xaa is C or S
  MOD_RES (16)..(17)..(18)..(19)..(20): Xaa is A or G
  MOD_RES (21)..(22)..(23)..(24): Xaa is A or G or is absent
RXGXAEVVMDSMEGLXXXXXXXXXMIQITINSLRAPVXXS

SEQ ID NO: 75616 - protein, 40 aa, Artificial Sequence; identical to SEQ ID NO: 18135
  GFR-binding peptide
  MOD_RES (2)..(36): Xaa is C or S

SEQ ID NO: 75617 - protein, 41 aa, Artificial Sequence; identical to SEQ ID NO: 18137
  GFR-binding peptide
  MOD_RES (1)..(38): Xaa is C or S

SEQ ID NO: 75618 - protein, 33 aa, Artificial Sequence
  GFR-binding peptide
  MOD_RES (33)..(33): Xaa is C or S
  MOD_RES (11)..(12)..(13)..(14)..(15): Xaa is A or G
  MOD_RES (16)..(17)..(18)..(19): Xaa is A or G or is absent
DVVMGSMEGIXXXXXXXXXMIQMTINSMKTPTX

SEQ ID NO: 75619 - protein, 43 aa, Artificial Sequence; identical to SEQ ID NO: 18138
  GFR-binding peptide
  MOD_RES (1)..(3)..(40): Xaa is C or S
  MOD_RES (16)..(17)..(18)..(19)..(20): Xaa is A or G
  MOD_RES (21)..(22)..(23)..(24): Xaa is A or G or is absent

SEQ ID NO: 75620 - protein, 41 aa, Artificial Sequence; identical to SEQ ID NO: 18139
  GFR-binding peptide
  MOD_RES (1)..(38): Xaa is C or S
  MOD_RES (14)..(15)..(16)..(17)..(18): Xaa is A or G
  MOD_RES (19)..(20)..(21)..(22): Xaa is A or G or is absent

SEQ ID NO: 75621 - protein, 39 aa, Artificial Sequence
  GFR-binding peptide
  MOD_RES (34)..(35): Xaa is C or S
  MOD_RES (12)..(13)..(14)..(15)..(16): Xaa is A or G
  MOD_RES (17)..(18)..(19)..(20): Xaa is A or G or is absent
RDVVMGSMEGIXXXXXXXXXMIQMTINSMKTPTXXPGAS

SEQ ID NO: 75622 - protein, 40 aa, Artificial Sequence
  GFR-binding peptide
  MOD_RES (2)..(4)..(36)..(37): Xaa is C or S
SXGXRDVVMGSMEGLIIQQKDNMIQMTINSMKTPTXXPGA

SEQ ID NO: 75623 - protein, 37 aa, Artificial Sequence
  GFR-binding peptide
  MOD_RES (33)..(34): Xaa is C or S
  MOD_RES (11)..(12)..(13)..(14)..(15): Xaa is A or G
  MOD_RES (16)..(17)..(18)..(19): Xaa is A or G or is absent
SRVIMSMEGLXXXXXXXXXMIQITINSLAQPVXXPAA

SEQ ID NO: 75624 - protein, 38 aa, Artificial Sequence
  GFR-binding peptide
  MOD_RES (2)..(4)..(35)..(36): Xaa is C or S
LXGXEEVIMSMEGILLVRGNDMIQMTINSTKVPAXXTS

SEQ ID NO: 75625 - protein, 32 aa, Artificial Sequence; identical to SEQ ID NO: 18141
  GFR-binding peptide

SEQ ID NO: 75626 - protein, 36 aa, Artificial Sequence
  GFR-binding peptide
  MOD_RES (2)..(4)..(35)..(36): Xaa is C or S
LXGXEEVIMSMEGILLVRGNDMIQMTINSTKVPAXX

SEQ ID NO: 75627 - protein, 39 aa, Artificial Sequence
  GFR-binding peptide
  MOD_RES (2)..(4)..(38)..(39): Xaa is C or S
  MOD_RES (16)..(17)..(18)..(19)..(20): Xaa is A or G
  MOD_RES (21)..(22)..(23)..(24): Xaa is A or G or is absent
SXGXRDVVMGSMEGLXXXXXXXXXMIQMTINSMKTPTXX

SEQ ID NO: 75628 - protein, 37 aa, Artificial Sequence
  GFR-binding peptide
  MOD_RES (1)..(3)..(34)..(35): Xaa is C or S
XKXSRVIMSMEGLVKPKRGVMIQITINSLAQPVXXPA

SEQ ID NO: 75629 - protein, 36 aa, Artificial Sequence; identical to SEQ ID NO: 48006
  GFR-binding peptide
  MOD_RES (34)..(35): Xaa is C or S
  MOD_RES (12)..(13)..(14)..(15)..(16): Xaa is A or G
  MOD_RES (17)..(18)..(19)..(20): Xaa is A or G or is absent

SEQ ID NO: 75630 - protein, 41 aa, Artificial Sequence
  GFR-binding peptide
  MOD_RES (2)..(4)..(38)..(39): Xaa is C or S
  MOD_RES (16)..(17)..(18)..(19)..(20): Xaa is A or G
  MOD_RES (21)..(22)..(23)..(24): Xaa is A or G or is absent
RXGXAEVVMDSMEGLXXXXXXXXXMIQITINSLRAPVXXSA

SEQ ID NO: 75631 - protein, 33 aa, Artificial Sequence; identical to SEQ ID NO: 18143
  GFR-binding peptide
  MOD_RES (11)..(12)..(13)..(14)..(15): Xaa is A or G
  MOD_RES (16)..(17)..(18)..(19): Xaa is A or G or is absent

SEQ ID NO: 75632 - protein, 32 aa, Artificial Sequence
  GFR-binding peptide
  MOD_RES (32)..(32): Xaa is C or S
AEVVMDSMEGLVVNNAADMIQITINSLRAPVX

SEQ ID NO: 75633 - protein, 44 aa, Artificial Sequence; identical to SEQ ID NO: 18145
  GFR-binding peptide
  MOD_RES (2)..(4)..(38): Xaa is C or S

SEQ ID NO: 75634 - protein, 37 aa, Artificial Sequence; identical to SEQ ID NO: 50563
  GFR-binding peptide
  MOD_RES (2)..(4): Xaa is C or S
  MOD_RES (16)..(17)..(18)..(19)..(20): Xaa is A or G
  MOD_RES (21)..(22)..(23)..(24): Xaa is A or G or is absent

SEQ ID NO: 75635 - protein, 38 aa, Artificial Sequence; identical to SEQ ID NO: 50565
  GFR-binding peptide
  MOD_RES (1)..(32)..(33): Xaa is C or S

SEQ ID NO: 75636 - protein, 36 aa, Artificial Sequence
  GFR-binding peptide
  MOD_RES (2)..(4)..(35)..(36): Xaa is C or S
SXKXSKVIMSMEGLIKPTKGIMIQITINSLDQSVXX

SEQ ID NO: 75637 - protein, 34 aa, Artificial Sequence
  GFR-binding peptide
  MOD_RES (1)..(33)..(34): Xaa is C or S
XSEVVMDSMEGLVVNNASDMIQITINSLRTPVXX

SEQ ID NO: 75638 - protein, 36 aa, Artificial Sequence; identical to SEQ ID NO: 18146
  GFR-binding peptide
  MOD_RES (1)..(1): Xaa is C or S

SEQ ID NO: 75639 - protein, 40 aa, Artificial Sequence
  GFR-binding peptide
  MOD_RES (1)..(35)..(36): Xaa is C or S
  MOD_RES (13)..(14)..(15)..(16)..(17): Xaa is A or G
  MOD_RES (18)..(19)..(20)..(21): Xaa is A or G or is absent
XRDVVMGSMEGIXXXXXXXXXMIQMTINSMKTPTXXPGAS

SEQ ID NO: 75640 - protein, 40 aa, Artificial Sequence; identical to SEQ ID NO: 18147
  GFR-binding peptide
  MOD_RES (1)..(35): Xaa is C or S
  MOD_RES (13)..(14)..(15)..(16)..(17): Xaa is A or G
  MOD_RES (18)..(19)..(20)..(21): Xaa is A or G or is absent

SEQ ID NO: 75641 - protein, 42 aa, Artificial Sequence; identical to SEQ ID NO: 18148
  GFR-binding peptide
  MOD_RES (2)..(36): Xaa is C or S

SEQ ID NO: 75642 - protein, 34 aa, Artificial Sequence; identical to SEQ ID NO: 48023
  GFR-binding peptide
  MOD_RES (1)..(34): Xaa is C or S
  MOD_RES (12)..(13)..(14)..(15)..(16): Xaa is A or G
  MOD_RES (17)..(18)..(19)..(20): Xaa is A or G or is absent

SEQ ID NO: 75643 - protein, 39 aa, Artificial Sequence; identical to SEQ ID NO: 18150
  GFR-binding peptide
  MOD_RES (1)..(3): Xaa is C or S
  MOD_RES (16)..(17)..(18)..(19)..(20): Xaa is A or G
  MOD_RES (21)..(22)..(23)..(24): Xaa is A or G or is absent

SEQ ID NO: 75644 - protein, 38 aa, Artificial Sequence; identical to SEQ ID NO: 18151
  GFR-binding peptide
  MOD_RES (1)..(3): Xaa is C or S

SEQ ID NO: 75645 - protein, 40 aa, Artificial Sequence; identical to SEQ ID NO: 18154
  GFR-binding peptide
  MOD_RES (1)..(3)..(40): Xaa is C or S
  MOD_RES (16)..(17)..(18)..(19)..(20): Xaa is A or G
  MOD_RES (21)..(22)..(23)..(24): Xaa is A or G or is absent

SEQ ID NO: 75646 - protein, 39 aa, Artificial Sequence
  GFR-binding peptide
  MOD_RES (33)..(34): Xaa is C or S
  MOD_RES (11)..(12)..(13)..(14)..(15): Xaa is A or G
  MOD_RES (16)..(17)..(18)..(19): Xaa is A or G or is absent
DVVMGSMEGLXXXXXXXXXMIQMTINSMKTPTXXPGASG

SEQ ID NO: 75647 - protein, 36 aa, Artificial Sequence
  GFR-binding peptide
  MOD_RES (31)..(32): Xaa is C or S
DVVMGSMEGLIIQQKDNMIQMTINSMKTPTXXPGAS

SEQ ID NO: 75648 - protein, 34 aa, Artificial Sequence
  GFR-binding peptide
  MOD_RES (1)..(32)..(33): Xaa is C or S
XSKVVMSMEGLVKPTRGVMIQITINSLDQPVXXP

SEQ ID NO: 75649 - protein, 39 aa, Artificial Sequence; identical to SEQ ID NO: 48032
  GFR-binding peptide
  MOD_RES (33)..(34): Xaa is C or S
  MOD_RES (11)..(12)..(13)..(14)..(15): Xaa is A or G
  MOD_RES (16)..(17)..(18)..(19): Xaa is A or G or is absent

SEQ ID NO: 75650 - protein, 40 aa, Artificial Sequence; identical to SEQ ID NO: 18158
  GFR-binding peptide
  MOD_RES (1)..(3)..(37): Xaa is C or S

SEQ ID NO: 75651 - protein, 33 aa, Artificial Sequence; identical to SEQ ID NO: 18159
  GFR-binding peptide
  MOD_RES (12)..(13)..(14)..(15)..(16): Xaa is A or G
  MOD_RES (17)..(18)..(19)..(20): Xaa is A or G or is absent

SEQ ID NO: 75652 - protein, 43 aa, Artificial Sequence; identical to SEQ ID NO: 18160
  GFR-binding peptide
  MOD_RES (2)..(4)..(38): Xaa is C or S

SEQ ID NO: 75653 - protein, 30 aa, Artificial Sequence; identical to SEQ ID NO: 50580
  GFR-binding peptide

SEQ ID NO: 75654 - protein, 41 aa, Artificial Sequence
  GFR-binding peptide
  MOD_RES (2)..(35)..(36): Xaa is C or S
  MOD_RES (13)..(14)..(15)..(16)..(17): Xaa is A or G
  MOD_RES (18)..(19)..(20)..(21): Xaa is A or G or is absent
KXSKVIMSMEGLXXXXXXXXXMIQITINSLDQSVXXPSASA

SEQ ID NO: 75655 - protein, 34 aa, Artificial Sequence; identical to SEQ ID NO: 48042
  GFR-binding peptide
  MOD_RES (2)..(33)..(34): Xaa is C or S

SEQ ID NO: 75656 - protein, 40 aa, Artificial Sequence
  GFR-binding peptide
  MOD_RES (1)..(35)..(36): Xaa is C or S
  MOD_RES (13)..(14)..(15)..(16)..(17): Xaa is A or G
  MOD_RES (18)..(19)..(20)..(21): Xaa is A or G or is absent
XSEVVMDSMEGLXXXXXXXXXMIQITINSLRTPVXXTPPT

SEQ ID NO: 75657 - protein, 35 aa, Artificial Sequence; identical to SEQ ID NO: 50586
  GFR-binding peptide
  MOD_RES (1)..(34)..(35): Xaa is C or S
  MOD_RES (12)..(13)..(14)..(15)..(16): Xaa is A or G
  MOD_RES (17)..(18)..(19)..(20): Xaa is A or G or is absent

SEQ ID NO: 75658 - protein, 37 aa, Artificial Sequence
  GFR-binding peptide
  MOD_RES (32)..(33): Xaa is C or S
AEVVMDSMEGIVVNNAADMIQITINSLRAPVXXSAPA

SEQ ID NO: 75659 - protein, 39 aa, Artificial Sequence
  GFR-binding peptide
  MOD_RES (33)..(34): Xaa is C or S
  MOD_RES (11)..(12)..(13)..(14)..(15): Xaa is A or G
  MOD_RES (16)..(17)..(18)..(19): Xaa is A or G or is absent
EEVIMSMEGIXXXXXXXXXMIQMTINSTKVPAXXTSPVR

SEQ ID NO: 75660 - protein, 32 aa, Artificial Sequence; identical to SEQ ID NO: 50592
  GFR-binding peptide
  MOD_RES (2)..(2): Xaa is C or S

SEQ ID NO: 75661 - protein, 35 aa, Artificial Sequence; identical to SEQ ID NO: 48047
  GFR-binding peptide
  MOD_RES (1)..(34)..(35): Xaa is C or S
  MOD_RES (12)..(13)..(14)..(15)..(16): Xaa is A or G
  MOD_RES (17)..(18)..(19)..(20): Xaa is A or G or is absent

SEQ ID NO: 75662 - protein, 40 aa, Artificial Sequence; identical to SEQ ID NO: 18163
  GFR-binding peptide
  MOD_RES (34)..(34): Xaa is C or S
  MOD_RES (12)..(13)..(14)..(15)..(16): Xaa is A or G
  MOD_RES (17)..(18)..(19)..(20): Xaa is A or G or is absent

SEQ ID NO: 75663 - protein, 40 aa, Artificial Sequence; identical to SEQ ID NO: 50595
  GFR-binding peptide
  MOD_RES (2)..(35)..(36): Xaa is C or S
  MOD_RES (13)..(14)..(15)..(16)..(17): Xaa is A or G
  MOD_RES (18)..(19)..(20)..(21): Xaa is A or G or is absent

SEQ ID NO: 75664 - protein, 37 aa, Artificial Sequence; identical to SEQ ID NO: 18164
  GFR-binding peptide
  MOD_RES (2)..(36): Xaa is C or S
  MOD_RES (14)..(15)..(16)..(17)..(18): Xaa is A or G
  MOD_RES (19)..(20)..(21)..(22): Xaa is A or G or is absent

SEQ ID NO: 75665 - protein, 43 aa, Artificial Sequence
  GFR-binding peptide
  MOD_RES (2)..(4)..(38)..(39): Xaa is C or S
  MOD_RES (16)..(17)..(18)..(19)..(20): Xaa is A or G
  MOD_RES (21)..(22)..(23)..(24): Xaa is A or G or is absent
RXGXSEVVMDSMEGIXXXXXXXXXMIQITINSLRTPVXXTPPT

SEQ ID NO: 75666 - protein, 40 aa, Artificial Sequence; identical to SEQ ID NO: 48052
  GFR-binding peptide
  MOD_RES (1)..(3)..(35)..(36): Xaa is C or S

SEQ ID NO: 75667 - protein, 41 aa, Artificial Sequence; identical to SEQ ID NO: 18165
  GFR-binding peptide
  MOD_RES (1)..(35): Xaa is C or S
  MOD_RES (13)..(14)..(15)..(16)..(17): Xaa is A or G
  MOD_RES (18)..(19)..(20)..(21): Xaa is A or G or is absent

SEQ ID NO: 75668 - protein, 38 aa, Artificial Sequence; identical to SEQ ID NO: 48058
  GFR-binding peptide
  MOD_RES (2)..(4)..(38): Xaa is C or S
  MOD_RES (16)..(17)..(18)..(19)..(20): Xaa is A or G
  MOD_RES (21)..(22)..(23)..(24): Xaa is A or G or is absent

SEQ ID NO: 75669 - protein, 36 aa, Artificial Sequence; identical to SEQ ID NO: 50602
  GFR-binding peptide
  MOD_RES (31)..(32): Xaa is C or S

SEQ ID NO: 75670 - protein, 38 aa, Artificial Sequence; identical to SEQ ID NO: 18167
  GFR-binding peptide
  MOD_RES (35)..(35): Xaa is C or S

SEQ ID NO: 75671 - protein, 40 aa, Artificial Sequence
  GFR-binding peptide
  MOD_RES (1)..(35)..(36): Xaa is C or S
  MOD_RES (13)..(14)..(15)..(16)..(17): Xaa is A or G
  MOD_RES (18)..(19)..(20)..(21): Xaa is A or G or is absent
XSRVVMNSMEGLXXXXXXXXXMIQVTINSLKTPAXXPKPV

SEQ ID NO: 75672 - protein, 40 aa, Artificial Sequence
  GFR-binding peptide
  MOD_RES (2)..(4)..(36)..(37): Xaa is C or S
RXGXSEVVMDSMEGIVVNNASDMIQITINSLRTPVXXTPP

SEQ ID NO: 75673 - protein, 38 aa, Artificial Sequence
  GFR-binding peptide
  MOD_RES (1)..(3)..(35)..(36): Xaa is C or S
XGXAEVVMDSMEGLVVNNAADMIQITINSLRAPVXXSA

SEQ ID NO: 75674 - protein, 37 aa, Artificial Sequence; identical to SEQ ID NO: 48062
  GFR-binding peptide
  MOD_RES (2)..(4)..(37): Xaa is C or S
  MOD_RES (15)..(16)..(17)..(18)..(19): Xaa is A or G
  MOD_RES (20)..(21)..(22)..(23): Xaa is A or G or is absent

SEQ ID NO: 75675 - protein, 36 aa, Artificial Sequence; identical to SEQ ID NO: 18170
  GFR-binding peptide
  MOD_RES (2)..(36): Xaa is C or S
  MOD_RES (14)..(15)..(16)..(17)..(18): Xaa is A or G
  MOD_RES (19)..(20)..(21)..(22): Xaa is A or G or is absent

SEQ ID NO: 75676 - protein, 35 aa, Artificial Sequence; identical to SEQ ID NO: 18171
  GFR-binding peptide
  MOD_RES (1)..(1): Xaa is C or S

SEQ ID NO: 75677 - protein, 37 aa, Artificial Sequence
  GFR-binding peptide
  MOD_RES (1)..(34)..(35): Xaa is C or S
  MOD_RES (12)..(13)..(14)..(15)..(16): Xaa is A or G
  MOD_RES (17)..(18)..(19)..(20): Xaa is A or G or is absent
XEEVIMSMEGLXXXXXXXXXMIQMTINSTKVPAXXTS

SEQ ID NO: 75678 - protein, 40 aa, Artificial Sequence; identical to SEQ ID NO: 18172
  GFR-binding peptide
  MOD_RES (2)..(4)..(38): Xaa is C or S

SEQ ID NO: 75679 - protein, 41 aa, Artificial Sequence; identical to SEQ ID NO: 18173
  GFR-binding peptide
  MOD_RES (1)..(3)..(37): Xaa is C or S

SEQ ID NO: 75680 - protein, 38 aa, Artificial Sequence; identical to SEQ ID NO: 18174
  GFR-binding peptide
  MOD_RES (2)..(4): Xaa is C or S
  MOD_RES (17)..(18)..(19)..(20)..(21): Xaa is A or G
  MOD_RES (22)..(23)..(24)..(25): Xaa is A or G or is absent

SEQ ID NO: 75681 - protein, 37 aa, Artificial Sequence; identical to SEQ ID NO: 50613
  GFR-binding peptide
  MOD_RES (1)..(32)..(33): Xaa is C or S

SEQ ID NO: 75682 - protein, 37 aa, Artificial Sequence
  GFR-binding peptide
  MOD_RES (34)..(35): Xaa is C or S
  MOD_RES (12)..(13)..(14)..(15)..(16): Xaa is A or G
  MOD_RES (17)..(18)..(19)..(20): Xaa is A or G or is absent
AEVVMDSMEGLXXXXXXXXXMIQITINSLRAPVXXSA

SEQ ID NO: 75683 - protein, 35 aa, Artificial Sequence
  GFR-binding peptide
  MOD_RES (2)..(4): Xaa is C or S
HXGXSRVVMNSMEGLIVNSSDDMIQVTINSLKTPA

SEQ ID NO: 75684 - protein, 39 aa, Artificial Sequence; identical to SEQ ID NO: 18175
  GFR-binding peptide
  MOD_RES (35)..(35): Xaa is C or S

SEQ ID NO: 75685 - protein, 40 aa, Artificial Sequence; identical to SEQ ID NO: 18176
  GFR-binding peptide
  MOD_RES (2)..(39): Xaa is C or S

SEQ ID NO: 75686 - protein, 38 aa, Artificial Sequence; identical to SEQ ID NO: 18177
  GFR-binding peptide
  MOD_RES (2)..(2): Xaa is C or S

SEQ ID NO: 75687 - protein, 35 aa, Artificial Sequence
  GFR-binding peptide
  MOD_RES (1)..(33)..(34): Xaa is C or S
XRDVVMGSMEGIIIQQKDNMIQMTINSMKTPTXXP

SEQ ID NO: 75688 - protein, 38 aa, Artificial Sequence; identical to SEQ ID NO: 18178
  GFR-binding peptide
  MOD_RES (1)..(3)..(37): Xaa is C or S
  MOD_RES (15)..(16)..(17)..(18)..(19): Xaa is A or G
  MOD_RES (20)..(21)..(22)..(23): Xaa is A or G or is absent

SEQ ID NO: 75689 - protein, 39 aa, Artificial Sequence; identical to SEQ ID NO: 18180
  GFR-binding peptide
  MOD_RES (2)..(4)..(38): Xaa is C or S

SEQ ID NO: 75690 - protein, 35 aa, Artificial Sequence; identical to SEQ ID NO: 18181
  GFR-binding peptide
  MOD_RES (1)..(35): Xaa is C or S
  MOD_RES (13)..(14)..(15)..(16)..(17): Xaa is A or G
  MOD_RES (18)..(19)..(20)..(21): Xaa is A or G or is absent

SEQ ID NO: 75691 - protein, 38 aa, Artificial Sequence
  GFR-binding peptide
  MOD_RES (1)..(3)..(37)..(38): Xaa is C or S
  MOD_RES (15)..(16)..(17)..(18)..(19): Xaa is A or G
  MOD_RES (20)..(21)..(22)..(23): Xaa is A or G or is absent
XGXSEVVMDSMEGLXXXXXXXXXMIQITINSLRTPVXX

SEQ ID NO: 75692 - protein, 39 aa, Artificial Sequence
  GFR-binding peptide
  MOD_RES (2)..(4)..(37)..(38): Xaa is C or S
  MOD_RES (15)..(16)..(17)..(18)..(19): Xaa is A or G
  MOD_RES (20)..(21)..(22)..(23): Xaa is A or G or is absent
LXGXEEVIMSMEGIXXXXXXXXXMIQMTINSTKVPAXXT

SEQ ID NO: 75693 - protein, 39 aa, Artificial Sequence; identical to SEQ ID NO: 18183
  GFR-binding peptide
  MOD_RES (35)..(35): Xaa is C or S

SEQ ID NO: 75694 - protein, 42 aa, Artificial Sequence; identical to SEQ ID NO: 18184
  GFR-binding peptide
  MOD_RES (1)..(3)..(37): Xaa is C or S

SEQ ID NO: 75695 - protein, 33 aa, Artificial Sequence; identical to SEQ ID NO: 48076
  GFR-binding peptide
  MOD_RES (2)..(33): Xaa is C or S

SEQ ID NO: 75696 - protein, 40 aa, Artificial Sequence; identical to SEQ ID NO: 18186
  GFR-binding peptide
  MOD_RES (36)..(36): Xaa is C or S

SEQ ID NO: 75697 - protein, 40 aa, Artificial Sequence; identical to SEQ ID NO: 18187
  GFR-binding peptide
  MOD_RES (1)..(3)..(40): Xaa is C or S

SEQ ID NO: 75698 - protein, 38 aa, Artificial Sequence; identical to SEQ ID NO: 18188
  GFR-binding peptide
  MOD_RES (1)..(38): Xaa is C or S
  MOD_RES (14)..(15)..(16)..(17)..(18): Xaa is A or G
  MOD_RES (19)..(20)..(21)..(22): Xaa is A or G or is absent

SEQ ID NO: 75699 - protein, 41 aa, Artificial Sequence; identical to SEQ ID NO: 18189
  GFR-binding peptide
  MOD_RES (2)..(4)..(41): Xaa is C or S

SEQ ID NO: 75700 - protein, 38 aa, Artificial Sequence
  GFR-binding peptide
  MOD_RES (1)..(3)..(37)..(38): Xaa is C or S
  MOD_RES (15)..(16)..(17)..(18)..(19): Xaa is A or G
  MOD_RES (20)..(21)..(22)..(23): Xaa is A or G or is absent
XGXAEVVMDSMEGIXXXXXXXXXMIQITINSLRAPVXX

SEQ ID NO: 75701 - protein, 30 aa, Artificial Sequence; identical to SEQ ID NO: 50627
  GFR-binding peptide

SEQ ID NO: 75702 - protein, 37 aa, Artificial Sequence; identical to SEQ ID NO: 18190
  GFR-binding peptide
  MOD_RES (1)..(3)..(37): Xaa is C or S
  MOD_RES (15)..(16)..(17)..(18)..(19): Xaa is A or G
  MOD_RES (20)..(21)..(22)..(23): Xaa is A or G or is absent

SEQ ID NO: 75703 - protein, 42 aa, Artificial Sequence; identical to SEQ ID NO: 18191
  GFR-binding peptide
  MOD_RES (2)..(4)..(38): Xaa is C or S
  MOD_RES (16)..(17)..(18)..(19)..(20): Xaa is A or G
  MOD_RES (21)..(22)..(23)..(24): Xaa is A or G or is absent

SEQ ID NO: 75704 - protein, 37 aa, Artificial Sequence; identical to SEQ ID NO: 18192
  GFR-binding peptide
  MOD_RES (37)..(37): Xaa is C or S

SEQ ID NO: 75705 - protein, 33 aa, Artificial Sequence; identical to SEQ ID NO: 18193
  GFR-binding peptide
  MOD_RES (12)..(13)..(14)..(15)..(16): Xaa is A or G
  MOD_RES (17)..(18)..(19)..(20): Xaa is A or G or is absent

SEQ ID NO: 75706 - protein, 33 aa, Artificial Sequence
  GFR-binding peptide
  MOD_RES (1)..(32)..(33): Xaa is C or S
XSRVIMSMEGLVKPKRGVMIQITINSLAQPVXX

SEQ ID NO: 75707 - protein, 39 aa, Artificial Sequence; identical to SEQ ID NO: 18195
  GFR-binding peptide
  MOD_RES (2)..(4): Xaa is C or S
  MOD_RES (17)..(18)..(19)..(20)..(21): Xaa is A or G
  MOD_RES (22)..(23)..(24)..(25): Xaa is A or G or is absent

SEQ ID NO: 75708 - protein, 35 aa, Artificial Sequence
  GFR-binding peptide
  MOD_RES (2)..(2): Xaa is C or S
  MOD_RES (14)..(15)..(16)..(17)..(18): Xaa is A or G
  MOD_RES (19)..(20)..(21)..(22): Xaa is A or G or is absent
GXAEVVMDSMEGLXXXXXXXXXMIQITINSLRAPV

SEQ ID NO: 75709 - protein, 36 aa, Artificial Sequence
  GFR-binding peptide
  MOD_RES (1)..(33)..(34): Xaa is C or S
XSEVVMDSMEGIVVNNASDMIQITINSLRTPVXXTP

SEQ ID NO: 75710 - protein, 36 aa, Artificial Sequence; identical to SEQ ID NO: 18196
  GFR-binding peptide
  MOD_RES (2)..(2): Xaa is C or S

SEQ ID NO: 75711 - protein, 34 aa, Artificial Sequence; identical to SEQ ID NO: 48085
  GFR-binding peptide
  MOD_RES (33)..(34): Xaa is C or S
  MOD_RES (11)..(12)..(13)..(14)..(15): Xaa is A or G
  MOD_RES (16)..(17)..(18)..(19): Xaa is A or G or is absent

SEQ ID NO: 75712 - protein, 39 aa, Artificial Sequence
  GFR-binding peptide
  MOD_RES (1)..(3)..(37)..(38): Xaa is C or S
  MOD_RES (15)..(16)..(17)..(18)..(19): Xaa is A or G
  MOD_RES (20)..(21)..(22)..(23): Xaa is A or G or is absent
XGXSEVVMDSMEGLXXXXXXXXXMIQITINSLRTPVXXT

SEQ ID NO: 75713 - protein, 33 aa, Artificial Sequence; identical to SEQ ID NO: 18197
  GFR-binding peptide
  MOD_RES (12)..(13)..(14)..(15)..(16): Xaa is A or G
  MOD_RES (17)..(18)..(19)..(20): Xaa is A or G or is absent

SEQ ID NO: 75714 - protein, 41 aa, Artificial Sequence; identical to SEQ ID NO: 48092
  GFR-binding peptide
  MOD_RES (2)..(4)..(35)..(36): Xaa is C or S

SEQ ID NO: 75715 - protein, 36 aa, Artificial Sequence; identical to SEQ ID NO: 48093
  GFR-binding peptide
  MOD_RES (2)..(4)..(35)..(36): Xaa is C or S

SEQ ID NO: 75716 - protein, 37 aa, Artificial Sequence; identical to SEQ ID NO: 18199
  GFR-binding peptide
  MOD_RES (34)..(34): Xaa is C or S
  MOD_RES (12)..(13)..(14)..(15)..(16): Xaa is A or G
  MOD_RES (17)..(18)..(19)..(20): Xaa is A or G or is absent

SEQ ID NO: 75717 - protein, 38 aa, Artificial Sequence; identical to SEQ ID NO: 50642
  GFR-binding peptide
  MOD_RES (2)..(33)..(34): Xaa is C or S

SEQ ID NO: 75718 - protein, 37 aa, Artificial Sequence
  GFR-binding peptide
  MOD_RES (1)..(3)..(36)..(37): Xaa is C or S
  MOD_RES (14)..(15)..(16)..(17)..(18): Xaa is A or G
  MOD_RES (19)..(20)..(21)..(22): Xaa is A or G or is absent
XGXEEVIMSMEGLXXXXXXXXXMIQMTINSTKVPAXX

SEQ ID NO: 75719 - protein, 38 aa, Artificial Sequence; identical to SEQ ID NO: 18202
  GFR-binding peptide
  MOD_RES (37)..(37): Xaa is C or S
  MOD_RES (13)..(14)..(15)..(16)..(17): Xaa is A or G
  MOD_RES (18)..(19)..(20)..(21): Xaa is A or G or is absent

SEQ ID NO: 75720 - protein, 40 aa, Artificial Sequence
  GFR-binding peptide
  MOD_RES (2)..(36)..(37): Xaa is C or S
  MOD_RES (14)..(15)..(16)..(17)..(18): Xaa is A or G
  MOD_RES (19)..(20)..(21)..(22): Xaa is A or G or is absent
GXRDVVMGSMEGIXXXXXXXXXMIQMTINSMKTPTXXPGA

SEQ ID NO: 75721 - protein, 35 aa, Artificial Sequence
  GFR-binding peptide
  MOD_RES (32)..(33): Xaa is C or S
RDVVMGSMEGIIIQQKDNMIQMTINSMKTPTXXPG

SEQ ID NO: 75722 - protein, 38 aa, Artificial Sequence
  GFR-binding peptide
  MOD_RES (1)..(33)..(34): Xaa is C or S
XSEVVMDSMEGIVVNNASDMIQITINSLRTPVXXTPPT

SEQ ID NO: 75723 - protein, 41 aa, Artificial Sequence; identical to SEQ ID NO: 18204
  GFR-binding peptide
  MOD_RES (1)..(3)..(40): Xaa is C or S

SEQ ID NO: 75724 - protein, 39 aa, Artificial Sequence
  GFR-binding peptide
  MOD_RES (1)..(3)..(35)..(36): Xaa is C or S
XGXRDVVMGSMEGIIIQQKDNMIQMTINSMKTPTXXPGA

SEQ ID NO: 75725 - protein, 34 aa, Artificial Sequence; identical to SEQ ID NO: 18206
  GFR-binding peptide
  MOD_RES (1)..(1): Xaa is C or S

SEQ ID NO: 75726 - protein, 33 aa, Artificial Sequence; identical to SEQ ID NO: 18208
  GFR-binding peptide

SEQ ID NO: 75727 - protein, 42 aa, Artificial Sequence; identical to SEQ ID NO: 18209
  GFR-binding peptide
  MOD_RES (1)..(3)..(37): Xaa is C or S
  MOD_RES (15)..(16)..(17)..(18)..(19): Xaa is A or G
  MOD_RES (20)..(21)..(22)..(23): Xaa is A or G or is absent

SEQ ID NO: 75728 - protein, 39 aa, Artificial Sequence; identical to SEQ ID NO: 18210
  GFR-binding peptide
  MOD_RES (2)..(4): Xaa is C or S

SEQ ID NO: 75729 - protein, 30 aa, Artificial Sequence
  GFR-binding peptide
EVVMDSMEGLVVNNASDMIQITINSLRTPV

SEQ ID NO: 75730 - protein, 38 aa, Artificial Sequence; identical to SEQ ID NO: 18212
  GFR-binding peptide
  MOD_RES (33)..(33): Xaa is C or S
  MOD_RES (11)..(12)..(13)..(14)..(15): Xaa is A or G
  MOD_RES (16)..(17)..(18)..(19): Xaa is A or G or is absent

SEQ ID NO: 75731 - protein, 34 aa, Artificial Sequence
  GFR-binding peptide
  MOD_RES (33)..(34): Xaa is C or S
  MOD_RES (11)..(12)..(13)..(14)..(15): Xaa is A or G
  MOD_RES (16)..(17)..(18)..(19): Xaa is A or G or is absent
DVVMGSMEGIXXXXXXXXXMIQMTINSMKTPTXX

SEQ ID NO: 75732 - protein, 36 aa, Artificial Sequence
  GFR-binding peptide
  MOD_RES (1)..(3)..(35)..(36): Xaa is C or S
XGXAEVVMDSMEGLVVNNAADMIQITINSLRAPVXX

SEQ ID NO: 75733 - protein, 36 aa, Artificial Sequence
  GFR-binding peptide
  MOD_RES (2)..(36): Xaa is C or S
  MOD_RES (14)..(15)..(16)..(17)..(18): Xaa is A or G
  MOD_RES (19)..(20)..(21)..(22): Xaa is A or G or is absent
GXSEVVMDSMEGLXXXXXXXXXMIQITINSLRTPVX

SEQ ID NO: 75734 - protein, 38 aa, Artificial Sequence; identical to SEQ ID NO: 48114
  GFR-binding peptide
  MOD_RES (1)..(3)..(37)..(38): Xaa is C or S
  MOD_RES (15)..(16)..(17)..(18)..(19): Xaa is A or G
  MOD_RES (20)..(21)..(22)..(23): Xaa is A or G or is absent

SEQ ID NO: 75735 - protein, 34 aa, Artificial Sequence; identical to SEQ ID NO: 18216
  GFR-binding peptide
  MOD_RES (34)..(34): Xaa is C or S

SEQ ID NO: 75736 - protein, 36 aa, Artificial Sequence; identical to SEQ ID NO: 18217
  GFR-binding peptide
  MOD_RES (1)..(3): Xaa is C or S

SEQ ID NO: 75737 - protein, 38 aa, Artificial Sequence; identical to SEQ ID NO: 18218
  GFR-binding peptide
  MOD_RES (1)..(38): Xaa is C or S

SEQ ID NO: 75738 - protein, 38 aa, Artificial Sequence; identical to SEQ ID NO: 18219
  GFR-binding peptide
  MOD_RES (1)..(35): Xaa is C or S

SEQ ID NO: 75739 - protein, 37 aa, Artificial Sequence
  GFR-binding peptide
  MOD_RES (34)..(35): Xaa is C or S
  MOD_RES (12)..(13)..(14)..(15)..(16): Xaa is A or G
  MOD_RES (17)..(18)..(19)..(20): Xaa is A or G or is absent
RDVVMGSMEGIXXXXXXXXXMIQMTINSMKTPTXXPG

SEQ ID NO: 75740 - protein, 40 aa, Artificial Sequence; identical to SEQ ID NO: 18221
  GFR-binding peptide
  MOD_RES (1)..(3)..(37): Xaa is C or S
  MOD_RES (15)..(16)..(17)..(18)..(19): Xaa is A or G
  MOD_RES (20)..(21)..(22)..(23): Xaa is A or G or is absent

SEQ ID NO: 75741 - protein, 38 aa, Artificial Sequence
  GFR-binding peptide
  MOD_RES (2)..(4)..(37)..(38): Xaa is C or S
  MOD_RES (15)..(16)..(17)..(18)..(19): Xaa is A or G
  MOD_RES (20)..(21)..(22)..(23): Xaa is A or G or is absent
LXGXEEVIMSMEGIXXXXXXXXXMIQMTINSTKVPAXX

SEQ ID NO: 75742 - protein, 34 aa, Artificial Sequence; identical to SEQ ID NO: 18224
  GFR-binding peptide
  MOD_RES (33)..(33): Xaa is C or S

SEQ ID NO: 75743 - protein, 38 aa, Artificial Sequence; identical to SEQ ID NO: 50676
  GFR-binding peptide
  MOD_RES (1)..(32)..(33): Xaa is C or S

SEQ ID NO: 75744 - protein, 42 aa, Artificial Sequence
  GFR-binding peptide
  MOD_RES (1)..(3)..(37)..(38): Xaa is C or S
  MOD_RES (15)..(16)..(17)..(18)..(19): Xaa is A or G
  MOD_RES (20)..(21)..(22)..(23): Xaa is A or G or is absent
XGXRDVVMGSMEGIXXXXXXXXXMIQMTINSMKTPTXXPGAS

SEQ ID NO: 75745 - protein, 42 aa, Artificial Sequence
  GFR-binding peptide
  MOD_RES (2)..(4)..(36)..(37): Xaa is C or S
RXGXSEVVMDSMEGLVVNNASDMIQITINSLRTPVXXTPPTS

SEQ ID NO: 75746 - protein, 40 aa, Artificial Sequence; identical to SEQ ID NO: 18228
  GFR-binding peptide
  MOD_RES (1)..(35): Xaa is C or S

SEQ ID NO: 75747 - protein, 38 aa, Artificial Sequence
  GFR-binding peptide
  MOD_RES (1)..(35)..(36): Xaa is C or S
  MOD_RES (13)..(14)..(15)..(16)..(17): Xaa is A or G
  MOD_RES (18)..(19)..(20)..(21): Xaa is A or G or is absent
XSEVVMDSMEGIXXXXXXXXXMIQITINSLRTPVXXTP

SEQ ID NO: 75748 - protein, 40 aa, Artificial Sequence; identical to SEQ ID NO: 18229
  GFR-binding peptide
  MOD_RES (36)..(36): Xaa is C or S
  MOD_RES (12)..(13)..(14)..(15)..(16): Xaa is A or G
  MOD_RES (17)..(18)..(19)..(20): Xaa is A or G or is absent

SEQ ID NO: 75749 - protein, 39 aa, Artificial Sequence; identical to SEQ ID NO: 18230
  GFR-binding peptide
  MOD_RES (33)..(33): Xaa is C or S
  MOD_RES (11)..(12)..(13)..(14)..(15): Xaa is A or G
  MOD_RES (16)..(17)..(18)..(19): Xaa is A or G or is absent

SEQ ID NO: 75750 - protein, 41 aa, Artificial Sequence; identical to SEQ ID NO: 18231
  GFR-binding peptide
  MOD_RES (1)..(3)..(40): Xaa is C or S

SEQ ID NO: 75751 - protein, 37 aa, Artificial Sequence; identical to SEQ ID NO: 18232
  GFR-binding peptide
  MOD_RES (1)..(35): Xaa is C or S

SEQ ID NO: 75752 - protein, 35 aa, Artificial Sequence; identical to SEQ ID NO: 18233
  GFR-binding peptide
  MOD_RES (1)..(35): Xaa is C or S

SEQ ID NO: 75753 - protein, 35 aa, Artificial Sequence; identical to SEQ ID NO: 18234
  GFR-binding peptide
  MOD_RES (33)..(33): Xaa is C or S

SEQ ID NO: 75754 - protein, 35 aa, Artificial Sequence; identical to SEQ ID NO: 18235
  GFR-binding peptide
  MOD_RES (33)..(33): Xaa is C or S
  MOD_RES (11)..(12)..(13)..(14)..(15): Xaa is A or G
  MOD_RES (16)..(17)..(18)..(19): Xaa is A or G or is absent

SEQ ID NO: 75755 - protein, 39 aa, Artificial Sequence; identical to SEQ ID NO: 18236
  GFR-binding peptide
  MOD_RES (2)..(36): Xaa is C or S

SEQ ID NO: 75756 - protein, 40 aa, Artificial Sequence
  GFR-binding peptide
  MOD_RES (2)..(34)..(35): Xaa is C or S
GXAEVVMDSMEGIVVNNAADMIQITINSLRAPVXXSAPAA

SEQ ID NO: 75757 - protein, 34 aa, Artificial Sequence
  GFR-binding peptide
  MOD_RES (2)..(34): Xaa is C or S
GXRDVVMGSMEGIIIQQKDNMIQMTINSMKTPTX

SEQ ID NO: 75758 - protein, 34 aa, Artificial Sequence; identical to SEQ ID NO: 18237
  GFR-binding peptide
  MOD_RES (1)..(1): Xaa is C or S
  MOD_RES (13)..(14)..(15)..(16)..(17): Xaa is A or G
  MOD_RES (18)..(19)..(20)..(21): Xaa is A or G or is absent

SEQ ID NO: 75759 - protein, 41 aa, Artificial Sequence; identical to SEQ ID NO: 18238
  GFR-binding peptide
  MOD_RES (1)..(35): Xaa is C or S
  MOD_RES (13)..(14)..(15)..(16)..(17): Xaa is A or G
  MOD_RES (18)..(19)..(20)..(21): Xaa is A or G or is absent

SEQ ID NO: 75760 - protein, 37 aa, Artificial Sequence; identical to SEQ ID NO: 18239
  GFR-binding peptide
  MOD_RES (2)..(36): Xaa is C or S
  MOD_RES (14)..(15)..(16)..(17)..(18): Xaa is A or G
  MOD_RES (19)..(20)..(21)..(22): Xaa is A or G or is absent

SEQ ID NO: 75761 - protein, 35 aa, Artificial Sequence; identical to SEQ ID NO: 50689
  GFR-binding peptide
  MOD_RES (1)..(34)..(35): Xaa is C or S
  MOD_RES (12)..(13)..(14)..(15)..(16): Xaa is A or G
  MOD_RES (17)..(18)..(19)..(20): Xaa is A or G or is absent

SEQ ID NO: 75762 - protein, 43 aa, Artificial Sequence; identical to SEQ ID NO: 18241
  GFR-binding peptide
  MOD_RES (2)..(39): Xaa is C or S
  MOD_RES (15)..(16)..(17)..(18)..(19): Xaa is A or G
  MOD_RES (20)..(21)..(22)..(23): Xaa is A or G or is absent

SEQ ID NO: 75763 - protein, 38 aa, Artificial Sequence; identical to SEQ ID NO: 18242
  GFR-binding peptide
  MOD_RES (33)..(33): Xaa is C or S

SEQ ID NO: 75764 - protein, 37 aa, Artificial Sequence
  GFR-binding peptide
  MOD_RES (2)..(4)..(35)..(36): Xaa is C or S
LXGXEEVIMSMEGLLLVRGNDMIQMTINSTKVPAXXT

SEQ ID NO: 75765 - protein, 37 aa, Artificial Sequence
  GFR-binding peptide
  MOD_RES (31)..(32): Xaa is C or S
EEVIMSMEGILLVRGNDMIQMTINSTKVPAXXTSPVR

SEQ ID NO: 75766 - protein, 38 aa, Artificial Sequence
  GFR-binding peptide
  MOD_RES (2)..(4)..(36)..(37): Xaa is C or S
RXGXSEVVMDSMEGIVVNNASDMIQITINSLRTPVXXT

SEQ ID NO: 75767 - protein, 45 aa, Artificial Sequence; identical to SEQ ID NO: 18245
  GFR-binding peptide
  MOD_RES (2)..(4)..(41): Xaa is C or S
  MOD_RES (17)..(18)..(19)..(20)..(21): Xaa is A or G
  MOD_RES (22)..(23)..(24)..(25): Xaa is A or G or is absent

SEQ ID NO: 75768 - protein, 37 aa, Artificial Sequence; identical to SEQ ID NO: 50700
  GFR-binding peptide
  MOD_RES (1)..(3)..(34)..(35): Xaa is C or S

SEQ ID NO: 75769 - protein, 42 aa, Artificial Sequence
  GFR-binding peptide
  MOD_RES (1)..(3)..(37)..(38): Xaa is C or S
  MOD_RES (15)..(16)..(17)..(18)..(19): Xaa is A or G
  MOD_RES (20)..(21)..(22)..(23): Xaa is A or G or is absent
XGXSEVVMDSMEGIXXXXXXXXXMIQITINSLRTPVXXTPPT

SEQ ID NO: 75770 - protein, 37 aa, Artificial Sequence; identical to SEQ ID NO: 18246
  GFR-binding peptide
  MOD_RES (1)..(1): Xaa is C or S
  MOD_RES (14)..(15)..(16)..(17)..(18): Xaa is A or G
  MOD_RES (19)..(20)..(21)..(22): Xaa is A or G or is absent

SEQ ID NO: 75771 - protein, 41 aa, Artificial Sequence; identical to SEQ ID NO: 18247
  GFR-binding peptide
  MOD_RES (2)..(36): Xaa is C or S
  MOD_RES (14)..(15)..(16)..(17)..(18): Xaa is A or G
  MOD_RES (19)..(20)..(21)..(22): Xaa is A or G or is absent

SEQ ID NO: 75772 - protein, 40 aa, Artificial Sequence; identical to SEQ ID NO: 48154
  GFR-binding peptide
  MOD_RES (1)..(34)..(35): Xaa is C or S
  MOD_RES (12)..(13)..(14)..(15)..(16): Xaa is A or G
  MOD_RES (17)..(18)..(19)..(20): Xaa is A or G or is absent

SEQ ID NO: 75773 - protein, 32 aa, Artificial Sequence
  GFR-binding peptide
  MOD_RES (32)..(32): Xaa is C or S
SEVVMDSMEGLVVNNASDMIQITINSLRTPVX

SEQ ID NO: 75774 - protein, 35 aa, Artificial Sequence
  GFR-binding peptide
  MOD_RES (33)..(34): Xaa is C or S
  MOD_RES (11)..(12)..(13)..(14)..(15): Xaa is A or G
  MOD_RES (16)..(17)..(18)..(19): Xaa is A or G or is absent
RVVMNSMEGLXXXXXXXXXMIQVTINSLKTPAXXP

SEQ ID NO: 75775 - protein, 42 aa, Artificial Sequence; identical to SEQ ID NO: 18248
  GFR-binding peptide
  MOD_RES (2)..(4)..(38): Xaa is C or S

SEQ ID NO: 75776 - protein, 36 aa, Artificial Sequence
  GFR-binding peptide
  MOD_RES (2)..(34)..(35): Xaa is C or S
GXSEVVMDSMEGIVVNNASDMIQITINSLRTPVXXT

SEQ ID NO: 75777 - protein, 37 aa, Artificial Sequence; identical to SEQ ID NO: 48163
  GFR-binding peptide
  MOD_RES (1)..(32)..(33): Xaa is C or S

SEQ ID NO: 75778 - protein, 37 aa, Artificial Sequence; identical to SEQ ID NO: 50709
  GFR-binding peptide
  MOD_RES (1)..(3)..(34)..(35): Xaa is C or S

SEQ ID NO: 75779 - protein, 36 aa, Artificial Sequence
  GFR-binding peptide
  MOD_RES (1)..(35)..(36): Xaa is C or S
  MOD_RES (13)..(14)..(15)..(16)..(17): Xaa is A or G
  MOD_RES (18)..(19)..(20)..(21): Xaa is A or G or is absent
XAEVVMDSMEGIXXXXXXXXXMIQITINSLRAPVXX

SEQ ID NO: 75780 - protein, 41 aa, Artificial Sequence; identical to SEQ ID NO: 18249
  GFR-binding peptide
  MOD_RES (1)..(3)..(37): Xaa is C or S
  MOD_RES (15)..(16)..(17)..(18)..(19): Xaa is A or G
  MOD_RES (20)..(21)..(22)..(23): Xaa is A or G or is absent

SEQ ID NO: 75781 - protein, 37 aa, Artificial Sequence
  GFR-binding peptide
  MOD_RES (2)..(34)..(35): Xaa is C or S
GXRDVVMGSMEGLIIQQKDNMIQMTINSMKTPTXXPG

SEQ ID NO: 75782 - protein, 39 aa, Artificial Sequence
  GFR-binding peptide
  MOD_RES (1)..(34)..(35): Xaa is C or S
  MOD_RES (12)..(13)..(14)..(15)..(16): Xaa is A or G
  MOD_RES (17)..(18)..(19)..(20): Xaa is A or G or is absent
XEEVIMSMEGIXXXXXXXXXMIQMTINSTKVPAXXTSPV

SEQ ID NO: 75783 - protein, 34 aa, Artificial Sequence
  GFR-binding peptide
  MOD_RES (31)..(32): Xaa is C or S
DVVMGSMEGLIIQQKDNMIQMTINSMKTPTXXPG

SEQ ID NO: 75784 - protein, 39 aa, Artificial Sequence; identical to SEQ ID NO: 18251
  GFR-binding peptide
  MOD_RES (37)..(37): Xaa is C or S

SEQ ID NO: 75785 - protein, 41 aa, Artificial Sequence; identical to SEQ ID NO: 18253
  GFR-binding peptide
  MOD_RES (2)..(4)..(38): Xaa is C or S
  MOD_RES (16)..(17)..(18)..(19)..(20): Xaa is A or G
  MOD_RES (21)..(22)..(23)..(24): Xaa is A or G or is absent

SEQ ID NO: 75786 - protein, 35 aa, Artificial Sequence
  GFR-binding peptide
  MOD_RES (1)..(3)..(34)..(35): Xaa is C or S
XKXSRVIMSMEGLVKPKRGVMIQITINSLAQPVXX

SEQ ID NO: 75787 - protein, 40 aa, Artificial Sequence
  GFR-binding peptide
  MOD_RES (34)..(35): Xaa is C or S
  MOD_RES (12)..(13)..(14)..(15)..(16): Xaa is A or G
  MOD_RES (17)..(18)..(19)..(20): Xaa is A or G or is absent
SRVVMNSMEGLXXXXXXXXXMIQVTINSLKTPAXXPKPVH

SEQ ID NO: 75788 - protein, 36 aa, Artificial Sequence
  GFR-binding peptide
  MOD_RES (1)..(32)..(33): Xaa is C or S
XSRVIMSMEGLVKPKRGVMIQITINSLAQPVXXPAA

SEQ ID NO: 75789 - protein, 38 aa, Artificial Sequence
  GFR-binding peptide
  MOD_RES (2)..(4)..(35)..(36): Xaa is C or S
SXKXSKVIMSMEGLIKPTKGIMIQITINSLDQSVXXPS

SEQ ID NO: 75790 - protein, 38 aa, Artificial Sequence
  GFR-binding peptide
  MOD_RES (2)..(34)..(35): Xaa is C or S
GXRDVVMGSMEGLIIQQKDNMIQMTINSMKTPTXXPGA

SEQ ID NO: 75791 - protein, 38 aa, Artificial Sequence; identical to SEQ ID NO: 50725
  GFR-binding peptide
  MOD_RES (1)..(3)..(36)..(37): Xaa is C or S
  MOD_RES (14)..(15)..(16)..(17)..(18): Xaa is A or G
  MOD_RES (19)..(20)..(21)..(22): Xaa is A or G or is absent

SEQ ID NO: 75792 - protein, 39 aa, Artificial Sequence
  GFR-binding peptide
  MOD_RES (1)..(33)..(34): Xaa is C or S
XSRVVMNSMEGLIVNSSDDMIQVTINSLKTPAXXPKPVH

SEQ ID NO: 75793 - protein, 34 aa, Artificial Sequence; identical to SEQ ID NO: 18257
  GFR-binding peptide

SEQ ID NO: 75794 - protein, 40 aa, Artificial Sequence; identical to SEQ ID NO: 18260
  GFR-binding peptide
  MOD_RES (37)..(37): Xaa is C or S

SEQ ID NO: 75795 - protein, 42 aa, Artificial Sequence; identical to SEQ ID NO: 18261
  GFR-binding peptide
  MOD_RES (2)..(4)..(41): Xaa is C or S

SEQ ID NO: 75796 - protein, 35 aa, Artificial Sequence; identical to SEQ ID NO: 18262
  GFR-binding peptide
  MOD_RES (1)..(1): Xaa is C or S

SEQ ID NO: 75797 - protein, 36 aa, Artificial Sequence; identical to SEQ ID NO: 50733
  GFR-binding peptide
  MOD_RES (1)..(32)..(33): Xaa is C or S

SEQ ID NO: 75798 - protein, 41 aa, Artificial Sequence
  GFR-binding peptide
  MOD_RES (1)..(35)..(36): Xaa is C or S
  MOD_RES (13)..(14)..(15)..(16)..(17): Xaa is A or G
  MOD_RES (18)..(19)..(20)..(21): Xaa is A or G or is absent
XRDVVMGSMEGIXXXXXXXXXMIQMTINSMKTPTXXPGASG

SEQ ID NO: 75799 - protein, 34 aa, Artificial Sequence
  GFR-binding peptide
  MOD_RES (1)..(32)..(33): Xaa is C or S
XEEVIMSMEGLLLVRGNDMIQMTINSTKVPAXXT

SEQ ID NO: 75800 - protein, 33 aa, Artificial Sequence
  GFR-binding peptide
  MOD_RES (31)..(32): Xaa is C or S
EEVIMSMEGLLLVRGNDMIQMTINSTKVPAXXT

SEQ ID NO: 75801 - protein, 36 aa, Artificial Sequence
  GFR-binding peptide
  MOD_RES (1)..(32)..(33): Xaa is C or S
XSKVIMSMEGLIKPTKGIMIQITINSLDQSVXXPSA

SEQ ID NO: 75802 - protein, 33 aa, Artificial Sequence
  GFR-binding peptide
  MOD_RES (12)..(13)..(14)..(15)..(16): Xaa is A or G
  MOD_RES (17)..(18)..(19)..(20): Xaa is A or G or is absent
AEVVMDSMEGIXXXXXXXXXMIQITINSLRAPV

SEQ ID NO: 75803 - protein, 44 aa, Artificial Sequence; identical to SEQ ID NO: 18267
  GFR-binding peptide
  MOD_RES (2)..(4)..(41): Xaa is C or S
  MOD_RES (17)..(18)..(19)..(20)..(21): Xaa is A or G
  MOD_RES (22)..(23)..(24)..(25): Xaa is A or G or is absent

SEQ ID NO: 75804 - protein, 39 aa, Artificial Sequence
  GFR-binding peptide
  MOD_RES (1)..(35)..(36): Xaa is C or S
  MOD_RES (13)..(14)..(15)..(16)..(17): Xaa is A or G
  MOD_RES (18)..(19)..(20)..(21): Xaa is A or G or is absent
XSRVVMNSMEGLXXXXXXXXXMIQVTINSLKTPAXXPKP

SEQ ID NO: 75805 - protein, 38 aa, Artificial Sequence; identical to SEQ ID NO: 50744
  GFR-binding peptide
  MOD_RES (1)..(3)..(34)..(35): Xaa is C or S

SEQ ID NO: 75806 - protein, 37 aa, Artificial Sequence; identical to SEQ ID NO: 18272
  GFR-binding peptide
  MOD_RES (2)..(4): Xaa is C or S
  MOD_RES (16)..(17)..(18)..(19)..(20): Xaa is A or G
  MOD_RES (21)..(22)..(23)..(24): Xaa is A or G or is absent

SEQ ID NO: 75807 - protein, 41 aa, Artificial Sequence; identical to SEQ ID NO: 18274
  GFR-binding peptide
  MOD_RES (2)..(39): Xaa is C or S
  MOD_RES (15)..(16)..(17)..(18)..(19): Xaa is A or G
  MOD_RES (20)..(21)..(22)..(23): Xaa is A or G or is absent

SEQ ID NO: 75808 - protein, 33 aa, Artificial Sequence
  GFR-binding peptide
  MOD_RES (1)..(1): Xaa is C or S
  MOD_RES (12)..(13)..(14)..(15)..(16): Xaa is A or G
  MOD_RES (17)..(18)..(19)..(20): Xaa is A or G or is absent
XEEVIMSMEGLXXXXXXXXXMIQMTINSTKVPA

SEQ ID NO: 75809 - protein, 41 aa, Artificial Sequence; identical to SEQ ID NO: 50751
  GFR-binding peptide
  MOD_RES (2)..(4)..(38)..(39): Xaa is C or S
  MOD_RES (16)..(17)..(18)..(19)..(20): Xaa is A or G
  MOD_RES (21)..(22)..(23)..(24): Xaa is A or G or is absent

SEQ ID NO: 75810 - protein, 38 aa, Artificial Sequence
  GFR-binding peptide
  MOD_RES (2)..(35)..(36): Xaa is C or S
  MOD_RES (13)..(14)..(15)..(16)..(17): Xaa is A or G
  MOD_RES (18)..(19)..(20)..(21): Xaa is A or G or is absent
GXEEVIMSMEGIXXXXXXXXXMIQMTINSTKVPAXXTS

SEQ ID NO: 75811 - protein, 40 aa, Artificial Sequence
  GFR-binding peptide
  MOD_RES (2)..(4)..(36)..(37): Xaa is C or S
HXGXSRVVMNSMEGLIVNSSDDMIQVTINSLKTPAXXPKP

SEQ ID NO: 75812 - protein, 36 aa, Artificial Sequence
  GFR-binding peptide
  MOD_RES (2)..(34)..(35): Xaa is C or S
GXSEVVMDSMEGLVVNNASDMIQITINSLRTPVXXT

SEQ ID NO: 75813 - protein, 38 aa, Artificial Sequence; identical to SEQ ID NO: 18276
  GFR-binding peptide
  MOD_RES (35)..(35): Xaa is C or S
  MOD_RES (11)..(12)..(13)..(14)..(15): Xaa is A or G
  MOD_RES (16)..(17)..(18)..(19): Xaa is A or G or is absent

SEQ ID NO: 75814 - protein, 37 aa, Artificial Sequence; identical to SEQ ID NO: 18279
  GFR-binding peptide
  MOD_RES (2)..(2): Xaa is C or S
  MOD_RES (15)..(16)..(17)..(18)..(19): Xaa is A or G
  MOD_RES (20)..(21)..(22)..(23): Xaa is A or G or is absent

SEQ ID NO: 75815 - protein, 32 aa, Artificial Sequence
  GFR-binding peptide
  MOD_RES (31)..(32): Xaa is C or S
EVVMDSMEGIVVNNAADMIQITINSLRAPVXX

SEQ ID NO: 75816 - protein, 32 aa, Artificial Sequence
  GFR-binding peptide
  MOD_RES (11)..(12)..(13)..(14)..(15): Xaa is A or G
  MOD_RES (16)..(17)..(18)..(19): Xaa is A or G or is absent
SKVIMSMEGLXXXXXXXXXMIQITINSLDQSV

SEQ ID NO: 75817 - protein, 37 aa, Artificial Sequence
  GFR-binding peptide
  MOD_RES (33)..(34): Xaa is C or S
  MOD_RES (11)..(12)..(13)..(14)..(15): Xaa is A or G
  MOD_RES (16)..(17)..(18)..(19): Xaa is A or G or is absent
DVVMGSMEGLXXXXXXXXXMIQMTINSMKTPTXXPGA

SEQ ID NO: 75818 - protein, 43 aa, Artificial Sequence
  GFR-binding peptide
  MOD_RES (2)..(4)..(37)..(38): Xaa is C or S
  MOD_RES (15)..(16)..(17)..(18)..(19): Xaa is A or G
  MOD_RES (20)..(21)..(22)..(23): Xaa is A or G or is absent
SXKXSKVIMSMEGLXXXXXXXXXMIQITINSLDQSVXXPSASA

SEQ ID NO: 75819 - protein, 36 aa, Artificial Sequence; identical to SEQ ID NO: 48215
  GFR-binding peptide
  MOD_RES (1)..(3): Xaa is C or S
  MOD_RES (15)..(16)..(17)..(18)..(19): Xaa is A or G
  MOD_RES (20)..(21)..(22)..(23): Xaa is A or G or is absent

SEQ ID NO: 75820 - protein, 38 aa, Artificial Sequence; identical to SEQ ID NO: 18283
  GFR-binding peptide
  MOD_RES (34)..(34): Xaa is C or S
  MOD_RES (12)..(13)..(14)..(15)..(16): Xaa is A or G
  MOD_RES (17)..(18)..(19)..(20): Xaa is A or G or is absent

SEQ ID NO: 75821 - protein, 36 aa, Artificial Sequence
  GFR-binding peptide
  MOD_RES (2)..(4)..(36): Xaa is C or S
SXGXRDVVMGSMEGIIIQQKDNMIQMTINSMKTPTX

SEQ ID NO: 75822 - protein, 36 aa, Artificial Sequence; identical to SEQ ID NO: 18284
  GFR-binding peptide
  MOD_RES (2)..(2): Xaa is C or S

SEQ ID NO: 75823 - protein, 41 aa, Artificial Sequence; identical to SEQ ID NO: 18285
  GFR-binding peptide
  MOD_RES (37)..(37): Xaa is C or S
  MOD_RES (13)..(14)..(15)..(16)..(17): Xaa is A or G
  MOD_RES (18)..(19)..(20)..(21): Xaa is A or G or is absent

SEQ ID NO: 75824 - protein, 38 aa, Artificial Sequence
  GFR-binding peptide
  MOD_RES (2)..(35)..(36): Xaa is C or S
  MOD_RES (13)..(14)..(15)..(16)..(17): Xaa is A or G
  MOD_RES (18)..(19)..(20)..(21): Xaa is A or G or is absent
GXEEVIMSMEGLXXXXXXXXXMIQMTINSTKVPAXXTS

SEQ ID NO: 75825 - protein, 34 aa, Artificial Sequence
  GFR-binding peptide
  MOD_RES (31)..(32): Xaa is C or S
SKVVMSMEGLVKPTRGVMIQITINSLDQPVXXPS

SEQ ID NO: 75826 - protein, 34 aa, Artificial Sequence
  GFR-binding peptide
  MOD_RES (1)..(1): Xaa is C or S
  MOD_RES (13)..(14)..(15)..(16)..(17): Xaa is A or G
  MOD_RES (18)..(19)..(20)..(21): Xaa is A or G or is absent
XAEVVMDSMEGLXXXXXXXXXMIQITINSLRAPV

SEQ ID NO: 75827 - protein, 39 aa, Artificial Sequence; identical to SEQ ID NO: 18286
  GFR-binding peptide
  MOD_RES (37)..(37): Xaa is C or S
  MOD_RES (13)..(14)..(15)..(16)..(17): Xaa is A or G
  MOD_RES (18)..(19)..(20)..(21): Xaa is A or G or is absent

SEQ ID NO: 75828 - protein, 41 aa, Artificial Sequence; identical to SEQ ID NO: 18287
  GFR-binding peptide
  MOD_RES (2)..(4)..(38): Xaa is C or S

SEQ ID NO: 75829 - protein, 38 aa, Artificial Sequence; identical to SEQ ID NO: 18288
  GFR-binding peptide
  MOD_RES (36)..(36): Xaa is C or S
  MOD_RES (12)..(13)..(14)..(15)..(16): Xaa is A or G
  MOD_RES (17)..(18)..(19)..(20): Xaa is A or G or is absent

SEQ ID NO: 75830 - protein, 36 aa, Artificial Sequence; identical to SEQ ID NO: 48223
  GFR-binding peptide
  MOD_RES (2)..(33)..(34): Xaa is C or S

SEQ ID NO: 75831 - protein, 38 aa, Artificial Sequence; identical to SEQ ID NO: 18289
  GFR-binding peptide
  MOD_RES (37)..(37): Xaa is C or S
  MOD_RES (13)..(14)..(15)..(16)..(17): Xaa is A or G
  MOD_RES (18)..(19)..(20)..(21): Xaa is A or G or is absent

SEQ ID NO: 75832 - protein, 38 aa, Artificial Sequence
  GFR-binding peptide
  MOD_RES (32)..(33): Xaa is C or S
RDVVMGSMEGLIIQQKDNMIQMTINSMKTPTXXPGASG

SEQ ID NO: 75833 - protein, 41 aa, Artificial Sequence; identical to SEQ ID NO: 18291
  GFR-binding peptide
  MOD_RES (37)..(37): Xaa is C or S

SEQ ID NO: 75834 - protein, 35 aa, Artificial Sequence; identical to SEQ ID NO: 18293
  GFR-binding peptide
  MOD_RES (34)..(34): Xaa is C or S
  MOD_RES (12)..(13)..(14)..(15)..(16): Xaa is A or G
  MOD_RES (17)..(18)..(19)..(20): Xaa is A or G or is absent

SEQ ID NO: 75835 - protein, 30 aa, Artificial Sequence
  GFR-binding peptide
SKVIMSMEGLIKPTKGIMIQITINSLDQSV

SEQ ID NO: 75836 - protein, 36 aa, Artificial Sequence; identical to SEQ ID NO: 18296
  GFR-binding peptide
  MOD_RES (2)..(2): Xaa is C or S
  MOD_RES (15)..(16)..(17)..(18)..(19): Xaa is A or G
  MOD_RES (20)..(21)..(22)..(23): Xaa is A or G or is absent

SEQ ID NO: 75837 - protein, 39 aa, Artificial Sequence
  GFR-binding peptide
  MOD_RES (1)..(3)..(37)..(38): Xaa is C or S
  MOD_RES (15)..(16)..(17)..(18)..(19): Xaa is A or G
  MOD_RES (20)..(21)..(22)..(23): Xaa is A or G or is absent
XGXSEVVMDSMEGIXXXXXXXXXMIQITINSLRTPVXXT

SEQ ID NO: 75838 - protein, 34 aa, Artificial Sequence
  GFR-binding peptide
  MOD_RES (2)..(34): Xaa is C or S
GXSEVVMDSMEGLVVNNASDMIQITINSLRTPVX

SEQ ID NO: 75839 - protein, 39 aa, Artificial Sequence
  GFR-binding peptide
  MOD_RES (2)..(35)..(36): Xaa is C or S
  MOD_RES (13)..(14)..(15)..(16)..(17): Xaa is A or G
  MOD_RES (18)..(19)..(20)..(21): Xaa is A or G or is absent
KXSRVIMSMEGLXXXXXXXXXMIQITINSLAQPVXXPAA

SEQ ID NO: 75840 - protein, 44 aa, Artificial Sequence; identical to SEQ ID NO: 18298
  GFR-binding peptide
  MOD_RES (2)..(4)..(38): Xaa is C or S
  MOD_RES (16)..(17)..(18)..(19)..(20): Xaa is A or G
  MOD_RES (21)..(22)..(23)..(24): Xaa is A or G or is absent

SEQ ID NO: 75841 - protein, 39 aa, Artificial Sequence; identical to SEQ ID NO: 50780
  GFR-binding peptide
  MOD_RES (2)..(35)..(36): Xaa is C or S
  MOD_RES (13)..(14)..(15)..(16)..(17): Xaa is A or G
  MOD_RES (18)..(19)..(20)..(21): Xaa is A or G or is absent

SEQ ID NO: 75842 - protein, 35 aa, Artificial Sequence
  GFR-binding peptide
  MOD_RES (31)..(32): Xaa is C or S
SRVIMSMEGLVKPKRGVMIQITINSLAQPVXXPAA

SEQ ID NO: 75843 - protein, 42 aa, Artificial Sequence; identical to SEQ ID NO: 18300
  GFR-binding peptide
  MOD_RES (1)..(3)..(40): Xaa is C or S

SEQ ID NO: 75844 - protein, 38 aa, Artificial Sequence
  GFR-binding peptide
  MOD_RES (32)..(33): Xaa is C or S
SRVVMNSMEGIIVNSSDDMIQVTINSLKTPAXXPKPVH

SEQ ID NO: 75845 - protein, 32 aa, Artificial Sequence; identical to SEQ ID NO: 48247
  GFR-binding peptide
  MOD_RES (11)..(12)..(13)..(14)..(15): Xaa is A or G
  MOD_RES (16)..(17)..(18)..(19): Xaa is A or G or is absent

SEQ ID NO: 75846 - protein, 42 aa, Artificial Sequence
  GFR-binding peptide
  MOD_RES (1)..(3)..(36)..(37): Xaa is C or S
  MOD_RES (14)..(15)..(16)..(17)..(18): Xaa is A or G
  MOD_RES (19)..(20)..(21)..(22): Xaa is A or G or is absent
XGXEEVIMSMEGLXXXXXXXXXMIQMTINSTKVPAXXTSPVR

SEQ ID NO: 75847 - protein, 40 aa, Artificial Sequence
  GFR-binding peptide
  MOD_RES (1)..(34)..(35): Xaa is C or S
  MOD_RES (12)..(13)..(14)..(15)..(16): Xaa is A or G
  MOD_RES (17)..(18)..(19)..(20): Xaa is A or G or is absent
XSKVVMSMEGLXXXXXXXXXMIQITINSLDQPVXXPSASA

SEQ ID NO: 75848 - protein, 39 aa, Artificial Sequence
  GFR-binding peptide
  MOD_RES (2)..(35)..(36): Xaa is C or S
  MOD_RES (13)..(14)..(15)..(16)..(17): Xaa is A or G
  MOD_RES (18)..(19)..(20)..(21): Xaa is A or G or is absent
KXSKVVMSMEGLXXXXXXXXXMIQITINSLDQPVXXPSA

SEQ ID NO: 75849 - protein, 37 aa, Artificial Sequence
  GFR-binding peptide
  MOD_RES (1)..(35)..(36): Xaa is C or S
  MOD_RES (13)..(14)..(15)..(16)..(17): Xaa is A or G
  MOD_RES (18)..(19)..(20)..(21): Xaa is A or G or is absent
XSEVVMDSMEGIXXXXXXXXXMIQITINSLRTPVXXT

SEQ ID NO: 75850 - protein, 40 aa, Artificial Sequence; identical to SEQ ID NO: 48252
  GFR-binding peptide
  MOD_RES (1)..(34)..(35): Xaa is C or S
  MOD_RES (12)..(13)..(14)..(15)..(16): Xaa is A or G
  MOD_RES (17)..(18)..(19)..(20): Xaa is A or G or is absent

SEQ ID NO: 75851 - protein, 39 aa, Artificial Sequence; identical to SEQ ID NO: 48255
  GFR-binding peptide
  MOD_RES (2)..(35)..(36): Xaa is C or S
  MOD_RES (13)..(14)..(15)..(16)..(17): Xaa is A or G
  MOD_RES (18)..(19)..(20)..(21): Xaa is A or G or is absent

SEQ ID NO: 75852 - protein, 35 aa, Artificial Sequence
  GFR-binding peptide
  MOD_RES (1)..(3)..(35): Xaa is C or S
XGXAEVVMDSMEGIVVNNAADMIQITINSLRAPVX

SEQ ID NO: 75853 - protein, 41 aa, Artificial Sequence
  GFR-binding peptide
  MOD_RES (2)..(36)..(37): Xaa is C or S
  MOD_RES (14)..(15)..(16)..(17)..(18): Xaa is A or G
  MOD_RES (19)..(20)..(21)..(22): Xaa is A or G or is absent
GXSEVVMDSMEGIXXXXXXXXXMIQITINSLRTPVXXTPPT

SEQ ID NO: 75854 - protein, 34 aa, Artificial Sequence
  GFR-binding peptide
  MOD_RES (33)..(34): Xaa is C or S
  MOD_RES (11)..(12)..(13)..(14)..(15): Xaa is A or G
  MOD_RES (16)..(17)..(18)..(19): Xaa is A or G or is absent
EVVMDSMEGLXXXXXXXXXMIQITINSLRAPVXX

SEQ ID NO: 75855 - protein, 37 aa, Artificial Sequence
  GFR-binding peptide
  MOD_RES (33)..(34): Xaa is C or S
  MOD_RES (11)..(12)..(13)..(14)..(15): Xaa is A or G
  MOD_RES (16)..(17)..(18)..(19): Xaa is A or G or is absent
SKVVMSMEGLXXXXXXXXXMIQITINSLDQPVXXPSA

SEQ ID NO: 75856 - protein, 40 aa, Artificial Sequence; identical to SEQ ID NO: 18305
  GFR-binding peptide
  MOD_RES (2)..(36): Xaa is C or S
  MOD_RES (14)..(15)..(16)..(17)..(18): Xaa is A or G
  MOD_RES (19)..(20)..(21)..(22): Xaa is A or G or is absent

SEQ ID NO: 75857 - protein, 33 aa, Artificial Sequence
  GFR-binding peptide
  MOD_RES (1)..(1): Xaa is C or S
  MOD_RES (12)..(13)..(14)..(15)..(16): Xaa is A or G
  MOD_RES (17)..(18)..(19)..(20): Xaa is A or G or is absent
XSRVIMSMEGLXXXXXXXXXMIQITINSLAQPV

SEQ ID NO: 75858 - protein, 36 aa, Artificial Sequence; identical to SEQ ID NO: 18306
  GFR-binding peptide
  MOD_RES (35)..(35): Xaa is C or S

SEQ ID NO: 75859 - protein, 36 aa, Artificial Sequence
  GFR-binding peptide
  MOD_RES (31)..(32): Xaa is C or S
EVVMDSMEGLVVNNAADMIQITINSLRAPVXXSAPA

SEQ ID NO: 75860 - protein, 42 aa, Artificial Sequence
  GFR-binding peptide
  MOD_RES (2)..(4)..(36)..(37): Xaa is C or S
RXGXAEVVMDSMEGLVVNNAADMIQITINSLRAPVXXSAPAA

SEQ ID NO: 75861 - protein, 34 aa, Artificial Sequence
  GFR-binding peptide
  MOD_RES (1)..(1): Xaa is C or S
  MOD_RES (13)..(14)..(15)..(16)..(17): Xaa is A or G
  MOD_RES (18)..(19)..(20)..(21): Xaa is A or G or is absent
XAEVVMDSMEGIXXXXXXXXXMIQITINSLRAPV

SEQ ID NO: 75862 - protein, 37 aa, Artificial Sequence; identical to SEQ ID NO: 48270
  GFR-binding peptide
  MOD_RES (33)..(34): Xaa is C or S
  MOD_RES (11)..(12)..(13)..(14)..(15): Xaa is A or G
  MOD_RES (16)..(17)..(18)..(19): Xaa is A or G or is absent

SEQ ID NO: 75863 - protein, 41 aa, Artificial Sequence
  GFR-binding peptide
  MOD_RES (1)..(3)..(35)..(36): Xaa is C or S
XGXRDVVMGSMEGIIIQQKDNMIQMTINSMKTPTXXPGASG

SEQ ID NO: 75864 - protein, 38 aa, Artificial Sequence; identical to SEQ ID NO: 18315
  GFR-binding peptide
  MOD_RES (2)..(4)..(38): Xaa is C or S

SEQ ID NO: 75865 - protein, 38 aa, Artificial Sequence
  GFR-binding peptide
  MOD_RES (2)..(36)..(37): Xaa is C or S
  MOD_RES (14)..(15)..(16)..(17)..(18): Xaa is A or G
  MOD_RES (19)..(20)..(21)..(22): Xaa is A or G or is absent
GXSEVVMDSMEGIXXXXXXXXXMIQITINSLRTPVXXT

SEQ ID NO: 75866 - protein, 40 aa, Artificial Sequence; identical to SEQ ID NO: 18318
  GFR-binding peptide
  MOD_RES (2)..(39): Xaa is C or S
  MOD_RES (15)..(16)..(17)..(18)..(19): Xaa is A or G
  MOD_RES (20)..(21)..(22)..(23): Xaa is A or G or is absent

SEQ ID NO: 75867 - protein, 42 aa, Artificial Sequence
  GFR-binding peptide
  MOD_RES (1)..(3)..(36)..(37): Xaa is C or S
  MOD_RES (14)..(15)..(16)..(17)..(18): Xaa is A or G
  MOD_RES (19)..(20)..(21)..(22): Xaa is A or G or is absent
XKXSKVVMSMEGLXXXXXXXXXMIQITINSLDQPVXXPSASA

SEQ ID NO: 75868 - protein, 41 aa, Artificial Sequence
  GFR-binding peptide
  MOD_RES (2)..(4)..(38)..(39): Xaa is C or S
  MOD_RES (16)..(17)..(18)..(19)..(20): Xaa is A or G
  MOD_RES (21)..(22)..(23)..(24): Xaa is A or G or is absent
HXGXSRVVMNSMEGLXXXXXXXXXMIQVTINSLKTPAXXPK

SEQ ID NO: 75869 - protein, 37 aa, Artificial Sequence
  GFR-binding peptide
  MOD_RES (1)..(35)..(36): Xaa is C or S
  MOD_RES (13)..(14)..(15)..(16)..(17): Xaa is A or G
  MOD_RES (18)..(19)..(20)..(21): Xaa is A or G or is absent
XSEVVMDSMEGLXXXXXXXXXMIQITINSLRTPVXXT

SEQ ID NO: 75870 - protein, 42 aa, Artificial Sequence; identical to SEQ ID NO: 18322
  GFR-binding peptide
  MOD_RES (2)..(4)..(38): Xaa is C or S

SEQ ID NO: 75871 - protein, 39 aa, Artificial Sequence; identical to SEQ ID NO: 18323
  GFR-binding peptide
  MOD_RES (2)..(36): Xaa is C or S

SEQ ID NO: 75872 - protein, 43 aa, Artificial Sequence; identical to SEQ ID NO: 18324
  GFR-binding peptide
  MOD_RES (2)..(4)..(41): Xaa is C or S

SEQ ID NO: 75873 - protein, 36 aa, Artificial Sequence; identical to SEQ ID NO: 18325
  GFR-binding peptide
  MOD_RES (1)..(35): Xaa is C or S

SEQ ID NO: 75874 - protein, 34 aa, Artificial Sequence
  GFR-binding peptide
  MOD_RES (1)..(1): Xaa is C or S
  MOD_RES (13)..(14)..(15)..(16)..(17): Xaa is A or G
  MOD_RES (18)..(19)..(20)..(21): Xaa is A or G or is absent
XSEVVMDSMEGLXXXXXXXXXMIQITINSLRTPV

SEQ ID NO: 75875 - protein, 42 aa, Artificial Sequence; identical to SEQ ID NO: 18326
  GFR-binding peptide
  MOD_RES (2)..(4)..(38): Xaa is C or S

SEQ ID NO: 75876 - protein, 39 aa, Artificial Sequence
  GFR-binding peptide
  MOD_RES (2)..(33)..(34): Xaa is C or S
KXSKVVMSMEGLVKPTRGVMIQITINSLDQPVXXPSASA

SEQ ID NO: 75877 - protein, 41 aa, Artificial Sequence; identical to SEQ ID NO: 18327
  GFR-binding peptide
  MOD_RES (1)..(38): Xaa is C or S
  MOD_RES (14)..(15)..(16)..(17)..(18): Xaa is A or G
  MOD_RES (19)..(20)..(21)..(22): Xaa is A or G or is absent

SEQ ID NO: 75878 - protein, 37 aa, Artificial Sequence; identical to SEQ ID NO: 50829
  GFR-binding peptide
  MOD_RES (34)..(35): Xaa is C or S
  MOD_RES (12)..(13)..(14)..(15)..(16): Xaa is A or G
  MOD_RES (17)..(18)..(19)..(20): Xaa is A or G or is absent

SEQ ID NO: 75879 - protein, 39 aa, Artificial Sequence; identical to SEQ ID NO: 50830
  GFR-binding peptide
  MOD_RES (1)..(3)..(36)..(37): Xaa is C or S
  MOD_RES (14)..(15)..(16)..(17)..(18): Xaa is A or G
  MOD_RES (19)..(20)..(21)..(22): Xaa is A or G or is absent

SEQ ID NO: 75880 - protein, 37 aa, Artificial Sequence
  GFR-binding peptide
  MOD_RES (2)..(36)..(37): Xaa is C or S
  MOD_RES (14)..(15)..(16)..(17)..(18): Xaa is A or G
  MOD_RES (19)..(20)..(21)..(22): Xaa is A or G or is absent
GXSEVVMDSMEGIXXXXXXXXXMIQITINSLRTPVXX

SEQ ID NO: 75881 - protein, 34 aa, Artificial Sequence; identical to SEQ ID NO: 18329
  GFR-binding peptide
  MOD_RES (33)..(33): Xaa is C or S
  MOD_RES (11)..(12)..(13)..(14)..(15): Xaa is A or G
  MOD_RES (16)..(17)..(18)..(19): Xaa is A or G or is absent

SEQ ID NO: 75882 - protein, 40 aa, Artificial Sequence; identical to SEQ ID NO: 18330
  GFR-binding peptide
  MOD_RES (2)..(36): Xaa is C or S
  MOD_RES (14)..(15)..(16)..(17)..(18): Xaa is A or G
  MOD_RES (19)..(20)..(21)..(22): Xaa is A or G or is absent

SEQ ID NO: 75883 - protein, 42 aa, Artificial Sequence
  GFR-binding peptide
  MOD_RES (2)..(4)..(37)..(38): Xaa is C or S
  MOD_RES (15)..(16)..(17)..(18)..(19): Xaa is A or G
  MOD_RES (20)..(21)..(22)..(23): Xaa is A or G or is absent
LXGXEEVIMSMEGLXXXXXXXXXMIQMTINSTKVPAXXTSPV

SEQ ID NO: 75884 - protein, 38 aa, Artificial Sequence
  GFR-binding peptide
  MOD_RES (1)..(32)..(33): Xaa is C or S
XEEVIMSMEGILLVRGNDMIQMTINSTKVPAXXTSPVR

SEQ ID NO: 75885 - protein, 30 aa, Artificial Sequence
  GFR-binding peptide
SRVIMSMEGLVKPKRGVMIQITINSLAQPV

SEQ ID NO: 75886 - protein, 35 aa, Artificial Sequence
  GFR-binding peptide
  MOD_RES (1)..(34)..(35): Xaa is C or S
  MOD_RES (12)..(13)..(14)..(15)..(16): Xaa is A or G
  MOD_RES (17)..(18)..(19)..(20): Xaa is A or G or is absent
XSKVVMSMEGLXXXXXXXXXMIQITINSLDQPVXX

SEQ ID NO: 75887 - protein, 31 aa, Artificial Sequence
  GFR-binding peptide
  MOD_RES (1)..(1): Xaa is C or S
XSKVIMSMEGLIKPTKGIMIQITINSLDQSV

SEQ ID NO: 75888 - protein, 37 aa, Artificial Sequence; identical to SEQ ID NO: 18333
  GFR-binding peptide
  MOD_RES (2)..(2): Xaa is C or S

SEQ ID NO: 75889 - protein, 39 aa, Artificial Sequence
  GFR-binding peptide
  MOD_RES (1)..(35)..(36): Xaa is C or S
  MOD_RES (13)..(14)..(15)..(16)..(17): Xaa is A or G
  MOD_RES (18)..(19)..(20)..(21): Xaa is A or G or is absent
XSEVVMDSMEGIXXXXXXXXXMIQITINSLRTPVXXTPP

SEQ ID NO: 75890 - protein, 39 aa, Artificial Sequence
  GFR-binding peptide
  MOD_RES (1)..(3)..(37)..(38): Xaa is C or S
  MOD_RES (15)..(16)..(17)..(18)..(19): Xaa is A or G
  MOD_RES (20)..(21)..(22)..(23): Xaa is A or G or is absent
XGXAEVVMDSMEGLXXXXXXXXXMIQITINSLRAPVXXS

SEQ ID NO: 75891 - protein, 37 aa, Artificial Sequence
  GFR-binding peptide
  MOD_RES (34)..(35): Xaa is C or S
  MOD_RES (12)..(13)..(14)..(15)..(16): Xaa is A or G
  MOD_RES (17)..(18)..(19)..(20): Xaa is A or G or is absent
SEVVMDSMEGLXXXXXXXXXMIQITINSLRTPVXXTP

SEQ ID NO: 75892 - protein, 32 aa, Artificial Sequence
  GFR-binding peptide
  MOD_RES (31)..(32): Xaa is C or S
EVVMDSMEGLVVNNASDMIQITINSLRTPVXX

SEQ ID NO: 75893 - protein, 34 aa, Artificial Sequence
  GFR-binding peptide
  MOD_RES (1)..(34): Xaa is C or S
  MOD_RES (12)..(13)..(14)..(15)..(16): Xaa is A or G
  MOD_RES (17)..(18)..(19)..(20): Xaa is A or G or is absent
XEEVIMSMEGIXXXXXXXXXMIQMTINSTKVPAX

SEQ ID NO: 75894 - protein, 38 aa, Artificial Sequence
  GFR-binding peptide
  MOD_RES (2)..(34)..(35): Xaa is C or S
GXSRVVMNSMEGLIVNSSDDMIQVTINSLKTPAXXPKP

SEQ ID NO: 75895 - protein, 38 aa, Artificial Sequence; identical to SEQ ID NO: 18338
  GFR-binding peptide
  MOD_RES (2)..(36): Xaa is C or S
  MOD_RES (14)..(15)..(16)..(17)..(18): Xaa is A or G
  MOD_RES (19)..(20)..(21)..(22): Xaa is A or G or is absent

SEQ ID NO: 75896 - protein, 39 aa, Artificial Sequence; identical to SEQ ID NO: 18340
  GFR-binding peptide
  MOD_RES (2)..(39): Xaa is C or S

SEQ ID NO: 75897 - protein, 36 aa, Artificial Sequence
  GFR-binding peptide
  MOD_RES (2)..(36): Xaa is C or S
  MOD_RES (14)..(15)..(16)..(17)..(18): Xaa is A or G
  MOD_RES (19)..(20)..(21)..(22): Xaa is A or G or is absent
GXAEVVMDSMEGLXXXXXXXXXMIQITINSLRAPVX

SEQ ID NO: 75898 - protein, 38 aa, Artificial Sequence; identical to SEQ ID NO: 18341
  GFR-binding peptide
  MOD_RES (35)..(35): Xaa is C or S
  MOD_RES (11)..(12)..(13)..(14)..(15): Xaa is A or G
  MOD_RES (16)..(17)..(18)..(19): Xaa is A or G or is absent

SEQ ID NO: 75899 - protein, 34 aa, Artificial Sequence; identical to SEQ ID NO: 50853
  GFR-binding peptide
  MOD_RES (1)..(32)..(33): Xaa is C or S

SEQ ID NO: 75900 - protein, 34 aa, Artificial Sequence
  GFR-binding peptide
  MOD_RES (1)..(3): Xaa is C or S
XGXSRVVMNSMEGLIVNSSDDMIQVTINSLKTPA

SEQ ID NO: 75901 - protein, 34 aa, Artificial Sequence; identical to SEQ ID NO: 18344
  GFR-binding peptide
  MOD_RES (13)..(14)..(15)..(16)..(17): Xaa is A or G
  MOD_RES (18)..(19)..(20)..(21): Xaa is A or G or is absent

SEQ ID NO: 75902 - protein, 38 aa, Artificial Sequence
  GFR-binding peptide
  MOD_RES (2)..(4)..(35)..(36): Xaa is C or S
SXKXSRVIMSMEGLVKPKRGVMIQITINSLAQPVXXPA

SEQ ID NO: 75903 - protein, 34 aa, Artificial Sequence
  GFR-binding peptide
  MOD_RES (1)..(1): Xaa is C or S
  MOD_RES (13)..(14)..(15)..(16)..(17): Xaa is A or G
  MOD_RES (18)..(19)..(20)..(21): Xaa is A or G or is absent
XRDVVMGSMEGLXXXXXXXXXMIQMTINSMKTPT

SEQ ID NO: 75904 - protein, 41 aa, Artificial Sequence; identical to SEQ ID NO: 18352
  GFR-binding peptide
  MOD_RES (1)..(38): Xaa is C or S
  MOD_RES (14)..(15)..(16)..(17)..(18): Xaa is A or G
  MOD_RES (19)..(20)..(21)..(22): Xaa is A or G or is absent

SEQ ID NO: 75905 - protein, 37 aa, Artificial Sequence; identical to SEQ ID NO: 18353
  GFR-binding peptide
  MOD_RES (1)..(3): Xaa is C or S
  MOD_RES (16)..(17)..(18)..(19)..(20): Xaa is A or G
  MOD_RES (21)..(22)..(23)..(24): Xaa is A or G or is absent

SEQ ID NO: 75906 - protein, 43 aa, Artificial Sequence
  GFR-binding peptide
  MOD_RES (2)..(4)..(38)..(39): Xaa is C or S
  MOD_RES (16)..(17)..(18)..(19)..(20): Xaa is A or G
  MOD_RES (21)..(22)..(23)..(24): Xaa is A or G or is absent
SXGXRDVVMGSMEGLXXXXXXXXXMIQMTINSMKTPTXXPGAS

SEQ ID NO: 75907 - protein, 36 aa, Artificial Sequence
  GFR-binding peptide
  MOD_RES (34)..(35): Xaa is C or S
  MOD_RES (12)..(13)..(14)..(15)..(16): Xaa is A or G
  MOD_RES (17)..(18)..(19)..(20): Xaa is A or G or is absent
RDVVMGSMEGLXXXXXXXXXMIQMTINSMKTPTXXP

SEQ ID NO: 75908 - protein, 43 aa, Artificial Sequence; identical to SEQ ID NO: 18355
  GFR-binding peptide
  MOD_RES (1)..(3)..(40): Xaa is C or S

SEQ ID NO: 75909 - protein, 37 aa, Artificial Sequence; identical to SEQ ID NO: 18358
  GFR-binding peptide
  MOD_RES (1)..(3)..(37): Xaa is C or S
  MOD_RES (15)..(16)..(17)..(18)..(19): Xaa is A or G
  MOD_RES (20)..(21)..(22)..(23): Xaa is A or G or is absent

SEQ ID NO: 75910 - protein, 37 aa, Artificial Sequence
  GFR-binding peptide
  MOD_RES (2)..(36)..(37): Xaa is C or S
  MOD_RES (14)..(15)..(16)..(17)..(18): Xaa is A or G
  MOD_RES (19)..(20)..(21)..(22): Xaa is A or G or is absent
GXSEVVMDSMEGLXXXXXXXXXMIQITINSLRTPVXX

SEQ ID NO: 75911 - protein, 37 aa, Artificial Sequence; identical to SEQ ID NO: 18362
  GFR-binding peptide
  MOD_RES (35)..(35): Xaa is C or S
  MOD_RES (11)..(12)..(13)..(14)..(15): Xaa is A or G
  MOD_RES (16)..(17)..(18)..(19): Xaa is A or G or is absent

SEQ ID NO: 75912 - protein, 35 aa, Artificial Sequence; identical to SEQ ID NO: 18363
  GFR-binding peptide
  MOD_RES (34)..(34): Xaa is C or S

SEQ ID NO: 75913 - protein, 36 aa, Artificial Sequence
  GFR-binding peptide
  MOD_RES (2)..(33)..(34): Xaa is C or S
KXSKVVMSMEGLVKPTRGVMIQITINSLDQPVXXPS

SEQ ID NO: 75914 - protein, 38 aa, Artificial Sequence; identical to SEQ ID NO: 18364
  GFR-binding peptide
  MOD_RES (35)..(35): Xaa is C or S
  MOD_RES (11)..(12)..(13)..(14)..(15): Xaa is A or G
  MOD_RES (16)..(17)..(18)..(19): Xaa is A or G or is absent

SEQ ID NO: 75915 - protein, 37 aa, Artificial Sequence
  GFR-binding peptide
  MOD_RES (31)..(32): Xaa is C or S
EVVMDSMEGIVVNNAADMIQITINSLRAPVXXSAPAA

SEQ ID NO: 75916 - protein, 33 aa, Artificial Sequence
  GFR-binding peptide
  MOD_RES (2)..(2): Xaa is C or S
GXSRVVMNSMEGLIVNSSDDMIQVTINSLKTPA

SEQ ID NO: 75917 - protein, 30 aa, Artificial Sequence
  GFR-binding peptide
EVVMDSMEGLVVNNAADMIQITINSLRAPV

SEQ ID NO: 75918 - protein, 41 aa, Artificial Sequence
  GFR-binding peptide
  MOD_RES (1)..(35)..(36): Xaa is C or S
  MOD_RES (13)..(14)..(15)..(16)..(17): Xaa is A or G
  MOD_RES (18)..(19)..(20)..(21): Xaa is A or G or is absent
XRDVVMGSMEGLXXXXXXXXXMIQMTINSMKTPTXXPGASG

SEQ ID NO: 75919 - protein, 34 aa, Artificial Sequence
  GFR-binding peptide
  MOD_RES (1)..(3): Xaa is C or S
XGXSEVVMDSMEGIVVNNASDMIQITINSLRTPV

SEQ ID NO: 75920 - protein, 39 aa, Artificial Sequence
  GFR-binding peptide
  MOD_RES (2)..(33)..(34): Xaa is C or S
KXSKVIMSMEGLIKPTKGIMIQITINSLDQSVXXPSASA

SEQ ID NO: 75921 - protein, 39 aa, Artificial Sequence; identical to SEQ ID NO: 18370
  GFR-binding peptide
  MOD_RES (36)..(36): Xaa is C or S
  MOD_RES (12)..(13)..(14)..(15)..(16): Xaa is A or G
  MOD_RES (17)..(18)..(19)..(20): Xaa is A or G or is absent

SEQ ID NO: 75922 - protein, 40 aa, Artificial Sequence; identical to SEQ ID NO: 18371
  GFR-binding peptide
  MOD_RES (2)..(4): Xaa is C or S

SEQ ID NO: 75923 - protein, 37 aa, Artificial Sequence
  GFR-binding peptide
  MOD_RES (1)..(35)..(36): Xaa is C or S
  MOD_RES (13)..(14)..(15)..(16)..(17): Xaa is A or G
  MOD_RES (18)..(19)..(20)..(21): Xaa is A or G or is absent
XRDVVMGSMEGIXXXXXXXXXMIQMTINSMKTPTXXP

SEQ ID NO: 75924 - protein, 39 aa, Artificial Sequence
  GFR-binding peptide
  MOD_RES (33)..(34): Xaa is C or S
  MOD_RES (11)..(12)..(13)..(14)..(15): Xaa is A or G
  MOD_RES (16)..(17)..(18)..(19): Xaa is A or G or is absent
RVVMNSMEGLXXXXXXXXXMIQVTINSLKTPAXXPKPVH

SEQ ID NO: 75925 - protein, 38 aa, Artificial Sequence
  GFR-binding peptide
  MOD_RES (1)..(32)..(33): Xaa is C or S
XSKVIMSMEGLIKPTKGIMIQITINSLDQSVXXPSASA

SEQ ID NO: 75926 - protein, 37 aa, Artificial Sequence; identical to SEQ ID NO: 48360
  GFR-binding peptide
  MOD_RES (2)..(4)..(35)..(36): Xaa is C or S

SEQ ID NO: 75927 - protein, 37 aa, Artificial Sequence
  GFR-binding peptide
  MOD_RES (1)..(3)..(34)..(35): Xaa is C or S
XGXEEVIMSMEGILLVRGNDMIQMTINSTKVPAXXTS

SEQ ID NO: 75928 - protein, 33 aa, Artificial Sequence
  GFR-binding peptide
  MOD_RES (2)..(2): Xaa is C or S
GXAEVVMDSMEGIVVNNAADMIQITINSLRAPV

SEQ ID NO: 75929 - protein, 35 aa, Artificial Sequence; identical to SEQ ID NO: 18374
  GFR-binding peptide

SEQ ID NO: 75930 - protein, 39 aa, Artificial Sequence; identical to SEQ ID NO: 18375
  GFR-binding peptide
  MOD_RES (34)..(34): Xaa is C or S

SEQ ID NO: 75931 - protein, 35 aa, Artificial Sequence
  GFR-binding peptide
  MOD_RES (33)..(34): Xaa is C or S
  MOD_RES (11)..(12)..(13)..(14)..(15): Xaa is A or G
  MOD_RES (16)..(17)..(18)..(19): Xaa is A or G or is absent
DVVMGSMEGIXXXXXXXXXMIQMTINSMKTPTXXP

SEQ ID NO: 75932 - protein, 38 aa, Artificial Sequence; identical to SEQ ID NO: 18376
  GFR-binding peptide
  MOD_RES (2)..(4): Xaa is C or S
  MOD_RES (17)..(18)..(19)..(20)..(21): Xaa is A or G
  MOD_RES (22)..(23)..(24)..(25): Xaa is A or G or is absent

SEQ ID NO: 75933 - protein, 40 aa, Artificial Sequence; identical to SEQ ID NO: 18378
  GFR-binding peptide
  MOD_RES (1)..(3)..(40): Xaa is C or S

SEQ ID NO: 75934 - protein, 40 aa, Artificial Sequence; identical to SEQ ID NO: 18379
  GFR-binding peptide
  MOD_RES (1)..(3)..(40): Xaa is C or S

SEQ ID NO: 75935 - protein, 37 aa, Artificial Sequence; identical to SEQ ID NO: 18381
  GFR-binding peptide
  MOD_RES (1)..(3)..(37): Xaa is C or S

SEQ ID NO: 75936 - protein, 33 aa, Artificial Sequence; identical to SEQ ID NO: 50895
  GFR-binding peptide
  MOD_RES (33)..(33): Xaa is C or S
  MOD_RES (11)..(12)..(13)..(14)..(15): Xaa is A or G
  MOD_RES (16)..(17)..(18)..(19): Xaa is A or G or is absent

SEQ ID NO: 75937 - protein, 33 aa, Artificial Sequence; identical to SEQ ID NO: 18384
  GFR-binding peptide

SEQ ID NO: 75938 - protein, 36 aa, Artificial Sequence; identical to SEQ ID NO: 18385
  GFR-binding peptide
  MOD_RES (36)..(36): Xaa is C or S

SEQ ID NO: 75939 - protein, 37 aa, Artificial Sequence; identical to SEQ ID NO: 18386
  GFR-binding peptide
  MOD_RES (2)..(36): Xaa is C or S

SEQ ID NO: 75940 - protein, 36 aa, Artificial Sequence
  GFR-binding peptide
  MOD_RES (2)..(33)..(34): Xaa is C or S
KXSKVIMSMEGLIKPTKGIMIQITINSLDQSVXXPS

SEQ ID NO: 75941 - protein, 33 aa, Artificial Sequence; identical to SEQ ID NO: 48379
  GFR-binding peptide
  MOD_RES (2)..(2): Xaa is C or S

SEQ ID NO: 75942 - protein, 34 aa, Artificial Sequence; identical to SEQ ID NO: 18389
  GFR-binding peptide

SEQ ID NO: 75943 - protein, 37 aa, Artificial Sequence
  GFR-binding peptide
  MOD_RES (1)..(35)..(36): Xaa is C or S
  MOD_RES (13)..(14)..(15)..(16)..(17): Xaa is A or G
  MOD_RES (18)..(19)..(20)..(21): Xaa is A or G or is absent
XRDVVMGSMEGLXXXXXXXXXMIQMTINSMKTPTXXP

SEQ ID NO: 75944 - protein, 40 aa, Artificial Sequence; identical to SEQ ID NO: 18391
  GFR-binding peptide
  MOD_RES (37)..(37): Xaa is C or S

SEQ ID NO: 75945 - protein, 35 aa, Artificial Sequence
  GFR-binding peptide
  MOD_RES (31)..(32): Xaa is C or S
DVVMGSMEGIIIQQKDNMIQMTINSMKTPTXXPGA

SEQ ID NO: 75946 - protein, 31 aa, Artificial Sequence
  GFR-binding peptide
SEVVMDSMEGLVVNNASDMIQITINSLRTPV

SEQ ID NO: 75947 - protein, 35 aa, Artificial Sequence; identical to SEQ ID NO: 18392
  GFR-binding peptide
  MOD_RES (13)..(14)..(15)..(16)..(17): Xaa is A or G
  MOD_RES (18)..(19)..(20)..(21): Xaa is A or G or is absent

SEQ ID NO: 75948 - protein, 39 aa, Artificial Sequence; identical to SEQ ID NO: 50908
  GFR-binding peptide
  MOD_RES (1)..(3)..(34)..(35): Xaa is C or S

SEQ ID NO: 75949 - protein, 39 aa, Artificial Sequence
  GFR-binding peptide
  MOD_RES (1)..(3)..(36)..(37): Xaa is C or S
  MOD_RES (14)..(15)..(16)..(17)..(18): Xaa is A or G
  MOD_RES (19)..(20)..(21)..(22): Xaa is A or G or is absent
XKXSKVVMSMEGLXXXXXXXXXMIQITINSLDQPVXXPS

SEQ ID NO: 75950 - protein, 34 aa, Artificial Sequence; identical to SEQ ID NO: 18393
  GFR-binding peptide
  MOD_RES (1)..(1): Xaa is C or S

SEQ ID NO: 75951 - protein, 38 aa, Artificial Sequence
  GFR-binding peptide
  MOD_RES (2)..(34)..(35): Xaa is C or S
GXAEVVMDSMEGIVVNNAADMIQITINSLRAPVXXSAP

SEQ ID NO: 75952 - protein, 37 aa, Artificial Sequence
  GFR-binding peptide
  MOD_RES (33)..(34): Xaa is C or S
  MOD_RES (11)..(12)..(13)..(14)..(15): Xaa is A or G
  MOD_RES (16)..(17)..(18)..(19): Xaa is A or G or is absent
SKVIMSMEGLXXXXXXXXXMIQITINSLDQSVXXPSA

SEQ ID NO: 75953 - protein, 40 aa, Artificial Sequence; identical to SEQ ID NO: 50911
  GFR-binding peptide
  MOD_RES (1)..(3)..(34)..(35): Xaa is C or S

SEQ ID NO: 75954 - protein, 34 aa, Artificial Sequence; identical to SEQ ID NO: 18396
  GFR-binding peptide
  MOD_RES (1)..(1): Xaa is C or S

SEQ ID NO: 75955 - protein, 37 aa, Artificial Sequence
  GFR-binding peptide
  MOD_RES (33)..(34): Xaa is C or S
  MOD_RES (11)..(12)..(13)..(14)..(15): Xaa is A or G
  MOD_RES (16)..(17)..(18)..(19): Xaa is A or G or is absent
EVVMDSMEGIXXXXXXXXXMIQITINSLRTPVXXTPP

SEQ ID NO: 75956 - protein, 41 aa, Artificial Sequence
  GFR-binding peptide
  MOD_RES (2)..(36)..(37): Xaa is C or S
  MOD_RES (14)..(15)..(16)..(17)..(18): Xaa is A or G
  MOD_RES (19)..(20)..(21)..(22): Xaa is A or G or is absent
GXSEVVMDSMEGLXXXXXXXXXMIQITINSLRTPVXXTPPT

SEQ ID NO: 75957 - protein, 31 aa, Artificial Sequence
  GFR-binding peptide
  MOD_RES (31)..(31): Xaa is C or S
EVVMDSMEGLVVNNAADMIQITINSLRAPVX

SEQ ID NO: 75958 - protein, 36 aa, Artificial Sequence; identical to SEQ ID NO: 18397
  GFR-binding peptide
  MOD_RES (35)..(35): Xaa is C or S

SEQ ID NO: 75959 - protein, 37 aa, Artificial Sequence; identical to SEQ ID NO: 18398
  GFR-binding peptide
  MOD_RES (2)..(4): Xaa is C or S

SEQ ID NO: 75960 - protein, 33 aa, Artificial Sequence
  GFR-binding peptide
  MOD_RES (2)..(2): Xaa is C or S
GXRDVVMGSMEGIIIQQKDNMIQMTINSMKTPT

SEQ ID NO: 75961 - protein, 35 aa, Artificial Sequence; identical to SEQ ID NO: 48399
  GFR-binding peptide
  MOD_RES (2)..(35): Xaa is C or S
  MOD_RES (13)..(14)..(15)..(16)..(17): Xaa is A or G
  MOD_RES (18)..(19)..(20)..(21): Xaa is A or G or is absent

SEQ ID NO: 75962 - protein, 39 aa, Artificial Sequence
  GFR-binding peptide
  MOD_RES (1)..(34)..(35): Xaa is C or S
  MOD_RES (12)..(13)..(14)..(15)..(16): Xaa is A or G
  MOD_RES (17)..(18)..(19)..(20): Xaa is A or G or is absent
XSKVVMSMEGLXXXXXXXXXMIQITINSLDQPVXXPSAS

SEQ ID NO: 75963 - protein, 36 aa, Artificial Sequence
  GFR-binding peptide
  MOD_RES (2)..(35)..(36): Xaa is C or S
  MOD_RES (13)..(14)..(15)..(16)..(17): Xaa is A or G
  MOD_RES (18)..(19)..(20)..(21): Xaa is A or G or is absent
KXSRVIMSMEGLXXXXXXXXXMIQITINSLAQPVXX

SEQ ID NO: 75964 - protein, 37 aa, Artificial Sequence; identical to SEQ ID NO: 18405
  GFR-binding peptide
  MOD_RES (1)..(1): Xaa is C or S
  MOD_RES (14)..(15)..(16)..(17)..(18): Xaa is A or G
  MOD_RES (19)..(20)..(21)..(22): Xaa is A or G or is absent

SEQ ID NO: 75965 - protein, 40 aa, Artificial Sequence
  GFR-binding peptide
  MOD_RES (2)..(4)..(35)..(36): Xaa is C or S
LXGXEEVIMSMEGLLLVRGNDMIQMTINSTKVPAXXTSPV

SEQ ID NO: 75966 - protein, 32 aa, Artificial Sequence
  GFR-binding peptide
  MOD_RES (1)..(1): Xaa is C or S
XSEVVMDSMEGIVVNNASDMIQITINSLRTPV

SEQ ID NO: 75967 - protein, 34 aa, Artificial Sequence; identical to SEQ ID NO: 18406
  GFR-binding peptide
  MOD_RES (1)..(1): Xaa is C or S
  MOD_RES (13)..(14)..(15)..(16)..(17): Xaa is A or G
  MOD_RES (18)..(19)..(20)..(21): Xaa is A or G or is absent

SEQ ID NO: 75968 - protein, 34 aa, Artificial Sequence; identical to SEQ ID NO: 18407
  GFR-binding peptide
  MOD_RES (12)..(13)..(14)..(15)..(16): Xaa is A or G
  MOD_RES (17)..(18)..(19)..(20): Xaa is A or G or is absent

SEQ ID NO: 75969 - protein, 40 aa, Artificial Sequence; identical to SEQ ID NO: 18409
  GFR-binding peptide
  MOD_RES (2)..(39): Xaa is C or S

SEQ ID NO: 75970 - protein, 33 aa, Artificial Sequence
  GFR-binding peptide
  MOD_RES (33)..(33): Xaa is C or S
  MOD_RES (11)..(12)..(13)..(14)..(15): Xaa is A or G
  MOD_RES (16)..(17)..(18)..(19): Xaa is A or G or is absent
EEVIMSMEGLXXXXXXXXXMIQMTINSTKVPAX

SEQ ID NO: 75971 - protein, 35 aa, Artificial Sequence
  GFR-binding peptide
  MOD_RES (34)..(35): Xaa is C or S
  MOD_RES (12)..(13)..(14)..(15)..(16): Xaa is A or G
  MOD_RES (17)..(18)..(19)..(20): Xaa is A or G or is absent
RDVVMGSMEGIXXXXXXXXXMIQMTINSMKTPTXX

SEQ ID NO: 75972 - protein, 44 aa, Artificial Sequence
  GFR-binding peptide
  MOD_RES (2)..(4)..(38)..(39): Xaa is C or S
  MOD_RES (16)..(17)..(18)..(19)..(20): Xaa is A or G
  MOD_RES (21)..(22)..(23)..(24): Xaa is A or G or is absent
RXGXAEVVMDSMEGIXXXXXXXXXMIQITINSLRAPVXXSAPAA

SEQ ID NO: 75973 - protein, 38 aa, Artificial Sequence; identical to SEQ ID NO: 18415
  GFR-binding peptide
  MOD_RES (2)..(4)..(38): Xaa is C or S

SEQ ID NO: 75974 - protein, 43 aa, Artificial Sequence; identical to SEQ ID NO: 18416
  GFR-binding peptide
  MOD_RES (1)..(3)..(40): Xaa is C or S

SEQ ID NO: 75975 - protein, 43 aa, Artificial Sequence; identical to SEQ ID NO: 18418
  GFR-binding peptide
  MOD_RES (1)..(3)..(40): Xaa is C or S

SEQ ID NO: 75976 - protein, 37 aa, Artificial Sequence
  GFR-binding peptide
  MOD_RES (1)..(3)..(35)..(36): Xaa is C or S
XGXRDVVMGSMEGIIIQQKDNMIQMTINSMKTPTXXP

SEQ ID NO: 75977 - protein, 34 aa, Artificial Sequence; identical to SEQ ID NO: 18419
  GFR-binding peptide
  MOD_RES (1)..(1): Xaa is C or S
  MOD_RES (13)..(14)..(15)..(16)..(17): Xaa is A or G
  MOD_RES (18)..(19)..(20)..(21): Xaa is A or G or is absent

SEQ ID NO: 75978 - protein, 33 aa, Artificial Sequence
  GFR-binding peptide
  MOD_RES (33)..(33): Xaa is C or S
  MOD_RES (11)..(12)..(13)..(14)..(15): Xaa is A or G
  MOD_RES (16)..(17)..(18)..(19): Xaa is A or G or is absent
EEVIMSMEGIXXXXXXXXXMIQMTINSTKVPAX

SEQ ID NO: 75979 - protein, 39 aa, Artificial Sequence; identical to SEQ ID NO: 18420
  GFR-binding peptide
  MOD_RES (2)..(36): Xaa is C or S

SEQ ID NO: 75980 - protein, 43 aa, Artificial Sequence
  GFR-binding peptide
  MOD_RES (1)..(3)..(37)..(38): Xaa is C or S
  MOD_RES (15)..(16)..(17)..(18)..(19): Xaa is A or G
  MOD_RES (20)..(21)..(22)..(23): Xaa is A or G or is absent
XGXSRVVMNSMEGLXXXXXXXXXMIQVTINSLKTPAXXPKPVH

SEQ ID NO: 75981 - protein, 35 aa, Artificial Sequence
  GFR-binding peptide
  MOD_RES (2)..(33)..(34): Xaa is C or S
KXSKVVMSMEGLVKPTRGVMIQITINSLDQPVXXP

SEQ ID NO: 75982 - protein, 36 aa, Artificial Sequence
  GFR-binding peptide
  MOD_RES (34)..(35): Xaa is C or S
  MOD_RES (12)..(13)..(14)..(15)..(16): Xaa is A or G
  MOD_RES (17)..(18)..(19)..(20): Xaa is A or G or is absent
AEVVMDSMEGLXXXXXXXXXMIQITINSLRAPVXXS

SEQ ID NO: 75983 - protein, 43 aa, Artificial Sequence
  GFR-binding peptide
  MOD_RES (1)..(3)..(37)..(38): Xaa is C or S
  MOD_RES (15)..(16)..(17)..(18)..(19): Xaa is A or G
  MOD_RES (20)..(21)..(22)..(23): Xaa is A or G or is absent
XGXSEVVMDSMEGIXXXXXXXXXMIQITINSLRTPVXXTPPTS

SEQ ID NO: 75984 - protein, 34 aa, Artificial Sequence
  GFR-binding peptide
  MOD_RES (32)..(33): Xaa is C or S
SEVVMDSMEGLVVNNASDMIQITINSLRTPVXXT

SEQ ID NO: 75985 - protein, 33 aa, Artificial Sequence; identical to SEQ ID NO: 50946
  GFR-binding peptide
  MOD_RES (33)..(33): Xaa is C or S
  MOD_RES (11)..(12)..(13)..(14)..(15): Xaa is A or G
  MOD_RES (16)..(17)..(18)..(19): Xaa is A or G or is absent

SEQ ID NO: 75986 - protein, 33 aa, Artificial Sequence
  GFR-binding peptide
  MOD_RES (2)..(2): Xaa is C or S
GXAEVVMDSMEGLVVNNAADMIQITINSLRAPV

SEQ ID NO: 75987 - protein, 40 aa, Artificial Sequence; identical to SEQ ID NO: 18424
  GFR-binding peptide
  MOD_RES (34)..(34): Xaa is C or S
  MOD_RES (12)..(13)..(14)..(15)..(16): Xaa is A or G
  MOD_RES (17)..(18)..(19)..(20): Xaa is A or G or is absent

SEQ ID NO: 75988 - protein, 40 aa, Artificial Sequence; identical to SEQ ID NO: 18425
  GFR-binding peptide
  MOD_RES (1)..(3)..(37): Xaa is C or S
  MOD_RES (15)..(16)..(17)..(18)..(19): Xaa is A or G
  MOD_RES (20)..(21)..(22)..(23): Xaa is A or G or is absent

SEQ ID NO: 75989 - protein, 33 aa, Artificial Sequence
  GFR-binding peptide
  MOD_RES (1)..(32)..(33): Xaa is C or S
XEEVIMSMEGLLLVRGNDMIQMTINSTKVPAXX

SEQ ID NO: 75990 - protein, 35 aa, Artificial Sequence
  GFR-binding peptide
  MOD_RES (31)..(32): Xaa is C or S
DVVMGSMEGLIIQQKDNMIQMTINSMKTPTXXPGA

SEQ ID NO: 75991 - protein, 42 aa, Artificial Sequence; identical to SEQ ID NO: 50958
  GFR-binding peptide
  MOD_RES (1)..(3)..(36)..(37): Xaa is C or S
  MOD_RES (14)..(15)..(16)..(17)..(18): Xaa is A or G
  MOD_RES (19)..(20)..(21)..(22): Xaa is A or G or is absent

SEQ ID NO: 75992 - protein, 36 aa, Artificial Sequence; identical to SEQ ID NO: 50961
  GFR-binding peptide
  MOD_RES (1)..(3)..(34)..(35): Xaa is C or S

SEQ ID NO: 75993 - protein, 35 aa, Artificial Sequence; identical to SEQ ID NO: 18429
  GFR-binding peptide
  MOD_RES (35)..(35): Xaa is C or S
  MOD_RES (11)..(12)..(13)..(14)..(15): Xaa is A or G
  MOD_RES (16)..(17)..(18)..(19): Xaa is A or G or is absent

SEQ ID NO: 75994 - protein, 36 aa, Artificial Sequence; identical to SEQ ID NO: 18431
  GFR-binding peptide
  MOD_RES (2)..(36): Xaa is C or S

SEQ ID NO: 75995 - protein, 37 aa, Artificial Sequence
  GFR-binding peptide
  MOD_RES (33)..(34): Xaa is C or S
  MOD_RES (11)..(12)..(13)..(14)..(15): Xaa is A or G
  MOD_RES (16)..(17)..(18)..(19): Xaa is A or G or is absent
EVVMDSMEGLXXXXXXXXXMIQITINSLRTPVXXTPP

SEQ ID NO: 75996 - protein, 37 aa, Artificial Sequence; identical to SEQ ID NO: 18434
  GFR-binding peptide
  MOD_RES (37)..(37): Xaa is C or S
  MOD_RES (13)..(14)..(15)..(16)..(17): Xaa is A or G
  MOD_RES (18)..(19)..(20)..(21): Xaa is A or G or is absent

SEQ ID NO: 75997 - protein, 35 aa, Artificial Sequence; identical to SEQ ID NO: 50968
  GFR-binding peptide
  MOD_RES (2)..(33)..(34): Xaa is C or S

SEQ ID NO: 75998 - protein, 31 aa, Artificial Sequence
  GFR-binding peptide
  MOD_RES (1)..(1): Xaa is C or S
XEEVIMSMEGILLVRGNDMIQMTINSTKVPA

SEQ ID NO: 75999 - protein, 40 aa, Artificial Sequence; identical to SEQ ID NO: 48449
  GFR-binding peptide
  MOD_RES (2)..(36)..(37): Xaa is C or S
  MOD_RES (14)..(15)..(16)..(17)..(18): Xaa is A or G
  MOD_RES (19)..(20)..(21)..(22): Xaa is A or G or is absent

SEQ ID NO: 76000 - protein, 30 aa, Artificial Sequence; identical to SEQ ID NO: 50971
  GFR-binding peptide

SEQ ID NO: 76001 - protein, 32 aa, Artificial Sequence
  GFR-binding peptide
  MOD_RES (1)..(32): Xaa is C or S
XSKVVMSMEGLVKPTRGVMIQITINSLDQPVX

SEQ ID NO: 76002 - protein, 39 aa, Artificial Sequence; identical to SEQ ID NO: 50972
  GFR-binding peptide
  MOD_RES (2)..(33)..(34): Xaa is C or S

SEQ ID NO: 76003 - protein, 33 aa, Artificial Sequence; identical to SEQ ID NO: 18437
  GFR-binding peptide
  MOD_RES (12)..(13)..(14)..(15)..(16): Xaa is A or G
  MOD_RES (17)..(18)..(19)..(20): Xaa is A or G or is absent

SEQ ID NO: 76004 - protein, 35 aa, Artificial Sequence
  GFR-binding peptide
  MOD_RES (33)..(34): Xaa is C or S
  MOD_RES (11)..(12)..(13)..(14)..(15): Xaa is A or G
  MOD_RES (16)..(17)..(18)..(19): Xaa is A or G or is absent
DVVMGSMEGLXXXXXXXXXMIQMTINSMKTPTXXP

SEQ ID NO: 76005 - protein, 40 aa, Artificial Sequence; identical to SEQ ID NO: 18438
  GFR-binding peptide
  MOD_RES (37)..(37): Xaa is C or S
  MOD_RES (13)..(14)..(15)..(16)..(17): Xaa is A or G
  MOD_RES (18)..(19)..(20)..(21): Xaa is A or G or is absent

SEQ ID NO: 76006 - protein, 38 aa, Artificial Sequence
  GFR-binding peptide
  MOD_RES (2)..(34)..(35): Xaa is C or S
GXRDVVMGSMEGIIIQQKDNMIQMTINSMKTPTXXPGA

SEQ ID NO: 76007 - protein, 37 aa, Artificial Sequence
  GFR-binding peptide
  MOD_RES (2)..(4)..(35)..(36): Xaa is C or S
LXGXEEVIMSMEGILLVRGNDMIQMTINSTKVPAXXT

SEQ ID NO: 76008 - protein, 42 aa, Artificial Sequence; identical to SEQ ID NO: 50979
  GFR-binding peptide
  MOD_RES (1)..(3)..(36)..(37): Xaa is C or S
  MOD_RES (14)..(15)..(16)..(17)..(18): Xaa is A or G
  MOD_RES (19)..(20)..(21)..(22): Xaa is A or G or is absent

SEQ ID NO: 76009 - protein, 33 aa, Artificial Sequence
  GFR-binding peptide
  MOD_RES (33)..(33): Xaa is C or S
  MOD_RES (11)..(12)..(13)..(14)..(15): Xaa is A or G
  MOD_RES (16)..(17)..(18)..(19): Xaa is A or G or is absent
RVVMNSMEGLXXXXXXXXXMIQVTINSLKTPAX

SEQ ID NO: 76010 - protein, 41 aa, Artificial Sequence; identical to SEQ ID NO: 18440
  GFR-binding peptide
  MOD_RES (1)..(3)..(37): Xaa is C or S

SEQ ID NO: 76011 - protein, 34 aa, Artificial Sequence; identical to SEQ ID NO: 50985
  GFR-binding peptide
  MOD_RES (31)..(32): Xaa is C or S

SEQ ID NO: 76012 - protein, 41 aa, Artificial Sequence; identical to SEQ ID NO: 50987
  GFR-binding peptide
  MOD_RES (1)..(3)..(37)..(38): Xaa is C or S
  MOD_RES (15)..(16)..(17)..(18)..(19): Xaa is A or G
  MOD_RES (20)..(21)..(22)..(23): Xaa is A or G or is absent

SEQ ID NO: 76013 - protein, 36 aa, Artificial Sequence
  GFR-binding peptide
  MOD_RES (1)..(34)..(35): Xaa is C or S
  MOD_RES (12)..(13)..(14)..(15)..(16): Xaa is A or G
  MOD_RES (17)..(18)..(19)..(20): Xaa is A or G or is absent
XEEVIMSMEGIXXXXXXXXXMIQMTINSTKVPAXXT

SEQ ID NO: 76014 - protein, 42 aa, Artificial Sequence
  GFR-binding peptide
  MOD_RES (2)..(4)..(38)..(39): Xaa is C or S
  MOD_RES (16)..(17)..(18)..(19)..(20): Xaa is A or G
  MOD_RES (21)..(22)..(23)..(24): Xaa is A or G or is absent
RXGXAEVVMDSMEGIXXXXXXXXXMIQITINSLRAPVXXSAP

SEQ ID NO: 76015 - protein, 33 aa, Artificial Sequence
  GFR-binding peptide
  MOD_RES (12)..(13)..(14)..(15)..(16): Xaa is A or G
  MOD_RES (17)..(18)..(19)..(20): Xaa is A or G or is absent
SEVVMDSMEGIXXXXXXXXXMIQITINSLRTPV

SEQ ID NO: 76016 - protein, 37 aa, Artificial Sequence
  GFR-binding peptide
  MOD_RES (1)..(3)..(36)..(37): Xaa is C or S
  MOD_RES (14)..(15)..(16)..(17)..(18): Xaa is A or G
  MOD_RES (19)..(20)..(21)..(22): Xaa is A or G or is absent
XKXSRVIMSMEGLXXXXXXXXXMIQITINSLAQPVXX

SEQ ID NO: 76017 - protein, 34 aa, Artificial Sequence; identical to SEQ ID NO: 50996
  GFR-binding peptide
  MOD_RES (1)..(32)..(33): Xaa is C or S

SEQ ID NO: 76018 - protein, 40 aa, Artificial Sequence; identical to SEQ ID NO: 18449
  GFR-binding peptide
  MOD_RES (36)..(36): Xaa is C or S

SEQ ID NO: 76019 - protein, 42 aa, Artificial Sequence
  GFR-binding peptide
  MOD_RES (2)..(4)..(36)..(37): Xaa is C or S
HXGXSRVVMNSMEGIIVNSSDDMIQVTINSLKTPAXXPKPVH

SEQ ID NO: 76020 - protein, 40 aa, Artificial Sequence
  GFR-binding peptide
  MOD_RES (2)..(4)..(37)..(38): Xaa is C or S
  MOD_RES (15)..(16)..(17)..(18)..(19): Xaa is A or G
  MOD_RES (20)..(21)..(22)..(23): Xaa is A or G or is absent
SXKXSRVIMSMEGLXXXXXXXXXMIQITINSLAQPVXXPA

SEQ ID NO: 76021 - protein, 39 aa, Artificial Sequence; identical to SEQ ID NO: 51004
  GFR-binding peptide
  MOD_RES (1)..(34)..(35): Xaa is C or S
  MOD_RES (12)..(13)..(14)..(15)..(16): Xaa is A or G
  MOD_RES (17)..(18)..(19)..(20): Xaa is A or G or is absent

SEQ ID NO: 76022 - protein, 42 aa, Artificial Sequence; identical to SEQ ID NO: 18453
  GFR-binding peptide
  MOD_RES (2)..(4)..(38): Xaa is C or S
  MOD_RES (16)..(17)..(18)..(19)..(20): Xaa is A or G
  MOD_RES (21)..(22)..(23)..(24): Xaa is A or G or is absent

SEQ ID NO: 76023 - protein, 39 aa, Artificial Sequence
  GFR-binding peptide
  MOD_RES (2)..(4)..(36)..(37): Xaa is C or S
RXGXAEVVMDSMEGIVVNNAADMIQITINSLRAPVXXSA

SEQ ID NO: 76024 - protein, 39 aa, Artificial Sequence; identical to SEQ ID NO: 48481
  GFR-binding peptide
  MOD_RES (1)..(3)..(35)..(36): Xaa is C or S

SEQ ID NO: 76025 - protein, 35 aa, Artificial Sequence; identical to SEQ ID NO: 18455
  GFR-binding peptide
  MOD_RES (35)..(35): Xaa is C or S
  MOD_RES (11)..(12)..(13)..(14)..(15): Xaa is A or G
  MOD_RES (16)..(17)..(18)..(19): Xaa is A or G or is absent

SEQ ID NO: 76026 - protein, 38 aa, Artificial Sequence; identical to SEQ ID NO: 51014
  GFR-binding peptide
  MOD_RES (1)..(3)..(34)..(35): Xaa is C or S

SEQ ID NO: 76027 - protein, 38 aa, Artificial Sequence; identical to SEQ ID NO: 18456
  GFR-binding peptide
  MOD_RES (1)..(38): Xaa is C or S
  MOD_RES (14)..(15)..(16)..(17)..(18): Xaa is A or G
  MOD_RES (19)..(20)..(21)..(22): Xaa is A or G or is absent

SEQ ID NO: 76028 - protein, 42 aa, Artificial Sequence; identical to SEQ ID NO: 18457
  GFR-binding peptide
  MOD_RES (2)..(4)..(41): Xaa is C or S

SEQ ID NO: 76029 - protein, 38 aa, Artificial Sequence
  GFR-binding peptide
  MOD_RES (2)..(4)..(37)..(38): Xaa is C or S
  MOD_RES (15)..(16)..(17)..(18)..(19): Xaa is A or G
  MOD_RES (20)..(21)..(22)..(23): Xaa is A or G or is absent
SXKXSRVIMSMEGLXXXXXXXXXMIQITINSLAQPVXX

SEQ ID NO: 76030 - protein, 39 aa, Artificial Sequence; identical to SEQ ID NO: 48492
  GFR-binding peptide
  MOD_RES (2)..(36)..(37): Xaa is C or S
  MOD_RES (14)..(15)..(16)..(17)..(18): Xaa is A or G
  MOD_RES (19)..(20)..(21)..(22): Xaa is A or G or is absent

SEQ ID NO: 76031 - protein, 34 aa, Artificial Sequence; identical to SEQ ID NO: 18460
  GFR-binding peptide
  MOD_RES (34)..(34): Xaa is C or S
  MOD_RES (12)..(13)..(14)..(15)..(16): Xaa is A or G
  MOD_RES (17)..(18)..(19)..(20): Xaa is A or G or is absent

SEQ ID NO: 76032 - protein, 41 aa, Artificial Sequence; identical to SEQ ID NO: 48493
  GFR-binding peptide
  MOD_RES (1)..(3)..(36)..(37): Xaa is C or S
  MOD_RES (14)..(15)..(16)..(17)..(18): Xaa is A or G
  MOD_RES (19)..(20)..(21)..(22): Xaa is A or G or is absent

SEQ ID NO: 76033 - protein, 42 aa, Artificial Sequence
  GFR-binding peptide
  MOD_RES (1)..(3)..(37)..(38): Xaa is C or S
  MOD_RES (15)..(16)..(17)..(18)..(19): Xaa is A or G
  MOD_RES (20)..(21)..(22)..(23): Xaa is A or G or is absent
XGXSRVVMNSMEGLXXXXXXXXXMIQVTINSLKTPAXXPKPV

SEQ ID NO: 76034 - protein, 40 aa, Artificial Sequence; identical to SEQ ID NO: 18462
  GFR-binding peptide
  MOD_RES (2)..(4)..(38): Xaa is C or S

SEQ ID NO: 76035 - protein, 40 aa, Artificial Sequence
  GFR-binding peptide
  MOD_RES (1)..(3)..(37)..(38): Xaa is C or S
  MOD_RES (15)..(16)..(17)..(18)..(19): Xaa is A or G
  MOD_RES (20)..(21)..(22)..(23): Xaa is A or G or is absent
XGXRDVVMGSMEGIXXXXXXXXXMIQMTINSMKTPTXXPG

SEQ ID NO: 76036 - protein, 41 aa, Artificial Sequence; identical to SEQ ID NO: 18463
  GFR-binding peptide
  MOD_RES (2)..(39): Xaa is C or S
  MOD_RES (15)..(16)..(17)..(18)..(19): Xaa is A or G
  MOD_RES (20)..(21)..(22)..(23): Xaa is A or G or is absent

SEQ ID NO: 76037 - protein, 34 aa, Artificial Sequence
  GFR-binding peptide
  MOD_RES (1)..(1): Xaa is C or S
  MOD_RES (13)..(14)..(15)..(16)..(17): Xaa is A or G
  MOD_RES (18)..(19)..(20)..(21): Xaa is A or G or is absent
XRDVVMGSMEGIXXXXXXXXXMIQMTINSMKTPT

SEQ ID NO: 76038 - protein, 42 aa, Artificial Sequence; identical to SEQ ID NO: 18464
  GFR-binding peptide
  MOD_RES (1)..(3)..(40): Xaa is C or S
  MOD_RES (16)..(17)..(18)..(19)..(20): Xaa is A or G
  MOD_RES (21)..(22)..(23)..(24): Xaa is A or G or is absent

SEQ ID NO: 76039 - protein, 35 aa, Artificial Sequence
  GFR-binding peptide
  MOD_RES (31)..(32): Xaa is C or S
EVVMDSMEGLVVNNAADMIQITINSLRAPVXXSAP

SEQ ID NO: 76040 - protein, 42 aa, Artificial Sequence; identical to SEQ ID NO: 18465
  GFR-binding peptide
  MOD_RES (1)..(3)..(40): Xaa is C or S
  MOD_RES (16)..(17)..(18)..(19)..(20): Xaa is A or G
  MOD_RES (21)..(22)..(23)..(24): Xaa is A or G or is absent

SEQ ID NO: 76041 - protein, 34 aa, Artificial Sequence
  GFR-binding peptide
  MOD_RES (2)..(33)..(34): Xaa is C or S
KXSKVVMSMEGLVKPTRGVMIQITINSLDQPVXX

SEQ ID NO: 76042 - protein, 40 aa, Artificial Sequence; identical to SEQ ID NO: 18466
  GFR-binding peptide
  MOD_RES (1)..(35): Xaa is C or S
  MOD_RES (13)..(14)..(15)..(16)..(17): Xaa is A or G
  MOD_RES (18)..(19)..(20)..(21): Xaa is A or G or is absent

SEQ ID NO: 76043 - protein, 41 aa, Artificial Sequence; identical to SEQ ID NO: 18467
  GFR-binding peptide
  MOD_RES (2)..(4)..(38): Xaa is C or S

SEQ ID NO: 76044 - protein, 36 aa, Artificial Sequence
  GFR-binding peptide
  MOD_RES (1)..(3)..(35)..(36): Xaa is C or S
XGXSRVVMNSMEGLIVNSSDDMIQVTINSLKTPAXX

SEQ ID NO: 76045 - protein, 38 aa, Artificial Sequence; identical to SEQ ID NO: 18468
  GFR-binding peptide
  MOD_RES (2)..(4): Xaa is C or S
  MOD_RES (17)..(18)..(19)..(20)..(21): Xaa is A or G
  MOD_RES (22)..(23)..(24)..(25): Xaa is A or G or is absent

SEQ ID NO: 76046 - protein, 41 aa, Artificial Sequence; identical to SEQ ID NO: 18470
  GFR-binding peptide
  MOD_RES (1)..(3)..(40): Xaa is C or S
  MOD_RES (16)..(17)..(18)..(19)..(20): Xaa is A or G
  MOD_RES (21)..(22)..(23)..(24): Xaa is A or G or is absent

SEQ ID NO: 76047 - protein, 39 aa, Artificial Sequence; identical to SEQ ID NO: 51033
  GFR-binding peptide
  MOD_RES (2)..(33)..(34): Xaa is C or S

SEQ ID NO: 76048 - protein, 39 aa, Artificial Sequence; identical to SEQ ID NO: 18471
  GFR-binding peptide
  MOD_RES (1)..(3): Xaa is C or S
  MOD_RES (16)..(17)..(18)..(19)..(20): Xaa is A or G
  MOD_RES (21)..(22)..(23)..(24): Xaa is A or G or is absent

SEQ ID NO: 76049 - protein, 39 aa, Artificial Sequence
  GFR-binding peptide
  MOD_RES (34)..(35): Xaa is C or S
  MOD_RES (12)..(13)..(14)..(15)..(16): Xaa is A or G
  MOD_RES (17)..(18)..(19)..(20): Xaa is A or G or is absent
AEVVMDSMEGLXXXXXXXXXMIQITINSLRAPVXXSAPA

SEQ ID NO: 76050 - protein, 41 aa, Artificial Sequence; identical to SEQ ID NO: 18472
  GFR-binding peptide
  MOD_RES (1)..(3)..(37): Xaa is C or S
  MOD_RES (15)..(16)..(17)..(18)..(19): Xaa is A or G
  MOD_RES (20)..(21)..(22)..(23): Xaa is A or G or is absent

SEQ ID NO: 76051 - protein, 40 aa, Artificial Sequence
  GFR-binding peptide
  MOD_RES (34)..(35): Xaa is C or S
  MOD_RES (12)..(13)..(14)..(15)..(16): Xaa is A or G
  MOD_RES (17)..(18)..(19)..(20): Xaa is A or G or is absent
SEVVMDSMEGLXXXXXXXXXMIQITINSLRTPVXXTPPTS

SEQ ID NO: 76052 - protein, 42 aa, Artificial Sequence; identical to SEQ ID NO: 18474
  GFR-binding peptide
  MOD_RES (2)..(36): Xaa is C or S

SEQ ID NO: 76053 - protein, 38 aa, Artificial Sequence
  GFR-binding peptide
  MOD_RES (1)..(3)..(34)..(35): Xaa is C or S
XKXSKVVMSMEGLVKPTRGVMIQITINSLDQPVXXPSA

SEQ ID NO: 76054 - protein, 37 aa, Artificial Sequence
  GFR-binding peptide
  MOD_RES (2)..(4)..(35)..(36): Xaa is C or S
SXKXSKVVMSMEGLVKPTRGVMIQITINSLDQPVXXP

SEQ ID NO: 76055 - protein, 40 aa, Artificial Sequence; identical to SEQ ID NO: 18475
  GFR-binding peptide
  MOD_RES (34)..(34): Xaa is C or S
  MOD_RES (12)..(13)..(14)..(15)..(16): Xaa is A or G
  MOD_RES (17)..(18)..(19)..(20): Xaa is A or G or is absent

SEQ ID NO: 76056 - protein, 34 aa, Artificial Sequence
  GFR-binding peptide
  MOD_RES (31)..(32): Xaa is C or S
SRVIMSMEGLVKPKRGVMIQITINSLAQPVXXPA

SEQ ID NO: 76057 - protein, 40 aa, Artificial Sequence; identical to SEQ ID NO: 18477
  GFR-binding peptide
  MOD_RES (1)..(38): Xaa is C or S

SEQ ID NO: 76058 - protein, 44 aa, Artificial Sequence; identical to SEQ ID NO: 18478
  GFR-binding peptide
  MOD_RES (2)..(4)..(38): Xaa is C or S

SEQ ID NO: 76059 - protein, 40 aa, Artificial Sequence
  GFR-binding peptide
  MOD_RES (1)..(35)..(36): Xaa is C or S
  MOD_RES (13)..(14)..(15)..(16)..(17): Xaa is A or G
  MOD_RES (18)..(19)..(20)..(21): Xaa is A or G or is absent
XSEVVMDSMEGIXXXXXXXXXMIQITINSLRTPVXXTPPT

SEQ ID NO: 76060 - protein, 34 aa, Artificial Sequence
  GFR-binding peptide
  MOD_RES (32)..(33): Xaa is C or S
RDVVMGSMEGLIIQQKDNMIQMTINSMKTPTXXP

SEQ ID NO: 76061 - protein, 37 aa, Artificial Sequence; identical to SEQ ID NO: 18481
  GFR-binding peptide
  MOD_RES (34)..(34): Xaa is C or S
  MOD_RES (12)..(13)..(14)..(15)..(16): Xaa is A or G
  MOD_RES (17)..(18)..(19)..(20): Xaa is A or G or is absent

SEQ ID NO: 76062 - protein, 39 aa, Artificial Sequence; identical to SEQ ID NO: 18482
  GFR-binding peptide
  MOD_RES (1)..(38): Xaa is C or S
  MOD_RES (14)..(15)..(16)..(17)..(18): Xaa is A or G
  MOD_RES (19)..(20)..(21)..(22): Xaa is A or G or is absent

SEQ ID NO: 76063 - protein, 38 aa, Artificial Sequence
  GFR-binding peptide
  MOD_RES (1)..(33)..(34): Xaa is C or S
XRDVVMGSMEGLIIQQKDNMIQMTINSMKTPTXXPGAS

SEQ ID NO: 76064 - protein, 33 aa, Artificial Sequence; identical to SEQ ID NO: 18483
  GFR-binding peptide

SEQ ID NO: 76065 - protein, 40 aa, Artificial Sequence; identical to SEQ ID NO: 18484
  GFR-binding peptide
  MOD_RES (36)..(36): Xaa is C or S

SEQ ID NO: 76066 - protein, 36 aa, Artificial Sequence; identical to SEQ ID NO: 18485
  GFR-binding peptide
  MOD_RES (1)..(1): Xaa is C or S

SEQ ID NO: 76067 - protein, 43 aa, Artificial Sequence; identical to SEQ ID NO: 18486
  GFR-binding peptide
  MOD_RES (2)..(4)..(38): Xaa is C or S

SEQ ID NO: 76068 - protein, 37 aa, Artificial Sequence
  GFR-binding peptide
  MOD_RES (33)..(34): Xaa is C or S
  MOD_RES (11)..(12)..(13)..(14)..(15): Xaa is A or G
  MOD_RES (16)..(17)..(18)..(19): Xaa is A or G or is absent
EVVMDSMEGLXXXXXXXXXMIQITINSLRAPVXXSAP

SEQ ID NO: 76069 - protein, 40 aa, Artificial Sequence
  GFR-binding peptide
  MOD_RES (34)..(35): Xaa is C or S
  MOD_RES (12)..(13)..(14)..(15)..(16): Xaa is A or G
  MOD_RES (17)..(18)..(19)..(20): Xaa is A or G or is absent
AEVVMDSMEGLXXXXXXXXXMIQITINSLRAPVXXSAPAA

SEQ ID NO: 76070 - protein, 42 aa, Artificial Sequence; identical to SEQ ID NO: 18488
  GFR-binding peptide
  MOD_RES (1)..(3)..(40): Xaa is C or S
  MOD_RES (16)..(17)..(18)..(19)..(20): Xaa is A or G
  MOD_RES (21)..(22)..(23)..(24): Xaa is A or G or is absent

SEQ ID NO: 76071 - protein, 39 aa, Artificial Sequence
  GFR-binding peptide
  MOD_RES (1)..(35)..(36): Xaa is C or S
  MOD_RES (13)..(14)..(15)..(16)..(17): Xaa is A or G
  MOD_RES (18)..(19)..(20)..(21): Xaa is A or G or is absent
XRDVVMGSMEGIXXXXXXXXXMIQMTINSMKTPTXXPGA

SEQ ID NO: 76072 - protein, 34 aa, Artificial Sequence; identical to SEQ ID NO: 48538
  GFR-binding peptide
  MOD_RES (1)..(32)..(33): Xaa is C or S

SEQ ID NO: 76073 - protein, 39 aa, Artificial Sequence
  GFR-binding peptide
  MOD_RES (1)..(34)..(35): Xaa is C or S
  MOD_RES (12)..(13)..(14)..(15)..(16): Xaa is A or G
  MOD_RES (17)..(18)..(19)..(20): Xaa is A or G or is absent
XSRVIMSMEGLXXXXXXXXXMIQITINSLAQPVXXPAAS

SEQ ID NO: 76074 - protein, 37 aa, Artificial Sequence; identical to SEQ ID NO: 48542
  GFR-binding peptide
  MOD_RES (32)..(33): Xaa is C or S

SEQ ID NO: 76075 - protein, 34 aa, Artificial Sequence
  GFR-binding peptide
  MOD_RES (2)..(33)..(34): Xaa is C or S
GXEEVIMSMEGLLLVRGNDMIQMTINSTKVPAXX

SEQ ID NO: 76076 - protein, 32 aa, Artificial Sequence
  GFR-binding peptide
  MOD_RES (1)..(1): Xaa is C or S
XAEVVMDSMEGIVVNNAADMIQITINSLRAPV

SEQ ID NO: 76077 - protein, 32 aa, Artificial Sequence
  GFR-binding peptide
  MOD_RES (31)..(32): Xaa is C or S
EVVMDSMEGIVVNNASDMIQITINSLRTPVXX

SEQ ID NO: 76078 - protein, 34 aa, Artificial Sequence
  GFR-binding peptide
  MOD_RES (32)..(33): Xaa is C or S
AEVVMDSMEGIVVNNAADMIQITINSLRAPVXXS

SEQ ID NO: 76079 - protein, 34 aa, Artificial Sequence; identical to SEQ ID NO: 48549
  GFR-binding peptide
  MOD_RES (34)..(34): Xaa is C or S
  MOD_RES (12)..(13)..(14)..(15)..(16): Xaa is A or G
  MOD_RES (17)..(18)..(19)..(20): Xaa is A or G or is absent

SEQ ID NO: 76080 - protein, 32 aa, Artificial Sequence; identical to SEQ ID NO: 18496
  GFR-binding peptide
  MOD_RES (11)..(12)..(13)..(14)..(15): Xaa is A or G
  MOD_RES (16)..(17)..(18)..(19): Xaa is A or G or is absent

SEQ ID NO: 76081 - protein, 34 aa, Artificial Sequence
  GFR-binding peptide
  MOD_RES (2)..(33)..(34): Xaa is C or S
GXEEVIMSMEGILLVRGNDMIQMTINSTKVPAXX

SEQ ID NO: 76082 - protein, 37 aa, Artificial Sequence
  GFR-binding peptide
  MOD_RES (2)..(4): Xaa is C or S
  MOD_RES (16)..(17)..(18)..(19)..(20): Xaa is A or G
  MOD_RES (21)..(22)..(23)..(24): Xaa is A or G or is absent
RXGXSEVVMDSMEGLXXXXXXXXXMIQITINSLRTPV

SEQ ID NO: 76083 - protein, 41 aa, Artificial Sequence; identical to SEQ ID NO: 18497
  GFR-binding peptide
  MOD_RES (37)..(37): Xaa is C or S
  MOD_RES (13)..(14)..(15)..(16)..(17): Xaa is A or G
  MOD_RES (18)..(19)..(20)..(21): Xaa is A or G or is absent

SEQ ID NO: 76084 - protein, 38 aa, Artificial Sequence
  GFR-binding peptide
  MOD_RES (1)..(3)..(36)..(37): Xaa is C or S
  MOD_RES (14)..(15)..(16)..(17)..(18): Xaa is A or G
  MOD_RES (19)..(20)..(21)..(22): Xaa is A or G or is absent
XGXEEVIMSMEGLXXXXXXXXXMIQMTINSTKVPAXXT

SEQ ID NO: 76085 - protein, 37 aa, Artificial Sequence; identical to SEQ ID NO: 18498
  GFR-binding peptide
  MOD_RES (1)..(3): Xaa is C or S
  MOD_RES (16)..(17)..(18)..(19)..(20): Xaa is A or G
  MOD_RES (21)..(22)..(23)..(24): Xaa is A or G or is absent

SEQ ID NO: 76086 - protein, 37 aa, Artificial Sequence
  GFR-binding peptide
  MOD_RES (33)..(34): Xaa is C or S
  MOD_RES (11)..(12)..(13)..(14)..(15): Xaa is A or G
  MOD_RES (16)..(17)..(18)..(19): Xaa is A or G or is absent
RVVMNSMEGLXXXXXXXXXMIQVTINSLKTPAXXPKP

SEQ ID NO: 76087 - protein, 33 aa, Artificial Sequence; identical to SEQ ID NO: 18499
  GFR-binding peptide

SEQ ID NO: 76088 - protein, 32 aa, Artificial Sequence; identical to SEQ ID NO: 51079
  GFR-binding peptide
  MOD_RES (2)..(2): Xaa is C or S

SEQ ID NO: 76089 - protein, 35 aa, Artificial Sequence
  GFR-binding peptide
  MOD_RES (33)..(34): Xaa is C or S
  MOD_RES (11)..(12)..(13)..(14)..(15): Xaa is A or G
  MOD_RES (16)..(17)..(18)..(19): Xaa is A or G or is absent
EEVIMSMEGLXXXXXXXXXMIQMTINSTKVPAXXT

SEQ ID NO: 76090 - protein, 44 aa, Artificial Sequence
  GFR-binding peptide
  MOD_RES (2)..(4)..(38)..(39): Xaa is C or S
  MOD_RES (16)..(17)..(18)..(19)..(20): Xaa is A or G
  MOD_RES (21)..(22)..(23)..(24): Xaa is A or G or is absent
SXGXRDVVMGSMEGLXXXXXXXXXMIQMTINSMKTPTXXPGASG

SEQ ID NO: 76091 - protein, 43 aa, Artificial Sequence
  GFR-binding peptide
  MOD_RES (1)..(3)..(37)..(38): Xaa is C or S
  MOD_RES (15)..(16)..(17)..(18)..(19): Xaa is A or G
  MOD_RES (20)..(21)..(22)..(23): Xaa is A or G or is absent
XGXAEVVMDSMEGLXXXXXXXXXMIQITINSLRAPVXXSAPAA

SEQ ID NO: 76092 - protein, 36 aa, Artificial Sequence; identical to SEQ ID NO: 18501
  GFR-binding peptide
  MOD_RES (1)..(3): Xaa is C or S
  MOD_RES (15)..(16)..(17)..(18)..(19): Xaa is A or G
  MOD_RES (20)..(21)..(22)..(23): Xaa is A or G or is absent

SEQ ID NO: 76093 - protein, 38 aa, Artificial Sequence; identical to SEQ ID NO: 18502
  GFR-binding peptide
  MOD_RES (1)..(3): Xaa is C or S

SEQ ID NO: 76094 - protein, 37 aa, Artificial Sequence
  GFR-binding peptide
  MOD_RES (2)..(34)..(35): Xaa is C or S
GXRDVVMGSMEGIIIQQKDNMIQMTINSMKTPTXXPG

SEQ ID NO: 76095 - protein, 40 aa, Artificial Sequence; identical to SEQ ID NO: 18503
  GFR-binding peptide
  MOD_RES (1)..(3)..(37): Xaa is C or S
  MOD_RES (15)..(16)..(17)..(18)..(19): Xaa is A or G
  MOD_RES (20)..(21)..(22)..(23): Xaa is A or G or is absent

SEQ ID NO: 76096 - protein, 41 aa, Artificial Sequence; identical to SEQ ID NO: 18505
  GFR-binding peptide
  MOD_RES (2)..(36): Xaa is C or S
  MOD_RES (14)..(15)..(16)..(17)..(18): Xaa is A or G
  MOD_RES (19)..(20)..(21)..(22): Xaa is A or G or is absent

SEQ ID NO: 76097 - protein, 37 aa, Artificial Sequence; identical to SEQ ID NO: 18506
  GFR-binding peptide
  MOD_RES (35)..(35): Xaa is C or S

SEQ ID NO: 76098 - protein, 33 aa, Artificial Sequence
  GFR-binding peptide
  MOD_RES (31)..(32): Xaa is C or S
EVVMDSMEGLVVNNAADMIQITINSLRAPVXXS

SEQ ID NO: 76099 - protein, 38 aa, Artificial Sequence
  GFR-binding peptide
  MOD_RES (1)..(35)..(36): Xaa is C or S
  MOD_RES (13)..(14)..(15)..(16)..(17): Xaa is A or G
  MOD_RES (18)..(19)..(20)..(21): Xaa is A or G or is absent
XRDVVMGSMEGIXXXXXXXXXMIQMTINSMKTPTXXPG

SEQ ID NO: 76100 - protein, 37 aa, Artificial Sequence
  GFR-binding peptide
  MOD_RES (2)..(34)..(35): Xaa is C or S
GXAEVVMDSMEGLVVNNAADMIQITINSLRAPVXXSA

SEQ ID NO: 76101 - protein, 40 aa, Artificial Sequence
  GFR-binding peptide
  MOD_RES (2)..(4)..(36)..(37): Xaa is C or S
RXGXAEVVMDSMEGLVVNNAADMIQITINSLRAPVXXSAP

SEQ ID NO: 76102 - protein, 38 aa, Artificial Sequence; identical to SEQ ID NO: 18510
  GFR-binding peptide
  MOD_RES (34)..(34): Xaa is C or S
  MOD_RES (12)..(13)..(14)..(15)..(16): Xaa is A or G
  MOD_RES (17)..(18)..(19)..(20): Xaa is A or G or is absent

SEQ ID NO: 76103 - protein, 39 aa, Artificial Sequence
  GFR-binding peptide
  MOD_RES (2)..(4)..(37)..(38): Xaa is C or S
  MOD_RES (15)..(16)..(17)..(18)..(19): Xaa is A or G
  MOD_RES (20)..(21)..(22)..(23): Xaa is A or G or is absent
SXKXSRVIMSMEGLXXXXXXXXXMIQITINSLAQPVXXP

SEQ ID NO: 76104 - protein, 32 aa, Artificial Sequence
  GFR-binding peptide
  MOD_RES (1)..(32): Xaa is C or S
XEEVIMSMEGILLVRGNDMIQMTINSTKVPAX

SEQ ID NO: 76105 - protein, 39 aa, Artificial Sequence
  GFR-binding peptide
  MOD_RES (2)..(36)..(37): Xaa is C or S
  MOD_RES (14)..(15)..(16)..(17)..(18): Xaa is A or G
  MOD_RES (19)..(20)..(21)..(22): Xaa is A or G or is absent
GXAEVVMDSMEGLXXXXXXXXXMIQITINSLRAPVXXSA

SEQ ID NO: 76106 - protein, 35 aa, Artificial Sequence; identical to SEQ ID NO: 18512
  GFR-binding peptide
  MOD_RES (1)..(1): Xaa is C or S

SEQ ID NO: 76107 - protein, 41 aa, Artificial Sequence
  GFR-binding peptide
  MOD_RES (1)..(3)..(37)..(38): Xaa is C or S
  MOD_RES (15)..(16)..(17)..(18)..(19): Xaa is A or G
  MOD_RES (20)..(21)..(22)..(23): Xaa is A or G or is absent
XGXSEVVMDSMEGIXXXXXXXXXMIQITINSLRTPVXXTPP

SEQ ID NO: 76108 - protein, 31 aa, Artificial Sequence
  GFR-binding peptide
  MOD_RES (1)..(1): Xaa is C or S
XSKVVMSMEGLVKPTRGVMIQITINSLDQPV

SEQ ID NO: 76109 - protein, 38 aa, Artificial Sequence; identical to SEQ ID NO: 18513
  GFR-binding peptide
  MOD_RES (36)..(36): Xaa is C or S

SEQ ID NO: 76110 - protein, 36 aa, Artificial Sequence
  GFR-binding peptide
  MOD_RES (33)..(34): Xaa is C or S
  MOD_RES (11)..(12)..(13)..(14)..(15): Xaa is A or G
  MOD_RES (16)..(17)..(18)..(19): Xaa is A or G or is absent
DVVMGSMEGLXXXXXXXXXMIQMTINSMKTPTXXPG

SEQ ID NO: 76111 - protein, 39 aa, Artificial Sequence
  GFR-binding peptide
  MOD_RES (2)..(4)..(38)..(39): Xaa is C or S
  MOD_RES (16)..(17)..(18)..(19)..(20): Xaa is A or G
  MOD_RES (21)..(22)..(23)..(24): Xaa is A or G or is absent
RXGXSEVVMDSMEGIXXXXXXXXXMIQITINSLRTPVXX

SEQ ID NO: 76112 - protein, 42 aa, Artificial Sequence; identical to SEQ ID NO: 18517
  GFR-binding peptide
  MOD_RES (2)..(39): Xaa is C or S

SEQ ID NO: 76113 - protein, 40 aa, Artificial Sequence
  GFR-binding peptide
  MOD_RES (1)..(3)..(35)..(36): Xaa is C or S
XGXSRVVMNSMEGLIVNSSDDMIQVTINSLKTPAXXPKPV

SEQ ID NO: 76114 - protein, 38 aa, Artificial Sequence
  GFR-binding peptide
  MOD_RES (2)..(4)..(38): Xaa is C or S
  MOD_RES (16)..(17)..(18)..(19)..(20): Xaa is A or G
  MOD_RES (21)..(22)..(23)..(24): Xaa is A or G or is absent
RXGXAEVVMDSMEGIXXXXXXXXXMIQITINSLRAPVX

SEQ ID NO: 76115 - protein, 38 aa, Artificial Sequence; identical to SEQ ID NO: 18518
  GFR-binding peptide
  MOD_RES (34)..(34): Xaa is C or S

SEQ ID NO: 76116 - protein, 33 aa, Artificial Sequence; identical to SEQ ID NO: 51104
  GFR-binding peptide
  MOD_RES (2)..(33): Xaa is C or S

SEQ ID NO: 76117 - protein, 36 aa, Artificial Sequence; identical to SEQ ID NO: 18520
  GFR-binding peptide
  MOD_RES (1)..(1): Xaa is C or S

SEQ ID NO: 76118 - protein, 36 aa, Artificial Sequence; identical to SEQ ID NO: 18524
  GFR-binding peptide
  MOD_RES (35)..(35): Xaa is C or S

SEQ ID NO: 76119 - protein, 37 aa, Artificial Sequence; identical to SEQ ID NO: 18525
  GFR-binding peptide
  MOD_RES (2)..(2): Xaa is C or S
  MOD_RES (15)..(16)..(17)..(18)..(19): Xaa is A or G
  MOD_RES (20)..(21)..(22)..(23): Xaa is A or G or is absent

SEQ ID NO: 76120 - protein, 33 aa, Artificial Sequence; identical to SEQ ID NO: 18526
  GFR-binding peptide

SEQ ID NO: 76121 - protein, 37 aa, Artificial Sequence
  GFR-binding peptide
  MOD_RES (2)..(34)..(35): Xaa is C or S
GXSRVVMNSMEGLIVNSSDDMIQVTINSLKTPAXXPK

SEQ ID NO: 76122 - protein, 34 aa, Artificial Sequence; identical to SEQ ID NO: 18527
  GFR-binding peptide

SEQ ID NO: 76123 - protein, 34 aa, Artificial Sequence
  GFR-binding peptide
  MOD_RES (2)..(34): Xaa is C or S
GXRDVVMGSMEGLIIQQKDNMIQMTINSMKTPTX

SEQ ID NO: 76124 - protein, 36 aa, Artificial Sequence; identical to SEQ ID NO: 18529
  GFR-binding peptide
  MOD_RES (35)..(35): Xaa is C or S

SEQ ID NO: 76125 - protein, 37 aa, Artificial Sequence; identical to SEQ ID NO: 51117
  GFR-binding peptide
  MOD_RES (2)..(33)..(34): Xaa is C or S

SEQ ID NO: 76126 - protein, 42 aa, Artificial Sequence
  GFR-binding peptide
  MOD_RES (2)..(4)..(37)..(38): Xaa is C or S
  MOD_RES (15)..(16)..(17)..(18)..(19): Xaa is A or G
  MOD_RES (20)..(21)..(22)..(23): Xaa is A or G or is absent
SXKXSRVIMSMEGLXXXXXXXXXMIQITINSLAQPVXXPAAS

SEQ ID NO: 76127 - protein, 38 aa, Artificial Sequence
  GFR-binding peptide
  MOD_RES (2)..(35)..(36): Xaa is C or S
  MOD_RES (13)..(14)..(15)..(16)..(17): Xaa is A or G
  MOD_RES (18)..(19)..(20)..(21): Xaa is A or G or is absent
KXSKVIMSMEGLXXXXXXXXXMIQITINSLDQSVXXPS

SEQ ID NO: 76128 - protein, 38 aa, Artificial Sequence
  GFR-binding peptide
  MOD_RES (2)..(36)..(37): Xaa is C or S
  MOD_RES (14)..(15)..(16)..(17)..(18): Xaa is A or G
  MOD_RES (19)..(20)..(21)..(22): Xaa is A or G or is absent
GXAEVVMDSMEGIXXXXXXXXXMIQITINSLRAPVXXS

SEQ ID NO: 76129 - protein, 37 aa, Artificial Sequence
  GFR-binding peptide
  MOD_RES (2)..(33)..(34): Xaa is C or S
KXSRVIMSMEGLVKPKRGVMIQITINSLAQPVXXPAA

SEQ ID NO: 76130 - protein, 35 aa, Artificial Sequence
  GFR-binding peptide
  MOD_RES (2)..(4)..(35): Xaa is C or S
LXGXEEVIMSMEGILLVRGNDMIQMTINSTKVPAX

SEQ ID NO: 76131 - protein, 38 aa, Artificial Sequence; identical to SEQ ID NO: 18533
  GFR-binding peptide
  MOD_RES (35)..(35): Xaa is C or S
  MOD_RES (11)..(12)..(13)..(14)..(15): Xaa is A or G
  MOD_RES (16)..(17)..(18)..(19): Xaa is A or G or is absent

SEQ ID NO: 76132 - protein, 33 aa, Artificial Sequence
  GFR-binding peptide
  MOD_RES (1)..(33): Xaa is C or S
XRDVVMGSMEGLIIQQKDNMIQMTINSMKTPTX

SEQ ID NO: 76133 - protein, 32 aa, Artificial Sequence; identical to SEQ ID NO: 51128
  GFR-binding peptide
  MOD_RES (11)..(12)..(13)..(14)..(15): Xaa is A or G
  MOD_RES (16)..(17)..(18)..(19): Xaa is A or G or is absent

SEQ ID NO: 76134 - protein, 35 aa, Artificial Sequence
  GFR-binding peptide
  MOD_RES (2)..(2): Xaa is C or S
  MOD_RES (14)..(15)..(16)..(17)..(18): Xaa is A or G
  MOD_RES (19)..(20)..(21)..(22): Xaa is A or G or is absent
GXAEVVMDSMEGIXXXXXXXXXMIQITINSLRAPV

SEQ ID NO: 76135 - protein, 38 aa, Artificial Sequence; identical to SEQ ID NO: 51132
  GFR-binding peptide
  MOD_RES (2)..(4)..(37)..(38): Xaa is C or S
  MOD_RES (15)..(16)..(17)..(18)..(19): Xaa is A or G
  MOD_RES (20)..(21)..(22)..(23): Xaa is A or G or is absent

SEQ ID NO: 76136 - protein, 38 aa, Artificial Sequence; identical to SEQ ID NO: 18537
  GFR-binding peptide
  MOD_RES (2)..(4)..(38): Xaa is C or S
  MOD_RES (16)..(17)..(18)..(19)..(20): Xaa is A or G
  MOD_RES (21)..(22)..(23)..(24): Xaa is A or G or is absent

SEQ ID NO: 76137 - protein, 41 aa, Artificial Sequence; identical to SEQ ID NO: 48620
  GFR-binding peptide
  MOD_RES (1)..(3)..(36)..(37): Xaa is C or S
  MOD_RES (14)..(15)..(16)..(17)..(18): Xaa is A or G
  MOD_RES (19)..(20)..(21)..(22): Xaa is A or G or is absent

SEQ ID NO: 76138 - protein, 40 aa, Artificial Sequence; identical to SEQ ID NO: 18542
  GFR-binding peptide
  MOD_RES (2)..(4)..(38): Xaa is C or S
  MOD_RES (16)..(17)..(18)..(19)..(20): Xaa is A or G
  MOD_RES (21)..(22)..(23)..(24): Xaa is A or G or is absent

SEQ ID NO: 76139 - protein, 38 aa, Artificial Sequence
  GFR-binding peptide
  MOD_RES (1)..(3)..(35)..(36): Xaa is C or S
XGXSEVVMDSMEGIVVNNASDMIQITINSLRTPVXXTP

SEQ ID NO: 76140 - protein, 41 aa, Artificial Sequence; identical to SEQ ID NO: 18544
  GFR-binding peptide
  MOD_RES (2)..(4)..(38): Xaa is C or S
  MOD_RES (16)..(17)..(18)..(19)..(20): Xaa is A or G
  MOD_RES (21)..(22)..(23)..(24): Xaa is A or G or is absent

SEQ ID NO: 76141 - protein, 34 aa, Artificial Sequence
  GFR-binding peptide
  MOD_RES (1)..(33)..(34): Xaa is C or S
XAEVVMDSMEGIVVNNAADMIQITINSLRAPVXX

SEQ ID NO: 76142 - protein, 36 aa, Artificial Sequence
  GFR-binding peptide
  MOD_RES (2)..(4)..(36): Xaa is C or S
RXGXAEVVMDSMEGLVVNNAADMIQITINSLRAPVX

SEQ ID NO: 76143 - protein, 36 aa, Artificial Sequence
  GFR-binding peptide
  MOD_RES (33)..(34): Xaa is C or S
  MOD_RES (11)..(12)..(13)..(14)..(15): Xaa is A or G
  MOD_RES (16)..(17)..(18)..(19): Xaa is A or G or is absent
SKVVMSMEGLXXXXXXXXXMIQITINSLDQPVXXPS

SEQ ID NO: 76144 - protein, 41 aa, Artificial Sequence; identical to SEQ ID NO: 18546
  GFR-binding peptide
  MOD_RES (2)..(36): Xaa is C or S

SEQ ID NO: 76145 - protein, 41 aa, Artificial Sequence
  GFR-binding peptide
  MOD_RES (2)..(4)..(38)..(39): Xaa is C or S
  MOD_RES (16)..(17)..(18)..(19)..(20): Xaa is A or G
  MOD_RES (21)..(22)..(23)..(24): Xaa is A or G or is absent
RXGXSEVVMDSMEGLXXXXXXXXXMIQITINSLRTPVXXTP

SEQ ID NO: 76146 - protein, 36 aa, Artificial Sequence; identical to SEQ ID NO: 18549
  GFR-binding peptide
  MOD_RES (36)..(36): Xaa is C or S
  MOD_RES (12)..(13)..(14)..(15)..(16): Xaa is A or G
  MOD_RES (17)..(18)..(19)..(20): Xaa is A or G or is absent

SEQ ID NO: 76147 - protein, 37 aa, Artificial Sequence; identical to SEQ ID NO: 18550
  GFR-binding peptide
  MOD_RES (1)..(3): Xaa is C or S

SEQ ID NO: 76148 - protein, 41 aa, Artificial Sequence
  GFR-binding peptide
  MOD_RES (1)..(3)..(37)..(38): Xaa is C or S
  MOD_RES (15)..(16)..(17)..(18)..(19): Xaa is A or G
  MOD_RES (20)..(21)..(22)..(23): Xaa is A or G or is absent
XGXSEVVMDSMEGLXXXXXXXXXMIQITINSLRTPVXXTPP

SEQ ID NO: 76149 - protein, 36 aa, Artificial Sequence
  GFR-binding peptide
  MOD_RES (1)..(32)..(33): Xaa is C or S
XEEVIMSMEGILLVRGNDMIQMTINSTKVPAXXTSP

SEQ ID NO: 76150 - protein, 36 aa, Artificial Sequence; identical to SEQ ID NO: 48640
  GFR-binding peptide
  MOD_RES (2)..(4)..(35)..(36): Xaa is C or S

SEQ ID NO: 76151 - protein, 43 aa, Artificial Sequence; identical to SEQ ID NO: 18553
  GFR-binding peptide
  MOD_RES (1)..(3)..(37): Xaa is C or S

SEQ ID NO: 76152 - protein, 45 aa, Artificial Sequence; identical to SEQ ID NO: 18554
  GFR-binding peptide
  MOD_RES (2)..(4)..(41): Xaa is C or S

SEQ ID NO: 76153 - protein, 37 aa, Artificial Sequence
  GFR-binding peptide
  MOD_RES (2)..(34)..(35): Xaa is C or S
GXAEVVMDSMEGIVVNNAADMIQITINSLRAPVXXSA

SEQ ID NO: 76154 - protein, 38 aa, Artificial Sequence; identical to SEQ ID NO: 18555
  GFR-binding peptide
  MOD_RES (1)..(38): Xaa is C or S
  MOD_RES (14)..(15)..(16)..(17)..(18): Xaa is A or G
  MOD_RES (19)..(20)..(21)..(22): Xaa is A or G or is absent

SEQ ID NO: 76155 - protein, 34 aa, Artificial Sequence; identical to SEQ ID NO: 18559
  GFR-binding peptide

SEQ ID NO: 76156 - protein, 37 aa, Artificial Sequence; identical to SEQ ID NO: 18560
  GFR-binding peptide
  MOD_RES (34)..(34): Xaa is C or S

SEQ ID NO: 76157 - protein, 40 aa, Artificial Sequence
  GFR-binding peptide
  MOD_RES (2)..(4)..(38)..(39): Xaa is C or S
  MOD_RES (16)..(17)..(18)..(19)..(20): Xaa is A or G
  MOD_RES (21)..(22)..(23)..(24): Xaa is A or G or is absent
RXGXAEVVMDSMEGIXXXXXXXXXMIQITINSLRAPVXXS

SEQ ID NO: 76158 - protein, 37 aa, Artificial Sequence; identical to SEQ ID NO: 51162
  GFR-binding peptide
  MOD_RES (1)..(3)..(36)..(37): Xaa is C or S
  MOD_RES (14)..(15)..(16)..(17)..(18): Xaa is A or G
  MOD_RES (19)..(20)..(21)..(22): Xaa is A or G or is absent

SEQ ID NO: 76159 - protein, 38 aa, Artificial Sequence
  GFR-binding peptide
  MOD_RES (1)..(34)..(35): Xaa is C or S
  MOD_RES (12)..(13)..(14)..(15)..(16): Xaa is A or G
  MOD_RES (17)..(18)..(19)..(20): Xaa is A or G or is absent
XEEVIMSMEGLXXXXXXXXXMIQMTINSTKVPAXXTSP

SEQ ID NO: 76160 - protein, 42 aa, Artificial Sequence; identical to SEQ ID NO: 18563
  GFR-binding peptide
  MOD_RES (1)..(3)..(37): Xaa is C or S
  MOD_RES (15)..(16)..(17)..(18)..(19): Xaa is A or G
  MOD_RES (20)..(21)..(22)..(23): Xaa is A or G or is absent

SEQ ID NO: 76161 - protein, 39 aa, Artificial Sequence
  GFR-binding peptide
  MOD_RES (1)..(3)..(36)..(37): Xaa is C or S
  MOD_RES (14)..(15)..(16)..(17)..(18): Xaa is A or G
  MOD_RES (19)..(20)..(21)..(22): Xaa is A or G or is absent
XGXEEVIMSMEGIXXXXXXXXXMIQMTINSTKVPAXXTS

SEQ ID NO: 76162 - protein, 32 aa, Artificial Sequence; identical to SEQ ID NO: 51165
  GFR-binding peptide
  MOD_RES (11)..(12)..(13)..(14)..(15): Xaa is A or G
  MOD_RES (16)..(17)..(18)..(19): Xaa is A or G or is absent

SEQ ID NO: 76163 - protein, 36 aa, Artificial Sequence; identical to SEQ ID NO: 48654
  GFR-binding peptide
  MOD_RES (1)..(34)..(35): Xaa is C or S
  MOD_RES (12)..(13)..(14)..(15)..(16): Xaa is A or G
  MOD_RES (17)..(18)..(19)..(20): Xaa is A or G or is absent

SEQ ID NO: 76164 - protein, 34 aa, Artificial Sequence; identical to SEQ ID NO: 18565
  GFR-binding peptide
  MOD_RES (13)..(14)..(15)..(16)..(17): Xaa is A or G
  MOD_RES (18)..(19)..(20)..(21): Xaa is A or G or is absent

SEQ ID NO: 76165 - protein, 44 aa, Artificial Sequence; identical to SEQ ID NO: 18566
  GFR-binding peptide
  MOD_RES (2)..(4)..(41): Xaa is C or S
  MOD_RES (17)..(18)..(19)..(20)..(21): Xaa is A or G
  MOD_RES (22)..(23)..(24)..(25): Xaa is A or G or is absent

SEQ ID NO: 76166 - protein, 38 aa, Artificial Sequence
  GFR-binding peptide
  MOD_RES (2)..(36)..(37): Xaa is C or S
  MOD_RES (14)..(15)..(16)..(17)..(18): Xaa is A or G
  MOD_RES (19)..(20)..(21)..(22): Xaa is A or G or is absent
GXRDVVMGSMEGIXXXXXXXXXMIQMTINSMKTPTXXP

SEQ ID NO: 76167 - protein, 42 aa, Artificial Sequence; identical to SEQ ID NO: 18568
  GFR-binding peptide
  MOD_RES (1)..(3)..(37): Xaa is C or S
  MOD_RES (15)..(16)..(17)..(18)..(19): Xaa is A or G
  MOD_RES (20)..(21)..(22)..(23): Xaa is A or G or is absent

SEQ ID NO: 76168 - protein, 39 aa, Artificial Sequence
  GFR-binding peptide
  MOD_RES (2)..(4)..(38)..(39): Xaa is C or S
  MOD_RES (16)..(17)..(18)..(19)..(20): Xaa is A or G
  MOD_RES (21)..(22)..(23)..(24): Xaa is A or G or is absent
RXGXAEVVMDSMEGLXXXXXXXXXMIQITINSLRAPVXX

SEQ ID NO: 76169 - protein, 39 aa, Artificial Sequence
  GFR-binding peptide
  MOD_RES (2)..(4)..(38)..(39): Xaa is C or S
  MOD_RES (16)..(17)..(18)..(19)..(20): Xaa is A or G
  MOD_RES (21)..(22)..(23)..(24): Xaa is A or G or is absent
SXGXRDVVMGSMEGIXXXXXXXXXMIQMTINSMKTPTXX

SEQ ID NO: 76170 - protein, 37 aa, Artificial Sequence
  GFR-binding peptide
  MOD_RES (2)..(36)..(37): Xaa is C or S
  MOD_RES (14)..(15)..(16)..(17)..(18): Xaa is A or G
  MOD_RES (19)..(20)..(21)..(22): Xaa is A or G or is absent
GXRDVVMGSMEGLXXXXXXXXXMIQMTINSMKTPTXX

SEQ ID NO: 76171 - protein, 35 aa, Artificial Sequence; identical to SEQ ID NO: 51176
  GFR-binding peptide
  MOD_RES (31)..(32): Xaa is C or S

SEQ ID NO: 76172 - protein, 34 aa, Artificial Sequence; identical to SEQ ID NO: 51177
  GFR-binding peptide
  MOD_RES (2)..(4): Xaa is C or S

SEQ ID NO: 76173 - protein, 31 aa, Artificial Sequence
  GFR-binding peptide
  MOD_RES (31)..(31): Xaa is C or S
EVVMDSMEGLVVNNASDMIQITINSLRTPVX

SEQ ID NO: 76174 - protein, 41 aa, Artificial Sequence; identical to SEQ ID NO: 18570
  GFR-binding peptide
  MOD_RES (2)..(36): Xaa is C or S

SEQ ID NO: 76175 - protein, 34 aa, Artificial Sequence
  GFR-binding peptide
  MOD_RES (33)..(34): Xaa is C or S
  MOD_RES (11)..(12)..(13)..(14)..(15): Xaa is A or G
  MOD_RES (16)..(17)..(18)..(19): Xaa is A or G or is absent
EVVMDSMEGIXXXXXXXXXMIQITINSLRAPVXX

SEQ ID NO: 76176 - protein, 33 aa, Artificial Sequence
  GFR-binding peptide
  MOD_RES (2)..(33): Xaa is C or S
GXEEVIMSMEGLLLVRGNDMIQMTINSTKVPAX

SEQ ID NO: 76177 - protein, 36 aa, Artificial Sequence
  GFR-binding peptide
  MOD_RES (2)..(36): Xaa is C or S
  MOD_RES (14)..(15)..(16)..(17)..(18): Xaa is A or G
  MOD_RES (19)..(20)..(21)..(22): Xaa is A or G or is absent
GXRDVVMGSMEGIXXXXXXXXXMIQMTINSMKTPTX

SEQ ID NO: 76178 - protein, 35 aa, Artificial Sequence; identical to SEQ ID NO: 18572
  GFR-binding peptide
  MOD_RES (12)..(13)..(14)..(15)..(16): Xaa is A or G
  MOD_RES (17)..(18)..(19)..(20): Xaa is A or G or is absent

SEQ ID NO: 76179 - protein, 39 aa, Artificial Sequence; identical to SEQ ID NO: 18573
  GFR-binding peptide
  MOD_RES (1)..(3): Xaa is C or S
  MOD_RES (16)..(17)..(18)..(19)..(20): Xaa is A or G
  MOD_RES (21)..(22)..(23)..(24): Xaa is A or G or is absent

SEQ ID NO: 76180 - protein, 33 aa, Artificial Sequence; identical to SEQ ID NO: 51187
  GFR-binding peptide
  MOD_RES (1)..(32)..(33): Xaa is C or S

SEQ ID NO: 76181 - protein, 39 aa, Artificial Sequence
  GFR-binding peptide
  MOD_RES (2)..(35)..(36): Xaa is C or S
  MOD_RES (13)..(14)..(15)..(16)..(17): Xaa is A or G
  MOD_RES (18)..(19)..(20)..(21): Xaa is A or G or is absent
KXSKVIMSMEGLXXXXXXXXXMIQITINSLDQSVXXPSA

SEQ ID NO: 76182 - protein, 36 aa, Artificial Sequence
  GFR-binding peptide
  MOD_RES (2)..(4): Xaa is C or S
  MOD_RES (15)..(16)..(17)..(18)..(19): Xaa is A or G
  MOD_RES (20)..(21)..(22)..(23): Xaa is A or G or is absent
SXKXSRVIMSMEGLXXXXXXXXXMIQITINSLAQPV

SEQ ID NO: 76183 - protein, 33 aa, Artificial Sequence
  GFR-binding peptide
  MOD_RES (32)..(33): Xaa is C or S
AEVVMDSMEGLVVNNAADMIQITINSLRAPVXX

SEQ ID NO: 76184 - protein, 39 aa, Artificial Sequence; identical to SEQ ID NO: 18574
  GFR-binding peptide
  MOD_RES (2)..(39): Xaa is C or S

SEQ ID NO: 76185 - protein, 37 aa, Artificial Sequence
  GFR-binding peptide
  MOD_RES (2)..(4): Xaa is C or S
  MOD_RES (16)..(17)..(18)..(19)..(20): Xaa is A or G
  MOD_RES (21)..(22)..(23)..(24): Xaa is A or G or is absent
HXGXSRVVMNSMEGLXXXXXXXXXMIQVTINSLKTPA

SEQ ID NO: 76186 - protein, 41 aa, Artificial Sequence; identical to SEQ ID NO: 18575
  GFR-binding peptide
  MOD_RES (2)..(39): Xaa is C or S

SEQ ID NO: 76187 - protein, 39 aa, Artificial Sequence; identical to SEQ ID NO: 18577
  GFR-binding peptide
  MOD_RES (34)..(34): Xaa is C or S
  MOD_RES (12)..(13)..(14)..(15)..(16): Xaa is A or G
  MOD_RES (17)..(18)..(19)..(20): Xaa is A or G or is absent

SEQ ID NO: 76188 - protein, 39 aa, Artificial Sequence; identical to SEQ ID NO: 18578
  GFR-binding peptide
  MOD_RES (1)..(3)..(37): Xaa is C or S

SEQ ID NO: 76189 - protein, 39 aa, Artificial Sequence; identical to SEQ ID NO: 18579
  GFR-binding peptide
  MOD_RES (2)..(36): Xaa is C or S
  MOD_RES (14)..(15)..(16)..(17)..(18): Xaa is A or G
  MOD_RES (19)..(20)..(21)..(22): Xaa is A or G or is absent

SEQ ID NO: 76190 - protein, 38 aa, Artificial Sequence
  GFR-binding peptide
  MOD_RES (1)..(33)..(34): Xaa is C or S
XRDVVMGSMEGIIIQQKDNMIQMTINSMKTPTXXPGAS

SEQ ID NO: 76191 - protein, 33 aa, Artificial Sequence
  GFR-binding peptide
  MOD_RES (33)..(33): Xaa is C or S
  MOD_RES (11)..(12)..(13)..(14)..(15): Xaa is A or G
  MOD_RES (16)..(17)..(18)..(19): Xaa is A or G or is absent
EVVMDSMEGIXXXXXXXXXMIQITINSLRTPVX

SEQ ID NO: 76192 - protein, 34 aa, Artificial Sequence; identical to SEQ ID NO: 51202
  GFR-binding peptide
  MOD_RES (2)..(33)..(34): Xaa is C or S

SEQ ID NO: 76193 - protein, 36 aa, Artificial Sequence
  GFR-binding peptide
  MOD_RES (2)..(4)..(35)..(36): Xaa is C or S
SXKXSRVIMSMEGLVKPKRGVMIQITINSLAQPVXX

SEQ ID NO: 76194 - protein, 38 aa, Artificial Sequence; identical to SEQ ID NO: 48679
  GFR-binding peptide
  MOD_RES (1)..(3)..(35)..(36): Xaa is C or S

SEQ ID NO: 76195 - protein, 38 aa, Artificial Sequence; identical to SEQ ID NO: 18580
  GFR-binding peptide
  MOD_RES (2)..(2): Xaa is C or S

SEQ ID NO: 76196 - protein, 35 aa, Artificial Sequence; identical to SEQ ID NO: 18581
  GFR-binding peptide
  MOD_RES (13)..(14)..(15)..(16)..(17): Xaa is A or G
  MOD_RES (18)..(19)..(20)..(21): Xaa is A or G or is absent

SEQ ID NO: 76197 - protein, 40 aa, Artificial Sequence; identical to SEQ ID NO: 18583
  GFR-binding peptide
  MOD_RES (1)..(3)..(40): Xaa is C or S
  MOD_RES (16)..(17)..(18)..(19)..(20): Xaa is A or G
  MOD_RES (21)..(22)..(23)..(24): Xaa is A or G or is absent

SEQ ID NO: 76198 - protein, 39 aa, Artificial Sequence; identical to SEQ ID NO: 18584
  GFR-binding peptide
  MOD_RES (2)..(4): Xaa is C or S
  MOD_RES (17)..(18)..(19)..(20)..(21): Xaa is A or G
  MOD_RES (22)..(23)..(24)..(25): Xaa is A or G or is absent

SEQ ID NO: 76199 - protein, 35 aa, Artificial Sequence
  GFR-binding peptide
  MOD_RES (2)..(4)..(35): Xaa is C or S
LXGXEEVIMSMEGLLLVRGNDMIQMTINSTKVPAX

SEQ ID NO: 76200 - protein, 34 aa, Artificial Sequence; identical to SEQ ID NO: 18590
  GFR-binding peptide
  MOD_RES (12)..(13)..(14)..(15)..(16): Xaa is A or G
  MOD_RES (17)..(18)..(19)..(20): Xaa is A or G or is absent

SEQ ID NO: 76201 - protein, 39 aa, Artificial Sequence; identical to SEQ ID NO: 18591
  GFR-binding peptide
  MOD_RES (1)..(38): Xaa is C or S

SEQ ID NO: 76202 - protein, 43 aa, Artificial Sequence
  GFR-binding peptide
  MOD_RES (2)..(4)..(38)..(39): Xaa is C or S
  MOD_RES (16)..(17)..(18)..(19)..(20): Xaa is A or G
  MOD_RES (21)..(22)..(23)..(24): Xaa is A or G or is absent
RXGXSEVVMDSMEGLXXXXXXXXXMIQITINSLRTPVXXTPPT

SEQ ID NO: 76203 - protein, 42 aa, Artificial Sequence; identical to SEQ ID NO: 18592
  GFR-binding peptide
  MOD_RES (1)..(38): Xaa is C or S

SEQ ID NO: 76204 - protein, 33 aa, Artificial Sequence; identical to SEQ ID NO: 18598
  GFR-binding peptide
  MOD_RES (12)..(13)..(14)..(15)..(16): Xaa is A or G
  MOD_RES (17)..(18)..(19)..(20): Xaa is A or G or is absent

SEQ ID NO: 76205 - protein, 37 aa, Artificial Sequence
  GFR-binding peptide
  MOD_RES (2)..(4): Xaa is C or S
  MOD_RES (16)..(17)..(18)..(19)..(20): Xaa is A or G
  MOD_RES (21)..(22)..(23)..(24): Xaa is A or G or is absent
SXGXRDVVMGSMEGLXXXXXXXXXMIQMTINSMKTPT

SEQ ID NO: 76206 - protein, 30 aa, Artificial Sequence; identical to SEQ ID NO: 48699
  GFR-binding peptide

SEQ ID NO: 76207 - protein, 32 aa, Artificial Sequence
  GFR-binding peptide
  MOD_RES (1)..(32): Xaa is C or S
XSKVIMSMEGLIKPTKGIMIQITINSLDQSVX

SEQ ID NO: 76208 - protein, 36 aa, Artificial Sequence; identical to SEQ ID NO: 18599
  GFR-binding peptide
  MOD_RES (1)..(35): Xaa is C or S
  MOD_RES (13)..(14)..(15)..(16)..(17): Xaa is A or G
  MOD_RES (18)..(19)..(20)..(21): Xaa is A or G or is absent

SEQ ID NO: 76209 - protein, 36 aa, Artificial Sequence; identical to SEQ ID NO: 48702
  GFR-binding peptide
  MOD_RES (2)..(33)..(34): Xaa is C or S

SEQ ID NO: 76210 - protein, 40 aa, Artificial Sequence; identical to SEQ ID NO: 18600
  GFR-binding peptide
  MOD_RES (2)..(4)..(38): Xaa is C or S

SEQ ID NO: 76211 - protein, 38 aa, Artificial Sequence; identical to SEQ ID NO: 51221
  GFR-binding peptide
  MOD_RES (2)..(34)..(35): Xaa is C or S

SEQ ID NO: 76212 - protein, 42 aa, Artificial Sequence; identical to SEQ ID NO: 18601
  GFR-binding peptide
  MOD_RES (2)..(4)..(38): Xaa is C or S
  MOD_RES (16)..(17)..(18)..(19)..(20): Xaa is A or G
  MOD_RES (21)..(22)..(23)..(24): Xaa is A or G or is absent

SEQ ID NO: 76213 - protein, 34 aa, Artificial Sequence; identical to SEQ ID NO: 18602
  GFR-binding peptide
  MOD_RES (11)..(12)..(13)..(14)..(15): Xaa is A or G
  MOD_RES (16)..(17)..(18)..(19): Xaa is A or G or is absent

SEQ ID NO: 76214 - protein, 35 aa, Artificial Sequence; identical to SEQ ID NO: 48709
  GFR-binding peptide
  MOD_RES (2)..(4): Xaa is C or S

SEQ ID NO: 76215 - protein, 35 aa, Artificial Sequence
  GFR-binding peptide
  MOD_RES (34)..(35): Xaa is C or S
  MOD_RES (12)..(13)..(14)..(15)..(16): Xaa is A or G
  MOD_RES (17)..(18)..(19)..(20): Xaa is A or G or is absent
SEVVMDSMEGIXXXXXXXXXMIQITINSLRTPVXX

SEQ ID NO: 76216 - protein, 35 aa, Artificial Sequence; identical to SEQ ID NO: 18603
  GFR-binding peptide
  MOD_RES (12)..(13)..(14)..(15)..(16): Xaa is A or G
  MOD_RES (17)..(18)..(19)..(20): Xaa is A or G or is absent

SEQ ID NO: 76217 - protein, 43 aa, Artificial Sequence; identical to SEQ ID NO: 18604
  GFR-binding peptide
  MOD_RES (2)..(4)..(41): Xaa is C or S
  MOD_RES (17)..(18)..(19)..(20)..(21): Xaa is A or G
  MOD_RES (22)..(23)..(24)..(25): Xaa is A or G or is absent

SEQ ID NO: 76218 - protein, 39 aa, Artificial Sequence; identical to SEQ ID NO: 18606
  GFR-binding peptide
  MOD_RES (2)..(4)..(38): Xaa is C or S

SEQ ID NO: 76219 - protein, 36 aa, Artificial Sequence; identical to SEQ ID NO: 18607
  GFR-binding peptide
  MOD_RES (1)..(35): Xaa is C or S
  MOD_RES (13)..(14)..(15)..(16)..(17): Xaa is A or G
  MOD_RES (18)..(19)..(20)..(21): Xaa is A or G or is absent

SEQ ID NO: 76220 - protein, 38 aa, Artificial Sequence
  GFR-binding peptide
  MOD_RES (2)..(4)..(35)..(36): Xaa is C or S
SXKXSKVVMSMEGLVKPTRGVMIQITINSLDQPVXXPS

SEQ ID NO: 76221 - protein, 33 aa, Artificial Sequence
  GFR-binding peptide
  MOD_RES (33)..(33): Xaa is C or S
  MOD_RES (11)..(12)..(13)..(14)..(15): Xaa is A or G
  MOD_RES (16)..(17)..(18)..(19): Xaa is A or G or is absent
EVVMDSMEGLXXXXXXXXXMIQITINSLRTPVX

SEQ ID NO: 76222 - protein, 34 aa, Artificial Sequence
  GFR-binding peptide
  MOD_RES (1)..(34): Xaa is C or S
  MOD_RES (12)..(13)..(14)..(15)..(16): Xaa is A or G
  MOD_RES (17)..(18)..(19)..(20): Xaa is A or G or is absent
XSKVIMSMEGLXXXXXXXXXMIQITINSLDQSVX

SEQ ID NO: 76223 - protein, 39 aa, Artificial Sequence; identical to SEQ ID NO: 18612
  GFR-binding peptide
  MOD_RES (1)..(3)..(37): Xaa is C or S
  MOD_RES (15)..(16)..(17)..(18)..(19): Xaa is A or G
  MOD_RES (20)..(21)..(22)..(23): Xaa is A or G or is absent

SEQ ID NO: 76224 - protein, 40 aa, Artificial Sequence; identical to SEQ ID NO: 18613
  GFR-binding peptide
  MOD_RES (1)..(3)..(40): Xaa is C or S

SEQ ID NO: 76225 - protein, 39 aa, Artificial Sequence
  GFR-binding peptide
  MOD_RES (2)..(34)..(35): Xaa is C or S
GXAEVVMDSMEGIVVNNAADMIQITINSLRAPVXXSAPA

SEQ ID NO: 76226 - protein, 44 aa, Artificial Sequence; identical to SEQ ID NO: 18615
  GFR-binding peptide
  MOD_RES (1)..(3)..(40): Xaa is C or S

SEQ ID NO: 76227 - protein, 33 aa, Artificial Sequence; identical to SEQ ID NO: 48730
  GFR-binding peptide
  MOD_RES (1)..(1): Xaa is C or S
  MOD_RES (12)..(13)..(14)..(15)..(16): Xaa is A or G
  MOD_RES (17)..(18)..(19)..(20): Xaa is A or G or is absent

SEQ ID NO: 76228 - protein, 42 aa, Artificial Sequence; identical to SEQ ID NO: 18616
  GFR-binding peptide
  MOD_RES (2)..(36): Xaa is C or S
  MOD_RES (14)..(15)..(16)..(17)..(18): Xaa is A or G
  MOD_RES (19)..(20)..(21)..(22): Xaa is A or G or is absent

SEQ ID NO: 76229 - protein, 34 aa, Artificial Sequence
  GFR-binding peptide
  MOD_RES (1)..(33)..(34): Xaa is C or S
XRDVVMGSMEGLIIQQKDNMIQMTINSMKTPTXX

SEQ ID NO: 76230 - protein, 42 aa, Artificial Sequence
  GFR-binding peptide
  MOD_RES (2)..(36)..(37): Xaa is C or S
  MOD_RES (14)..(15)..(16)..(17)..(18): Xaa is A or G
  MOD_RES (19)..(20)..(21)..(22): Xaa is A or G or is absent
GXRDVVMGSMEGLXXXXXXXXXMIQMTINSMKTPTXXPGASG

SEQ ID NO: 76231 - protein, 34 aa, Artificial Sequence
  GFR-binding peptide
  MOD_RES (1)..(33)..(34): Xaa is C or S
XRDVVMGSMEGIIIQQKDNMIQMTINSMKTPTXX

SEQ ID NO: 76232 - protein, 33 aa, Artificial Sequence
  GFR-binding peptide
  MOD_RES (1)..(33): Xaa is C or S
XAEVVMDSMEGIVVNNAADMIQITINSLRAPVX

SEQ ID NO: 76233 - protein, 37 aa, Artificial Sequence
  GFR-binding peptide
  MOD_RES (2)..(4)..(36)..(37): Xaa is C or S
SXGXRDVVMGSMEGLIIQQKDNMIQMTINSMKTPTXX

SEQ ID NO: 76234 - protein, 37 aa, Artificial Sequence
  GFR-binding peptide
  MOD_RES (1)..(3)..(37): Xaa is C or S
  MOD_RES (15)..(16)..(17)..(18)..(19): Xaa is A or G
  MOD_RES (20)..(21)..(22)..(23): Xaa is A or G or is absent
XGXAEVVMDSMEGIXXXXXXXXXMIQITINSLRAPVX

SEQ ID NO: 76235 - protein, 35 aa, Artificial Sequence
  GFR-binding peptide
  MOD_RES (1)..(35): Xaa is C or S
  MOD_RES (13)..(14)..(15)..(16)..(17): Xaa is A or G
  MOD_RES (18)..(19)..(20)..(21): Xaa is A or G or is absent
XSEVVMDSMEGLXXXXXXXXXMIQITINSLRTPVX

SEQ ID NO: 76236 - protein, 37 aa, Artificial Sequence; identical to SEQ ID NO: 18617
  GFR-binding peptide
  MOD_RES (35)..(35): Xaa is C or S

SEQ ID NO: 76237 - protein, 35 aa, Artificial Sequence
  GFR-binding peptide
  MOD_RES (1)..(35): Xaa is C or S
  MOD_RES (13)..(14)..(15)..(16)..(17): Xaa is A or G
  MOD_RES (18)..(19)..(20)..(21): Xaa is A or G or is absent
XSEVVMDSMEGIXXXXXXXXXMIQITINSLRTPVX

SEQ ID NO: 76238 - protein, 37 aa, Artificial Sequence; identical to SEQ ID NO: 18619
  GFR-binding peptide
  MOD_RES (35)..(35): Xaa is C or S

SEQ ID NO: 76239 - protein, 33 aa, Artificial Sequence
  GFR-binding peptide
  MOD_RES (1)..(33): Xaa is C or S
XAEVVMDSMEGLVVNNAADMIQITINSLRAPVX

SEQ ID NO: 76240 - protein, 36 aa, Artificial Sequence; identical to SEQ ID NO: 18620
  GFR-binding peptide
  MOD_RES (2)..(2): Xaa is C or S
  MOD_RES (15)..(16)..(17)..(18)..(19): Xaa is A or G
  MOD_RES (20)..(21)..(22)..(23): Xaa is A or G or is absent

SEQ ID NO: 76241 - protein, 37 aa, Artificial Sequence
  GFR-binding peptide
  MOD_RES (1)..(3)..(34)..(35): Xaa is C or S
XGXEEVIMSMEGLLLVRGNDMIQMTINSTKVPAXXTS

SEQ ID NO: 76242 - protein, 35 aa, Artificial Sequence
  GFR-binding peptide
  MOD_RES (2)..(35): Xaa is C or S
  MOD_RES (13)..(14)..(15)..(16)..(17): Xaa is A or G
  MOD_RES (18)..(19)..(20)..(21): Xaa is A or G or is absent
KXSRVIMSMEGLXXXXXXXXXMIQITINSLAQPVX

SEQ ID NO: 76243 - protein, 32 aa, Artificial Sequence
  GFR-binding peptide
  MOD_RES (1)..(1): Xaa is C or S
XSEVVMDSMEGLVVNNASDMIQITINSLRTPV

SEQ ID NO: 76244 - protein, 41 aa, Artificial Sequence; identical to SEQ ID NO: 18621
  GFR-binding peptide
  MOD_RES (1)..(3)..(40): Xaa is C or S

SEQ ID NO: 76245 - protein, 39 aa, Artificial Sequence
  GFR-binding peptide
  MOD_RES (1)..(3)..(35)..(36): Xaa is C or S
XGXSEVVMDSMEGIVVNNASDMIQITINSLRTPVXXTPP

SEQ ID NO: 76246 - protein, 39 aa, Artificial Sequence
  GFR-binding peptide
  MOD_RES (2)..(4)..(36)..(37): Xaa is C or S
RXGXSEVVMDSMEGLVVNNASDMIQITINSLRTPVXXTP

SEQ ID NO: 76247 - protein, 36 aa, Artificial Sequence
  GFR-binding peptide
  MOD_RES (33)..(34): Xaa is C or S
  MOD_RES (11)..(12)..(13)..(14)..(15): Xaa is A or G
  MOD_RES (16)..(17)..(18)..(19): Xaa is A or G or is absent
DVVMGSMEGIXXXXXXXXXMIQMTINSMKTPTXXPG

SEQ ID NO: 76248 - protein, 36 aa, Artificial Sequence
  GFR-binding peptide
  MOD_RES (2)..(4)..(35)..(36): Xaa is C or S
SXKXSKVVMSMEGLVKPTRGVMIQITINSLDQPVXX

SEQ ID NO: 76249 - protein, 40 aa, Artificial Sequence; identical to SEQ ID NO: 18624
  GFR-binding peptide
  MOD_RES (1)..(3)..(37): Xaa is C or S

SEQ ID NO: 76250 - protein, 41 aa, Artificial Sequence; identical to SEQ ID NO: 18625
  GFR-binding peptide
  MOD_RES (2)..(39): Xaa is C or S

SEQ ID NO: 76251 - protein, 33 aa, Artificial Sequence
  GFR-binding peptide
  MOD_RES (1)..(1): Xaa is C or S
  MOD_RES (12)..(13)..(14)..(15)..(16): Xaa is A or G
  MOD_RES (17)..(18)..(19)..(20): Xaa is A or G or is absent
XSKVVMSMEGLXXXXXXXXXMIQITINSLDQPV

SEQ ID NO: 76252 - protein, 37 aa, Artificial Sequence; identical to SEQ ID NO: 18627
  GFR-binding peptide
  MOD_RES (36)..(36): Xaa is C or S
  MOD_RES (12)..(13)..(14)..(15)..(16): Xaa is A or G
  MOD_RES (17)..(18)..(19)..(20): Xaa is A or G or is absent

SEQ ID NO: 76253 - protein, 37 aa, Artificial Sequence; identical to SEQ ID NO: 48766
  GFR-binding peptide
  MOD_RES (33)..(34): Xaa is C or S
  MOD_RES (11)..(12)..(13)..(14)..(15): Xaa is A or G
  MOD_RES (16)..(17)..(18)..(19): Xaa is A or G or is absent

SEQ ID NO: 76254 - protein, 38 aa, Artificial Sequence; identical to SEQ ID NO: 18630
  GFR-binding peptide
  MOD_RES (1)..(35): Xaa is C or S

SEQ ID NO: 76255 - protein, 35 aa, Artificial Sequence
  GFR-binding peptide
  MOD_RES (33)..(34): Xaa is C or S
  MOD_RES (11)..(12)..(13)..(14)..(15): Xaa is A or G
  MOD_RES (16)..(17)..(18)..(19): Xaa is A or G or is absent
EEVIMSMEGIXXXXXXXXXMIQMTINSTKVPAXXT

SEQ ID NO: 76256 - protein, 38 aa, Artificial Sequence; identical to SEQ ID NO: 18634
  GFR-binding peptide
  MOD_RES (1)..(3)..(37): Xaa is C or S
  MOD_RES (15)..(16)..(17)..(18)..(19): Xaa is A or G
  MOD_RES (20)..(21)..(22)..(23): Xaa is A or G or is absent

SEQ ID NO: 76257 - protein, 37 aa, Artificial Sequence
  GFR-binding peptide
  MOD_RES (32)..(33): Xaa is C or S
SEVVMDSMEGLVVNNASDMIQITINSLRTPVXXTPPT

SEQ ID NO: 76258 - protein, 36 aa, Artificial Sequence; identical to SEQ ID NO: 18636
  GFR-binding peptide
  MOD_RES (1)..(3): Xaa is C or S
  MOD_RES (15)..(16)..(17)..(18)..(19): Xaa is A or G
  MOD_RES (20)..(21)..(22)..(23): Xaa is A or G or is absent

SEQ ID NO: 76259 - protein, 41 aa, Artificial Sequence; identical to SEQ ID NO: 18637
  GFR-binding peptide
  MOD_RES (1)..(3)..(37): Xaa is C or S
  MOD_RES (15)..(16)..(17)..(18)..(19): Xaa is A or G
  MOD_RES (20)..(21)..(22)..(23): Xaa is A or G or is absent

SEQ ID NO: 76260 - protein, 39 aa, Artificial Sequence; identical to SEQ ID NO: 18641
  GFR-binding peptide
  MOD_RES (2)..(4): Xaa is C or S
  MOD_RES (17)..(18)..(19)..(20)..(21): Xaa is A or G
  MOD_RES (22)..(23)..(24)..(25): Xaa is A or G or is absent

SEQ ID NO: 76261 - protein, 41 aa, Artificial Sequence
  GFR-binding peptide
  MOD_RES (2)..(36)..(37): Xaa is C or S
  MOD_RES (14)..(15)..(16)..(17)..(18): Xaa is A or G
  MOD_RES (19)..(20)..(21)..(22): Xaa is A or G or is absent
GXAEVVMDSMEGLXXXXXXXXXMIQITINSLRAPVXXSAPA

SEQ ID NO: 76262 - protein, 33 aa, Artificial Sequence; identical to SEQ ID NO: 48776
  GFR-binding peptide
  MOD_RES (12)..(13)..(14)..(15)..(16): Xaa is A or G
  MOD_RES (17)..(18)..(19)..(20): Xaa is A or G or is absent

SEQ ID NO: 76263 - protein, 35 aa, Artificial Sequence; identical to SEQ ID NO: 18642
  GFR-binding peptide

SEQ ID NO: 76264 - protein, 41 aa, Artificial Sequence; identical to SEQ ID NO: 48777
  GFR-binding peptide
  MOD_RES (2)..(4)..(36)..(37): Xaa is C or S

SEQ ID NO: 76265 - protein, 38 aa, Artificial Sequence
  GFR-binding peptide
  MOD_RES (32)..(33): Xaa is C or S
SEVVMDSMEGIVVNNASDMIQITINSLRTPVXXTPPTS

SEQ ID NO: 76266 - protein, 40 aa, Artificial Sequence; identical to SEQ ID NO: 18643
  GFR-binding peptide
  MOD_RES (36)..(36): Xaa is C or S
  MOD_RES (12)..(13)..(14)..(15)..(16): Xaa is A or G
  MOD_RES (17)..(18)..(19)..(20): Xaa is A or G or is absent

SEQ ID NO: 76267 - protein, 35 aa, Artificial Sequence; identical to SEQ ID NO: 51273
  GFR-binding peptide
  MOD_RES (1)..(3)..(34)..(35): Xaa is C or S

SEQ ID NO: 76268 - protein, 41 aa, Artificial Sequence
  GFR-binding peptide
  MOD_RES (1)..(3)..(37)..(38): Xaa is C or S
  MOD_RES (15)..(16)..(17)..(18)..(19): Xaa is A or G
  MOD_RES (20)..(21)..(22)..(23): Xaa is A or G or is absent
XGXSRVVMNSMEGLXXXXXXXXXMIQVTINSLKTPAXXPKP

SEQ ID NO: 76269 - protein, 43 aa, Artificial Sequence; identical to SEQ ID NO: 18645
  GFR-binding peptide
  MOD_RES (2)..(39): Xaa is C or S
  MOD_RES (15)..(16)..(17)..(18)..(19): Xaa is A or G
  MOD_RES (20)..(21)..(22)..(23): Xaa is A or G or is absent

SEQ ID NO: 76270 - protein, 35 aa, Artificial Sequence
  GFR-binding peptide
  MOD_RES (1)..(34)..(35): Xaa is C or S
  MOD_RES (12)..(13)..(14)..(15)..(16): Xaa is A or G
  MOD_RES (17)..(18)..(19)..(20): Xaa is A or G or is absent
XEEVIMSMEGLXXXXXXXXXMIQMTINSTKVPAXX

SEQ ID NO: 76271 - protein, 41 aa, Artificial Sequence; identical to SEQ ID NO: 18646
  GFR-binding peptide
  MOD_RES (1)..(38): Xaa is C or S
  MOD_RES (14)..(15)..(16)..(17)..(18): Xaa is A or G
  MOD_RES (19)..(20)..(21)..(22): Xaa is A or G or is absent

SEQ ID NO: 76272 - protein, 38 aa, Artificial Sequence; identical to SEQ ID NO: 51283
  GFR-binding peptide
  MOD_RES (2)..(33)..(34): Xaa is C or S

SEQ ID NO: 76273 - protein, 38 aa, Artificial Sequence
  GFR-binding peptide
  MOD_RES (2)..(4)..(36)..(37): Xaa is C or S
RXGXSEVVMDSMEGLVVNNASDMIQITINSLRTPVXXT

SEQ ID NO: 76274 - protein, 37 aa, Artificial Sequence
  GFR-binding peptide
  MOD_RES (33)..(34): Xaa is C or S
  MOD_RES (11)..(12)..(13)..(14)..(15): Xaa is A or G
  MOD_RES (16)..(17)..(18)..(19): Xaa is A or G or is absent
DVVMGSMEGIXXXXXXXXXMIQMTINSMKTPTXXPGA

SEQ ID NO: 76275 - protein, 41 aa, Artificial Sequence
  GFR-binding peptide
  MOD_RES (1)..(3)..(36)..(37): Xaa is C or S
  MOD_RES (14)..(15)..(16)..(17)..(18): Xaa is A or G
  MOD_RES (19)..(20)..(21)..(22): Xaa is A or G or is absent
XGXEEVIMSMEGIXXXXXXXXXMIQMTINSTKVPAXXTSPV

SEQ ID NO: 76276 - protein, 38 aa, Artificial Sequence; identical to SEQ ID NO: 18648
  GFR-binding peptide
  MOD_RES (2)..(2): Xaa is C or S
  MOD_RES (15)..(16)..(17)..(18)..(19): Xaa is A or G
  MOD_RES (20)..(21)..(22)..(23): Xaa is A or G or is absent

SEQ ID NO: 76277 - protein, 34 aa, Artificial Sequence
  GFR-binding peptide
  MOD_RES (1)..(33)..(34): Xaa is C or S
XAEVVMDSMEGLVVNNAADMIQITINSLRAPVXX

SEQ ID NO: 76278 - protein, 41 aa, Artificial Sequence; identical to SEQ ID NO: 18651
  GFR-binding peptide
  MOD_RES (2)..(39): Xaa is C or S
  MOD_RES (15)..(16)..(17)..(18)..(19): Xaa is A or G
  MOD_RES (20)..(21)..(22)..(23): Xaa is A or G or is absent

SEQ ID NO: 76279 - protein, 35 aa, Artificial Sequence
  GFR-binding peptide
  MOD_RES (1)..(3)..(35): Xaa is C or S
XGXRDVVMGSMEGIIIQQKDNMIQMTINSMKTPTX

SEQ ID NO: 76280 - protein, 40 aa, Artificial Sequence
  GFR-binding peptide
  MOD_RES (2)..(34)..(35): Xaa is C or S
GXRDVVMGSMEGLIIQQKDNMIQMTINSMKTPTXXPGASG

SEQ ID NO: 76281 - protein, 38 aa, Artificial Sequence
  GFR-binding peptide
  MOD_RES (2)..(34)..(35): Xaa is C or S
GXSEVVMDSMEGLVVNNASDMIQITINSLRTPVXXTPP

SEQ ID NO: 76282 - protein, 39 aa, Artificial Sequence; identical to SEQ ID NO: 18653
  GFR-binding peptide
  MOD_RES (36)..(36): Xaa is C or S

SEQ ID NO: 76283 - protein, 37 aa, Artificial Sequence
  GFR-binding peptide
  MOD_RES (33)..(34): Xaa is C or S
  MOD_RES (11)..(12)..(13)..(14)..(15): Xaa is A or G
  MOD_RES (16)..(17)..(18)..(19): Xaa is A or G or is absent
EVVMDSMEGIXXXXXXXXXMIQITINSLRAPVXXSAP

SEQ ID NO: 76284 - protein, 33 aa, Artificial Sequence
  GFR-binding peptide
  MOD_RES (1)..(33): Xaa is C or S
XRDVVMGSMEGIIIQQKDNMIQMTINSMKTPTX

SEQ ID NO: 76285 - protein, 37 aa, Artificial Sequence
  GFR-binding peptide
  MOD_RES (1)..(3)..(34)..(35): Xaa is C or S
XKXSKVIMSMEGLIKPTKGIMIQITINSLDQSVXXPS

SEQ ID NO: 76286 - protein, 37 aa, Artificial Sequence; identical to SEQ ID NO: 18656
  GFR-binding peptide
  MOD_RES (2)..(2): Xaa is C or S

SEQ ID NO: 76287 - protein, 40 aa, Artificial Sequence
  GFR-binding peptide
  MOD_RES (2)..(36)..(37): Xaa is C or S
  MOD_RES (14)..(15)..(16)..(17)..(18): Xaa is A or G
  MOD_RES (19)..(20)..(21)..(22): Xaa is A or G or is absent
GXAEVVMDSMEGLXXXXXXXXXMIQITINSLRAPVXXSAP

SEQ ID NO: 76288 - protein, 42 aa, Artificial Sequence; identical to SEQ ID NO: 18657
  GFR-binding peptide
  MOD_RES (2)..(36): Xaa is C or S

SEQ ID NO: 76289 - protein, 41 aa, Artificial Sequence; identical to SEQ ID NO: 18658
  GFR-binding peptide
  MOD_RES (2)..(4)..(41): Xaa is C or S
  MOD_RES (17)..(18)..(19)..(20)..(21): Xaa is A or G
  MOD_RES (22)..(23)..(24)..(25): Xaa is A or G or is absent

SEQ ID NO: 76290 - protein, 40 aa, Artificial Sequence; identical to SEQ ID NO: 51298
  GFR-binding peptide
  MOD_RES (1)..(3)..(36)..(37): Xaa is C or S
  MOD_RES (14)..(15)..(16)..(17)..(18): Xaa is A or G
  MOD_RES (19)..(20)..(21)..(22): Xaa is A or G or is absent

SEQ ID NO: 76291 - protein, 38 aa, Artificial Sequence
  GFR-binding peptide
  MOD_RES (1)..(3)..(36)..(37): Xaa is C or S
  MOD_RES (14)..(15)..(16)..(17)..(18): Xaa is A or G
  MOD_RES (19)..(20)..(21)..(22): Xaa is A or G or is absent
XKXSKVIMSMEGLXXXXXXXXXMIQITINSLDQSVXXP

SEQ ID NO: 76292 - protein, 35 aa, Artificial Sequence
  GFR-binding peptide
  MOD_RES (2)..(4): Xaa is C or S
RXGXSEVVMDSMEGIVVNNASDMIQITINSLRTPV

SEQ ID NO: 76293 - protein, 40 aa, Artificial Sequence
  GFR-binding peptide
  MOD_RES (1)..(3)..(37)..(38): Xaa is C or S
  MOD_RES (15)..(16)..(17)..(18)..(19): Xaa is A or G
  MOD_RES (20)..(21)..(22)..(23): Xaa is A or G or is absent
XGXAEVVMDSMEGIXXXXXXXXXMIQITINSLRAPVXXSA

SEQ ID NO: 76294 - protein, 39 aa, Artificial Sequence; identical to SEQ ID NO: 51301
  GFR-binding peptide
  MOD_RES (2)..(4)..(37)..(38): Xaa is C or S
  MOD_RES (15)..(16)..(17)..(18)..(19): Xaa is A or G
  MOD_RES (20)..(21)..(22)..(23): Xaa is A or G or is absent

SEQ ID NO: 76295 - protein, 35 aa, Artificial Sequence; identical to SEQ ID NO: 51302
  GFR-binding peptide
  MOD_RES (32)..(33): Xaa is C or S

SEQ ID NO: 76296 - protein, 36 aa, Artificial Sequence; identical to SEQ ID NO: 18659
  GFR-binding peptide
  MOD_RES (1)..(3): Xaa is C or S

SEQ ID NO: 76297 - protein, 37 aa, Artificial Sequence; identical to SEQ ID NO: 18660
  GFR-binding peptide
  MOD_RES (37)..(37): Xaa is C or S
  MOD_RES (13)..(14)..(15)..(16)..(17): Xaa is A or G
  MOD_RES (18)..(19)..(20)..(21): Xaa is A or G or is absent

SEQ ID NO: 76298 - protein, 41 aa, Artificial Sequence; identical to SEQ ID NO: 18662
  GFR-binding peptide
  MOD_RES (1)..(3)..(37): Xaa is C or S

SEQ ID NO: 76299 - protein, 34 aa, Artificial Sequence
  GFR-binding peptide
  MOD_RES (1)..(1): Xaa is C or S
  MOD_RES (13)..(14)..(15)..(16)..(17): Xaa is A or G
  MOD_RES (18)..(19)..(20)..(21): Xaa is A or G or is absent
XSEVVMDSMEGIXXXXXXXXXMIQITINSLRTPV

SEQ ID NO: 76300 - protein, 36 aa, Artificial Sequence; identical to SEQ ID NO: 18664
  GFR-binding peptide
  MOD_RES (1)..(35): Xaa is C or S

SEQ ID NO: 76301 - protein, 39 aa, Artificial Sequence; identical to SEQ ID NO: 48814
  GFR-binding peptide
  MOD_RES (34)..(35): Xaa is C or S
  MOD_RES (12)..(13)..(14)..(15)..(16): Xaa is A or G
  MOD_RES (17)..(18)..(19)..(20): Xaa is A or G or is absent

SEQ ID NO: 76302 - protein, 35 aa, Artificial Sequence; identical to SEQ ID NO: 48815
  GFR-binding peptide
  MOD_RES (31)..(32): Xaa is C or S

SEQ ID NO: 76303 - protein, 40 aa, Artificial Sequence
  GFR-binding peptide
  MOD_RES (1)..(3)..(37)..(38): Xaa is C or S
  MOD_RES (15)..(16)..(17)..(18)..(19): Xaa is A or G
  MOD_RES (20)..(21)..(22)..(23): Xaa is A or G or is absent
XGXRDVVMGSMEGLXXXXXXXXXMIQMTINSMKTPTXXPG

SEQ ID NO: 76304 - protein, 36 aa, Artificial Sequence
  GFR-binding peptide
  MOD_RES (1)..(3)..(36): Xaa is C or S
  MOD_RES (14)..(15)..(16)..(17)..(18): Xaa is A or G
  MOD_RES (19)..(20)..(21)..(22): Xaa is A or G or is absent
XGXEEVIMSMEGIXXXXXXXXXMIQMTINSTKVPAX

SEQ ID NO: 76305 - protein, 43 aa, Artificial Sequence; identical to SEQ ID NO: 18666
  GFR-binding peptide
  MOD_RES (2)..(39): Xaa is C or S

SEQ ID NO: 76306 - protein, 43 aa, Artificial Sequence
  GFR-binding peptide
  MOD_RES (2)..(4)..(37)..(38): Xaa is C or S
  MOD_RES (15)..(16)..(17)..(18)..(19): Xaa is A or G
  MOD_RES (20)..(21)..(22)..(23): Xaa is A or G or is absent
SXKXSKVVMSMEGLXXXXXXXXXMIQITINSLDQPVXXPSASA

SEQ ID NO: 76307 - protein, 33 aa, Artificial Sequence
  GFR-binding peptide
  MOD_RES (2)..(33): Xaa is C or S
GXEEVIMSMEGILLVRGNDMIQMTINSTKVPAX

SEQ ID NO: 76308 - protein, 39 aa, Artificial Sequence; identical to SEQ ID NO: 18672
  GFR-binding peptide
  MOD_RES (35)..(35): Xaa is C or S
  MOD_RES (11)..(12)..(13)..(14)..(15): Xaa is A or G
  MOD_RES (16)..(17)..(18)..(19): Xaa is A or G or is absent

SEQ ID NO: 76309 - protein, 40 aa, Artificial Sequence
  GFR-binding peptide
  MOD_RES (2)..(4)..(35)..(36): Xaa is C or S
SXKXSRVIMSMEGLVKPKRGVMIQITINSLAQPVXXPAAS

SEQ ID NO: 76310 - protein, 36 aa, Artificial Sequence; identical to SEQ ID NO: 18674
  GFR-binding peptide
  MOD_RES (34)..(34): Xaa is C or S

SEQ ID NO: 76311 - protein, 37 aa, Artificial Sequence
  GFR-binding peptide
  MOD_RES (31)..(32): Xaa is C or S
EVVMDSMEGLVVNNASDMIQITINSLRTPVXXTPPTS

SEQ ID NO: 76312 - protein, 37 aa, Artificial Sequence; identical to SEQ ID NO: 18675
  GFR-binding peptide
  MOD_RES (1)..(1): Xaa is C or S
  MOD_RES (14)..(15)..(16)..(17)..(18): Xaa is A or G
  MOD_RES (19)..(20)..(21)..(22): Xaa is A or G or is absent

SEQ ID NO: 76313 - protein, 39 aa, Artificial Sequence; identical to SEQ ID NO: 18676
  GFR-binding peptide
  MOD_RES (35)..(35): Xaa is C or S
  MOD_RES (11)..(12)..(13)..(14)..(15): Xaa is A or G
  MOD_RES (16)..(17)..(18)..(19): Xaa is A or G or is absent

SEQ ID NO: 76314 - protein, 38 aa, Artificial Sequence
  GFR-binding peptide
  MOD_RES (1)..(35)..(36): Xaa is C or S
  MOD_RES (13)..(14)..(15)..(16)..(17): Xaa is A or G
  MOD_RES (18)..(19)..(20)..(21): Xaa is A or G or is absent
XRDVVMGSMEGLXXXXXXXXXMIQMTINSMKTPTXXPG

SEQ ID NO: 76315 - protein, 36 aa, Artificial Sequence; identical to SEQ ID NO: 18677
  GFR-binding peptide
  MOD_RES (2)..(36): Xaa is C or S

SEQ ID NO: 76316 - protein, 43 aa, Artificial Sequence
  GFR-binding peptide
  MOD_RES (1)..(3)..(37)..(38): Xaa is C or S
  MOD_RES (15)..(16)..(17)..(18)..(19): Xaa is A or G
  MOD_RES (20)..(21)..(22)..(23): Xaa is A or G or is absent
XGXSRVVMNSMEGIXXXXXXXXXMIQVTINSLKTPAXXPKPVH

SEQ ID NO: 76317 - protein, 39 aa, Artificial Sequence; identical to SEQ ID NO: 18679
  GFR-binding peptide
  MOD_RES (1)..(35): Xaa is C or S

SEQ ID NO: 76318 - protein, 36 aa, Artificial Sequence; identical to SEQ ID NO: 18680
  GFR-binding peptide

SEQ ID NO: 76319 - protein, 32 aa, Artificial Sequence
  GFR-binding peptide
  MOD_RES (2)..(2): Xaa is C or S
KXSKVVMSMEGLVKPTRGVMIQITINSLDQPV

SEQ ID NO: 76320 - protein, 34 aa, Artificial Sequence; identical to SEQ ID NO: 51327
  GFR-binding peptide
  MOD_RES (31)..(32): Xaa is C or S

SEQ ID NO: 76321 - protein, 42 aa, Artificial Sequence; identical to SEQ ID NO: 18683
  GFR-binding peptide
  MOD_RES (2)..(4)..(41): Xaa is C or S

SEQ ID NO: 76322 - protein, 34 aa, Artificial Sequence; identical to SEQ ID NO: 18685
  GFR-binding peptide
  MOD_RES (11)..(12)..(13)..(14)..(15): Xaa is A or G
  MOD_RES (16)..(17)..(18)..(19): Xaa is A or G or is absent

SEQ ID NO: 76323 - protein, 36 aa, Artificial Sequence; identical to SEQ ID NO: 18687
  GFR-binding peptide
  MOD_RES (36)..(36): Xaa is C or S
  MOD_RES (12)..(13)..(14)..(15)..(16): Xaa is A or G
  MOD_RES (17)..(18)..(19)..(20): Xaa is A or G or is absent

SEQ ID NO: 76324 - protein, 36 aa, Artificial Sequence; identical to SEQ ID NO: 18689
  GFR-binding peptide
  MOD_RES (34)..(34): Xaa is C or S
  MOD_RES (12)..(13)..(14)..(15)..(16): Xaa is A or G
  MOD_RES (17)..(18)..(19)..(20): Xaa is A or G or is absent

SEQ ID NO: 76325 - protein, 37 aa, Artificial Sequence
  GFR-binding peptide
  MOD_RES (1)..(34)..(35): Xaa is C or S
  MOD_RES (12)..(13)..(14)..(15)..(16): Xaa is A or G
  MOD_RES (17)..(18)..(19)..(20): Xaa is A or G or is absent
XSRVIMSMEGLXXXXXXXXXMIQITINSLAQPVXXPA

SEQ ID NO: 76326 - protein, 39 aa, Artificial Sequence; identical to SEQ ID NO: 51335
  GFR-binding peptide
  MOD_RES (1)..(3)..(36)..(37): Xaa is C or S
  MOD_RES (14)..(15)..(16)..(17)..(18): Xaa is A or G
  MOD_RES (19)..(20)..(21)..(22): Xaa is A or G or is absent

SEQ ID NO: 76327 - protein, 39 aa, Artificial Sequence; identical to SEQ ID NO: 18690
  GFR-binding peptide
  MOD_RES (37)..(37): Xaa is C or S

SEQ ID NO: 76328 - protein, 40 aa, Artificial Sequence; identical to SEQ ID NO: 18691
  GFR-binding peptide
  MOD_RES (1)..(38): Xaa is C or S
  MOD_RES (14)..(15)..(16)..(17)..(18): Xaa is A or G
  MOD_RES (19)..(20)..(21)..(22): Xaa is A or G or is absent

SEQ ID NO: 76329 - protein, 39 aa, Artificial Sequence; identical to SEQ ID NO: 51342
  GFR-binding peptide
  MOD_RES (2)..(35)..(36): Xaa is C or S
  MOD_RES (13)..(14)..(15)..(16)..(17): Xaa is A or G
  MOD_RES (18)..(19)..(20)..(21): Xaa is A or G or is absent

SEQ ID NO: 76330 - protein, 39 aa, Artificial Sequence
  GFR-binding peptide
  MOD_RES (1)..(3)..(35)..(36): Xaa is C or S
XGXSRVVMNSMEGLIVNSSDDMIQVTINSLKTPAXXPKP

SEQ ID NO: 76331 - protein, 38 aa, Artificial Sequence
  GFR-binding peptide
  MOD_RES (2)..(36)..(37): Xaa is C or S
  MOD_RES (14)..(15)..(16)..(17)..(18): Xaa is A or G
  MOD_RES (19)..(20)..(21)..(22): Xaa is A or G or is absent
GXSEVVMDSMEGLXXXXXXXXXMIQITINSLRTPVXXT

SEQ ID NO: 76332 - protein, 35 aa, Artificial Sequence; identical to SEQ ID NO: 18692
  GFR-binding peptide
  MOD_RES (1)..(1): Xaa is C or S
  MOD_RES (14)..(15)..(16)..(17)..(18): Xaa is A or G
  MOD_RES (19)..(20)..(21)..(22): Xaa is A or G or is absent

SEQ ID NO: 76333 - protein, 34 aa, Artificial Sequence; identical to SEQ ID NO: 18693
  GFR-binding peptide
  MOD_RES (34)..(34): Xaa is C or S

SEQ ID NO: 76334 - protein, 38 aa, Artificial Sequence
  GFR-binding peptide
  MOD_RES (1)..(34)..(35): Xaa is C or S
  MOD_RES (12)..(13)..(14)..(15)..(16): Xaa is A or G
  MOD_RES (17)..(18)..(19)..(20): Xaa is A or G or is absent
XSRVIMSMEGLXXXXXXXXXMIQITINSLAQPVXXPAA

SEQ ID NO: 76335 - protein, 35 aa, Artificial Sequence
  GFR-binding peptide
  MOD_RES (31)..(32): Xaa is C or S
SKVVMSMEGLVKPTRGVMIQITINSLDQPVXXPSA

SEQ ID NO: 76336 - protein, 34 aa, Artificial Sequence
  GFR-binding peptide
  MOD_RES (34)..(34): Xaa is C or S
  MOD_RES (12)..(13)..(14)..(15)..(16): Xaa is A or G
  MOD_RES (17)..(18)..(19)..(20): Xaa is A or G or is absent
SEVVMDSMEGIXXXXXXXXXMIQITINSLRTPVX

SEQ ID NO: 76337 - protein, 37 aa, Artificial Sequence
  GFR-binding peptide
  MOD_RES (31)..(32): Xaa is C or S
EVVMDSMEGIVVNNASDMIQITINSLRTPVXXTPPTS

SEQ ID NO: 76338 - protein, 35 aa, Artificial Sequence; identical to SEQ ID NO: 18698
  GFR-binding peptide
  MOD_RES (2)..(2): Xaa is C or S
  MOD_RES (14)..(15)..(16)..(17)..(18): Xaa is A or G
  MOD_RES (19)..(20)..(21)..(22): Xaa is A or G or is absent

SEQ ID NO: 76339 - protein, 39 aa, Artificial Sequence; identical to SEQ ID NO: 18699
  GFR-binding peptide
  MOD_RES (1)..(35): Xaa is C or S
  MOD_RES (13)..(14)..(15)..(16)..(17): Xaa is A or G
  MOD_RES (18)..(19)..(20)..(21): Xaa is A or G or is absent

SEQ ID NO: 76340 - protein, 34 aa, Artificial Sequence
  GFR-binding peptide
  MOD_RES (2)..(2): Xaa is C or S
  MOD_RES (13)..(14)..(15)..(16)..(17): Xaa is A or G
  MOD_RES (18)..(19)..(20)..(21): Xaa is A or G or is absent
KXSRVIMSMEGLXXXXXXXXXMIQITINSLAQPV

SEQ ID NO: 76341 - protein, 38 aa, Artificial Sequence; identical to SEQ ID NO: 2269
  GFR-binding peptide
  MOD_RES (32)..(33): Xaa is C or S

SEQ ID NO: 76342 - protein, 38 aa, Artificial Sequence; identical to SEQ ID NO: 4227
  GFR-binding peptide
  MOD_RES (1)..(34)..(35): Xaa is C or S
  MOD_RES (12)..(13)..(14)..(15)..(16): Xaa is A or G
  MOD_RES (17)..(18)..(19)..(20): Xaa is A or G or is absent

SEQ ID NO: 76343 - protein, 43 aa, Artificial Sequence; identical to SEQ ID NO: 2270
  GFR-binding peptide
  MOD_RES (2)..(4)..(38)..(39): Xaa is C or S
  MOD_RES (16)..(17)..(18)..(19)..(20): Xaa is A or G
  MOD_RES (21)..(22)..(23)..(24): Xaa is A or G or is absent

SEQ ID NO: 76344 - protein, 35 aa, Artificial Sequence; identical to SEQ ID NO: 2271
  GFR-binding peptide
  MOD_RES (2)..(4): Xaa is C or S

SEQ ID NO: 76345 - protein, 34 aa, Artificial Sequence; identical to SEQ ID NO: 2272
  GFR-binding peptide
  MOD_RES (13)..(14)..(15)..(16)..(17): Xaa is A or G
  MOD_RES (18)..(19)..(20)..(21): Xaa is A or G or is absent

SEQ ID NO: 76346 - protein, 42 aa, Artificial Sequence; identical to SEQ ID NO: 2274
  GFR-binding peptide
  MOD_RES (1)..(3)..(38)..(39): Xaa is C or S
  MOD_RES (16)..(17)..(18)..(19)..(20): Xaa is A or G
  MOD_RES (21)..(22)..(23)..(24): Xaa is A or G or is absent

SEQ ID NO: 76347 - protein, 40 aa, Artificial Sequence; identical to SEQ ID NO: 2275
  GFR-binding peptide
  MOD_RES (1)..(3)..(36)..(37): Xaa is C or S
  MOD_RES (14)..(15)..(16)..(17)..(18): Xaa is A or G
  MOD_RES (19)..(20)..(21)..(22): Xaa is A or G or is absent

SEQ ID NO: 76348 - protein, 39 aa, Artificial Sequence; identical to SEQ ID NO: 4229
  GFR-binding peptide
  MOD_RES (1)..(33)..(34): Xaa is C or S

SEQ ID NO: 76349 - protein, 31 aa, Artificial Sequence; identical to SEQ ID NO: 61720
  GFR-binding peptide
  MOD_RES (31)..(31): Xaa is C or S

SEQ ID NO: 76350 - protein, 37 aa, Artificial Sequence
  GFR-binding peptide
  MOD_RES (31)..(32): Xaa is C or S
DVVMGQYNKLIIQQKDNLYLMSIASMKTPTXXPGASG

SEQ ID NO: 76351 - protein, 33 aa, Artificial Sequence; identical to SEQ ID NO: 2277
  GFR-binding peptide
  MOD_RES (2)..(2): Xaa is C or S

SEQ ID NO: 76352 - protein, 38 aa, Artificial Sequence; identical to SEQ ID NO: 2279
  GFR-binding peptide
  MOD_RES (1)..(3)..(37)..(38): Xaa is C or S
  MOD_RES (15)..(16)..(17)..(18)..(19): Xaa is A or G
  MOD_RES (20)..(21)..(22)..(23): Xaa is A or G or is absent

SEQ ID NO: 76353 - protein, 44 aa, Artificial Sequence; identical to SEQ ID NO: 56141
  GFR-binding peptide
  MOD_RES (2)..(4)..(38)..(39): Xaa is C or S
  MOD_RES (16)..(17)..(18)..(19)..(20): Xaa is A or G
  MOD_RES (21)..(22)..(23)..(24): Xaa is A or G or is absent

SEQ ID NO: 76354 - protein, 38 aa, Artificial Sequence; identical to SEQ ID NO: 56142
  GFR-binding peptide
  MOD_RES (1)..(3)..(37)..(38): Xaa is C or S
  MOD_RES (15)..(16)..(17)..(18)..(19): Xaa is A or G
  MOD_RES (20)..(21)..(22)..(23): Xaa is A or G or is absent

SEQ ID NO: 76355 - protein, 38 aa, Artificial Sequence; identical to SEQ ID NO: 25289
  GFR-binding peptide
  MOD_RES (2)..(4)..(38): Xaa is C or S
  MOD_RES (16)..(17)..(18)..(19)..(20): Xaa is A or G
  MOD_RES (21)..(22)..(23)..(24): Xaa is A or G or is absent

SEQ ID NO: 76356 - protein, 39 aa, Artificial Sequence
  GFR-binding peptide
  MOD_RES (1)..(3)..(37)..(38): Xaa is C or S
  MOD_RES (15)..(16)..(17)..(18)..(19): Xaa is A or G
  MOD_RES (20)..(21)..(22)..(23): Xaa is A or G or is absent
XGXRDVVMGQYNKLXXXXXXXXXLYLMSIASMKTPTXXP

SEQ ID NO: 76357 - protein, 37 aa, Artificial Sequence; identical to SEQ ID NO: 4230
  GFR-binding peptide
  MOD_RES (2)..(4)..(35)..(36): Xaa is C or S

SEQ ID NO: 76358 - protein, 36 aa, Artificial Sequence; identical to SEQ ID NO: 11646
  GFR-binding peptide
  MOD_RES (1)..(3): Xaa is C or S
  MOD_RES (15)..(16)..(17)..(18)..(19): Xaa is A or G
  MOD_RES (20)..(21)..(22)..(23): Xaa is A or G or is absent

SEQ ID NO: 76359 - protein, 39 aa, Artificial Sequence; identical to SEQ ID NO: 58209
  GFR-binding peptide
  MOD_RES (1)..(33)..(34): Xaa is C or S

SEQ ID NO: 76360 - protein, 38 aa, Artificial Sequence; identical to SEQ ID NO: 2284
  GFR-binding peptide
  MOD_RES (1)..(3)..(34)..(35): Xaa is C or S

SEQ ID NO: 76361 - protein, 42 aa, Artificial Sequence; identical to SEQ ID NO: 4234
  GFR-binding peptide
  MOD_RES (2)..(4)..(37)..(38): Xaa is C or S
  MOD_RES (15)..(16)..(17)..(18)..(19): Xaa is A or G
  MOD_RES (20)..(21)..(22)..(23): Xaa is A or G or is absent

SEQ ID NO: 76362 - protein, 38 aa, Artificial Sequence; identical to SEQ ID NO: 4236
  GFR-binding peptide
  MOD_RES (1)..(33)..(34): Xaa is C or S

SEQ ID NO: 76363 - protein, 37 aa, Artificial Sequence
  GFR-binding peptide
  MOD_RES (33)..(34): Xaa is C or S
  MOD_RES (11)..(12)..(13)..(14)..(15): Xaa is A or G
  MOD_RES (16)..(17)..(18)..(19): Xaa is A or G or is absent
SVAMGQYNKLXXXXXXXXXLYLISIASLKTPVXXAKS

SEQ ID NO: 76364 - protein, 43 aa, Artificial Sequence; identical to SEQ ID NO: 4238
  GFR-binding peptide
  MOD_RES (1)..(3)..(37): Xaa is C or S
  MOD_RES (15)..(16)..(17)..(18)..(19): Xaa is A or G
  MOD_RES (20)..(21)..(22)..(23): Xaa is A or G or is absent

SEQ ID NO: 76365 - protein, 36 aa, Artificial Sequence
  GFR-binding peptide
  MOD_RES (1)..(35)..(36): Xaa is C or S
  MOD_RES (13)..(14)..(15)..(16)..(17): Xaa is A or G
  MOD_RES (18)..(19)..(20)..(21): Xaa is A or G or is absent
XSEVTMNQYNKLXXXXXXXXXLYLISIASMKEPVXX

SEQ ID NO: 76366 - protein, 36 aa, Artificial Sequence; identical to SEQ ID NO: 56147
  GFR-binding peptide
  MOD_RES (33)..(34): Xaa is C or S
  MOD_RES (11)..(12)..(13)..(14)..(15): Xaa is A or G
  MOD_RES (16)..(17)..(18)..(19): Xaa is A or G or is absent

SEQ ID NO: 76367 - protein, 41 aa, Artificial Sequence; identical to SEQ ID NO: 56148
  GFR-binding peptide
  MOD_RES (2)..(36)..(37): Xaa is C or S
  MOD_RES (14)..(15)..(16)..(17)..(18): Xaa is A or G
  MOD_RES (19)..(20)..(21)..(22): Xaa is A or G or is absent

SEQ ID NO: 76368 - protein, 35 aa, Artificial Sequence; identical to SEQ ID NO: 2288
  GFR-binding peptide
  MOD_RES (31)..(32): Xaa is C or S

SEQ ID NO: 76369 - protein, 44 aa, Artificial Sequence; identical to SEQ ID NO: 4243
  GFR-binding peptide
  MOD_RES (2)..(4)..(38)..(39): Xaa is C or S
  MOD_RES (16)..(17)..(18)..(19)..(20): Xaa is A or G
  MOD_RES (21)..(22)..(23)..(24): Xaa is A or G or is absent

SEQ ID NO: 76370 - protein, 30 aa, Artificial Sequence; identical to SEQ ID NO: 2292
  GFR-binding peptide

SEQ ID NO: 76371 - protein, 42 aa, Artificial Sequence; identical to SEQ ID NO: 2293
  GFR-binding peptide
  MOD_RES (2)..(4)..(36)..(37): Xaa is C or S

SEQ ID NO: 76372 - protein, 39 aa, Artificial Sequence; identical to SEQ ID NO: 2295
  GFR-binding peptide
  MOD_RES (1)..(3)..(38)..(39): Xaa is C or S
  MOD_RES (16)..(17)..(18)..(19)..(20): Xaa is A or G
  MOD_RES (21)..(22)..(23)..(24): Xaa is A or G or is absent

SEQ ID NO: 76373 - protein, 32 aa, Artificial Sequence; identical to SEQ ID NO: 2297
  GFR-binding peptide
  MOD_RES (11)..(12)..(13)..(14)..(15): Xaa is A or G
  MOD_RES (16)..(17)..(18)..(19): Xaa is A or G or is absent

SEQ ID NO: 76374 - protein, 31 aa, Artificial Sequence; identical to SEQ ID NO: 56159
  GFR-binding peptide
  MOD_RES (1)..(1): Xaa is C or S

SEQ ID NO: 76375 - protein, 39 aa, Artificial Sequence; identical to SEQ ID NO: 2299
  GFR-binding peptide
  MOD_RES (1)..(3)..(35)..(36): Xaa is C or S

SEQ ID NO: 76376 - protein, 35 aa, Artificial Sequence; identical to SEQ ID NO: 2300
  GFR-binding peptide
  MOD_RES (1)..(32)..(33): Xaa is C or S

SEQ ID NO: 76377 - protein, 33 aa, Artificial Sequence
  GFR-binding peptide
  MOD_RES (1)..(1): Xaa is C or S
  MOD_RES (12)..(13)..(14)..(15)..(16): Xaa is A or G
  MOD_RES (17)..(18)..(19)..(20): Xaa is A or G or is absent
XEEVIMQYNKLXXXXXXXXXLYLMSIASTKVPA

SEQ ID NO: 76378 - protein, 35 aa, Artificial Sequence; identical to SEQ ID NO: 23287
  GFR-binding peptide
  MOD_RES (33)..(34): Xaa is C or S
  MOD_RES (11)..(12)..(13)..(14)..(15): Xaa is A or G
  MOD_RES (16)..(17)..(18)..(19): Xaa is A or G or is absent

SEQ ID NO: 76379 - protein, 35 aa, Artificial Sequence; identical to SEQ ID NO: 25301
  GFR-binding peptide
  MOD_RES (1)..(3)..(35): Xaa is C or S

SEQ ID NO: 76380 - protein, 35 aa, Artificial Sequence; identical to SEQ ID NO: 4251
  GFR-binding peptide
  MOD_RES (2)..(4)..(35): Xaa is C or S

SEQ ID NO: 76381 - protein, 40 aa, Artificial Sequence; identical to SEQ ID NO: 2303
  GFR-binding peptide
  MOD_RES (1)..(3)..(36)..(37): Xaa is C or S
  MOD_RES (14)..(15)..(16)..(17)..(18): Xaa is A or G
  MOD_RES (19)..(20)..(21)..(22): Xaa is A or G or is absent

SEQ ID NO: 76382 - protein, 38 aa, Artificial Sequence
  GFR-binding peptide
  MOD_RES (2)..(4)..(36)..(37): Xaa is C or S
RXAXSEVTMNQYNKLVVNKNEDLYLISIASMKEPVXXP

SEQ ID NO: 76383 - protein, 34 aa, Artificial Sequence; identical to SEQ ID NO: 25303
  GFR-binding peptide
  MOD_RES (1)..(33)..(34): Xaa is C or S

SEQ ID NO: 76384 - protein, 34 aa, Artificial Sequence; identical to SEQ ID NO: 2305
  GFR-binding peptide
  MOD_RES (2)..(2): Xaa is C or S
  MOD_RES (13)..(14)..(15)..(16)..(17): Xaa is A or G
  MOD_RES (18)..(19)..(20)..(21): Xaa is A or G or is absent

SEQ ID NO: 76385 - protein, 35 aa, Artificial Sequence; identical to SEQ ID NO: 4253
  GFR-binding peptide
  MOD_RES (2)..(35): Xaa is C or S

SEQ ID NO: 76386 - protein, 39 aa, Artificial Sequence
  GFR-binding peptide
  MOD_RES (33)..(34): Xaa is C or S
  MOD_RES (11)..(12)..(13)..(14)..(15): Xaa is A or G
  MOD_RES (16)..(17)..(18)..(19): Xaa is A or G or is absent
SVAMGQYNKLXXXXXXXXXLYLISIASLKTPVXXAKSAK

SEQ ID NO: 76387 - protein, 36 aa, Artificial Sequence; identical to SEQ ID NO: 9808
  GFR-binding peptide
  MOD_RES (2)..(36): Xaa is C or S
  MOD_RES (14)..(15)..(16)..(17)..(18): Xaa is A or G
  MOD_RES (19)..(20)..(21)..(22): Xaa is A or G or is absent

SEQ ID NO: 76388 - protein, 40 aa, Artificial Sequence
  GFR-binding peptide
  MOD_RES (2)..(4)..(38)..(39): Xaa is C or S
  MOD_RES (16)..(17)..(18)..(19)..(20): Xaa is A or G
  MOD_RES (21)..(22)..(23)..(24): Xaa is A or G or is absent
RXGXESVAMGQYNKLXXXXXXXXXLYLISIASLKTPVXXA

SEQ ID NO: 76389 - protein, 39 aa, Artificial Sequence; identical to SEQ ID NO: 25305
  GFR-binding peptide
  MOD_RES (1)..(3)..(37)..(38): Xaa is C or S
  MOD_RES (15)..(16)..(17)..(18)..(19): Xaa is A or G
  MOD_RES (20)..(21)..(22)..(23): Xaa is A or G or is absent

SEQ ID NO: 76390 - protein, 37 aa, Artificial Sequence; identical to SEQ ID NO: 2310
  GFR-binding peptide
  MOD_RES (31)..(32): Xaa is C or S

SEQ ID NO: 76391 - protein, 41 aa, Artificial Sequence; identical to SEQ ID NO: 4256
  GFR-binding peptide
  MOD_RES (2)..(4)..(36)..(37): Xaa is C or S

SEQ ID NO: 76392 - protein, 44 aa, Artificial Sequence; identical to SEQ ID NO: 2311
  GFR-binding peptide
  MOD_RES (2)..(4)..(38)..(39): Xaa is C or S
  MOD_RES (16)..(17)..(18)..(19)..(20): Xaa is A or G
  MOD_RES (21)..(22)..(23)..(24): Xaa is A or G or is absent

SEQ ID NO: 76393 - protein, 40 aa, Artificial Sequence
  GFR-binding peptide
  MOD_RES (1)..(35)..(36): Xaa is C or S
  MOD_RES (13)..(14)..(15)..(16)..(17): Xaa is A or G
  MOD_RES (18)..(19)..(20)..(21): Xaa is A or G or is absent
XESVAMGQYNKLXXXXXXXXXLYLISIASLKTPVXXAKSA

SEQ ID NO: 76394 - protein, 32 aa, Artificial Sequence; identical to SEQ ID NO: 25312
  GFR-binding peptide
  MOD_RES (11)..(12)..(13)..(14)..(15): Xaa is A or G
  MOD_RES (16)..(17)..(18)..(19): Xaa is A or G or is absent

SEQ ID NO: 76395 - protein, 37 aa, Artificial Sequence; identical to SEQ ID NO: 58241
  GFR-binding peptide
  MOD_RES (32)..(33): Xaa is C or S

SEQ ID NO: 76396 - protein, 31 aa, Artificial Sequence; identical to SEQ ID NO: 23296
  GFR-binding peptide
  MOD_RES (31)..(31): Xaa is C or S

SEQ ID NO: 76397 - protein, 38 aa, Artificial Sequence; identical to SEQ ID NO: 2316
  GFR-binding peptide
  MOD_RES (32)..(32): Xaa is C or S

SEQ ID NO: 76398 - protein, 37 aa, Artificial Sequence
  GFR-binding peptide
  MOD_RES (1)..(3)..(37): Xaa is C or S
  MOD_RES (15)..(16)..(17)..(18)..(19): Xaa is A or G
  MOD_RES (20)..(21)..(22)..(23): Xaa is A or G or is absent
XGXRDVVMGQYNKLXXXXXXXXXLYLMSIASMKTPTX

SEQ ID NO: 76399 - protein, 33 aa, Artificial Sequence; identical to SEQ ID NO: 11675
  GFR-binding peptide
  MOD_RES (1)..(33): Xaa is C or S

SEQ ID NO: 76400 - protein, 40 aa, Artificial Sequence; identical to SEQ ID NO: 23297
  GFR-binding peptide
  MOD_RES (1)..(35)..(36): Xaa is C or S
  MOD_RES (13)..(14)..(15)..(16)..(17): Xaa is A or G
  MOD_RES (18)..(19)..(20)..(21): Xaa is A or G or is absent

SEQ ID NO: 76401 - protein, 41 aa, Artificial Sequence
  GFR-binding peptide
  MOD_RES (1)..(3)..(37)..(38): Xaa is C or S
  MOD_RES (15)..(16)..(17)..(18)..(19): Xaa is A or G
  MOD_RES (20)..(21)..(22)..(23): Xaa is A or G or is absent
XGXAEVVMDQYNKLXXXXXXXXXLYLISIASLRAPVXXSAP

SEQ ID NO: 76402 - protein, 40 aa, Artificial Sequence; identical to SEQ ID NO: 2319
  GFR-binding peptide
  MOD_RES (2)..(35)..(36): Xaa is C or S

SEQ ID NO: 76403 - protein, 41 aa, Artificial Sequence; identical to SEQ ID NO: 56183
  GFR-binding peptide
  MOD_RES (1)..(3)..(35)..(36): Xaa is C or S

SEQ ID NO: 76404 - protein, 37 aa, Artificial Sequence; identical to SEQ ID NO: 2323
  GFR-binding peptide
  MOD_RES (2)..(4): Xaa is C or S
  MOD_RES (16)..(17)..(18)..(19)..(20): Xaa is A or G
  MOD_RES (21)..(22)..(23)..(24): Xaa is A or G or is absent

SEQ ID NO: 76405 - protein, 36 aa, Artificial Sequence
  GFR-binding peptide
  MOD_RES (2)..(34)..(35): Xaa is C or S
AXSEVTMNQYNKLVVNKNEDLYLISIASMKEPVXXP

SEQ ID NO: 76406 - protein, 37 aa, Artificial Sequence; identical to SEQ ID NO: 4263
  GFR-binding peptide
  MOD_RES (34)..(34): Xaa is C or S
  MOD_RES (12)..(13)..(14)..(15)..(16): Xaa is A or G
  MOD_RES (17)..(18)..(19)..(20): Xaa is A or G or is absent

SEQ ID NO: 76407 - protein, 36 aa, Artificial Sequence; identical to SEQ ID NO: 4265
  GFR-binding peptide
  MOD_RES (2)..(33)..(34): Xaa is C or S

SEQ ID NO: 76408 - protein, 32 aa, Artificial Sequence; identical to SEQ ID NO: 2327
  GFR-binding peptide
  MOD_RES (31)..(32): Xaa is C or S

SEQ ID NO: 76409 - protein, 36 aa, Artificial Sequence; identical to SEQ ID NO: 4266
  GFR-binding peptide
  MOD_RES (2)..(35)..(36): Xaa is C or S

SEQ ID NO: 76410 - protein, 41 aa, Artificial Sequence; identical to SEQ ID NO: 9821
  GFR-binding peptide
  MOD_RES (1)..(3)..(35)..(36): Xaa is C or S

SEQ ID NO: 76411 - protein, 36 aa, Artificial Sequence; identical to SEQ ID NO: 11684
  GFR-binding peptide
  MOD_RES (1)..(3)..(35)..(36): Xaa is C or S

SEQ ID NO: 76412 - protein, 34 aa, Artificial Sequence; identical to SEQ ID NO: 56192
  GFR-binding peptide
  MOD_RES (1)..(32)..(33): Xaa is C or S

SEQ ID NO: 76413 - protein, 40 aa, Artificial Sequence; identical to SEQ ID NO: 25322
  GFR-binding peptide
  MOD_RES (2)..(4)..(38)..(39): Xaa is C or S
  MOD_RES (16)..(17)..(18)..(19)..(20): Xaa is A or G
  MOD_RES (21)..(22)..(23)..(24): Xaa is A or G or is absent

SEQ ID NO: 76414 - protein, 35 aa, Artificial Sequence; identical to SEQ ID NO: 11686
  GFR-binding peptide
  MOD_RES (33)..(34): Xaa is C or S
  MOD_RES (11)..(12)..(13)..(14)..(15): Xaa is A or G
  MOD_RES (16)..(17)..(18)..(19): Xaa is A or G or is absent

SEQ ID NO: 76415 - protein, 35 aa, Artificial Sequence; identical to SEQ ID NO: 2332
  GFR-binding peptide
  MOD_RES (2)..(4)..(35): Xaa is C or S

SEQ ID NO: 76416 - protein, 35 aa, Artificial Sequence; identical to SEQ ID NO: 56197
  GFR-binding peptide
  MOD_RES (2)..(34)..(35): Xaa is C or S

SEQ ID NO: 76417 - protein, 40 aa, Artificial Sequence; identical to SEQ ID NO: 2333
  GFR-binding peptide
  MOD_RES (1)..(3)..(36)..(37): Xaa is C or S

SEQ ID NO: 76418 - protein, 37 aa, Artificial Sequence; identical to SEQ ID NO: 23318
  GFR-binding peptide
  MOD_RES (1)..(33)..(34): Xaa is C or S

SEQ ID NO: 76419 - protein, 42 aa, Artificial Sequence; identical to SEQ ID NO: 4271
  GFR-binding peptide
  MOD_RES (1)..(3)..(37)..(38): Xaa is C or S
  MOD_RES (15)..(16)..(17)..(18)..(19): Xaa is A or G
  MOD_RES (20)..(21)..(22)..(23): Xaa is A or G or is absent

SEQ ID NO: 76420 - protein, 34 aa, Artificial Sequence; identical to SEQ ID NO: 4272
  GFR-binding peptide
  MOD_RES (1)..(32)..(33): Xaa is C or S

SEQ ID NO: 76421 - protein, 33 aa, Artificial Sequence
  GFR-binding peptide
  MOD_RES (32)..(33): Xaa is C or S
RDVVMGQYNKLIIQQKDNLYLMSIASMKTPTXX

SEQ ID NO: 76422 - protein, 39 aa, Artificial Sequence; identical to SEQ ID NO: 2336
  GFR-binding peptide
  MOD_RES (2)..(35)..(36): Xaa is C or S
  MOD_RES (13)..(14)..(15)..(16)..(17): Xaa is A or G
  MOD_RES (18)..(19)..(20)..(21): Xaa is A or G or is absent

SEQ ID NO: 76423 - protein, 37 aa, Artificial Sequence; identical to SEQ ID NO: 2337
  GFR-binding peptide
  MOD_RES (1)..(3)..(35)..(36): Xaa is C or S

SEQ ID NO: 76424 - protein, 42 aa, Artificial Sequence; identical to SEQ ID NO: 4274
  GFR-binding peptide
  MOD_RES (2)..(4)..(37)..(38): Xaa is C or S

SEQ ID NO: 76425 - protein, 39 aa, Artificial Sequence; identical to SEQ ID NO: 2338
  GFR-binding peptide
  MOD_RES (2)..(36)..(37): Xaa is C or S
  MOD_RES (14)..(15)..(16)..(17)..(18): Xaa is A or G
  MOD_RES (19)..(20)..(21)..(22): Xaa is A or G or is absent

SEQ ID NO: 76426 - protein, 39 aa, Artificial Sequence; identical to SEQ ID NO: 4275
  GFR-binding peptide
  MOD_RES (2)..(36)..(37): Xaa is C or S
  MOD_RES (14)..(15)..(16)..(17)..(18): Xaa is A or G
  MOD_RES (19)..(20)..(21)..(22): Xaa is A or G or is absent

SEQ ID NO: 76427 - protein, 34 aa, Artificial Sequence; identical to SEQ ID NO: 4277
  GFR-binding peptide
  MOD_RES (1)..(1): Xaa is C or S
  MOD_RES (13)..(14)..(15)..(16)..(17): Xaa is A or G
  MOD_RES (18)..(19)..(20)..(21): Xaa is A or G or is absent

SEQ ID NO: 76428 - protein, 39 aa, Artificial Sequence; identical to SEQ ID NO: 4278
  GFR-binding peptide
  MOD_RES (1)..(33): Xaa is C or S

SEQ ID NO: 76429 - protein, 31 aa, Artificial Sequence; identical to SEQ ID NO: 11698
  GFR-binding peptide
  MOD_RES (31)..(31): Xaa is C or S

SEQ ID NO: 76430 - protein, 40 aa, Artificial Sequence; identical to SEQ ID NO: 4280
  GFR-binding peptide
  MOD_RES (34)..(34): Xaa is C or S
  MOD_RES (12)..(13)..(14)..(15)..(16): Xaa is A or G
  MOD_RES (17)..(18)..(19)..(20): Xaa is A or G or is absent

SEQ ID NO: 76431 - protein, 37 aa, Artificial Sequence; identical to SEQ ID NO: 2340
  GFR-binding peptide
  MOD_RES (1)..(33)..(34): Xaa is C or S

SEQ ID NO: 76432 - protein, 32 aa, Artificial Sequence; identical to SEQ ID NO: 56211
  GFR-binding peptide
  MOD_RES (32)..(32): Xaa is C or S

SEQ ID NO: 76433 - protein, 34 aa, Artificial Sequence
  GFR-binding peptide
  MOD_RES (1)..(34): Xaa is C or S
  MOD_RES (12)..(13)..(14)..(15)..(16): Xaa is A or G
  MOD_RES (17)..(18)..(19)..(20): Xaa is A or G or is absent
XEEVIMQYNKLXXXXXXXXXLYLMSIASTKVPAX

SEQ ID NO: 76434 - protein, 36 aa, Artificial Sequence
  GFR-binding peptide
  MOD_RES (1)..(33)..(34): Xaa is C or S
XSEVTMNQYNKLVVNKNEDLYLISIASMKEPVXXPE

SEQ ID NO: 76435 - protein, 41 aa, Artificial Sequence; identical to SEQ ID NO: 2343
  GFR-binding peptide
  MOD_RES (1)..(3)..(37): Xaa is C or S
  MOD_RES (15)..(16)..(17)..(18)..(19): Xaa is A or G
  MOD_RES (20)..(21)..(22)..(23): Xaa is A or G or is absent

SEQ ID NO: 76436 - protein, 35 aa, Artificial Sequence
  GFR-binding peptide
  MOD_RES (32)..(33): Xaa is C or S
SEVTMNQYNKLVVNKNEDLYLISIASMKEPVXXPE

SEQ ID NO: 76437 - protein, 34 aa, Artificial Sequence; identical to SEQ ID NO: 2344
  GFR-binding peptide
  MOD_RES (31)..(32): Xaa is C or S

SEQ ID NO: 76438 - protein, 38 aa, Artificial Sequence; identical to SEQ ID NO: 25331
  GFR-binding peptide
  MOD_RES (32)..(33): Xaa is C or S

SEQ ID NO: 76439 - protein, 41 aa, Artificial Sequence
  GFR-binding peptide
  MOD_RES (2)..(36)..(37): Xaa is C or S
  MOD_RES (14)..(15)..(16)..(17)..(18): Xaa is A or G
  MOD_RES (19)..(20)..(21)..(22): Xaa is A or G or is absent
GXAEVVMDQYNKLXXXXXXXXXLYLISIASLRAPVXXSAPA

SEQ ID NO: 76440 - protein, 39 aa, Artificial Sequence; identical to SEQ ID NO: 4283
  GFR-binding peptide
  MOD_RES (2)..(33)..(34): Xaa is C or S

SEQ ID NO: 76441 - protein, 38 aa, Artificial Sequence; identical to SEQ ID NO: 2349
  GFR-binding peptide
  MOD_RES (34)..(35): Xaa is C or S
  MOD_RES (12)..(13)..(14)..(15)..(16): Xaa is A or G
  MOD_RES (17)..(18)..(19)..(20): Xaa is A or G or is absent

SEQ ID NO: 76442 - protein, 34 aa, Artificial Sequence
  GFR-binding peptide
  MOD_RES (1)..(32)..(33): Xaa is C or S
XEEVIMQYNKLLLVRGNDLYLMSIASTKVPAXXT

SEQ ID NO: 76443 - protein, 39 aa, Artificial Sequence; identical to SEQ ID NO: 2350
  GFR-binding peptide
  MOD_RES (2)..(4)..(36)..(37): Xaa is C or S

SEQ ID NO: 76444 - protein, 38 aa, Artificial Sequence; identical to SEQ ID NO: 2351
  GFR-binding peptide
  MOD_RES (1)..(3)..(35)..(36): Xaa is C or S

SEQ ID NO: 76445 - protein, 34 aa, Artificial Sequence
  GFR-binding peptide
  MOD_RES (32)..(33): Xaa is C or S
AEVVMDQYNKLVVNNAADLYLISIASLRAPVXXS

SEQ ID NO: 76446 - protein, 42 aa, Artificial Sequence; identical to SEQ ID NO: 2353
  GFR-binding peptide
  MOD_RES (1)..(3)..(37)..(38): Xaa is C or S
  MOD_RES (15)..(16)..(17)..(18)..(19): Xaa is A or G
  MOD_RES (20)..(21)..(22)..(23): Xaa is A or G or is absent

SEQ ID NO: 76447 - protein, 37 aa, Artificial Sequence; identical to SEQ ID NO: 4286
  GFR-binding peptide
  MOD_RES (1)..(3)..(37): Xaa is C or S
  MOD_RES (15)..(16)..(17)..(18)..(19): Xaa is A or G
  MOD_RES (20)..(21)..(22)..(23): Xaa is A or G or is absent

SEQ ID NO: 76448 - protein, 34 aa, Artificial Sequence; identical to SEQ ID NO: 2356
  GFR-binding peptide
  MOD_RES (1)..(34): Xaa is C or S
  MOD_RES (12)..(13)..(14)..(15)..(16): Xaa is A or G
  MOD_RES (17)..(18)..(19)..(20): Xaa is A or G or is absent

SEQ ID NO: 76449 - protein, 38 aa, Artificial Sequence
  GFR-binding peptide
  MOD_RES (33)..(34): Xaa is C or S
  MOD_RES (11)..(12)..(13)..(14)..(15): Xaa is A or G
  MOD_RES (16)..(17)..(18)..(19): Xaa is A or G or is absent
EEVIMQYNKLXXXXXXXXXLYLMSIASTKVPAXXTSPV

SEQ ID NO: 76450 - protein, 43 aa, Artificial Sequence; identical to SEQ ID NO: 2357
  GFR-binding peptide
  MOD_RES (2)..(4)..(38)..(39): Xaa is C or S
  MOD_RES (16)..(17)..(18)..(19)..(20): Xaa is A or G
  MOD_RES (21)..(22)..(23)..(24): Xaa is A or G or is absent

SEQ ID NO: 76451 - protein, 33 aa, Artificial Sequence; identical to SEQ ID NO: 2358
  GFR-binding peptide
  MOD_RES (33)..(33): Xaa is C or S
  MOD_RES (11)..(12)..(13)..(14)..(15): Xaa is A or G
  MOD_RES (16)..(17)..(18)..(19): Xaa is A or G or is absent

SEQ ID NO: 76452 - protein, 38 aa, Artificial Sequence; identical to SEQ ID NO: 2359
  GFR-binding peptide
  MOD_RES (1)..(34)..(35): Xaa is C or S
  MOD_RES (12)..(13)..(14)..(15)..(16): Xaa is A or G
  MOD_RES (17)..(18)..(19)..(20): Xaa is A or G or is absent

SEQ ID NO: 76453 - protein, 42 aa, Artificial Sequence; identical to SEQ ID NO: 56227
  GFR-binding peptide
  MOD_RES (2)..(36)..(37): Xaa is C or S
  MOD_RES (14)..(15)..(16)..(17)..(18): Xaa is A or G
  MOD_RES (19)..(20)..(21)..(22): Xaa is A or G or is absent

SEQ ID NO: 76454 - protein, 38 aa, Artificial Sequence
  GFR-binding peptide
  MOD_RES (2)..(4)..(38): Xaa is C or S
  MOD_RES (16)..(17)..(18)..(19)..(20): Xaa is A or G
  MOD_RES (21)..(22)..(23)..(24): Xaa is A or G or is absent
RXAXSEVTMNQYNKLXXXXXXXXXLYLISIASMKEPVX

SEQ ID NO: 76455 - protein, 37 aa, Artificial Sequence; identical to SEQ ID NO: 2360
  GFR-binding peptide
  MOD_RES (1)..(3)..(37): Xaa is C or S
  MOD_RES (15)..(16)..(17)..(18)..(19): Xaa is A or G
  MOD_RES (20)..(21)..(22)..(23): Xaa is A or G or is absent

SEQ ID NO: 76456 - protein, 40 aa, Artificial Sequence; identical to SEQ ID NO: 4291
  GFR-binding peptide
  MOD_RES (2)..(4)..(36)..(37): Xaa is C or S

SEQ ID NO: 76457 - protein, 35 aa, Artificial Sequence
  GFR-binding peptide
  MOD_RES (2)..(2): Xaa is C or S
  MOD_RES (14)..(15)..(16)..(17)..(18): Xaa is A or G
  MOD_RES (19)..(20)..(21)..(22): Xaa is A or G or is absent
GXAEVVMDQYNKLXXXXXXXXXLYLISIASLRAPV

SEQ ID NO: 76458 - protein, 34 aa, Artificial Sequence; identical to SEQ ID NO: 56229
  GFR-binding peptide
  MOD_RES (2)..(4): Xaa is C or S

SEQ ID NO: 76459 - protein, 34 aa, Artificial Sequence; identical to SEQ ID NO: 2362
  GFR-binding peptide
  MOD_RES (1)..(33)..(34): Xaa is C or S

SEQ ID NO: 76460 - protein, 39 aa, Artificial Sequence; identical to SEQ ID NO: 2363
  GFR-binding peptide
  MOD_RES (33)..(34): Xaa is C or S
  MOD_RES (11)..(12)..(13)..(14)..(15): Xaa is A or G
  MOD_RES (16)..(17)..(18)..(19): Xaa is A or G or is absent

SEQ ID NO: 76461 - protein, 38 aa, Artificial Sequence; identical to SEQ ID NO: 4294
  GFR-binding peptide
  MOD_RES (33)..(34): Xaa is C or S
  MOD_RES (11)..(12)..(13)..(14)..(15): Xaa is A or G
  MOD_RES (16)..(17)..(18)..(19): Xaa is A or G or is absent

SEQ ID NO: 76462 - protein, 33 aa, Artificial Sequence; identical to SEQ ID NO: 4295
  GFR-binding peptide
  MOD_RES (2)..(33): Xaa is C or S

SEQ ID NO: 76463 - protein, 39 aa, Artificial Sequence; identical to SEQ ID NO: 56235
  GFR-binding peptide
  MOD_RES (2)..(36)..(37): Xaa is C or S
  MOD_RES (14)..(15)..(16)..(17)..(18): Xaa is A or G
  MOD_RES (19)..(20)..(21)..(22): Xaa is A or G or is absent

SEQ ID NO: 76464 - protein, 36 aa, Artificial Sequence; identical to SEQ ID NO: 60015
  GFR-binding peptide
  MOD_RES (31)..(32): Xaa is C or S

SEQ ID NO: 76465 - protein, 41 aa, Artificial Sequence; identical to SEQ ID NO: 2364
  GFR-binding peptide
  MOD_RES (2)..(4)..(37)..(38): Xaa is C or S
  MOD_RES (15)..(16)..(17)..(18)..(19): Xaa is A or G
  MOD_RES (20)..(21)..(22)..(23): Xaa is A or G or is absent

SEQ ID NO: 76466 - protein, 35 aa, Artificial Sequence; identical to SEQ ID NO: 2367
  GFR-binding peptide
  MOD_RES (34)..(35): Xaa is C or S
  MOD_RES (12)..(13)..(14)..(15)..(16): Xaa is A or G
  MOD_RES (17)..(18)..(19)..(20): Xaa is A or G or is absent

SEQ ID NO: 76467 - protein, 39 aa, Artificial Sequence; identical to SEQ ID NO: 4297
  GFR-binding peptide
  MOD_RES (2)..(4)..(38)..(39): Xaa is C or S
  MOD_RES (16)..(17)..(18)..(19)..(20): Xaa is A or G
  MOD_RES (21)..(22)..(23)..(24): Xaa is A or G or is absent

SEQ ID NO: 76468 - protein, 34 aa, Artificial Sequence; identical to SEQ ID NO: 2368
  GFR-binding peptide
  MOD_RES (32)..(33): Xaa is C or S

SEQ ID NO: 76469 - protein, 33 aa, Artificial Sequence; identical to SEQ ID NO: 4298
  GFR-binding peptide
  MOD_RES (2)..(33): Xaa is C or S

SEQ ID NO: 76470 - protein, 37 aa, Artificial Sequence; identical to SEQ ID NO: 4299
  GFR-binding peptide
  MOD_RES (2)..(36)..(37): Xaa is C or S
  MOD_RES (14)..(15)..(16)..(17)..(18): Xaa is A or G
  MOD_RES (19)..(20)..(21)..(22): Xaa is A or G or is absent

SEQ ID NO: 76471 - protein, 38 aa, Artificial Sequence
  GFR-binding peptide
  MOD_RES (1)..(33)..(34): Xaa is C or S
XAEVVMDQYNKLVVNNAADLYLISIASLRAPVXXSAPA

SEQ ID NO: 76472 - protein, 41 aa, Artificial Sequence; identical to SEQ ID NO: 58290
  GFR-binding peptide
  MOD_RES (2)..(4)..(38)..(39): Xaa is C or S
  MOD_RES (16)..(17)..(18)..(19)..(20): Xaa is A or G
  MOD_RES (21)..(22)..(23)..(24): Xaa is A or G or is absent

SEQ ID NO: 76473 - protein, 37 aa, Artificial Sequence; identical to SEQ ID NO: 4303
  GFR-binding peptide
  MOD_RES (2)..(34)..(35): Xaa is C or S

SEQ ID NO: 76474 - protein, 38 aa, Artificial Sequence; identical to SEQ ID NO: 4304
  GFR-binding peptide
  MOD_RES (1)..(35)..(36): Xaa is C or S
  MOD_RES (13)..(14)..(15)..(16)..(17): Xaa is A or G
  MOD_RES (18)..(19)..(20)..(21): Xaa is A or G or is absent

SEQ ID NO: 76475 - protein, 40 aa, Artificial Sequence; identical to SEQ ID NO: 4305
  GFR-binding peptide
  MOD_RES (2)..(4)..(36)..(37): Xaa is C or S

SEQ ID NO: 76476 - protein, 36 aa, Artificial Sequence; identical to SEQ ID NO: 4306
  GFR-binding peptide
  MOD_RES (2)..(4)..(35)..(36): Xaa is C or S

SEQ ID NO: 76477 - protein, 37 aa, Artificial Sequence; identical to SEQ ID NO: 2377
  GFR-binding peptide
  MOD_RES (1)..(33)..(34): Xaa is C or S

SEQ ID NO: 76478 - protein, 42 aa, Artificial Sequence; identical to SEQ ID NO: 2379
  GFR-binding peptide
  MOD_RES (2)..(4)..(38)..(39): Xaa is C or S
  MOD_RES (16)..(17)..(18)..(19)..(20): Xaa is A or G
  MOD_RES (21)..(22)..(23)..(24): Xaa is A or G or is absent

SEQ ID NO: 76479 - protein, 39 aa, Artificial Sequence; identical to SEQ ID NO: 2381
  GFR-binding peptide
  MOD_RES (2)..(36)..(37): Xaa is C or S
  MOD_RES (14)..(15)..(16)..(17)..(18): Xaa is A or G
  MOD_RES (19)..(20)..(21)..(22): Xaa is A or G or is absent

SEQ ID NO: 76480 - protein, 32 aa, Artificial Sequence; identical to SEQ ID NO: 4308
  GFR-binding peptide
  MOD_RES (31)..(32): Xaa is C or S

SEQ ID NO: 76481 - protein, 38 aa, Artificial Sequence; identical to SEQ ID NO: 2382
  GFR-binding peptide
  MOD_RES (1)..(3)..(37)..(38): Xaa is C or S
  MOD_RES (15)..(16)..(17)..(18)..(19): Xaa is A or G
  MOD_RES (20)..(21)..(22)..(23): Xaa is A or G or is absent

SEQ ID NO: 76482 - protein, 33 aa, Artificial Sequence; identical to SEQ ID NO: 4310
  GFR-binding peptide
  MOD_RES (33)..(33): Xaa is C or S
  MOD_RES (11)..(12)..(13)..(14)..(15): Xaa is A or G
  MOD_RES (16)..(17)..(18)..(19): Xaa is A or G or is absent

SEQ ID NO: 76483 - protein, 32 aa, Artificial Sequence; identical to SEQ ID NO: 4313
  GFR-binding peptide
  MOD_RES (1)..(1): Xaa is C or S

SEQ ID NO: 76484 - protein, 40 aa, Artificial Sequence; identical to SEQ ID NO: 58296
  GFR-binding peptide
  MOD_RES (2)..(4)..(38)..(39): Xaa is C or S
  MOD_RES (16)..(17)..(18)..(19)..(20): Xaa is A or G
  MOD_RES (21)..(22)..(23)..(24): Xaa is A or G or is absent

SEQ ID NO: 76485 - protein, 40 aa, Artificial Sequence; identical to SEQ ID NO: 56247
  GFR-binding peptide
  MOD_RES (1)..(3)..(35)..(36): Xaa is C or S

SEQ ID NO: 76486 - protein, 41 aa, Artificial Sequence; identical to SEQ ID NO: 4314
  GFR-binding peptide
  MOD_RES (1)..(3)..(35)..(36): Xaa is C or S

SEQ ID NO: 76487 - protein, 34 aa, Artificial Sequence; identical to SEQ ID NO: 2387
  GFR-binding peptide
  MOD_RES (33)..(34): Xaa is C or S
  MOD_RES (11)..(12)..(13)..(14)..(15): Xaa is A or G
  MOD_RES (16)..(17)..(18)..(19): Xaa is A or G or is absent

SEQ ID NO: 76488 - protein, 44 aa, Artificial Sequence; identical to SEQ ID NO: 2388
  GFR-binding peptide
  MOD_RES (1)..(3)..(38)..(39): Xaa is C or S
  MOD_RES (16)..(17)..(18)..(19)..(20): Xaa is A or G
  MOD_RES (21)..(22)..(23)..(24): Xaa is A or G or is absent

SEQ ID NO: 76489 - protein, 35 aa, Artificial Sequence; identical to SEQ ID NO: 2390
  GFR-binding peptide
  MOD_RES (1)..(32)..(33): Xaa is C or S

SEQ ID NO: 76490 - protein, 41 aa, Artificial Sequence; identical to SEQ ID NO: 2394
  GFR-binding peptide
  MOD_RES (2)..(36)..(37): Xaa is C or S
  MOD_RES (14)..(15)..(16)..(17)..(18): Xaa is A or G
  MOD_RES (19)..(20)..(21)..(22): Xaa is A or G or is absent

SEQ ID NO: 76491 - protein, 36 aa, Artificial Sequence; identical to SEQ ID NO: 4320
  GFR-binding peptide
  MOD_RES (2)..(36): Xaa is C or S
  MOD_RES (14)..(15)..(16)..(17)..(18): Xaa is A or G
  MOD_RES (19)..(20)..(21)..(22): Xaa is A or G or is absent

SEQ ID NO: 76492 - protein, 36 aa, Artificial Sequence; identical to SEQ ID NO: 2398
  GFR-binding peptide
  MOD_RES (1)..(34)..(35): Xaa is C or S
  MOD_RES (12)..(13)..(14)..(15)..(16): Xaa is A or G
  MOD_RES (17)..(18)..(19)..(20): Xaa is A or G or is absent

SEQ ID NO: 76493 - protein, 38 aa, Artificial Sequence; identical to SEQ ID NO: 4322
  GFR-binding peptide
  MOD_RES (33)..(34): Xaa is C or S
  MOD_RES (11)..(12)..(13)..(14)..(15): Xaa is A or G
  MOD_RES (16)..(17)..(18)..(19): Xaa is A or G or is absent

SEQ ID NO: 76494 - protein, 38 aa, Artificial Sequence; identical to SEQ ID NO: 4324
  GFR-binding peptide
  MOD_RES (2)..(34)..(35): Xaa is C or S

SEQ ID NO: 76495 - protein, 39 aa, Artificial Sequence; identical to SEQ ID NO: 61809
  GFR-binding peptide
  MOD_RES (2)..(36)..(37): Xaa is C or S
  MOD_RES (14)..(15)..(16)..(17)..(18): Xaa is A or G
  MOD_RES (19)..(20)..(21)..(22): Xaa is A or G or is absent

SEQ ID NO: 76496 - protein, 38 aa, Artificial Sequence; identical to SEQ ID NO: 9895
  GFR-binding peptide
  MOD_RES (1)..(33)..(34): Xaa is C or S

SEQ ID NO: 76497 - protein, 42 aa, Artificial Sequence
  GFR-binding peptide
  MOD_RES (2)..(36)..(37): Xaa is C or S
  MOD_RES (14)..(15)..(16)..(17)..(18): Xaa is A or G
  MOD_RES (19)..(20)..(21)..(22): Xaa is A or G or is absent
GXAEVVMDQYNKLXXXXXXXXXLYLISIASLRAPVXXSAPAA

SEQ ID NO: 76498 - protein, 34 aa, Artificial Sequence
  GFR-binding peptide
  MOD_RES (1)..(33)..(34): Xaa is C or S
XESVAMGQYNKLYTVVGKDLYLISIASLKTPVXX

SEQ ID NO: 76499 - protein, 40 aa, Artificial Sequence
  GFR-binding peptide
  MOD_RES (34)..(35): Xaa is C or S
  MOD_RES (12)..(13)..(14)..(15)..(16): Xaa is A or G
  MOD_RES (17)..(18)..(19)..(20): Xaa is A or G or is absent
AEVVMDQYNKLXXXXXXXXXLYLISIASLRAPVXXSAPAA

SEQ ID NO: 76500 - protein, 36 aa, Artificial Sequence
  GFR-binding peptide
  MOD_RES (2)..(35)..(36): Xaa is C or S
  MOD_RES (13)..(14)..(15)..(16)..(17): Xaa is A or G
  MOD_RES (18)..(19)..(20)..(21): Xaa is A or G or is absent
GXEEVIMQYNKLXXXXXXXXXLYLMSIASTKVPAXX

SEQ ID NO: 76501 - protein, 38 aa, Artificial Sequence; identical to SEQ ID NO: 4329
  GFR-binding peptide
  MOD_RES (1)..(33)..(34): Xaa is C or S

SEQ ID NO: 76502 - protein, 38 aa, Artificial Sequence; identical to SEQ ID NO: 2402
  GFR-binding peptide
  MOD_RES (2)..(4)..(36)..(37): Xaa is C or S

SEQ ID NO: 76503 - protein, 35 aa, Artificial Sequence; identical to SEQ ID NO: 4331
  GFR-binding peptide
  MOD_RES (34)..(35): Xaa is C or S
  MOD_RES (12)..(13)..(14)..(15)..(16): Xaa is A or G
  MOD_RES (17)..(18)..(19)..(20): Xaa is A or G or is absent

SEQ ID NO: 76504 - protein, 36 aa, Artificial Sequence; identical to SEQ ID NO: 4332
  GFR-binding peptide
  MOD_RES (2)..(36): Xaa is C or S
  MOD_RES (14)..(15)..(16)..(17)..(18): Xaa is A or G
  MOD_RES (19)..(20)..(21)..(22): Xaa is A or G or is absent

SEQ ID NO: 76505 - protein, 35 aa, Artificial Sequence
  GFR-binding peptide
  MOD_RES (1)..(33)..(34): Xaa is C or S
XRDVVMGQYNKLIIQQKDNLYLMSIASMKTPTXXP

SEQ ID NO: 76506 - protein, 33 aa, Artificial Sequence; identical to SEQ ID NO: 4335
  GFR-binding peptide
  MOD_RES (1)..(1): Xaa is C or S
  MOD_RES (12)..(13)..(14)..(15)..(16): Xaa is A or G
  MOD_RES (17)..(18)..(19)..(20): Xaa is A or G or is absent

SEQ ID NO: 76507 - protein, 34 aa, Artificial Sequence; identical to SEQ ID NO: 2403
  GFR-binding peptide
  MOD_RES (33)..(34): Xaa is C or S
  MOD_RES (11)..(12)..(13)..(14)..(15): Xaa is A or G
  MOD_RES (16)..(17)..(18)..(19): Xaa is A or G or is absent

SEQ ID NO: 76508 - protein, 39 aa, Artificial Sequence
  GFR-binding peptide
  MOD_RES (2)..(34)..(35): Xaa is C or S
GXESVAMGQYNKLYTVVGKDLYLISIASLKTPVXXAKSA

SEQ ID NO: 76509 - protein, 35 aa, Artificial Sequence; identical to SEQ ID NO: 4337
  GFR-binding peptide
  MOD_RES (2)..(2): Xaa is C or S
  MOD_RES (14)..(15)..(16)..(17)..(18): Xaa is A or G
  MOD_RES (19)..(20)..(21)..(22): Xaa is A or G or is absent

SEQ ID NO: 76510 - protein, 39 aa, Artificial Sequence; identical to SEQ ID NO: 2406
  GFR-binding peptide
  MOD_RES (2)..(4)..(38)..(39): Xaa is C or S
  MOD_RES (16)..(17)..(18)..(19)..(20): Xaa is A or G
  MOD_RES (21)..(22)..(23)..(24): Xaa is A or G or is absent

SEQ ID NO: 76511 - protein, 34 aa, Artificial Sequence; identical to SEQ ID NO: 4338
  GFR-binding peptide
  MOD_RES (1)..(34): Xaa is C or S
  MOD_RES (12)..(13)..(14)..(15)..(16): Xaa is A or G
  MOD_RES (17)..(18)..(19)..(20): Xaa is A or G or is absent

SEQ ID NO: 76512 - protein, 38 aa, Artificial Sequence; identical to SEQ ID NO: 2407
  GFR-binding peptide
  MOD_RES (33)..(34): Xaa is C or S
  MOD_RES (11)..(12)..(13)..(14)..(15): Xaa is A or G
  MOD_RES (16)..(17)..(18)..(19): Xaa is A or G or is absent

SEQ ID NO: 76513 - protein, 34 aa, Artificial Sequence; identical to SEQ ID NO: 2408
  GFR-binding peptide
  MOD_RES (33)..(34): Xaa is C or S
  MOD_RES (11)..(12)..(13)..(14)..(15): Xaa is A or G
  MOD_RES (16)..(17)..(18)..(19): Xaa is A or G or is absent

SEQ ID NO: 76514 - protein, 38 aa, Artificial Sequence; identical to SEQ ID NO: 56275
  GFR-binding peptide
  MOD_RES (2)..(36)..(37): Xaa is C or S
  MOD_RES (14)..(15)..(16)..(17)..(18): Xaa is A or G
  MOD_RES (19)..(20)..(21)..(22): Xaa is A or G or is absent

SEQ ID NO: 76515 - protein, 32 aa, Artificial Sequence; identical to SEQ ID NO: 2409
  GFR-binding peptide
  MOD_RES (31)..(31): Xaa is C or S

SEQ ID NO: 76516 - protein, 41 aa, Artificial Sequence; identical to SEQ ID NO: 2410
  GFR-binding peptide
  MOD_RES (1)..(3)..(35)..(36): Xaa is C or S

SEQ ID NO: 76517 - protein, 37 aa, Artificial Sequence
  GFR-binding peptide
  MOD_RES (1)..(34)..(35): Xaa is C or S
  MOD_RES (12)..(13)..(14)..(15)..(16): Xaa is A or G
  MOD_RES (17)..(18)..(19)..(20): Xaa is A or G or is absent
XEEVIMQYNKLXXXXXXXXXLYLMSIASTKVPAXXTS

SEQ ID NO: 76518 - protein, 37 aa, Artificial Sequence
  GFR-binding peptide
  MOD_RES (2)..(36)..(37): Xaa is C or S
  MOD_RES (14)..(15)..(16)..(17)..(18): Xaa is A or G
  MOD_RES (19)..(20)..(21)..(22): Xaa is A or G or is absent
GXRDVVMGQYNKLXXXXXXXXXLYLMSIASMKTPTXX

SEQ ID NO: 76519 - protein, 32 aa, Artificial Sequence; identical to SEQ ID NO: 4346
  GFR-binding peptide
  MOD_RES (11)..(12)..(13)..(14)..(15): Xaa is A or G
  MOD_RES (16)..(17)..(18)..(19): Xaa is A or G or is absent

SEQ ID NO: 76520 - protein, 33 aa, Artificial Sequence
  GFR-binding peptide
  MOD_RES (2)..(33): Xaa is C or S
GXEEVIMQYNKLLLVRGNDLYLMSIASTKVPAX

SEQ ID NO: 76521 - protein, 40 aa, Artificial Sequence; identical to SEQ ID NO: 9911
  GFR-binding peptide
  MOD_RES (2)..(34)..(35): Xaa is C or S

SEQ ID NO: 76522 - protein, 35 aa, Artificial Sequence; identical to SEQ ID NO: 63566
  GFR-binding peptide
  MOD_RES (2)..(34)..(35): Xaa is C or S

SEQ ID NO: 76523 - protein, 35 aa, Artificial Sequence
  GFR-binding peptide
  MOD_RES (32)..(33): Xaa is C or S
RDVVMGQYNKLIIQQKDNLYLMSIASMKTPTXXPG

SEQ ID NO: 76524 - protein, 38 aa, Artificial Sequence
  GFR-binding peptide
  MOD_RES (1)..(3)..(37)..(38): Xaa is C or S
  MOD_RES (15)..(16)..(17)..(18)..(19): Xaa is A or G
  MOD_RES (20)..(21)..(22)..(23): Xaa is A or G or is absent
XGXESVAMGQYNKLXXXXXXXXXLYLISIASLKTPVXX

SEQ ID NO: 76525 - protein, 37 aa, Artificial Sequence; identical to SEQ ID NO: 23395
  GFR-binding peptide
  MOD_RES (2)..(34)..(35): Xaa is C or S

SEQ ID NO: 76526 - protein, 37 aa, Artificial Sequence
  GFR-binding peptide
  MOD_RES (2)..(36)..(37): Xaa is C or S
  MOD_RES (14)..(15)..(16)..(17)..(18): Xaa is A or G
  MOD_RES (19)..(20)..(21)..(22): Xaa is A or G or is absent
GXAEVVMDQYNKLXXXXXXXXXLYLISIASLRAPVXX

SEQ ID NO: 76527 - protein, 36 aa, Artificial Sequence; identical to SEQ ID NO: 2418
  GFR-binding peptide
  MOD_RES (1)..(32)..(33): Xaa is C or S

SEQ ID NO: 76528 - protein, 36 aa, Artificial Sequence
  GFR-binding peptide
  MOD_RES (33)..(34): Xaa is C or S
  MOD_RES (11)..(12)..(13)..(14)..(15): Xaa is A or G
  MOD_RES (16)..(17)..(18)..(19): Xaa is A or G or is absent
SVAMGQYNKLXXXXXXXXXLYLISIASLKTPVXXAK

SEQ ID NO: 76529 - protein, 39 aa, Artificial Sequence; identical to SEQ ID NO: 4349
  GFR-binding peptide
  MOD_RES (1)..(3)..(37)..(38): Xaa is C or S
  MOD_RES (15)..(16)..(17)..(18)..(19): Xaa is A or G
  MOD_RES (20)..(21)..(22)..(23): Xaa is A or G or is absent

SEQ ID NO: 76530 - protein, 38 aa, Artificial Sequence; identical to SEQ ID NO: 23400
  GFR-binding peptide
  MOD_RES (2)..(34)..(35): Xaa is C or S

SEQ ID NO: 76531 - protein, 33 aa, Artificial Sequence; identical to SEQ ID NO: 4350
  GFR-binding peptide
  MOD_RES (33)..(33): Xaa is C or S
  MOD_RES (11)..(12)..(13)..(14)..(15): Xaa is A or G
  MOD_RES (16)..(17)..(18)..(19): Xaa is A or G or is absent

SEQ ID NO: 76532 - protein, 34 aa, Artificial Sequence; identical to SEQ ID NO: 4351
  GFR-binding peptide
  MOD_RES (1)..(32)..(33): Xaa is C or S

SEQ ID NO: 76533 - protein, 37 aa, Artificial Sequence; identical to SEQ ID NO: 2423
  GFR-binding peptide
  MOD_RES (1)..(35)..(36): Xaa is C or S
  MOD_RES (13)..(14)..(15)..(16)..(17): Xaa is A or G
  MOD_RES (18)..(19)..(20)..(21): Xaa is A or G or is absent

SEQ ID NO: 76534 - protein, 37 aa, Artificial Sequence; identical to SEQ ID NO: 56284
  GFR-binding peptide
  MOD_RES (1)..(34)..(35): Xaa is C or S
  MOD_RES (12)..(13)..(14)..(15)..(16): Xaa is A or G
  MOD_RES (17)..(18)..(19)..(20): Xaa is A or G or is absent

SEQ ID NO: 76535 - protein, 35 aa, Artificial Sequence; identical to SEQ ID NO: 2424
  GFR-binding peptide
  MOD_RES (2)..(35): Xaa is C or S
  MOD_RES (13)..(14)..(15)..(16)..(17): Xaa is A or G
  MOD_RES (18)..(19)..(20)..(21): Xaa is A or G or is absent

SEQ ID NO: 76536 - protein, 33 aa, Artificial Sequence; identical to SEQ ID NO: 4354
  GFR-binding peptide
  MOD_RES (1)..(1): Xaa is C or S

SEQ ID NO: 76537 - protein, 35 aa, Artificial Sequence; identical to SEQ ID NO: 2426
  GFR-binding peptide
  MOD_RES (2)..(2): Xaa is C or S
  MOD_RES (14)..(15)..(16)..(17)..(18): Xaa is A or G
  MOD_RES (19)..(20)..(21)..(22): Xaa is A or G or is absent

SEQ ID NO: 76538 - protein, 33 aa, Artificial Sequence; identical to SEQ ID NO: 61832
  GFR-binding peptide
  MOD_RES (12)..(13)..(14)..(15)..(16): Xaa is A or G
  MOD_RES (17)..(18)..(19)..(20): Xaa is A or G or is absent

SEQ ID NO: 76539 - protein, 37 aa, Artificial Sequence; identical to SEQ ID NO: 4357
  GFR-binding peptide
  MOD_RES (2)..(4): Xaa is C or S
  MOD_RES (16)..(17)..(18)..(19)..(20): Xaa is A or G
  MOD_RES (21)..(22)..(23)..(24): Xaa is A or G or is absent

SEQ ID NO: 76540 - protein, 38 aa, Artificial Sequence; identical to SEQ ID NO: 56288
  GFR-binding peptide
  MOD_RES (2)..(34)..(35): Xaa is C or S

SEQ ID NO: 76541 - protein, 39 aa, Artificial Sequence
  GFR-binding peptide
  MOD_RES (2)..(34)..(35): Xaa is C or S
GXRDVVMGQYNKLIIQQKDNLYLMSIASMKTPTXXPGAS

SEQ ID NO: 76542 - protein, 36 aa, Artificial Sequence; identical to SEQ ID NO: 4358
  GFR-binding peptide
  MOD_RES (2)..(36): Xaa is C or S
  MOD_RES (14)..(15)..(16)..(17)..(18): Xaa is A or G
  MOD_RES (19)..(20)..(21)..(22): Xaa is A or G or is absent

SEQ ID NO: 76543 - protein, 42 aa, Artificial Sequence; identical to SEQ ID NO: 4359
  GFR-binding peptide
  MOD_RES (2)..(4)..(38)..(39): Xaa is C or S
  MOD_RES (16)..(17)..(18)..(19)..(20): Xaa is A or G
  MOD_RES (21)..(22)..(23)..(24): Xaa is A or G or is absent

SEQ ID NO: 76544 - protein, 42 aa, Artificial Sequence; identical to SEQ ID NO: 4360
  GFR-binding peptide
  MOD_RES (2)..(36)..(37): Xaa is C or S
  MOD_RES (14)..(15)..(16)..(17)..(18): Xaa is A or G
  MOD_RES (19)..(20)..(21)..(22): Xaa is A or G or is absent

SEQ ID NO: 76545 - protein, 36 aa, Artificial Sequence; identical to SEQ ID NO: 56293
  GFR-binding peptide
  MOD_RES (31)..(32): Xaa is C or S

SEQ ID NO: 76546 - protein, 36 aa, Artificial Sequence; identical to SEQ ID NO: 25421
  GFR-binding peptide
  MOD_RES (2)..(34)..(35): Xaa is C or S

SEQ ID NO: 76547 - protein, 41 aa, Artificial Sequence; identical to SEQ ID NO: 56295
  GFR-binding peptide
  MOD_RES (1)..(3)..(36)..(37): Xaa is C or S
  MOD_RES (14)..(15)..(16)..(17)..(18): Xaa is A or G
  MOD_RES (19)..(20)..(21)..(22): Xaa is A or G or is absent

SEQ ID NO: 76548 - protein, 33 aa, Artificial Sequence; identical to SEQ ID NO: 23412
  GFR-binding peptide
  MOD_RES (31)..(32): Xaa is C or S

SEQ ID NO: 76549 - protein, 38 aa, Artificial Sequence; identical to SEQ ID NO: 25425
  GFR-binding peptide
  MOD_RES (1)..(3)..(35)..(36): Xaa is C or S

SEQ ID NO: 76550 - protein, 40 aa, Artificial Sequence; identical to SEQ ID NO: 58347
  GFR-binding peptide
  MOD_RES (2)..(34)..(35): Xaa is C or S

SEQ ID NO: 76551 - protein, 39 aa, Artificial Sequence; identical to SEQ ID NO: 4365
  GFR-binding peptide
  MOD_RES (1)..(35)..(36): Xaa is C or S
  MOD_RES (13)..(14)..(15)..(16)..(17): Xaa is A or G
  MOD_RES (18)..(19)..(20)..(21): Xaa is A or G or is absent

SEQ ID NO: 76552 - protein, 43 aa, Artificial Sequence
  GFR-binding peptide
  MOD_RES (1)..(3)..(37)..(38): Xaa is C or S
  MOD_RES (15)..(16)..(17)..(18)..(19): Xaa is A or G
  MOD_RES (20)..(21)..(22)..(23): Xaa is A or G or is absent
XGXSRVVMNQYNKLXXXXXXXXXLYLVSIASLKTPAXXPKPVH

SEQ ID NO: 76553 - protein, 34 aa, Artificial Sequence; identical to SEQ ID NO: 2438
  GFR-binding peptide
  MOD_RES (1)..(3)..(34): Xaa is C or S

SEQ ID NO: 76554 - protein, 33 aa, Artificial Sequence; identical to SEQ ID NO: 2439
  GFR-binding peptide
  MOD_RES (31)..(32): Xaa is C or S

SEQ ID NO: 76555 - protein, 39 aa, Artificial Sequence; identical to SEQ ID NO: 4368
  GFR-binding peptide
  MOD_RES (2)..(35)..(36): Xaa is C or S

SEQ ID NO: 76556 - protein, 42 aa, Artificial Sequence; identical to SEQ ID NO: 25430
  GFR-binding peptide
  MOD_RES (2)..(4)..(36)..(37): Xaa is C or S

SEQ ID NO: 76557 - protein, 38 aa, Artificial Sequence; identical to SEQ ID NO: 9939
  GFR-binding peptide
  MOD_RES (33)..(34): Xaa is C or S
  MOD_RES (11)..(12)..(13)..(14)..(15): Xaa is A or G
  MOD_RES (16)..(17)..(18)..(19): Xaa is A or G or is absent

SEQ ID NO: 76558 - protein, 40 aa, Artificial Sequence; identical to SEQ ID NO: 11794
  GFR-binding peptide
  MOD_RES (2)..(4)..(38)..(39): Xaa is C or S
  MOD_RES (16)..(17)..(18)..(19)..(20): Xaa is A or G
  MOD_RES (21)..(22)..(23)..(24): Xaa is A or G or is absent

SEQ ID NO: 76559 - protein, 32 aa, Artificial Sequence
  GFR-binding peptide
  MOD_RES (11)..(12)..(13)..(14)..(15): Xaa is A or G
  MOD_RES (16)..(17)..(18)..(19): Xaa is A or G or is absent
DVVMGQYNKLXXXXXXXXXLYLMSIASMKTPT

SEQ ID NO: 76560 - protein, 36 aa, Artificial Sequence; identical to SEQ ID NO: 63590
  GFR-binding peptide
  MOD_RES (1)..(3): Xaa is C or S
  MOD_RES (15)..(16)..(17)..(18)..(19): Xaa is A or G
  MOD_RES (20)..(21)..(22)..(23): Xaa is A or G or is absent

SEQ ID NO: 76561 - protein, 39 aa, Artificial Sequence; identical to SEQ ID NO: 4370
  GFR-binding peptide
  MOD_RES (2)..(36): Xaa is C or S
  MOD_RES (14)..(15)..(16)..(17)..(18): Xaa is A or G
  MOD_RES (19)..(20)..(21)..(22): Xaa is A or G or is absent

SEQ ID NO: 76562 - protein, 39 aa, Artificial Sequence; identical to SEQ ID NO: 4371
  GFR-binding peptide
  MOD_RES (34)..(35): Xaa is C or S
  MOD_RES (12)..(13)..(14)..(15)..(16): Xaa is A or G
  MOD_RES (17)..(18)..(19)..(20): Xaa is A or G or is absent

SEQ ID NO: 76563 - protein, 35 aa, Artificial Sequence; identical to SEQ ID NO: 11800
  GFR-binding peptide
  MOD_RES (2)..(4): Xaa is C or S

SEQ ID NO: 76564 - protein, 35 aa, Artificial Sequence; identical to SEQ ID NO: 4372
  GFR-binding peptide
  MOD_RES (35)..(35): Xaa is C or S
  MOD_RES (13)..(14)..(15)..(16)..(17): Xaa is A or G
  MOD_RES (18)..(19)..(20)..(21): Xaa is A or G or is absent

SEQ ID NO: 76565 - protein, 36 aa, Artificial Sequence; identical to SEQ ID NO: 4373
  GFR-binding peptide
  MOD_RES (2)..(34): Xaa is C or S

SEQ ID NO: 76566 - protein, 39 aa, Artificial Sequence; identical to SEQ ID NO: 4375
  GFR-binding peptide
  MOD_RES (1)..(33)..(34): Xaa is C or S

SEQ ID NO: 76567 - protein, 31 aa, Artificial Sequence; identical to SEQ ID NO: 2448
  GFR-binding peptide
  MOD_RES (31)..(31): Xaa is C or S

SEQ ID NO: 76568 - protein, 34 aa, Artificial Sequence; identical to SEQ ID NO: 9950
  GFR-binding peptide
  MOD_RES (32)..(33): Xaa is C or S

SEQ ID NO: 76569 - protein, 34 aa, Artificial Sequence
  GFR-binding peptide
  MOD_RES (1)..(33)..(34): Xaa is C or S
XSEVTMNQYNKLVVNKNEDLYLISIASMKEPVXX

SEQ ID NO: 76570 - protein, 40 aa, Artificial Sequence; identical to SEQ ID NO: 4376
  GFR-binding peptide
  MOD_RES (2)..(34)..(35): Xaa is C or S

SEQ ID NO: 76571 - protein, 38 aa, Artificial Sequence; identical to SEQ ID NO: 11805
  GFR-binding peptide
  MOD_RES (34)..(35): Xaa is C or S
  MOD_RES (12)..(13)..(14)..(15)..(16): Xaa is A or G
  MOD_RES (17)..(18)..(19)..(20): Xaa is A or G or is absent

SEQ ID NO: 76572 - protein, 35 aa, Artificial Sequence; identical to SEQ ID NO: 4381
  GFR-binding peptide
  MOD_RES (1)..(3): Xaa is C or S
  MOD_RES (14)..(15)..(16)..(17)..(18): Xaa is A or G
  MOD_RES (19)..(20)..(21)..(22): Xaa is A or G or is absent

SEQ ID NO: 76573 - protein, 44 aa, Artificial Sequence; identical to SEQ ID NO: 56331
  GFR-binding peptide
  MOD_RES (2)..(4)..(38)..(39): Xaa is C or S
  MOD_RES (16)..(17)..(18)..(19)..(20): Xaa is A or G
  MOD_RES (21)..(22)..(23)..(24): Xaa is A or G or is absent

SEQ ID NO: 76574 - protein, 40 aa, Artificial Sequence
  GFR-binding peptide
  MOD_RES (2)..(34)..(35): Xaa is C or S
GXRDVVMGQYNKLIIQQKDNLYLMSIASMKTPTXXPGASG

SEQ ID NO: 76575 - protein, 41 aa, Artificial Sequence
  GFR-binding peptide
  MOD_RES (2)..(4)..(38)..(39): Xaa is C or S
  MOD_RES (16)..(17)..(18)..(19)..(20): Xaa is A or G
  MOD_RES (21)..(22)..(23)..(24): Xaa is A or G or is absent
RXGXESVAMGQYNKLXXXXXXXXXLYLISIASLKTPVXXAK

SEQ ID NO: 76576 - protein, 40 aa, Artificial Sequence; identical to SEQ ID NO: 4384
  GFR-binding peptide
  MOD_RES (2)..(4)..(38)..(39): Xaa is C or S
  MOD_RES (16)..(17)..(18)..(19)..(20): Xaa is A or G
  MOD_RES (21)..(22)..(23)..(24): Xaa is A or G or is absent

SEQ ID NO: 76577 - protein, 35 aa, Artificial Sequence
  GFR-binding peptide
  MOD_RES (1)..(3)..(35): Xaa is C or S
XAXSEVTMNQYNKLVVNKNEDLYLISIASMKEPVX

SEQ ID NO: 76578 - protein, 38 aa, Artificial Sequence; identical to SEQ ID NO: 2453
  GFR-binding peptide
  MOD_RES (33)..(34): Xaa is C or S
  MOD_RES (11)..(12)..(13)..(14)..(15): Xaa is A or G
  MOD_RES (16)..(17)..(18)..(19): Xaa is A or G or is absent

SEQ ID NO: 76579 - protein, 40 aa, Artificial Sequence
  GFR-binding peptide
  MOD_RES (34)..(35): Xaa is C or S
  MOD_RES (12)..(13)..(14)..(15)..(16): Xaa is A or G
  MOD_RES (17)..(18)..(19)..(20): Xaa is A or G or is absent
SRVVMNQYNKLXXXXXXXXXLYLVSIASLKTPAXXPKPVH

SEQ ID NO: 76580 - protein, 38 aa, Artificial Sequence; identical to SEQ ID NO: 60099
  GFR-binding peptide
  MOD_RES (1)..(33)..(34): Xaa is C or S

SEQ ID NO: 76581 - protein, 40 aa, Artificial Sequence; identical to SEQ ID NO: 2454
  GFR-binding peptide
  MOD_RES (2)..(4)..(36)..(37): Xaa is C or S

SEQ ID NO: 76582 - protein, 34 aa, Artificial Sequence
  GFR-binding peptide
  MOD_RES (32)..(33): Xaa is C or S
ESVAMGQYNKLYTVVGKDLYLISIASLKTPVXXA

SEQ ID NO: 76583 - protein, 30 aa, Artificial Sequence; identical to SEQ ID NO: 25446
  GFR-binding peptide

SEQ ID NO: 76584 - protein, 36 aa, Artificial Sequence; identical to SEQ ID NO: 4386
  GFR-binding peptide
  MOD_RES (2)..(4): Xaa is C or S
  MOD_RES (15)..(16)..(17)..(18)..(19): Xaa is A or G
  MOD_RES (20)..(21)..(22)..(23): Xaa is A or G or is absent

SEQ ID NO: 76585 - protein, 42 aa, Artificial Sequence; identical to SEQ ID NO: 4387
  GFR-binding peptide
  MOD_RES (2)..(4)..(38): Xaa is C or S
  MOD_RES (16)..(17)..(18)..(19)..(20): Xaa is A or G
  MOD_RES (21)..(22)..(23)..(24): Xaa is A or G or is absent

SEQ ID NO: 76586 - protein, 32 aa, Artificial Sequence; identical to SEQ ID NO: 2456
  GFR-binding peptide
  MOD_RES (31)..(32): Xaa is C or S

SEQ ID NO: 76587 - protein, 42 aa, Artificial Sequence; identical to SEQ ID NO: 4388
  GFR-binding peptide
  MOD_RES (2)..(4)..(38)..(39): Xaa is C or S
  MOD_RES (16)..(17)..(18)..(19)..(20): Xaa is A or G
  MOD_RES (21)..(22)..(23)..(24): Xaa is A or G or is absent

SEQ ID NO: 76588 - protein, 33 aa, Artificial Sequence; identical to SEQ ID NO: 4389
  GFR-binding peptide
  MOD_RES (32)..(33): Xaa is C or S

SEQ ID NO: 76589 - protein, 36 aa, Artificial Sequence; identical to SEQ ID NO: 11819
  GFR-binding peptide
  MOD_RES (34)..(35): Xaa is C or S
  MOD_RES (12)..(13)..(14)..(15)..(16): Xaa is A or G
  MOD_RES (17)..(18)..(19)..(20): Xaa is A or G or is absent

SEQ ID NO: 76590 - protein, 33 aa, Artificial Sequence; identical to SEQ ID NO: 2458
  GFR-binding peptide
  MOD_RES (33)..(33): Xaa is C or S
  MOD_RES (11)..(12)..(13)..(14)..(15): Xaa is A or G
  MOD_RES (16)..(17)..(18)..(19): Xaa is A or G or is absent

SEQ ID NO: 76591 - protein, 33 aa, Artificial Sequence; identical to SEQ ID NO: 4390
  GFR-binding peptide
  MOD_RES (1)..(3): Xaa is C or S

SEQ ID NO: 76592 - protein, 41 aa, Artificial Sequence; identical to SEQ ID NO: 23439
  GFR-binding peptide
  MOD_RES (1)..(3)..(37)..(38): Xaa is C or S
  MOD_RES (15)..(16)..(17)..(18)..(19): Xaa is A or G
  MOD_RES (20)..(21)..(22)..(23): Xaa is A or G or is absent

SEQ ID NO: 76593 - protein, 37 aa, Artificial Sequence; identical to SEQ ID NO: 11821
  GFR-binding peptide
  MOD_RES (33)..(34): Xaa is C or S
  MOD_RES (11)..(12)..(13)..(14)..(15): Xaa is A or G
  MOD_RES (16)..(17)..(18)..(19): Xaa is A or G or is absent

SEQ ID NO: 76594 - protein, 38 aa, Artificial Sequence; identical to SEQ ID NO: 2462
  GFR-binding peptide
  MOD_RES (1)..(32)..(33): Xaa is C or S

SEQ ID NO: 76595 - protein, 38 aa, Artificial Sequence; identical to SEQ ID NO: 4394
  GFR-binding peptide
  MOD_RES (33)..(34): Xaa is C or S
  MOD_RES (11)..(12)..(13)..(14)..(15): Xaa is A or G
  MOD_RES (16)..(17)..(18)..(19): Xaa is A or G or is absent

SEQ ID NO: 76596 - protein, 43 aa, Artificial Sequence; identical to SEQ ID NO: 61867
  GFR-binding peptide
  MOD_RES (1)..(3)..(37)..(38): Xaa is C or S
  MOD_RES (15)..(16)..(17)..(18)..(19): Xaa is A or G
  MOD_RES (20)..(21)..(22)..(23): Xaa is A or G or is absent

SEQ ID NO: 76597 - protein, 39 aa, Artificial Sequence; identical to SEQ ID NO: 4397
  GFR-binding peptide
  MOD_RES (33)..(34): Xaa is C or S
  MOD_RES (11)..(12)..(13)..(14)..(15): Xaa is A or G
  MOD_RES (16)..(17)..(18)..(19): Xaa is A or G or is absent

SEQ ID NO: 76598 - protein, 33 aa, Artificial Sequence; identical to SEQ ID NO: 2464
  GFR-binding peptide
  MOD_RES (33)..(33): Xaa is C or S
  MOD_RES (11)..(12)..(13)..(14)..(15): Xaa is A or G
  MOD_RES (16)..(17)..(18)..(19): Xaa is A or G or is absent

SEQ ID NO: 76599 - protein, 42 aa, Artificial Sequence; identical to SEQ ID NO: 23444
  GFR-binding peptide
  MOD_RES (1)..(3)..(37)..(38): Xaa is C or S
  MOD_RES (15)..(16)..(17)..(18)..(19): Xaa is A or G
  MOD_RES (20)..(21)..(22)..(23): Xaa is A or G or is absent

SEQ ID NO: 76600 - protein, 37 aa, Artificial Sequence; identical to SEQ ID NO: 23446
  GFR-binding peptide
  MOD_RES (1)..(3)..(37): Xaa is C or S
  MOD_RES (15)..(16)..(17)..(18)..(19): Xaa is A or G
  MOD_RES (20)..(21)..(22)..(23): Xaa is A or G or is absent

SEQ ID NO: 76601 - protein, 35 aa, Artificial Sequence; identical to SEQ ID NO: 2465
  GFR-binding peptide
  MOD_RES (35)..(35): Xaa is C or S
  MOD_RES (13)..(14)..(15)..(16)..(17): Xaa is A or G
  MOD_RES (18)..(19)..(20)..(21): Xaa is A or G or is absent

SEQ ID NO: 76602 - protein, 34 aa, Artificial Sequence; identical to SEQ ID NO: 4402
  GFR-binding peptide
  MOD_RES (1)..(3): Xaa is C or S

SEQ ID NO: 76603 - protein, 32 aa, Artificial Sequence; identical to SEQ ID NO: 2466
  GFR-binding peptide
  MOD_RES (1)..(32): Xaa is C or S

SEQ ID NO: 76604 - protein, 40 aa, Artificial Sequence; identical to SEQ ID NO: 23447
  GFR-binding peptide
  MOD_RES (1)..(3)..(37)..(38): Xaa is C or S
  MOD_RES (15)..(16)..(17)..(18)..(19): Xaa is A or G
  MOD_RES (20)..(21)..(22)..(23): Xaa is A or G or is absent

SEQ ID NO: 76605 - protein, 40 aa, Artificial Sequence
  GFR-binding peptide
  MOD_RES (2)..(4)..(38)..(39): Xaa is C or S
  MOD_RES (16)..(17)..(18)..(19)..(20): Xaa is A or G
  MOD_RES (21)..(22)..(23)..(24): Xaa is A or G or is absent
SXGXRDVVMGQYNKLXXXXXXXXXLYLMSIASMKTPTXXP

SEQ ID NO: 76606 - protein, 32 aa, Artificial Sequence; identical to SEQ ID NO: 2470
  GFR-binding peptide
  MOD_RES (11)..(12)..(13)..(14)..(15): Xaa is A or G
  MOD_RES (16)..(17)..(18)..(19): Xaa is A or G or is absent

SEQ ID NO: 76607 - protein, 35 aa, Artificial Sequence; identical to SEQ ID NO: 2471
  GFR-binding peptide
  MOD_RES (34)..(35): Xaa is C or S
  MOD_RES (12)..(13)..(14)..(15)..(16): Xaa is A or G
  MOD_RES (17)..(18)..(19)..(20): Xaa is A or G or is absent

SEQ ID NO: 76608 - protein, 43 aa, Artificial Sequence; identical to SEQ ID NO: 2473
  GFR-binding peptide
  MOD_RES (2)..(4)..(39)..(40): Xaa is C or S
  MOD_RES (17)..(18)..(19)..(20)..(21): Xaa is A or G
  MOD_RES (22)..(23)..(24)..(25): Xaa is A or G or is absent

SEQ ID NO: 76609 - protein, 31 aa, Artificial Sequence; identical to SEQ ID NO: 2474
  GFR-binding peptide
  MOD_RES (1)..(1): Xaa is C or S

SEQ ID NO: 76610 - protein, 39 aa, Artificial Sequence; identical to SEQ ID NO: 2476
  GFR-binding peptide
  MOD_RES (2)..(36)..(37): Xaa is C or S
  MOD_RES (14)..(15)..(16)..(17)..(18): Xaa is A or G
  MOD_RES (19)..(20)..(21)..(22): Xaa is A or G or is absent

SEQ ID NO: 76611 - protein, 38 aa, Artificial Sequence; identical to SEQ ID NO: 2477
  GFR-binding peptide
  MOD_RES (2)..(4): Xaa is C or S
  MOD_RES (17)..(18)..(19)..(20)..(21): Xaa is A or G
  MOD_RES (22)..(23)..(24)..(25): Xaa is A or G or is absent

SEQ ID NO: 76612 - protein, 40 aa, Artificial Sequence; identical to SEQ ID NO: 4406
  GFR-binding peptide
  MOD_RES (2)..(4)..(36)..(37): Xaa is C or S

SEQ ID NO: 76613 - protein, 40 aa, Artificial Sequence; identical to SEQ ID NO: 2479
  GFR-binding peptide
  MOD_RES (2)..(34)..(35): Xaa is C or S

SEQ ID NO: 76614 - protein, 43 aa, Artificial Sequence; identical to SEQ ID NO: 4407
  GFR-binding peptide
  MOD_RES (2)..(37)..(38): Xaa is C or S
  MOD_RES (15)..(16)..(17)..(18)..(19): Xaa is A or G
  MOD_RES (20)..(21)..(22)..(23): Xaa is A or G or is absent

SEQ ID NO: 76615 - protein, 34 aa, Artificial Sequence; identical to SEQ ID NO: 4409
  GFR-binding peptide
  MOD_RES (2)..(34): Xaa is C or S

SEQ ID NO: 76616 - protein, 38 aa, Artificial Sequence; identical to SEQ ID NO: 4410
  GFR-binding peptide
  MOD_RES (33)..(34): Xaa is C or S
  MOD_RES (11)..(12)..(13)..(14)..(15): Xaa is A or G
  MOD_RES (16)..(17)..(18)..(19): Xaa is A or G or is absent

SEQ ID NO: 76617 - protein, 35 aa, Artificial Sequence; identical to SEQ ID NO: 2482
  GFR-binding peptide
  MOD_RES (1)..(1): Xaa is C or S
  MOD_RES (14)..(15)..(16)..(17)..(18): Xaa is A or G
  MOD_RES (19)..(20)..(21)..(22): Xaa is A or G or is absent

SEQ ID NO: 76618 - protein, 36 aa, Artificial Sequence
  GFR-binding peptide
  MOD_RES (32)..(33): Xaa is C or S
AEVVMDQYNKLVVNNAADLYLISIASLRAPVXXSAP

SEQ ID NO: 76619 - protein, 35 aa, Artificial Sequence; identical to SEQ ID NO: 4412
  GFR-binding peptide
  MOD_RES (2)..(33)..(34): Xaa is C or S

SEQ ID NO: 76620 - protein, 41 aa, Artificial Sequence; identical to SEQ ID NO: 25475
  GFR-binding peptide
  MOD_RES (2)..(4)..(36)..(37): Xaa is C or S

SEQ ID NO: 76621 - protein, 35 aa, Artificial Sequence; identical to SEQ ID NO: 4414
  GFR-binding peptide
  MOD_RES (1)..(3)..(34)..(35): Xaa is C or S

SEQ ID NO: 76622 - protein, 40 aa, Artificial Sequence; identical to SEQ ID NO: 2484
  GFR-binding peptide
  MOD_RES (2)..(4)..(37)..(38): Xaa is C or S
  MOD_RES (15)..(16)..(17)..(18)..(19): Xaa is A or G
  MOD_RES (20)..(21)..(22)..(23): Xaa is A or G or is absent

SEQ ID NO: 76623 - protein, 38 aa, Artificial Sequence; identical to SEQ ID NO: 2485
  GFR-binding peptide
  MOD_RES (32)..(33): Xaa is C or S

SEQ ID NO: 76624 - protein, 35 aa, Artificial Sequence; identical to SEQ ID NO: 4415
  GFR-binding peptide
  MOD_RES (31)..(32): Xaa is C or S

SEQ ID NO: 76625 - protein, 39 aa, Artificial Sequence; identical to SEQ ID NO: 2487
  GFR-binding peptide
  MOD_RES (2)..(4)..(35)..(36): Xaa is C or S

SEQ ID NO: 76626 - protein, 34 aa, Artificial Sequence; identical to SEQ ID NO: 56377
  GFR-binding peptide
  MOD_RES (31)..(32): Xaa is C or S

SEQ ID NO: 76627 - protein, 39 aa, Artificial Sequence; identical to SEQ ID NO: 2489
  GFR-binding peptide
  MOD_RES (34)..(35): Xaa is C or S
  MOD_RES (12)..(13)..(14)..(15)..(16): Xaa is A or G
  MOD_RES (17)..(18)..(19)..(20): Xaa is A or G or is absent

SEQ ID NO: 76628 - protein, 35 aa, Artificial Sequence; identical to SEQ ID NO: 2490
  GFR-binding peptide
  MOD_RES (1)..(3): Xaa is C or S
  MOD_RES (14)..(15)..(16)..(17)..(18): Xaa is A or G
  MOD_RES (19)..(20)..(21)..(22): Xaa is A or G or is absent

SEQ ID NO: 76629 - protein, 35 aa, Artificial Sequence; identical to SEQ ID NO: 56379
  GFR-binding peptide
  MOD_RES (2)..(35): Xaa is C or S
  MOD_RES (13)..(14)..(15)..(16)..(17): Xaa is A or G
  MOD_RES (18)..(19)..(20)..(21): Xaa is A or G or is absent

SEQ ID NO: 76630 - protein, 33 aa, Artificial Sequence; identical to SEQ ID NO: 4417
  GFR-binding peptide
  MOD_RES (31)..(32): Xaa is C or S

SEQ ID NO: 76631 - protein, 36 aa, Artificial Sequence; identical to SEQ ID NO: 4418
  GFR-binding peptide
  MOD_RES (2)..(35)..(36): Xaa is C or S
  MOD_RES (13)..(14)..(15)..(16)..(17): Xaa is A or G
  MOD_RES (18)..(19)..(20)..(21): Xaa is A or G or is absent

SEQ ID NO: 76632 - protein, 33 aa, Artificial Sequence; identical to SEQ ID NO: 4419
  GFR-binding peptide
  MOD_RES (31)..(32): Xaa is C or S

SEQ ID NO: 76633 - protein, 40 aa, Artificial Sequence; identical to SEQ ID NO: 4420
  GFR-binding peptide
  MOD_RES (35)..(36): Xaa is C or S
  MOD_RES (13)..(14)..(15)..(16)..(17): Xaa is A or G
  MOD_RES (18)..(19)..(20)..(21): Xaa is A or G or is absent

SEQ ID NO: 76634 - protein, 32 aa, Artificial Sequence
  GFR-binding peptide
  MOD_RES (11)..(12)..(13)..(14)..(15): Xaa is A or G
  MOD_RES (16)..(17)..(18)..(19): Xaa is A or G or is absent
SVAMGQYNKLXXXXXXXXXLYLISIASLKTPV

SEQ ID NO: 76635 - protein, 40 aa, Artificial Sequence; identical to SEQ ID NO: 4422
  GFR-binding peptide
  MOD_RES (2)..(36): Xaa is C or S
  MOD_RES (14)..(15)..(16)..(17)..(18): Xaa is A or G
  MOD_RES (19)..(20)..(21)..(22): Xaa is A or G or is absent

SEQ ID NO: 76636 - protein, 40 aa, Artificial Sequence; identical to SEQ ID NO: 11845
  GFR-binding peptide
  MOD_RES (2)..(4)..(36)..(37): Xaa is C or S

SEQ ID NO: 76637 - protein, 40 aa, Artificial Sequence; identical to SEQ ID NO: 2493
  GFR-binding peptide
  MOD_RES (2)..(34): Xaa is C or S

SEQ ID NO: 76638 - protein, 36 aa, Artificial Sequence; identical to SEQ ID NO: 4425
  GFR-binding peptide
  MOD_RES (2)..(4): Xaa is C or S

SEQ ID NO: 76639 - protein, 33 aa, Artificial Sequence; identical to SEQ ID NO: 4426
  GFR-binding peptide
  MOD_RES (31)..(32): Xaa is C or S

SEQ ID NO: 76640 - protein, 39 aa, Artificial Sequence; identical to SEQ ID NO: 9998
  GFR-binding peptide
  MOD_RES (33)..(34): Xaa is C or S
  MOD_RES (11)..(12)..(13)..(14)..(15): Xaa is A or G
  MOD_RES (16)..(17)..(18)..(19): Xaa is A or G or is absent

SEQ ID NO: 76641 - protein, 41 aa, Artificial Sequence; identical to SEQ ID NO: 4427
  GFR-binding peptide
  MOD_RES (2)..(36)..(37): Xaa is C or S
  MOD_RES (14)..(15)..(16)..(17)..(18): Xaa is A or G
  MOD_RES (19)..(20)..(21)..(22): Xaa is A or G or is absent

SEQ ID NO: 76642 - protein, 38 aa, Artificial Sequence; identical to SEQ ID NO: 4428
  GFR-binding peptide
  MOD_RES (2)..(33)..(34): Xaa is C or S

SEQ ID NO: 76643 - protein, 39 aa, Artificial Sequence
  GFR-binding peptide
  MOD_RES (2)..(36)..(37): Xaa is C or S
  MOD_RES (14)..(15)..(16)..(17)..(18): Xaa is A or G
  MOD_RES (19)..(20)..(21)..(22): Xaa is A or G or is absent
GXESVAMGQYNKLXXXXXXXXXLYLISIASLKTPVXXAK

SEQ ID NO: 76644 - protein, 36 aa, Artificial Sequence; identical to SEQ ID NO: 4429
  GFR-binding peptide
  MOD_RES (1)..(34)..(35): Xaa is C or S
  MOD_RES (12)..(13)..(14)..(15)..(16): Xaa is A or G
  MOD_RES (17)..(18)..(19)..(20): Xaa is A or G or is absent

SEQ ID NO: 76645 - protein, 34 aa, Artificial Sequence; identical to SEQ ID NO: 2498
  GFR-binding peptide
  MOD_RES (1)..(3): Xaa is C or S

SEQ ID NO: 76646 - protein, 41 aa, Artificial Sequence; identical to SEQ ID NO: 10000
  GFR-binding peptide
  MOD_RES (2)..(4)..(36)..(37): Xaa is C or S

SEQ ID NO: 76647 - protein, 38 aa, Artificial Sequence; identical to SEQ ID NO: 2500
  GFR-binding peptide
  MOD_RES (2)..(4)..(35)..(36): Xaa is C or S

SEQ ID NO: 76648 - protein, 38 aa, Artificial Sequence
  GFR-binding peptide
  MOD_RES (1)..(32)..(33): Xaa is C or S
XEEVIMQYNKLLLVRGNDLYLMSIASTKVPAXXTSPVR

SEQ ID NO: 76649 - protein, 36 aa, Artificial Sequence
  GFR-binding peptide
  MOD_RES (1)..(3)..(35)..(36): Xaa is C or S
XGXAEVVMDQYNKLVVNNAADLYLISIASLRAPVXX

SEQ ID NO: 76650 - protein, 36 aa, Artificial Sequence; identical to SEQ ID NO: 4430
  GFR-binding peptide
  MOD_RES (33)..(34): Xaa is C or S
  MOD_RES (11)..(12)..(13)..(14)..(15): Xaa is A or G
  MOD_RES (16)..(17)..(18)..(19): Xaa is A or G or is absent

SEQ ID NO: 76651 - protein, 37 aa, Artificial Sequence; identical to SEQ ID NO: 23481
  GFR-binding peptide
  MOD_RES (2)..(36)..(37): Xaa is C or S
  MOD_RES (14)..(15)..(16)..(17)..(18): Xaa is A or G
  MOD_RES (19)..(20)..(21)..(22): Xaa is A or G or is absent

SEQ ID NO: 76652 - protein, 39 aa, Artificial Sequence; identical to SEQ ID NO: 56393
  GFR-binding peptide
  MOD_RES (1)..(35)..(36): Xaa is C or S
  MOD_RES (13)..(14)..(15)..(16)..(17): Xaa is A or G
  MOD_RES (18)..(19)..(20)..(21): Xaa is A or G or is absent

SEQ ID NO: 76653 - protein, 34 aa, Artificial Sequence; identical to SEQ ID NO: 4432
  GFR-binding peptide
  MOD_RES (2)..(2): Xaa is C or S
  MOD_RES (13)..(14)..(15)..(16)..(17): Xaa is A or G
  MOD_RES (18)..(19)..(20)..(21): Xaa is A or G or is absent

SEQ ID NO: 76654 - protein, 33 aa, Artificial Sequence; identical to SEQ ID NO: 10006
  GFR-binding peptide
  MOD_RES (31)..(32): Xaa is C or S

SEQ ID NO: 76655 - protein, 33 aa, Artificial Sequence; identical to SEQ ID NO: 4435
  GFR-binding peptide
  MOD_RES (1)..(32)..(33): Xaa is C or S

SEQ ID NO: 76656 - protein, 36 aa, Artificial Sequence; identical to SEQ ID NO: 2510
  GFR-binding peptide
  MOD_RES (2)..(36): Xaa is C or S
  MOD_RES (14)..(15)..(16)..(17)..(18): Xaa is A or G
  MOD_RES (19)..(20)..(21)..(22): Xaa is A or G or is absent

SEQ ID NO: 76657 - protein, 41 aa, Artificial Sequence
  GFR-binding peptide
  MOD_RES (1)..(3)..(35)..(36): Xaa is C or S
XGXAEVVMDQYNKLVVNNAADLYLISIASLRAPVXXSAPAA

SEQ ID NO: 76658 - protein, 38 aa, Artificial Sequence; identical to SEQ ID NO: 4437
  GFR-binding peptide
  MOD_RES (1)..(3)..(36)..(37): Xaa is C or S

SEQ ID NO: 76659 - protein, 41 aa, Artificial Sequence; identical to SEQ ID NO: 4438
  GFR-binding peptide
  MOD_RES (2)..(36)..(37): Xaa is C or S
  MOD_RES (14)..(15)..(16)..(17)..(18): Xaa is A or G
  MOD_RES (19)..(20)..(21)..(22): Xaa is A or G or is absent

SEQ ID NO: 76660 - protein, 38 aa, Artificial Sequence; identical to SEQ ID NO: 2511
  GFR-binding peptide
  MOD_RES (2)..(35)..(36): Xaa is C or S

SEQ ID NO: 76661 - protein, 34 aa, Artificial Sequence; identical to SEQ ID NO: 56399
  GFR-binding peptide
  MOD_RES (32)..(33): Xaa is C or S

SEQ ID NO: 76662 - protein, 42 aa, Artificial Sequence; identical to SEQ ID NO: 25516
  GFR-binding peptide
  MOD_RES (2)..(36)..(37): Xaa is C or S
  MOD_RES (14)..(15)..(16)..(17)..(18): Xaa is A or G
  MOD_RES (19)..(20)..(21)..(22): Xaa is A or G or is absent

SEQ ID NO: 76663 - protein, 38 aa, Artificial Sequence
  GFR-binding peptide
  MOD_RES (2)..(4)..(37)..(38): Xaa is C or S
  MOD_RES (15)..(16)..(17)..(18)..(19): Xaa is A or G
  MOD_RES (20)..(21)..(22)..(23): Xaa is A or G or is absent
LXGXEEVIMQYNKLXXXXXXXXXLYLMSIASTKVPAXX

SEQ ID NO: 76664 - protein, 35 aa, Artificial Sequence
  GFR-binding peptide
  MOD_RES (1)..(35): Xaa is C or S
  MOD_RES (13)..(14)..(15)..(16)..(17): Xaa is A or G
  MOD_RES (18)..(19)..(20)..(21): Xaa is A or G or is absent
XSEVTMNQYNKLXXXXXXXXXLYLISIASMKEPVX

SEQ ID NO: 76665 - protein, 41 aa, Artificial Sequence; identical to SEQ ID NO: 25518
  GFR-binding peptide
  MOD_RES (2)..(4)..(38)..(39): Xaa is C or S
  MOD_RES (16)..(17)..(18)..(19)..(20): Xaa is A or G
  MOD_RES (21)..(22)..(23)..(24): Xaa is A or G or is absent

SEQ ID NO: 76666 - protein, 39 aa, Artificial Sequence; identical to SEQ ID NO: 2514
  GFR-binding peptide
  MOD_RES (35)..(36): Xaa is C or S
  MOD_RES (13)..(14)..(15)..(16)..(17): Xaa is A or G
  MOD_RES (18)..(19)..(20)..(21): Xaa is A or G or is absent

SEQ ID NO: 76667 - protein, 42 aa, Artificial Sequence; identical to SEQ ID NO: 10009
  GFR-binding peptide
  MOD_RES (1)..(3)..(37)..(38): Xaa is C or S
  MOD_RES (15)..(16)..(17)..(18)..(19): Xaa is A or G
  MOD_RES (20)..(21)..(22)..(23): Xaa is A or G or is absent

SEQ ID NO: 76668 - protein, 44 aa, Artificial Sequence; identical to SEQ ID NO: 25519
  GFR-binding peptide
  MOD_RES (2)..(4)..(38)..(39): Xaa is C or S
  MOD_RES (16)..(17)..(18)..(19)..(20): Xaa is A or G
  MOD_RES (21)..(22)..(23)..(24): Xaa is A or G or is absent

SEQ ID NO: 76669 - protein, 33 aa, Artificial Sequence; identical to SEQ ID NO: 2515
  GFR-binding peptide
  MOD_RES (32)..(32): Xaa is C or S

SEQ ID NO: 76670 - protein, 32 aa, Artificial Sequence; identical to SEQ ID NO: 4443
  GFR-binding peptide
  MOD_RES (2)..(2): Xaa is C or S

SEQ ID NO: 76671 - protein, 34 aa, Artificial Sequence; identical to SEQ ID NO: 4444
  GFR-binding peptide
  MOD_RES (33)..(34): Xaa is C or S

SEQ ID NO: 76672 - protein, 34 aa, Artificial Sequence
  GFR-binding peptide
  MOD_RES (1)..(3): Xaa is C or S
XGXRDVVMGQYNKLIIQQKDNLYLMSIASMKTPT

SEQ ID NO: 76673 - protein, 38 aa, Artificial Sequence; identical to SEQ ID NO: 56408
  GFR-binding peptide
  MOD_RES (34)..(35): Xaa is C or S
  MOD_RES (12)..(13)..(14)..(15)..(16): Xaa is A or G
  MOD_RES (17)..(18)..(19)..(20): Xaa is A or G or is absent

SEQ ID NO: 76674 - protein, 37 aa, Artificial Sequence; identical to SEQ ID NO: 2518
  GFR-binding peptide
  MOD_RES (33)..(34): Xaa is C or S
  MOD_RES (11)..(12)..(13)..(14)..(15): Xaa is A or G
  MOD_RES (16)..(17)..(18)..(19): Xaa is A or G or is absent

SEQ ID NO: 76675 - protein, 38 aa, Artificial Sequence; identical to SEQ ID NO: 4448
  GFR-binding peptide
  MOD_RES (2)..(34)..(35): Xaa is C or S

SEQ ID NO: 76676 - protein, 38 aa, Artificial Sequence; identical to SEQ ID NO: 56411
  GFR-binding peptide
  MOD_RES (1)..(3)..(35)..(36): Xaa is C or S

SEQ ID NO: 76677 - protein, 39 aa, Artificial Sequence; identical to SEQ ID NO: 4450
  GFR-binding peptide
  MOD_RES (2)..(4)..(35)..(36): Xaa is C or S

SEQ ID NO: 76678 - protein, 35 aa, Artificial Sequence; identical to SEQ ID NO: 4451
  GFR-binding peptide
  MOD_RES (33)..(34): Xaa is C or S
  MOD_RES (11)..(12)..(13)..(14)..(15): Xaa is A or G
  MOD_RES (16)..(17)..(18)..(19): Xaa is A or G or is absent

SEQ ID NO: 76679 - protein, 36 aa, Artificial Sequence; identical to SEQ ID NO: 60159
  GFR-binding peptide
  MOD_RES (1)..(35)..(36): Xaa is C or S
  MOD_RES (13)..(14)..(15)..(16)..(17): Xaa is A or G
  MOD_RES (18)..(19)..(20)..(21): Xaa is A or G or is absent

SEQ ID NO: 76680 - protein, 34 aa, Artificial Sequence; identical to SEQ ID NO: 2522
  GFR-binding peptide
  MOD_RES (34)..(34): Xaa is C or S
  MOD_RES (12)..(13)..(14)..(15)..(16): Xaa is A or G
  MOD_RES (17)..(18)..(19)..(20): Xaa is A or G or is absent

SEQ ID NO: 76681 - protein, 38 aa, Artificial Sequence
  GFR-binding peptide
  MOD_RES (2)..(34)..(35): Xaa is C or S
AXSEVTMNQYNKLVVNKNEDLYLISIASMKEPVXXPEP

SEQ ID NO: 76682 - protein, 34 aa, Artificial Sequence; identical to SEQ ID NO: 10019
  GFR-binding peptide
  MOD_RES (1)..(3): Xaa is C or S

SEQ ID NO: 76683 - protein, 34 aa, Artificial Sequence
  GFR-binding peptide
  MOD_RES (2)..(34): Xaa is C or S
AXSEVTMNQYNKLVVNKNEDLYLISIASMKEPVX

SEQ ID NO: 76684 - protein, 39 aa, Artificial Sequence; identical to SEQ ID NO: 2525
  GFR-binding peptide
  MOD_RES (1)..(3)..(34)..(35): Xaa is C or S

SEQ ID NO: 76685 - protein, 32 aa, Artificial Sequence; identical to SEQ ID NO: 4453
  GFR-binding peptide
  MOD_RES (11)..(12)..(13)..(14)..(15): Xaa is A or G
  MOD_RES (16)..(17)..(18)..(19): Xaa is A or G or is absent

SEQ ID NO: 76686 - protein, 42 aa, Artificial Sequence
  GFR-binding peptide
  MOD_RES (1)..(3)..(37)..(38): Xaa is C or S
  MOD_RES (15)..(16)..(17)..(18)..(19): Xaa is A or G
  MOD_RES (20)..(21)..(22)..(23): Xaa is A or G or is absent
XAXSEVTMNQYNKLXXXXXXXXXLYLISIASMKEPVXXPEPI

SEQ ID NO: 76687 - protein, 37 aa, Artificial Sequence; identical to SEQ ID NO: 11880
  GFR-binding peptide
  MOD_RES (2)..(4)..(36)..(37): Xaa is C or S

SEQ ID NO: 76688 - protein, 37 aa, Artificial Sequence; identical to SEQ ID NO: 2526
  GFR-binding peptide
  MOD_RES (2)..(36): Xaa is C or S
  MOD_RES (14)..(15)..(16)..(17)..(18): Xaa is A or G
  MOD_RES (19)..(20)..(21)..(22): Xaa is A or G or is absent

SEQ ID NO: 76689 - protein, 43 aa, Artificial Sequence; identical to SEQ ID NO: 4454
  GFR-binding peptide
  MOD_RES (2)..(4)..(37)..(38): Xaa is C or S
  MOD_RES (15)..(16)..(17)..(18)..(19): Xaa is A or G
  MOD_RES (20)..(21)..(22)..(23): Xaa is A or G or is absent

SEQ ID NO: 76690 - protein, 38 aa, Artificial Sequence; identical to SEQ ID NO: 4456
  GFR-binding peptide
  MOD_RES (1)..(34)..(35): Xaa is C or S

SEQ ID NO: 76691 - protein, 37 aa, Artificial Sequence
  GFR-binding peptide
  MOD_RES (2)..(33)..(34): Xaa is C or S
GXEEVIMQYNKLLLVRGNDLYLMSIASTKVPAXXTSP

SEQ ID NO: 76692 - protein, 39 aa, Artificial Sequence; identical to SEQ ID NO: 4457
  GFR-binding peptide
  MOD_RES (2)..(34)..(35): Xaa is C or S

SEQ ID NO: 76693 - protein, 41 aa, Artificial Sequence; identical to SEQ ID NO: 4458
  GFR-binding peptide
  MOD_RES (2)..(36)..(37): Xaa is C or S
  MOD_RES (14)..(15)..(16)..(17)..(18): Xaa is A or G
  MOD_RES (19)..(20)..(21)..(22): Xaa is A or G or is absent

SEQ ID NO: 76694 - protein, 36 aa, Artificial Sequence; identical to SEQ ID NO: 4459
  GFR-binding peptide
  MOD_RES (2)..(4): Xaa is C or S
  MOD_RES (15)..(16)..(17)..(18)..(19): Xaa is A or G
  MOD_RES (20)..(21)..(22)..(23): Xaa is A or G or is absent

SEQ ID NO: 76695 - protein, 35 aa, Artificial Sequence; identical to SEQ ID NO: 10025
  GFR-binding peptide
  MOD_RES (1)..(33)..(34): Xaa is C or S

SEQ ID NO: 76696 - protein, 34 aa, Artificial Sequence
  GFR-binding peptide
  MOD_RES (1)..(1): Xaa is C or S
  MOD_RES (13)..(14)..(15)..(16)..(17): Xaa is A or G
  MOD_RES (18)..(19)..(20)..(21): Xaa is A or G or is absent
XRDVVMGQYNKLXXXXXXXXXLYLMSIASMKTPT

SEQ ID NO: 76697 - protein, 39 aa, Artificial Sequence; identical to SEQ ID NO: 2531
  GFR-binding peptide
  MOD_RES (2)..(4)..(38): Xaa is C or S
  MOD_RES (16)..(17)..(18)..(19)..(20): Xaa is A or G
  MOD_RES (21)..(22)..(23)..(24): Xaa is A or G or is absent

SEQ ID NO: 76698 - protein, 34 aa, Artificial Sequence; identical to SEQ ID NO: 56431
  GFR-binding peptide
  MOD_RES (1)..(33)..(34): Xaa is C or S

SEQ ID NO: 76699 - protein, 30 aa, Artificial Sequence; identical to SEQ ID NO: 11889
  GFR-binding peptide

SEQ ID NO: 76700 - protein, 37 aa, Artificial Sequence
  GFR-binding peptide
  MOD_RES (1)..(3)..(37): Xaa is C or S
  MOD_RES (15)..(16)..(17)..(18)..(19): Xaa is A or G
  MOD_RES (20)..(21)..(22)..(23): Xaa is A or G or is absent
XAXSEVTMNQYNKLXXXXXXXXXLYLISIASMKEPVX

SEQ ID NO: 76701 - protein, 34 aa, Artificial Sequence; identical to SEQ ID NO: 4461
  GFR-binding peptide
  MOD_RES (1)..(3)..(34): Xaa is C or S

SEQ ID NO: 76702 - protein, 38 aa, Artificial Sequence; identical to SEQ ID NO: 2535
  GFR-binding peptide
  MOD_RES (1)..(34)..(35): Xaa is C or S
  MOD_RES (12)..(13)..(14)..(15)..(16): Xaa is A or G
  MOD_RES (17)..(18)..(19)..(20): Xaa is A or G or is absent

SEQ ID NO: 76703 - protein, 34 aa, Artificial Sequence; identical to SEQ ID NO: 4462
  GFR-binding peptide
  MOD_RES (13)..(14)..(15)..(16)..(17): Xaa is A or G
  MOD_RES (18)..(19)..(20)..(21): Xaa is A or G or is absent

SEQ ID NO: 76704 - protein, 38 aa, Artificial Sequence; identical to SEQ ID NO: 25549
  GFR-binding peptide
  MOD_RES (32)..(33): Xaa is C or S

SEQ ID NO: 76705 - protein, 40 aa, Artificial Sequence; identical to SEQ ID NO: 4463
  GFR-binding peptide
  MOD_RES (2)..(4)..(37)..(38): Xaa is C or S
  MOD_RES (15)..(16)..(17)..(18)..(19): Xaa is A or G
  MOD_RES (20)..(21)..(22)..(23): Xaa is A or G or is absent

SEQ ID NO: 76706 - protein, 33 aa, Artificial Sequence; identical to SEQ ID NO: 2537
  GFR-binding peptide
  MOD_RES (2)..(2): Xaa is C or S

SEQ ID NO: 76707 - protein, 36 aa, Artificial Sequence; identical to SEQ ID NO: 2538
  GFR-binding peptide
  MOD_RES (1)..(3)..(35)..(36): Xaa is C or S

SEQ ID NO: 76708 - protein, 39 aa, Artificial Sequence
  GFR-binding peptide
  MOD_RES (2)..(36)..(37): Xaa is C or S
  MOD_RES (14)..(15)..(16)..(17)..(18): Xaa is A or G
  MOD_RES (19)..(20)..(21)..(22): Xaa is A or G or is absent
AXSEVTMNQYNKLXXXXXXXXXLYLISIASMKEPVXXPE

SEQ ID NO: 76709 - protein, 34 aa, Artificial Sequence; identical to SEQ ID NO: 4466
  GFR-binding peptide
  MOD_RES (31)..(32): Xaa is C or S

SEQ ID NO: 76710 - protein, 34 aa, Artificial Sequence; identical to SEQ ID NO: 56440
  GFR-binding peptide
  MOD_RES (1)..(1): Xaa is C or S
  MOD_RES (13)..(14)..(15)..(16)..(17): Xaa is A or G
  MOD_RES (18)..(19)..(20)..(21): Xaa is A or G or is absent

SEQ ID NO: 76711 - protein, 37 aa, Artificial Sequence; identical to SEQ ID NO: 2539
  GFR-binding peptide
  MOD_RES (2)..(33)..(34): Xaa is C or S

SEQ ID NO: 76712 - protein, 32 aa, Artificial Sequence; identical to SEQ ID NO: 10038
  GFR-binding peptide
  MOD_RES (31)..(32): Xaa is C or S

SEQ ID NO: 76713 - protein, 43 aa, Artificial Sequence; identical to SEQ ID NO: 2540
  GFR-binding peptide
  MOD_RES (1)..(3)..(37)..(38): Xaa is C or S
  MOD_RES (15)..(16)..(17)..(18)..(19): Xaa is A or G
  MOD_RES (20)..(21)..(22)..(23): Xaa is A or G or is absent

SEQ ID NO: 76714 - protein, 44 aa, Artificial Sequence; identical to SEQ ID NO: 4467
  GFR-binding peptide
  MOD_RES (2)..(4)..(38)..(39): Xaa is C or S
  MOD_RES (16)..(17)..(18)..(19)..(20): Xaa is A or G
  MOD_RES (21)..(22)..(23)..(24): Xaa is A or G or is absent

SEQ ID NO: 76715 - protein, 39 aa, Artificial Sequence; identical to SEQ ID NO: 56442
  GFR-binding peptide
  MOD_RES (2)..(4)..(35)..(36): Xaa is C or S

SEQ ID NO: 76716 - protein, 40 aa, Artificial Sequence; identical to SEQ ID NO: 2541
  GFR-binding peptide
  MOD_RES (34)..(35): Xaa is C or S
  MOD_RES (12)..(13)..(14)..(15)..(16): Xaa is A or G
  MOD_RES (17)..(18)..(19)..(20): Xaa is A or G or is absent

SEQ ID NO: 76717 - protein, 40 aa, Artificial Sequence; identical to SEQ ID NO: 2542
  GFR-binding peptide
  MOD_RES (1)..(3)..(35)..(36): Xaa is C or S

SEQ ID NO: 76718 - protein, 41 aa, Artificial Sequence; identical to SEQ ID NO: 2543
  GFR-binding peptide
  MOD_RES (1)..(3)..(37)..(38): Xaa is C or S
  MOD_RES (15)..(16)..(17)..(18)..(19): Xaa is A or G
  MOD_RES (20)..(21)..(22)..(23): Xaa is A or G or is absent

SEQ ID NO: 76719 - protein, 41 aa, Artificial Sequence; identical to SEQ ID NO: 2544
  GFR-binding peptide
  MOD_RES (2)..(4)..(36)..(37): Xaa is C or S

SEQ ID NO: 76720 - protein, 41 aa, Artificial Sequence; identical to SEQ ID NO: 2545
  GFR-binding peptide
  MOD_RES (2)..(4)..(38)..(39): Xaa is C or S
  MOD_RES (16)..(17)..(18)..(19)..(20): Xaa is A or G
  MOD_RES (21)..(22)..(23)..(24): Xaa is A or G or is absent

SEQ ID NO: 76721 - protein, 38 aa, Artificial Sequence; identical to SEQ ID NO: 4470
  GFR-binding peptide
  MOD_RES (2)..(35)..(36): Xaa is C or S
  MOD_RES (13)..(14)..(15)..(16)..(17): Xaa is A or G
  MOD_RES (18)..(19)..(20)..(21): Xaa is A or G or is absent

SEQ ID NO: 76722 - protein, 38 aa, Artificial Sequence; identical to SEQ ID NO: 2549
  GFR-binding peptide
  MOD_RES (2)..(35)..(36): Xaa is C or S
  MOD_RES (13)..(14)..(15)..(16)..(17): Xaa is A or G
  MOD_RES (18)..(19)..(20)..(21): Xaa is A or G or is absent

SEQ ID NO: 76723 - protein, 37 aa, Artificial Sequence; identical to SEQ ID NO: 4472
  GFR-binding peptide
  MOD_RES (2)..(34)..(35): Xaa is C or S

SEQ ID NO: 76724 - protein, 40 aa, Artificial Sequence; identical to SEQ ID NO: 4474
  GFR-binding peptide
  MOD_RES (2)..(4)..(39)..(40): Xaa is C or S
  MOD_RES (17)..(18)..(19)..(20)..(21): Xaa is A or G
  MOD_RES (22)..(23)..(24)..(25): Xaa is A or G or is absent

SEQ ID NO: 76725 - protein, 34 aa, Artificial Sequence; identical to SEQ ID NO: 2550
  GFR-binding peptide
  MOD_RES (1)..(33): Xaa is C or S

SEQ ID NO: 76726 - protein, 32 aa, Artificial Sequence; identical to SEQ ID NO: 25563
  GFR-binding peptide
  MOD_RES (31)..(32): Xaa is C or S

SEQ ID NO: 76727 - protein, 34 aa, Artificial Sequence
  GFR-binding peptide
  MOD_RES (2)..(33)..(34): Xaa is C or S
GXEEVIMQYNKLLLVRGNDLYLMSIASTKVPAXX

SEQ ID NO: 76728 - protein, 41 aa, Artificial Sequence; identical to SEQ ID NO: 2551
  GFR-binding peptide
  MOD_RES (2)..(4)..(38)..(39): Xaa is C or S
  MOD_RES (16)..(17)..(18)..(19)..(20): Xaa is A or G
  MOD_RES (21)..(22)..(23)..(24): Xaa is A or G or is absent

SEQ ID NO: 76729 - protein, 33 aa, Artificial Sequence; identical to SEQ ID NO: 56455
  GFR-binding peptide
  MOD_RES (1)..(3): Xaa is C or S

SEQ ID NO: 76730 - protein, 33 aa, Artificial Sequence; identical to SEQ ID NO: 56456
  GFR-binding peptide
  MOD_RES (31)..(32): Xaa is C or S

SEQ ID NO: 76731 - protein, 36 aa, Artificial Sequence; identical to SEQ ID NO: 56458
  GFR-binding peptide
  MOD_RES (33)..(34): Xaa is C or S
  MOD_RES (11)..(12)..(13)..(14)..(15): Xaa is A or G
  MOD_RES (16)..(17)..(18)..(19): Xaa is A or G or is absent

SEQ ID NO: 76732 - protein, 34 aa, Artificial Sequence; identical to SEQ ID NO: 4479
  GFR-binding peptide
  MOD_RES (33)..(34): Xaa is C or S
  MOD_RES (11)..(12)..(13)..(14)..(15): Xaa is A or G
  MOD_RES (16)..(17)..(18)..(19): Xaa is A or G or is absent

SEQ ID NO: 76733 - protein, 36 aa, Artificial Sequence; identical to SEQ ID NO: 2554
  GFR-binding peptide
  MOD_RES (32)..(33): Xaa is C or S

SEQ ID NO: 76734 - protein, 32 aa, Artificial Sequence
  GFR-binding peptide
  MOD_RES (1)..(1): Xaa is C or S
XAEVVMDQYNKLVVNNAADLYLISIASLRAPV

SEQ ID NO: 76735 - protein, 36 aa, Artificial Sequence
  GFR-binding peptide
  MOD_RES (1)..(35)..(36): Xaa is C or S
  MOD_RES (13)..(14)..(15)..(16)..(17): Xaa is A or G
  MOD_RES (18)..(19)..(20)..(21): Xaa is A or G or is absent
XAEVVMDQYNKLXXXXXXXXXLYLISIASLRAPVXX

SEQ ID NO: 76736 - protein, 34 aa, Artificial Sequence
  GFR-binding peptide
  MOD_RES (33)..(34): Xaa is C or S
  MOD_RES (11)..(12)..(13)..(14)..(15): Xaa is A or G
  MOD_RES (16)..(17)..(18)..(19): Xaa is A or G or is absent
DVVMGQYNKLXXXXXXXXXLYLMSIASMKTPTXX

SEQ ID NO: 76737 - protein, 37 aa, Artificial Sequence; identical to SEQ ID NO: 2557
  GFR-binding peptide
  MOD_RES (2)..(4): Xaa is C or S
  MOD_RES (16)..(17)..(18)..(19)..(20): Xaa is A or G
  MOD_RES (21)..(22)..(23)..(24): Xaa is A or G or is absent

SEQ ID NO: 76738 - protein, 38 aa, Artificial Sequence; identical to SEQ ID NO: 11913
  GFR-binding peptide
  MOD_RES (1)..(3)..(35)..(36): Xaa is C or S

SEQ ID NO: 76739 - protein, 34 aa, Artificial Sequence; identical to SEQ ID NO: 2558
  GFR-binding peptide
  MOD_RES (2)..(4): Xaa is C or S

SEQ ID NO: 76740 - protein, 39 aa, Artificial Sequence; identical to SEQ ID NO: 4483
  GFR-binding peptide
  MOD_RES (1)..(34)..(35): Xaa is C or S
  MOD_RES (12)..(13)..(14)..(15)..(16): Xaa is A or G
  MOD_RES (17)..(18)..(19)..(20): Xaa is A or G or is absent

SEQ ID NO: 76741 - protein, 38 aa, Artificial Sequence; identical to SEQ ID NO: 2559
  GFR-binding peptide
  MOD_RES (33)..(34): Xaa is C or S

SEQ ID NO: 76742 - protein, 36 aa, Artificial Sequence; identical to SEQ ID NO: 11916
  GFR-binding peptide
  MOD_RES (2)..(4)..(36): Xaa is C or S

SEQ ID NO: 76743 - protein, 34 aa, Artificial Sequence; identical to SEQ ID NO: 4486
  GFR-binding peptide
  MOD_RES (2)..(33)..(34): Xaa is C or S

SEQ ID NO: 76744 - protein, 40 aa, Artificial Sequence; identical to SEQ ID NO: 2563
  GFR-binding peptide
  MOD_RES (1)..(3)..(35)..(36): Xaa is C or S

SEQ ID NO: 76745 - protein, 41 aa, Artificial Sequence; identical to SEQ ID NO: 4488
  GFR-binding peptide
  MOD_RES (1)..(3)..(35)..(36): Xaa is C or S

SEQ ID NO: 76746 - protein, 36 aa, Artificial Sequence; identical to SEQ ID NO: 56466
  GFR-binding peptide
  MOD_RES (1)..(33)..(34): Xaa is C or S

SEQ ID NO: 76747 - protein, 33 aa, Artificial Sequence; identical to SEQ ID NO: 4489
  GFR-binding peptide
  MOD_RES (32)..(33): Xaa is C or S

SEQ ID NO: 76748 - protein, 40 aa, Artificial Sequence; identical to SEQ ID NO: 25580
  GFR-binding peptide
  MOD_RES (2)..(36)..(37): Xaa is C or S
  MOD_RES (14)..(15)..(16)..(17)..(18): Xaa is A or G
  MOD_RES (19)..(20)..(21)..(22): Xaa is A or G or is absent

SEQ ID NO: 76749 - protein, 38 aa, Artificial Sequence; identical to SEQ ID NO: 4490
  GFR-binding peptide
  MOD_RES (1)..(32)..(33): Xaa is C or S

SEQ ID NO: 76750 - protein, 42 aa, Artificial Sequence
  GFR-binding peptide
  MOD_RES (1)..(3)..(37)..(38): Xaa is C or S
  MOD_RES (15)..(16)..(17)..(18)..(19): Xaa is A or G
  MOD_RES (20)..(21)..(22)..(23): Xaa is A or G or is absent
XGXAEVVMDQYNKLXXXXXXXXXLYLISIASLRAPVXXSAPA

SEQ ID NO: 76751 - protein, 39 aa, Artificial Sequence
  GFR-binding peptide
  MOD_RES (1)..(33)..(34): Xaa is C or S
XSRVVMNQYNKLIVNSSDDLYLVSIASLKTPAXXPKPVH

SEQ ID NO: 76752 - protein, 42 aa, Artificial Sequence; identical to SEQ ID NO: 61954
  GFR-binding peptide
  MOD_RES (2)..(36)..(37): Xaa is C or S
  MOD_RES (14)..(15)..(16)..(17)..(18): Xaa is A or G
  MOD_RES (19)..(20)..(21)..(22): Xaa is A or G or is absent

SEQ ID NO: 76753 - protein, 35 aa, Artificial Sequence; identical to SEQ ID NO: 2569
  GFR-binding peptide
  MOD_RES (1)..(33)..(34): Xaa is C or S

SEQ ID NO: 76754 - protein, 37 aa, Artificial Sequence; identical to SEQ ID NO: 23565
  GFR-binding peptide
  MOD_RES (1)..(3)..(37): Xaa is C or S
  MOD_RES (15)..(16)..(17)..(18)..(19): Xaa is A or G
  MOD_RES (20)..(21)..(22)..(23): Xaa is A or G or is absent

SEQ ID NO: 76755 - protein, 39 aa, Artificial Sequence
  GFR-binding peptide
  MOD_RES (1)..(3)..(35)..(36): Xaa is C or S
XGXAEVVMDQYNKLVVNNAADLYLISIASLRAPVXXSAP

SEQ ID NO: 76756 - protein, 38 aa, Artificial Sequence; identical to SEQ ID NO: 4492
  GFR-binding peptide
  MOD_RES (1)..(3)..(34)..(35): Xaa is C or S

SEQ ID NO: 76757 - protein, 38 aa, Artificial Sequence; identical to SEQ ID NO: 25584
  GFR-binding peptide
  MOD_RES (2)..(36)..(37): Xaa is C or S
  MOD_RES (14)..(15)..(16)..(17)..(18): Xaa is A or G
  MOD_RES (19)..(20)..(21)..(22): Xaa is A or G or is absent

SEQ ID NO: 76758 - protein, 39 aa, Artificial Sequence; identical to SEQ ID NO: 2573
  GFR-binding peptide
  MOD_RES (1)..(3)..(34)..(35): Xaa is C or S

SEQ ID NO: 76759 - protein, 41 aa, Artificial Sequence; identical to SEQ ID NO: 63722
  GFR-binding peptide
  MOD_RES (2)..(4)..(36)..(37): Xaa is C or S

SEQ ID NO: 76760 - protein, 35 aa, Artificial Sequence
  GFR-binding peptide
  MOD_RES (2)..(4): Xaa is C or S
SXGXRDVVMGQYNKLIIQQKDNLYLMSIASMKTPT

SEQ ID NO: 76761 - protein, 37 aa, Artificial Sequence
  GFR-binding peptide
  MOD_RES (2)..(34)..(35): Xaa is C or S
GXAEVVMDQYNKLVVNNAADLYLISIASLRAPVXXSA

SEQ ID NO: 76762 - protein, 36 aa, Artificial Sequence; identical to SEQ ID NO: 4495
  GFR-binding peptide
  MOD_RES (1)..(34)..(35): Xaa is C or S
  MOD_RES (12)..(13)..(14)..(15)..(16): Xaa is A or G
  MOD_RES (17)..(18)..(19)..(20): Xaa is A or G or is absent

SEQ ID NO: 76763 - protein, 40 aa, Artificial Sequence; identical to SEQ ID NO: 4498
  GFR-binding peptide
  MOD_RES (2)..(35)..(36): Xaa is C or S
  MOD_RES (13)..(14)..(15)..(16)..(17): Xaa is A or G
  MOD_RES (18)..(19)..(20)..(21): Xaa is A or G or is absent

SEQ ID NO: 76764 - protein, 37 aa, Artificial Sequence; identical to SEQ ID NO: 56479
  GFR-binding peptide
  MOD_RES (1)..(3)..(35)..(36): Xaa is C or S

SEQ ID NO: 76765 - protein, 36 aa, Artificial Sequence; identical to SEQ ID NO: 11935
  GFR-binding peptide
  MOD_RES (2)..(36): Xaa is C or S
  MOD_RES (14)..(15)..(16)..(17)..(18): Xaa is A or G
  MOD_RES (19)..(20)..(21)..(22): Xaa is A or G or is absent

SEQ ID NO: 76766 - protein, 30 aa, Artificial Sequence
  GFR-binding peptide
SVAMGQYNKLYTVVGKDLYLISIASLKTPV

SEQ ID NO: 76767 - protein, 41 aa, Artificial Sequence
  GFR-binding peptide
  MOD_RES (1)..(35)..(36): Xaa is C or S
  MOD_RES (13)..(14)..(15)..(16)..(17): Xaa is A or G
  MOD_RES (18)..(19)..(20)..(21): Xaa is A or G or is absent
XRDVVMGQYNKLXXXXXXXXXLYLMSIASMKTPTXXPGASG

SEQ ID NO: 76768 - protein, 37 aa, Artificial Sequence; identical to SEQ ID NO: 4499
  GFR-binding peptide
  MOD_RES (2)..(34)..(35): Xaa is C or S

SEQ ID NO: 76769 - protein, 33 aa, Artificial Sequence
  GFR-binding peptide
  MOD_RES (33)..(33): Xaa is C or S
  MOD_RES (11)..(12)..(13)..(14)..(15): Xaa is A or G
  MOD_RES (16)..(17)..(18)..(19): Xaa is A or G or is absent
DVVMGQYNKLXXXXXXXXXLYLMSIASMKTPTX

SEQ ID NO: 76770 - protein, 37 aa, Artificial Sequence; identical to SEQ ID NO: 23574
  GFR-binding peptide
  MOD_RES (34)..(35): Xaa is C or S
  MOD_RES (12)..(13)..(14)..(15)..(16): Xaa is A or G
  MOD_RES (17)..(18)..(19)..(20): Xaa is A or G or is absent

SEQ ID NO: 76771 - protein, 38 aa, Artificial Sequence; identical to SEQ ID NO: 63728
  GFR-binding peptide
  MOD_RES (1)..(3)..(37)..(38): Xaa is C or S
  MOD_RES (15)..(16)..(17)..(18)..(19): Xaa is A or G
  MOD_RES (20)..(21)..(22)..(23): Xaa is A or G or is absent

SEQ ID NO: 76772 - protein, 38 aa, Artificial Sequence; identical to SEQ ID NO: 2579
  GFR-binding peptide
  MOD_RES (1)..(3)..(36)..(37): Xaa is C or S
  MOD_RES (14)..(15)..(16)..(17)..(18): Xaa is A or G
  MOD_RES (19)..(20)..(21)..(22): Xaa is A or G or is absent

SEQ ID NO: 76773 - protein, 34 aa, Artificial Sequence; identical to SEQ ID NO: 4501
  GFR-binding peptide
  MOD_RES (2)..(2): Xaa is C or S
  MOD_RES (13)..(14)..(15)..(16)..(17): Xaa is A or G
  MOD_RES (18)..(19)..(20)..(21): Xaa is A or G or is absent

SEQ ID NO: 76774 - protein, 35 aa, Artificial Sequence; identical to SEQ ID NO: 23578
  GFR-binding peptide
  MOD_RES (1)..(35): Xaa is C or S
  MOD_RES (13)..(14)..(15)..(16)..(17): Xaa is A or G
  MOD_RES (18)..(19)..(20)..(21): Xaa is A or G or is absent

SEQ ID NO: 76775 - protein, 36 aa, Artificial Sequence; identical to SEQ ID NO: 2582
  GFR-binding peptide
  MOD_RES (1)..(3): Xaa is C or S
  MOD_RES (15)..(16)..(17)..(18)..(19): Xaa is A or G
  MOD_RES (20)..(21)..(22)..(23): Xaa is A or G or is absent

SEQ ID NO: 76776 - protein, 39 aa, Artificial Sequence; identical to SEQ ID NO: 23580
  GFR-binding peptide
  MOD_RES (1)..(3)..(37)..(38): Xaa is C or S
  MOD_RES (15)..(16)..(17)..(18)..(19): Xaa is A or G
  MOD_RES (20)..(21)..(22)..(23): Xaa is A or G or is absent

SEQ ID NO: 76777 - protein, 40 aa, Artificial Sequence; identical to SEQ ID NO: 4502
  GFR-binding peptide
  MOD_RES (2)..(36)..(37): Xaa is C or S
  MOD_RES (14)..(15)..(16)..(17)..(18): Xaa is A or G
  MOD_RES (19)..(20)..(21)..(22): Xaa is A or G or is absent

SEQ ID NO: 76778 - protein, 36 aa, Artificial Sequence
  GFR-binding peptide
  MOD_RES (1)..(3): Xaa is C or S
  MOD_RES (15)..(16)..(17)..(18)..(19): Xaa is A or G
  MOD_RES (20)..(21)..(22)..(23): Xaa is A or G or is absent
XGXESVAMGQYNKLXXXXXXXXXLYLISIASLKTPV

SEQ ID NO: 76779 - protein, 36 aa, Artificial Sequence; identical to SEQ ID NO: 2585
  GFR-binding peptide
  MOD_RES (1)..(32)..(33): Xaa is C or S

SEQ ID NO: 76780 - protein, 36 aa, Artificial Sequence; identical to SEQ ID NO: 56490
  GFR-binding peptide
  MOD_RES (1)..(32)..(33): Xaa is C or S

SEQ ID NO: 76781 - protein, 37 aa, Artificial Sequence
  GFR-binding peptide
  MOD_RES (32)..(33): Xaa is C or S
ESVAMGQYNKLYTVVGKDLYLISIASLKTPVXXAKSA

SEQ ID NO: 76782 - protein, 37 aa, Artificial Sequence
  GFR-binding peptide
  MOD_RES (2)..(4)..(35)..(36): Xaa is C or S
LXGXEEVIMQYNKLLLVRGNDLYLMSIASTKVPAXXT

SEQ ID NO: 76783 - protein, 37 aa, Artificial Sequence; identical to SEQ ID NO: 2589
  GFR-binding peptide
  MOD_RES (1)..(3)..(36)..(37): Xaa is C or S
  MOD_RES (14)..(15)..(16)..(17)..(18): Xaa is A or G
  MOD_RES (19)..(20)..(21)..(22): Xaa is A or G or is absent

SEQ ID NO: 76784 - protein, 33 aa, Artificial Sequence; identical to SEQ ID NO: 2590
  GFR-binding peptide
  MOD_RES (31)..(32): Xaa is C or S

SEQ ID NO: 76785 - protein, 37 aa, Artificial Sequence; identical to SEQ ID NO: 4505
  GFR-binding peptide
  MOD_RES (2)..(4)..(35)..(36): Xaa is C or S

SEQ ID NO: 76786 - protein, 43 aa, Artificial Sequence; identical to SEQ ID NO: 4506
  GFR-binding peptide
  MOD_RES (2)..(4)..(39)..(40): Xaa is C or S
  MOD_RES (17)..(18)..(19)..(20)..(21): Xaa is A or G
  MOD_RES (22)..(23)..(24)..(25): Xaa is A or G or is absent

SEQ ID NO: 76787 - protein, 36 aa, Artificial Sequence; identical to SEQ ID NO: 10081
  GFR-binding peptide
  MOD_RES (33)..(34): Xaa is C or S
  MOD_RES (11)..(12)..(13)..(14)..(15): Xaa is A or G
  MOD_RES (16)..(17)..(18)..(19): Xaa is A or G or is absent

SEQ ID NO: 76788 - protein, 42 aa, Artificial Sequence; identical to SEQ ID NO: 2592
  GFR-binding peptide
  MOD_RES (2)..(4)..(36): Xaa is C or S

SEQ ID NO: 76789 - protein, 37 aa, Artificial Sequence; identical to SEQ ID NO: 11946
  GFR-binding peptide
  MOD_RES (2)..(4)..(36)..(37): Xaa is C or S

SEQ ID NO: 76790 - protein, 36 aa, Artificial Sequence; identical to SEQ ID NO: 4509
  GFR-binding peptide
  MOD_RES (1)..(35): Xaa is C or S
  MOD_RES (13)..(14)..(15)..(16)..(17): Xaa is A or G
  MOD_RES (18)..(19)..(20)..(21): Xaa is A or G or is absent

SEQ ID NO: 76791 - protein, 41 aa, Artificial Sequence; identical to SEQ ID NO: 2593
  GFR-binding peptide
  MOD_RES (2)..(36): Xaa is C or S
  MOD_RES (14)..(15)..(16)..(17)..(18): Xaa is A or G
  MOD_RES (19)..(20)..(21)..(22): Xaa is A or G or is absent

SEQ ID NO: 76792 - protein, 37 aa, Artificial Sequence
  GFR-binding peptide
  MOD_RES (2)..(4): Xaa is C or S
  MOD_RES (16)..(17)..(18)..(19)..(20): Xaa is A or G
  MOD_RES (21)..(22)..(23)..(24): Xaa is A or G or is absent
RXGXAEVVMDQYNKLXXXXXXXXXLYLISIASLRAPV

SEQ ID NO: 76793 - protein, 34 aa, Artificial Sequence; identical to SEQ ID NO: 4512
  GFR-binding peptide
  MOD_RES (1)..(1): Xaa is C or S
  MOD_RES (13)..(14)..(15)..(16)..(17): Xaa is A or G
  MOD_RES (18)..(19)..(20)..(21): Xaa is A or G or is absent

SEQ ID NO: 76794 - protein, 35 aa, Artificial Sequence; identical to SEQ ID NO: 4513
  GFR-binding peptide
  MOD_RES (34)..(35): Xaa is C or S
  MOD_RES (12)..(13)..(14)..(15)..(16): Xaa is A or G
  MOD_RES (17)..(18)..(19)..(20): Xaa is A or G or is absent

SEQ ID NO: 76795 - protein, 34 aa, Artificial Sequence; identical to SEQ ID NO: 2599
  GFR-binding peptide
  MOD_RES (1)..(33)..(34): Xaa is C or S

SEQ ID NO: 76796 - protein, 39 aa, Artificial Sequence; identical to SEQ ID NO: 4514
  GFR-binding peptide
  MOD_RES (2)..(36)..(37): Xaa is C or S
  MOD_RES (14)..(15)..(16)..(17)..(18): Xaa is A or G
  MOD_RES (19)..(20)..(21)..(22): Xaa is A or G or is absent

SEQ ID NO: 76797 - protein, 39 aa, Artificial Sequence
  GFR-binding peptide
  MOD_RES (2)..(4)..(35)..(36): Xaa is C or S
LXGXEEVIMQYNKLLLVRGNDLYLMSIASTKVPAXXTSP

SEQ ID NO: 76798 - protein, 37 aa, Artificial Sequence; identical to SEQ ID NO: 56505
  GFR-binding peptide
  MOD_RES (31)..(32): Xaa is C or S

SEQ ID NO: 76799 - protein, 35 aa, Artificial Sequence
  GFR-binding peptide
  MOD_RES (1)..(33)..(34): Xaa is C or S
XESVAMGQYNKLYTVVGKDLYLISIASLKTPVXXA

SEQ ID NO: 76800 - protein, 32 aa, Artificial Sequence; identical to SEQ ID NO: 56508
  GFR-binding peptide
  MOD_RES (1)..(1): Xaa is C or S

SEQ ID NO: 76801 - protein, 44 aa, Artificial Sequence; identical to SEQ ID NO: 2603
  GFR-binding peptide
  MOD_RES (2)..(4)..(38)..(39): Xaa is C or S
  MOD_RES (16)..(17)..(18)..(19)..(20): Xaa is A or G
  MOD_RES (21)..(22)..(23)..(24): Xaa is A or G or is absent

SEQ ID NO: 76802 - protein, 37 aa, Artificial Sequence; identical to SEQ ID NO: 58521
  GFR-binding peptide
  MOD_RES (34)..(35): Xaa is C or S
  MOD_RES (12)..(13)..(14)..(15)..(16): Xaa is A or G
  MOD_RES (17)..(18)..(19)..(20): Xaa is A or G or is absent

SEQ ID NO: 76803 - protein, 36 aa, Artificial Sequence; identical to SEQ ID NO: 11961
  GFR-binding peptide
  MOD_RES (31)..(32): Xaa is C or S

SEQ ID NO: 76804 - protein, 39 aa, Artificial Sequence; identical to SEQ ID NO: 11962
  GFR-binding peptide
  MOD_RES (2)..(4)..(38)..(39): Xaa is C or S
  MOD_RES (16)..(17)..(18)..(19)..(20): Xaa is A or G
  MOD_RES (21)..(22)..(23)..(24): Xaa is A or G or is absent

SEQ ID NO: 76805 - protein, 36 aa, Artificial Sequence; identical to SEQ ID NO: 4522
  GFR-binding peptide
  MOD_RES (1)..(33): Xaa is C or S

SEQ ID NO: 76806 - protein, 35 aa, Artificial Sequence; identical to SEQ ID NO: 4523
  GFR-binding peptide
  MOD_RES (33)..(34): Xaa is C or S
  MOD_RES (11)..(12)..(13)..(14)..(15): Xaa is A or G
  MOD_RES (16)..(17)..(18)..(19): Xaa is A or G or is absent

SEQ ID NO: 76807 - protein, 36 aa, Artificial Sequence
  GFR-binding peptide
  MOD_RES (1)..(32)..(33): Xaa is C or S
XEEVIMQYNKLLLVRGNDLYLMSIASTKVPAXXTSP

SEQ ID NO: 76808 - protein, 35 aa, Artificial Sequence
  GFR-binding peptide
  MOD_RES (1)..(35): Xaa is C or S
  MOD_RES (13)..(14)..(15)..(16)..(17): Xaa is A or G
  MOD_RES (18)..(19)..(20)..(21): Xaa is A or G or is absent
XAEVVMDQYNKLXXXXXXXXXLYLISIASLRAPVX

SEQ ID NO: 76809 - protein, 31 aa, Artificial Sequence
  GFR-binding peptide
  MOD_RES (31)..(31): Xaa is C or S
DVVMGQYNKLIIQQKDNLYLMSIASMKTPTX

SEQ ID NO: 76810 - protein, 33 aa, Artificial Sequence; identical to SEQ ID NO: 23612
  GFR-binding peptide
  MOD_RES (33)..(33): Xaa is C or S
  MOD_RES (11)..(12)..(13)..(14)..(15): Xaa is A or G
  MOD_RES (16)..(17)..(18)..(19): Xaa is A or G or is absent

SEQ ID NO: 76811 - protein, 31 aa, Artificial Sequence; identical to SEQ ID NO: 11968
  GFR-binding peptide

SEQ ID NO: 76812 - protein, 41 aa, Artificial Sequence; identical to SEQ ID NO: 56516
  GFR-binding peptide
  MOD_RES (2)..(4)..(37)..(38): Xaa is C or S
  MOD_RES (15)..(16)..(17)..(18)..(19): Xaa is A or G
  MOD_RES (20)..(21)..(22)..(23): Xaa is A or G or is absent

SEQ ID NO: 76813 - protein, 36 aa, Artificial Sequence
  GFR-binding peptide
  MOD_RES (31)..(32): Xaa is C or S
SVAMGQYNKLYTVVGKDLYLISIASLKTPVXXAKSA

SEQ ID NO: 76814 - protein, 32 aa, Artificial Sequence; identical to SEQ ID NO: 61998
  GFR-binding peptide
  MOD_RES (32)..(32): Xaa is C or S

SEQ ID NO: 76815 - protein, 32 aa, Artificial Sequence; identical to SEQ ID NO: 2610
  GFR-binding peptide
  MOD_RES (11)..(12)..(13)..(14)..(15): Xaa is A or G
  MOD_RES (16)..(17)..(18)..(19): Xaa is A or G or is absent

SEQ ID NO: 76816 - protein, 33 aa, Artificial Sequence; identical to SEQ ID NO: 2612
  GFR-binding peptide
  MOD_RES (1)..(1): Xaa is C or S
  MOD_RES (12)..(13)..(14)..(15)..(16): Xaa is A or G
  MOD_RES (17)..(18)..(19)..(20): Xaa is A or G or is absent

SEQ ID NO: 76817 - protein, 34 aa, Artificial Sequence; identical to SEQ ID NO: 4529
  GFR-binding peptide
  MOD_RES (2)..(4): Xaa is C or S

SEQ ID NO: 76818 - protein, 42 aa, Artificial Sequence
  GFR-binding peptide
  MOD_RES (2)..(4)..(37)..(38): Xaa is C or S
  MOD_RES (15)..(16)..(17)..(18)..(19): Xaa is A or G
  MOD_RES (20)..(21)..(22)..(23): Xaa is A or G or is absent
LXGXEEVIMQYNKLXXXXXXXXXLYLMSIASTKVPAXXTSPV

SEQ ID NO: 76819 - protein, 35 aa, Artificial Sequence; identical to SEQ ID NO: 2614
  GFR-binding peptide
  MOD_RES (33)..(34): Xaa is C or S
  MOD_RES (11)..(12)..(13)..(14)..(15): Xaa is A or G
  MOD_RES (16)..(17)..(18)..(19): Xaa is A or G or is absent

SEQ ID NO: 76820 - protein, 37 aa, Artificial Sequence; identical to SEQ ID NO: 4531
  GFR-binding peptide
  MOD_RES (33)..(33): Xaa is C or S
  MOD_RES (11)..(12)..(13)..(14)..(15): Xaa is A or G
  MOD_RES (16)..(17)..(18)..(19): Xaa is A or G or is absent

SEQ ID NO: 76821 - protein, 41 aa, Artificial Sequence
  GFR-binding peptide
  MOD_RES (2)..(36)..(37): Xaa is C or S
  MOD_RES (14)..(15)..(16)..(17)..(18): Xaa is A or G
  MOD_RES (19)..(20)..(21)..(22): Xaa is A or G or is absent
GXRDVVMGQYNKLXXXXXXXXXLYLMSIASMKTPTXXPGAS

SEQ ID NO: 76822 - protein, 36 aa, Artificial Sequence; identical to SEQ ID NO: 4534
  GFR-binding peptide
  MOD_RES (32)..(33): Xaa is C or S

SEQ ID NO: 76823 - protein, 40 aa, Artificial Sequence; identical to SEQ ID NO: 2618
  GFR-binding peptide
  MOD_RES (2)..(4)..(35)..(36): Xaa is C or S

SEQ ID NO: 76824 - protein, 34 aa, Artificial Sequence; identical to SEQ ID NO: 4538
  GFR-binding peptide
  MOD_RES (2)..(33)..(34): Xaa is C or S

SEQ ID NO: 76825 - protein, 41 aa, Artificial Sequence; identical to SEQ ID NO: 56522
  GFR-binding peptide
  MOD_RES (2)..(4)..(35)..(36): Xaa is C or S

SEQ ID NO: 76826 - protein, 34 aa, Artificial Sequence
  GFR-binding peptide
  MOD_RES (1)..(3): Xaa is C or S
XGXESVAMGQYNKLYTVVGKDLYLISIASLKTPV

SEQ ID NO: 76827 - protein, 34 aa, Artificial Sequence; identical to SEQ ID NO: 4540
  GFR-binding peptide
  MOD_RES (2)..(34): Xaa is C or S

SEQ ID NO: 76828 - protein, 43 aa, Artificial Sequence
  GFR-binding peptide
  MOD_RES (2)..(4)..(37)..(38): Xaa is C or S
  MOD_RES (15)..(16)..(17)..(18)..(19): Xaa is A or G
  MOD_RES (20)..(21)..(22)..(23): Xaa is A or G or is absent
LXGXEEVIMQYNKLXXXXXXXXXLYLMSIASTKVPAXXTSPVR

SEQ ID NO: 76829 - protein, 36 aa, Artificial Sequence; identical to SEQ ID NO: 2620
  GFR-binding peptide
  MOD_RES (1)..(34)..(35): Xaa is C or S
  MOD_RES (12)..(13)..(14)..(15)..(16): Xaa is A or G
  MOD_RES (17)..(18)..(19)..(20): Xaa is A or G or is absent

SEQ ID NO: 76830 - protein, 37 aa, Artificial Sequence; identical to SEQ ID NO: 25637
  GFR-binding peptide
  MOD_RES (2)..(4)..(36)..(37): Xaa is C or S

SEQ ID NO: 76831 - protein, 38 aa, Artificial Sequence; identical to SEQ ID NO: 4542
  GFR-binding peptide
  MOD_RES (2)..(34): Xaa is C or S

SEQ ID NO: 76832 - protein, 34 aa, Artificial Sequence; identical to SEQ ID NO: 2621
  GFR-binding peptide
  MOD_RES (31)..(32): Xaa is C or S

SEQ ID NO: 76833 - protein, 41 aa, Artificial Sequence; identical to SEQ ID NO: 2622
  GFR-binding peptide
  MOD_RES (1)..(3)..(35)..(36): Xaa is C or S

SEQ ID NO: 76834 - protein, 39 aa, Artificial Sequence; identical to SEQ ID NO: 4545
  GFR-binding peptide
  MOD_RES (2)..(4)..(36)..(37): Xaa is C or S

SEQ ID NO: 76835 - protein, 36 aa, Artificial Sequence; identical to SEQ ID NO: 4546
  GFR-binding peptide
  MOD_RES (2)..(4)..(36): Xaa is C or S

SEQ ID NO: 76836 - protein, 33 aa, Artificial Sequence; identical to SEQ ID NO: 2623
  GFR-binding peptide
  MOD_RES (1)..(33): Xaa is C or S

SEQ ID NO: 76837 - protein, 37 aa, Artificial Sequence; identical to SEQ ID NO: 23627
  GFR-binding peptide
  MOD_RES (1)..(35)..(36): Xaa is C or S
  MOD_RES (13)..(14)..(15)..(16)..(17): Xaa is A or G
  MOD_RES (18)..(19)..(20)..(21): Xaa is A or G or is absent

SEQ ID NO: 76838 - protein, 39 aa, Artificial Sequence; identical to SEQ ID NO: 25644
  GFR-binding peptide
  MOD_RES (1)..(3)..(35)..(36): Xaa is C or S

SEQ ID NO: 76839 - protein, 31 aa, Artificial Sequence; identical to SEQ ID NO: 2628
  GFR-binding peptide
  MOD_RES (31)..(31): Xaa is C or S

SEQ ID NO: 76840 - protein, 37 aa, Artificial Sequence; identical to SEQ ID NO: 2629
  GFR-binding peptide
  MOD_RES (32)..(32): Xaa is C or S

SEQ ID NO: 76841 - protein, 41 aa, Artificial Sequence; identical to SEQ ID NO: 4549
  GFR-binding peptide
  MOD_RES (1)..(35): Xaa is C or S
  MOD_RES (13)..(14)..(15)..(16)..(17): Xaa is A or G
  MOD_RES (18)..(19)..(20)..(21): Xaa is A or G or is absent

SEQ ID NO: 76842 - protein, 35 aa, Artificial Sequence; identical to SEQ ID NO: 2630
  GFR-binding peptide
  MOD_RES (34)..(34): Xaa is C or S
  MOD_RES (12)..(13)..(14)..(15)..(16): Xaa is A or G
  MOD_RES (17)..(18)..(19)..(20): Xaa is A or G or is absent

SEQ ID NO: 76843 - protein, 34 aa, Artificial Sequence; identical to SEQ ID NO: 56536
  GFR-binding peptide
  MOD_RES (1)..(3)..(34): Xaa is C or S

SEQ ID NO: 76844 - protein, 40 aa, Artificial Sequence; identical to SEQ ID NO: 4553
  GFR-binding peptide
  MOD_RES (34)..(35): Xaa is C or S
  MOD_RES (12)..(13)..(14)..(15)..(16): Xaa is A or G
  MOD_RES (17)..(18)..(19)..(20): Xaa is A or G or is absent

SEQ ID NO: 76845 - protein, 41 aa, Artificial Sequence; identical to SEQ ID NO: 2632
  GFR-binding peptide
  MOD_RES (2)..(4)..(36)..(37): Xaa is C or S

SEQ ID NO: 76846 - protein, 33 aa, Artificial Sequence; identical to SEQ ID NO: 4554
  GFR-binding peptide
  MOD_RES (33)..(33): Xaa is C or S
  MOD_RES (11)..(12)..(13)..(14)..(15): Xaa is A or G
  MOD_RES (16)..(17)..(18)..(19): Xaa is A or G or is absent

SEQ ID NO: 76847 - protein, 41 aa, Artificial Sequence; identical to SEQ ID NO: 2634
  GFR-binding peptide
  MOD_RES (2)..(35)..(36): Xaa is C or S
  MOD_RES (13)..(14)..(15)..(16)..(17): Xaa is A or G
  MOD_RES (18)..(19)..(20)..(21): Xaa is A or G or is absent

SEQ ID NO: 76848 - protein, 36 aa, Artificial Sequence; identical to SEQ ID NO: 4556
  GFR-binding peptide
  MOD_RES (1)..(33)..(34): Xaa is C or S

SEQ ID NO: 76849 - protein, 33 aa, Artificial Sequence; identical to SEQ ID NO: 4557
  GFR-binding peptide
  MOD_RES (33)..(33): Xaa is C or S
  MOD_RES (11)..(12)..(13)..(14)..(15): Xaa is A or G
  MOD_RES (16)..(17)..(18)..(19): Xaa is A or G or is absent

SEQ ID NO: 76850 - protein, 35 aa, Artificial Sequence; identical to SEQ ID NO: 4558
  GFR-binding peptide
  MOD_RES (2)..(2): Xaa is C or S
  MOD_RES (14)..(15)..(16)..(17)..(18): Xaa is A or G
  MOD_RES (19)..(20)..(21)..(22): Xaa is A or G or is absent

SEQ ID NO: 76851 - protein, 37 aa, Artificial Sequence; identical to SEQ ID NO: 23636
  GFR-binding peptide
  MOD_RES (34)..(35): Xaa is C or S
  MOD_RES (12)..(13)..(14)..(15)..(16): Xaa is A or G
  MOD_RES (17)..(18)..(19)..(20): Xaa is A or G or is absent

SEQ ID NO: 76852 - protein, 39 aa, Artificial Sequence; identical to SEQ ID NO: 2637
  GFR-binding peptide
  MOD_RES (2)..(4)..(37)..(38): Xaa is C or S
  MOD_RES (15)..(16)..(17)..(18)..(19): Xaa is A or G
  MOD_RES (20)..(21)..(22)..(23): Xaa is A or G or is absent

SEQ ID NO: 76853 - protein, 37 aa, Artificial Sequence; identical to SEQ ID NO: 2638
  GFR-binding peptide
  MOD_RES (1)..(33)..(34): Xaa is C or S

SEQ ID NO: 76854 - protein, 38 aa, Artificial Sequence; identical to SEQ ID NO: 2639
  GFR-binding peptide
  MOD_RES (34)..(34): Xaa is C or S
  MOD_RES (12)..(13)..(14)..(15)..(16): Xaa is A or G
  MOD_RES (17)..(18)..(19)..(20): Xaa is A or G or is absent

SEQ ID NO: 76855 - protein, 31 aa, Artificial Sequence; identical to SEQ ID NO: 23644
  GFR-binding peptide

SEQ ID NO: 76856 - protein, 37 aa, Artificial Sequence; identical to SEQ ID NO: 2642
  GFR-binding peptide
  MOD_RES (31)..(32): Xaa is C or S

SEQ ID NO: 76857 - protein, 35 aa, Artificial Sequence; identical to SEQ ID NO: 56553
  GFR-binding peptide
  MOD_RES (1)..(3)..(34)..(35): Xaa is C or S

SEQ ID NO: 76858 - protein, 38 aa, Artificial Sequence; identical to SEQ ID NO: 4566
  GFR-binding peptide
  MOD_RES (1)..(3)..(36)..(37): Xaa is C or S
  MOD_RES (14)..(15)..(16)..(17)..(18): Xaa is A or G
  MOD_RES (19)..(20)..(21)..(22): Xaa is A or G or is absent

SEQ ID NO: 76859 - protein, 41 aa, Artificial Sequence
  GFR-binding peptide
  MOD_RES (2)..(4)..(36)..(37): Xaa is C or S
RXGXESVAMGQYNKLYTVVGKDLYLISIASLKTPVXXAKSA

SEQ ID NO: 76860 - protein, 37 aa, Artificial Sequence; identical to SEQ ID NO: 2645
  GFR-binding peptide
  MOD_RES (1)..(33): Xaa is C or S

SEQ ID NO: 76861 - protein, 32 aa, Artificial Sequence; identical to SEQ ID NO: 2646
  GFR-binding peptide
  MOD_RES (1)..(1): Xaa is C or S

SEQ ID NO: 76862 - protein, 37 aa, Artificial Sequence; identical to SEQ ID NO: 60248
  GFR-binding peptide
  MOD_RES (2)..(36)..(37): Xaa is C or S
  MOD_RES (14)..(15)..(16)..(17)..(18): Xaa is A or G
  MOD_RES (19)..(20)..(21)..(22): Xaa is A or G or is absent

SEQ ID NO: 76863 - protein, 38 aa, Artificial Sequence
  GFR-binding peptide
  MOD_RES (34)..(35): Xaa is C or S
  MOD_RES (12)..(13)..(14)..(15)..(16): Xaa is A or G
  MOD_RES (17)..(18)..(19)..(20): Xaa is A or G or is absent
SEVTMNQYNKLXXXXXXXXXLYLISIASMKEPVXXPEP

SEQ ID NO: 76864 - protein, 39 aa, Artificial Sequence; identical to SEQ ID NO: 4570
  GFR-binding peptide
  MOD_RES (1)..(3)..(35)..(36): Xaa is C or S

SEQ ID NO: 76865 - protein, 36 aa, Artificial Sequence
  GFR-binding peptide
  MOD_RES (2)..(4): Xaa is C or S
  MOD_RES (15)..(16)..(17)..(18)..(19): Xaa is A or G
  MOD_RES (20)..(21)..(22)..(23): Xaa is A or G or is absent
LXGXEEVIMQYNKLXXXXXXXXXLYLMSIASTKVPA

SEQ ID NO: 76866 - protein, 43 aa, Artificial Sequence; identical to SEQ ID NO: 4571
  GFR-binding peptide
  MOD_RES (2)..(4)..(38)..(39): Xaa is C or S
  MOD_RES (16)..(17)..(18)..(19)..(20): Xaa is A or G
  MOD_RES (21)..(22)..(23)..(24): Xaa is A or G or is absent

SEQ ID NO: 76867 - protein, 39 aa, Artificial Sequence; identical to SEQ ID NO: 2652
  GFR-binding peptide
  MOD_RES (2)..(4)..(35)..(36): Xaa is C or S

SEQ ID NO: 76868 - protein, 36 aa, Artificial Sequence; identical to SEQ ID NO: 56558
  GFR-binding peptide
  MOD_RES (2)..(4)..(35)..(36): Xaa is C or S

SEQ ID NO: 76869 - protein, 35 aa, Artificial Sequence; identical to SEQ ID NO: 12006
  GFR-binding peptide
  MOD_RES (2)..(2): Xaa is C or S
  MOD_RES (14)..(15)..(16)..(17)..(18): Xaa is A or G
  MOD_RES (19)..(20)..(21)..(22): Xaa is A or G or is absent

SEQ ID NO: 76870 - protein, 36 aa, Artificial Sequence; identical to SEQ ID NO: 10135
  GFR-binding peptide
  MOD_RES (2)..(34)..(35): Xaa is C or S

SEQ ID NO: 76871 - protein, 36 aa, Artificial Sequence; identical to SEQ ID NO: 56563
  GFR-binding peptide
  MOD_RES (1)..(3): Xaa is C or S
  MOD_RES (15)..(16)..(17)..(18)..(19): Xaa is A or G
  MOD_RES (20)..(21)..(22)..(23): Xaa is A or G or is absent

SEQ ID NO: 76872 - protein, 40 aa, Artificial Sequence; identical to SEQ ID NO: 4578
  GFR-binding peptide
  MOD_RES (1)..(3)..(36)..(37): Xaa is C or S
  MOD_RES (14)..(15)..(16)..(17)..(18): Xaa is A or G
  MOD_RES (19)..(20)..(21)..(22): Xaa is A or G or is absent

SEQ ID NO: 76873 - protein, 36 aa, Artificial Sequence; identical to SEQ ID NO: 2657
  GFR-binding peptide
  MOD_RES (1)..(3): Xaa is C or S
  MOD_RES (15)..(16)..(17)..(18)..(19): Xaa is A or G
  MOD_RES (20)..(21)..(22)..(23): Xaa is A or G or is absent

SEQ ID NO: 76874 - protein, 38 aa, Artificial Sequence; identical to SEQ ID NO: 2658
  GFR-binding peptide
  MOD_RES (1)..(3)..(37)..(38): Xaa is C or S
  MOD_RES (15)..(16)..(17)..(18)..(19): Xaa is A or G
  MOD_RES (20)..(21)..(22)..(23): Xaa is A or G or is absent

SEQ ID NO: 76875 - protein, 36 aa, Artificial Sequence; identical to SEQ ID NO: 56567
  GFR-binding peptide
  MOD_RES (2)..(35)..(36): Xaa is C or S
  MOD_RES (13)..(14)..(15)..(16)..(17): Xaa is A or G
  MOD_RES (18)..(19)..(20)..(21): Xaa is A or G or is absent

SEQ ID NO: 76876 - protein, 40 aa, Artificial Sequence; identical to SEQ ID NO: 63794
  GFR-binding peptide
  MOD_RES (2)..(4)..(36)..(37): Xaa is C or S

SEQ ID NO: 76877 - protein, 35 aa, Artificial Sequence; identical to SEQ ID NO: 2659
  GFR-binding peptide
  MOD_RES (2)..(4)..(35): Xaa is C or S

SEQ ID NO: 76878 - protein, 37 aa, Artificial Sequence; identical to SEQ ID NO: 2660
  GFR-binding peptide
  MOD_RES (2)..(33)..(34): Xaa is C or S

SEQ ID NO: 76879 - protein, 35 aa, Artificial Sequence; identical to SEQ ID NO: 2661
  GFR-binding peptide
  MOD_RES (1)..(3)..(34)..(35): Xaa is C or S

SEQ ID NO: 76880 - protein, 42 aa, Artificial Sequence; identical to SEQ ID NO: 25670
  GFR-binding peptide
  MOD_RES (2)..(4)..(38)..(39): Xaa is C or S
  MOD_RES (16)..(17)..(18)..(19)..(20): Xaa is A or G
  MOD_RES (21)..(22)..(23)..(24): Xaa is A or G or is absent

SEQ ID NO: 76881 - protein, 38 aa, Artificial Sequence; identical to SEQ ID NO: 2662
  GFR-binding peptide
  MOD_RES (1)..(3)..(37)..(38): Xaa is C or S
  MOD_RES (15)..(16)..(17)..(18)..(19): Xaa is A or G
  MOD_RES (20)..(21)..(22)..(23): Xaa is A or G or is absent

SEQ ID NO: 76882 - protein, 34 aa, Artificial Sequence; identical to SEQ ID NO: 25672
  GFR-binding peptide
  MOD_RES (34)..(34): Xaa is C or S
  MOD_RES (12)..(13)..(14)..(15)..(16): Xaa is A or G
  MOD_RES (17)..(18)..(19)..(20): Xaa is A or G or is absent

SEQ ID NO: 76883 - protein, 33 aa, Artificial Sequence
  GFR-binding peptide
  MOD_RES (32)..(33): Xaa is C or S
SEVTMNQYNKLVVNKNEDLYLISIASMKEPVXX

SEQ ID NO: 76884 - protein, 37 aa, Artificial Sequence; identical to SEQ ID NO: 4583
  GFR-binding peptide
  MOD_RES (2)..(35)..(36): Xaa is C or S
  MOD_RES (13)..(14)..(15)..(16)..(17): Xaa is A or G
  MOD_RES (18)..(19)..(20)..(21): Xaa is A or G or is absent

SEQ ID NO: 76885 - protein, 37 aa, Artificial Sequence; identical to SEQ ID NO: 2663
  GFR-binding peptide
  MOD_RES (33)..(34): Xaa is C or S
  MOD_RES (11)..(12)..(13)..(14)..(15): Xaa is A or G
  MOD_RES (16)..(17)..(18)..(19): Xaa is A or G or is absent

SEQ ID NO: 76886 - protein, 36 aa, Artificial Sequence; identical to SEQ ID NO: 2664
  GFR-binding peptide
  MOD_RES (2)..(36): Xaa is C or S
  MOD_RES (14)..(15)..(16)..(17)..(18): Xaa is A or G
  MOD_RES (19)..(20)..(21)..(22): Xaa is A or G or is absent

SEQ ID NO: 76887 - protein, 38 aa, Artificial Sequence; identical to SEQ ID NO: 56577
  GFR-binding peptide
  MOD_RES (1)..(33)..(34): Xaa is C or S

SEQ ID NO: 76888 - protein, 31 aa, Artificial Sequence; identical to SEQ ID NO: 4585
  GFR-binding peptide

SEQ ID NO: 76889 - protein, 35 aa, Artificial Sequence; identical to SEQ ID NO: 10150
  GFR-binding peptide
  MOD_RES (1)..(35): Xaa is C or S
  MOD_RES (13)..(14)..(15)..(16)..(17): Xaa is A or G
  MOD_RES (18)..(19)..(20)..(21): Xaa is A or G or is absent

SEQ ID NO: 76890 - protein, 35 aa, Artificial Sequence; identical to SEQ ID NO: 4588
  GFR-binding peptide
  MOD_RES (2)..(35): Xaa is C or S
  MOD_RES (13)..(14)..(15)..(16)..(17): Xaa is A or G
  MOD_RES (18)..(19)..(20)..(21): Xaa is A or G or is absent

SEQ ID NO: 76891 - protein, 33 aa, Artificial Sequence; identical to SEQ ID NO: 2667
  GFR-binding peptide
  MOD_RES (1)..(1): Xaa is C or S
  MOD_RES (12)..(13)..(14)..(15)..(16): Xaa is A or G
  MOD_RES (17)..(18)..(19)..(20): Xaa is A or G or is absent

SEQ ID NO: 76892 - protein, 39 aa, Artificial Sequence; identical to SEQ ID NO: 23667
  GFR-binding peptide
  MOD_RES (33)..(34): Xaa is C or S
  MOD_RES (11)..(12)..(13)..(14)..(15): Xaa is A or G
  MOD_RES (16)..(17)..(18)..(19): Xaa is A or G or is absent

SEQ ID NO: 76893 - protein, 34 aa, Artificial Sequence; identical to SEQ ID NO: 2668
  GFR-binding peptide
  MOD_RES (31)..(31): Xaa is C or S

SEQ ID NO: 76894 - protein, 39 aa, Artificial Sequence; identical to SEQ ID NO: 2672
  GFR-binding peptide
  MOD_RES (1)..(33)..(34): Xaa is C or S

SEQ ID NO: 76895 - protein, 37 aa, Artificial Sequence; identical to SEQ ID NO: 4589
  GFR-binding peptide
  MOD_RES (1)..(35)..(36): Xaa is C or S
  MOD_RES (13)..(14)..(15)..(16)..(17): Xaa is A or G
  MOD_RES (18)..(19)..(20)..(21): Xaa is A or G or is absent

SEQ ID NO: 76896 - protein, 38 aa, Artificial Sequence; identical to SEQ ID NO: 10159
  GFR-binding peptide
  MOD_RES (34)..(35): Xaa is C or S
  MOD_RES (12)..(13)..(14)..(15)..(16): Xaa is A or G
  MOD_RES (17)..(18)..(19)..(20): Xaa is A or G or is absent

SEQ ID NO: 76897 - protein, 38 aa, Artificial Sequence; identical to SEQ ID NO: 2675
  GFR-binding peptide
  MOD_RES (2)..(4)..(38): Xaa is C or S
  MOD_RES (16)..(17)..(18)..(19)..(20): Xaa is A or G
  MOD_RES (21)..(22)..(23)..(24): Xaa is A or G or is absent

SEQ ID NO: 76898 - protein, 33 aa, Artificial Sequence; identical to SEQ ID NO: 4591
  GFR-binding peptide
  MOD_RES (31)..(31): Xaa is C or S

SEQ ID NO: 76899 - protein, 33 aa, Artificial Sequence; identical to SEQ ID NO: 4592
  GFR-binding peptide
  MOD_RES (1)..(32)..(33): Xaa is C or S

SEQ ID NO: 76900 - protein, 37 aa, Artificial Sequence; identical to SEQ ID NO: 12023
  GFR-binding peptide
  MOD_RES (1)..(3)..(35)..(36): Xaa is C or S

SEQ ID NO: 76901 - protein, 36 aa, Artificial Sequence; identical to SEQ ID NO: 2677
  GFR-binding peptide
  MOD_RES (1)..(3)..(36): Xaa is C or S
  MOD_RES (14)..(15)..(16)..(17)..(18): Xaa is A or G
  MOD_RES (19)..(20)..(21)..(22): Xaa is A or G or is absent

SEQ ID NO: 76902 - protein, 41 aa, Artificial Sequence; identical to SEQ ID NO: 4595
  GFR-binding peptide
  MOD_RES (1)..(35)..(36): Xaa is C or S
  MOD_RES (13)..(14)..(15)..(16)..(17): Xaa is A or G
  MOD_RES (18)..(19)..(20)..(21): Xaa is A or G or is absent

SEQ ID NO: 76903 - protein, 42 aa, Artificial Sequence; identical to SEQ ID NO: 56589
  GFR-binding peptide
  MOD_RES (2)..(4)..(38)..(39): Xaa is C or S
  MOD_RES (16)..(17)..(18)..(19)..(20): Xaa is A or G
  MOD_RES (21)..(22)..(23)..(24): Xaa is A or G or is absent

SEQ ID NO: 76904 - protein, 36 aa, Artificial Sequence; identical to SEQ ID NO: 4596
  GFR-binding peptide
  MOD_RES (1)..(33)..(34): Xaa is C or S

SEQ ID NO: 76905 - protein, 38 aa, Artificial Sequence; identical to SEQ ID NO: 12026
  GFR-binding peptide
  MOD_RES (1)..(3)..(37)..(38): Xaa is C or S
  MOD_RES (15)..(16)..(17)..(18)..(19): Xaa is A or G
  MOD_RES (20)..(21)..(22)..(23): Xaa is A or G or is absent

SEQ ID NO: 76906 - protein, 37 aa, Artificial Sequence; identical to SEQ ID NO: 56590
  GFR-binding peptide
  MOD_RES (2)..(36)..(37): Xaa is C or S
  MOD_RES (14)..(15)..(16)..(17)..(18): Xaa is A or G
  MOD_RES (19)..(20)..(21)..(22): Xaa is A or G or is absent

SEQ ID NO: 76907 - protein, 36 aa, Artificial Sequence; identical to SEQ ID NO: 4597
  GFR-binding peptide
  MOD_RES (33)..(34): Xaa is C or S
  MOD_RES (11)..(12)..(13)..(14)..(15): Xaa is A or G
  MOD_RES (16)..(17)..(18)..(19): Xaa is A or G or is absent

SEQ ID NO: 76908 - protein, 35 aa, Artificial Sequence; identical to SEQ ID NO: 2680
  GFR-binding peptide
  MOD_RES (1)..(3)..(35): Xaa is C or S

SEQ ID NO: 76909 - protein, 36 aa, Artificial Sequence; identical to SEQ ID NO: 2681
  GFR-binding peptide
  MOD_RES (32)..(33): Xaa is C or S

SEQ ID NO: 76910 - protein, 34 aa, Artificial Sequence; identical to SEQ ID NO: 4601
  GFR-binding peptide
  MOD_RES (1)..(3)..(34): Xaa is C or S

SEQ ID NO: 76911 - protein, 36 aa, Artificial Sequence; identical to SEQ ID NO: 12031
  GFR-binding peptide
  MOD_RES (2)..(4)..(36): Xaa is C or S

SEQ ID NO: 76912 - protein, 35 aa, Artificial Sequence
  GFR-binding peptide
  MOD_RES (1)..(33)..(34): Xaa is C or S
XAEVVMDQYNKLVVNNAADLYLISIASLRAPVXXS

SEQ ID NO: 76913 - protein, 34 aa, Artificial Sequence; identical to SEQ ID NO: 56596
  GFR-binding peptide
  MOD_RES (34)..(34): Xaa is C or S
  MOD_RES (12)..(13)..(14)..(15)..(16): Xaa is A or G
  MOD_RES (17)..(18)..(19)..(20): Xaa is A or G or is absent

SEQ ID NO: 76914 - protein, 32 aa, Artificial Sequence
  GFR-binding peptide
  MOD_RES (31)..(32): Xaa is C or S
DVVMGQYNKLIIQQKDNLYLMSIASMKTPTXX

SEQ ID NO: 76915 - protein, 40 aa, Artificial Sequence
  GFR-binding peptide
  MOD_RES (1)..(3)..(35)..(36): Xaa is C or S
XGXAEVVMDQYNKLVVNNAADLYLISIASLRAPVXXSAPA

SEQ ID NO: 76916 - protein, 33 aa, Artificial Sequence
  GFR-binding peptide
  MOD_RES (1)..(3): Xaa is C or S
XGXEEVIMQYNKLLLVRGNDLYLMSIASTKVPA

SEQ ID NO: 76917 - protein, 39 aa, Artificial Sequence; identical to SEQ ID NO: 4606
  GFR-binding peptide
  MOD_RES (2)..(34)..(35): Xaa is C or S

SEQ ID NO: 76918 - protein, 35 aa, Artificial Sequence; identical to SEQ ID NO: 2683
  GFR-binding peptide
  MOD_RES (32)..(32): Xaa is C or S

SEQ ID NO: 76919 - protein, 38 aa, Artificial Sequence; identical to SEQ ID NO: 4609
  GFR-binding peptide
  MOD_RES (1)..(36)..(37): Xaa is C or S
  MOD_RES (14)..(15)..(16)..(17)..(18): Xaa is A or G
  MOD_RES (19)..(20)..(21)..(22): Xaa is A or G or is absent

SEQ ID NO: 76920 - protein, 33 aa, Artificial Sequence
  GFR-binding peptide
  MOD_RES (31)..(32): Xaa is C or S
EEVIMQYNKLLLVRGNDLYLMSIASTKVPAXXT

SEQ ID NO: 76921 - protein, 35 aa, Artificial Sequence
  GFR-binding peptide
  MOD_RES (2)..(2): Xaa is C or S
  MOD_RES (14)..(15)..(16)..(17)..(18): Xaa is A or G
  MOD_RES (19)..(20)..(21)..(22): Xaa is A or G or is absent
AXSEVTMNQYNKLXXXXXXXXXLYLISIASMKEPV

SEQ ID NO: 76922 - protein, 43 aa, Artificial Sequence; identical to SEQ ID NO: 23694
  GFR-binding peptide
  MOD_RES (2)..(4)..(38)..(39): Xaa is C or S
  MOD_RES (16)..(17)..(18)..(19)..(20): Xaa is A or G
  MOD_RES (21)..(22)..(23)..(24): Xaa is A or G or is absent

SEQ ID NO: 76923 - protein, 36 aa, Artificial Sequence; identical to SEQ ID NO: 2695
  GFR-binding peptide
  MOD_RES (32)..(33): Xaa is C or S

SEQ ID NO: 76924 - protein, 33 aa, Artificial Sequence; identical to SEQ ID NO: 12037
  GFR-binding peptide
  MOD_RES (33)..(33): Xaa is C or S
  MOD_RES (11)..(12)..(13)..(14)..(15): Xaa is A or G
  MOD_RES (16)..(17)..(18)..(19): Xaa is A or G or is absent

SEQ ID NO: 76925 - protein, 36 aa, Artificial Sequence; identical to SEQ ID NO: 4614
  GFR-binding peptide
  MOD_RES (1)..(3)..(35)..(36): Xaa is C or S

SEQ ID NO: 76926 - protein, 37 aa, Artificial Sequence; identical to SEQ ID NO: 25707
  GFR-binding peptide
  MOD_RES (2)..(4): Xaa is C or S
  MOD_RES (16)..(17)..(18)..(19)..(20): Xaa is A or G
  MOD_RES (21)..(22)..(23)..(24): Xaa is A or G or is absent

SEQ ID NO: 76927 - protein, 37 aa, Artificial Sequence; identical to SEQ ID NO: 4616
  GFR-binding peptide
  MOD_RES (2)..(34)..(35): Xaa is C or S

SEQ ID NO: 76928 - protein, 43 aa, Artificial Sequence; identical to SEQ ID NO: 2696
  GFR-binding peptide
  MOD_RES (1)..(3)..(38)..(39): Xaa is C or S
  MOD_RES (16)..(17)..(18)..(19)..(20): Xaa is A or G
  MOD_RES (21)..(22)..(23)..(24): Xaa is A or G or is absent

SEQ ID NO: 76929 - protein, 41 aa, Artificial Sequence; identical to SEQ ID NO: 2697
  GFR-binding peptide
  MOD_RES (1)..(35)..(36): Xaa is C or S
  MOD_RES (13)..(14)..(15)..(16)..(17): Xaa is A or G
  MOD_RES (18)..(19)..(20)..(21): Xaa is A or G or is absent

SEQ ID NO: 76930 - protein, 34 aa, Artificial Sequence; identical to SEQ ID NO: 2698
  GFR-binding peptide
  MOD_RES (2)..(4): Xaa is C or S

SEQ ID NO: 76931 - protein, 38 aa, Artificial Sequence; identical to SEQ ID NO: 4620
  GFR-binding peptide
  MOD_RES (1)..(3)..(36)..(37): Xaa is C or S

SEQ ID NO: 76932 - protein, 34 aa, Artificial Sequence
  GFR-binding peptide
  MOD_RES (34)..(34): Xaa is C or S
  MOD_RES (12)..(13)..(14)..(15)..(16): Xaa is A or G
  MOD_RES (17)..(18)..(19)..(20): Xaa is A or G or is absent
AEVVMDQYNKLXXXXXXXXXLYLISIASLRAPVX

SEQ ID NO: 76933 - protein, 37 aa, Artificial Sequence; identical to SEQ ID NO: 4624
  GFR-binding peptide
  MOD_RES (1)..(3)..(35): Xaa is C or S

SEQ ID NO: 76934 - protein, 30 aa, Artificial Sequence; identical to SEQ ID NO: 2703
  GFR-binding peptide

SEQ ID NO: 76935 - protein, 36 aa, Artificial Sequence; identical to SEQ ID NO: 4625
  GFR-binding peptide
  MOD_RES (1)..(32)..(33): Xaa is C or S

SEQ ID NO: 76936 - protein, 35 aa, Artificial Sequence; identical to SEQ ID NO: 2705
  GFR-binding peptide
  MOD_RES (2)..(34)..(35): Xaa is C or S

SEQ ID NO: 76937 - protein, 34 aa, Artificial Sequence; identical to SEQ ID NO: 4626
  GFR-binding peptide
  MOD_RES (31)..(32): Xaa is C or S

SEQ ID NO: 76938 - protein, 41 aa, Artificial Sequence
  GFR-binding peptide
  MOD_RES (1)..(3)..(37)..(38): Xaa is C or S
  MOD_RES (15)..(16)..(17)..(18)..(19): Xaa is A or G
  MOD_RES (20)..(21)..(22)..(23): Xaa is A or G or is absent
XAXSEVTMNQYNKLXXXXXXXXXLYLISIASMKEPVXXPEP

SEQ ID NO: 76939 - protein, 38 aa, Artificial Sequence; identical to SEQ ID NO: 56620
  GFR-binding peptide
  MOD_RES (1)..(34)..(35): Xaa is C or S
  MOD_RES (12)..(13)..(14)..(15)..(16): Xaa is A or G
  MOD_RES (17)..(18)..(19)..(20): Xaa is A or G or is absent

SEQ ID NO: 76940 - protein, 33 aa, Artificial Sequence; identical to SEQ ID NO: 4627
  GFR-binding peptide
  MOD_RES (1)..(3): Xaa is C or S

SEQ ID NO: 76941 - protein, 33 aa, Artificial Sequence; identical to SEQ ID NO: 10191
  GFR-binding peptide
  MOD_RES (32)..(33): Xaa is C or S

SEQ ID NO: 76942 - protein, 37 aa, Artificial Sequence; identical to SEQ ID NO: 4629
  GFR-binding peptide
  MOD_RES (2)..(34)..(35): Xaa is C or S

SEQ ID NO: 76943 - protein, 39 aa, Artificial Sequence; identical to SEQ ID NO: 4630
  GFR-binding peptide
  MOD_RES (1)..(34)..(35): Xaa is C or S
  MOD_RES (12)..(13)..(14)..(15)..(16): Xaa is A or G
  MOD_RES (17)..(18)..(19)..(20): Xaa is A or G or is absent

SEQ ID NO: 76944 - protein, 37 aa, Artificial Sequence; identical to SEQ ID NO: 4631
  GFR-binding peptide
  MOD_RES (1)..(3)..(37): Xaa is C or S
  MOD_RES (15)..(16)..(17)..(18)..(19): Xaa is A or G
  MOD_RES (20)..(21)..(22)..(23): Xaa is A or G or is absent

SEQ ID NO: 76945 - protein, 34 aa, Artificial Sequence; identical to SEQ ID NO: 56623
  GFR-binding peptide
  MOD_RES (33)..(34): Xaa is C or S
  MOD_RES (11)..(12)..(13)..(14)..(15): Xaa is A or G
  MOD_RES (16)..(17)..(18)..(19): Xaa is A or G or is absent

SEQ ID NO: 76946 - protein, 42 aa, Artificial Sequence; identical to SEQ ID NO: 4632
  GFR-binding peptide
  MOD_RES (1)..(3)..(37)..(38): Xaa is C or S
  MOD_RES (15)..(16)..(17)..(18)..(19): Xaa is A or G
  MOD_RES (20)..(21)..(22)..(23): Xaa is A or G or is absent

SEQ ID NO: 76947 - protein, 41 aa, Artificial Sequence; identical to SEQ ID NO: 25720
  GFR-binding peptide
  MOD_RES (2)..(36)..(37): Xaa is C or S
  MOD_RES (14)..(15)..(16)..(17)..(18): Xaa is A or G
  MOD_RES (19)..(20)..(21)..(22): Xaa is A or G or is absent

SEQ ID NO: 76948 - protein, 34 aa, Artificial Sequence; identical to SEQ ID NO: 25721
  GFR-binding peptide
  MOD_RES (33)..(34): Xaa is C or S
  MOD_RES (11)..(12)..(13)..(14)..(15): Xaa is A or G
  MOD_RES (16)..(17)..(18)..(19): Xaa is A or G or is absent

SEQ ID NO: 76949 - protein, 34 aa, Artificial Sequence; identical to SEQ ID NO: 2709
  GFR-binding peptide
  MOD_RES (1)..(1): Xaa is C or S
  MOD_RES (13)..(14)..(15)..(16)..(17): Xaa is A or G
  MOD_RES (18)..(19)..(20)..(21): Xaa is A or G or is absent

SEQ ID NO: 76950 - protein, 39 aa, Artificial Sequence; identical to SEQ ID NO: 2710
  GFR-binding peptide
  MOD_RES (1)..(3)..(35)..(36): Xaa is C or S

SEQ ID NO: 76951 - protein, 38 aa, Artificial Sequence
  GFR-binding peptide
  MOD_RES (2)..(36)..(37): Xaa is C or S
  MOD_RES (14)..(15)..(16)..(17)..(18): Xaa is A or G
  MOD_RES (19)..(20)..(21)..(22): Xaa is A or G or is absent
GXRDVVMGQYNKLXXXXXXXXXLYLMSIASMKTPTXXP

SEQ ID NO: 76952 - protein, 38 aa, Artificial Sequence; identical to SEQ ID NO: 4633
  GFR-binding peptide
  MOD_RES (2)..(4)..(36)..(37): Xaa is C or S

SEQ ID NO: 76953 - protein, 36 aa, Artificial Sequence
  GFR-binding peptide
  MOD_RES (1)..(3)..(35)..(36): Xaa is C or S
XGXRDVVMGQYNKLIIQQKDNLYLMSIASMKTPTXX

SEQ ID NO: 76954 - protein, 34 aa, Artificial Sequence; identical to SEQ ID NO: 2714
  GFR-binding peptide
  MOD_RES (34)..(34): Xaa is C or S
  MOD_RES (12)..(13)..(14)..(15)..(16): Xaa is A or G
  MOD_RES (17)..(18)..(19)..(20): Xaa is A or G or is absent

SEQ ID NO: 76955 - protein, 34 aa, Artificial Sequence; identical to SEQ ID NO: 2715
  GFR-binding peptide
  MOD_RES (1)..(34): Xaa is C or S

SEQ ID NO: 76956 - protein, 33 aa, Artificial Sequence
  GFR-binding peptide
  MOD_RES (12)..(13)..(14)..(15)..(16): Xaa is A or G
  MOD_RES (17)..(18)..(19)..(20): Xaa is A or G or is absent
SEVTMNQYNKLXXXXXXXXXLYLISIASMKEPV

SEQ ID NO: 76957 - protein, 39 aa, Artificial Sequence; identical to SEQ ID NO: 4637
  GFR-binding peptide
  MOD_RES (2)..(4)..(36)..(37): Xaa is C or S

SEQ ID NO: 76958 - protein, 39 aa, Artificial Sequence; identical to SEQ ID NO: 2718
  GFR-binding peptide
  MOD_RES (1)..(3)..(37)..(38): Xaa is C or S
  MOD_RES (15)..(16)..(17)..(18)..(19): Xaa is A or G
  MOD_RES (20)..(21)..(22)..(23): Xaa is A or G or is absent

SEQ ID NO: 76959 - protein, 36 aa, Artificial Sequence
  GFR-binding peptide
  MOD_RES (32)..(33): Xaa is C or S
RDVVMGQYNKLIIQQKDNLYLMSIASMKTPTXXPGA

SEQ ID NO: 76960 - protein, 34 aa, Artificial Sequence; identical to SEQ ID NO: 4638
  GFR-binding peptide
  MOD_RES (2)..(2): Xaa is C or S

SEQ ID NO: 76961 - protein, 35 aa, Artificial Sequence
  GFR-binding peptide
  MOD_RES (2)..(2): Xaa is C or S
  MOD_RES (14)..(15)..(16)..(17)..(18): Xaa is A or G
  MOD_RES (19)..(20)..(21)..(22): Xaa is A or G or is absent
GXRDVVMGQYNKLXXXXXXXXXLYLMSIASMKTPT

SEQ ID NO: 76962 - protein, 35 aa, Artificial Sequence; identical to SEQ ID NO: 2719
  GFR-binding peptide
  MOD_RES (34)..(35): Xaa is C or S
  MOD_RES (12)..(13)..(14)..(15)..(16): Xaa is A or G
  MOD_RES (17)..(18)..(19)..(20): Xaa is A or G or is absent

SEQ ID NO: 76963 - protein, 32 aa, Artificial Sequence; identical to SEQ ID NO: 10203
  GFR-binding peptide
  MOD_RES (32)..(32): Xaa is C or S

SEQ ID NO: 76964 - protein, 41 aa, Artificial Sequence; identical to SEQ ID NO: 4639
  GFR-binding peptide
  MOD_RES (2)..(4)..(36)..(37): Xaa is C or S

SEQ ID NO: 76965 - protein, 38 aa, Artificial Sequence; identical to SEQ ID NO: 4641
  GFR-binding peptide
  MOD_RES (1)..(3)..(34)..(35): Xaa is C or S

SEQ ID NO: 76966 - protein, 40 aa, Artificial Sequence
  GFR-binding peptide
  MOD_RES (2)..(4)..(36)..(37): Xaa is C or S
RXAXSEVTMNQYNKLVVNKNEDLYLISIASMKEPVXXPEP

SEQ ID NO: 76967 - protein, 38 aa, Artificial Sequence; identical to SEQ ID NO: 56640
  GFR-binding peptide
  MOD_RES (2)..(33)..(34): Xaa is C or S

SEQ ID NO: 76968 - protein, 34 aa, Artificial Sequence; identical to SEQ ID NO: 56641
  GFR-binding peptide
  MOD_RES (1)..(34): Xaa is C or S
  MOD_RES (12)..(13)..(14)..(15)..(16): Xaa is A or G
  MOD_RES (17)..(18)..(19)..(20): Xaa is A or G or is absent

SEQ ID NO: 76969 - protein, 39 aa, Artificial Sequence; identical to SEQ ID NO: 4643
  GFR-binding peptide
  MOD_RES (2)..(35)..(36): Xaa is C or S
  MOD_RES (13)..(14)..(15)..(16)..(17): Xaa is A or G
  MOD_RES (18)..(19)..(20)..(21): Xaa is A or G or is absent

SEQ ID NO: 76970 - protein, 38 aa, Artificial Sequence; identical to SEQ ID NO: 56642
  GFR-binding peptide
  MOD_RES (1)..(35)..(36): Xaa is C or S
  MOD_RES (13)..(14)..(15)..(16)..(17): Xaa is A or G
  MOD_RES (18)..(19)..(20)..(21): Xaa is A or G or is absent

SEQ ID NO: 76971 - protein, 34 aa, Artificial Sequence; identical to SEQ ID NO: 25734
  GFR-binding peptide
  MOD_RES (31)..(32): Xaa is C or S

SEQ ID NO: 76972 - protein, 38 aa, Artificial Sequence; identical to SEQ ID NO: 4645
  GFR-binding peptide
  MOD_RES (1)..(34)..(35): Xaa is C or S
  MOD_RES (12)..(13)..(14)..(15)..(16): Xaa is A or G
  MOD_RES (17)..(18)..(19)..(20): Xaa is A or G or is absent

SEQ ID NO: 76973 - protein, 33 aa, Artificial Sequence; identical to SEQ ID NO: 25738
  GFR-binding peptide
  MOD_RES (1)..(33): Xaa is C or S

SEQ ID NO: 76974 - protein, 36 aa, Artificial Sequence; identical to SEQ ID NO: 2728
  GFR-binding peptide
  MOD_RES (2)..(35)..(36): Xaa is C or S
  MOD_RES (13)..(14)..(15)..(16)..(17): Xaa is A or G
  MOD_RES (18)..(19)..(20)..(21): Xaa is A or G or is absent

SEQ ID NO: 76975 - protein, 40 aa, Artificial Sequence; identical to SEQ ID NO: 12079
  GFR-binding peptide
  MOD_RES (1)..(3)..(37)..(38): Xaa is C or S
  MOD_RES (15)..(16)..(17)..(18)..(19): Xaa is A or G
  MOD_RES (20)..(21)..(22)..(23): Xaa is A or G or is absent

SEQ ID NO: 76976 - protein, 39 aa, Artificial Sequence; identical to SEQ ID NO: 56648
  GFR-binding peptide
  MOD_RES (1)..(33)..(34): Xaa is C or S

SEQ ID NO: 76977 - protein, 38 aa, Artificial Sequence; identical to SEQ ID NO: 4649
  GFR-binding peptide
  MOD_RES (1)..(3)..(34)..(35): Xaa is C or S

SEQ ID NO: 76978 - protein, 35 aa, Artificial Sequence; identical to SEQ ID NO: 23722
  GFR-binding peptide
  MOD_RES (1)..(3)..(35): Xaa is C or S

SEQ ID NO: 76979 - protein, 35 aa, Artificial Sequence; identical to SEQ ID NO: 4652
  GFR-binding peptide
  MOD_RES (33)..(34): Xaa is C or S
  MOD_RES (11)..(12)..(13)..(14)..(15): Xaa is A or G
  MOD_RES (16)..(17)..(18)..(19): Xaa is A or G or is absent

SEQ ID NO: 76980 - protein, 31 aa, Artificial Sequence
  GFR-binding peptide
RDVVMGQYNKLIIQQKDNLYLMSIASMKTPT

SEQ ID NO: 76981 - protein, 41 aa, Artificial Sequence; identical to SEQ ID NO: 10215
  GFR-binding peptide
  MOD_RES (1)..(35)..(36): Xaa is C or S
  MOD_RES (13)..(14)..(15)..(16)..(17): Xaa is A or G
  MOD_RES (18)..(19)..(20)..(21): Xaa is A or G or is absent

SEQ ID NO: 76982 - protein, 36 aa, Artificial Sequence; identical to SEQ ID NO: 2734
  GFR-binding peptide
  MOD_RES (2)..(34)..(35): Xaa is C or S

SEQ ID NO: 76983 - protein, 36 aa, Artificial Sequence; identical to SEQ ID NO: 2735
  GFR-binding peptide
  MOD_RES (2)..(34)..(35): Xaa is C or S

SEQ ID NO: 76984 - protein, 36 aa, Artificial Sequence; identical to SEQ ID NO: 25749
  GFR-binding peptide
  MOD_RES (1)..(35)..(36): Xaa is C or S
  MOD_RES (13)..(14)..(15)..(16)..(17): Xaa is A or G
  MOD_RES (18)..(19)..(20)..(21): Xaa is A or G or is absent

SEQ ID NO: 76985 - protein, 32 aa, Artificial Sequence; identical to SEQ ID NO: 2736
  GFR-binding peptide
  MOD_RES (31)..(32): Xaa is C or S

SEQ ID NO: 76986 - protein, 30 aa, Artificial Sequence; identical to SEQ ID NO: 2738
  GFR-binding peptide

SEQ ID NO: 76987 - protein, 40 aa, Artificial Sequence; identical to SEQ ID NO: 2739
  GFR-binding peptide
  MOD_RES (2)..(4)..(36)..(37): Xaa is C or S

SEQ ID NO: 76988 - protein, 33 aa, Artificial Sequence; identical to SEQ ID NO: 2740
  GFR-binding peptide
  MOD_RES (32)..(33): Xaa is C or S

SEQ ID NO: 76989 - protein, 38 aa, Artificial Sequence; identical to SEQ ID NO: 60327
  GFR-binding peptide
  MOD_RES (2)..(34)..(35): Xaa is C or S

SEQ ID NO: 76990 - protein, 34 aa, Artificial Sequence; identical to SEQ ID NO: 4658
  GFR-binding peptide
  MOD_RES (34)..(34): Xaa is C or S
  MOD_RES (12)..(13)..(14)..(15)..(16): Xaa is A or G
  MOD_RES (17)..(18)..(19)..(20): Xaa is A or G or is absent

SEQ ID NO: 76991 - protein, 36 aa, Artificial Sequence
  GFR-binding peptide
  MOD_RES (2)..(36): Xaa is C or S
  MOD_RES (14)..(15)..(16)..(17)..(18): Xaa is A or G
  MOD_RES (19)..(20)..(21)..(22): Xaa is A or G or is absent
GXESVAMGQYNKLXXXXXXXXXLYLISIASLKTPVX

SEQ ID NO: 76992 - protein, 39 aa, Artificial Sequence; identical to SEQ ID NO: 4659
  GFR-binding peptide
  MOD_RES (2)..(37)..(38): Xaa is C or S
  MOD_RES (15)..(16)..(17)..(18)..(19): Xaa is A or G
  MOD_RES (20)..(21)..(22)..(23): Xaa is A or G or is absent

SEQ ID NO: 76993 - protein, 33 aa, Artificial Sequence; identical to SEQ ID NO: 2741
  GFR-binding peptide
  MOD_RES (1)..(33): Xaa is C or S

SEQ ID NO: 76994 - protein, 36 aa, Artificial Sequence
  GFR-binding peptide
  MOD_RES (32)..(33): Xaa is C or S
ESVAMGQYNKLYTVVGKDLYLISIASLKTPVXXAKS

SEQ ID NO: 76995 - protein, 32 aa, Artificial Sequence; identical to SEQ ID NO: 10224
  GFR-binding peptide
  MOD_RES (11)..(12)..(13)..(14)..(15): Xaa is A or G
  MOD_RES (16)..(17)..(18)..(19): Xaa is A or G or is absent

SEQ ID NO: 76996 - protein, 31 aa, Artificial Sequence; identical to SEQ ID NO: 4662
  GFR-binding peptide

SEQ ID NO: 76997 - protein, 35 aa, Artificial Sequence; identical to SEQ ID NO: 4663
  GFR-binding peptide
  MOD_RES (33)..(34): Xaa is C or S
  MOD_RES (11)..(12)..(13)..(14)..(15): Xaa is A or G
  MOD_RES (16)..(17)..(18)..(19): Xaa is A or G or is absent

SEQ ID NO: 76998 - protein, 31 aa, Artificial Sequence; identical to SEQ ID NO: 2743
  GFR-binding peptide
  MOD_RES (31)..(31): Xaa is C or S

SEQ ID NO: 76999 - protein, 35 aa, Artificial Sequence; identical to SEQ ID NO: 2745
  GFR-binding peptide
  MOD_RES (1)..(33)..(34): Xaa is C or S

SEQ ID NO: 77000 - protein, 36 aa, Artificial Sequence
  GFR-binding peptide
  MOD_RES (1)..(33)..(34): Xaa is C or S
XRDVVMGQYNKLIIQQKDNLYLMSIASMKTPTXXPG

SEQ ID NO: 77001 - protein, 40 aa, Artificial Sequence; identical to SEQ ID NO: 4666
  GFR-binding peptide
  MOD_RES (1)..(3)..(35)..(36): Xaa is C or S

SEQ ID NO: 77002 - protein, 31 aa, Artificial Sequence; identical to SEQ ID NO: 2746
  GFR-binding peptide
  MOD_RES (1)..(1): Xaa is C or S

SEQ ID NO: 77003 - protein, 38 aa, Artificial Sequence; identical to SEQ ID NO: 4667
  GFR-binding peptide
  MOD_RES (33)..(34): Xaa is C or S
  MOD_RES (11)..(12)..(13)..(14)..(15): Xaa is A or G
  MOD_RES (16)..(17)..(18)..(19): Xaa is A or G or is absent

SEQ ID NO: 77004 - protein, 36 aa, Artificial Sequence; identical to SEQ ID NO: 56670
  GFR-binding peptide
  MOD_RES (1)..(3)..(34)..(35): Xaa is C or S

SEQ ID NO: 77005 - protein, 39 aa, Artificial Sequence; identical to SEQ ID NO: 2747
  GFR-binding peptide
  MOD_RES (1)..(34)..(35): Xaa is C or S
  MOD_RES (12)..(13)..(14)..(15)..(16): Xaa is A or G
  MOD_RES (17)..(18)..(19)..(20): Xaa is A or G or is absent

SEQ ID NO: 77006 - protein, 38 aa, Artificial Sequence; identical to SEQ ID NO: 60340
  GFR-binding peptide
  MOD_RES (34)..(35): Xaa is C or S
  MOD_RES (12)..(13)..(14)..(15)..(16): Xaa is A or G
  MOD_RES (17)..(18)..(19)..(20): Xaa is A or G or is absent

SEQ ID NO: 77007 - protein, 38 aa, Artificial Sequence; identical to SEQ ID NO: 56673
  GFR-binding peptide
  MOD_RES (2)..(35)..(36): Xaa is C or S
  MOD_RES (13)..(14)..(15)..(16)..(17): Xaa is A or G
  MOD_RES (18)..(19)..(20)..(21): Xaa is A or G or is absent

SEQ ID NO: 77008 - protein, 38 aa, Artificial Sequence
  GFR-binding peptide
  MOD_RES (2)..(4)..(38): Xaa is C or S
  MOD_RES (16)..(17)..(18)..(19)..(20): Xaa is A or G
  MOD_RES (21)..(22)..(23)..(24): Xaa is A or G or is absent
RXGXAEVVMDQYNKLXXXXXXXXXLYLISIASLRAPVX

SEQ ID NO: 77009 - protein, 39 aa, Artificial Sequence; identical to SEQ ID NO: 56674
  GFR-binding peptide
  MOD_RES (2)..(4)..(38)..(39): Xaa is C or S
  MOD_RES (16)..(17)..(18)..(19)..(20): Xaa is A or G
  MOD_RES (21)..(22)..(23)..(24): Xaa is A or G or is absent

SEQ ID NO: 77010 - protein, 40 aa, Artificial Sequence; identical to SEQ ID NO: 56675
  GFR-binding peptide
  MOD_RES (1)..(3)..(37)..(38): Xaa is C or S
  MOD_RES (15)..(16)..(17)..(18)..(19): Xaa is A or G
  MOD_RES (20)..(21)..(22)..(23): Xaa is A or G or is absent

SEQ ID NO: 77011 - protein, 38 aa, Artificial Sequence; identical to SEQ ID NO: 63887
  GFR-binding peptide
  MOD_RES (33)..(34): Xaa is C or S
  MOD_RES (11)..(12)..(13)..(14)..(15): Xaa is A or G
  MOD_RES (16)..(17)..(18)..(19): Xaa is A or G or is absent

SEQ ID NO: 77012 - protein, 38 aa, Artificial Sequence
  GFR-binding peptide
  MOD_RES (1)..(35)..(36): Xaa is C or S
  MOD_RES (13)..(14)..(15)..(16)..(17): Xaa is A or G
  MOD_RES (18)..(19)..(20)..(21): Xaa is A or G or is absent
XAEVVMDQYNKLXXXXXXXXXLYLISIASLRAPVXXSA

SEQ ID NO: 77013 - protein, 33 aa, Artificial Sequence; identical to SEQ ID NO: 4674
  GFR-binding peptide
  MOD_RES (1)..(1): Xaa is C or S
  MOD_RES (12)..(13)..(14)..(15)..(16): Xaa is A or G
  MOD_RES (17)..(18)..(19)..(20): Xaa is A or G or is absent

SEQ ID NO: 77014 - protein, 41 aa, Artificial Sequence; identical to SEQ ID NO: 2751
  GFR-binding peptide
  MOD_RES (2)..(4)..(37)..(38): Xaa is C or S
  MOD_RES (15)..(16)..(17)..(18)..(19): Xaa is A or G
  MOD_RES (20)..(21)..(22)..(23): Xaa is A or G or is absent

SEQ ID NO: 77015 - protein, 32 aa, Artificial Sequence
  GFR-binding peptide
  MOD_RES (1)..(1): Xaa is C or S
XRDVVMGQYNKLIIQQKDNLYLMSIASMKTPT

SEQ ID NO: 77016 - protein, 39 aa, Artificial Sequence; identical to SEQ ID NO: 2753
  GFR-binding peptide
  MOD_RES (33)..(34): Xaa is C or S
  MOD_RES (11)..(12)..(13)..(14)..(15): Xaa is A or G
  MOD_RES (16)..(17)..(18)..(19): Xaa is A or G or is absent

SEQ ID NO: 77017 - protein, 36 aa, Artificial Sequence; identical to SEQ ID NO: 2754
  GFR-binding peptide
  MOD_RES (2)..(4): Xaa is C or S

SEQ ID NO: 77018 - protein, 36 aa, Artificial Sequence; identical to SEQ ID NO: 12104
  GFR-binding peptide
  MOD_RES (1)..(35)..(36): Xaa is C or S
  MOD_RES (13)..(14)..(15)..(16)..(17): Xaa is A or G
  MOD_RES (18)..(19)..(20)..(21): Xaa is A or G or is absent

SEQ ID NO: 77019 - protein, 39 aa, Artificial Sequence
  GFR-binding peptide
  MOD_RES (2)..(36)..(37): Xaa is C or S
  MOD_RES (14)..(15)..(16)..(17)..(18): Xaa is A or G
  MOD_RES (19)..(20)..(21)..(22): Xaa is A or G or is absent
GXRDVVMGQYNKLXXXXXXXXXLYLMSIASMKTPTXXPG

SEQ ID NO: 77020 - protein, 39 aa, Artificial Sequence
  GFR-binding peptide
  MOD_RES (33)..(34): Xaa is C or S
  MOD_RES (11)..(12)..(13)..(14)..(15): Xaa is A or G
  MOD_RES (16)..(17)..(18)..(19): Xaa is A or G or is absent
EVTMNQYNKLXXXXXXXXXLYLISIASMKEPVXXPEPIG

SEQ ID NO: 77021 - protein, 37 aa, Artificial Sequence; identical to SEQ ID NO: 2756
  GFR-binding peptide
  MOD_RES (2)..(35)..(36): Xaa is C or S

SEQ ID NO: 77022 - protein, 33 aa, Artificial Sequence; identical to SEQ ID NO: 2757
  GFR-binding peptide
  MOD_RES (1)..(33): Xaa is C or S

SEQ ID NO: 77023 - protein, 35 aa, Artificial Sequence; identical to SEQ ID NO: 12106
  GFR-binding peptide
  MOD_RES (2)..(34)..(35): Xaa is C or S

SEQ ID NO: 77024 - protein, 32 aa, Artificial Sequence
  GFR-binding peptide
  MOD_RES (32)..(32): Xaa is C or S
AEVVMDQYNKLVVNNAADLYLISIASLRAPVX

SEQ ID NO: 77025 - protein, 36 aa, Artificial Sequence; identical to SEQ ID NO: 4682
  GFR-binding peptide
  MOD_RES (2)..(33)..(34): Xaa is C or S

SEQ ID NO: 77026 - protein, 39 aa, Artificial Sequence
  GFR-binding peptide
  MOD_RES (2)..(4)..(36)..(37): Xaa is C or S
RXAXSEVTMNQYNKLVVNKNEDLYLISIASMKEPVXXPE

SEQ ID NO: 77027 - protein, 32 aa, Artificial Sequence; identical to SEQ ID NO: 4685
  GFR-binding peptide
  MOD_RES (1)..(32): Xaa is C or S

SEQ ID NO: 77028 - protein, 34 aa, Artificial Sequence
  GFR-binding peptide
  MOD_RES (34)..(34): Xaa is C or S
  MOD_RES (12)..(13)..(14)..(15)..(16): Xaa is A or G
  MOD_RES (17)..(18)..(19)..(20): Xaa is A or G or is absent
RDVVMGQYNKLXXXXXXXXXLYLMSIASMKTPTX

SEQ ID NO: 77029 - protein, 38 aa, Artificial Sequence; identical to SEQ ID NO: 56688
  GFR-binding peptide
  MOD_RES (1)..(32)..(33): Xaa is C or S

SEQ ID NO: 77030 - protein, 36 aa, Artificial Sequence; identical to SEQ ID NO: 4686
  GFR-binding peptide
  MOD_RES (2)..(35)..(36): Xaa is C or S
  MOD_RES (13)..(14)..(15)..(16)..(17): Xaa is A or G
  MOD_RES (18)..(19)..(20)..(21): Xaa is A or G or is absent

SEQ ID NO: 77031 - protein, 38 aa, Artificial Sequence
  GFR-binding peptide
  MOD_RES (1)..(34)..(35): Xaa is C or S
  MOD_RES (12)..(13)..(14)..(15)..(16): Xaa is A or G
  MOD_RES (17)..(18)..(19)..(20): Xaa is A or G or is absent
XEEVIMQYNKLXXXXXXXXXLYLMSIASTKVPAXXTSP

SEQ ID NO: 77032 - protein, 37 aa, Artificial Sequence
  GFR-binding peptide
  MOD_RES (34)..(35): Xaa is C or S
  MOD_RES (12)..(13)..(14)..(15)..(16): Xaa is A or G
  MOD_RES (17)..(18)..(19)..(20): Xaa is A or G or is absent
SEVTMNQYNKLXXXXXXXXXLYLISIASMKEPVXXPE

SEQ ID NO: 77033 - protein, 36 aa, Artificial Sequence
  GFR-binding peptide
  MOD_RES (1)..(33)..(34): Xaa is C or S
XAEVVMDQYNKLVVNNAADLYLISIASLRAPVXXSA

SEQ ID NO: 77034 - protein, 37 aa, Artificial Sequence; identical to SEQ ID NO: 12118
  GFR-binding peptide
  MOD_RES (1)..(3)..(37): Xaa is C or S
  MOD_RES (15)..(16)..(17)..(18)..(19): Xaa is A or G
  MOD_RES (20)..(21)..(22)..(23): Xaa is A or G or is absent

SEQ ID NO: 77035 - protein, 35 aa, Artificial Sequence; identical to SEQ ID NO: 56700
  GFR-binding peptide
  MOD_RES (31)..(32): Xaa is C or S

SEQ ID NO: 77036 - protein, 40 aa, Artificial Sequence; identical to SEQ ID NO: 10251
  GFR-binding peptide
  MOD_RES (2)..(36)..(37): Xaa is C or S
  MOD_RES (14)..(15)..(16)..(17)..(18): Xaa is A or G
  MOD_RES (19)..(20)..(21)..(22): Xaa is A or G or is absent

SEQ ID NO: 77037 - protein, 39 aa, Artificial Sequence; identical to SEQ ID NO: 58660
  GFR-binding peptide
  MOD_RES (2)..(4)..(38)..(39): Xaa is C or S
  MOD_RES (16)..(17)..(18)..(19)..(20): Xaa is A or G
  MOD_RES (21)..(22)..(23)..(24): Xaa is A or G or is absent

SEQ ID NO: 77038 - protein, 37 aa, Artificial Sequence; identical to SEQ ID NO: 2766
  GFR-binding peptide
  MOD_RES (1)..(35)..(36): Xaa is C or S
  MOD_RES (13)..(14)..(15)..(16)..(17): Xaa is A or G
  MOD_RES (18)..(19)..(20)..(21): Xaa is A or G or is absent

SEQ ID NO: 77039 - protein, 33 aa, Artificial Sequence; identical to SEQ ID NO: 56708
  GFR-binding peptide
  MOD_RES (2)..(33): Xaa is C or S

SEQ ID NO: 77040 - protein, 36 aa, Artificial Sequence; identical to SEQ ID NO: 4696
  GFR-binding peptide
  MOD_RES (1)..(34)..(35): Xaa is C or S
  MOD_RES (12)..(13)..(14)..(15)..(16): Xaa is A or G
  MOD_RES (17)..(18)..(19)..(20): Xaa is A or G or is absent

SEQ ID NO: 77041 - protein, 40 aa, Artificial Sequence; identical to SEQ ID NO: 2769
  GFR-binding peptide
  MOD_RES (1)..(34)..(35): Xaa is C or S
  MOD_RES (12)..(13)..(14)..(15)..(16): Xaa is A or G
  MOD_RES (17)..(18)..(19)..(20): Xaa is A or G or is absent

SEQ ID NO: 77042 - protein, 32 aa, Artificial Sequence; identical to SEQ ID NO: 2771
  GFR-binding peptide
  MOD_RES (11)..(12)..(13)..(14)..(15): Xaa is A or G
  MOD_RES (16)..(17)..(18)..(19): Xaa is A or G or is absent

SEQ ID NO: 77043 - protein, 39 aa, Artificial Sequence; identical to SEQ ID NO: 4698
  GFR-binding peptide
  MOD_RES (1)..(33)..(34): Xaa is C or S

SEQ ID NO: 77044 - protein, 33 aa, Artificial Sequence; identical to SEQ ID NO: 23765
  GFR-binding peptide
  MOD_RES (12)..(13)..(14)..(15)..(16): Xaa is A or G
  MOD_RES (17)..(18)..(19)..(20): Xaa is A or G or is absent

SEQ ID NO: 77045 - protein, 34 aa, Artificial Sequence; identical to SEQ ID NO: 4699
  GFR-binding peptide
  MOD_RES (2)..(33)..(34): Xaa is C or S

SEQ ID NO: 77046 - protein, 37 aa, Artificial Sequence; identical to SEQ ID NO: 4700
  GFR-binding peptide
  MOD_RES (2)..(36)..(37): Xaa is C or S
  MOD_RES (14)..(15)..(16)..(17)..(18): Xaa is A or G
  MOD_RES (19)..(20)..(21)..(22): Xaa is A or G or is absent

SEQ ID NO: 77047 - protein, 33 aa, Artificial Sequence; identical to SEQ ID NO: 2773
  GFR-binding peptide
  MOD_RES (1)..(33): Xaa is C or S

SEQ ID NO: 77048 - protein, 38 aa, Artificial Sequence; identical to SEQ ID NO: 4701
  GFR-binding peptide
  MOD_RES (1)..(33)..(34): Xaa is C or S

SEQ ID NO: 77049 - protein, 33 aa, Artificial Sequence
  GFR-binding peptide
  MOD_RES (12)..(13)..(14)..(15)..(16): Xaa is A or G
  MOD_RES (17)..(18)..(19)..(20): Xaa is A or G or is absent
ESVAMGQYNKLXXXXXXXXXLYLISIASLKTPV

SEQ ID NO: 77050 - protein, 36 aa, Artificial Sequence; identical to SEQ ID NO: 4702
  GFR-binding peptide
  MOD_RES (1)..(33)..(34): Xaa is C or S

SEQ ID NO: 77051 - protein, 40 aa, Artificial Sequence; identical to SEQ ID NO: 56718
  GFR-binding peptide
  MOD_RES (1)..(3)..(36)..(37): Xaa is C or S
  MOD_RES (14)..(15)..(16)..(17)..(18): Xaa is A or G
  MOD_RES (19)..(20)..(21)..(22): Xaa is A or G or is absent

SEQ ID NO: 77052 - protein, 37 aa, Artificial Sequence; identical to SEQ ID NO: 2780
  GFR-binding peptide
  MOD_RES (1)..(34)..(35): Xaa is C or S
  MOD_RES (12)..(13)..(14)..(15)..(16): Xaa is A or G
  MOD_RES (17)..(18)..(19)..(20): Xaa is A or G or is absent

SEQ ID NO: 77053 - protein, 31 aa, Artificial Sequence; identical to SEQ ID NO: 4704
  GFR-binding peptide
  MOD_RES (31)..(31): Xaa is C or S

SEQ ID NO: 77054 - protein, 34 aa, Artificial Sequence; identical to SEQ ID NO: 4705
  GFR-binding peptide
  MOD_RES (2)..(34): Xaa is C or S

SEQ ID NO: 77055 - protein, 36 aa, Artificial Sequence; identical to SEQ ID NO: 4708
  GFR-binding peptide
  MOD_RES (1)..(35)..(36): Xaa is C or S
  MOD_RES (13)..(14)..(15)..(16)..(17): Xaa is A or G
  MOD_RES (18)..(19)..(20)..(21): Xaa is A or G or is absent

SEQ ID NO: 77056 - protein, 39 aa, Artificial Sequence; identical to SEQ ID NO: 4709
  GFR-binding peptide
  MOD_RES (2)..(4)..(36)..(37): Xaa is C or S

SEQ ID NO: 77057 - protein, 35 aa, Artificial Sequence; identical to SEQ ID NO: 4710
  GFR-binding peptide
  MOD_RES (1)..(3)..(34)..(35): Xaa is C or S

SEQ ID NO: 77058 - protein, 35 aa, Artificial Sequence
  GFR-binding peptide
  MOD_RES (1)..(3)..(35): Xaa is C or S
XGXESVAMGQYNKLYTVVGKDLYLISIASLKTPVX

SEQ ID NO: 77059 - protein, 35 aa, Artificial Sequence
  GFR-binding peptide
  MOD_RES (31)..(32): Xaa is C or S
EVTMNQYNKLVVNKNEDLYLISIASMKEPVXXPEP

SEQ ID NO: 77060 - protein, 38 aa, Artificial Sequence; identical to SEQ ID NO: 4711
  GFR-binding peptide
  MOD_RES (2)..(4)..(35)..(36): Xaa is C or S

SEQ ID NO: 77061 - protein, 34 aa, Artificial Sequence; identical to SEQ ID NO: 4712
  GFR-binding peptide
  MOD_RES (1)..(33)..(34): Xaa is C or S

SEQ ID NO: 77062 - protein, 32 aa, Artificial Sequence; identical to SEQ ID NO: 2782
  GFR-binding peptide
  MOD_RES (32)..(32): Xaa is C or S

SEQ ID NO: 77063 - protein, 31 aa, Artificial Sequence; identical to SEQ ID NO: 56733
  GFR-binding peptide
  MOD_RES (31)..(31): Xaa is C or S

SEQ ID NO: 77064 - protein, 41 aa, Artificial Sequence; identical to SEQ ID NO: 2786
  GFR-binding peptide
  MOD_RES (1)..(3)..(37)..(38): Xaa is C or S
  MOD_RES (15)..(16)..(17)..(18)..(19): Xaa is A or G
  MOD_RES (20)..(21)..(22)..(23): Xaa is A or G or is absent

SEQ ID NO: 77065 - protein, 38 aa, Artificial Sequence; identical to SEQ ID NO: 4716
  GFR-binding peptide
  MOD_RES (2)..(37)..(38): Xaa is C or S
  MOD_RES (15)..(16)..(17)..(18)..(19): Xaa is A or G
  MOD_RES (20)..(21)..(22)..(23): Xaa is A or G or is absent

SEQ ID NO: 77066 - protein, 35 aa, Artificial Sequence; identical to SEQ ID NO: 25797
  GFR-binding peptide
  MOD_RES (2)..(4): Xaa is C or S

SEQ ID NO: 77067 - protein, 32 aa, Artificial Sequence; identical to SEQ ID NO: 25798
  GFR-binding peptide
  MOD_RES (31)..(32): Xaa is C or S

SEQ ID NO: 77068 - protein, 44 aa, Artificial Sequence; identical to SEQ ID NO: 4717
  GFR-binding peptide
  MOD_RES (2)..(4)..(38): Xaa is C or S
  MOD_RES (16)..(17)..(18)..(19)..(20): Xaa is A or G
  MOD_RES (21)..(22)..(23)..(24): Xaa is A or G or is absent

SEQ ID NO: 77069 - protein, 35 aa, Artificial Sequence; identical to SEQ ID NO: 2789
  GFR-binding peptide
  MOD_RES (33)..(34): Xaa is C or S
  MOD_RES (11)..(12)..(13)..(14)..(15): Xaa is A or G
  MOD_RES (16)..(17)..(18)..(19): Xaa is A or G or is absent

SEQ ID NO: 77070 - protein, 36 aa, Artificial Sequence; identical to SEQ ID NO: 4719
  GFR-binding peptide
  MOD_RES (1)..(3)..(35)..(36): Xaa is C or S

SEQ ID NO: 77071 - protein, 37 aa, Artificial Sequence; identical to SEQ ID NO: 2791
  GFR-binding peptide
  MOD_RES (1)..(3)..(34)..(35): Xaa is C or S

SEQ ID NO: 77072 - protein, 36 aa, Artificial Sequence; identical to SEQ ID NO: 2792
  GFR-binding peptide
  MOD_RES (32)..(33): Xaa is C or S

SEQ ID NO: 77073 - protein, 41 aa, Artificial Sequence; identical to SEQ ID NO: 4720
  GFR-binding peptide
  MOD_RES (1)..(3)..(37)..(38): Xaa is C or S
  MOD_RES (15)..(16)..(17)..(18)..(19): Xaa is A or G
  MOD_RES (20)..(21)..(22)..(23): Xaa is A or G or is absent

SEQ ID NO: 77074 - protein, 32 aa, Artificial Sequence; identical to SEQ ID NO: 2794
  GFR-binding peptide
  MOD_RES (31)..(32): Xaa is C or S

SEQ ID NO: 77075 - protein, 37 aa, Artificial Sequence; identical to SEQ ID NO: 25802
  GFR-binding peptide
  MOD_RES (31)..(32): Xaa is C or S

SEQ ID NO: 77076 - protein, 37 aa, Artificial Sequence; identical to SEQ ID NO: 4723
  GFR-binding peptide
  MOD_RES (1)..(32)..(33): Xaa is C or S

SEQ ID NO: 77077 - protein, 43 aa, Artificial Sequence; identical to SEQ ID NO: 2795
  GFR-binding peptide
  MOD_RES (2)..(4)..(38)..(39): Xaa is C or S
  MOD_RES (16)..(17)..(18)..(19)..(20): Xaa is A or G
  MOD_RES (21)..(22)..(23)..(24): Xaa is A or G or is absent

SEQ ID NO: 77078 - protein, 33 aa, Artificial Sequence; identical to SEQ ID NO: 4724
  GFR-binding peptide
  MOD_RES (33)..(33): Xaa is C or S
  MOD_RES (11)..(12)..(13)..(14)..(15): Xaa is A or G
  MOD_RES (16)..(17)..(18)..(19): Xaa is A or G or is absent

SEQ ID NO: 77079 - protein, 37 aa, Artificial Sequence; identical to SEQ ID NO: 25806
  GFR-binding peptide
  MOD_RES (1)..(3)..(35)..(36): Xaa is C or S

SEQ ID NO: 77080 - protein, 41 aa, Artificial Sequence; identical to SEQ ID NO: 4727
  GFR-binding peptide
  MOD_RES (2)..(4)..(38)..(39): Xaa is C or S
  MOD_RES (16)..(17)..(18)..(19)..(20): Xaa is A or G
  MOD_RES (21)..(22)..(23)..(24): Xaa is A or G or is absent

SEQ ID NO: 77081 - protein, 35 aa, Artificial Sequence
  GFR-binding peptide
  MOD_RES (33)..(34): Xaa is C or S
  MOD_RES (11)..(12)..(13)..(14)..(15): Xaa is A or G
  MOD_RES (16)..(17)..(18)..(19): Xaa is A or G or is absent
EEVIMQYNKLXXXXXXXXXLYLMSIASTKVPAXXT

SEQ ID NO: 77082 - protein, 36 aa, Artificial Sequence; identical to SEQ ID NO: 25809
  GFR-binding peptide
  MOD_RES (2)..(36): Xaa is C or S
  MOD_RES (14)..(15)..(16)..(17)..(18): Xaa is A or G
  MOD_RES (19)..(20)..(21)..(22): Xaa is A or G or is absent

SEQ ID NO: 77083 - protein, 37 aa, Artificial Sequence; identical to SEQ ID NO: 4731
  GFR-binding peptide
  MOD_RES (32)..(33): Xaa is C or S

SEQ ID NO: 77084 - protein, 34 aa, Artificial Sequence; identical to SEQ ID NO: 2801
  GFR-binding peptide
  MOD_RES (2)..(34): Xaa is C or S

SEQ ID NO: 77085 - protein, 37 aa, Artificial Sequence; identical to SEQ ID NO: 2802
  GFR-binding peptide
  MOD_RES (33)..(34): Xaa is C or S

SEQ ID NO: 77086 - protein, 38 aa, Artificial Sequence; identical to SEQ ID NO: 4733
  GFR-binding peptide
  MOD_RES (2)..(4)..(37)..(38): Xaa is C or S
  MOD_RES (15)..(16)..(17)..(18)..(19): Xaa is A or G
  MOD_RES (20)..(21)..(22)..(23): Xaa is A or G or is absent

SEQ ID NO: 77087 - protein, 33 aa, Artificial Sequence; identical to SEQ ID NO: 25813
  GFR-binding peptide
  MOD_RES (32)..(33): Xaa is C or S

SEQ ID NO: 77088 - protein, 32 aa, Artificial Sequence; identical to SEQ ID NO: 4735
  GFR-binding peptide
  MOD_RES (31)..(32): Xaa is C or S

SEQ ID NO: 77089 - protein, 34 aa, Artificial Sequence; identical to SEQ ID NO: 4737
  GFR-binding peptide
  MOD_RES (1)..(3): Xaa is C or S

SEQ ID NO: 77090 - protein, 37 aa, Artificial Sequence
  GFR-binding peptide
  MOD_RES (1)..(32)..(33): Xaa is C or S
XEEVIMQYNKLLLVRGNDLYLMSIASTKVPAXXTSPV

SEQ ID NO: 77091 - protein, 40 aa, Artificial Sequence; identical to SEQ ID NO: 2809
  GFR-binding peptide
  MOD_RES (1)..(35)..(36): Xaa is C or S
  MOD_RES (13)..(14)..(15)..(16)..(17): Xaa is A or G
  MOD_RES (18)..(19)..(20)..(21): Xaa is A or G or is absent

SEQ ID NO: 77092 - protein, 34 aa, Artificial Sequence; identical to SEQ ID NO: 4738
  GFR-binding peptide
  MOD_RES (34)..(34): Xaa is C or S
  MOD_RES (12)..(13)..(14)..(15)..(16): Xaa is A or G
  MOD_RES (17)..(18)..(19)..(20): Xaa is A or G or is absent

SEQ ID NO: 77093 - protein, 35 aa, Artificial Sequence; identical to SEQ ID NO: 2810
  GFR-binding peptide
  MOD_RES (32)..(33): Xaa is C or S

SEQ ID NO: 77094 - protein, 40 aa, Artificial Sequence
  GFR-binding peptide
  MOD_RES (1)..(3)..(35)..(36): Xaa is C or S
XGXRDVVMGQYNKLIIQQKDNLYLMSIASMKTPTXXPGAS

SEQ ID NO: 77095 - protein, 38 aa, Artificial Sequence; identical to SEQ ID NO: 10287
  GFR-binding peptide
  MOD_RES (32)..(33): Xaa is C or S

SEQ ID NO: 77096 - protein, 40 aa, Artificial Sequence
  GFR-binding peptide
  MOD_RES (1)..(3)..(35)..(36): Xaa is C or S
XAXSEVTMNQYNKLVVNKNEDLYLISIASMKEPVXXPEPI

SEQ ID NO: 77097 - protein, 38 aa, Artificial Sequence; identical to SEQ ID NO: 12169
  GFR-binding peptide
  MOD_RES (1)..(35)..(36): Xaa is C or S
  MOD_RES (13)..(14)..(15)..(16)..(17): Xaa is A or G
  MOD_RES (18)..(19)..(20)..(21): Xaa is A or G or is absent

SEQ ID NO: 77098 - protein, 36 aa, Artificial Sequence; identical to SEQ ID NO: 2811
  GFR-binding peptide
  MOD_RES (2)..(36): Xaa is C or S
  MOD_RES (14)..(15)..(16)..(17)..(18): Xaa is A or G
  MOD_RES (19)..(20)..(21)..(22): Xaa is A or G or is absent

SEQ ID NO: 77099 - protein, 33 aa, Artificial Sequence; identical to SEQ ID NO: 2812
  GFR-binding peptide
  MOD_RES (1)..(1): Xaa is C or S
  MOD_RES (12)..(13)..(14)..(15)..(16): Xaa is A or G
  MOD_RES (17)..(18)..(19)..(20): Xaa is A or G or is absent

SEQ ID NO: 77100 - protein, 34 aa, Artificial Sequence; identical to SEQ ID NO: 2814
  GFR-binding peptide
  MOD_RES (34)..(34): Xaa is C or S
  MOD_RES (12)..(13)..(14)..(15)..(16): Xaa is A or G
  MOD_RES (17)..(18)..(19)..(20): Xaa is A or G or is absent

SEQ ID NO: 77101 - protein, 40 aa, Artificial Sequence
  GFR-binding peptide
  MOD_RES (2)..(4)..(36)..(37): Xaa is C or S
SXGXRDVVMGQYNKLIIQQKDNLYLMSIASMKTPTXXPGA

SEQ ID NO: 77102 - protein, 39 aa, Artificial Sequence; identical to SEQ ID NO: 23807
  GFR-binding peptide
  MOD_RES (1)..(35)..(36): Xaa is C or S
  MOD_RES (13)..(14)..(15)..(16)..(17): Xaa is A or G
  MOD_RES (18)..(19)..(20)..(21): Xaa is A or G or is absent

SEQ ID NO: 77103 - protein, 40 aa, Artificial Sequence; identical to SEQ ID NO: 12178
  GFR-binding peptide
  MOD_RES (1)..(35)..(36): Xaa is C or S
  MOD_RES (13)..(14)..(15)..(16)..(17): Xaa is A or G
  MOD_RES (18)..(19)..(20)..(21): Xaa is A or G or is absent

SEQ ID NO: 77104 - protein, 36 aa, Artificial Sequence; identical to SEQ ID NO: 56773
  GFR-binding peptide
  MOD_RES (34)..(35): Xaa is C or S
  MOD_RES (12)..(13)..(14)..(15)..(16): Xaa is A or G
  MOD_RES (17)..(18)..(19)..(20): Xaa is A or G or is absent

SEQ ID NO: 77105 - protein, 38 aa, Artificial Sequence; identical to SEQ ID NO: 2817
  GFR-binding peptide
  MOD_RES (2)..(36)..(37): Xaa is C or S
  MOD_RES (14)..(15)..(16)..(17)..(18): Xaa is A or G
  MOD_RES (19)..(20)..(21)..(22): Xaa is A or G or is absent

SEQ ID NO: 77106 - protein, 33 aa, Artificial Sequence; identical to SEQ ID NO: 4745
  GFR-binding peptide
  MOD_RES (32)..(33): Xaa is C or S

SEQ ID NO: 77107 - protein, 33 aa, Artificial Sequence; identical to SEQ ID NO: 2819
  GFR-binding peptide
  MOD_RES (32)..(33): Xaa is C or S

SEQ ID NO: 77108 - protein, 39 aa, Artificial Sequence; identical to SEQ ID NO: 25827
  GFR-binding peptide
  MOD_RES (2)..(4)..(38)..(39): Xaa is C or S
  MOD_RES (16)..(17)..(18)..(19)..(20): Xaa is A or G
  MOD_RES (21)..(22)..(23)..(24): Xaa is A or G or is absent

SEQ ID NO: 77109 - protein, 38 aa, Artificial Sequence
  GFR-binding peptide
  MOD_RES (1)..(3)..(35)..(36): Xaa is C or S
XGXRDVVMGQYNKLIIQQKDNLYLMSIASMKTPTXXPG

SEQ ID NO: 77110 - protein, 39 aa, Artificial Sequence; identical to SEQ ID NO: 2829
  GFR-binding peptide
  MOD_RES (2)..(4)..(37)..(38): Xaa is C or S
  MOD_RES (15)..(16)..(17)..(18)..(19): Xaa is A or G
  MOD_RES (20)..(21)..(22)..(23): Xaa is A or G or is absent

SEQ ID NO: 77111 - protein, 40 aa, Artificial Sequence; identical to SEQ ID NO: 2830
  GFR-binding peptide
  MOD_RES (1)..(3)..(37)..(38): Xaa is C or S
  MOD_RES (15)..(16)..(17)..(18)..(19): Xaa is A or G
  MOD_RES (20)..(21)..(22)..(23): Xaa is A or G or is absent

SEQ ID NO: 77112 - protein, 39 aa, Artificial Sequence; identical to SEQ ID NO: 4751
  GFR-binding peptide
  MOD_RES (1)..(3)..(37)..(38): Xaa is C or S
  MOD_RES (15)..(16)..(17)..(18)..(19): Xaa is A or G
  MOD_RES (20)..(21)..(22)..(23): Xaa is A or G or is absent

SEQ ID NO: 77113 - protein, 40 aa, Artificial Sequence
  GFR-binding peptide
  MOD_RES (1)..(35)..(36): Xaa is C or S
  MOD_RES (13)..(14)..(15)..(16)..(17): Xaa is A or G
  MOD_RES (18)..(19)..(20)..(21): Xaa is A or G or is absent
XRDVVMGQYNKLXXXXXXXXXLYLMSIASMKTPTXXPGAS

SEQ ID NO: 77114 - protein, 37 aa, Artificial Sequence; identical to SEQ ID NO: 4752
  GFR-binding peptide
  MOD_RES (31)..(32): Xaa is C or S

SEQ ID NO: 77115 - protein, 35 aa, Artificial Sequence; identical to SEQ ID NO: 4754
  GFR-binding peptide
  MOD_RES (1)..(3)..(35): Xaa is C or S

SEQ ID NO: 77116 - protein, 37 aa, Artificial Sequence; identical to SEQ ID NO: 2833
  GFR-binding peptide
  MOD_RES (1)..(36)..(37): Xaa is C or S
  MOD_RES (14)..(15)..(16)..(17)..(18): Xaa is A or G
  MOD_RES (19)..(20)..(21)..(22): Xaa is A or G or is absent

SEQ ID NO: 77117 - protein, 36 aa, Artificial Sequence
  GFR-binding peptide
  MOD_RES (2)..(36): Xaa is C or S
  MOD_RES (14)..(15)..(16)..(17)..(18): Xaa is A or G
  MOD_RES (19)..(20)..(21)..(22): Xaa is A or G or is absent
GXRDVVMGQYNKLXXXXXXXXXLYLMSIASMKTPTX

SEQ ID NO: 77118 - protein, 36 aa, Artificial Sequence; identical to SEQ ID NO: 10309
  GFR-binding peptide
  MOD_RES (2)..(34)..(35): Xaa is C or S

SEQ ID NO: 77119 - protein, 33 aa, Artificial Sequence; identical to SEQ ID NO: 4755
  GFR-binding peptide
  MOD_RES (31)..(32): Xaa is C or S

SEQ ID NO: 77120 - protein, 42 aa, Artificial Sequence
  GFR-binding peptide
  MOD_RES (2)..(36)..(37): Xaa is C or S
  MOD_RES (14)..(15)..(16)..(17)..(18): Xaa is A or G
  MOD_RES (19)..(20)..(21)..(22): Xaa is A or G or is absent
AXSEVTMNQYNKLXXXXXXXXXLYLISIASMKEPVXXPEPIG

SEQ ID NO: 77121 - protein, 37 aa, Artificial Sequence; identical to SEQ ID NO: 4757
  GFR-binding peptide
  MOD_RES (1)..(3)..(35)..(36): Xaa is C or S

SEQ ID NO: 77122 - protein, 36 aa, Artificial Sequence; identical to SEQ ID NO: 62220
  GFR-binding peptide
  MOD_RES (1)..(33)..(34): Xaa is C or S

SEQ ID NO: 77123 - protein, 32 aa, Artificial Sequence; identical to SEQ ID NO: 4760
  GFR-binding peptide
  MOD_RES (32)..(32): Xaa is C or S

SEQ ID NO: 77124 - protein, 36 aa, Artificial Sequence; identical to SEQ ID NO: 25841
  GFR-binding peptide
  MOD_RES (2)..(4)..(36): Xaa is C or S

SEQ ID NO: 77125 - protein, 38 aa, Artificial Sequence; identical to SEQ ID NO: 25842
  GFR-binding peptide
  MOD_RES (33)..(34): Xaa is C or S
  MOD_RES (11)..(12)..(13)..(14)..(15): Xaa is A or G
  MOD_RES (16)..(17)..(18)..(19): Xaa is A or G or is absent

SEQ ID NO: 77126 - protein, 34 aa, Artificial Sequence; identical to SEQ ID NO: 4761
  GFR-binding peptide
  MOD_RES (31)..(32): Xaa is C or S

SEQ ID NO: 77127 - protein, 33 aa, Artificial Sequence; identical to SEQ ID NO: 2848
  GFR-binding peptide
  MOD_RES (1)..(3): Xaa is C or S

SEQ ID NO: 77128 - protein, 40 aa, Artificial Sequence; identical to SEQ ID NO: 2850
  GFR-binding peptide
  MOD_RES (1)..(3)..(37)..(38): Xaa is C or S
  MOD_RES (15)..(16)..(17)..(18)..(19): Xaa is A or G
  MOD_RES (20)..(21)..(22)..(23): Xaa is A or G or is absent

SEQ ID NO: 77129 - protein, 43 aa, Artificial Sequence; identical to SEQ ID NO: 2853
  GFR-binding peptide
  MOD_RES (1)..(3)..(37)..(38): Xaa is C or S
  MOD_RES (15)..(16)..(17)..(18)..(19): Xaa is A or G
  MOD_RES (20)..(21)..(22)..(23): Xaa is A or G or is absent

SEQ ID NO: 77130 - protein, 33 aa, Artificial Sequence; identical to SEQ ID NO: 4770
  GFR-binding peptide
  MOD_RES (1)..(3): Xaa is C or S

SEQ ID NO: 77131 - protein, 40 aa, Artificial Sequence; identical to SEQ ID NO: 4771
  GFR-binding peptide
  MOD_RES (1)..(3)..(37)..(38): Xaa is C or S
  MOD_RES (15)..(16)..(17)..(18)..(19): Xaa is A or G
  MOD_RES (20)..(21)..(22)..(23): Xaa is A or G or is absent

SEQ ID NO: 77132 - protein, 38 aa, Artificial Sequence; identical to SEQ ID NO: 10322
  GFR-binding peptide
  MOD_RES (2)..(4)..(38): Xaa is C or S
  MOD_RES (16)..(17)..(18)..(19)..(20): Xaa is A or G
  MOD_RES (21)..(22)..(23)..(24): Xaa is A or G or is absent

SEQ ID NO: 77133 - protein, 39 aa, Artificial Sequence; identical to SEQ ID NO: 4773
  GFR-binding peptide
  MOD_RES (1)..(3)..(34)..(35): Xaa is C or S

SEQ ID NO: 77134 - protein, 36 aa, Artificial Sequence
  GFR-binding peptide
  MOD_RES (2)..(34)..(35): Xaa is C or S
GXAEVVMDQYNKLVVNNAADLYLISIASLRAPVXXS

SEQ ID NO: 77135 - protein, 38 aa, Artificial Sequence; identical to SEQ ID NO: 2855
  GFR-binding peptide
  MOD_RES (2)..(4)..(36)..(37): Xaa is C or S

SEQ ID NO: 77136 - protein, 37 aa, Artificial Sequence; identical to SEQ ID NO: 12213
  GFR-binding peptide
  MOD_RES (2)..(34)..(35): Xaa is C or S

SEQ ID NO: 77137 - protein, 37 aa, Artificial Sequence; identical to SEQ ID NO: 56806
  GFR-binding peptide
  MOD_RES (2)..(35)..(36): Xaa is C or S
  MOD_RES (13)..(14)..(15)..(16)..(17): Xaa is A or G
  MOD_RES (18)..(19)..(20)..(21): Xaa is A or G or is absent

SEQ ID NO: 77138 - protein, 40 aa, Artificial Sequence; identical to SEQ ID NO: 4777
  GFR-binding peptide
  MOD_RES (2)..(4)..(35)..(36): Xaa is C or S

SEQ ID NO: 77139 - protein, 35 aa, Artificial Sequence; identical to SEQ ID NO: 56807
  GFR-binding peptide
  MOD_RES (2)..(2): Xaa is C or S
  MOD_RES (14)..(15)..(16)..(17)..(18): Xaa is A or G
  MOD_RES (19)..(20)..(21)..(22): Xaa is A or G or is absent

SEQ ID NO: 77140 - protein, 38 aa, Artificial Sequence; identical to SEQ ID NO: 2858
  GFR-binding peptide
  MOD_RES (1)..(3)..(35)..(36): Xaa is C or S

SEQ ID NO: 77141 - protein, 37 aa, Artificial Sequence; identical to SEQ ID NO: 2859
  GFR-binding peptide
  MOD_RES (1)..(33)..(34): Xaa is C or S

SEQ ID NO: 77142 - protein, 34 aa, Artificial Sequence; identical to SEQ ID NO: 60439
  GFR-binding peptide
  MOD_RES (33)..(34): Xaa is C or S
  MOD_RES (11)..(12)..(13)..(14)..(15): Xaa is A or G
  MOD_RES (16)..(17)..(18)..(19): Xaa is A or G or is absent

SEQ ID NO: 77143 - protein, 33 aa, Artificial Sequence; identical to SEQ ID NO: 56810
  GFR-binding peptide
  MOD_RES (33)..(33): Xaa is C or S
  MOD_RES (11)..(12)..(13)..(14)..(15): Xaa is A or G
  MOD_RES (16)..(17)..(18)..(19): Xaa is A or G or is absent

SEQ ID NO: 77144 - protein, 39 aa, Artificial Sequence; identical to SEQ ID NO: 4779
  GFR-binding peptide
  MOD_RES (1)..(3)..(35)..(36): Xaa is C or S

SEQ ID NO: 77145 - protein, 38 aa, Artificial Sequence
  GFR-binding peptide
  MOD_RES (1)..(35)..(36): Xaa is C or S
  MOD_RES (13)..(14)..(15)..(16)..(17): Xaa is A or G
  MOD_RES (18)..(19)..(20)..(21): Xaa is A or G or is absent
XSEVTMNQYNKLXXXXXXXXXLYLISIASMKEPVXXPE

SEQ ID NO: 77146 - protein, 33 aa, Artificial Sequence; identical to SEQ ID NO: 4783
  GFR-binding peptide
  MOD_RES (31)..(32): Xaa is C or S

SEQ ID NO: 77147 - protein, 35 aa, Artificial Sequence; identical to SEQ ID NO: 2863
  GFR-binding peptide
  MOD_RES (2)..(4)..(35): Xaa is C or S

SEQ ID NO: 77148 - protein, 44 aa, Artificial Sequence; identical to SEQ ID NO: 2864
  GFR-binding peptide
  MOD_RES (2)..(4)..(38): Xaa is C or S
  MOD_RES (16)..(17)..(18)..(19)..(20): Xaa is A or G
  MOD_RES (21)..(22)..(23)..(24): Xaa is A or G or is absent

SEQ ID NO: 77149 - protein, 39 aa, Artificial Sequence; identical to SEQ ID NO: 10331
  GFR-binding peptide
  MOD_RES (2)..(36)..(37): Xaa is C or S
  MOD_RES (14)..(15)..(16)..(17)..(18): Xaa is A or G
  MOD_RES (19)..(20)..(21)..(22): Xaa is A or G or is absent

SEQ ID NO: 77150 - protein, 37 aa, Artificial Sequence; identical to SEQ ID NO: 2866
  GFR-binding peptide
  MOD_RES (1)..(3): Xaa is C or S
  MOD_RES (16)..(17)..(18)..(19)..(20): Xaa is A or G
  MOD_RES (21)..(22)..(23)..(24): Xaa is A or G or is absent

SEQ ID NO: 77151 - protein, 32 aa, Artificial Sequence
  GFR-binding peptide
  MOD_RES (11)..(12)..(13)..(14)..(15): Xaa is A or G
  MOD_RES (16)..(17)..(18)..(19): Xaa is A or G or is absent
EEVIMQYNKLXXXXXXXXXLYLMSIASTKVPA

SEQ ID NO: 77152 - protein, 38 aa, Artificial Sequence
  GFR-binding peptide
  MOD_RES (1)..(3)..(35)..(36): Xaa is C or S
XGXESVAMGQYNKLYTVVGKDLYLISIASLKTPVXXAK

SEQ ID NO: 77153 - protein, 35 aa, Artificial Sequence; identical to SEQ ID NO: 4789
  GFR-binding peptide
  MOD_RES (1)..(35): Xaa is C or S
  MOD_RES (13)..(14)..(15)..(16)..(17): Xaa is A or G
  MOD_RES (18)..(19)..(20)..(21): Xaa is A or G or is absent

SEQ ID NO: 77154 - protein, 34 aa, Artificial Sequence; identical to SEQ ID NO: 12224
  GFR-binding peptide
  MOD_RES (31)..(32): Xaa is C or S

SEQ ID NO: 77155 - protein, 39 aa, Artificial Sequence; identical to SEQ ID NO: 2870
  GFR-binding peptide
  MOD_RES (1)..(34)..(35): Xaa is C or S
  MOD_RES (12)..(13)..(14)..(15)..(16): Xaa is A or G
  MOD_RES (17)..(18)..(19)..(20): Xaa is A or G or is absent

SEQ ID NO: 77156 - protein, 35 aa, Artificial Sequence; identical to SEQ ID NO: 2871
  GFR-binding peptide
  MOD_RES (1)..(34)..(35): Xaa is C or S
  MOD_RES (12)..(13)..(14)..(15)..(16): Xaa is A or G
  MOD_RES (17)..(18)..(19)..(20): Xaa is A or G or is absent

SEQ ID NO: 77157 - protein, 37 aa, Artificial Sequence
  GFR-binding peptide
  MOD_RES (1)..(35)..(36): Xaa is C or S
  MOD_RES (13)..(14)..(15)..(16)..(17): Xaa is A or G
  MOD_RES (18)..(19)..(20)..(21): Xaa is A or G or is absent
XSEVTMNQYNKLXXXXXXXXXLYLISIASMKEPVXXP

SEQ ID NO: 77158 - protein, 38 aa, Artificial Sequence; identical to SEQ ID NO: 4795
  GFR-binding peptide
  MOD_RES (2)..(4)..(38): Xaa is C or S
  MOD_RES (16)..(17)..(18)..(19)..(20): Xaa is A or G
  MOD_RES (21)..(22)..(23)..(24): Xaa is A or G or is absent

SEQ ID NO: 77159 - protein, 38 aa, Artificial Sequence; identical to SEQ ID NO: 4796
  GFR-binding peptide
  MOD_RES (2)..(33)..(34): Xaa is C or S

SEQ ID NO: 77160 - protein, 39 aa, Artificial Sequence; identical to SEQ ID NO: 23864
  GFR-binding peptide
  MOD_RES (1)..(33)..(34): Xaa is C or S

SEQ ID NO: 77161 - protein, 36 aa, Artificial Sequence; identical to SEQ ID NO: 4799
  GFR-binding peptide
  MOD_RES (31)..(32): Xaa is C or S

SEQ ID NO: 77162 - protein, 34 aa, Artificial Sequence; identical to SEQ ID NO: 2876
  GFR-binding peptide
  MOD_RES (32)..(33): Xaa is C or S

SEQ ID NO: 77163 - protein, 42 aa, Artificial Sequence; identical to SEQ ID NO: 23866
  GFR-binding peptide
  MOD_RES (2)..(4)..(38)..(39): Xaa is C or S
  MOD_RES (16)..(17)..(18)..(19)..(20): Xaa is A or G
  MOD_RES (21)..(22)..(23)..(24): Xaa is A or G or is absent

SEQ ID NO: 77164 - protein, 33 aa, Artificial Sequence; identical to SEQ ID NO: 2877
  GFR-binding peptide
  MOD_RES (32)..(33): Xaa is C or S

SEQ ID NO: 77165 - protein, 34 aa, Artificial Sequence; identical to SEQ ID NO: 4805
  GFR-binding peptide
  MOD_RES (31)..(32): Xaa is C or S

SEQ ID NO: 77166 - protein, 36 aa, Artificial Sequence
  GFR-binding peptide
  MOD_RES (1)..(3)..(35)..(36): Xaa is C or S
XAXSEVTMNQYNKLVVNKNEDLYLISIASMKEPVXX

SEQ ID NO: 77167 - protein, 37 aa, Artificial Sequence; identical to SEQ ID NO: 2879
  GFR-binding peptide
  MOD_RES (2)..(36)..(37): Xaa is C or S
  MOD_RES (14)..(15)..(16)..(17)..(18): Xaa is A or G
  MOD_RES (19)..(20)..(21)..(22): Xaa is A or G or is absent

SEQ ID NO: 77168 - protein, 33 aa, Artificial Sequence; identical to SEQ ID NO: 2880
  GFR-binding peptide
  MOD_RES (1)..(33): Xaa is C or S

SEQ ID NO: 77169 - protein, 40 aa, Artificial Sequence
  GFR-binding peptide
  MOD_RES (1)..(3)..(35)..(36): Xaa is C or S
XGXESVAMGQYNKLYTVVGKDLYLISIASLKTPVXXAKSA

SEQ ID NO: 77170 - protein, 39 aa, Artificial Sequence; identical to SEQ ID NO: 25890
  GFR-binding peptide
  MOD_RES (2)..(36)..(37): Xaa is C or S
  MOD_RES (14)..(15)..(16)..(17)..(18): Xaa is A or G
  MOD_RES (19)..(20)..(21)..(22): Xaa is A or G or is absent

SEQ ID NO: 77171 - protein, 38 aa, Artificial Sequence
  GFR-binding peptide
  MOD_RES (1)..(35)..(36): Xaa is C or S
  MOD_RES (13)..(14)..(15)..(16)..(17): Xaa is A or G
  MOD_RES (18)..(19)..(20)..(21): Xaa is A or G or is absent
XESVAMGQYNKLXXXXXXXXXLYLISIASLKTPVXXAK

SEQ ID NO: 77172 - protein, 37 aa, Artificial Sequence; identical to SEQ ID NO: 4813
  GFR-binding peptide
  MOD_RES (1)..(3)..(35)..(36): Xaa is C or S

SEQ ID NO: 77173 - protein, 36 aa, Artificial Sequence; identical to SEQ ID NO: 10346
  GFR-binding peptide
  MOD_RES (1)..(33)..(34): Xaa is C or S

SEQ ID NO: 77174 - protein, 38 aa, Artificial Sequence; identical to SEQ ID NO: 10348
  GFR-binding peptide
  MOD_RES (33)..(34): Xaa is C or S
  MOD_RES (11)..(12)..(13)..(14)..(15): Xaa is A or G
  MOD_RES (16)..(17)..(18)..(19): Xaa is A or G or is absent

SEQ ID NO: 77175 - protein, 37 aa, Artificial Sequence
  GFR-binding peptide
  MOD_RES (33)..(34): Xaa is C or S
  MOD_RES (11)..(12)..(13)..(14)..(15): Xaa is A or G
  MOD_RES (16)..(17)..(18)..(19): Xaa is A or G or is absent
EVTMNQYNKLXXXXXXXXXLYLISIASMKEPVXXPEP

SEQ ID NO: 77176 - protein, 37 aa, Artificial Sequence; identical to SEQ ID NO: 4814
  GFR-binding peptide
  MOD_RES (31)..(32): Xaa is C or S

SEQ ID NO: 77177 - protein, 39 aa, Artificial Sequence
  GFR-binding peptide
  MOD_RES (1)..(33)..(34): Xaa is C or S
XRDVVMGQYNKLIIQQKDNLYLMSIASMKTPTXXPGASG

SEQ ID NO: 77178 - protein, 36 aa, Artificial Sequence; identical to SEQ ID NO: 4818
  GFR-binding peptide
  MOD_RES (33)..(34): Xaa is C or S
  MOD_RES (11)..(12)..(13)..(14)..(15): Xaa is A or G
  MOD_RES (16)..(17)..(18)..(19): Xaa is A or G or is absent

SEQ ID NO: 77179 - protein, 32 aa, Artificial Sequence; identical to SEQ ID NO: 2891
  GFR-binding peptide
  MOD_RES (11)..(12)..(13)..(14)..(15): Xaa is A or G
  MOD_RES (16)..(17)..(18)..(19): Xaa is A or G or is absent

SEQ ID NO: 77180 - protein, 36 aa, Artificial Sequence
  GFR-binding peptide
  MOD_RES (33)..(34): Xaa is C or S
  MOD_RES (11)..(12)..(13)..(14)..(15): Xaa is A or G
  MOD_RES (16)..(17)..(18)..(19): Xaa is A or G or is absent
DVVMGQYNKLXXXXXXXXXLYLMSIASMKTPTXXPG

SEQ ID NO: 77181 - protein, 39 aa, Artificial Sequence; identical to SEQ ID NO: 2892
  GFR-binding peptide
  MOD_RES (1)..(34)..(35): Xaa is C or S
  MOD_RES (12)..(13)..(14)..(15)..(16): Xaa is A or G
  MOD_RES (17)..(18)..(19)..(20): Xaa is A or G or is absent

SEQ ID NO: 77182 - protein, 37 aa, Artificial Sequence
  GFR-binding peptide
  MOD_RES (32)..(33): Xaa is C or S
RDVVMGQYNKLIIQQKDNLYLMSIASMKTPTXXPGAS

SEQ ID NO: 77183 - protein, 36 aa, Artificial Sequence
  GFR-binding peptide
  MOD_RES (34)..(35): Xaa is C or S
  MOD_RES (12)..(13)..(14)..(15)..(16): Xaa is A or G
  MOD_RES (17)..(18)..(19)..(20): Xaa is A or G or is absent
AEVVMDQYNKLXXXXXXXXXLYLISIASLRAPVXXS

SEQ ID NO: 77184 - protein, 37 aa, Artificial Sequence; identical to SEQ ID NO: 4819
  GFR-binding peptide
  MOD_RES (33)..(34): Xaa is C or S
  MOD_RES (11)..(12)..(13)..(14)..(15): Xaa is A or G
  MOD_RES (16)..(17)..(18)..(19): Xaa is A or G or is absent

SEQ ID NO: 77185 - protein, 40 aa, Artificial Sequence; identical to SEQ ID NO: 4824
  GFR-binding peptide
  MOD_RES (1)..(36)..(37): Xaa is C or S
  MOD_RES (14)..(15)..(16)..(17)..(18): Xaa is A or G
  MOD_RES (19)..(20)..(21)..(22): Xaa is A or G or is absent

SEQ ID NO: 77186 - protein, 37 aa, Artificial Sequence; identical to SEQ ID NO: 4825
  GFR-binding peptide
  MOD_RES (32)..(33): Xaa is C or S

SEQ ID NO: 77187 - protein, 39 aa, Artificial Sequence; identical to SEQ ID NO: 4826
  GFR-binding peptide
  MOD_RES (2)..(35)..(36): Xaa is C or S

SEQ ID NO: 77188 - protein, 33 aa, Artificial Sequence; identical to SEQ ID NO: 4827
  GFR-binding peptide
  MOD_RES (1)..(32)..(33): Xaa is C or S

SEQ ID NO: 77189 - protein, 36 aa, Artificial Sequence; identical to SEQ ID NO: 4829
  GFR-binding peptide
  MOD_RES (2)..(34)..(35): Xaa is C or S

SEQ ID NO: 77190 - protein, 33 aa, Artificial Sequence
  GFR-binding peptide
  MOD_RES (32)..(33): Xaa is C or S
ESVAMGQYNKLYTVVGKDLYLISIASLKTPVXX

SEQ ID NO: 77191 - protein, 37 aa, Artificial Sequence; identical to SEQ ID NO: 2894
  GFR-binding peptide
  MOD_RES (2)..(35)..(36): Xaa is C or S
  MOD_RES (13)..(14)..(15)..(16)..(17): Xaa is A or G
  MOD_RES (18)..(19)..(20)..(21): Xaa is A or G or is absent

SEQ ID NO: 77192 - protein, 42 aa, Artificial Sequence; identical to SEQ ID NO: 12259
  GFR-binding peptide
  MOD_RES (2)..(4)..(36)..(37): Xaa is C or S

SEQ ID NO: 77193 - protein, 33 aa, Artificial Sequence; identical to SEQ ID NO: 4831
  GFR-binding peptide
  MOD_RES (2)..(33): Xaa is C or S

SEQ ID NO: 77194 - protein, 35 aa, Artificial Sequence; identical to SEQ ID NO: 12261
  GFR-binding peptide
  MOD_RES (1)..(35): Xaa is C or S
  MOD_RES (13)..(14)..(15)..(16)..(17): Xaa is A or G
  MOD_RES (18)..(19)..(20)..(21): Xaa is A or G or is absent

SEQ ID NO: 77195 - protein, 37 aa, Artificial Sequence; identical to SEQ ID NO: 4832
  GFR-binding peptide
  MOD_RES (32)..(33): Xaa is C or S

SEQ ID NO: 77196 - protein, 38 aa, Artificial Sequence; identical to SEQ ID NO: 12264
  GFR-binding peptide
  MOD_RES (2)..(4)..(36)..(37): Xaa is C or S

SEQ ID NO: 77197 - protein, 36 aa, Artificial Sequence
  GFR-binding peptide
  MOD_RES (1)..(3)..(34)..(35): Xaa is C or S
XGXEEVIMQYNKLLLVRGNDLYLMSIASTKVPAXXT

SEQ ID NO: 77198 - protein, 37 aa, Artificial Sequence; identical to SEQ ID NO: 2896
  GFR-binding peptide
  MOD_RES (2)..(4)..(35)..(36): Xaa is C or S

SEQ ID NO: 77199 - protein, 36 aa, Artificial Sequence; identical to SEQ ID NO: 2897
  GFR-binding peptide
  MOD_RES (1)..(35)..(36): Xaa is C or S
  MOD_RES (13)..(14)..(15)..(16)..(17): Xaa is A or G
  MOD_RES (18)..(19)..(20)..(21): Xaa is A or G or is absent

SEQ ID NO: 77200 - protein, 41 aa, Artificial Sequence; identical to SEQ ID NO: 4836
  GFR-binding peptide
  MOD_RES (2)..(4)..(36)..(37): Xaa is C or S

SEQ ID NO: 77201 - protein, 38 aa, Artificial Sequence; identical to SEQ ID NO: 4837
  GFR-binding peptide
  MOD_RES (2)..(4)..(37)..(38): Xaa is C or S
  MOD_RES (15)..(16)..(17)..(18)..(19): Xaa is A or G
  MOD_RES (20)..(21)..(22)..(23): Xaa is A or G or is absent

SEQ ID NO: 77202 - protein, 39 aa, Artificial Sequence; identical to SEQ ID NO: 4838
  GFR-binding peptide
  MOD_RES (1)..(33)..(34): Xaa is C or S

SEQ ID NO: 77203 - protein, 36 aa, Artificial Sequence; identical to SEQ ID NO: 4839
  GFR-binding peptide
  MOD_RES (31)..(32): Xaa is C or S

SEQ ID NO: 77204 - protein, 40 aa, Artificial Sequence; identical to SEQ ID NO: 62278
  GFR-binding peptide
  MOD_RES (1)..(3)..(37)..(38): Xaa is C or S
  MOD_RES (15)..(16)..(17)..(18)..(19): Xaa is A or G
  MOD_RES (20)..(21)..(22)..(23): Xaa is A or G or is absent

SEQ ID NO: 77205 - protein, 38 aa, Artificial Sequence; identical to SEQ ID NO: 10361
  GFR-binding peptide
  MOD_RES (32)..(33): Xaa is C or S

SEQ ID NO: 77206 - protein, 43 aa, Artificial Sequence
  GFR-binding peptide
  MOD_RES (2)..(4)..(38)..(39): Xaa is C or S
  MOD_RES (16)..(17)..(18)..(19)..(20): Xaa is A or G
  MOD_RES (21)..(22)..(23)..(24): Xaa is A or G or is absent
RXAXSEVTMNQYNKLXXXXXXXXXLYLISIASMKEPVXXPEPI

SEQ ID NO: 77207 - protein, 37 aa, Artificial Sequence; identical to SEQ ID NO: 4841
  GFR-binding peptide
  MOD_RES (31)..(32): Xaa is C or S

SEQ ID NO: 77208 - protein, 42 aa, Artificial Sequence; identical to SEQ ID NO: 2900
  GFR-binding peptide
  MOD_RES (2)..(36)..(37): Xaa is C or S
  MOD_RES (14)..(15)..(16)..(17)..(18): Xaa is A or G
  MOD_RES (19)..(20)..(21)..(22): Xaa is A or G or is absent

SEQ ID NO: 77209 - protein, 37 aa, Artificial Sequence; identical to SEQ ID NO: 4844
  GFR-binding peptide
  MOD_RES (33)..(34): Xaa is C or S
  MOD_RES (11)..(12)..(13)..(14)..(15): Xaa is A or G
  MOD_RES (16)..(17)..(18)..(19): Xaa is A or G or is absent

SEQ ID NO: 77210 - protein, 38 aa, Artificial Sequence; identical to SEQ ID NO: 56853
  GFR-binding peptide
  MOD_RES (33)..(34): Xaa is C or S
  MOD_RES (11)..(12)..(13)..(14)..(15): Xaa is A or G
  MOD_RES (16)..(17)..(18)..(19): Xaa is A or G or is absent

SEQ ID NO: 77211 - protein, 33 aa, Artificial Sequence; identical to SEQ ID NO: 12275
  GFR-binding peptide
  MOD_RES (33)..(33): Xaa is C or S
  MOD_RES (11)..(12)..(13)..(14)..(15): Xaa is A or G
  MOD_RES (16)..(17)..(18)..(19): Xaa is A or G or is absent

SEQ ID NO: 77212 - protein, 34 aa, Artificial Sequence; identical to SEQ ID NO: 2903
  GFR-binding peptide
  MOD_RES (33)..(34): Xaa is C or S
  MOD_RES (11)..(12)..(13)..(14)..(15): Xaa is A or G
  MOD_RES (16)..(17)..(18)..(19): Xaa is A or G or is absent

SEQ ID NO: 77213 - protein, 37 aa, Artificial Sequence; identical to SEQ ID NO: 4848
  GFR-binding peptide
  MOD_RES (1)..(35)..(36): Xaa is C or S
  MOD_RES (13)..(14)..(15)..(16)..(17): Xaa is A or G
  MOD_RES (18)..(19)..(20)..(21): Xaa is A or G or is absent

SEQ ID NO: 77214 - protein, 39 aa, Artificial Sequence; identical to SEQ ID NO: 60501
  GFR-binding peptide
  MOD_RES (2)..(4)..(36)..(37): Xaa is C or S

SEQ ID NO: 77215 - protein, 32 aa, Artificial Sequence; identical to SEQ ID NO: 2904
  GFR-binding peptide
  MOD_RES (32)..(32): Xaa is C or S

SEQ ID NO: 77216 - protein, 39 aa, Artificial Sequence; identical to SEQ ID NO: 4849
  GFR-binding peptide
  MOD_RES (2)..(4)..(35)..(36): Xaa is C or S

SEQ ID NO: 77217 - protein, 36 aa, Artificial Sequence; identical to SEQ ID NO: 25924
  GFR-binding peptide
  MOD_RES (1)..(3): Xaa is C or S
  MOD_RES (15)..(16)..(17)..(18)..(19): Xaa is A or G
  MOD_RES (20)..(21)..(22)..(23): Xaa is A or G or is absent

SEQ ID NO: 77218 - protein, 39 aa, Artificial Sequence; identical to SEQ ID NO: 12281
  GFR-binding peptide
  MOD_RES (2)..(4)..(36)..(37): Xaa is C or S

SEQ ID NO: 77219 - protein, 32 aa, Artificial Sequence; identical to SEQ ID NO: 4852
  GFR-binding peptide
  MOD_RES (32)..(32): Xaa is C or S

SEQ ID NO: 77220 - protein, 39 aa, Artificial Sequence; identical to SEQ ID NO: 4853
  GFR-binding peptide
  MOD_RES (35)..(36): Xaa is C or S
  MOD_RES (13)..(14)..(15)..(16)..(17): Xaa is A or G
  MOD_RES (18)..(19)..(20)..(21): Xaa is A or G or is absent

SEQ ID NO: 77221 - protein, 35 aa, Artificial Sequence; identical to SEQ ID NO: 2911
  GFR-binding peptide
  MOD_RES (31)..(32): Xaa is C or S

SEQ ID NO: 77222 - protein, 39 aa, Artificial Sequence; identical to SEQ ID NO: 2912
  GFR-binding peptide
  MOD_RES (33)..(34): Xaa is C or S
  MOD_RES (11)..(12)..(13)..(14)..(15): Xaa is A or G
  MOD_RES (16)..(17)..(18)..(19): Xaa is A or G or is absent

SEQ ID NO: 77223 - protein, 37 aa, Artificial Sequence; identical to SEQ ID NO: 4854
  GFR-binding peptide
  MOD_RES (1)..(3)..(35)..(36): Xaa is C or S

SEQ ID NO: 77224 - protein, 38 aa, Artificial Sequence; identical to SEQ ID NO: 4855
  GFR-binding peptide
  MOD_RES (1)..(33)..(34): Xaa is C or S

SEQ ID NO: 77225 - protein, 38 aa, Artificial Sequence; identical to SEQ ID NO: 25927
  GFR-binding peptide
  MOD_RES (1)..(33)..(34): Xaa is C or S

SEQ ID NO: 77226 - protein, 36 aa, Artificial Sequence; identical to SEQ ID NO: 10376
  GFR-binding peptide
  MOD_RES (31)..(32): Xaa is C or S

SEQ ID NO: 77227 - protein, 38 aa, Artificial Sequence; identical to SEQ ID NO: 4857
  GFR-binding peptide
  MOD_RES (2)..(34)..(35): Xaa is C or S

SEQ ID NO: 77228 - protein, 37 aa, Artificial Sequence; identical to SEQ ID NO: 4858
  GFR-binding peptide
  MOD_RES (33)..(34): Xaa is C or S
  MOD_RES (11)..(12)..(13)..(14)..(15): Xaa is A or G
  MOD_RES (16)..(17)..(18)..(19): Xaa is A or G or is absent

SEQ ID NO: 77229 - protein, 42 aa, Artificial Sequence; identical to SEQ ID NO: 2913
  GFR-binding peptide
  MOD_RES (2)..(4)..(37)..(38): Xaa is C or S
  MOD_RES (15)..(16)..(17)..(18)..(19): Xaa is A or G
  MOD_RES (20)..(21)..(22)..(23): Xaa is A or G or is absent

SEQ ID NO: 77230 - protein, 38 aa, Artificial Sequence; identical to SEQ ID NO: 2914
  GFR-binding peptide
  MOD_RES (1)..(3)..(37)..(38): Xaa is C or S
  MOD_RES (15)..(16)..(17)..(18)..(19): Xaa is A or G
  MOD_RES (20)..(21)..(22)..(23): Xaa is A or G or is absent

SEQ ID NO: 77231 - protein, 37 aa, Artificial Sequence; identical to SEQ ID NO: 56866
  GFR-binding peptide
  MOD_RES (1)..(3)..(34)..(35): Xaa is C or S

SEQ ID NO: 77232 - protein, 41 aa, Artificial Sequence; identical to SEQ ID NO: 4860
  GFR-binding peptide
  MOD_RES (1)..(35)..(36): Xaa is C or S
  MOD_RES (13)..(14)..(15)..(16)..(17): Xaa is A or G
  MOD_RES (18)..(19)..(20)..(21): Xaa is A or G or is absent

SEQ ID NO: 77233 - protein, 35 aa, Artificial Sequence; identical to SEQ ID NO: 10383
  GFR-binding peptide
  MOD_RES (2)..(2): Xaa is C or S
  MOD_RES (14)..(15)..(16)..(17)..(18): Xaa is A or G
  MOD_RES (19)..(20)..(21)..(22): Xaa is A or G or is absent

SEQ ID NO: 77234 - protein, 41 aa, Artificial Sequence; identical to SEQ ID NO: 4861
  GFR-binding peptide
  MOD_RES (2)..(4)..(38)..(39): Xaa is C or S
  MOD_RES (16)..(17)..(18)..(19)..(20): Xaa is A or G
  MOD_RES (21)..(22)..(23)..(24): Xaa is A or G or is absent

SEQ ID NO: 77235 - protein, 40 aa, Artificial Sequence; identical to SEQ ID NO: 2916
  GFR-binding peptide
  MOD_RES (1)..(3)..(36)..(37): Xaa is C or S

SEQ ID NO: 77236 - protein, 33 aa, Artificial Sequence; identical to SEQ ID NO: 2917
  GFR-binding peptide
  MOD_RES (33)..(33): Xaa is C or S

SEQ ID NO: 77237 - protein, 32 aa, Artificial Sequence; identical to SEQ ID NO: 4862
  GFR-binding peptide
  MOD_RES (32)..(32): Xaa is C or S

SEQ ID NO: 77238 - protein, 35 aa, Artificial Sequence; identical to SEQ ID NO: 2918
  GFR-binding peptide
  MOD_RES (33)..(34): Xaa is C or S
  MOD_RES (11)..(12)..(13)..(14)..(15): Xaa is A or G
  MOD_RES (16)..(17)..(18)..(19): Xaa is A or G or is absent

SEQ ID NO: 77239 - protein, 40 aa, Artificial Sequence; identical to SEQ ID NO: 56872
  GFR-binding peptide
  MOD_RES (2)..(4)..(37)..(38): Xaa is C or S
  MOD_RES (15)..(16)..(17)..(18)..(19): Xaa is A or G
  MOD_RES (20)..(21)..(22)..(23): Xaa is A or G or is absent

SEQ ID NO: 77240 - protein, 40 aa, Artificial Sequence; identical to SEQ ID NO: 4864
  GFR-binding peptide
  MOD_RES (2)..(35)..(36): Xaa is C or S
  MOD_RES (13)..(14)..(15)..(16)..(17): Xaa is A or G
  MOD_RES (18)..(19)..(20)..(21): Xaa is A or G or is absent

SEQ ID NO: 77241 - protein, 36 aa, Artificial Sequence; identical to SEQ ID NO: 4865
  GFR-binding peptide
  MOD_RES (1)..(3)..(34)..(35): Xaa is C or S

SEQ ID NO: 77242 - protein, 37 aa, Artificial Sequence; identical to SEQ ID NO: 2920
  GFR-binding peptide
  MOD_RES (32)..(33): Xaa is C or S

SEQ ID NO: 77243 - protein, 37 aa, Artificial Sequence; identical to SEQ ID NO: 4867
  GFR-binding peptide
  MOD_RES (2)..(4): Xaa is C or S
  MOD_RES (16)..(17)..(18)..(19)..(20): Xaa is A or G
  MOD_RES (21)..(22)..(23)..(24): Xaa is A or G or is absent

SEQ ID NO: 77244 - protein, 36 aa, Artificial Sequence; identical to SEQ ID NO: 4868
  GFR-binding peptide
  MOD_RES (1)..(3)..(34)..(35): Xaa is C or S

SEQ ID NO: 77245 - protein, 41 aa, Artificial Sequence; identical to SEQ ID NO: 2921
  GFR-binding peptide
  MOD_RES (2)..(35)..(36): Xaa is C or S

SEQ ID NO: 77246 - protein, 36 aa, Artificial Sequence; identical to SEQ ID NO: 4869
  GFR-binding peptide
  MOD_RES (1)..(3)..(36): Xaa is C or S

SEQ ID NO: 77247 - protein, 37 aa, Artificial Sequence
  GFR-binding peptide
  MOD_RES (2)..(4)..(36)..(37): Xaa is C or S
SXGXRDVVMGQYNKLIIQQKDNLYLMSIASMKTPTXX

SEQ ID NO: 77248 - protein, 39 aa, Artificial Sequence; identical to SEQ ID NO: 2922
  GFR-binding peptide
  MOD_RES (2)..(4)..(38)..(39): Xaa is C or S
  MOD_RES (16)..(17)..(18)..(19)..(20): Xaa is A or G
  MOD_RES (21)..(22)..(23)..(24): Xaa is A or G or is absent

SEQ ID NO: 77249 - protein, 41 aa, Artificial Sequence; identical to SEQ ID NO: 2923
  GFR-binding peptide
  MOD_RES (2)..(4)..(39)..(40): Xaa is C or S
  MOD_RES (17)..(18)..(19)..(20)..(21): Xaa is A or G
  MOD_RES (22)..(23)..(24)..(25): Xaa is A or G or is absent

SEQ ID NO: 77250 - protein, 39 aa, Artificial Sequence; identical to SEQ ID NO: 23921
  GFR-binding peptide
  MOD_RES (34)..(35): Xaa is C or S
  MOD_RES (12)..(13)..(14)..(15)..(16): Xaa is A or G
  MOD_RES (17)..(18)..(19)..(20): Xaa is A or G or is absent

SEQ ID NO: 77251 - protein, 40 aa, Artificial Sequence; identical to SEQ ID NO: 4870
  GFR-binding peptide
  MOD_RES (2)..(34)..(35): Xaa is C or S

SEQ ID NO: 77252 - protein, 42 aa, Artificial Sequence
  GFR-binding peptide
  MOD_RES (2)..(36)..(37): Xaa is C or S
  MOD_RES (14)..(15)..(16)..(17)..(18): Xaa is A or G
  MOD_RES (19)..(20)..(21)..(22): Xaa is A or G or is absent
GXSRVVMNQYNKLXXXXXXXXXLYLVSIASLKTPAXXPKPVH

SEQ ID NO: 77253 - protein, 37 aa, Artificial Sequence
  GFR-binding peptide
  MOD_RES (1)..(33)..(34): Xaa is C or S
XESVAMGQYNKLYTVVGKDLYLISIASLKTPVXXAKS

SEQ ID NO: 77254 - protein, 40 aa, Artificial Sequence; identical to SEQ ID NO: 2924
  GFR-binding peptide
  MOD_RES (2)..(4)..(37)..(38): Xaa is C or S
  MOD_RES (15)..(16)..(17)..(18)..(19): Xaa is A or G
  MOD_RES (20)..(21)..(22)..(23): Xaa is A or G or is absent

SEQ ID NO: 77255 - protein, 39 aa, Artificial Sequence
  GFR-binding peptide
  MOD_RES (2)..(4)..(38)..(39): Xaa is C or S
  MOD_RES (16)..(17)..(18)..(19)..(20): Xaa is A or G
  MOD_RES (21)..(22)..(23)..(24): Xaa is A or G or is absent
RXAXSEVTMNQYNKLXXXXXXXXXLYLISIASMKEPVXX

SEQ ID NO: 77256 - protein, 42 aa, Artificial Sequence; identical to SEQ ID NO: 2927
  GFR-binding peptide
  MOD_RES (2)..(37)..(38): Xaa is C or S
  MOD_RES (15)..(16)..(17)..(18)..(19): Xaa is A or G
  MOD_RES (20)..(21)..(22)..(23): Xaa is A or G or is absent

SEQ ID NO: 77257 - protein, 36 aa, Artificial Sequence; identical to SEQ ID NO: 23928
  GFR-binding peptide
  MOD_RES (1)..(3)..(35)..(36): Xaa is C or S

SEQ ID NO: 77258 - protein, 35 aa, Artificial Sequence; identical to SEQ ID NO: 56888
  GFR-binding peptide
  MOD_RES (1)..(35): Xaa is C or S
  MOD_RES (13)..(14)..(15)..(16)..(17): Xaa is A or G
  MOD_RES (18)..(19)..(20)..(21): Xaa is A or G or is absent

SEQ ID NO: 77259 - protein, 40 aa, Artificial Sequence; identical to SEQ ID NO: 2929
  GFR-binding peptide
  MOD_RES (1)..(3)..(34)..(35): Xaa is C or S

SEQ ID NO: 77260 - protein, 41 aa, Artificial Sequence; identical to SEQ ID NO: 10392
  GFR-binding peptide
  MOD_RES (1)..(3)..(37)..(38): Xaa is C or S
  MOD_RES (15)..(16)..(17)..(18)..(19): Xaa is A or G
  MOD_RES (20)..(21)..(22)..(23): Xaa is A or G or is absent

SEQ ID NO: 77261 - protein, 38 aa, Artificial Sequence
  GFR-binding peptide
  MOD_RES (1)..(33)..(34): Xaa is C or S
XESVAMGQYNKLYTVVGKDLYLISIASLKTPVXXAKSA

SEQ ID NO: 77262 - protein, 40 aa, Artificial Sequence; identical to SEQ ID NO: 2930
  GFR-binding peptide
  MOD_RES (1)..(3)..(38)..(39): Xaa is C or S
  MOD_RES (16)..(17)..(18)..(19)..(20): Xaa is A or G
  MOD_RES (21)..(22)..(23)..(24): Xaa is A or G or is absent

SEQ ID NO: 77263 - protein, 34 aa, Artificial Sequence; identical to SEQ ID NO: 64026
  GFR-binding peptide
  MOD_RES (31)..(32): Xaa is C or S

SEQ ID NO: 77264 - protein, 41 aa, Artificial Sequence; identical to SEQ ID NO: 25946
  GFR-binding peptide
  MOD_RES (2)..(4)..(36)..(37): Xaa is C or S

SEQ ID NO: 77265 - protein, 37 aa, Artificial Sequence; identical to SEQ ID NO: 4872
  GFR-binding peptide
  MOD_RES (2)..(36)..(37): Xaa is C or S
  MOD_RES (14)..(15)..(16)..(17)..(18): Xaa is A or G
  MOD_RES (19)..(20)..(21)..(22): Xaa is A or G or is absent

SEQ ID NO: 77266 - protein, 37 aa, Artificial Sequence; identical to SEQ ID NO: 2931
  GFR-binding peptide
  MOD_RES (2)..(4): Xaa is C or S
  MOD_RES (16)..(17)..(18)..(19)..(20): Xaa is A or G
  MOD_RES (21)..(22)..(23)..(24): Xaa is A or G or is absent

SEQ ID NO: 77267 - protein, 35 aa, Artificial Sequence; identical to SEQ ID NO: 2932
  GFR-binding peptide
  MOD_RES (1)..(34)..(35): Xaa is C or S

SEQ ID NO: 77268 - protein, 37 aa, Artificial Sequence; identical to SEQ ID NO: 2935
  GFR-binding peptide
  MOD_RES (2)..(4)..(37): Xaa is C or S
  MOD_RES (15)..(16)..(17)..(18)..(19): Xaa is A or G
  MOD_RES (20)..(21)..(22)..(23): Xaa is A or G or is absent

SEQ ID NO: 77269 - protein, 36 aa, Artificial Sequence; identical to SEQ ID NO: 2936
  GFR-binding peptide
  MOD_RES (34)..(35): Xaa is C or S
  MOD_RES (12)..(13)..(14)..(15)..(16): Xaa is A or G
  MOD_RES (17)..(18)..(19)..(20): Xaa is A or G or is absent

SEQ ID NO: 77270 - protein, 35 aa, Artificial Sequence; identical to SEQ ID NO: 4875
  GFR-binding peptide
  MOD_RES (1)..(3): Xaa is C or S
  MOD_RES (14)..(15)..(16)..(17)..(18): Xaa is A or G
  MOD_RES (19)..(20)..(21)..(22): Xaa is A or G or is absent

SEQ ID NO: 77271 - protein, 39 aa, Artificial Sequence
  GFR-binding peptide
  MOD_RES (34)..(35): Xaa is C or S
  MOD_RES (12)..(13)..(14)..(15)..(16): Xaa is A or G
  MOD_RES (17)..(18)..(19)..(20): Xaa is A or G or is absent
RDVVMGQYNKLXXXXXXXXXLYLMSIASMKTPTXXPGAS

SEQ ID NO: 77272 - protein, 37 aa, Artificial Sequence; identical to SEQ ID NO: 2938
  GFR-binding peptide
  MOD_RES (1)..(33)..(34): Xaa is C or S

SEQ ID NO: 77273 - protein, 35 aa, Artificial Sequence; identical to SEQ ID NO: 2943
  GFR-binding peptide
  MOD_RES (32)..(33): Xaa is C or S

SEQ ID NO: 77274 - protein, 41 aa, Artificial Sequence; identical to SEQ ID NO: 4876
  GFR-binding peptide
  MOD_RES (1)..(3)..(35)..(36): Xaa is C or S

SEQ ID NO: 77275 - protein, 32 aa, Artificial Sequence; identical to SEQ ID NO: 10407
  GFR-binding peptide
  MOD_RES (11)..(12)..(13)..(14)..(15): Xaa is A or G
  MOD_RES (16)..(17)..(18)..(19): Xaa is A or G or is absent

SEQ ID NO: 77276 - protein, 33 aa, Artificial Sequence; identical to SEQ ID NO: 62318
  GFR-binding peptide
  MOD_RES (2)..(2): Xaa is C or S

SEQ ID NO: 77277 - protein, 40 aa, Artificial Sequence; identical to SEQ ID NO: 4878
  GFR-binding peptide
  MOD_RES (2)..(4)..(36)..(37): Xaa is C or S

SEQ ID NO: 77278 - protein, 37 aa, Artificial Sequence; identical to SEQ ID NO: 4879
  GFR-binding peptide
  MOD_RES (1)..(32)..(33): Xaa is C or S

SEQ ID NO: 77279 - protein, 37 aa, Artificial Sequence; identical to SEQ ID NO: 4880
  GFR-binding peptide
  MOD_RES (2)..(4)..(35)..(36): Xaa is C or S

SEQ ID NO: 77280 - protein, 31 aa, Artificial Sequence; identical to SEQ ID NO: 4881
  GFR-binding peptide
  MOD_RES (31)..(31): Xaa is C or S

SEQ ID NO: 77281 - protein, 34 aa, Artificial Sequence; identical to SEQ ID NO: 56906
  GFR-binding peptide
  MOD_RES (2)..(2): Xaa is C or S
  MOD_RES (13)..(14)..(15)..(16)..(17): Xaa is A or G
  MOD_RES (18)..(19)..(20)..(21): Xaa is A or G or is absent

SEQ ID NO: 77282 - protein, 37 aa, Artificial Sequence; identical to SEQ ID NO: 2946
  GFR-binding peptide
  MOD_RES (2)..(4)..(36)..(37): Xaa is C or S

SEQ ID NO: 77283 - protein, 34 aa, Artificial Sequence; identical to SEQ ID NO: 2947
  GFR-binding peptide
  MOD_RES (1)..(1): Xaa is C or S
  MOD_RES (13)..(14)..(15)..(16)..(17): Xaa is A or G
  MOD_RES (18)..(19)..(20)..(21): Xaa is A or G or is absent

SEQ ID NO: 77284 - protein, 39 aa, Artificial Sequence; identical to SEQ ID NO: 4885
  GFR-binding peptide
  MOD_RES (2)..(4)..(36)..(37): Xaa is C or S

SEQ ID NO: 77285 - protein, 32 aa, Artificial Sequence
  GFR-binding peptide
  MOD_RES (31)..(32): Xaa is C or S
EEVIMQYNKLLLVRGNDLYLMSIASTKVPAXX

SEQ ID NO: 77286 - protein, 38 aa, Artificial Sequence; identical to SEQ ID NO: 2952
  GFR-binding peptide
  MOD_RES (1)..(34)..(35): Xaa is C or S
  MOD_RES (12)..(13)..(14)..(15)..(16): Xaa is A or G
  MOD_RES (17)..(18)..(19)..(20): Xaa is A or G or is absent

SEQ ID NO: 77287 - protein, 31 aa, Artificial Sequence; identical to SEQ ID NO: 2956
  GFR-binding peptide
  MOD_RES (31)..(31): Xaa is C or S

SEQ ID NO: 77288 - protein, 34 aa, Artificial Sequence; identical to SEQ ID NO: 4886
  GFR-binding peptide
  MOD_RES (2)..(34): Xaa is C or S

SEQ ID NO: 77289 - protein, 38 aa, Artificial Sequence
  GFR-binding peptide
  MOD_RES (2)..(33)..(34): Xaa is C or S
GXEEVIMQYNKLLLVRGNDLYLMSIASTKVPAXXTSPV

SEQ ID NO: 77290 - protein, 41 aa, Artificial Sequence; identical to SEQ ID NO: 56923
  GFR-binding peptide
  MOD_RES (2)..(4)..(36)..(37): Xaa is C or S

SEQ ID NO: 77291 - protein, 31 aa, Artificial Sequence; identical to SEQ ID NO: 2959
  GFR-binding peptide
  MOD_RES (31)..(31): Xaa is C or S

SEQ ID NO: 77292 - protein, 38 aa, Artificial Sequence
  GFR-binding peptide
  MOD_RES (1)..(35)..(36): Xaa is C or S
  MOD_RES (13)..(14)..(15)..(16)..(17): Xaa is A or G
  MOD_RES (18)..(19)..(20)..(21): Xaa is A or G or is absent
XRDVVMGQYNKLXXXXXXXXXLYLMSIASMKTPTXXPG

SEQ ID NO: 77293 - protein, 42 aa, Artificial Sequence; identical to SEQ ID NO: 4890
  GFR-binding peptide
  MOD_RES (1)..(3)..(36)..(37): Xaa is C or S
  MOD_RES (14)..(15)..(16)..(17)..(18): Xaa is A or G
  MOD_RES (19)..(20)..(21)..(22): Xaa is A or G or is absent

SEQ ID NO: 77294 - protein, 41 aa, Artificial Sequence; identical to SEQ ID NO: 4891
  GFR-binding peptide
  MOD_RES (1)..(3)..(36)..(37): Xaa is C or S
  MOD_RES (14)..(15)..(16)..(17)..(18): Xaa is A or G
  MOD_RES (19)..(20)..(21)..(22): Xaa is A or G or is absent

SEQ ID NO: 77295 - protein, 37 aa, Artificial Sequence; identical to SEQ ID NO: 56925
  GFR-binding peptide
  MOD_RES (32)..(33): Xaa is C or S

SEQ ID NO: 77296 - protein, 41 aa, Artificial Sequence; identical to SEQ ID NO: 4893
  GFR-binding peptide
  MOD_RES (1)..(3)..(37)..(38): Xaa is C or S
  MOD_RES (15)..(16)..(17)..(18)..(19): Xaa is A or G
  MOD_RES (20)..(21)..(22)..(23): Xaa is A or G or is absent

SEQ ID NO: 77297 - protein, 34 aa, Artificial Sequence
  GFR-binding peptide
  MOD_RES (1)..(1): Xaa is C or S
  MOD_RES (13)..(14)..(15)..(16)..(17): Xaa is A or G
  MOD_RES (18)..(19)..(20)..(21): Xaa is A or G or is absent
XSEVTMNQYNKLXXXXXXXXXLYLISIASMKEPV

SEQ ID NO: 77298 - protein, 34 aa, Artificial Sequence; identical to SEQ ID NO: 2966
  GFR-binding peptide
  MOD_RES (32)..(33): Xaa is C or S

SEQ ID NO: 77299 - protein, 37 aa, Artificial Sequence; identical to SEQ ID NO: 4895
  GFR-binding peptide
  MOD_RES (1)..(3)..(34)..(35): Xaa is C or S

SEQ ID NO: 77300 - protein, 36 aa, Artificial Sequence; identical to SEQ ID NO: 2967
  GFR-binding peptide
  MOD_RES (33)..(34): Xaa is C or S
  MOD_RES (11)..(12)..(13)..(14)..(15): Xaa is A or G
  MOD_RES (16)..(17)..(18)..(19): Xaa is A or G or is absent

SEQ ID NO: 77301 - protein, 41 aa, Artificial Sequence
  GFR-binding peptide
  MOD_RES (2)..(36)..(37): Xaa is C or S
  MOD_RES (14)..(15)..(16)..(17)..(18): Xaa is A or G
  MOD_RES (19)..(20)..(21)..(22): Xaa is A or G or is absent
AXSEVTMNQYNKLXXXXXXXXXLYLISIASMKEPVXXPEPI

SEQ ID NO: 77302 - protein, 41 aa, Artificial Sequence; identical to SEQ ID NO: 2968
  GFR-binding peptide
  MOD_RES (2)..(4)..(36)..(37): Xaa is C or S

SEQ ID NO: 77303 - protein, 38 aa, Artificial Sequence
  GFR-binding peptide
  MOD_RES (32)..(33): Xaa is C or S
SRVVMNQYNKLIVNSSDDLYLVSIASLKTPAXXPKPVH

SEQ ID NO: 77304 - protein, 41 aa, Artificial Sequence; identical to SEQ ID NO: 64051
  GFR-binding peptide
  MOD_RES (1)..(35)..(36): Xaa is C or S
  MOD_RES (13)..(14)..(15)..(16)..(17): Xaa is A or G
  MOD_RES (18)..(19)..(20)..(21): Xaa is A or G or is absent

SEQ ID NO: 77305 - protein, 39 aa, Artificial Sequence; identical to SEQ ID NO: 4897
  GFR-binding peptide
  MOD_RES (2)..(4)..(37)..(38): Xaa is C or S
  MOD_RES (15)..(16)..(17)..(18)..(19): Xaa is A or G
  MOD_RES (20)..(21)..(22)..(23): Xaa is A or G or is absent

SEQ ID NO: 77306 - protein, 43 aa, Artificial Sequence; identical to SEQ ID NO: 4898
  GFR-binding peptide
  MOD_RES (1)..(3)..(38)..(39): Xaa is C or S
  MOD_RES (16)..(17)..(18)..(19)..(20): Xaa is A or G
  MOD_RES (21)..(22)..(23)..(24): Xaa is A or G or is absent

SEQ ID NO: 77307 - protein, 35 aa, Artificial Sequence; identical to SEQ ID NO: 4899
  GFR-binding peptide
  MOD_RES (2)..(35): Xaa is C or S
  MOD_RES (13)..(14)..(15)..(16)..(17): Xaa is A or G
  MOD_RES (18)..(19)..(20)..(21): Xaa is A or G or is absent

SEQ ID NO: 77308 - protein, 35 aa, Artificial Sequence; identical to SEQ ID NO: 12340
  GFR-binding peptide
  MOD_RES (33)..(34): Xaa is C or S
  MOD_RES (11)..(12)..(13)..(14)..(15): Xaa is A or G
  MOD_RES (16)..(17)..(18)..(19): Xaa is A or G or is absent

SEQ ID NO: 77309 - protein, 37 aa, Artificial Sequence; identical to SEQ ID NO: 25985
  GFR-binding peptide
  MOD_RES (1)..(33)..(34): Xaa is C or S

SEQ ID NO: 77310 - protein, 32 aa, Artificial Sequence
  GFR-binding peptide
  MOD_RES (11)..(12)..(13)..(14)..(15): Xaa is A or G
  MOD_RES (16)..(17)..(18)..(19): Xaa is A or G or is absent
EVTMNQYNKLXXXXXXXXXLYLISIASMKEPV

SEQ ID NO: 77311 - protein, 37 aa, Artificial Sequence; identical to SEQ ID NO: 4902
  GFR-binding peptide
  MOD_RES (2)..(37): Xaa is C or S
  MOD_RES (15)..(16)..(17)..(18)..(19): Xaa is A or G
  MOD_RES (20)..(21)..(22)..(23): Xaa is A or G or is absent

SEQ ID NO: 77312 - protein, 36 aa, Artificial Sequence; identical to SEQ ID NO: 23971
  GFR-binding peptide
  MOD_RES (34)..(35): Xaa is C or S
  MOD_RES (12)..(13)..(14)..(15)..(16): Xaa is A or G
  MOD_RES (17)..(18)..(19)..(20): Xaa is A or G or is absent

SEQ ID NO: 77313 - protein, 42 aa, Artificial Sequence; identical to SEQ ID NO: 4906
  GFR-binding peptide
  MOD_RES (1)..(3)..(36)..(37): Xaa is C or S
  MOD_RES (14)..(15)..(16)..(17)..(18): Xaa is A or G
  MOD_RES (19)..(20)..(21)..(22): Xaa is A or G or is absent

SEQ ID NO: 77314 - protein, 35 aa, Artificial Sequence; identical to SEQ ID NO: 25995
  GFR-binding peptide
  MOD_RES (1)..(35): Xaa is C or S
  MOD_RES (13)..(14)..(15)..(16)..(17): Xaa is A or G
  MOD_RES (18)..(19)..(20)..(21): Xaa is A or G or is absent

SEQ ID NO: 77315 - protein, 42 aa, Artificial Sequence
  GFR-binding peptide
  MOD_RES (1)..(3)..(37)..(38): Xaa is C or S
  MOD_RES (15)..(16)..(17)..(18)..(19): Xaa is A or G
  MOD_RES (20)..(21)..(22)..(23): Xaa is A or G or is absent
XGXRDVVMGQYNKLXXXXXXXXXLYLMSIASMKTPTXXPGAS

SEQ ID NO: 77316 - protein, 38 aa, Artificial Sequence; identical to SEQ ID NO: 2976
  GFR-binding peptide
  MOD_RES (2)..(4)..(37)..(38): Xaa is C or S
  MOD_RES (15)..(16)..(17)..(18)..(19): Xaa is A or G
  MOD_RES (20)..(21)..(22)..(23): Xaa is A or G or is absent

SEQ ID NO: 77317 - protein, 36 aa, Artificial Sequence; identical to SEQ ID NO: 10433
  GFR-binding peptide
  MOD_RES (32)..(33): Xaa is C or S

SEQ ID NO: 77318 - protein, 42 aa, Artificial Sequence; identical to SEQ ID NO: 56948
  GFR-binding peptide
  MOD_RES (1)..(3)..(37)..(38): Xaa is C or S
  MOD_RES (15)..(16)..(17)..(18)..(19): Xaa is A or G
  MOD_RES (20)..(21)..(22)..(23): Xaa is A or G or is absent

SEQ ID NO: 77319 - protein, 40 aa, Artificial Sequence; identical to SEQ ID NO: 2983
  GFR-binding peptide
  MOD_RES (1)..(3)..(34)..(35): Xaa is C or S

SEQ ID NO: 77320 - protein, 38 aa, Artificial Sequence
  GFR-binding peptide
  MOD_RES (2)..(4)..(36)..(37): Xaa is C or S
RXGXESVAMGQYNKLYTVVGKDLYLISIASLKTPVXXA

SEQ ID NO: 77321 - protein, 44 aa, Artificial Sequence; identical to SEQ ID NO: 26002
  GFR-binding peptide
  MOD_RES (2)..(4)..(38)..(39): Xaa is C or S
  MOD_RES (16)..(17)..(18)..(19)..(20): Xaa is A or G
  MOD_RES (21)..(22)..(23)..(24): Xaa is A or G or is absent

SEQ ID NO: 77322 - protein, 37 aa, Artificial Sequence
  GFR-binding peptide
  MOD_RES (34)..(35): Xaa is C or S
  MOD_RES (12)..(13)..(14)..(15)..(16): Xaa is A or G
  MOD_RES (17)..(18)..(19)..(20): Xaa is A or G or is absent
ESVAMGQYNKLXXXXXXXXXLYLISIASLKTPVXXAK

SEQ ID NO: 77323 - protein, 37 aa, Artificial Sequence; identical to SEQ ID NO: 12350
  GFR-binding peptide
  MOD_RES (34)..(35): Xaa is C or S
  MOD_RES (12)..(13)..(14)..(15)..(16): Xaa is A or G
  MOD_RES (17)..(18)..(19)..(20): Xaa is A or G or is absent

SEQ ID NO: 77324 - protein, 30 aa, Artificial Sequence; identical to SEQ ID NO: 2986
  GFR-binding peptide

SEQ ID NO: 77325 - protein, 34 aa, Artificial Sequence
  GFR-binding peptide
  MOD_RES (2)..(34): Xaa is C or S
GXESVAMGQYNKLYTVVGKDLYLISIASLKTPVX

SEQ ID NO: 77326 - protein, 38 aa, Artificial Sequence
  GFR-binding peptide
  MOD_RES (2)..(35)..(36): Xaa is C or S
  MOD_RES (13)..(14)..(15)..(16)..(17): Xaa is A or G
  MOD_RES (18)..(19)..(20)..(21): Xaa is A or G or is absent
GXEEVIMQYNKLXXXXXXXXXLYLMSIASTKVPAXXTS

SEQ ID NO: 77327 - protein, 39 aa, Artificial Sequence; identical to SEQ ID NO: 2987
  GFR-binding peptide
  MOD_RES (34)..(34): Xaa is C or S
  MOD_RES (12)..(13)..(14)..(15)..(16): Xaa is A or G
  MOD_RES (17)..(18)..(19)..(20): Xaa is A or G or is absent

SEQ ID NO: 77328 - protein, 34 aa, Artificial Sequence; identical to SEQ ID NO: 4913
  GFR-binding peptide
  MOD_RES (1)..(3)..(34): Xaa is C or S

SEQ ID NO: 77329 - protein, 42 aa, Artificial Sequence; identical to SEQ ID NO: 4914
  GFR-binding peptide
  MOD_RES (1)..(36)..(37): Xaa is C or S
  MOD_RES (14)..(15)..(16)..(17)..(18): Xaa is A or G
  MOD_RES (19)..(20)..(21)..(22): Xaa is A or G or is absent

SEQ ID NO: 77330 - protein, 39 aa, Artificial Sequence; identical to SEQ ID NO: 4915
  GFR-binding peptide
  MOD_RES (2)..(33)..(34): Xaa is C or S

SEQ ID NO: 77331 - protein, 40 aa, Artificial Sequence; identical to SEQ ID NO: 2989
  GFR-binding peptide
  MOD_RES (1)..(35)..(36): Xaa is C or S
  MOD_RES (13)..(14)..(15)..(16)..(17): Xaa is A or G
  MOD_RES (18)..(19)..(20)..(21): Xaa is A or G or is absent

SEQ ID NO: 77332 - protein, 38 aa, Artificial Sequence; identical to SEQ ID NO: 4918
  GFR-binding peptide
  MOD_RES (2)..(35)..(36): Xaa is C or S
  MOD_RES (13)..(14)..(15)..(16)..(17): Xaa is A or G
  MOD_RES (18)..(19)..(20)..(21): Xaa is A or G or is absent

SEQ ID NO: 77333 - protein, 32 aa, Artificial Sequence
  GFR-binding peptide
  MOD_RES (32)..(32): Xaa is C or S
SEVTMNQYNKLVVNKNEDLYLISIASMKEPVX

SEQ ID NO: 77334 - protein, 39 aa, Artificial Sequence; identical to SEQ ID NO: 4920
  GFR-binding peptide
  MOD_RES (2)..(4)..(38)..(39): Xaa is C or S
  MOD_RES (16)..(17)..(18)..(19)..(20): Xaa is A or G
  MOD_RES (21)..(22)..(23)..(24): Xaa is A or G or is absent

SEQ ID NO: 77335 - protein, 36 aa, Artificial Sequence; identical to SEQ ID NO: 10446
  GFR-binding peptide
  MOD_RES (1)..(35)..(36): Xaa is C or S
  MOD_RES (13)..(14)..(15)..(16)..(17): Xaa is A or G
  MOD_RES (18)..(19)..(20)..(21): Xaa is A or G or is absent

SEQ ID NO: 77336 - protein, 36 aa, Artificial Sequence; identical to SEQ ID NO: 56957
  GFR-binding peptide
  MOD_RES (2)..(34)..(35): Xaa is C or S

SEQ ID NO: 77337 - protein, 37 aa, Artificial Sequence; identical to SEQ ID NO: 26017
  GFR-binding peptide
  MOD_RES (33)..(34): Xaa is C or S
  MOD_RES (11)..(12)..(13)..(14)..(15): Xaa is A or G
  MOD_RES (16)..(17)..(18)..(19): Xaa is A or G or is absent

SEQ ID NO: 77338 - protein, 34 aa, Artificial Sequence; identical to SEQ ID NO: 10448
  GFR-binding peptide
  MOD_RES (33)..(34): Xaa is C or S
  MOD_RES (11)..(12)..(13)..(14)..(15): Xaa is A or G
  MOD_RES (16)..(17)..(18)..(19): Xaa is A or G or is absent

SEQ ID NO: 77339 - protein, 33 aa, Artificial Sequence; identical to SEQ ID NO: 2995
  GFR-binding peptide
  MOD_RES (1)..(32)..(33): Xaa is C or S

SEQ ID NO: 77340 - protein, 37 aa, Artificial Sequence; identical to SEQ ID NO: 23996
  GFR-binding peptide
  MOD_RES (2)..(34)..(35): Xaa is C or S

SEQ ID NO: 77341 - protein, 30 aa, Artificial Sequence; identical to SEQ ID NO: 2998
  GFR-binding peptide

SEQ ID NO: 77342 - protein, 38 aa, Artificial Sequence; identical to SEQ ID NO: 2999
  GFR-binding peptide
  MOD_RES (2)..(4)..(38): Xaa is C or S
  MOD_RES (16)..(17)..(18)..(19)..(20): Xaa is A or G
  MOD_RES (21)..(22)..(23)..(24): Xaa is A or G or is absent

SEQ ID NO: 77343 - protein, 38 aa, Artificial Sequence; identical to SEQ ID NO: 3000
  GFR-binding peptide
  MOD_RES (1)..(35)..(36): Xaa is C or S
  MOD_RES (13)..(14)..(15)..(16)..(17): Xaa is A or G
  MOD_RES (18)..(19)..(20)..(21): Xaa is A or G or is absent

SEQ ID NO: 77344 - protein, 37 aa, Artificial Sequence; identical to SEQ ID NO: 56966
  GFR-binding peptide
  MOD_RES (2)..(4)..(37): Xaa is C or S
  MOD_RES (15)..(16)..(17)..(18)..(19): Xaa is A or G
  MOD_RES (20)..(21)..(22)..(23): Xaa is A or G or is absent

SEQ ID NO: 77345 - protein, 35 aa, Artificial Sequence
  GFR-binding peptide
  MOD_RES (2)..(2): Xaa is C or S
  MOD_RES (14)..(15)..(16)..(17)..(18): Xaa is A or G
  MOD_RES (19)..(20)..(21)..(22): Xaa is A or G or is absent
GXESVAMGQYNKLXXXXXXXXXLYLISIASLKTPV

SEQ ID NO: 77346 - protein, 38 aa, Artificial Sequence; identical to SEQ ID NO: 26024
  GFR-binding peptide
  MOD_RES (2)..(4)..(38): Xaa is C or S
  MOD_RES (16)..(17)..(18)..(19)..(20): Xaa is A or G
  MOD_RES (21)..(22)..(23)..(24): Xaa is A or G or is absent

SEQ ID NO: 77347 - protein, 38 aa, Artificial Sequence
  GFR-binding peptide
  MOD_RES (1)..(3)..(37)..(38): Xaa is C or S
  MOD_RES (15)..(16)..(17)..(18)..(19): Xaa is A or G
  MOD_RES (20)..(21)..(22)..(23): Xaa is A or G or is absent
XGXAEVVMDQYNKLXXXXXXXXXLYLISIASLRAPVXX

SEQ ID NO: 77348 - protein, 32 aa, Artificial Sequence; identical to SEQ ID NO: 4933
  GFR-binding peptide
  MOD_RES (1)..(1): Xaa is C or S

SEQ ID NO: 77349 - protein, 40 aa, Artificial Sequence; identical to SEQ ID NO: 56971
  GFR-binding peptide
  MOD_RES (2)..(4)..(35)..(36): Xaa is C or S

SEQ ID NO: 77350 - protein, 35 aa, Artificial Sequence; identical to SEQ ID NO: 3004
  GFR-binding peptide
  MOD_RES (1)..(34)..(35): Xaa is C or S
  MOD_RES (12)..(13)..(14)..(15)..(16): Xaa is A or G
  MOD_RES (17)..(18)..(19)..(20): Xaa is A or G or is absent

SEQ ID NO: 77351 - protein, 39 aa, Artificial Sequence
  GFR-binding peptide
  MOD_RES (2)..(4)..(38)..(39): Xaa is C or S
  MOD_RES (16)..(17)..(18)..(19)..(20): Xaa is A or G
  MOD_RES (21)..(22)..(23)..(24): Xaa is A or G or is absent
SXGXRDVVMGQYNKLXXXXXXXXXLYLMSIASMKTPTXX

SEQ ID NO: 77352 - protein, 38 aa, Artificial Sequence; identical to SEQ ID NO: 56973
  GFR-binding peptide
  MOD_RES (2)..(4)..(38): Xaa is C or S
  MOD_RES (16)..(17)..(18)..(19)..(20): Xaa is A or G
  MOD_RES (21)..(22)..(23)..(24): Xaa is A or G or is absent

SEQ ID NO: 77353 - protein, 36 aa, Artificial Sequence; identical to SEQ ID NO: 3005
  GFR-binding peptide
  MOD_RES (33)..(33): Xaa is C or S
  MOD_RES (11)..(12)..(13)..(14)..(15): Xaa is A or G
  MOD_RES (16)..(17)..(18)..(19): Xaa is A or G or is absent

SEQ ID NO: 77354 - protein, 38 aa, Artificial Sequence; identical to SEQ ID NO: 4934
  GFR-binding peptide
  MOD_RES (1)..(3)..(38): Xaa is C or S
  MOD_RES (16)..(17)..(18)..(19)..(20): Xaa is A or G
  MOD_RES (21)..(22)..(23)..(24): Xaa is A or G or is absent

SEQ ID NO: 77355 - protein, 37 aa, Artificial Sequence; identical to SEQ ID NO: 64092
  GFR-binding peptide
  MOD_RES (2)..(34)..(35): Xaa is C or S

SEQ ID NO: 77356 - protein, 36 aa, Artificial Sequence; identical to SEQ ID NO: 4935
  GFR-binding peptide
  MOD_RES (1)..(3): Xaa is C or S
  MOD_RES (15)..(16)..(17)..(18)..(19): Xaa is A or G
  MOD_RES (20)..(21)..(22)..(23): Xaa is A or G or is absent

SEQ ID NO: 77357 - protein, 38 aa, Artificial Sequence; identical to SEQ ID NO: 4936
  GFR-binding peptide
  MOD_RES (1)..(3)..(35)..(36): Xaa is C or S

SEQ ID NO: 77358 - protein, 39 aa, Artificial Sequence
  GFR-binding peptide
  MOD_RES (2)..(4)..(38)..(39): Xaa is C or S
  MOD_RES (16)..(17)..(18)..(19)..(20): Xaa is A or G
  MOD_RES (21)..(22)..(23)..(24): Xaa is A or G or is absent
RXGXAEVVMDQYNKLXXXXXXXXXLYLISIASLRAPVXX

SEQ ID NO: 77359 - protein, 37 aa, Artificial Sequence; identical to SEQ ID NO: 4938
  GFR-binding peptide
  MOD_RES (2)..(4)..(37): Xaa is C or S
  MOD_RES (15)..(16)..(17)..(18)..(19): Xaa is A or G
  MOD_RES (20)..(21)..(22)..(23): Xaa is A or G or is absent

SEQ ID NO: 77360 - protein, 42 aa, Artificial Sequence; identical to SEQ ID NO: 4940
  GFR-binding peptide
  MOD_RES (2)..(4)..(39)..(40): Xaa is C or S
  MOD_RES (17)..(18)..(19)..(20)..(21): Xaa is A or G
  MOD_RES (22)..(23)..(24)..(25): Xaa is A or G or is absent

SEQ ID NO: 77361 - protein, 37 aa, Artificial Sequence; identical to SEQ ID NO: 3008
  GFR-binding peptide
  MOD_RES (1)..(35)..(36): Xaa is C or S
  MOD_RES (13)..(14)..(15)..(16)..(17): Xaa is A or G
  MOD_RES (18)..(19)..(20)..(21): Xaa is A or G or is absent

SEQ ID NO: 77362 - protein, 37 aa, Artificial Sequence; identical to SEQ ID NO: 4943
  GFR-binding peptide
  MOD_RES (32)..(33): Xaa is C or S

SEQ ID NO: 77363 - protein, 36 aa, Artificial Sequence; identical to SEQ ID NO: 3011
  GFR-binding peptide
  MOD_RES (2)..(34)..(35): Xaa is C or S

SEQ ID NO: 77364 - protein, 36 aa, Artificial Sequence; identical to SEQ ID NO: 4944
  GFR-binding peptide
  MOD_RES (1)..(33)..(34): Xaa is C or S

SEQ ID NO: 77365 - protein, 40 aa, Artificial Sequence
  GFR-binding peptide
  MOD_RES (1)..(3)..(37)..(38): Xaa is C or S
  MOD_RES (15)..(16)..(17)..(18)..(19): Xaa is A or G
  MOD_RES (20)..(21)..(22)..(23): Xaa is A or G or is absent
XAXSEVTMNQYNKLXXXXXXXXXLYLISIASMKEPVXXPE

SEQ ID NO: 77366 - protein, 33 aa, Artificial Sequence; identical to SEQ ID NO: 3013
  GFR-binding peptide
  MOD_RES (2)..(2): Xaa is C or S

SEQ ID NO: 77367 - protein, 37 aa, Artificial Sequence; identical to SEQ ID NO: 3014
  GFR-binding peptide
  MOD_RES (1)..(3)..(37): Xaa is C or S
  MOD_RES (15)..(16)..(17)..(18)..(19): Xaa is A or G
  MOD_RES (20)..(21)..(22)..(23): Xaa is A or G or is absent

SEQ ID NO: 77368 - protein, 34 aa, Artificial Sequence; identical to SEQ ID NO: 12378
  GFR-binding peptide
  MOD_RES (2)..(34): Xaa is C or S

SEQ ID NO: 77369 - protein, 39 aa, Artificial Sequence; identical to SEQ ID NO: 56984
  GFR-binding peptide
  MOD_RES (33)..(34): Xaa is C or S
  MOD_RES (11)..(12)..(13)..(14)..(15): Xaa is A or G
  MOD_RES (16)..(17)..(18)..(19): Xaa is A or G or is absent

SEQ ID NO: 77370 - protein, 38 aa, Artificial Sequence; identical to SEQ ID NO: 3018
  GFR-binding peptide
  MOD_RES (34)..(35): Xaa is C or S
  MOD_RES (12)..(13)..(14)..(15)..(16): Xaa is A or G
  MOD_RES (17)..(18)..(19)..(20): Xaa is A or G or is absent

SEQ ID NO: 77371 - protein, 43 aa, Artificial Sequence; identical to SEQ ID NO: 3020
  GFR-binding peptide
  MOD_RES (2)..(4)..(37)..(38): Xaa is C or S
  MOD_RES (15)..(16)..(17)..(18)..(19): Xaa is A or G
  MOD_RES (20)..(21)..(22)..(23): Xaa is A or G or is absent

SEQ ID NO: 77372 - protein, 35 aa, Artificial Sequence; identical to SEQ ID NO: 4954
  GFR-binding peptide
  MOD_RES (1)..(33): Xaa is C or S

SEQ ID NO: 77373 - protein, 37 aa, Artificial Sequence; identical to SEQ ID NO: 12386
  GFR-binding peptide
  MOD_RES (2)..(4): Xaa is C or S
  MOD_RES (16)..(17)..(18)..(19)..(20): Xaa is A or G
  MOD_RES (21)..(22)..(23)..(24): Xaa is A or G or is absent

SEQ ID NO: 77374 - protein, 40 aa, Artificial Sequence; identical to SEQ ID NO: 12387
  GFR-binding peptide
  MOD_RES (2)..(36)..(37): Xaa is C or S
  MOD_RES (14)..(15)..(16)..(17)..(18): Xaa is A or G
  MOD_RES (19)..(20)..(21)..(22): Xaa is A or G or is absent

SEQ ID NO: 77375 - protein, 37 aa, Artificial Sequence; identical to SEQ ID NO: 4955
  GFR-binding peptide
  MOD_RES (2)..(34)..(35): Xaa is C or S

SEQ ID NO: 77376 - protein, 36 aa, Artificial Sequence; identical to SEQ ID NO: 4957
  GFR-binding peptide
  MOD_RES (33)..(34): Xaa is C or S
  MOD_RES (11)..(12)..(13)..(14)..(15): Xaa is A or G
  MOD_RES (16)..(17)..(18)..(19): Xaa is A or G or is absent

SEQ ID NO: 77377 - protein, 35 aa, Artificial Sequence; identical to SEQ ID NO: 4959
  GFR-binding peptide
  MOD_RES (1)..(32)..(33): Xaa is C or S

SEQ ID NO: 77378 - protein, 40 aa, Artificial Sequence; identical to SEQ ID NO: 3025
  GFR-binding peptide
  MOD_RES (2)..(4)..(37)..(38): Xaa is C or S
  MOD_RES (15)..(16)..(17)..(18)..(19): Xaa is A or G
  MOD_RES (20)..(21)..(22)..(23): Xaa is A or G or is absent

SEQ ID NO: 77379 - protein, 39 aa, Artificial Sequence; identical to SEQ ID NO: 56996
  GFR-binding peptide
  MOD_RES (1)..(3)..(34)..(35): Xaa is C or S

SEQ ID NO: 77380 - protein, 39 aa, Artificial Sequence; identical to SEQ ID NO: 4960
  GFR-binding peptide
  MOD_RES (33)..(34): Xaa is C or S
  MOD_RES (11)..(12)..(13)..(14)..(15): Xaa is A or G
  MOD_RES (16)..(17)..(18)..(19): Xaa is A or G or is absent

SEQ ID NO: 77381 - protein, 35 aa, Artificial Sequence; identical to SEQ ID NO: 3026
  GFR-binding peptide
  MOD_RES (1)..(3)..(35): Xaa is C or S

SEQ ID NO: 77382 - protein, 36 aa, Artificial Sequence; identical to SEQ ID NO: 24023
  GFR-binding peptide
  MOD_RES (1)..(35)..(36): Xaa is C or S
  MOD_RES (13)..(14)..(15)..(16)..(17): Xaa is A or G
  MOD_RES (18)..(19)..(20)..(21): Xaa is A or G or is absent

SEQ ID NO: 77383 - protein, 41 aa, Artificial Sequence; identical to SEQ ID NO: 56998
  GFR-binding peptide
  MOD_RES (1)..(35)..(36): Xaa is C or S
  MOD_RES (13)..(14)..(15)..(16)..(17): Xaa is A or G
  MOD_RES (18)..(19)..(20)..(21): Xaa is A or G or is absent

SEQ ID NO: 77384 - protein, 34 aa, Artificial Sequence
  GFR-binding peptide
  MOD_RES (2)..(34): Xaa is C or S
GXAEVVMDQYNKLVVNNAADLYLISIASLRAPVX

SEQ ID NO: 77385 - protein, 35 aa, Artificial Sequence; identical to SEQ ID NO: 12395
  GFR-binding peptide
  MOD_RES (2)..(34)..(35): Xaa is C or S

SEQ ID NO: 77386 - protein, 35 aa, Artificial Sequence; identical to SEQ ID NO: 3028
  GFR-binding peptide
  MOD_RES (32)..(33): Xaa is C or S

SEQ ID NO: 77387 - protein, 38 aa, Artificial Sequence; identical to SEQ ID NO: 3029
  GFR-binding peptide
  MOD_RES (35)..(36): Xaa is C or S
  MOD_RES (13)..(14)..(15)..(16)..(17): Xaa is A or G
  MOD_RES (18)..(19)..(20)..(21): Xaa is A or G or is absent

SEQ ID NO: 77388 - protein, 38 aa, Artificial Sequence; identical to SEQ ID NO: 4964
  GFR-binding peptide
  MOD_RES (34)..(35): Xaa is C or S
  MOD_RES (12)..(13)..(14)..(15)..(16): Xaa is A or G
  MOD_RES (17)..(18)..(19)..(20): Xaa is A or G or is absent

SEQ ID NO: 77389 - protein, 33 aa, Artificial Sequence; identical to SEQ ID NO: 4967
  GFR-binding peptide
  MOD_RES (1)..(32)..(33): Xaa is C or S

SEQ ID NO: 77390 - protein, 35 aa, Artificial Sequence; identical to SEQ ID NO: 3031
  GFR-binding peptide
  MOD_RES (1)..(34)..(35): Xaa is C or S
  MOD_RES (12)..(13)..(14)..(15)..(16): Xaa is A or G
  MOD_RES (17)..(18)..(19)..(20): Xaa is A or G or is absent

SEQ ID NO: 77391 - protein, 40 aa, Artificial Sequence; identical to SEQ ID NO: 4968
  GFR-binding peptide
  MOD_RES (2)..(37)..(38): Xaa is C or S
  MOD_RES (15)..(16)..(17)..(18)..(19): Xaa is A or G
  MOD_RES (20)..(21)..(22)..(23): Xaa is A or G or is absent

SEQ ID NO: 77392 - protein, 37 aa, Artificial Sequence
  GFR-binding peptide
  MOD_RES (33)..(34): Xaa is C or S
  MOD_RES (11)..(12)..(13)..(14)..(15): Xaa is A or G
  MOD_RES (16)..(17)..(18)..(19): Xaa is A or G or is absent
DVVMGQYNKLXXXXXXXXXLYLMSIASMKTPTXXPGA

SEQ ID NO: 77393 - protein, 34 aa, Artificial Sequence; identical to SEQ ID NO: 4969
  GFR-binding peptide
  MOD_RES (34)..(34): Xaa is C or S
  MOD_RES (12)..(13)..(14)..(15)..(16): Xaa is A or G
  MOD_RES (17)..(18)..(19)..(20): Xaa is A or G or is absent

SEQ ID NO: 77394 - protein, 38 aa, Artificial Sequence; identical to SEQ ID NO: 4970
  GFR-binding peptide
  MOD_RES (34)..(35): Xaa is C or S
  MOD_RES (12)..(13)..(14)..(15)..(16): Xaa is A or G
  MOD_RES (17)..(18)..(19)..(20): Xaa is A or G or is absent

SEQ ID NO: 77395 - protein, 35 aa, Artificial Sequence; identical to SEQ ID NO: 3033
  GFR-binding peptide
  MOD_RES (2)..(33)..(34): Xaa is C or S

SEQ ID NO: 77396 - protein, 35 aa, Artificial Sequence; identical to SEQ ID NO: 4974
  GFR-binding peptide
  MOD_RES (2)..(4): Xaa is C or S

SEQ ID NO: 77397 - protein, 38 aa, Artificial Sequence; identical to SEQ ID NO: 4977
  GFR-binding peptide
  MOD_RES (2)..(36)..(37): Xaa is C or S
  MOD_RES (14)..(15)..(16)..(17)..(18): Xaa is A or G
  MOD_RES (19)..(20)..(21)..(22): Xaa is A or G or is absent

SEQ ID NO: 77398 - protein, 36 aa, Artificial Sequence; identical to SEQ ID NO: 26069
  GFR-binding peptide
  MOD_RES (34)..(35): Xaa is C or S
  MOD_RES (12)..(13)..(14)..(15)..(16): Xaa is A or G
  MOD_RES (17)..(18)..(19)..(20): Xaa is A or G or is absent

SEQ ID NO: 77399 - protein, 38 aa, Artificial Sequence; identical to SEQ ID NO: 4980
  GFR-binding peptide
  MOD_RES (32)..(33): Xaa is C or S

SEQ ID NO: 77400 - protein, 43 aa, Artificial Sequence; identical to SEQ ID NO: 4981
  GFR-binding peptide
  MOD_RES (1)..(3)..(37)..(38): Xaa is C or S
  MOD_RES (15)..(16)..(17)..(18)..(19): Xaa is A or G
  MOD_RES (20)..(21)..(22)..(23): Xaa is A or G or is absent

SEQ ID NO: 77401 - protein, 37 aa, Artificial Sequence
  GFR-binding peptide
  MOD_RES (34)..(35): Xaa is C or S
  MOD_RES (12)..(13)..(14)..(15)..(16): Xaa is A or G
  MOD_RES (17)..(18)..(19)..(20): Xaa is A or G or is absent
AEVVMDQYNKLXXXXXXXXXLYLISIASLRAPVXXSA

SEQ ID NO: 77402 - protein, 35 aa, Artificial Sequence; identical to SEQ ID NO: 57011
  GFR-binding peptide
  MOD_RES (2)..(33)..(34): Xaa is C or S

SEQ ID NO: 77403 - protein, 43 aa, Artificial Sequence; identical to SEQ ID NO: 12416
  GFR-binding peptide
  MOD_RES (1)..(3)..(37)..(38): Xaa is C or S
  MOD_RES (15)..(16)..(17)..(18)..(19): Xaa is A or G
  MOD_RES (20)..(21)..(22)..(23): Xaa is A or G or is absent

SEQ ID NO: 77404 - protein, 39 aa, Artificial Sequence; identical to SEQ ID NO: 3039
  GFR-binding peptide
  MOD_RES (2)..(35)..(36): Xaa is C or S
  MOD_RES (13)..(14)..(15)..(16)..(17): Xaa is A or G
  MOD_RES (18)..(19)..(20)..(21): Xaa is A or G or is absent

SEQ ID NO: 77405 - protein, 33 aa, Artificial Sequence
  GFR-binding peptide
  MOD_RES (33)..(33): Xaa is C or S
  MOD_RES (11)..(12)..(13)..(14)..(15): Xaa is A or G
  MOD_RES (16)..(17)..(18)..(19): Xaa is A or G or is absent
EVTMNQYNKLXXXXXXXXXLYLISIASMKEPVX

SEQ ID NO: 77406 - protein, 38 aa, Artificial Sequence; identical to SEQ ID NO: 3041
  GFR-binding peptide
  MOD_RES (1)..(3)..(35): Xaa is C or S

SEQ ID NO: 77407 - protein, 35 aa, Artificial Sequence; identical to SEQ ID NO: 3042
  GFR-binding peptide
  MOD_RES (32)..(33): Xaa is C or S

SEQ ID NO: 77408 - protein, 44 aa, Artificial Sequence
  GFR-binding peptide
  MOD_RES (2)..(4)..(38)..(39): Xaa is C or S
  MOD_RES (16)..(17)..(18)..(19)..(20): Xaa is A or G
  MOD_RES (21)..(22)..(23)..(24): Xaa is A or G or is absent
SXGXRDVVMGQYNKLXXXXXXXXXLYLMSIASMKTPTXXPGASG

SEQ ID NO: 77409 - protein, 38 aa, Artificial Sequence; identical to SEQ ID NO: 4985
  GFR-binding peptide
  MOD_RES (2)..(4)..(35)..(36): Xaa is C or S

SEQ ID NO: 77410 - protein, 39 aa, Artificial Sequence
  GFR-binding peptide
  MOD_RES (1)..(3)..(37)..(38): Xaa is C or S
  MOD_RES (15)..(16)..(17)..(18)..(19): Xaa is A or G
  MOD_RES (20)..(21)..(22)..(23): Xaa is A or G or is absent
XAXSEVTMNQYNKLXXXXXXXXXLYLISIASMKEPVXXP

SEQ ID NO: 77411 - protein, 37 aa, Artificial Sequence; identical to SEQ ID NO: 3046
  GFR-binding peptide
  MOD_RES (2)..(33)..(34): Xaa is C or S

SEQ ID NO: 77412 - protein, 32 aa, Artificial Sequence; identical to SEQ ID NO: 57023
  GFR-binding peptide
  MOD_RES (1)..(32): Xaa is C or S

SEQ ID NO: 77413 - protein, 35 aa, Artificial Sequence
  GFR-binding peptide
  MOD_RES (32)..(33): Xaa is C or S
ESVAMGQYNKLYTVVGKDLYLISIASLKTPVXXAK

SEQ ID NO: 77414 - protein, 40 aa, Artificial Sequence
  GFR-binding peptide
  MOD_RES (1)..(3)..(37)..(38): Xaa is C or S
  MOD_RES (15)..(16)..(17)..(18)..(19): Xaa is A or G
  MOD_RES (20)..(21)..(22)..(23): Xaa is A or G or is absent
XGXRDVVMGQYNKLXXXXXXXXXLYLMSIASMKTPTXXPG

SEQ ID NO: 77415 - protein, 32 aa, Artificial Sequence
  GFR-binding peptide
  MOD_RES (32)..(32): Xaa is C or S
ESVAMGQYNKLYTVVGKDLYLISIASLKTPVX

SEQ ID NO: 77416 - protein, 43 aa, Artificial Sequence
  GFR-binding peptide
  MOD_RES (1)..(3)..(37)..(38): Xaa is C or S
  MOD_RES (15)..(16)..(17)..(18)..(19): Xaa is A or G
  MOD_RES (20)..(21)..(22)..(23): Xaa is A or G or is absent
XGXESVAMGQYNKLXXXXXXXXXLYLISIASLKTPVXXAKSAK

SEQ ID NO: 77417 - protein, 39 aa, Artificial Sequence; identical to SEQ ID NO: 12424
  GFR-binding peptide
  MOD_RES (1)..(35)..(36): Xaa is C or S
  MOD_RES (13)..(14)..(15)..(16)..(17): Xaa is A or G
  MOD_RES (18)..(19)..(20)..(21): Xaa is A or G or is absent

SEQ ID NO: 77418 - protein, 41 aa, Artificial Sequence; identical to SEQ ID NO: 3049
  GFR-binding peptide
  MOD_RES (2)..(4)..(35)..(36): Xaa is C or S

SEQ ID NO: 77419 - protein, 44 aa, Artificial Sequence; identical to SEQ ID NO: 3051
  GFR-binding peptide
  MOD_RES (2)..(4)..(38)..(39): Xaa is C or S
  MOD_RES (16)..(17)..(18)..(19)..(20): Xaa is A or G
  MOD_RES (21)..(22)..(23)..(24): Xaa is A or G or is absent

SEQ ID NO: 77420 - protein, 38 aa, Artificial Sequence; identical to SEQ ID NO: 26081
  GFR-binding peptide
  MOD_RES (34)..(35): Xaa is C or S
  MOD_RES (12)..(13)..(14)..(15)..(16): Xaa is A or G
  MOD_RES (17)..(18)..(19)..(20): Xaa is A or G or is absent

SEQ ID NO: 77421 - protein, 36 aa, Artificial Sequence; identical to SEQ ID NO: 4988
  GFR-binding peptide
  MOD_RES (35)..(36): Xaa is C or S
  MOD_RES (13)..(14)..(15)..(16)..(17): Xaa is A or G
  MOD_RES (18)..(19)..(20)..(21): Xaa is A or G or is absent

SEQ ID NO: 77422 - protein, 39 aa, Artificial Sequence; identical to SEQ ID NO: 3052
  GFR-binding peptide
  MOD_RES (1)..(35)..(36): Xaa is C or S
  MOD_RES (13)..(14)..(15)..(16)..(17): Xaa is A or G
  MOD_RES (18)..(19)..(20)..(21): Xaa is A or G or is absent

SEQ ID NO: 77423 - protein, 34 aa, Artificial Sequence; identical to SEQ ID NO: 12427
  GFR-binding peptide
  MOD_RES (1)..(1): Xaa is C or S
  MOD_RES (13)..(14)..(15)..(16)..(17): Xaa is A or G
  MOD_RES (18)..(19)..(20)..(21): Xaa is A or G or is absent

SEQ ID NO: 77424 - protein, 43 aa, Artificial Sequence; identical to SEQ ID NO: 3053
  GFR-binding peptide
  MOD_RES (2)..(4)..(38)..(39): Xaa is C or S
  MOD_RES (16)..(17)..(18)..(19)..(20): Xaa is A or G
  MOD_RES (21)..(22)..(23)..(24): Xaa is A or G or is absent

SEQ ID NO: 77425 - protein, 38 aa, Artificial Sequence; identical to SEQ ID NO: 3054
  GFR-binding peptide
  MOD_RES (1)..(3)..(36)..(37): Xaa is C or S
  MOD_RES (14)..(15)..(16)..(17)..(18): Xaa is A or G
  MOD_RES (19)..(20)..(21)..(22): Xaa is A or G or is absent

SEQ ID NO: 77426 - protein, 35 aa, Artificial Sequence; identical to SEQ ID NO: 24056
  GFR-binding peptide
  MOD_RES (32)..(33): Xaa is C or S

SEQ ID NO: 77427 - protein, 36 aa, Artificial Sequence
  GFR-binding peptide
  MOD_RES (2)..(33)..(34): Xaa is C or S
GXEEVIMQYNKLLLVRGNDLYLMSIASTKVPAXXTS

SEQ ID NO: 77428 - protein, 39 aa, Artificial Sequence; identical to SEQ ID NO: 12430
  GFR-binding peptide
  MOD_RES (2)..(36)..(37): Xaa is C or S
  MOD_RES (14)..(15)..(16)..(17)..(18): Xaa is A or G
  MOD_RES (19)..(20)..(21)..(22): Xaa is A or G or is absent

SEQ ID NO: 77429 - protein, 37 aa, Artificial Sequence; identical to SEQ ID NO: 3057
  GFR-binding peptide
  MOD_RES (34)..(35): Xaa is C or S
  MOD_RES (12)..(13)..(14)..(15)..(16): Xaa is A or G
  MOD_RES (17)..(18)..(19)..(20): Xaa is A or G or is absent

SEQ ID NO: 77430 - protein, 40 aa, Artificial Sequence; identical to SEQ ID NO: 3058
  GFR-binding peptide
  MOD_RES (2)..(4)..(38)..(39): Xaa is C or S
  MOD_RES (16)..(17)..(18)..(19)..(20): Xaa is A or G
  MOD_RES (21)..(22)..(23)..(24): Xaa is A or G or is absent

SEQ ID NO: 77431 - protein, 39 aa, Artificial Sequence; identical to SEQ ID NO: 12433
  GFR-binding peptide
  MOD_RES (1)..(3)..(35)..(36): Xaa is C or S

SEQ ID NO: 77432 - protein, 38 aa, Artificial Sequence; identical to SEQ ID NO: 4991
  GFR-binding peptide
  MOD_RES (2)..(33)..(34): Xaa is C or S

SEQ ID NO: 77433 - protein, 42 aa, Artificial Sequence
  GFR-binding peptide
  MOD_RES (2)..(4)..(36)..(37): Xaa is C or S
RXGXESVAMGQYNKLYTVVGKDLYLISIASLKTPVXXAKSAK

SEQ ID NO: 77434 - protein, 42 aa, Artificial Sequence; identical to SEQ ID NO: 57042
  GFR-binding peptide
  MOD_RES (1)..(3)..(36)..(37): Xaa is C or S
  MOD_RES (14)..(15)..(16)..(17)..(18): Xaa is A or G
  MOD_RES (19)..(20)..(21)..(22): Xaa is A or G or is absent

SEQ ID NO: 77435 - protein, 35 aa, Artificial Sequence
  GFR-binding peptide
  MOD_RES (1)..(3)..(34)..(35): Xaa is C or S
XGXEEVIMQYNKLLLVRGNDLYLMSIASTKVPAXX

SEQ ID NO: 77436 - protein, 40 aa, Artificial Sequence; identical to SEQ ID NO: 3059
  GFR-binding peptide
  MOD_RES (1)..(3)..(37): Xaa is C or S
  MOD_RES (15)..(16)..(17)..(18)..(19): Xaa is A or G
  MOD_RES (20)..(21)..(22)..(23): Xaa is A or G or is absent

SEQ ID NO: 77437 - protein, 32 aa, Artificial Sequence; identical to SEQ ID NO: 3061
  GFR-binding peptide
  MOD_RES (11)..(12)..(13)..(14)..(15): Xaa is A or G
  MOD_RES (16)..(17)..(18)..(19): Xaa is A or G or is absent

SEQ ID NO: 77438 - protein, 35 aa, Artificial Sequence; identical to SEQ ID NO: 57048
  GFR-binding peptide
  MOD_RES (2)..(4)..(35): Xaa is C or S

SEQ ID NO: 77439 - protein, 41 aa, Artificial Sequence; identical to SEQ ID NO: 57050
  GFR-binding peptide
  MOD_RES (1)..(3)..(37)..(38): Xaa is C or S
  MOD_RES (15)..(16)..(17)..(18)..(19): Xaa is A or G
  MOD_RES (20)..(21)..(22)..(23): Xaa is A or G or is absent

SEQ ID NO: 77440 - protein, 37 aa, Artificial Sequence
  GFR-binding peptide
  MOD_RES (1)..(3)..(35)..(36): Xaa is C or S
XAXSEVTMNQYNKLVVNKNEDLYLISIASMKEPVXXP

SEQ ID NO: 77441 - protein, 33 aa, Artificial Sequence; identical to SEQ ID NO: 26093
  GFR-binding peptide
  MOD_RES (1)..(33): Xaa is C or S

SEQ ID NO: 77442 - protein, 35 aa, Artificial Sequence; identical to SEQ ID NO: 5000
  GFR-binding peptide
  MOD_RES (2)..(34)..(35): Xaa is C or S

SEQ ID NO: 77443 - protein, 39 aa, Artificial Sequence; identical to SEQ ID NO: 5004
  GFR-binding peptide
  MOD_RES (1)..(3)..(35)..(36): Xaa is C or S

SEQ ID NO: 77444 - protein, 44 aa, Artificial Sequence; identical to SEQ ID NO: 64166
  GFR-binding peptide
  MOD_RES (2)..(4)..(38)..(39): Xaa is C or S
  MOD_RES (16)..(17)..(18)..(19)..(20): Xaa is A or G
  MOD_RES (21)..(22)..(23)..(24): Xaa is A or G or is absent

SEQ ID NO: 77445 - protein, 37 aa, Artificial Sequence; identical to SEQ ID NO: 5006
  GFR-binding peptide
  MOD_RES (1)..(3)..(34)..(35): Xaa is C or S

SEQ ID NO: 77446 - protein, 31 aa, Artificial Sequence; identical to SEQ ID NO: 3074
  GFR-binding peptide
  MOD_RES (31)..(31): Xaa is C or S

SEQ ID NO: 77447 - protein, 37 aa, Artificial Sequence; identical to SEQ ID NO: 10532
  GFR-binding peptide
  MOD_RES (34)..(35): Xaa is C or S
  MOD_RES (12)..(13)..(14)..(15)..(16): Xaa is A or G
  MOD_RES (17)..(18)..(19)..(20): Xaa is A or G or is absent

SEQ ID NO: 77448 - protein, 41 aa, Artificial Sequence; identical to SEQ ID NO: 3075
  GFR-binding peptide
  MOD_RES (2)..(37)..(38): Xaa is C or S
  MOD_RES (15)..(16)..(17)..(18)..(19): Xaa is A or G
  MOD_RES (20)..(21)..(22)..(23): Xaa is A or G or is absent

SEQ ID NO: 77449 - protein, 37 aa, Artificial Sequence; identical to SEQ ID NO: 5008
  GFR-binding peptide
  MOD_RES (1)..(3)..(36)..(37): Xaa is C or S

SEQ ID NO: 77450 - protein, 37 aa, Artificial Sequence; identical to SEQ ID NO: 5009
  GFR-binding peptide
  MOD_RES (1)..(3)..(36)..(37): Xaa is C or S
  MOD_RES (14)..(15)..(16)..(17)..(18): Xaa is A or G
  MOD_RES (19)..(20)..(21)..(22): Xaa is A or G or is absent

SEQ ID NO: 77451 - protein, 36 aa, Artificial Sequence; identical to SEQ ID NO: 26101
  GFR-binding peptide
  MOD_RES (33)..(34): Xaa is C or S
  MOD_RES (11)..(12)..(13)..(14)..(15): Xaa is A or G
  MOD_RES (16)..(17)..(18)..(19): Xaa is A or G or is absent

SEQ ID NO: 77452 - protein, 39 aa, Artificial Sequence
  GFR-binding peptide
  MOD_RES (1)..(3)..(37)..(38): Xaa is C or S
  MOD_RES (15)..(16)..(17)..(18)..(19): Xaa is A or G
  MOD_RES (20)..(21)..(22)..(23): Xaa is A or G or is absent
XGXAEVVMDQYNKLXXXXXXXXXLYLISIASLRAPVXXS

SEQ ID NO: 77453 - protein, 35 aa, Artificial Sequence; identical to SEQ ID NO: 5010
  GFR-binding peptide
  MOD_RES (1)..(33)..(34): Xaa is C or S

SEQ ID NO: 77454 - protein, 40 aa, Artificial Sequence
  GFR-binding peptide
  MOD_RES (1)..(34)..(35): Xaa is C or S
  MOD_RES (12)..(13)..(14)..(15)..(16): Xaa is A or G
  MOD_RES (17)..(18)..(19)..(20): Xaa is A or G or is absent
XEEVIMQYNKLXXXXXXXXXLYLMSIASTKVPAXXTSPVR

SEQ ID NO: 77455 - protein, 34 aa, Artificial Sequence; identical to SEQ ID NO: 3078
  GFR-binding peptide
  MOD_RES (33)..(34): Xaa is C or S
  MOD_RES (11)..(12)..(13)..(14)..(15): Xaa is A or G
  MOD_RES (16)..(17)..(18)..(19): Xaa is A or G or is absent

SEQ ID NO: 77456 - protein, 34 aa, Artificial Sequence; identical to SEQ ID NO: 5011
  GFR-binding peptide
  MOD_RES (1)..(34): Xaa is C or S
  MOD_RES (12)..(13)..(14)..(15)..(16): Xaa is A or G
  MOD_RES (17)..(18)..(19)..(20): Xaa is A or G or is absent

SEQ ID NO: 77457 - protein, 39 aa, Artificial Sequence
  GFR-binding peptide
  MOD_RES (1)..(3)..(36)..(37): Xaa is C or S
  MOD_RES (14)..(15)..(16)..(17)..(18): Xaa is A or G
  MOD_RES (19)..(20)..(21)..(22): Xaa is A or G or is absent
XGXEEVIMQYNKLXXXXXXXXXLYLMSIASTKVPAXXTS

SEQ ID NO: 77458 - protein, 42 aa, Artificial Sequence; identical to SEQ ID NO: 57063
  GFR-binding peptide
  MOD_RES (2)..(4)..(36)..(37): Xaa is C or S

SEQ ID NO: 77459 - protein, 37 aa, Artificial Sequence; identical to SEQ ID NO: 5013
  GFR-binding peptide
  MOD_RES (2)..(4)..(37): Xaa is C or S

SEQ ID NO: 77460 - protein, 35 aa, Artificial Sequence; identical to SEQ ID NO: 3082
  GFR-binding peptide
  MOD_RES (1)..(33)..(34): Xaa is C or S

SEQ ID NO: 77461 - protein, 39 aa, Artificial Sequence; identical to SEQ ID NO: 5016
  GFR-binding peptide
  MOD_RES (1)..(35)..(36): Xaa is C or S
  MOD_RES (13)..(14)..(15)..(16)..(17): Xaa is A or G
  MOD_RES (18)..(19)..(20)..(21): Xaa is A or G or is absent

SEQ ID NO: 77462 - protein, 35 aa, Artificial Sequence; identical to SEQ ID NO: 57068
  GFR-binding peptide
  MOD_RES (31)..(32): Xaa is C or S

SEQ ID NO: 77463 - protein, 43 aa, Artificial Sequence; identical to SEQ ID NO: 26109
  GFR-binding peptide
  MOD_RES (2)..(4)..(38)..(39): Xaa is C or S
  MOD_RES (16)..(17)..(18)..(19)..(20): Xaa is A or G
  MOD_RES (21)..(22)..(23)..(24): Xaa is A or G or is absent

SEQ ID NO: 77464 - protein, 43 aa, Artificial Sequence; identical to SEQ ID NO: 57070
  GFR-binding peptide
  MOD_RES (1)..(3)..(37)..(38): Xaa is C or S
  MOD_RES (15)..(16)..(17)..(18)..(19): Xaa is A or G
  MOD_RES (20)..(21)..(22)..(23): Xaa is A or G or is absent

SEQ ID NO: 77465 - protein, 34 aa, Artificial Sequence; identical to SEQ ID NO: 3087
  GFR-binding peptide
  MOD_RES (1)..(32)..(33): Xaa is C or S

SEQ ID NO: 77466 - protein, 40 aa, Artificial Sequence; identical to SEQ ID NO: 26111
  GFR-binding peptide
  MOD_RES (2)..(4)..(36)..(37): Xaa is C or S

SEQ ID NO: 77467 - protein, 43 aa, Artificial Sequence; identical to SEQ ID NO: 5020
  GFR-binding peptide
  MOD_RES (2)..(4)..(38)..(39): Xaa is C or S
  MOD_RES (16)..(17)..(18)..(19)..(20): Xaa is A or G
  MOD_RES (21)..(22)..(23)..(24): Xaa is A or G or is absent

SEQ ID NO: 77468 - protein, 35 aa, Artificial Sequence
  GFR-binding peptide
  MOD_RES (32)..(33): Xaa is C or S
AEVVMDQYNKLVVNNAADLYLISIASLRAPVXXSA

SEQ ID NO: 77469 - protein, 38 aa, Artificial Sequence; identical to SEQ ID NO: 3088
  GFR-binding peptide
  MOD_RES (1)..(32)..(33): Xaa is C or S

SEQ ID NO: 77470 - protein, 34 aa, Artificial Sequence
  GFR-binding peptide
  MOD_RES (2)..(34): Xaa is C or S
GXRDVVMGQYNKLIIQQKDNLYLMSIASMKTPTX

SEQ ID NO: 77471 - protein, 34 aa, Artificial Sequence
  GFR-binding peptide
  MOD_RES (33)..(34): Xaa is C or S
  MOD_RES (11)..(12)..(13)..(14)..(15): Xaa is A or G
  MOD_RES (16)..(17)..(18)..(19): Xaa is A or G or is absent
EVVMDQYNKLXXXXXXXXXLYLISIASLRAPVXX

SEQ ID NO: 77472 - protein, 33 aa, Artificial Sequence; identical to SEQ ID NO: 3092
  GFR-binding peptide
  MOD_RES (12)..(13)..(14)..(15)..(16): Xaa is A or G
  MOD_RES (17)..(18)..(19)..(20): Xaa is A or G or is absent

SEQ ID NO: 77473 - protein, 36 aa, Artificial Sequence; identical to SEQ ID NO: 5025
  GFR-binding peptide
  MOD_RES (2)..(35)..(36): Xaa is C or S
  MOD_RES (13)..(14)..(15)..(16)..(17): Xaa is A or G
  MOD_RES (18)..(19)..(20)..(21): Xaa is A or G or is absent

SEQ ID NO: 77474 - protein, 39 aa, Artificial Sequence; identical to SEQ ID NO: 3093
  GFR-binding peptide
  MOD_RES (2)..(4)..(38)..(39): Xaa is C or S
  MOD_RES (16)..(17)..(18)..(19)..(20): Xaa is A or G
  MOD_RES (21)..(22)..(23)..(24): Xaa is A or G or is absent

SEQ ID NO: 77475 - protein, 32 aa, Artificial Sequence; identical to SEQ ID NO: 5029
  GFR-binding peptide
  MOD_RES (32)..(32): Xaa is C or S

SEQ ID NO: 77476 - protein, 37 aa, Artificial Sequence; identical to SEQ ID NO: 60671
  GFR-binding peptide
  MOD_RES (2)..(4)..(36)..(37): Xaa is C or S

SEQ ID NO: 77477 - protein, 39 aa, Artificial Sequence; identical to SEQ ID NO: 64193
  GFR-binding peptide
  MOD_RES (1)..(35)..(36): Xaa is C or S
  MOD_RES (13)..(14)..(15)..(16)..(17): Xaa is A or G
  MOD_RES (18)..(19)..(20)..(21): Xaa is A or G or is absent

SEQ ID NO: 77478 - protein, 42 aa, Artificial Sequence; identical to SEQ ID NO: 57078
  GFR-binding peptide
  MOD_RES (2)..(4)..(37)..(38): Xaa is C or S
  MOD_RES (15)..(16)..(17)..(18)..(19): Xaa is A or G
  MOD_RES (20)..(21)..(22)..(23): Xaa is A or G or is absent

SEQ ID NO: 77479 - protein, 32 aa, Artificial Sequence; identical to SEQ ID NO: 5034
  GFR-binding peptide
  MOD_RES (32)..(32): Xaa is C or S

SEQ ID NO: 77480 - protein, 40 aa, Artificial Sequence
  GFR-binding peptide
  MOD_RES (2)..(36)..(37): Xaa is C or S
  MOD_RES (14)..(15)..(16)..(17)..(18): Xaa is A or G
  MOD_RES (19)..(20)..(21)..(22): Xaa is A or G or is absent
GXESVAMGQYNKLXXXXXXXXXLYLISIASLKTPVXXAKS

SEQ ID NO: 77481 - protein, 37 aa, Artificial Sequence; identical to SEQ ID NO: 3101
  GFR-binding peptide
  MOD_RES (1)..(3)..(35)..(36): Xaa is C or S

SEQ ID NO: 77482 - protein, 37 aa, Artificial Sequence
  GFR-binding peptide
  MOD_RES (1)..(35)..(36): Xaa is C or S
  MOD_RES (13)..(14)..(15)..(16)..(17): Xaa is A or G
  MOD_RES (18)..(19)..(20)..(21): Xaa is A or G or is absent
XESVAMGQYNKLXXXXXXXXXLYLISIASLKTPVXXA

SEQ ID NO: 77483 - protein, 41 aa, Artificial Sequence; identical to SEQ ID NO: 5035
  GFR-binding peptide
  MOD_RES (2)..(4)..(38)..(39): Xaa is C or S
  MOD_RES (16)..(17)..(18)..(19)..(20): Xaa is A or G
  MOD_RES (21)..(22)..(23)..(24): Xaa is A or G or is absent

SEQ ID NO: 77484 - protein, 40 aa, Artificial Sequence; identical to SEQ ID NO: 3102
  GFR-binding peptide
  MOD_RES (34)..(35): Xaa is C or S
  MOD_RES (12)..(13)..(14)..(15)..(16): Xaa is A or G
  MOD_RES (17)..(18)..(19)..(20): Xaa is A or G or is absent

SEQ ID NO: 77485 - protein, 40 aa, Artificial Sequence; identical to SEQ ID NO: 5036
  GFR-binding peptide
  MOD_RES (34)..(35): Xaa is C or S
  MOD_RES (12)..(13)..(14)..(15)..(16): Xaa is A or G
  MOD_RES (17)..(18)..(19)..(20): Xaa is A or G or is absent

SEQ ID NO: 77486 - protein, 43 aa, Artificial Sequence; identical to SEQ ID NO: 57084
  GFR-binding peptide
  MOD_RES (2)..(4)..(37)..(38): Xaa is C or S
  MOD_RES (15)..(16)..(17)..(18)..(19): Xaa is A or G
  MOD_RES (20)..(21)..(22)..(23): Xaa is A or G or is absent

SEQ ID NO: 77487 - protein, 40 aa, Artificial Sequence; identical to SEQ ID NO: 3107
  GFR-binding peptide
  MOD_RES (1)..(3)..(34)..(35): Xaa is C or S

SEQ ID NO: 77488 - protein, 37 aa, Artificial Sequence; identical to SEQ ID NO: 3108
  GFR-binding peptide
  MOD_RES (34)..(35): Xaa is C or S
  MOD_RES (12)..(13)..(14)..(15)..(16): Xaa is A or G
  MOD_RES (17)..(18)..(19)..(20): Xaa is A or G or is absent

SEQ ID NO: 77489 - protein, 38 aa, Artificial Sequence; identical to SEQ ID NO: 5040
  GFR-binding peptide
  MOD_RES (2)..(4)..(37)..(38): Xaa is C or S

SEQ ID NO: 77490 - protein, 42 aa, Artificial Sequence; identical to SEQ ID NO: 5041
  GFR-binding peptide
  MOD_RES (1)..(3)..(36)..(37): Xaa is C or S

SEQ ID NO: 77491 - protein, 37 aa, Artificial Sequence
  GFR-binding peptide
  MOD_RES (1)..(3)..(37): Xaa is C or S
  MOD_RES (15)..(16)..(17)..(18)..(19): Xaa is A or G
  MOD_RES (20)..(21)..(22)..(23): Xaa is A or G or is absent
XGXAEVVMDQYNKLXXXXXXXXXLYLISIASLRAPVX

SEQ ID NO: 77492 - protein, 35 aa, Artificial Sequence
  GFR-binding peptide
  MOD_RES (33)..(34): Xaa is C or S
  MOD_RES (11)..(12)..(13)..(14)..(15): Xaa is A or G
  MOD_RES (16)..(17)..(18)..(19): Xaa is A or G or is absent
EVVMDQYNKLXXXXXXXXXLYLISIASLRAPVXXS

SEQ ID NO: 77493 - protein, 37 aa, Artificial Sequence; identical to SEQ ID NO: 5044
  GFR-binding peptide
  MOD_RES (32)..(33): Xaa is C or S

SEQ ID NO: 77494 - protein, 38 aa, Artificial Sequence
  GFR-binding peptide
  MOD_RES (34)..(35): Xaa is C or S
  MOD_RES (12)..(13)..(14)..(15)..(16): Xaa is A or G
  MOD_RES (17)..(18)..(19)..(20): Xaa is A or G or is absent
AEVVMDQYNKLXXXXXXXXXLYLISIASLRAPVXXSAP

SEQ ID NO: 77495 - protein, 42 aa, Artificial Sequence
  GFR-binding peptide
  MOD_RES (2)..(4)..(36)..(37): Xaa is C or S
RXGXAEVVMDQYNKLVVNNAADLYLISIASLRAPVXXSAPAA

SEQ ID NO: 77496 - protein, 40 aa, Artificial Sequence; identical to SEQ ID NO: 3117
  GFR-binding peptide
  MOD_RES (2)..(36)..(37): Xaa is C or S
  MOD_RES (14)..(15)..(16)..(17)..(18): Xaa is A or G
  MOD_RES (19)..(20)..(21)..(22): Xaa is A or G or is absent

SEQ ID NO: 77497 - protein, 37 aa, Artificial Sequence; identical to SEQ ID NO: 3118
  GFR-binding peptide
  MOD_RES (33)..(34): Xaa is C or S
  MOD_RES (11)..(12)..(13)..(14)..(15): Xaa is A or G
  MOD_RES (16)..(17)..(18)..(19): Xaa is A or G or is absent

SEQ ID NO: 77498 - protein, 39 aa, Artificial Sequence; identical to SEQ ID NO: 3121
  GFR-binding peptide
  MOD_RES (2)..(35)..(36): Xaa is C or S
  MOD_RES (13)..(14)..(15)..(16)..(17): Xaa is A or G
  MOD_RES (18)..(19)..(20)..(21): Xaa is A or G or is absent

SEQ ID NO: 77499 - protein, 33 aa, Artificial Sequence; identical to SEQ ID NO: 3123
  GFR-binding peptide
  MOD_RES (2)..(2): Xaa is C or S

SEQ ID NO: 77500 - protein, 37 aa, Artificial Sequence; identical to SEQ ID NO: 3124
  GFR-binding peptide
  MOD_RES (2)..(4)..(37): Xaa is C or S
  MOD_RES (15)..(16)..(17)..(18)..(19): Xaa is A or G
  MOD_RES (20)..(21)..(22)..(23): Xaa is A or G or is absent

SEQ ID NO: 77501 - protein, 42 aa, Artificial Sequence; identical to SEQ ID NO: 26139
  GFR-binding peptide
  MOD_RES (1)..(3)..(37)..(38): Xaa is C or S
  MOD_RES (15)..(16)..(17)..(18)..(19): Xaa is A or G
  MOD_RES (20)..(21)..(22)..(23): Xaa is A or G or is absent

SEQ ID NO: 77502 - protein, 40 aa, Artificial Sequence; identical to SEQ ID NO: 3125
  GFR-binding peptide
  MOD_RES (1)..(34)..(35): Xaa is C or S
  MOD_RES (12)..(13)..(14)..(15)..(16): Xaa is A or G
  MOD_RES (17)..(18)..(19)..(20): Xaa is A or G or is absent

SEQ ID NO: 77503 - protein, 37 aa, Artificial Sequence
  GFR-binding peptide
  MOD_RES (1)..(3)..(35)..(36): Xaa is C or S
XGXAEVVMDQYNKLVVNNAADLYLISIASLRAPVXXS

SEQ ID NO: 77504 - protein, 38 aa, Artificial Sequence
  GFR-binding peptide
  MOD_RES (1)..(3)..(35)..(36): Xaa is C or S
XAXSEVTMNQYNKLVVNKNEDLYLISIASMKEPVXXPE

SEQ ID NO: 77505 - protein, 37 aa, Artificial Sequence; identical to SEQ ID NO: 3128
  GFR-binding peptide
  MOD_RES (2)..(36)..(37): Xaa is C or S
  MOD_RES (14)..(15)..(16)..(17)..(18): Xaa is A or G
  MOD_RES (19)..(20)..(21)..(22): Xaa is A or G or is absent

SEQ ID NO: 77506 - protein, 36 aa, Artificial Sequence
  GFR-binding peptide
  MOD_RES (34)..(35): Xaa is C or S
  MOD_RES (12)..(13)..(14)..(15)..(16): Xaa is A or G
  MOD_RES (17)..(18)..(19)..(20): Xaa is A or G or is absent
ESVAMGQYNKLXXXXXXXXXLYLISIASLKTPVXXA

SEQ ID NO: 77507 - protein, 40 aa, Artificial Sequence; identical to SEQ ID NO: 5053
  GFR-binding peptide
  MOD_RES (2)..(34)..(35): Xaa is C or S

SEQ ID NO: 77508 - protein, 38 aa, Artificial Sequence
  GFR-binding peptide
  MOD_RES (1)..(3)..(37)..(38): Xaa is C or S
  MOD_RES (15)..(16)..(17)..(18)..(19): Xaa is A or G
  MOD_RES (20)..(21)..(22)..(23): Xaa is A or G or is absent
XAXSEVTMNQYNKLXXXXXXXXXLYLISIASMKEPVXX

SEQ ID NO: 77509 - protein, 42 aa, Artificial Sequence; identical to SEQ ID NO: 5055
  GFR-binding peptide
  MOD_RES (2)..(36)..(37): Xaa is C or S
  MOD_RES (14)..(15)..(16)..(17)..(18): Xaa is A or G
  MOD_RES (19)..(20)..(21)..(22): Xaa is A or G or is absent

SEQ ID NO: 77510 - protein, 35 aa, Artificial Sequence; identical to SEQ ID NO: 3133
  GFR-binding peptide
  MOD_RES (34)..(35): Xaa is C or S
  MOD_RES (12)..(13)..(14)..(15)..(16): Xaa is A or G
  MOD_RES (17)..(18)..(19)..(20): Xaa is A or G or is absent

SEQ ID NO: 77511 - protein, 35 aa, Artificial Sequence; identical to SEQ ID NO: 5056
  GFR-binding peptide
  MOD_RES (1)..(3)..(35): Xaa is C or S

SEQ ID NO: 77512 - protein, 39 aa, Artificial Sequence; identical to SEQ ID NO: 57103
  GFR-binding peptide
  MOD_RES (1)..(34)..(35): Xaa is C or S
  MOD_RES (12)..(13)..(14)..(15)..(16): Xaa is A or G
  MOD_RES (17)..(18)..(19)..(20): Xaa is A or G or is absent

SEQ ID NO: 77513 - protein, 39 aa, Artificial Sequence; identical to SEQ ID NO: 5057
  GFR-binding peptide
  MOD_RES (34)..(35): Xaa is C or S
  MOD_RES (12)..(13)..(14)..(15)..(16): Xaa is A or G
  MOD_RES (17)..(18)..(19)..(20): Xaa is A or G or is absent

SEQ ID NO: 77514 - protein, 36 aa, Artificial Sequence; identical to SEQ ID NO: 3136
  GFR-binding peptide
  MOD_RES (1)..(3): Xaa is C or S
  MOD_RES (15)..(16)..(17)..(18)..(19): Xaa is A or G
  MOD_RES (20)..(21)..(22)..(23): Xaa is A or G or is absent

SEQ ID NO: 77515 - protein, 37 aa, Artificial Sequence; identical to SEQ ID NO: 3137
  GFR-binding peptide
  MOD_RES (1)..(3)..(35)..(36): Xaa is C or S

SEQ ID NO: 77516 - protein, 38 aa, Artificial Sequence; identical to SEQ ID NO: 3138
  GFR-binding peptide
  MOD_RES (34)..(35): Xaa is C or S
  MOD_RES (12)..(13)..(14)..(15)..(16): Xaa is A or G
  MOD_RES (17)..(18)..(19)..(20): Xaa is A or G or is absent

SEQ ID NO: 77517 - protein, 35 aa, Artificial Sequence
  GFR-binding peptide
  MOD_RES (33)..(34): Xaa is C or S
  MOD_RES (11)..(12)..(13)..(14)..(15): Xaa is A or G
  MOD_RES (16)..(17)..(18)..(19): Xaa is A or G or is absent
DVVMGQYNKLXXXXXXXXXLYLMSIASMKTPTXXP

SEQ ID NO: 77518 - protein, 40 aa, Artificial Sequence; identical to SEQ ID NO: 12488
  GFR-binding peptide
  MOD_RES (2)..(4)..(36)..(37): Xaa is C or S

SEQ ID NO: 77519 - protein, 32 aa, Artificial Sequence; identical to SEQ ID NO: 3139
  GFR-binding peptide
  MOD_RES (11)..(12)..(13)..(14)..(15): Xaa is A or G
  MOD_RES (16)..(17)..(18)..(19): Xaa is A or G or is absent

SEQ ID NO: 77520 - protein, 41 aa, Artificial Sequence; identical to SEQ ID NO: 5059
  GFR-binding peptide
  MOD_RES (1)..(3)..(36)..(37): Xaa is C or S
  MOD_RES (14)..(15)..(16)..(17)..(18): Xaa is A or G
  MOD_RES (19)..(20)..(21)..(22): Xaa is A or G or is absent

SEQ ID NO: 77521 - protein, 35 aa, Artificial Sequence
  GFR-binding peptide
  MOD_RES (33)..(34): Xaa is C or S
  MOD_RES (11)..(12)..(13)..(14)..(15): Xaa is A or G
  MOD_RES (16)..(17)..(18)..(19): Xaa is A or G or is absent
SVAMGQYNKLXXXXXXXXXLYLISIASLKTPVXXA

SEQ ID NO: 77522 - protein, 36 aa, Artificial Sequence; identical to SEQ ID NO: 5060
  GFR-binding peptide
  MOD_RES (31)..(32): Xaa is C or S

SEQ ID NO: 77523 - protein, 39 aa, Artificial Sequence
  GFR-binding peptide
  MOD_RES (1)..(3)..(35)..(36): Xaa is C or S
XAXSEVTMNQYNKLVVNKNEDLYLISIASMKEPVXXPEP

SEQ ID NO: 77524 - protein, 33 aa, Artificial Sequence; identical to SEQ ID NO: 3144
  GFR-binding peptide
  MOD_RES (33)..(33): Xaa is C or S
  MOD_RES (11)..(12)..(13)..(14)..(15): Xaa is A or G
  MOD_RES (16)..(17)..(18)..(19): Xaa is A or G or is absent

SEQ ID NO: 77525 - protein, 38 aa, Artificial Sequence; identical to SEQ ID NO: 5067
  GFR-binding peptide
  MOD_RES (2)..(36)..(37): Xaa is C or S
  MOD_RES (14)..(15)..(16)..(17)..(18): Xaa is A or G
  MOD_RES (19)..(20)..(21)..(22): Xaa is A or G or is absent

SEQ ID NO: 77526 - protein, 42 aa, Artificial Sequence; identical to SEQ ID NO: 5068
  GFR-binding peptide
  MOD_RES (2)..(4)..(36)..(37): Xaa is C or S

SEQ ID NO: 77527 - protein, 36 aa, Artificial Sequence
  GFR-binding peptide
  MOD_RES (1)..(3)..(36): Xaa is C or S
  MOD_RES (14)..(15)..(16)..(17)..(18): Xaa is A or G
  MOD_RES (19)..(20)..(21)..(22): Xaa is A or G or is absent
XGXEEVIMQYNKLXXXXXXXXXLYLMSIASTKVPAX

SEQ ID NO: 77528 - protein, 36 aa, Artificial Sequence; identical to SEQ ID NO: 57111
  GFR-binding peptide
  MOD_RES (2)..(4)..(36): Xaa is C or S

SEQ ID NO: 77529 - protein, 34 aa, Artificial Sequence; identical to SEQ ID NO: 3147
  GFR-binding peptide
  MOD_RES (31)..(32): Xaa is C or S

SEQ ID NO: 77530 - protein, 36 aa, Artificial Sequence; identical to SEQ ID NO: 5069
  GFR-binding peptide
  MOD_RES (1)..(33)..(34): Xaa is C or S

SEQ ID NO: 77531 - protein, 32 aa, Artificial Sequence; identical to SEQ ID NO: 57113
  GFR-binding peptide
  MOD_RES (31)..(32): Xaa is C or S

SEQ ID NO: 77532 - protein, 34 aa, Artificial Sequence; identical to SEQ ID NO: 12502
  GFR-binding peptide
  MOD_RES (1)..(33)..(34): Xaa is C or S

SEQ ID NO: 77533 - protein, 34 aa, Artificial Sequence
  GFR-binding peptide
  MOD_RES (2)..(4): Xaa is C or S
LXGXEEVIMQYNKLLLVRGNDLYLMSIASTKVPA

SEQ ID NO: 77534 - protein, 31 aa, Artificial Sequence; identical to SEQ ID NO: 3149
  GFR-binding peptide
  MOD_RES (31)..(31): Xaa is C or S

SEQ ID NO: 77535 - protein, 32 aa, Artificial Sequence
  GFR-binding peptide
  MOD_RES (1)..(32): Xaa is C or S
XEEVIMQYNKLLLVRGNDLYLMSIASTKVPAX

SEQ ID NO: 77536 - protein, 41 aa, Artificial Sequence; identical to SEQ ID NO: 5070
  GFR-binding peptide
  MOD_RES (1)..(36)..(37): Xaa is C or S
  MOD_RES (14)..(15)..(16)..(17)..(18): Xaa is A or G
  MOD_RES (19)..(20)..(21)..(22): Xaa is A or G or is absent

SEQ ID NO: 77537 - protein, 35 aa, Artificial Sequence; identical to SEQ ID NO: 5074
  GFR-binding peptide
  MOD_RES (1)..(3)..(34)..(35): Xaa is C or S

SEQ ID NO: 77538 - protein, 40 aa, Artificial Sequence; identical to SEQ ID NO: 24141
  GFR-binding peptide
  MOD_RES (34)..(35): Xaa is C or S
  MOD_RES (12)..(13)..(14)..(15)..(16): Xaa is A or G
  MOD_RES (17)..(18)..(19)..(20): Xaa is A or G or is absent

SEQ ID NO: 77539 - protein, 35 aa, Artificial Sequence; identical to SEQ ID NO: 26177
  GFR-binding peptide
  MOD_RES (32)..(33): Xaa is C or S

SEQ ID NO: 77540 - protein, 37 aa, Artificial Sequence
  GFR-binding peptide
  MOD_RES (2)..(34)..(35): Xaa is C or S
AXSEVTMNQYNKLVVNKNEDLYLISIASMKEPVXXPE

SEQ ID NO: 77541 - protein, 36 aa, Artificial Sequence; identical to SEQ ID NO: 62494
  GFR-binding peptide
  MOD_RES (33)..(34): Xaa is C or S
  MOD_RES (11)..(12)..(13)..(14)..(15): Xaa is A or G
  MOD_RES (16)..(17)..(18)..(19): Xaa is A or G or is absent

SEQ ID NO: 77542 - protein, 42 aa, Artificial Sequence; identical to SEQ ID NO: 5078
  GFR-binding peptide
  MOD_RES (2)..(36)..(37): Xaa is C or S
  MOD_RES (14)..(15)..(16)..(17)..(18): Xaa is A or G
  MOD_RES (19)..(20)..(21)..(22): Xaa is A or G or is absent

SEQ ID NO: 77543 - protein, 35 aa, Artificial Sequence; identical to SEQ ID NO: 5079
  GFR-binding peptide
  MOD_RES (32)..(33): Xaa is C or S

SEQ ID NO: 77544 - protein, 39 aa, Artificial Sequence
  GFR-binding peptide
  MOD_RES (1)..(3)..(35)..(36): Xaa is C or S
XGXESVAMGQYNKLYTVVGKDLYLISIASLKTPVXXAKS

SEQ ID NO: 77545 - protein, 38 aa, Artificial Sequence; identical to SEQ ID NO: 5080
  GFR-binding peptide
  MOD_RES (1)..(3)..(37)..(38): Xaa is C or S
  MOD_RES (15)..(16)..(17)..(18)..(19): Xaa is A or G
  MOD_RES (20)..(21)..(22)..(23): Xaa is A or G or is absent

SEQ ID NO: 77546 - protein, 38 aa, Artificial Sequence; identical to SEQ ID NO: 3157
  GFR-binding peptide
  MOD_RES (32)..(33): Xaa is C or S

SEQ ID NO: 77547 - protein, 38 aa, Artificial Sequence; identical to SEQ ID NO: 5081
  GFR-binding peptide
  MOD_RES (32)..(33): Xaa is C or S

SEQ ID NO: 77548 - protein, 34 aa, Artificial Sequence; identical to SEQ ID NO: 60727
  GFR-binding peptide
  MOD_RES (1)..(3): Xaa is C or S

SEQ ID NO: 77549 - protein, 34 aa, Artificial Sequence; identical to SEQ ID NO: 26189
  GFR-binding peptide
  MOD_RES (1)..(33)..(34): Xaa is C or S

SEQ ID NO: 77550 - protein, 36 aa, Artificial Sequence; identical to SEQ ID NO: 5086
  GFR-binding peptide
  MOD_RES (34)..(35): Xaa is C or S
  MOD_RES (12)..(13)..(14)..(15)..(16): Xaa is A or G
  MOD_RES (17)..(18)..(19)..(20): Xaa is A or G or is absent

SEQ ID NO: 77551 - protein, 35 aa, Artificial Sequence; identical to SEQ ID NO: 5088
  GFR-binding peptide
  MOD_RES (32)..(33): Xaa is C or S

SEQ ID NO: 77552 - protein, 33 aa, Artificial Sequence; identical to SEQ ID NO: 3162
  GFR-binding peptide
  MOD_RES (12)..(13)..(14)..(15)..(16): Xaa is A or G
  MOD_RES (17)..(18)..(19)..(20): Xaa is A or G or is absent

SEQ ID NO: 77553 - protein, 39 aa, Artificial Sequence
  GFR-binding peptide
  MOD_RES (34)..(35): Xaa is C or S
  MOD_RES (12)..(13)..(14)..(15)..(16): Xaa is A or G
  MOD_RES (17)..(18)..(19)..(20): Xaa is A or G or is absent
AEVVMDQYNKLXXXXXXXXXLYLISIASLRAPVXXSAPA

SEQ ID NO: 77554 - protein, 38 aa, Artificial Sequence; identical to SEQ ID NO: 5091
  GFR-binding peptide
  MOD_RES (2)..(4)..(36)..(37): Xaa is C or S

SEQ ID NO: 77555 - protein, 36 aa, Artificial Sequence; identical to SEQ ID NO: 12523
  GFR-binding peptide
  MOD_RES (32)..(33): Xaa is C or S

SEQ ID NO: 77556 - protein, 33 aa, Artificial Sequence; identical to SEQ ID NO: 5097
  GFR-binding peptide
  MOD_RES (2)..(2): Xaa is C or S

SEQ ID NO: 77557 - protein, 36 aa, Artificial Sequence; identical to SEQ ID NO: 5098
  GFR-binding peptide
  MOD_RES (1)..(32)..(33): Xaa is C or S

SEQ ID NO: 77558 - protein, 36 aa, Artificial Sequence
  GFR-binding peptide
  MOD_RES (2)..(4)..(36): Xaa is C or S
RXAXSEVTMNQYNKLVVNKNEDLYLISIASMKEPVX

SEQ ID NO: 77559 - protein, 44 aa, Artificial Sequence
  GFR-binding peptide
  MOD_RES (2)..(4)..(38)..(39): Xaa is C or S
  MOD_RES (16)..(17)..(18)..(19)..(20): Xaa is A or G
  MOD_RES (21)..(22)..(23)..(24): Xaa is A or G or is absent
HXGXSRVVMNQYNKLXXXXXXXXXLYLVSIASLKTPAXXPKPVH

SEQ ID NO: 77560 - protein, 35 aa, Artificial Sequence; identical to SEQ ID NO: 57129
  GFR-binding peptide
  MOD_RES (1)..(3)..(35): Xaa is C or S

SEQ ID NO: 77561 - protein, 35 aa, Artificial Sequence; identical to SEQ ID NO: 3170
  GFR-binding peptide
  MOD_RES (1)..(3): Xaa is C or S
  MOD_RES (14)..(15)..(16)..(17)..(18): Xaa is A or G
  MOD_RES (19)..(20)..(21)..(22): Xaa is A or G or is absent

SEQ ID NO: 77562 - protein, 36 aa, Artificial Sequence; identical to SEQ ID NO: 3171
  GFR-binding peptide
  MOD_RES (2)..(4)..(35)..(36): Xaa is C or S

SEQ ID NO: 77563 - protein, 40 aa, Artificial Sequence; identical to SEQ ID NO: 3172
  GFR-binding peptide
  MOD_RES (2)..(4)..(37)..(38): Xaa is C or S

SEQ ID NO: 77564 - protein, 37 aa, Artificial Sequence
  GFR-binding peptide
  MOD_RES (2)..(4)..(36)..(37): Xaa is C or S
RXGXESVAMGQYNKLYTVVGKDLYLISIASLKTPVXX

SEQ ID NO: 77565 - protein, 40 aa, Artificial Sequence; identical to SEQ ID NO: 57136
  GFR-binding peptide
  MOD_RES (1)..(3)..(34)..(35): Xaa is C or S

SEQ ID NO: 77566 - protein, 38 aa, Artificial Sequence; identical to SEQ ID NO: 5102
  GFR-binding peptide
  MOD_RES (1)..(35)..(36): Xaa is C or S
  MOD_RES (13)..(14)..(15)..(16)..(17): Xaa is A or G
  MOD_RES (18)..(19)..(20)..(21): Xaa is A or G or is absent

SEQ ID NO: 77567 - protein, 34 aa, Artificial Sequence; identical to SEQ ID NO: 3174
  GFR-binding peptide
  MOD_RES (1)..(32)..(33): Xaa is C or S

SEQ ID NO: 77568 - protein, 33 aa, Artificial Sequence; identical to SEQ ID NO: 3175
  GFR-binding peptide
  MOD_RES (33)..(33): Xaa is C or S
  MOD_RES (11)..(12)..(13)..(14)..(15): Xaa is A or G
  MOD_RES (16)..(17)..(18)..(19): Xaa is A or G or is absent

SEQ ID NO: 77569 - protein, 38 aa, Artificial Sequence; identical to SEQ ID NO: 5103
  GFR-binding peptide
  MOD_RES (33)..(34): Xaa is C or S
  MOD_RES (11)..(12)..(13)..(14)..(15): Xaa is A or G
  MOD_RES (16)..(17)..(18)..(19): Xaa is A or G or is absent

SEQ ID NO: 77570 - protein, 35 aa, Artificial Sequence; identical to SEQ ID NO: 5104
  GFR-binding peptide
  MOD_RES (31)..(31): Xaa is C or S

SEQ ID NO: 77571 - protein, 30 aa, Artificial Sequence; identical to SEQ ID NO: 5105
  GFR-binding peptide

SEQ ID NO: 77572 - protein, 34 aa, Artificial Sequence
  GFR-binding peptide
  MOD_RES (1)..(3): Xaa is C or S
XGXAEVVMDQYNKLVVNNAADLYLISIASLRAPV

SEQ ID NO: 77573 - protein, 39 aa, Artificial Sequence; identical to SEQ ID NO: 5106
  GFR-binding peptide
  MOD_RES (2)..(34)..(35): Xaa is C or S

SEQ ID NO: 77574 - protein, 35 aa, Artificial Sequence; identical to SEQ ID NO: 10629
  GFR-binding peptide
  MOD_RES (1)..(3)..(35): Xaa is C or S

SEQ ID NO: 77575 - protein, 39 aa, Artificial Sequence; identical to SEQ ID NO: 3179
  GFR-binding peptide
  MOD_RES (1)..(3)..(36)..(37): Xaa is C or S
  MOD_RES (14)..(15)..(16)..(17)..(18): Xaa is A or G
  MOD_RES (19)..(20)..(21)..(22): Xaa is A or G or is absent

SEQ ID NO: 77576 - protein, 37 aa, Artificial Sequence; identical to SEQ ID NO: 3181
  GFR-binding peptide
  MOD_RES (2)..(4)..(36)..(37): Xaa is C or S

SEQ ID NO: 77577 - protein, 37 aa, Artificial Sequence
  GFR-binding peptide
  MOD_RES (2)..(4): Xaa is C or S
  MOD_RES (16)..(17)..(18)..(19)..(20): Xaa is A or G
  MOD_RES (21)..(22)..(23)..(24): Xaa is A or G or is absent
RXAXSEVTMNQYNKLXXXXXXXXXLYLISIASMKEPV

SEQ ID NO: 77578 - protein, 40 aa, Artificial Sequence; identical to SEQ ID NO: 12540
  GFR-binding peptide
  MOD_RES (1)..(3)..(35)..(36): Xaa is C or S

SEQ ID NO: 77579 - protein, 36 aa, Artificial Sequence; identical to SEQ ID NO: 26210
  GFR-binding peptide
  MOD_RES (2)..(34)..(35): Xaa is C or S

SEQ ID NO: 77580 - protein, 36 aa, Artificial Sequence; identical to SEQ ID NO: 3182
  GFR-binding peptide
  MOD_RES (1)..(34)..(35): Xaa is C or S

SEQ ID NO: 77581 - protein, 34 aa, Artificial Sequence; identical to SEQ ID NO: 24177
  GFR-binding peptide
  MOD_RES (2)..(34): Xaa is C or S

SEQ ID NO: 77582 - protein, 35 aa, Artificial Sequence
  GFR-binding peptide
  MOD_RES (31)..(32): Xaa is C or S
EEVIMQYNKLLLVRGNDLYLMSIASTKVPAXXTSP

SEQ ID NO: 77583 - protein, 35 aa, Artificial Sequence; identical to SEQ ID NO: 5113
  GFR-binding peptide
  MOD_RES (1)..(3): Xaa is C or S

SEQ ID NO: 77584 - protein, 36 aa, Artificial Sequence; identical to SEQ ID NO: 5114
  GFR-binding peptide
  MOD_RES (31)..(32): Xaa is C or S

SEQ ID NO: 77585 - protein, 34 aa, Artificial Sequence; identical to SEQ ID NO: 3184
  GFR-binding peptide
  MOD_RES (1)..(1): Xaa is C or S
  MOD_RES (13)..(14)..(15)..(16)..(17): Xaa is A or G
  MOD_RES (18)..(19)..(20)..(21): Xaa is A or G or is absent

SEQ ID NO: 77586 - protein, 41 aa, Artificial Sequence; identical to SEQ ID NO: 3185
  GFR-binding peptide
  MOD_RES (2)..(4)..(38): Xaa is C or S
  MOD_RES (16)..(17)..(18)..(19)..(20): Xaa is A or G
  MOD_RES (21)..(22)..(23)..(24): Xaa is A or G or is absent

SEQ ID NO: 77587 - protein, 35 aa, Artificial Sequence; identical to SEQ ID NO: 5116
  GFR-binding peptide
  MOD_RES (32)..(33): Xaa is C or S

SEQ ID NO: 77588 - protein, 32 aa, Artificial Sequence; identical to SEQ ID NO: 5117
  GFR-binding peptide
  MOD_RES (31)..(32): Xaa is C or S

SEQ ID NO: 77589 - protein, 43 aa, Artificial Sequence; identical to SEQ ID NO: 12546
  GFR-binding peptide
  MOD_RES (2)..(4)..(38)..(39): Xaa is C or S
  MOD_RES (16)..(17)..(18)..(19)..(20): Xaa is A or G
  MOD_RES (21)..(22)..(23)..(24): Xaa is A or G or is absent

SEQ ID NO: 77590 - protein, 37 aa, Artificial Sequence
  GFR-binding peptide
  MOD_RES (2)..(34)..(35): Xaa is C or S
GXESVAMGQYNKLYTVVGKDLYLISIASLKTPVXXAK

SEQ ID NO: 77591 - protein, 39 aa, Artificial Sequence; identical to SEQ ID NO: 12547
  GFR-binding peptide
  MOD_RES (2)..(34)..(35): Xaa is C or S

SEQ ID NO: 77592 - protein, 36 aa, Artificial Sequence; identical to SEQ ID NO: 3189
  GFR-binding peptide
  MOD_RES (1)..(3)..(35)..(36): Xaa is C or S

SEQ ID NO: 77593 - protein, 42 aa, Artificial Sequence; identical to SEQ ID NO: 3190
  GFR-binding peptide
  MOD_RES (2)..(4)..(38)..(39): Xaa is C or S
  MOD_RES (16)..(17)..(18)..(19)..(20): Xaa is A or G
  MOD_RES (21)..(22)..(23)..(24): Xaa is A or G or is absent

SEQ ID NO: 77594 - protein, 35 aa, Artificial Sequence; identical to SEQ ID NO: 59024
  GFR-binding peptide
  MOD_RES (2)..(2): Xaa is C or S
  MOD_RES (14)..(15)..(16)..(17)..(18): Xaa is A or G
  MOD_RES (19)..(20)..(21)..(22): Xaa is A or G or is absent

SEQ ID NO: 77595 - protein, 34 aa, Artificial Sequence; identical to SEQ ID NO: 3192
  GFR-binding peptide
  MOD_RES (1)..(34): Xaa is C or S
  MOD_RES (12)..(13)..(14)..(15)..(16): Xaa is A or G
  MOD_RES (17)..(18)..(19)..(20): Xaa is A or G or is absent

SEQ ID NO: 77596 - protein, 41 aa, Artificial Sequence; identical to SEQ ID NO: 3195
  GFR-binding peptide
  MOD_RES (1)..(3)..(36)..(37): Xaa is C or S
  MOD_RES (14)..(15)..(16)..(17)..(18): Xaa is A or G
  MOD_RES (19)..(20)..(21)..(22): Xaa is A or G or is absent

SEQ ID NO: 77597 - protein, 36 aa, Artificial Sequence; identical to SEQ ID NO: 5122
  GFR-binding peptide
  MOD_RES (33)..(34): Xaa is C or S
  MOD_RES (11)..(12)..(13)..(14)..(15): Xaa is A or G
  MOD_RES (16)..(17)..(18)..(19): Xaa is A or G or is absent

SEQ ID NO: 77598 - protein, 39 aa, Artificial Sequence; identical to SEQ ID NO: 26225
  GFR-binding peptide
  MOD_RES (2)..(4)..(36)..(37): Xaa is C or S

SEQ ID NO: 77599 - protein, 34 aa, Artificial Sequence; identical to SEQ ID NO: 5124
  GFR-binding peptide
  MOD_RES (33)..(34): Xaa is C or S
  MOD_RES (11)..(12)..(13)..(14)..(15): Xaa is A or G
  MOD_RES (16)..(17)..(18)..(19): Xaa is A or G or is absent

SEQ ID NO: 77600 - protein, 42 aa, Artificial Sequence; identical to SEQ ID NO: 3201
  GFR-binding peptide
  MOD_RES (1)..(3)..(37): Xaa is C or S
  MOD_RES (15)..(16)..(17)..(18)..(19): Xaa is A or G
  MOD_RES (20)..(21)..(22)..(23): Xaa is A or G or is absent

SEQ ID NO: 77601 - protein, 38 aa, Artificial Sequence; identical to SEQ ID NO: 3203
  GFR-binding peptide
  MOD_RES (33)..(34): Xaa is C or S

SEQ ID NO: 77602 - protein, 44 aa, Artificial Sequence; identical to SEQ ID NO: 5130
  GFR-binding peptide
  MOD_RES (2)..(4)..(38)..(39): Xaa is C or S
  MOD_RES (16)..(17)..(18)..(19)..(20): Xaa is A or G
  MOD_RES (21)..(22)..(23)..(24): Xaa is A or G or is absent

SEQ ID NO: 77603 - protein, 42 aa, Artificial Sequence; identical to SEQ ID NO: 5131
  GFR-binding peptide
  MOD_RES (2)..(4)..(37)..(38): Xaa is C or S
  MOD_RES (15)..(16)..(17)..(18)..(19): Xaa is A or G
  MOD_RES (20)..(21)..(22)..(23): Xaa is A or G or is absent

SEQ ID NO: 77604 - protein, 37 aa, Artificial Sequence; identical to SEQ ID NO: 5132
  GFR-binding peptide
  MOD_RES (32)..(33): Xaa is C or S

SEQ ID NO: 77605 - protein, 39 aa, Artificial Sequence; identical to SEQ ID NO: 3207
  GFR-binding peptide
  MOD_RES (34)..(35): Xaa is C or S
  MOD_RES (12)..(13)..(14)..(15)..(16): Xaa is A or G
  MOD_RES (17)..(18)..(19)..(20): Xaa is A or G or is absent

SEQ ID NO: 77606 - protein, 34 aa, Artificial Sequence; identical to SEQ ID NO: 3208
  GFR-binding peptide
  MOD_RES (33)..(34): Xaa is C or S
  MOD_RES (11)..(12)..(13)..(14)..(15): Xaa is A or G
  MOD_RES (16)..(17)..(18)..(19): Xaa is A or G or is absent

SEQ ID NO: 77607 - protein, 40 aa, Artificial Sequence; identical to SEQ ID NO: 3209
  GFR-binding peptide
  MOD_RES (2)..(4)..(36)..(37): Xaa is C or S

SEQ ID NO: 77608 - protein, 43 aa, Artificial Sequence; identical to SEQ ID NO: 5136
  GFR-binding peptide
  MOD_RES (1)..(3)..(37)..(38): Xaa is C or S
  MOD_RES (15)..(16)..(17)..(18)..(19): Xaa is A or G
  MOD_RES (20)..(21)..(22)..(23): Xaa is A or G or is absent

SEQ ID NO: 77609 - protein, 32 aa, Artificial Sequence; identical to SEQ ID NO: 5137
  GFR-binding peptide
  MOD_RES (11)..(12)..(13)..(14)..(15): Xaa is A or G
  MOD_RES (16)..(17)..(18)..(19): Xaa is A or G or is absent

SEQ ID NO: 77610 - protein, 37 aa, Artificial Sequence; identical to SEQ ID NO: 3211
  GFR-binding peptide
  MOD_RES (1)..(35): Xaa is C or S
  MOD_RES (13)..(14)..(15)..(16)..(17): Xaa is A or G
  MOD_RES (18)..(19)..(20)..(21): Xaa is A or G or is absent

SEQ ID NO: 77611 - protein, 40 aa, Artificial Sequence; identical to SEQ ID NO: 26238
  GFR-binding peptide
  MOD_RES (2)..(4)..(38)..(39): Xaa is C or S
  MOD_RES (16)..(17)..(18)..(19)..(20): Xaa is A or G
  MOD_RES (21)..(22)..(23)..(24): Xaa is A or G or is absent

SEQ ID NO: 77612 - protein, 36 aa, Artificial Sequence
  GFR-binding peptide
  MOD_RES (2)..(34)..(35): Xaa is C or S
GXRDVVMGQYNKLIIQQKDNLYLMSIASMKTPTXXP

SEQ ID NO: 77613 - protein, 39 aa, Artificial Sequence; identical to SEQ ID NO: 12575
  GFR-binding peptide
  MOD_RES (1)..(33)..(34): Xaa is C or S

SEQ ID NO: 77614 - protein, 38 aa, Artificial Sequence; identical to SEQ ID NO: 5139
  GFR-binding peptide
  MOD_RES (2)..(34)..(35): Xaa is C or S

SEQ ID NO: 77615 - protein, 33 aa, Artificial Sequence; identical to SEQ ID NO: 5140
  GFR-binding peptide
  MOD_RES (12)..(13)..(14)..(15)..(16): Xaa is A or G
  MOD_RES (17)..(18)..(19)..(20): Xaa is A or G or is absent

SEQ ID NO: 77616 - protein, 32 aa, Artificial Sequence; identical to SEQ ID NO: 5141
  GFR-binding peptide
  MOD_RES (1)..(1): Xaa is C or S

SEQ ID NO: 77617 - protein, 40 aa, Artificial Sequence; identical to SEQ ID NO: 5142
  GFR-binding peptide
  MOD_RES (2)..(4)..(38)..(39): Xaa is C or S
  MOD_RES (16)..(17)..(18)..(19)..(20): Xaa is A or G
  MOD_RES (21)..(22)..(23)..(24): Xaa is A or G or is absent

SEQ ID NO: 77618 - protein, 37 aa, Artificial Sequence; identical to SEQ ID NO: 10656
  GFR-binding peptide
  MOD_RES (1)..(33)..(34): Xaa is C or S

SEQ ID NO: 77619 - protein, 36 aa, Artificial Sequence; identical to SEQ ID NO: 64277
  GFR-binding peptide
  MOD_RES (32)..(33): Xaa is C or S

SEQ ID NO: 77620 - protein, 39 aa, Artificial Sequence; identical to SEQ ID NO: 10657
  GFR-binding peptide
  MOD_RES (33)..(34): Xaa is C or S
  MOD_RES (11)..(12)..(13)..(14)..(15): Xaa is A or G
  MOD_RES (16)..(17)..(18)..(19): Xaa is A or G or is absent

SEQ ID NO: 77621 - protein, 38 aa, Artificial Sequence
  GFR-binding peptide
  MOD_RES (1)..(3)..(34)..(35): Xaa is C or S
XGXEEVIMQYNKLLLVRGNDLYLMSIASTKVPAXXTSP

SEQ ID NO: 77622 - protein, 32 aa, Artificial Sequence; identical to SEQ ID NO: 24211
  GFR-binding peptide
  MOD_RES (32)..(32): Xaa is C or S

SEQ ID NO: 77623 - protein, 36 aa, Artificial Sequence; identical to SEQ ID NO: 57186
  GFR-binding peptide
  MOD_RES (1)..(35)..(36): Xaa is C or S
  MOD_RES (13)..(14)..(15)..(16)..(17): Xaa is A or G
  MOD_RES (18)..(19)..(20)..(21): Xaa is A or G or is absent

SEQ ID NO: 77624 - protein, 30 aa, Artificial Sequence
  GFR-binding peptide
EVTMNQYNKLVVNKNEDLYLISIASMKEPV

SEQ ID NO: 77625 - protein, 35 aa, Artificial Sequence; identical to SEQ ID NO: 3218
  GFR-binding peptide
  MOD_RES (1)..(34)..(35): Xaa is C or S

SEQ ID NO: 77626 - protein, 40 aa, Artificial Sequence; identical to SEQ ID NO: 3219
  GFR-binding peptide
  MOD_RES (1)..(3)..(35)..(36): Xaa is C or S

SEQ ID NO: 77627 - protein, 40 aa, Artificial Sequence
  GFR-binding peptide
  MOD_RES (2)..(34)..(35): Xaa is C or S
AXSEVTMNQYNKLVVNKNEDLYLISIASMKEPVXXPEPIG

SEQ ID NO: 77628 - protein, 37 aa, Artificial Sequence; identical to SEQ ID NO: 3222
  GFR-binding peptide
  MOD_RES (2)..(36)..(37): Xaa is C or S
  MOD_RES (14)..(15)..(16)..(17)..(18): Xaa is A or G
  MOD_RES (19)..(20)..(21)..(22): Xaa is A or G or is absent

SEQ ID NO: 77629 - protein, 37 aa, Artificial Sequence; identical to SEQ ID NO: 3223
  GFR-binding peptide
  MOD_RES (2)..(4)..(36)..(37): Xaa is C or S

SEQ ID NO: 77630 - protein, 33 aa, Artificial Sequence; identical to SEQ ID NO: 62550
  GFR-binding peptide
  MOD_RES (1)..(33): Xaa is C or S

SEQ ID NO: 77631 - protein, 34 aa, Artificial Sequence
  GFR-binding peptide
  MOD_RES (33)..(34): Xaa is C or S
  MOD_RES (11)..(12)..(13)..(14)..(15): Xaa is A or G
  MOD_RES (16)..(17)..(18)..(19): Xaa is A or G or is absent
SVAMGQYNKLXXXXXXXXXLYLISIASLKTPVXX

SEQ ID NO: 77632 - protein, 37 aa, Artificial Sequence; identical to SEQ ID NO: 5143
  GFR-binding peptide
  MOD_RES (31)..(32): Xaa is C or S

SEQ ID NO: 77633 - protein, 33 aa, Artificial Sequence
  GFR-binding peptide
  MOD_RES (2)..(2): Xaa is C or S
AXSEVTMNQYNKLVVNKNEDLYLISIASMKEPV

SEQ ID NO: 77634 - protein, 40 aa, Artificial Sequence; identical to SEQ ID NO: 12587
  GFR-binding peptide
  MOD_RES (1)..(3)..(37)..(38): Xaa is C or S
  MOD_RES (15)..(16)..(17)..(18)..(19): Xaa is A or G
  MOD_RES (20)..(21)..(22)..(23): Xaa is A or G or is absent

SEQ ID NO: 77635 - protein, 34 aa, Artificial Sequence; identical to SEQ ID NO: 62555
  GFR-binding peptide
  MOD_RES (1)..(33)..(34): Xaa is C or S

SEQ ID NO: 77636 - protein, 39 aa, Artificial Sequence; identical to SEQ ID NO: 5147
  GFR-binding peptide
  MOD_RES (1)..(33)..(34): Xaa is C or S

SEQ ID NO: 77637 - protein, 36 aa, Artificial Sequence; identical to SEQ ID NO: 5148
  GFR-binding peptide
  MOD_RES (2)..(4)..(35)..(36): Xaa is C or S

SEQ ID NO: 77638 - protein, 43 aa, Artificial Sequence; identical to SEQ ID NO: 3229
  GFR-binding peptide
  MOD_RES (2)..(4)..(37)..(38): Xaa is C or S
  MOD_RES (15)..(16)..(17)..(18)..(19): Xaa is A or G
  MOD_RES (20)..(21)..(22)..(23): Xaa is A or G or is absent

SEQ ID NO: 77639 - protein, 42 aa, Artificial Sequence; identical to SEQ ID NO: 3231
  GFR-binding peptide
  MOD_RES (2)..(4)..(36)..(37): Xaa is C or S

SEQ ID NO: 77640 - protein, 37 aa, Artificial Sequence; identical to SEQ ID NO: 5149
  GFR-binding peptide
  MOD_RES (34)..(35): Xaa is C or S
  MOD_RES (12)..(13)..(14)..(15)..(16): Xaa is A or G
  MOD_RES (17)..(18)..(19)..(20): Xaa is A or G or is absent

SEQ ID NO: 77641 - protein, 41 aa, Artificial Sequence; identical to SEQ ID NO: 5150
  GFR-binding peptide
  MOD_RES (1)..(3)..(37)..(38): Xaa is C or S
  MOD_RES (15)..(16)..(17)..(18)..(19): Xaa is A or G
  MOD_RES (20)..(21)..(22)..(23): Xaa is A or G or is absent

SEQ ID NO: 77642 - protein, 34 aa, Artificial Sequence; identical to SEQ ID NO: 3234
  GFR-binding peptide
  MOD_RES (1)..(1): Xaa is C or S
  MOD_RES (13)..(14)..(15)..(16)..(17): Xaa is A or G
  MOD_RES (18)..(19)..(20)..(21): Xaa is A or G or is absent

SEQ ID NO: 77643 - protein, 41 aa, Artificial Sequence; identical to SEQ ID NO: 5151
  GFR-binding peptide
  MOD_RES (2)..(36)..(37): Xaa is C or S
  MOD_RES (14)..(15)..(16)..(17)..(18): Xaa is A or G
  MOD_RES (19)..(20)..(21)..(22): Xaa is A or G or is absent

SEQ ID NO: 77644 - protein, 31 aa, Artificial Sequence; identical to SEQ ID NO: 5152
  GFR-binding peptide
  MOD_RES (31)..(31): Xaa is C or S

SEQ ID NO: 77645 - protein, 36 aa, Artificial Sequence
  GFR-binding peptide
  MOD_RES (34)..(35): Xaa is C or S
  MOD_RES (12)..(13)..(14)..(15)..(16): Xaa is A or G
  MOD_RES (17)..(18)..(19)..(20): Xaa is A or G or is absent
RDVVMGQYNKLXXXXXXXXXLYLMSIASMKTPTXXP

SEQ ID NO: 77646 - protein, 33 aa, Artificial Sequence; identical to SEQ ID NO: 12596
  GFR-binding peptide
  MOD_RES (31)..(32): Xaa is C or S

SEQ ID NO: 77647 - protein, 38 aa, Artificial Sequence; identical to SEQ ID NO: 5153
  GFR-binding peptide
  MOD_RES (32)..(33): Xaa is C or S

SEQ ID NO: 77648 - protein, 42 aa, Artificial Sequence; identical to SEQ ID NO: 3238
  GFR-binding peptide
  MOD_RES (2)..(4)..(38)..(39): Xaa is C or S
  MOD_RES (16)..(17)..(18)..(19)..(20): Xaa is A or G
  MOD_RES (21)..(22)..(23)..(24): Xaa is A or G or is absent

SEQ ID NO: 77649 - protein, 36 aa, Artificial Sequence
  GFR-binding peptide
  MOD_RES (31)..(32): Xaa is C or S
EEVIMQYNKLLLVRGNDLYLMSIASTKVPAXXTSPV

SEQ ID NO: 77650 - protein, 36 aa, Artificial Sequence; identical to SEQ ID NO: 5154
  GFR-binding peptide
  MOD_RES (2)..(34)..(35): Xaa is C or S

SEQ ID NO: 77651 - protein, 39 aa, Artificial Sequence
  GFR-binding peptide
  MOD_RES (1)..(35)..(36): Xaa is C or S
  MOD_RES (13)..(14)..(15)..(16)..(17): Xaa is A or G
  MOD_RES (18)..(19)..(20)..(21): Xaa is A or G or is absent
XRDVVMGQYNKLXXXXXXXXXLYLMSIASMKTPTXXPGA

SEQ ID NO: 77652 - protein, 33 aa, Artificial Sequence; identical to SEQ ID NO: 3241
  GFR-binding peptide
  MOD_RES (1)..(32)..(33): Xaa is C or S

SEQ ID NO: 77653 - protein, 38 aa, Artificial Sequence; identical to SEQ ID NO: 5157
  GFR-binding peptide
  MOD_RES (2)..(4)..(36)..(37): Xaa is C or S

SEQ ID NO: 77654 - protein, 42 aa, Artificial Sequence; identical to SEQ ID NO: 5160
  GFR-binding peptide
  MOD_RES (2)..(36): Xaa is C or S
  MOD_RES (14)..(15)..(16)..(17)..(18): Xaa is A or G
  MOD_RES (19)..(20)..(21)..(22): Xaa is A or G or is absent

SEQ ID NO: 77655 - protein, 36 aa, Artificial Sequence; identical to SEQ ID NO: 26269
  GFR-binding peptide
  MOD_RES (1)..(3)..(35)..(36): Xaa is C or S

SEQ ID NO: 77656 - protein, 33 aa, Artificial Sequence; identical to SEQ ID NO: 57204
  GFR-binding peptide
  MOD_RES (33)..(33): Xaa is C or S
  MOD_RES (11)..(12)..(13)..(14)..(15): Xaa is A or G
  MOD_RES (16)..(17)..(18)..(19): Xaa is A or G or is absent

SEQ ID NO: 77657 - protein, 38 aa, Artificial Sequence; identical to SEQ ID NO: 5164
  GFR-binding peptide
  MOD_RES (33)..(34): Xaa is C or S
  MOD_RES (11)..(12)..(13)..(14)..(15): Xaa is A or G
  MOD_RES (16)..(17)..(18)..(19): Xaa is A or G or is absent

SEQ ID NO: 77658 - protein, 33 aa, Artificial Sequence; identical to SEQ ID NO: 3244
  GFR-binding peptide
  MOD_RES (33)..(33): Xaa is C or S

SEQ ID NO: 77659 - protein, 43 aa, Artificial Sequence; identical to SEQ ID NO: 5165
  GFR-binding peptide
  MOD_RES (2)..(4)..(38): Xaa is C or S
  MOD_RES (16)..(17)..(18)..(19)..(20): Xaa is A or G
  MOD_RES (21)..(22)..(23)..(24): Xaa is A or G or is absent

SEQ ID NO: 77660 - protein, 37 aa, Artificial Sequence; identical to SEQ ID NO: 57206
  GFR-binding peptide
  MOD_RES (1)..(3)..(36)..(37): Xaa is C or S
  MOD_RES (14)..(15)..(16)..(17)..(18): Xaa is A or G
  MOD_RES (19)..(20)..(21)..(22): Xaa is A or G or is absent

SEQ ID NO: 77661 - protein, 33 aa, Artificial Sequence; identical to SEQ ID NO: 3248
  GFR-binding peptide
  MOD_RES (31)..(32): Xaa is C or S

SEQ ID NO: 77662 - protein, 41 aa, Artificial Sequence; identical to SEQ ID NO: 5167
  GFR-binding peptide
  MOD_RES (2)..(4)..(38)..(39): Xaa is C or S
  MOD_RES (16)..(17)..(18)..(19)..(20): Xaa is A or G
  MOD_RES (21)..(22)..(23)..(24): Xaa is A or G or is absent

SEQ ID NO: 77663 - protein, 37 aa, Artificial Sequence; identical to SEQ ID NO: 5168
  GFR-binding peptide
  MOD_RES (34)..(35): Xaa is C or S
  MOD_RES (12)..(13)..(14)..(15)..(16): Xaa is A or G
  MOD_RES (17)..(18)..(19)..(20): Xaa is A or G or is absent

SEQ ID NO: 77664 - protein, 33 aa, Artificial Sequence; identical to SEQ ID NO: 3250
  GFR-binding peptide
  MOD_RES (31)..(32): Xaa is C or S

SEQ ID NO: 77665 - protein, 38 aa, Artificial Sequence; identical to SEQ ID NO: 57209
  GFR-binding peptide
  MOD_RES (2)..(4)..(36)..(37): Xaa is C or S

SEQ ID NO: 77666 - protein, 32 aa, Artificial Sequence; identical to SEQ ID NO: 5171
  GFR-binding peptide
  MOD_RES (31)..(32): Xaa is C or S

SEQ ID NO: 77667 - protein, 31 aa, Artificial Sequence
  GFR-binding peptide
  MOD_RES (1)..(1): Xaa is C or S
XEEVIMQYNKLLLVRGNDLYLMSIASTKVPA

SEQ ID NO: 77668 - protein, 35 aa, Artificial Sequence; identical to SEQ ID NO: 3254
  GFR-binding peptide
  MOD_RES (31)..(32): Xaa is C or S

SEQ ID NO: 77669 - protein, 30 aa, Artificial Sequence; identical to SEQ ID NO: 5173
  GFR-binding peptide

SEQ ID NO: 77670 - protein, 32 aa, Artificial Sequence; identical to SEQ ID NO: 3256
  GFR-binding peptide
  MOD_RES (2)..(2): Xaa is C or S

SEQ ID NO: 77671 - protein, 41 aa, Artificial Sequence
  GFR-binding peptide
  MOD_RES (1)..(3)..(36)..(37): Xaa is C or S
  MOD_RES (14)..(15)..(16)..(17)..(18): Xaa is A or G
  MOD_RES (19)..(20)..(21)..(22): Xaa is A or G or is absent
XGXEEVIMQYNKLXXXXXXXXXLYLMSIASTKVPAXXTSPV

SEQ ID NO: 77672 - protein, 43 aa, Artificial Sequence
  GFR-binding peptide
  MOD_RES (1)..(3)..(37)..(38): Xaa is C or S
  MOD_RES (15)..(16)..(17)..(18)..(19): Xaa is A or G
  MOD_RES (20)..(21)..(22)..(23): Xaa is A or G or is absent
XGXAEVVMDQYNKLXXXXXXXXXLYLISIASLRAPVXXSAPAA

SEQ ID NO: 77673 - protein, 35 aa, Artificial Sequence; identical to SEQ ID NO: 3257
  GFR-binding peptide
  MOD_RES (1)..(35): Xaa is C or S
  MOD_RES (13)..(14)..(15)..(16)..(17): Xaa is A or G
  MOD_RES (18)..(19)..(20)..(21): Xaa is A or G or is absent

SEQ ID NO: 77674 - protein, 41 aa, Artificial Sequence; identical to SEQ ID NO: 10688
  GFR-binding peptide
  MOD_RES (2)..(4)..(38)..(39): Xaa is C or S
  MOD_RES (16)..(17)..(18)..(19)..(20): Xaa is A or G
  MOD_RES (21)..(22)..(23)..(24): Xaa is A or G or is absent

SEQ ID NO: 77675 - protein, 39 aa, Artificial Sequence; identical to SEQ ID NO: 3259
  GFR-binding peptide
  MOD_RES (1)..(3)..(36)..(37): Xaa is C or S
  MOD_RES (14)..(15)..(16)..(17)..(18): Xaa is A or G
  MOD_RES (19)..(20)..(21)..(22): Xaa is A or G or is absent

SEQ ID NO: 77676 - protein, 34 aa, Artificial Sequence; identical to SEQ ID NO: 5177
  GFR-binding peptide
  MOD_RES (33)..(34): Xaa is C or S
  MOD_RES (11)..(12)..(13)..(14)..(15): Xaa is A or G
  MOD_RES (16)..(17)..(18)..(19): Xaa is A or G or is absent

SEQ ID NO: 77677 - protein, 37 aa, Artificial Sequence; identical to SEQ ID NO: 57222
  GFR-binding peptide
  MOD_RES (33)..(34): Xaa is C or S
  MOD_RES (11)..(12)..(13)..(14)..(15): Xaa is A or G
  MOD_RES (16)..(17)..(18)..(19): Xaa is A or G or is absent

SEQ ID NO: 77678 - protein, 36 aa, Artificial Sequence; identical to SEQ ID NO: 3261
  GFR-binding peptide
  MOD_RES (2)..(4)..(36): Xaa is C or S

SEQ ID NO: 77679 - protein, 33 aa, Artificial Sequence; identical to SEQ ID NO: 5180
  GFR-binding peptide
  MOD_RES (12)..(13)..(14)..(15)..(16): Xaa is A or G
  MOD_RES (17)..(18)..(19)..(20): Xaa is A or G or is absent

SEQ ID NO: 77680 - protein, 39 aa, Artificial Sequence
  GFR-binding peptide
  MOD_RES (34)..(35): Xaa is C or S
  MOD_RES (12)..(13)..(14)..(15)..(16): Xaa is A or G
  MOD_RES (17)..(18)..(19)..(20): Xaa is A or G or is absent
SEVTMNQYNKLXXXXXXXXXLYLISIASMKEPVXXPEPI

SEQ ID NO: 77681 - protein, 32 aa, Artificial Sequence; identical to SEQ ID NO: 57226
  GFR-binding peptide
  MOD_RES (11)..(12)..(13)..(14)..(15): Xaa is A or G
  MOD_RES (16)..(17)..(18)..(19): Xaa is A or G or is absent

SEQ ID NO: 77682 - protein, 32 aa, Artificial Sequence; identical to SEQ ID NO: 3264
  GFR-binding peptide
  MOD_RES (11)..(12)..(13)..(14)..(15): Xaa is A or G
  MOD_RES (16)..(17)..(18)..(19): Xaa is A or G or is absent

SEQ ID NO: 77683 - protein, 40 aa, Artificial Sequence
  GFR-binding peptide
  MOD_RES (1)..(3)..(37)..(38): Xaa is C or S
  MOD_RES (15)..(16)..(17)..(18)..(19): Xaa is A or G
  MOD_RES (20)..(21)..(22)..(23): Xaa is A or G or is absent
XGXESVAMGQYNKLXXXXXXXXXLYLISIASLKTPVXXAK

SEQ ID NO: 77684 - protein, 35 aa, Artificial Sequence; identical to SEQ ID NO: 5183
  GFR-binding peptide
  MOD_RES (1)..(35): Xaa is C or S
  MOD_RES (13)..(14)..(15)..(16)..(17): Xaa is A or G
  MOD_RES (18)..(19)..(20)..(21): Xaa is A or G or is absent

SEQ ID NO: 77685 - protein, 41 aa, Artificial Sequence; identical to SEQ ID NO: 57228
  GFR-binding peptide
  MOD_RES (2)..(4)..(38)..(39): Xaa is C or S
  MOD_RES (16)..(17)..(18)..(19)..(20): Xaa is A or G
  MOD_RES (21)..(22)..(23)..(24): Xaa is A or G or is absent

SEQ ID NO: 77686 - protein, 36 aa, Artificial Sequence; identical to SEQ ID NO: 5185
  GFR-binding peptide
  MOD_RES (2)..(33)..(34): Xaa is C or S

SEQ ID NO: 77687 - protein, 37 aa, Artificial Sequence
  GFR-binding peptide
  MOD_RES (33)..(34): Xaa is C or S
  MOD_RES (11)..(12)..(13)..(14)..(15): Xaa is A or G
  MOD_RES (16)..(17)..(18)..(19): Xaa is A or G or is absent
EVVMDQYNKLXXXXXXXXXLYLISIASLRAPVXXSAP

SEQ ID NO: 77688 - protein, 35 aa, Artificial Sequence; identical to SEQ ID NO: 10706
  GFR-binding peptide
  MOD_RES (31)..(32): Xaa is C or S

SEQ ID NO: 77689 - protein, 32 aa, Artificial Sequence; identical to SEQ ID NO: 5188
  GFR-binding peptide

SEQ ID NO: 77690 - protein, 42 aa, Artificial Sequence; identical to SEQ ID NO: 3269
  GFR-binding peptide
  MOD_RES (2)..(4)..(36)..(37): Xaa is C or S

SEQ ID NO: 77691 - protein, 40 aa, Artificial Sequence; identical to SEQ ID NO: 5190
  GFR-binding peptide
  MOD_RES (1)..(3)..(37)..(38): Xaa is C or S
  MOD_RES (15)..(16)..(17)..(18)..(19): Xaa is A or G
  MOD_RES (20)..(21)..(22)..(23): Xaa is A or G or is absent

SEQ ID NO: 77692 - protein, 42 aa, Artificial Sequence; identical to SEQ ID NO: 3271
  GFR-binding peptide
  MOD_RES (1)..(3)..(37)..(38): Xaa is C or S
  MOD_RES (15)..(16)..(17)..(18)..(19): Xaa is A or G
  MOD_RES (20)..(21)..(22)..(23): Xaa is A or G or is absent

SEQ ID NO: 77693 - protein, 35 aa, Artificial Sequence; identical to SEQ ID NO: 5192
  GFR-binding peptide
  MOD_RES (1)..(3)..(35): Xaa is C or S

SEQ ID NO: 77694 - protein, 33 aa, Artificial Sequence; identical to SEQ ID NO: 5193
  GFR-binding peptide
  MOD_RES (33)..(33): Xaa is C or S
  MOD_RES (11)..(12)..(13)..(14)..(15): Xaa is A or G
  MOD_RES (16)..(17)..(18)..(19): Xaa is A or G or is absent

SEQ ID NO: 77695 - protein, 31 aa, Artificial Sequence; identical to SEQ ID NO: 57231
  GFR-binding peptide
  MOD_RES (31)..(31): Xaa is C or S

SEQ ID NO: 77696 - protein, 42 aa, Artificial Sequence; identical to SEQ ID NO: 3272
  GFR-binding peptide
  MOD_RES (2)..(4)..(36)..(37): Xaa is C or S

SEQ ID NO: 77697 - protein, 35 aa, Artificial Sequence; identical to SEQ ID NO: 5195
  GFR-binding peptide
  MOD_RES (1)..(32)..(33): Xaa is C or S

SEQ ID NO: 77698 - protein, 39 aa, Artificial Sequence; identical to SEQ ID NO: 5197
  GFR-binding peptide
  MOD_RES (1)..(3)..(37)..(38): Xaa is C or S
  MOD_RES (15)..(16)..(17)..(18)..(19): Xaa is A or G
  MOD_RES (20)..(21)..(22)..(23): Xaa is A or G or is absent

SEQ ID NO: 77699 - protein, 43 aa, Artificial Sequence
  GFR-binding peptide
  MOD_RES (2)..(4)..(38)..(39): Xaa is C or S
  MOD_RES (16)..(17)..(18)..(19)..(20): Xaa is A or G
  MOD_RES (21)..(22)..(23)..(24): Xaa is A or G or is absent
RXGXAEVVMDQYNKLXXXXXXXXXLYLISIASLRAPVXXSAPA

SEQ ID NO: 77700 - protein, 34 aa, Artificial Sequence; identical to SEQ ID NO: 26309
  GFR-binding peptide
  MOD_RES (2)..(34): Xaa is C or S

SEQ ID NO: 77701 - protein, 39 aa, Artificial Sequence
  GFR-binding peptide
  MOD_RES (2)..(33)..(34): Xaa is C or S
GXEEVIMQYNKLLLVRGNDLYLMSIASTKVPAXXTSPVR

SEQ ID NO: 77702 - protein, 36 aa, Artificial Sequence; identical to SEQ ID NO: 5201
  GFR-binding peptide
  MOD_RES (33)..(34): Xaa is C or S

SEQ ID NO: 77703 - protein, 35 aa, Artificial Sequence; identical to SEQ ID NO: 3276
  GFR-binding peptide
  MOD_RES (33)..(34): Xaa is C or S
  MOD_RES (11)..(12)..(13)..(14)..(15): Xaa is A or G
  MOD_RES (16)..(17)..(18)..(19): Xaa is A or G or is absent

SEQ ID NO: 77704 - protein, 41 aa, Artificial Sequence; identical to SEQ ID NO: 3278
  GFR-binding peptide
  MOD_RES (2)..(35)..(36): Xaa is C or S

SEQ ID NO: 77705 - protein, 35 aa, Artificial Sequence; identical to SEQ ID NO: 5202
  GFR-binding peptide
  MOD_RES (1)..(35): Xaa is C or S
  MOD_RES (13)..(14)..(15)..(16)..(17): Xaa is A or G
  MOD_RES (18)..(19)..(20)..(21): Xaa is A or G or is absent

SEQ ID NO: 77706 - protein, 39 aa, Artificial Sequence; identical to SEQ ID NO: 5206
  GFR-binding peptide
  MOD_RES (33)..(34): Xaa is C or S
  MOD_RES (11)..(12)..(13)..(14)..(15): Xaa is A or G
  MOD_RES (16)..(17)..(18)..(19): Xaa is A or G or is absent

SEQ ID NO: 77707 - protein, 33 aa, Artificial Sequence; identical to SEQ ID NO: 3281
  GFR-binding peptide
  MOD_RES (2)..(33): Xaa is C or S

SEQ ID NO: 77708 - protein, 35 aa, Artificial Sequence; identical to SEQ ID NO: 5208
  GFR-binding peptide
  MOD_RES (1)..(34)..(35): Xaa is C or S
  MOD_RES (12)..(13)..(14)..(15)..(16): Xaa is A or G
  MOD_RES (17)..(18)..(19)..(20): Xaa is A or G or is absent

SEQ ID NO: 77709 - protein, 38 aa, Artificial Sequence
  GFR-binding peptide
  MOD_RES (1)..(3)..(37)..(38): Xaa is C or S
  MOD_RES (15)..(16)..(17)..(18)..(19): Xaa is A or G
  MOD_RES (20)..(21)..(22)..(23): Xaa is A or G or is absent
XGXRDVVMGQYNKLXXXXXXXXXLYLMSIASMKTPTXX

SEQ ID NO: 77710 - protein, 38 aa, Artificial Sequence; identical to SEQ ID NO: 56144
  GFR-binding peptide
  MOD_RES (32)..(33): Xaa is C or S

SEQ ID NO: 77711 - protein, 36 aa, Artificial Sequence
  GFR-binding peptide
  MOD_RES (2)..(4)..(36): Xaa is C or S
RXGXESVAMGQYNKLYTVVGKDLYLISIASLKTPVX

SEQ ID NO: 77712 - protein, 35 aa, Artificial Sequence; identical to SEQ ID NO: 3283
  GFR-binding peptide
  MOD_RES (1)..(35): Xaa is C or S
  MOD_RES (13)..(14)..(15)..(16)..(17): Xaa is A or G
  MOD_RES (18)..(19)..(20)..(21): Xaa is A or G or is absent

SEQ ID NO: 77713 - protein, 36 aa, Artificial Sequence; identical to SEQ ID NO: 3288
  GFR-binding peptide
  MOD_RES (2)..(4)..(36): Xaa is C or S

SEQ ID NO: 77714 - protein, 34 aa, Artificial Sequence; identical to SEQ ID NO: 5213
  GFR-binding peptide
  MOD_RES (1)..(3): Xaa is C or S

SEQ ID NO: 77715 - protein, 32 aa, Artificial Sequence; identical to SEQ ID NO: 5214
  GFR-binding peptide
  MOD_RES (31)..(32): Xaa is C or S

SEQ ID NO: 77716 - protein, 41 aa, Artificial Sequence; identical to SEQ ID NO: 3292
  GFR-binding peptide
  MOD_RES (1)..(3)..(36)..(37): Xaa is C or S
  MOD_RES (14)..(15)..(16)..(17)..(18): Xaa is A or G
  MOD_RES (19)..(20)..(21)..(22): Xaa is A or G or is absent

SEQ ID NO: 77717 - protein, 41 aa, Artificial Sequence; identical to SEQ ID NO: 5216
  GFR-binding peptide
  MOD_RES (2)..(37)..(38): Xaa is C or S
  MOD_RES (15)..(16)..(17)..(18)..(19): Xaa is A or G
  MOD_RES (20)..(21)..(22)..(23): Xaa is A or G or is absent

SEQ ID NO: 77718 - protein, 39 aa, Artificial Sequence; identical to SEQ ID NO: 56149
  GFR-binding peptide
  MOD_RES (1)..(3)..(36)..(37): Xaa is C or S
  MOD_RES (14)..(15)..(16)..(17)..(18): Xaa is A or G
  MOD_RES (19)..(20)..(21)..(22): Xaa is A or G or is absent

SEQ ID NO: 77719 - protein, 37 aa, Artificial Sequence; identical to SEQ ID NO: 5217
  GFR-binding peptide
  MOD_RES (1)..(3)..(36)..(37): Xaa is C or S
  MOD_RES (14)..(15)..(16)..(17)..(18): Xaa is A or G
  MOD_RES (19)..(20)..(21)..(22): Xaa is A or G or is absent

SEQ ID NO: 77720 - protein, 40 aa, Artificial Sequence; identical to SEQ ID NO: 5218
  GFR-binding peptide
  MOD_RES (1)..(3)..(35)..(36): Xaa is C or S

SEQ ID NO: 77721 - protein, 37 aa, Artificial Sequence; identical to SEQ ID NO: 3297
  GFR-binding peptide
  MOD_RES (2)..(4): Xaa is C or S
  MOD_RES (16)..(17)..(18)..(19)..(20): Xaa is A or G
  MOD_RES (21)..(22)..(23)..(24): Xaa is A or G or is absent

SEQ ID NO: 77722 - protein, 35 aa, Artificial Sequence; identical to SEQ ID NO: 5219
  GFR-binding peptide
  MOD_RES (2)..(34)..(35): Xaa is C or S

SEQ ID NO: 77723 - protein, 36 aa, Artificial Sequence
  GFR-binding peptide
  MOD_RES (2)..(36): Xaa is C or S
  MOD_RES (14)..(15)..(16)..(17)..(18): Xaa is A or G
  MOD_RES (19)..(20)..(21)..(22): Xaa is A or G or is absent
AXSEVTMNQYNKLXXXXXXXXXLYLISIASMKEPVX

SEQ ID NO: 77724 - protein, 40 aa, Artificial Sequence; identical to SEQ ID NO: 5220
  GFR-binding peptide
  MOD_RES (2)..(4)..(35)..(36): Xaa is C or S

SEQ ID NO: 77725 - protein, 36 aa, Artificial Sequence; identical to SEQ ID NO: 26332
  GFR-binding peptide
  MOD_RES (31)..(32): Xaa is C or S

SEQ ID NO: 77726 - protein, 39 aa, Artificial Sequence; identical to SEQ ID NO: 3298
  GFR-binding peptide
  MOD_RES (1)..(36)..(37): Xaa is C or S
  MOD_RES (14)..(15)..(16)..(17)..(18): Xaa is A or G
  MOD_RES (19)..(20)..(21)..(22): Xaa is A or G or is absent

SEQ ID NO: 77727 - protein, 37 aa, Artificial Sequence; identical to SEQ ID NO: 5223
  GFR-binding peptide
  MOD_RES (31)..(32): Xaa is C or S

SEQ ID NO: 77728 - protein, 42 aa, Artificial Sequence; identical to SEQ ID NO: 5224
  GFR-binding peptide
  MOD_RES (2)..(37)..(38): Xaa is C or S
  MOD_RES (15)..(16)..(17)..(18)..(19): Xaa is A or G
  MOD_RES (20)..(21)..(22)..(23): Xaa is A or G or is absent

SEQ ID NO: 77729 - protein, 40 aa, Artificial Sequence; identical to SEQ ID NO: 24290
  GFR-binding peptide
  MOD_RES (34)..(35): Xaa is C or S
  MOD_RES (12)..(13)..(14)..(15)..(16): Xaa is A or G
  MOD_RES (17)..(18)..(19)..(20): Xaa is A or G or is absent

SEQ ID NO: 77730 - protein, 40 aa, Artificial Sequence; identical to SEQ ID NO: 60860
  GFR-binding peptide
  MOD_RES (2)..(36)..(37): Xaa is C or S
  MOD_RES (14)..(15)..(16)..(17)..(18): Xaa is A or G
  MOD_RES (19)..(20)..(21)..(22): Xaa is A or G or is absent

SEQ ID NO: 77731 - protein, 41 aa, Artificial Sequence; identical to SEQ ID NO: 5226
  GFR-binding peptide
  MOD_RES (2)..(4)..(35)..(36): Xaa is C or S

SEQ ID NO: 77732 - protein, 35 aa, Artificial Sequence; identical to SEQ ID NO: 26339
  GFR-binding peptide
  MOD_RES (2)..(34)..(35): Xaa is C or S

SEQ ID NO: 77733 - protein, 39 aa, Artificial Sequence; identical to SEQ ID NO: 56165
  GFR-binding peptide
  MOD_RES (2)..(35)..(36): Xaa is C or S
  MOD_RES (13)..(14)..(15)..(16)..(17): Xaa is A or G
  MOD_RES (18)..(19)..(20)..(21): Xaa is A or G or is absent

SEQ ID NO: 77734 - protein, 37 aa, Artificial Sequence; identical to SEQ ID NO: 56166
  GFR-binding peptide
  MOD_RES (2)..(4)..(36)..(37): Xaa is C or S

SEQ ID NO: 77735 - protein, 36 aa, Artificial Sequence; identical to SEQ ID NO: 3301
  GFR-binding peptide
  MOD_RES (2)..(34)..(35): Xaa is C or S

SEQ ID NO: 77736 - protein, 37 aa, Artificial Sequence; identical to SEQ ID NO: 3302
  GFR-binding peptide
  MOD_RES (31)..(31): Xaa is C or S

SEQ ID NO: 77737 - protein, 35 aa, Artificial Sequence; identical to SEQ ID NO: 5229
  GFR-binding peptide
  MOD_RES (33)..(34): Xaa is C or S
  MOD_RES (11)..(12)..(13)..(14)..(15): Xaa is A or G
  MOD_RES (16)..(17)..(18)..(19): Xaa is A or G or is absent

SEQ ID NO: 77738 - protein, 34 aa, Artificial Sequence
  GFR-binding peptide
  MOD_RES (31)..(32): Xaa is C or S
EVTMNQYNKLVVNKNEDLYLISIASMKEPVXXPE

SEQ ID NO: 77739 - protein, 39 aa, Artificial Sequence; identical to SEQ ID NO: 5230
  GFR-binding peptide
  MOD_RES (2)..(4)..(38)..(39): Xaa is C or S
  MOD_RES (16)..(17)..(18)..(19)..(20): Xaa is A or G
  MOD_RES (21)..(22)..(23)..(24): Xaa is A or G or is absent

SEQ ID NO: 77740 - protein, 37 aa, Artificial Sequence; identical to SEQ ID NO: 56168
  GFR-binding peptide
  MOD_RES (2)..(34)..(35): Xaa is C or S

SEQ ID NO: 77741 - protein, 35 aa, Artificial Sequence; identical to SEQ ID NO: 5232
  GFR-binding peptide
  MOD_RES (33)..(34): Xaa is C or S

SEQ ID NO: 77742 - protein, 30 aa, Artificial Sequence; identical to SEQ ID NO: 24301
  GFR-binding peptide

SEQ ID NO: 77743 - protein, 41 aa, Artificial Sequence; identical to SEQ ID NO: 3307
  GFR-binding peptide
  MOD_RES (35)..(36): Xaa is C or S
  MOD_RES (13)..(14)..(15)..(16)..(17): Xaa is A or G
  MOD_RES (18)..(19)..(20)..(21): Xaa is A or G or is absent

SEQ ID NO: 77744 - protein, 32 aa, Artificial Sequence; identical to SEQ ID NO: 10748
  GFR-binding peptide
  MOD_RES (32)..(32): Xaa is C or S

SEQ ID NO: 77745 - protein, 37 aa, Artificial Sequence; identical to SEQ ID NO: 12669
  GFR-binding peptide
  MOD_RES (1)..(3)..(35)..(36): Xaa is C or S

SEQ ID NO: 77746 - protein, 36 aa, Artificial Sequence; identical to SEQ ID NO: 5234
  GFR-binding peptide
  MOD_RES (1)..(32)..(33): Xaa is C or S

SEQ ID NO: 77747 - protein, 36 aa, Artificial Sequence; identical to SEQ ID NO: 64355
  GFR-binding peptide
  MOD_RES (1)..(3)..(35)..(36): Xaa is C or S

SEQ ID NO: 77748 - protein, 34 aa, Artificial Sequence; identical to SEQ ID NO: 3316
  GFR-binding peptide
  MOD_RES (2)..(2): Xaa is C or S

SEQ ID NO: 77749 - protein, 37 aa, Artificial Sequence; identical to SEQ ID NO: 62634
  GFR-binding peptide
  MOD_RES (2)..(4): Xaa is C or S
  MOD_RES (16)..(17)..(18)..(19)..(20): Xaa is A or G
  MOD_RES (21)..(22)..(23)..(24): Xaa is A or G or is absent

SEQ ID NO: 77750 - protein, 40 aa, Artificial Sequence; identical to SEQ ID NO: 56179
  GFR-binding peptide
  MOD_RES (2)..(4)..(36)..(37): Xaa is C or S

SEQ ID NO: 77751 - protein, 33 aa, Artificial Sequence; identical to SEQ ID NO: 60884
  GFR-binding peptide
  MOD_RES (32)..(33): Xaa is C or S

SEQ ID NO: 77752 - protein, 31 aa, Artificial Sequence; identical to SEQ ID NO: 5237
  GFR-binding peptide
  MOD_RES (31)..(31): Xaa is C or S

SEQ ID NO: 77753 - protein, 36 aa, Artificial Sequence
  GFR-binding peptide
  MOD_RES (32)..(33): Xaa is C or S
SEVTMNQYNKLVVNKNEDLYLISIASMKEPVXXPEP

SEQ ID NO: 77754 - protein, 40 aa, Artificial Sequence; identical to SEQ ID NO: 3321
  GFR-binding peptide
  MOD_RES (1)..(3)..(37)..(38): Xaa is C or S
  MOD_RES (15)..(16)..(17)..(18)..(19): Xaa is A or G
  MOD_RES (20)..(21)..(22)..(23): Xaa is A or G or is absent

SEQ ID NO: 77755 - protein, 37 aa, Artificial Sequence; identical to SEQ ID NO: 3322
  GFR-binding peptide
  MOD_RES (1)..(3)..(37): Xaa is C or S
  MOD_RES (15)..(16)..(17)..(18)..(19): Xaa is A or G
  MOD_RES (20)..(21)..(22)..(23): Xaa is A or G or is absent

SEQ ID NO: 77756 - protein, 42 aa, Artificial Sequence; identical to SEQ ID NO: 5239
  GFR-binding peptide
  MOD_RES (2)..(4)..(37)..(38): Xaa is C or S
  MOD_RES (15)..(16)..(17)..(18)..(19): Xaa is A or G
  MOD_RES (20)..(21)..(22)..(23): Xaa is A or G or is absent

SEQ ID NO: 77757 - protein, 40 aa, Artificial Sequence
  GFR-binding peptide
  MOD_RES (2)..(4)..(35)..(36): Xaa is C or S
LXGXEEVIMQYNKLLLVRGNDLYLMSIASTKVPAXXTSPV

SEQ ID NO: 77758 - protein, 43 aa, Artificial Sequence; identical to SEQ ID NO: 26358
  GFR-binding peptide
  MOD_RES (1)..(3)..(37)..(38): Xaa is C or S
  MOD_RES (15)..(16)..(17)..(18)..(19): Xaa is A or G
  MOD_RES (20)..(21)..(22)..(23): Xaa is A or G or is absent

SEQ ID NO: 77759 - protein, 36 aa, Artificial Sequence; identical to SEQ ID NO: 3323
  GFR-binding peptide
  MOD_RES (2)..(4)..(36): Xaa is C or S

SEQ ID NO: 77760 - protein, 41 aa, Artificial Sequence; identical to SEQ ID NO: 5241
  GFR-binding peptide
  MOD_RES (2)..(35)..(36): Xaa is C or S
  MOD_RES (13)..(14)..(15)..(16)..(17): Xaa is A or G
  MOD_RES (18)..(19)..(20)..(21): Xaa is A or G or is absent

SEQ ID NO: 77761 - protein, 41 aa, Artificial Sequence; identical to SEQ ID NO: 5242
  GFR-binding peptide
  MOD_RES (2)..(35)..(36): Xaa is C or S
  MOD_RES (13)..(14)..(15)..(16)..(17): Xaa is A or G
  MOD_RES (18)..(19)..(20)..(21): Xaa is A or G or is absent

SEQ ID NO: 77762 - protein, 39 aa, Artificial Sequence; identical to SEQ ID NO: 5244
  GFR-binding peptide
  MOD_RES (1)..(3)..(37)..(38): Xaa is C or S
  MOD_RES (15)..(16)..(17)..(18)..(19): Xaa is A or G
  MOD_RES (20)..(21)..(22)..(23): Xaa is A or G or is absent

SEQ ID NO: 77763 - protein, 35 aa, Artificial Sequence; identical to SEQ ID NO: 5245
  GFR-binding peptide
  MOD_RES (2)..(4): Xaa is C or S

SEQ ID NO: 77764 - protein, 30 aa, Artificial Sequence; identical to SEQ ID NO: 64367
  GFR-binding peptide

SEQ ID NO: 77765 - protein, 39 aa, Artificial Sequence; identical to SEQ ID NO: 3326
  GFR-binding peptide
  MOD_RES (33)..(34): Xaa is C or S

SEQ ID NO: 77766 - protein, 41 aa, Artificial Sequence
  GFR-binding peptide
  MOD_RES (2)..(4)..(36)..(37): Xaa is C or S
RXGXAEVVMDQYNKLVVNNAADLYLISIASLRAPVXXSAPA

SEQ ID NO: 77767 - protein, 39 aa, Artificial Sequence; identical to SEQ ID NO: 3330
  GFR-binding peptide
  MOD_RES (1)..(33)..(34): Xaa is C or S

SEQ ID NO: 77768 - protein, 34 aa, Artificial Sequence; identical to SEQ ID NO: 26365
  GFR-binding peptide
  MOD_RES (32)..(33): Xaa is C or S

SEQ ID NO: 77769 - protein, 42 aa, Artificial Sequence; identical to SEQ ID NO: 62646
  GFR-binding peptide
  MOD_RES (1)..(3)..(37)..(38): Xaa is C or S
  MOD_RES (15)..(16)..(17)..(18)..(19): Xaa is A or G
  MOD_RES (20)..(21)..(22)..(23): Xaa is A or G or is absent

SEQ ID NO: 77770 - protein, 36 aa, Artificial Sequence; identical to SEQ ID NO: 12680
  GFR-binding peptide
  MOD_RES (1)..(3): Xaa is C or S
  MOD_RES (15)..(16)..(17)..(18)..(19): Xaa is A or G
  MOD_RES (20)..(21)..(22)..(23): Xaa is A or G or is absent

SEQ ID NO: 77771 - protein, 37 aa, Artificial Sequence; identical to SEQ ID NO: 10765
  GFR-binding peptide
  MOD_RES (2)..(34)..(35): Xaa is C or S

SEQ ID NO: 77772 - protein, 37 aa, Artificial Sequence; identical to SEQ ID NO: 62649
  GFR-binding peptide
  MOD_RES (1)..(33)..(34): Xaa is C or S

SEQ ID NO: 77773 - protein, 33 aa, Artificial Sequence; identical to SEQ ID NO: 12682
  GFR-binding peptide
  MOD_RES (2)..(2): Xaa is C or S

SEQ ID NO: 77774 - protein, 38 aa, Artificial Sequence; identical to SEQ ID NO: 3332
  GFR-binding peptide
  MOD_RES (1)..(3)..(36)..(37): Xaa is C or S
  MOD_RES (14)..(15)..(16)..(17)..(18): Xaa is A or G
  MOD_RES (19)..(20)..(21)..(22): Xaa is A or G or is absent

SEQ ID NO: 77775 - protein, 39 aa, Artificial Sequence
  GFR-binding peptide
  MOD_RES (2)..(34)..(35): Xaa is C or S
GXAEVVMDQYNKLVVNNAADLYLISIASLRAPVXXSAPA

SEQ ID NO: 77776 - protein, 39 aa, Artificial Sequence; identical to SEQ ID NO: 5249
  GFR-binding peptide
  MOD_RES (2)..(4)..(37)..(38): Xaa is C or S

SEQ ID NO: 77777 - protein, 35 aa, Artificial Sequence; identical to SEQ ID NO: 56202
  GFR-binding peptide
  MOD_RES (1)..(34)..(35): Xaa is C or S
  MOD_RES (12)..(13)..(14)..(15)..(16): Xaa is A or G
  MOD_RES (17)..(18)..(19)..(20): Xaa is A or G or is absent

SEQ ID NO: 77778 - protein, 38 aa, Artificial Sequence; identical to SEQ ID NO: 5250
  GFR-binding peptide
  MOD_RES (1)..(3)..(35)..(36): Xaa is C or S

SEQ ID NO: 77779 - protein, 45 aa, Artificial Sequence; identical to SEQ ID NO: 5252
  GFR-binding peptide
  MOD_RES (2)..(4)..(39)..(40): Xaa is C or S
  MOD_RES (17)..(18)..(19)..(20)..(21): Xaa is A or G
  MOD_RES (22)..(23)..(24)..(25): Xaa is A or G or is absent

SEQ ID NO: 77780 - protein, 37 aa, Artificial Sequence; identical to SEQ ID NO: 5253
  GFR-binding peptide
  MOD_RES (1)..(34)..(35): Xaa is C or S

SEQ ID NO: 77781 - protein, 33 aa, Artificial Sequence; identical to SEQ ID NO: 5255
  GFR-binding peptide
  MOD_RES (33)..(33): Xaa is C or S
  MOD_RES (11)..(12)..(13)..(14)..(15): Xaa is A or G
  MOD_RES (16)..(17)..(18)..(19): Xaa is A or G or is absent

SEQ ID NO: 77782 - protein, 40 aa, Artificial Sequence; identical to SEQ ID NO: 5256
  GFR-binding peptide
  MOD_RES (1)..(3)..(35)..(36): Xaa is C or S

SEQ ID NO: 77783 - protein, 37 aa, Artificial Sequence; identical to SEQ ID NO: 3339
  GFR-binding peptide
  MOD_RES (1)..(32)..(33): Xaa is C or S

SEQ ID NO: 77784 - protein, 39 aa, Artificial Sequence; identical to SEQ ID NO: 5257
  GFR-binding peptide
  MOD_RES (2)..(33)..(34): Xaa is C or S

SEQ ID NO: 77785 - protein, 37 aa, Artificial Sequence; identical to SEQ ID NO: 3341
  GFR-binding peptide
  MOD_RES (2)..(35)..(36): Xaa is C or S
  MOD_RES (13)..(14)..(15)..(16)..(17): Xaa is A or G
  MOD_RES (18)..(19)..(20)..(21): Xaa is A or G or is absent

SEQ ID NO: 77786 - protein, 40 aa, Artificial Sequence; identical to SEQ ID NO: 5258
  GFR-binding peptide
  MOD_RES (2)..(36)..(37): Xaa is C or S
  MOD_RES (14)..(15)..(16)..(17)..(18): Xaa is A or G
  MOD_RES (19)..(20)..(21)..(22): Xaa is A or G or is absent

SEQ ID NO: 77787 - protein, 35 aa, Artificial Sequence
  GFR-binding peptide
  MOD_RES (34)..(35): Xaa is C or S
  MOD_RES (12)..(13)..(14)..(15)..(16): Xaa is A or G
  MOD_RES (17)..(18)..(19)..(20): Xaa is A or G or is absent
ESVAMGQYNKLXXXXXXXXXLYLISIASLKTPVXX

SEQ ID NO: 77788 - protein, 37 aa, Artificial Sequence; identical to SEQ ID NO: 3342
  GFR-binding peptide
  MOD_RES (1)..(32)..(33): Xaa is C or S

SEQ ID NO: 77789 - protein, 41 aa, Artificial Sequence; identical to SEQ ID NO: 3344
  GFR-binding peptide
  MOD_RES (1)..(35)..(36): Xaa is C or S
  MOD_RES (13)..(14)..(15)..(16)..(17): Xaa is A or G
  MOD_RES (18)..(19)..(20)..(21): Xaa is A or G or is absent

SEQ ID NO: 77790 - protein, 42 aa, Artificial Sequence; identical to SEQ ID NO: 12692
  GFR-binding peptide
  MOD_RES (2)..(36)..(37): Xaa is C or S
  MOD_RES (14)..(15)..(16)..(17)..(18): Xaa is A or G
  MOD_RES (19)..(20)..(21)..(22): Xaa is A or G or is absent

SEQ ID NO: 77791 - protein, 33 aa, Artificial Sequence
  GFR-binding peptide
  MOD_RES (31)..(32): Xaa is C or S
DVVMGQYNKLIIQQKDNLYLMSIASMKTPTXXP

SEQ ID NO: 77792 - protein, 39 aa, Artificial Sequence; identical to SEQ ID NO: 5265
  GFR-binding peptide
  MOD_RES (1)..(3)..(36)..(37): Xaa is C or S
  MOD_RES (14)..(15)..(16)..(17)..(18): Xaa is A or G
  MOD_RES (19)..(20)..(21)..(22): Xaa is A or G or is absent

SEQ ID NO: 77793 - protein, 43 aa, Artificial Sequence
  GFR-binding peptide
  MOD_RES (1)..(3)..(37)..(38): Xaa is C or S
  MOD_RES (15)..(16)..(17)..(18)..(19): Xaa is A or G
  MOD_RES (20)..(21)..(22)..(23): Xaa is A or G or is absent
XAXSEVTMNQYNKLXXXXXXXXXLYLISIASMKEPVXXPEPIG

SEQ ID NO: 77794 - protein, 35 aa, Artificial Sequence; identical to SEQ ID NO: 24332
  GFR-binding peptide
  MOD_RES (34)..(35): Xaa is C or S
  MOD_RES (12)..(13)..(14)..(15)..(16): Xaa is A or G
  MOD_RES (17)..(18)..(19)..(20): Xaa is A or G or is absent

SEQ ID NO: 77795 - protein, 35 aa, Artificial Sequence
  GFR-binding peptide
  MOD_RES (2)..(4): Xaa is C or S
RXGXAEVVMDQYNKLVVNNAADLYLISIASLRAPV

SEQ ID NO: 77796 - protein, 37 aa, Artificial Sequence
  GFR-binding peptide
  MOD_RES (32)..(33): Xaa is C or S
SEVTMNQYNKLVVNKNEDLYLISIASMKEPVXXPEPI

SEQ ID NO: 77797 - protein, 35 aa, Artificial Sequence; identical to SEQ ID NO: 5267
  GFR-binding peptide
  MOD_RES (2)..(4)..(35): Xaa is C or S

SEQ ID NO: 77798 - protein, 36 aa, Artificial Sequence; identical to SEQ ID NO: 3347
  GFR-binding peptide
  MOD_RES (2)..(4): Xaa is C or S
  MOD_RES (15)..(16)..(17)..(18)..(19): Xaa is A or G
  MOD_RES (20)..(21)..(22)..(23): Xaa is A or G or is absent

SEQ ID NO: 77799 - protein, 37 aa, Artificial Sequence; identical to SEQ ID NO: 3350
  GFR-binding peptide
  MOD_RES (2)..(35)..(36): Xaa is C or S
  MOD_RES (13)..(14)..(15)..(16)..(17): Xaa is A or G
  MOD_RES (18)..(19)..(20)..(21): Xaa is A or G or is absent

SEQ ID NO: 77800 - protein, 40 aa, Artificial Sequence; identical to SEQ ID NO: 5268
  GFR-binding peptide
  MOD_RES (34)..(35): Xaa is C or S
  MOD_RES (12)..(13)..(14)..(15)..(16): Xaa is A or G
  MOD_RES (17)..(18)..(19)..(20): Xaa is A or G or is absent

SEQ ID NO: 77801 - protein, 37 aa, Artificial Sequence; identical to SEQ ID NO: 5269
  GFR-binding peptide
  MOD_RES (35)..(36): Xaa is C or S
  MOD_RES (13)..(14)..(15)..(16)..(17): Xaa is A or G
  MOD_RES (18)..(19)..(20)..(21): Xaa is A or G or is absent

SEQ ID NO: 77802 - protein, 37 aa, Artificial Sequence
  GFR-binding peptide
  MOD_RES (31)..(32): Xaa is C or S
RVVMNQYNKLIVNSSDDLYLVSIASLKTPAXXPKPVH

SEQ ID NO: 77803 - protein, 35 aa, Artificial Sequence; identical to SEQ ID NO: 3354
  GFR-binding peptide
  MOD_RES (2)..(4): Xaa is C or S

SEQ ID NO: 77804 - protein, 43 aa, Artificial Sequence; identical to SEQ ID NO: 3356
  GFR-binding peptide
  MOD_RES (1)..(3)..(37)..(38): Xaa is C or S
  MOD_RES (15)..(16)..(17)..(18)..(19): Xaa is A or G
  MOD_RES (20)..(21)..(22)..(23): Xaa is A or G or is absent

SEQ ID NO: 77805 - protein, 40 aa, Artificial Sequence
  GFR-binding peptide
  MOD_RES (2)..(4)..(38)..(39): Xaa is C or S
  MOD_RES (16)..(17)..(18)..(19)..(20): Xaa is A or G
  MOD_RES (21)..(22)..(23)..(24): Xaa is A or G or is absent
RXAXSEVTMNQYNKLXXXXXXXXXLYLISIASMKEPVXXP

SEQ ID NO: 77806 - protein, 35 aa, Artificial Sequence; identical to SEQ ID NO: 24338
  GFR-binding peptide
  MOD_RES (31)..(32): Xaa is C or S

SEQ ID NO: 77807 - protein, 36 aa, Artificial Sequence; identical to SEQ ID NO: 3358
  GFR-binding peptide
  MOD_RES (1)..(35)..(36): Xaa is C or S
  MOD_RES (13)..(14)..(15)..(16)..(17): Xaa is A or G
  MOD_RES (18)..(19)..(20)..(21): Xaa is A or G or is absent

SEQ ID NO: 77808 - protein, 37 aa, Artificial Sequence; identical to SEQ ID NO: 56221
  GFR-binding peptide
  MOD_RES (34)..(35): Xaa is C or S
  MOD_RES (12)..(13)..(14)..(15)..(16): Xaa is A or G
  MOD_RES (17)..(18)..(19)..(20): Xaa is A or G or is absent

SEQ ID NO: 77809 - protein, 41 aa, Artificial Sequence; identical to SEQ ID NO: 60916
  GFR-binding peptide
  MOD_RES (1)..(3)..(35)..(36): Xaa is C or S

SEQ ID NO: 77810 - protein, 39 aa, Artificial Sequence; identical to SEQ ID NO: 24342
  GFR-binding peptide
  MOD_RES (1)..(33)..(34): Xaa is C or S

SEQ ID NO: 77811 - protein, 42 aa, Artificial Sequence
  GFR-binding peptide
  MOD_RES (2)..(36)..(37): Xaa is C or S
  MOD_RES (14)..(15)..(16)..(17)..(18): Xaa is A or G
  MOD_RES (19)..(20)..(21)..(22): Xaa is A or G or is absent
GXESVAMGQYNKLXXXXXXXXXLYLISIASLKTPVXXAKSAK

SEQ ID NO: 77812 - protein, 33 aa, Artificial Sequence; identical to SEQ ID NO: 3364
  GFR-binding peptide
  MOD_RES (31)..(32): Xaa is C or S

SEQ ID NO: 77813 - protein, 39 aa, Artificial Sequence; identical to SEQ ID NO: 59177
  GFR-binding peptide
  MOD_RES (34)..(35): Xaa is C or S
  MOD_RES (12)..(13)..(14)..(15)..(16): Xaa is A or G
  MOD_RES (17)..(18)..(19)..(20): Xaa is A or G or is absent

SEQ ID NO: 77814 - protein, 36 aa, Artificial Sequence; identical to SEQ ID NO: 5282
  GFR-binding peptide
  MOD_RES (34)..(35): Xaa is C or S
  MOD_RES (12)..(13)..(14)..(15)..(16): Xaa is A or G
  MOD_RES (17)..(18)..(19)..(20): Xaa is A or G or is absent

SEQ ID NO: 77815 - protein, 36 aa, Artificial Sequence; identical to SEQ ID NO: 3367
  GFR-binding peptide
  MOD_RES (1)..(3)..(35)..(36): Xaa is C or S

SEQ ID NO: 77816 - protein, 38 aa, Artificial Sequence; identical to SEQ ID NO: 59179
  GFR-binding peptide
  MOD_RES (2)..(4)..(38): Xaa is C or S
  MOD_RES (16)..(17)..(18)..(19)..(20): Xaa is A or G
  MOD_RES (21)..(22)..(23)..(24): Xaa is A or G or is absent

SEQ ID NO: 77817 - protein, 35 aa, Artificial Sequence; identical to SEQ ID NO: 5283
  GFR-binding peptide
  MOD_RES (1)..(33)..(34): Xaa is C or S

SEQ ID NO: 77818 - protein, 37 aa, Artificial Sequence; identical to SEQ ID NO: 3368
  GFR-binding peptide
  MOD_RES (2)..(4)..(36)..(37): Xaa is C or S

SEQ ID NO: 77819 - protein, 36 aa, Artificial Sequence; identical to SEQ ID NO: 3370
  GFR-binding peptide
  MOD_RES (1)..(35)..(36): Xaa is C or S
  MOD_RES (13)..(14)..(15)..(16)..(17): Xaa is A or G
  MOD_RES (18)..(19)..(20)..(21): Xaa is A or G or is absent

SEQ ID NO: 77820 - protein, 41 aa, Artificial Sequence; identical to SEQ ID NO: 24352
  GFR-binding peptide
  MOD_RES (1)..(3)..(35)..(36): Xaa is C or S

SEQ ID NO: 77821 - protein, 37 aa, Artificial Sequence; identical to SEQ ID NO: 3372
  GFR-binding peptide
  MOD_RES (1)..(3)..(37): Xaa is C or S
  MOD_RES (15)..(16)..(17)..(18)..(19): Xaa is A or G
  MOD_RES (20)..(21)..(22)..(23): Xaa is A or G or is absent

SEQ ID NO: 77822 - protein, 42 aa, Artificial Sequence; identical to SEQ ID NO: 5288
  GFR-binding peptide
  MOD_RES (2)..(4)..(36)..(37): Xaa is C or S

SEQ ID NO: 77823 - protein, 42 aa, Artificial Sequence
  GFR-binding peptide
  MOD_RES (1)..(3)..(37)..(38): Xaa is C or S
  MOD_RES (15)..(16)..(17)..(18)..(19): Xaa is A or G
  MOD_RES (20)..(21)..(22)..(23): Xaa is A or G or is absent
XGXESVAMGQYNKLXXXXXXXXXLYLISIASLKTPVXXAKSA

SEQ ID NO: 77824 - protein, 37 aa, Artificial Sequence; identical to SEQ ID NO: 3373
  GFR-binding peptide
  MOD_RES (1)..(3)..(34)..(35): Xaa is C or S

SEQ ID NO: 77825 - protein, 35 aa, Artificial Sequence; identical to SEQ ID NO: 5290
  GFR-binding peptide
  MOD_RES (1)..(3)..(35): Xaa is C or S

SEQ ID NO: 77826 - protein, 40 aa, Artificial Sequence; identical to SEQ ID NO: 5292
  GFR-binding peptide
  MOD_RES (2)..(4)..(37)..(38): Xaa is C or S
  MOD_RES (15)..(16)..(17)..(18)..(19): Xaa is A or G
  MOD_RES (20)..(21)..(22)..(23): Xaa is A or G or is absent

SEQ ID NO: 77827 - protein, 39 aa, Artificial Sequence; identical to SEQ ID NO: 5293
  GFR-binding peptide
  MOD_RES (2)..(33)..(34): Xaa is C or S

SEQ ID NO: 77828 - protein, 41 aa, Artificial Sequence
  GFR-binding peptide
  MOD_RES (1)..(35)..(36): Xaa is C or S
  MOD_RES (13)..(14)..(15)..(16)..(17): Xaa is A or G
  MOD_RES (18)..(19)..(20)..(21): Xaa is A or G or is absent
XAEVVMDQYNKLXXXXXXXXXLYLISIASLRAPVXXSAPAA

SEQ ID NO: 77829 - protein, 38 aa, Artificial Sequence; identical to SEQ ID NO: 3376
  GFR-binding peptide
  MOD_RES (32)..(33): Xaa is C or S

SEQ ID NO: 77830 - protein, 36 aa, Artificial Sequence; identical to SEQ ID NO: 3377
  GFR-binding peptide
  MOD_RES (2)..(33)..(34): Xaa is C or S

SEQ ID NO: 77831 - protein, 42 aa, Artificial Sequence
  GFR-binding peptide
  MOD_RES (2)..(4)..(38)..(39): Xaa is C or S
  MOD_RES (16)..(17)..(18)..(19)..(20): Xaa is A or G
  MOD_RES (21)..(22)..(23)..(24): Xaa is A or G or is absent
RXGXESVAMGQYNKLXXXXXXXXXLYLISIASLKTPVXXAKS

SEQ ID NO: 77832 - protein, 42 aa, Artificial Sequence; identical to SEQ ID NO: 3378
  GFR-binding peptide
  MOD_RES (1)..(3)..(37)..(38): Xaa is C or S
  MOD_RES (15)..(16)..(17)..(18)..(19): Xaa is A or G
  MOD_RES (20)..(21)..(22)..(23): Xaa is A or G or is absent

SEQ ID NO: 77833 - protein, 34 aa, Artificial Sequence; identical to SEQ ID NO: 5297
  GFR-binding peptide
  MOD_RES (1)..(3): Xaa is C or S

SEQ ID NO: 77834 - protein, 34 aa, Artificial Sequence
  GFR-binding peptide
  MOD_RES (33)..(34): Xaa is C or S
  MOD_RES (11)..(12)..(13)..(14)..(15): Xaa is A or G
  MOD_RES (16)..(17)..(18)..(19): Xaa is A or G or is absent
EEVIMQYNKLXXXXXXXXXLYLMSIASTKVPAXX

SEQ ID NO: 77835 - protein, 36 aa, Artificial Sequence; identical to SEQ ID NO: 26419
  GFR-binding peptide
  MOD_RES (1)..(33)..(34): Xaa is C or S

SEQ ID NO: 77836 - protein, 35 aa, Artificial Sequence; identical to SEQ ID NO: 5301
  GFR-binding peptide
  MOD_RES (2)..(4): Xaa is C or S

SEQ ID NO: 77837 - protein, 36 aa, Artificial Sequence; identical to SEQ ID NO: 3381
  GFR-binding peptide
  MOD_RES (1)..(3)..(34)..(35): Xaa is C or S

SEQ ID NO: 77838 - protein, 36 aa, Artificial Sequence; identical to SEQ ID NO: 5304
  GFR-binding peptide
  MOD_RES (31)..(32): Xaa is C or S

SEQ ID NO: 77839 - protein, 41 aa, Artificial Sequence; identical to SEQ ID NO: 5305
  GFR-binding peptide
  MOD_RES (2)..(4)..(37)..(38): Xaa is C or S
  MOD_RES (15)..(16)..(17)..(18)..(19): Xaa is A or G
  MOD_RES (20)..(21)..(22)..(23): Xaa is A or G or is absent

SEQ ID NO: 77840 - protein, 38 aa, Artificial Sequence; identical to SEQ ID NO: 3383
  GFR-binding peptide
  MOD_RES (2)..(4)..(38): Xaa is C or S
  MOD_RES (16)..(17)..(18)..(19)..(20): Xaa is A or G
  MOD_RES (21)..(22)..(23)..(24): Xaa is A or G or is absent

SEQ ID NO: 77841 - protein, 39 aa, Artificial Sequence
  GFR-binding peptide
  MOD_RES (33)..(34): Xaa is C or S
  MOD_RES (11)..(12)..(13)..(14)..(15): Xaa is A or G
  MOD_RES (16)..(17)..(18)..(19): Xaa is A or G or is absent
EVVMDQYNKLXXXXXXXXXLYLISIASLRAPVXXSAPAA

SEQ ID NO: 77842 - protein, 39 aa, Artificial Sequence
  GFR-binding peptide
  MOD_RES (2)..(35)..(36): Xaa is C or S
  MOD_RES (13)..(14)..(15)..(16)..(17): Xaa is A or G
  MOD_RES (18)..(19)..(20)..(21): Xaa is A or G or is absent
GXEEVIMQYNKLXXXXXXXXXLYLMSIASTKVPAXXTSP

SEQ ID NO: 77843 - protein, 39 aa, Artificial Sequence; identical to SEQ ID NO: 3384
  GFR-binding peptide
  MOD_RES (34)..(35): Xaa is C or S
  MOD_RES (12)..(13)..(14)..(15)..(16): Xaa is A or G
  MOD_RES (17)..(18)..(19)..(20): Xaa is A or G or is absent

SEQ ID NO: 77844 - protein, 40 aa, Artificial Sequence; identical to SEQ ID NO: 10810
  GFR-binding peptide
  MOD_RES (1)..(3)..(35)..(36): Xaa is C or S

SEQ ID NO: 77845 - protein, 36 aa, Artificial Sequence; identical to SEQ ID NO: 3388
  GFR-binding peptide
  MOD_RES (2)..(4)..(36): Xaa is C or S

SEQ ID NO: 77846 - protein, 37 aa, Artificial Sequence; identical to SEQ ID NO: 56251
  GFR-binding peptide
  MOD_RES (1)..(3)..(37): Xaa is C or S
  MOD_RES (15)..(16)..(17)..(18)..(19): Xaa is A or G
  MOD_RES (20)..(21)..(22)..(23): Xaa is A or G or is absent

SEQ ID NO: 77847 - protein, 33 aa, Artificial Sequence; identical to SEQ ID NO: 56252
  GFR-binding peptide
  MOD_RES (12)..(13)..(14)..(15)..(16): Xaa is A or G
  MOD_RES (17)..(18)..(19)..(20): Xaa is A or G or is absent

SEQ ID NO: 77848 - protein, 40 aa, Artificial Sequence
  GFR-binding peptide
  MOD_RES (2)..(4)..(36)..(37): Xaa is C or S
RXGXAEVVMDQYNKLVVNNAADLYLISIASLRAPVXXSAP

SEQ ID NO: 77849 - protein, 39 aa, Artificial Sequence; identical to SEQ ID NO: 10812
  GFR-binding peptide
  MOD_RES (2)..(4)..(38)..(39): Xaa is C or S
  MOD_RES (16)..(17)..(18)..(19)..(20): Xaa is A or G
  MOD_RES (21)..(22)..(23)..(24): Xaa is A or G or is absent

SEQ ID NO: 77850 - protein, 40 aa, Artificial Sequence
  GFR-binding peptide
  MOD_RES (2)..(34)..(35): Xaa is C or S
GXESVAMGQYNKLYTVVGKDLYLISIASLKTPVXXAKSAK

SEQ ID NO: 77851 - protein, 40 aa, Artificial Sequence; identical to SEQ ID NO: 62683
  GFR-binding peptide
  MOD_RES (1)..(3)..(35)..(36): Xaa is C or S

SEQ ID NO: 77852 - protein, 44 aa, Artificial Sequence; identical to SEQ ID NO: 5309
  GFR-binding peptide
  MOD_RES (2)..(4)..(39)..(40): Xaa is C or S
  MOD_RES (17)..(18)..(19)..(20)..(21): Xaa is A or G
  MOD_RES (22)..(23)..(24)..(25): Xaa is A or G or is absent

SEQ ID NO: 77853 - protein, 39 aa, Artificial Sequence; identical to SEQ ID NO: 5310
  GFR-binding peptide
  MOD_RES (2)..(4)..(36)..(37): Xaa is C or S

SEQ ID NO: 77854 - protein, 32 aa, Artificial Sequence; identical to SEQ ID NO: 3389
  GFR-binding peptide
  MOD_RES (11)..(12)..(13)..(14)..(15): Xaa is A or G
  MOD_RES (16)..(17)..(18)..(19): Xaa is A or G or is absent

SEQ ID NO: 77855 - protein, 42 aa, Artificial Sequence; identical to SEQ ID NO: 5312
  GFR-binding peptide
  MOD_RES (2)..(36)..(37): Xaa is C or S
  MOD_RES (14)..(15)..(16)..(17)..(18): Xaa is A or G
  MOD_RES (19)..(20)..(21)..(22): Xaa is A or G or is absent

SEQ ID NO: 77856 - protein, 38 aa, Artificial Sequence; identical to SEQ ID NO: 5313
  GFR-binding peptide
  MOD_RES (1)..(33)..(34): Xaa is C or S

SEQ ID NO: 77857 - protein, 32 aa, Artificial Sequence; identical to SEQ ID NO: 5314
  GFR-binding peptide
  MOD_RES (2)..(2): Xaa is C or S

SEQ ID NO: 77858 - protein, 39 aa, Artificial Sequence; identical to SEQ ID NO: 56260
  GFR-binding peptide
  MOD_RES (1)..(3)..(37)..(38): Xaa is C or S
  MOD_RES (15)..(16)..(17)..(18)..(19): Xaa is A or G
  MOD_RES (20)..(21)..(22)..(23): Xaa is A or G or is absent

SEQ ID NO: 77859 - protein, 31 aa, Artificial Sequence; identical to SEQ ID NO: 3392
  GFR-binding peptide
  MOD_RES (31)..(31): Xaa is C or S

SEQ ID NO: 77860 - protein, 36 aa, Artificial Sequence; identical to SEQ ID NO: 3393
  GFR-binding peptide
  MOD_RES (33)..(34): Xaa is C or S

SEQ ID NO: 77861 - protein, 36 aa, Artificial Sequence; identical to SEQ ID NO: 12744
  GFR-binding peptide
  MOD_RES (33)..(34): Xaa is C or S
  MOD_RES (11)..(12)..(13)..(14)..(15): Xaa is A or G
  MOD_RES (16)..(17)..(18)..(19): Xaa is A or G or is absent

SEQ ID NO: 77862 - protein, 36 aa, Artificial Sequence
  GFR-binding peptide
  MOD_RES (2)..(4)..(36): Xaa is C or S
RXGXAEVVMDQYNKLVVNNAADLYLISIASLRAPVX

SEQ ID NO: 77863 - protein, 37 aa, Artificial Sequence
  GFR-binding peptide
  MOD_RES (1)..(3)..(36)..(37): Xaa is C or S
  MOD_RES (14)..(15)..(16)..(17)..(18): Xaa is A or G
  MOD_RES (19)..(20)..(21)..(22): Xaa is A or G or is absent
XGXEEVIMQYNKLXXXXXXXXXLYLMSIASTKVPAXX

SEQ ID NO: 77864 - protein, 34 aa, Artificial Sequence; identical to SEQ ID NO: 3398
  GFR-binding peptide
  MOD_RES (1)..(33)..(34): Xaa is C or S

SEQ ID NO: 77865 - protein, 30 aa, Artificial Sequence; identical to SEQ ID NO: 12746
  GFR-binding peptide

SEQ ID NO: 77866 - protein, 36 aa, Artificial Sequence; identical to SEQ ID NO: 3400
  GFR-binding peptide
  MOD_RES (1)..(36): Xaa is C or S
  MOD_RES (14)..(15)..(16)..(17)..(18): Xaa is A or G
  MOD_RES (19)..(20)..(21)..(22): Xaa is A or G or is absent

SEQ ID NO: 77867 - protein, 35 aa, Artificial Sequence; identical to SEQ ID NO: 26447
  GFR-binding peptide
  MOD_RES (2)..(2): Xaa is C or S
  MOD_RES (14)..(15)..(16)..(17)..(18): Xaa is A or G
  MOD_RES (19)..(20)..(21)..(22): Xaa is A or G or is absent

SEQ ID NO: 77868 - protein, 41 aa, Artificial Sequence
  GFR-binding peptide
  MOD_RES (2)..(4)..(38)..(39): Xaa is C or S
  MOD_RES (16)..(17)..(18)..(19)..(20): Xaa is A or G
  MOD_RES (21)..(22)..(23)..(24): Xaa is A or G or is absent
RXAXSEVTMNQYNKLXXXXXXXXXLYLISIASMKEPVXXPE

SEQ ID NO: 77869 - protein, 35 aa, Artificial Sequence; identical to SEQ ID NO: 5320
  GFR-binding peptide
  MOD_RES (33)..(33): Xaa is C or S
  MOD_RES (11)..(12)..(13)..(14)..(15): Xaa is A or G
  MOD_RES (16)..(17)..(18)..(19): Xaa is A or G or is absent

SEQ ID NO: 77870 - protein, 39 aa, Artificial Sequence; identical to SEQ ID NO: 3403
  GFR-binding peptide
  MOD_RES (2)..(34)..(35): Xaa is C or S

SEQ ID NO: 77871 - protein, 35 aa, Artificial Sequence; identical to SEQ ID NO: 3404
  GFR-binding peptide
  MOD_RES (2)..(34)..(35): Xaa is C or S

SEQ ID NO: 77872 - protein, 39 aa, Artificial Sequence; identical to SEQ ID NO: 5323
  GFR-binding peptide
  MOD_RES (2)..(4)..(39): Xaa is C or S
  MOD_RES (17)..(18)..(19)..(20)..(21): Xaa is A or G
  MOD_RES (22)..(23)..(24)..(25): Xaa is A or G or is absent

SEQ ID NO: 77873 - protein, 41 aa, Artificial Sequence; identical to SEQ ID NO: 5324
  GFR-binding peptide
  MOD_RES (2)..(36)..(37): Xaa is C or S
  MOD_RES (14)..(15)..(16)..(17)..(18): Xaa is A or G
  MOD_RES (19)..(20)..(21)..(22): Xaa is A or G or is absent

SEQ ID NO: 77874 - protein, 35 aa, Artificial Sequence; identical to SEQ ID NO: 5328
  GFR-binding peptide
  MOD_RES (2)..(35): Xaa is C or S
  MOD_RES (13)..(14)..(15)..(16)..(17): Xaa is A or G
  MOD_RES (18)..(19)..(20)..(21): Xaa is A or G or is absent

SEQ ID NO: 77875 - protein, 33 aa, Artificial Sequence; identical to SEQ ID NO: 5330
  GFR-binding peptide
  MOD_RES (1)..(33): Xaa is C or S

SEQ ID NO: 77876 - protein, 34 aa, Artificial Sequence; identical to SEQ ID NO: 24385
  GFR-binding peptide
  MOD_RES (1)..(1): Xaa is C or S
  MOD_RES (13)..(14)..(15)..(16)..(17): Xaa is A or G
  MOD_RES (18)..(19)..(20)..(21): Xaa is A or G or is absent

SEQ ID NO: 77877 - protein, 34 aa, Artificial Sequence; identical to SEQ ID NO: 56276
  GFR-binding peptide
  MOD_RES (31)..(32): Xaa is C or S

SEQ ID NO: 77878 - protein, 34 aa, Artificial Sequence
  GFR-binding peptide
  MOD_RES (31)..(32): Xaa is C or S
EVVMDQYNKLVVNNAADLYLISIASLRAPVXXSA

SEQ ID NO: 77879 - protein, 37 aa, Artificial Sequence
  GFR-binding peptide
  MOD_RES (2)..(4): Xaa is C or S
  MOD_RES (16)..(17)..(18)..(19)..(20): Xaa is A or G
  MOD_RES (21)..(22)..(23)..(24): Xaa is A or G or is absent
SXGXRDVVMGQYNKLXXXXXXXXXLYLMSIASMKTPT

SEQ ID NO: 77880 - protein, 40 aa, Artificial Sequence; identical to SEQ ID NO: 3411
  GFR-binding peptide
  MOD_RES (1)..(34)..(35): Xaa is C or S
  MOD_RES (12)..(13)..(14)..(15)..(16): Xaa is A or G
  MOD_RES (17)..(18)..(19)..(20): Xaa is A or G or is absent

SEQ ID NO: 77881 - protein, 36 aa, Artificial Sequence; identical to SEQ ID NO: 5334
  GFR-binding peptide
  MOD_RES (34)..(35): Xaa is C or S
  MOD_RES (12)..(13)..(14)..(15)..(16): Xaa is A or G
  MOD_RES (17)..(18)..(19)..(20): Xaa is A or G or is absent

SEQ ID NO: 77882 - protein, 36 aa, Artificial Sequence; identical to SEQ ID NO: 3414
  GFR-binding peptide
  MOD_RES (2)..(33)..(34): Xaa is C or S

SEQ ID NO: 77883 - protein, 36 aa, Artificial Sequence; identical to SEQ ID NO: 3418
  GFR-binding peptide
  MOD_RES (33)..(34): Xaa is C or S
  MOD_RES (11)..(12)..(13)..(14)..(15): Xaa is A or G
  MOD_RES (16)..(17)..(18)..(19): Xaa is A or G or is absent

SEQ ID NO: 77884 - protein, 31 aa, Artificial Sequence; identical to SEQ ID NO: 5336
  GFR-binding peptide
  MOD_RES (31)..(31): Xaa is C or S

SEQ ID NO: 77885 - protein, 38 aa, Artificial Sequence; identical to SEQ ID NO: 5338
  GFR-binding peptide
  MOD_RES (1)..(3)..(35)..(36): Xaa is C or S

SEQ ID NO: 77886 - protein, 35 aa, Artificial Sequence; identical to SEQ ID NO: 5339
  GFR-binding peptide
  MOD_RES (2)..(34)..(35): Xaa is C or S

SEQ ID NO: 77887 - protein, 42 aa, Artificial Sequence; identical to SEQ ID NO: 5340
  GFR-binding peptide
  MOD_RES (1)..(3)..(37)..(38): Xaa is C or S
  MOD_RES (15)..(16)..(17)..(18)..(19): Xaa is A or G
  MOD_RES (20)..(21)..(22)..(23): Xaa is A or G or is absent

SEQ ID NO: 77888 - protein, 39 aa, Artificial Sequence; identical to SEQ ID NO: 5343
  GFR-binding peptide
  MOD_RES (2)..(4)..(38)..(39): Xaa is C or S
  MOD_RES (16)..(17)..(18)..(19)..(20): Xaa is A or G
  MOD_RES (21)..(22)..(23)..(24): Xaa is A or G or is absent

SEQ ID NO: 77889 - protein, 42 aa, Artificial Sequence; identical to SEQ ID NO: 12770
  GFR-binding peptide
  MOD_RES (2)..(4)..(38)..(39): Xaa is C or S
  MOD_RES (16)..(17)..(18)..(19)..(20): Xaa is A or G
  MOD_RES (21)..(22)..(23)..(24): Xaa is A or G or is absent

SEQ ID NO: 77890 - protein, 31 aa, Artificial Sequence; identical to SEQ ID NO: 12773
  GFR-binding peptide

SEQ ID NO: 77891 - protein, 40 aa, Artificial Sequence
  GFR-binding peptide
  MOD_RES (2)..(4)..(38)..(39): Xaa is C or S
  MOD_RES (16)..(17)..(18)..(19)..(20): Xaa is A or G
  MOD_RES (21)..(22)..(23)..(24): Xaa is A or G or is absent
RXGXAEVVMDQYNKLXXXXXXXXXLYLISIASLRAPVXXS

SEQ ID NO: 77892 - protein, 33 aa, Artificial Sequence; identical to SEQ ID NO: 5346
  GFR-binding peptide
  MOD_RES (32)..(33): Xaa is C or S

SEQ ID NO: 77893 - protein, 32 aa, Artificial Sequence; identical to SEQ ID NO: 5347
  GFR-binding peptide
  MOD_RES (31)..(32): Xaa is C or S

SEQ ID NO: 77894 - protein, 44 aa, Artificial Sequence; identical to SEQ ID NO: 5349
  GFR-binding peptide
  MOD_RES (2)..(4)..(38)..(39): Xaa is C or S
  MOD_RES (16)..(17)..(18)..(19)..(20): Xaa is A or G
  MOD_RES (21)..(22)..(23)..(24): Xaa is A or G or is absent

SEQ ID NO: 77895 - protein, 37 aa, Artificial Sequence; identical to SEQ ID NO: 56303
  GFR-binding peptide
  MOD_RES (1)..(35)..(36): Xaa is C or S
  MOD_RES (13)..(14)..(15)..(16)..(17): Xaa is A or G
  MOD_RES (18)..(19)..(20)..(21): Xaa is A or G or is absent

SEQ ID NO: 77896 - protein, 36 aa, Artificial Sequence; identical to SEQ ID NO: 56304
  GFR-binding peptide
  MOD_RES (2)..(4): Xaa is C or S
  MOD_RES (15)..(16)..(17)..(18)..(19): Xaa is A or G
  MOD_RES (20)..(21)..(22)..(23): Xaa is A or G or is absent

SEQ ID NO: 77897 - protein, 34 aa, Artificial Sequence; identical to SEQ ID NO: 5350
  GFR-binding peptide
  MOD_RES (1)..(3)..(34): Xaa is C or S

SEQ ID NO: 77898 - protein, 43 aa, Artificial Sequence; identical to SEQ ID NO: 3427
  GFR-binding peptide
  MOD_RES (2)..(4)..(38)..(39): Xaa is C or S
  MOD_RES (16)..(17)..(18)..(19)..(20): Xaa is A or G
  MOD_RES (21)..(22)..(23)..(24): Xaa is A or G or is absent

SEQ ID NO: 77899 - protein, 39 aa, Artificial Sequence; identical to SEQ ID NO: 5352
  GFR-binding peptide
  MOD_RES (33)..(33): Xaa is C or S
  MOD_RES (11)..(12)..(13)..(14)..(15): Xaa is A or G
  MOD_RES (16)..(17)..(18)..(19): Xaa is A or G or is absent

SEQ ID NO: 77900 - protein, 45 aa, Artificial Sequence; identical to SEQ ID NO: 5353
  GFR-binding peptide
  MOD_RES (2)..(4)..(39)..(40): Xaa is C or S
  MOD_RES (17)..(18)..(19)..(20)..(21): Xaa is A or G
  MOD_RES (22)..(23)..(24)..(25): Xaa is A or G or is absent

SEQ ID NO: 77901 - protein, 37 aa, Artificial Sequence; identical to SEQ ID NO: 5354
  GFR-binding peptide
  MOD_RES (31)..(32): Xaa is C or S

SEQ ID NO: 77902 - protein, 40 aa, Artificial Sequence; identical to SEQ ID NO: 5355
  GFR-binding peptide
  MOD_RES (1)..(35)..(36): Xaa is C or S
  MOD_RES (13)..(14)..(15)..(16)..(17): Xaa is A or G
  MOD_RES (18)..(19)..(20)..(21): Xaa is A or G or is absent

SEQ ID NO: 77903 - protein, 41 aa, Artificial Sequence; identical to SEQ ID NO: 5357
  GFR-binding peptide
  MOD_RES (1)..(3)..(35)..(36): Xaa is C or S

SEQ ID NO: 77904 - protein, 35 aa, Artificial Sequence; identical to SEQ ID NO: 3432
  GFR-binding peptide
  MOD_RES (1)..(33)..(34): Xaa is C or S

SEQ ID NO: 77905 - protein, 39 aa, Artificial Sequence; identical to SEQ ID NO: 12789
  GFR-binding peptide
  MOD_RES (34)..(35): Xaa is C or S
  MOD_RES (12)..(13)..(14)..(15)..(16): Xaa is A or G
  MOD_RES (17)..(18)..(19)..(20): Xaa is A or G or is absent

SEQ ID NO: 77906 - protein, 35 aa, Artificial Sequence
  GFR-binding peptide
  MOD_RES (2)..(4): Xaa is C or S
RXAXSEVTMNQYNKLVVNKNEDLYLISIASMKEPV

SEQ ID NO: 77907 - protein, 35 aa, Artificial Sequence; identical to SEQ ID NO: 3434
  GFR-binding peptide
  MOD_RES (1)..(33)..(34): Xaa is C or S

SEQ ID NO: 77908 - protein, 38 aa, Artificial Sequence; identical to SEQ ID NO: 3435
  GFR-binding peptide
  MOD_RES (2)..(34)..(35): Xaa is C or S

SEQ ID NO: 77909 - protein, 38 aa, Artificial Sequence
  GFR-binding peptide
  MOD_RES (2)..(4)..(36)..(37): Xaa is C or S
SXGXRDVVMGQYNKLIIQQKDNLYLMSIASMKTPTXXP

SEQ ID NO: 77910 - protein, 36 aa, Artificial Sequence; identical to SEQ ID NO: 56312
  GFR-binding peptide
  MOD_RES (31)..(32): Xaa is C or S

SEQ ID NO: 77911 - protein, 34 aa, Artificial Sequence; identical to SEQ ID NO: 5360
  GFR-binding peptide
  MOD_RES (1)..(3): Xaa is C or S

SEQ ID NO: 77912 - protein, 38 aa, Artificial Sequence
  GFR-binding peptide
  MOD_RES (1)..(3)..(36)..(37): Xaa is C or S
  MOD_RES (14)..(15)..(16)..(17)..(18): Xaa is A or G
  MOD_RES (19)..(20)..(21)..(22): Xaa is A or G or is absent
XGXEEVIMQYNKLXXXXXXXXXLYLMSIASTKVPAXXT

SEQ ID NO: 77913 - protein, 32 aa, Artificial Sequence; identical to SEQ ID NO: 3436
  GFR-binding peptide
  MOD_RES (1)..(1): Xaa is C or S

SEQ ID NO: 77914 - protein, 40 aa, Artificial Sequence; identical to SEQ ID NO: 24427
  GFR-binding peptide
  MOD_RES (1)..(3)..(35)..(36): Xaa is C or S

SEQ ID NO: 77915 - protein, 38 aa, Artificial Sequence; identical to SEQ ID NO: 3437
  GFR-binding peptide
  MOD_RES (1)..(35)..(36): Xaa is C or S
  MOD_RES (13)..(14)..(15)..(16)..(17): Xaa is A or G
  MOD_RES (18)..(19)..(20)..(21): Xaa is A or G or is absent

SEQ ID NO: 77916 - protein, 32 aa, Artificial Sequence
  GFR-binding peptide
  MOD_RES (32)..(32): Xaa is C or S
RDVVMGQYNKLIIQQKDNLYLMSIASMKTPTX

SEQ ID NO: 77917 - protein, 37 aa, Artificial Sequence; identical to SEQ ID NO: 3438
  GFR-binding peptide
  MOD_RES (33)..(34): Xaa is C or S
  MOD_RES (11)..(12)..(13)..(14)..(15): Xaa is A or G
  MOD_RES (16)..(17)..(18)..(19): Xaa is A or G or is absent

SEQ ID NO: 77918 - protein, 40 aa, Artificial Sequence; identical to SEQ ID NO: 3439
  GFR-binding peptide
  MOD_RES (2)..(4)..(35)..(36): Xaa is C or S

SEQ ID NO: 77919 - protein, 44 aa, Artificial Sequence; identical to SEQ ID NO: 10856
  GFR-binding peptide
  MOD_RES (2)..(4)..(38)..(39): Xaa is C or S
  MOD_RES (16)..(17)..(18)..(19)..(20): Xaa is A or G
  MOD_RES (21)..(22)..(23)..(24): Xaa is A or G or is absent

SEQ ID NO: 77920 - protein, 40 aa, Artificial Sequence; identical to SEQ ID NO: 3440
  GFR-binding peptide
  MOD_RES (2)..(36)..(37): Xaa is C or S
  MOD_RES (14)..(15)..(16)..(17)..(18): Xaa is A or G
  MOD_RES (19)..(20)..(21)..(22): Xaa is A or G or is absent

SEQ ID NO: 77921 - protein, 35 aa, Artificial Sequence; identical to SEQ ID NO: 3441
  GFR-binding peptide
  MOD_RES (34)..(35): Xaa is C or S
  MOD_RES (12)..(13)..(14)..(15)..(16): Xaa is A or G
  MOD_RES (17)..(18)..(19)..(20): Xaa is A or G or is absent

SEQ ID NO: 77922 - protein, 36 aa, Artificial Sequence
  GFR-binding peptide
  MOD_RES (1)..(34)..(35): Xaa is C or S
  MOD_RES (12)..(13)..(14)..(15)..(16): Xaa is A or G
  MOD_RES (17)..(18)..(19)..(20): Xaa is A or G or is absent
XEEVIMQYNKLXXXXXXXXXLYLMSIASTKVPAXXT

SEQ ID NO: 77923 - protein, 30 aa, Artificial Sequence; identical to SEQ ID NO: 3442
  GFR-binding peptide

SEQ ID NO: 77924 - protein, 41 aa, Artificial Sequence; identical to SEQ ID NO: 5365
  GFR-binding peptide
  MOD_RES (1)..(35)..(36): Xaa is C or S
  MOD_RES (13)..(14)..(15)..(16)..(17): Xaa is A or G
  MOD_RES (18)..(19)..(20)..(21): Xaa is A or G or is absent

SEQ ID NO: 77925 - protein, 39 aa, Artificial Sequence; identical to SEQ ID NO: 12801
  GFR-binding peptide
  MOD_RES (34)..(35): Xaa is C or S
  MOD_RES (12)..(13)..(14)..(15)..(16): Xaa is A or G
  MOD_RES (17)..(18)..(19)..(20): Xaa is A or G or is absent

SEQ ID NO: 77926 - protein, 33 aa, Artificial Sequence; identical to SEQ ID NO: 5368
  GFR-binding peptide
  MOD_RES (31)..(32): Xaa is C or S

SEQ ID NO: 77927 - protein, 37 aa, Artificial Sequence; identical to SEQ ID NO: 26499
  GFR-binding peptide
  MOD_RES (2)..(36)..(37): Xaa is C or S
  MOD_RES (14)..(15)..(16)..(17)..(18): Xaa is A or G
  MOD_RES (19)..(20)..(21)..(22): Xaa is A or G or is absent

SEQ ID NO: 77928 - protein, 37 aa, Artificial Sequence
  GFR-binding peptide
  MOD_RES (31)..(32): Xaa is C or S
EVTMNQYNKLVVNKNEDLYLISIASMKEPVXXPEPIG

SEQ ID NO: 77929 - protein, 35 aa, Artificial Sequence; identical to SEQ ID NO: 5369
  GFR-binding peptide
  MOD_RES (33)..(34): Xaa is C or S

SEQ ID NO: 77930 - protein, 33 aa, Artificial Sequence; identical to SEQ ID NO: 5370
  GFR-binding peptide
  MOD_RES (1)..(33): Xaa is C or S

SEQ ID NO: 77931 - protein, 40 aa, Artificial Sequence; identical to SEQ ID NO: 5371
  GFR-binding peptide
  MOD_RES (34)..(35): Xaa is C or S
  MOD_RES (12)..(13)..(14)..(15)..(16): Xaa is A or G
  MOD_RES (17)..(18)..(19)..(20): Xaa is A or G or is absent

SEQ ID NO: 77932 - protein, 42 aa, Artificial Sequence; identical to SEQ ID NO: 3447
  GFR-binding peptide
  MOD_RES (1)..(3)..(38)..(39): Xaa is C or S
  MOD_RES (16)..(17)..(18)..(19)..(20): Xaa is A or G
  MOD_RES (21)..(22)..(23)..(24): Xaa is A or G or is absent

SEQ ID NO: 77933 - protein, 36 aa, Artificial Sequence
  GFR-binding peptide
  MOD_RES (33)..(34): Xaa is C or S
  MOD_RES (11)..(12)..(13)..(14)..(15): Xaa is A or G
  MOD_RES (16)..(17)..(18)..(19): Xaa is A or G or is absent
EVTMNQYNKLXXXXXXXXXLYLISIASMKEPVXXPE

SEQ ID NO: 77934 - protein, 40 aa, Artificial Sequence; identical to SEQ ID NO: 3449
  GFR-binding peptide
  MOD_RES (2)..(4)..(37)..(38): Xaa is C or S

SEQ ID NO: 77935 - protein, 36 aa, Artificial Sequence; identical to SEQ ID NO: 5374
  GFR-binding peptide
  MOD_RES (1)..(3)..(35): Xaa is C or S

SEQ ID NO: 77936 - protein, 42 aa, Artificial Sequence
  GFR-binding peptide
  MOD_RES (2)..(4)..(36)..(37): Xaa is C or S
RXAXSEVTMNQYNKLVVNKNEDLYLISIASMKEPVXXPEPIG

SEQ ID NO: 77937 - protein, 37 aa, Artificial Sequence; identical to SEQ ID NO: 3451
  GFR-binding peptide
  MOD_RES (34)..(35): Xaa is C or S
  MOD_RES (12)..(13)..(14)..(15)..(16): Xaa is A or G
  MOD_RES (17)..(18)..(19)..(20): Xaa is A or G or is absent

SEQ ID NO: 77938 - protein, 36 aa, Artificial Sequence; identical to SEQ ID NO: 5376
  GFR-binding peptide
  MOD_RES (1)..(3)..(36): Xaa is C or S
  MOD_RES (14)..(15)..(16)..(17)..(18): Xaa is A or G
  MOD_RES (19)..(20)..(21)..(22): Xaa is A or G or is absent

SEQ ID NO: 77939 - protein, 36 aa, Artificial Sequence; identical to SEQ ID NO: 5378
  GFR-binding peptide
  MOD_RES (2)..(4): Xaa is C or S
  MOD_RES (15)..(16)..(17)..(18)..(19): Xaa is A or G
  MOD_RES (20)..(21)..(22)..(23): Xaa is A or G or is absent

SEQ ID NO: 77940 - protein, 37 aa, Artificial Sequence
  GFR-binding peptide
  MOD_RES (31)..(32): Xaa is C or S
EVVMDQYNKLVVNNAADLYLISIASLRAPVXXSAPAA

SEQ ID NO: 77941 - protein, 35 aa, Artificial Sequence; identical to SEQ ID NO: 12811
  GFR-binding peptide
  MOD_RES (34)..(35): Xaa is C or S
  MOD_RES (12)..(13)..(14)..(15)..(16): Xaa is A or G
  MOD_RES (17)..(18)..(19)..(20): Xaa is A or G or is absent

SEQ ID NO: 77942 - protein, 35 aa, Artificial Sequence; identical to SEQ ID NO: 26511
  GFR-binding peptide
  MOD_RES (31)..(32): Xaa is C or S

SEQ ID NO: 77943 - protein, 36 aa, Artificial Sequence; identical to SEQ ID NO: 3457
  GFR-binding peptide
  MOD_RES (33)..(34): Xaa is C or S
  MOD_RES (11)..(12)..(13)..(14)..(15): Xaa is A or G
  MOD_RES (16)..(17)..(18)..(19): Xaa is A or G or is absent

SEQ ID NO: 77944 - protein, 32 aa, Artificial Sequence; identical to SEQ ID NO: 24438
  GFR-binding peptide
  MOD_RES (1)..(1): Xaa is C or S

SEQ ID NO: 77945 - protein, 37 aa, Artificial Sequence
  GFR-binding peptide
  MOD_RES (2)..(4): Xaa is C or S
  MOD_RES (16)..(17)..(18)..(19)..(20): Xaa is A or G
  MOD_RES (21)..(22)..(23)..(24): Xaa is A or G or is absent
RXGXESVAMGQYNKLXXXXXXXXXLYLISIASLKTPV

SEQ ID NO: 77946 - protein, 38 aa, Artificial Sequence; identical to SEQ ID NO: 3459
  GFR-binding peptide
  MOD_RES (1)..(32)..(33): Xaa is C or S

SEQ ID NO: 77947 - protein, 39 aa, Artificial Sequence; identical to SEQ ID NO: 5379
  GFR-binding peptide
  MOD_RES (1)..(3)..(36)..(37): Xaa is C or S
  MOD_RES (14)..(15)..(16)..(17)..(18): Xaa is A or G
  MOD_RES (19)..(20)..(21)..(22): Xaa is A or G or is absent

SEQ ID NO: 77948 - protein, 40 aa, Artificial Sequence; identical to SEQ ID NO: 24440
  GFR-binding peptide
  MOD_RES (2)..(36)..(37): Xaa is C or S
  MOD_RES (14)..(15)..(16)..(17)..(18): Xaa is A or G
  MOD_RES (19)..(20)..(21)..(22): Xaa is A or G or is absent

SEQ ID NO: 77949 - protein, 37 aa, Artificial Sequence
  GFR-binding peptide
  MOD_RES (1)..(3)..(37): Xaa is C or S
  MOD_RES (15)..(16)..(17)..(18)..(19): Xaa is A or G
  MOD_RES (20)..(21)..(22)..(23): Xaa is A or G or is absent
XGXESVAMGQYNKLXXXXXXXXXLYLISIASLKTPVX

SEQ ID NO: 77950 - protein, 39 aa, Artificial Sequence; identical to SEQ ID NO: 5381
  GFR-binding peptide
  MOD_RES (1)..(3)..(37): Xaa is C or S
  MOD_RES (15)..(16)..(17)..(18)..(19): Xaa is A or G
  MOD_RES (20)..(21)..(22)..(23): Xaa is A or G or is absent

SEQ ID NO: 77951 - protein, 37 aa, Artificial Sequence
  GFR-binding peptide
  MOD_RES (34)..(35): Xaa is C or S
  MOD_RES (12)..(13)..(14)..(15)..(16): Xaa is A or G
  MOD_RES (17)..(18)..(19)..(20): Xaa is A or G or is absent
RDVVMGQYNKLXXXXXXXXXLYLMSIASMKTPTXXPG

SEQ ID NO: 77952 - protein, 41 aa, Artificial Sequence; identical to SEQ ID NO: 5382
  GFR-binding peptide
  MOD_RES (2)..(4)..(36): Xaa is C or S

SEQ ID NO: 77953 - protein, 37 aa, Artificial Sequence; identical to SEQ ID NO: 5383
  GFR-binding peptide
  MOD_RES (2)..(34)..(35): Xaa is C or S

SEQ ID NO: 77954 - protein, 39 aa, Artificial Sequence; identical to SEQ ID NO: 5384
  GFR-binding peptide
  MOD_RES (2)..(34)..(35): Xaa is C or S

SEQ ID NO: 77955 - protein, 33 aa, Artificial Sequence
  GFR-binding peptide
  MOD_RES (1)..(33): Xaa is C or S
XAEVVMDQYNKLVVNNAADLYLISIASLRAPVX

SEQ ID NO: 77956 - protein, 34 aa, Artificial Sequence; identical to SEQ ID NO: 3465
  GFR-binding peptide
  MOD_RES (31)..(32): Xaa is C or S

SEQ ID NO: 77957 - protein, 37 aa, Artificial Sequence; identical to SEQ ID NO: 5387
  GFR-binding peptide
  MOD_RES (2)..(4): Xaa is C or S
  MOD_RES (16)..(17)..(18)..(19)..(20): Xaa is A or G
  MOD_RES (21)..(22)..(23)..(24): Xaa is A or G or is absent

SEQ ID NO: 77958 - protein, 39 aa, Artificial Sequence; identical to SEQ ID NO: 3468
  GFR-binding peptide
  MOD_RES (2)..(34)..(35): Xaa is C or S

SEQ ID NO: 77959 - protein, 40 aa, Artificial Sequence; identical to SEQ ID NO: 5390
  GFR-binding peptide
  MOD_RES (2)..(4)..(35)..(36): Xaa is C or S

SEQ ID NO: 77960 - protein, 36 aa, Artificial Sequence; identical to SEQ ID NO: 3469
  GFR-binding peptide
  MOD_RES (1)..(34)..(35): Xaa is C or S

SEQ ID NO: 77961 - protein, 43 aa, Artificial Sequence; identical to SEQ ID NO: 5393
  GFR-binding peptide
  MOD_RES (2)..(4)..(38)..(39): Xaa is C or S
  MOD_RES (16)..(17)..(18)..(19)..(20): Xaa is A or G
  MOD_RES (21)..(22)..(23)..(24): Xaa is A or G or is absent

SEQ ID NO: 77962 - protein, 40 aa, Artificial Sequence; identical to SEQ ID NO: 5394
  GFR-binding peptide
  MOD_RES (34)..(35): Xaa is C or S
  MOD_RES (12)..(13)..(14)..(15)..(16): Xaa is A or G
  MOD_RES (17)..(18)..(19)..(20): Xaa is A or G or is absent

SEQ ID NO: 77963 - protein, 37 aa, Artificial Sequence; identical to SEQ ID NO: 3470
  GFR-binding peptide
  MOD_RES (1)..(3)..(37): Xaa is C or S
  MOD_RES (15)..(16)..(17)..(18)..(19): Xaa is A or G
  MOD_RES (20)..(21)..(22)..(23): Xaa is A or G or is absent

SEQ ID NO: 77964 - protein, 35 aa, Artificial Sequence; identical to SEQ ID NO: 5395
  GFR-binding peptide
  MOD_RES (31)..(32): Xaa is C or S

SEQ ID NO: 77965 - protein, 42 aa, Artificial Sequence; identical to SEQ ID NO: 5396
  GFR-binding peptide
  MOD_RES (2)..(36)..(37): Xaa is C or S
  MOD_RES (14)..(15)..(16)..(17)..(18): Xaa is A or G
  MOD_RES (19)..(20)..(21)..(22): Xaa is A or G or is absent

SEQ ID NO: 77966 - protein, 32 aa, Artificial Sequence
  GFR-binding peptide
  MOD_RES (31)..(32): Xaa is C or S
EVVMDQYNKLVVNNAADLYLISIASLRAPVXX

SEQ ID NO: 77967 - protein, 42 aa, Artificial Sequence; identical to SEQ ID NO: 12830
  GFR-binding peptide
  MOD_RES (2)..(4)..(36)..(37): Xaa is C or S

SEQ ID NO: 77968 - protein, 42 aa, Artificial Sequence; identical to SEQ ID NO: 10888
  GFR-binding peptide
  MOD_RES (1)..(3)..(37)..(38): Xaa is C or S
  MOD_RES (15)..(16)..(17)..(18)..(19): Xaa is A or G
  MOD_RES (20)..(21)..(22)..(23): Xaa is A or G or is absent

SEQ ID NO: 77969 - protein, 34 aa, Artificial Sequence; identical to SEQ ID NO: 24452
  GFR-binding peptide
  MOD_RES (32)..(33): Xaa is C or S

SEQ ID NO: 77970 - protein, 35 aa, Artificial Sequence; identical to SEQ ID NO: 56362
  GFR-binding peptide
  MOD_RES (2)..(4): Xaa is C or S

SEQ ID NO: 77971 - protein, 33 aa, Artificial Sequence; identical to SEQ ID NO: 26525
  GFR-binding peptide
  MOD_RES (2)..(2): Xaa is C or S

SEQ ID NO: 77972 - protein, 36 aa, Artificial Sequence; identical to SEQ ID NO: 5401
  GFR-binding peptide
  MOD_RES (31)..(32): Xaa is C or S

SEQ ID NO: 77973 - protein, 37 aa, Artificial Sequence; identical to SEQ ID NO: 3475
  GFR-binding peptide
  MOD_RES (34)..(35): Xaa is C or S
  MOD_RES (12)..(13)..(14)..(15)..(16): Xaa is A or G
  MOD_RES (17)..(18)..(19)..(20): Xaa is A or G or is absent

SEQ ID NO: 77974 - protein, 33 aa, Artificial Sequence; identical to SEQ ID NO: 24456
  GFR-binding peptide
  MOD_RES (12)..(13)..(14)..(15)..(16): Xaa is A or G
  MOD_RES (17)..(18)..(19)..(20): Xaa is A or G or is absent

SEQ ID NO: 77975 - protein, 42 aa, Artificial Sequence; identical to SEQ ID NO: 3476
  GFR-binding peptide
  MOD_RES (1)..(3)..(37)..(38): Xaa is C or S
  MOD_RES (15)..(16)..(17)..(18)..(19): Xaa is A or G
  MOD_RES (20)..(21)..(22)..(23): Xaa is A or G or is absent

SEQ ID NO: 77976 - protein, 35 aa, Artificial Sequence; identical to SEQ ID NO: 56370
  GFR-binding peptide
  MOD_RES (32)..(33): Xaa is C or S

SEQ ID NO: 77977 - protein, 34 aa, Artificial Sequence; identical to SEQ ID NO: 3477
  GFR-binding peptide
  MOD_RES (2)..(4): Xaa is C or S

SEQ ID NO: 77978 - protein, 41 aa, Artificial Sequence
  GFR-binding peptide
  MOD_RES (2)..(4)..(37)..(38): Xaa is C or S
  MOD_RES (15)..(16)..(17)..(18)..(19): Xaa is A or G
  MOD_RES (20)..(21)..(22)..(23): Xaa is A or G or is absent
LXGXEEVIMQYNKLXXXXXXXXXLYLMSIASTKVPAXXTSP

SEQ ID NO: 77979 - protein, 42 aa, Artificial Sequence; identical to SEQ ID NO: 10896
  GFR-binding peptide
  MOD_RES (2)..(36)..(37): Xaa is C or S
  MOD_RES (14)..(15)..(16)..(17)..(18): Xaa is A or G
  MOD_RES (19)..(20)..(21)..(22): Xaa is A or G or is absent

SEQ ID NO: 77980 - protein, 35 aa, Artificial Sequence; identical to SEQ ID NO: 3481
  GFR-binding peptide
  MOD_RES (31)..(32): Xaa is C or S

SEQ ID NO: 77981 - protein, 35 aa, Artificial Sequence; identical to SEQ ID NO: 3482
  GFR-binding peptide
  MOD_RES (1)..(3): Xaa is C or S

SEQ ID NO: 77982 - protein, 39 aa, Artificial Sequence; identical to SEQ ID NO: 12836
  GFR-binding peptide
  MOD_RES (2)..(34)..(35): Xaa is C or S

SEQ ID NO: 77983 - protein, 41 aa, Artificial Sequence; identical to SEQ ID NO: 56380
  GFR-binding peptide
  MOD_RES (2)..(35)..(36): Xaa is C or S
  MOD_RES (13)..(14)..(15)..(16)..(17): Xaa is A or G
  MOD_RES (18)..(19)..(20)..(21): Xaa is A or G or is absent

SEQ ID NO: 77984 - protein, 35 aa, Artificial Sequence
  GFR-binding peptide
  MOD_RES (1)..(3): Xaa is C or S
  MOD_RES (14)..(15)..(16)..(17)..(18): Xaa is A or G
  MOD_RES (19)..(20)..(21)..(22): Xaa is A or G or is absent
XGXEEVIMQYNKLXXXXXXXXXLYLMSIASTKVPA

SEQ ID NO: 77985 - protein, 35 aa, Artificial Sequence; identical to SEQ ID NO: 3487
  GFR-binding peptide
  MOD_RES (34)..(35): Xaa is C or S
  MOD_RES (12)..(13)..(14)..(15)..(16): Xaa is A or G
  MOD_RES (17)..(18)..(19)..(20): Xaa is A or G or is absent

SEQ ID NO: 77986 - protein, 30 aa, Artificial Sequence; identical to SEQ ID NO: 56384
  GFR-binding peptide

SEQ ID NO: 77987 - protein, 39 aa, Artificial Sequence; identical to SEQ ID NO: 5411
  GFR-binding peptide
  MOD_RES (1)..(3)..(36)..(37): Xaa is C or S
  MOD_RES (14)..(15)..(16)..(17)..(18): Xaa is A or G
  MOD_RES (19)..(20)..(21)..(22): Xaa is A or G or is absent

SEQ ID NO: 77988 - protein, 38 aa, Artificial Sequence; identical to SEQ ID NO: 5412
  GFR-binding peptide
  MOD_RES (2)..(35)..(36): Xaa is C or S
  MOD_RES (13)..(14)..(15)..(16)..(17): Xaa is A or G
  MOD_RES (18)..(19)..(20)..(21): Xaa is A or G or is absent

SEQ ID NO: 77989 - protein, 32 aa, Artificial Sequence; identical to SEQ ID NO: 10902
  GFR-binding peptide
  MOD_RES (1)..(1): Xaa is C or S

SEQ ID NO: 77990 - protein, 35 aa, Artificial Sequence; identical to SEQ ID NO: 5413
  GFR-binding peptide
  MOD_RES (1)..(35): Xaa is C or S
  MOD_RES (13)..(14)..(15)..(16)..(17): Xaa is A or G
  MOD_RES (18)..(19)..(20)..(21): Xaa is A or G or is absent

SEQ ID NO: 77991 - protein, 39 aa, Artificial Sequence
  GFR-binding peptide
  MOD_RES (1)..(3)..(37)..(38): Xaa is C or S
  MOD_RES (15)..(16)..(17)..(18)..(19): Xaa is A or G
  MOD_RES (20)..(21)..(22)..(23): Xaa is A or G or is absent
XGXESVAMGQYNKLXXXXXXXXXLYLISIASLKTPVXXA

SEQ ID NO: 77992 - protein, 39 aa, Artificial Sequence; identical to SEQ ID NO: 3490
  GFR-binding peptide
  MOD_RES (1)..(3)..(35)..(36): Xaa is C or S

SEQ ID NO: 77993 - protein, 36 aa, Artificial Sequence; identical to SEQ ID NO: 5414
  GFR-binding peptide
  MOD_RES (1)..(33)..(34): Xaa is C or S

SEQ ID NO: 77994 - protein, 41 aa, Artificial Sequence; identical to SEQ ID NO: 3493
  GFR-binding peptide
  MOD_RES (1)..(3)..(36)..(37): Xaa is C or S
  MOD_RES (14)..(15)..(16)..(17)..(18): Xaa is A or G
  MOD_RES (19)..(20)..(21)..(22): Xaa is A or G or is absent

SEQ ID NO: 77995 - protein, 37 aa, Artificial Sequence; identical to SEQ ID NO: 3494
  GFR-binding peptide
  MOD_RES (33)..(34): Xaa is C or S
  MOD_RES (11)..(12)..(13)..(14)..(15): Xaa is A or G
  MOD_RES (16)..(17)..(18)..(19): Xaa is A or G or is absent

SEQ ID NO: 77996 - protein, 40 aa, Artificial Sequence; identical to SEQ ID NO: 56390
  GFR-binding peptide
  MOD_RES (2)..(35)..(36): Xaa is C or S
  MOD_RES (13)..(14)..(15)..(16)..(17): Xaa is A or G
  MOD_RES (18)..(19)..(20)..(21): Xaa is A or G or is absent

SEQ ID NO: 77997 - protein, 37 aa, Artificial Sequence
  GFR-binding peptide
  MOD_RES (33)..(34): Xaa is C or S
  MOD_RES (11)..(12)..(13)..(14)..(15): Xaa is A or G
  MOD_RES (16)..(17)..(18)..(19): Xaa is A or G or is absent
EEVIMQYNKLXXXXXXXXXLYLMSIASTKVPAXXTSP

SEQ ID NO: 77998 - protein, 42 aa, Artificial Sequence; identical to SEQ ID NO: 26544
  GFR-binding peptide
  MOD_RES (2)..(36)..(37): Xaa is C or S
  MOD_RES (14)..(15)..(16)..(17)..(18): Xaa is A or G
  MOD_RES (19)..(20)..(21)..(22): Xaa is A or G or is absent

SEQ ID NO: 77999 - protein, 34 aa, Artificial Sequence; identical to SEQ ID NO: 3496
  GFR-binding peptide
  MOD_RES (33)..(34): Xaa is C or S
  MOD_RES (11)..(12)..(13)..(14)..(15): Xaa is A or G
  MOD_RES (16)..(17)..(18)..(19): Xaa is A or G or is absent

SEQ ID NO: 78000 - protein, 37 aa, Artificial Sequence
  GFR-binding peptide
  MOD_RES (2)..(4)..(36)..(37): Xaa is C or S
RXAXSEVTMNQYNKLVVNKNEDLYLISIASMKEPVXX

SEQ ID NO: 78001 - protein, 37 aa, Artificial Sequence; identical to SEQ ID NO: 5417
  GFR-binding peptide
  MOD_RES (2)..(4)..(36)..(37): Xaa is C or S

SEQ ID NO: 78002 - protein, 39 aa, Artificial Sequence; identical to SEQ ID NO: 3499
  GFR-binding peptide
  MOD_RES (2)..(36)..(37): Xaa is C or S
  MOD_RES (14)..(15)..(16)..(17)..(18): Xaa is A or G
  MOD_RES (19)..(20)..(21)..(22): Xaa is A or G or is absent

SEQ ID NO: 78003 - protein, 35 aa, Artificial Sequence; identical to SEQ ID NO: 24481
  GFR-binding peptide
  MOD_RES (1)..(33)..(34): Xaa is C or S

SEQ ID NO: 78004 - protein, 36 aa, Artificial Sequence; identical to SEQ ID NO: 5421
  GFR-binding peptide
  MOD_RES (2)..(36): Xaa is C or S
  MOD_RES (14)..(15)..(16)..(17)..(18): Xaa is A or G
  MOD_RES (19)..(20)..(21)..(22): Xaa is A or G or is absent

SEQ ID NO: 78005 - protein, 31 aa, Artificial Sequence; identical to SEQ ID NO: 5422
  GFR-binding peptide
  MOD_RES (31)..(31): Xaa is C or S

SEQ ID NO: 78006 - protein, 44 aa, Artificial Sequence; identical to SEQ ID NO: 5423
  GFR-binding peptide
  MOD_RES (2)..(4)..(39)..(40): Xaa is C or S
  MOD_RES (17)..(18)..(19)..(20)..(21): Xaa is A or G
  MOD_RES (22)..(23)..(24)..(25): Xaa is A or G or is absent

SEQ ID NO: 78007 - protein, 37 aa, Artificial Sequence; identical to SEQ ID NO: 56397
  GFR-binding peptide
  MOD_RES (1)..(33)..(34): Xaa is C or S

SEQ ID NO: 78008 - protein, 41 aa, Artificial Sequence; identical to SEQ ID NO: 5425
  GFR-binding peptide
  MOD_RES (1)..(3)..(35)..(36): Xaa is C or S

SEQ ID NO: 78009 - protein, 41 aa, Artificial Sequence
  GFR-binding peptide
  MOD_RES (2)..(36)..(37): Xaa is C or S
  MOD_RES (14)..(15)..(16)..(17)..(18): Xaa is A or G
  MOD_RES (19)..(20)..(21)..(22): Xaa is A or G or is absent
GXESVAMGQYNKLXXXXXXXXXLYLISIASLKTPVXXAKSA

SEQ ID NO: 78010 - protein, 41 aa, Artificial Sequence
  GFR-binding peptide
  MOD_RES (1)..(3)..(37)..(38): Xaa is C or S
  MOD_RES (15)..(16)..(17)..(18)..(19): Xaa is A or G
  MOD_RES (20)..(21)..(22)..(23): Xaa is A or G or is absent
XGXRDVVMGQYNKLXXXXXXXXXLYLMSIASMKTPTXXPGA

SEQ ID NO: 78011 - protein, 36 aa, Artificial Sequence; identical to SEQ ID NO: 5427
  GFR-binding peptide
  MOD_RES (33)..(34): Xaa is C or S
  MOD_RES (11)..(12)..(13)..(14)..(15): Xaa is A or G
  MOD_RES (16)..(17)..(18)..(19): Xaa is A or G or is absent

SEQ ID NO: 78012 - protein, 38 aa, Artificial Sequence
  GFR-binding peptide
  MOD_RES (32)..(33): Xaa is C or S
AEVVMDQYNKLVVNNAADLYLISIASLRAPVXXSAPAA

SEQ ID NO: 78013 - protein, 43 aa, Artificial Sequence; identical to SEQ ID NO: 26554
  GFR-binding peptide
  MOD_RES (1)..(3)..(37)..(38): Xaa is C or S
  MOD_RES (15)..(16)..(17)..(18)..(19): Xaa is A or G
  MOD_RES (20)..(21)..(22)..(23): Xaa is A or G or is absent

SEQ ID NO: 78014 - protein, 35 aa, Artificial Sequence; identical to SEQ ID NO: 10917
  GFR-binding peptide
  MOD_RES (31)..(32): Xaa is C or S

SEQ ID NO: 78015 - protein, 31 aa, Artificial Sequence
  GFR-binding peptide
  MOD_RES (31)..(31): Xaa is C or S
EEVIMQYNKLLLVRGNDLYLMSIASTKVPAX

SEQ ID NO: 78016 - protein, 34 aa, Artificial Sequence; identical to SEQ ID NO: 56407
  GFR-binding peptide
  MOD_RES (33)..(34): Xaa is C or S
  MOD_RES (11)..(12)..(13)..(14)..(15): Xaa is A or G
  MOD_RES (16)..(17)..(18)..(19): Xaa is A or G or is absent

SEQ ID NO: 78017 - protein, 34 aa, Artificial Sequence
  GFR-binding peptide
  MOD_RES (1)..(33)..(34): Xaa is C or S
XRDVVMGQYNKLIIQQKDNLYLMSIASMKTPTXX

SEQ ID NO: 78018 - protein, 38 aa, Artificial Sequence; identical to SEQ ID NO: 5435
  GFR-binding peptide
  MOD_RES (1)..(33)..(34): Xaa is C or S

SEQ ID NO: 78019 - protein, 33 aa, Artificial Sequence
  GFR-binding peptide
  MOD_RES (12)..(13)..(14)..(15)..(16): Xaa is A or G
  MOD_RES (17)..(18)..(19)..(20): Xaa is A or G or is absent
RDVVMGQYNKLXXXXXXXXXLYLMSIASMKTPT

SEQ ID NO: 78020 - protein, 40 aa, Artificial Sequence
  GFR-binding peptide
  MOD_RES (1)..(3)..(37)..(38): Xaa is C or S
  MOD_RES (15)..(16)..(17)..(18)..(19): Xaa is A or G
  MOD_RES (20)..(21)..(22)..(23): Xaa is A or G or is absent
XGXAEVVMDQYNKLXXXXXXXXXLYLISIASLRAPVXXSA

SEQ ID NO: 78021 - protein, 36 aa, Artificial Sequence
  GFR-binding peptide
  MOD_RES (1)..(3): Xaa is C or S
  MOD_RES (15)..(16)..(17)..(18)..(19): Xaa is A or G
  MOD_RES (20)..(21)..(22)..(23): Xaa is A or G or is absent
XAXSEVTMNQYNKLXXXXXXXXXLYLISIASMKEPV

SEQ ID NO: 78022 - protein, 35 aa, Artificial Sequence; identical to SEQ ID NO: 56412
  GFR-binding peptide
  MOD_RES (33)..(34): Xaa is C or S
  MOD_RES (11)..(12)..(13)..(14)..(15): Xaa is A or G
  MOD_RES (16)..(17)..(18)..(19): Xaa is A or G or is absent

SEQ ID NO: 78023 - protein, 34 aa, Artificial Sequence; identical to SEQ ID NO: 3512
  GFR-binding peptide
  MOD_RES (32)..(32): Xaa is C or S

SEQ ID NO: 78024 - protein, 36 aa, Artificial Sequence; identical to SEQ ID NO: 24497
  GFR-binding peptide
  MOD_RES (1)..(3): Xaa is C or S
  MOD_RES (15)..(16)..(17)..(18)..(19): Xaa is A or G
  MOD_RES (20)..(21)..(22)..(23): Xaa is A or G or is absent

SEQ ID NO: 78025 - protein, 39 aa, Artificial Sequence; identical to SEQ ID NO: 24498
  GFR-binding peptide
  MOD_RES (1)..(35)..(36): Xaa is C or S
  MOD_RES (13)..(14)..(15)..(16)..(17): Xaa is A or G
  MOD_RES (18)..(19)..(20)..(21): Xaa is A or G or is absent

SEQ ID NO: 78026 - protein, 36 aa, Artificial Sequence; identical to SEQ ID NO: 5442
  GFR-binding peptide
  MOD_RES (1)..(35)..(36): Xaa is C or S
  MOD_RES (13)..(14)..(15)..(16)..(17): Xaa is A or G
  MOD_RES (18)..(19)..(20)..(21): Xaa is A or G or is absent

SEQ ID NO: 78027 - protein, 31 aa, Artificial Sequence
  GFR-binding peptide
ESVAMGQYNKLYTVVGKDLYLISIASLKTPV

SEQ ID NO: 78028 - protein, 34 aa, Artificial Sequence; identical to SEQ ID NO: 3514
  GFR-binding peptide
  MOD_RES (34)..(34): Xaa is C or S
  MOD_RES (12)..(13)..(14)..(15)..(16): Xaa is A or G
  MOD_RES (17)..(18)..(19)..(20): Xaa is A or G or is absent

SEQ ID NO: 78029 - protein, 37 aa, Artificial Sequence; identical to SEQ ID NO: 3515
  GFR-binding peptide
  MOD_RES (2)..(4)..(35)..(36): Xaa is C or S

SEQ ID NO: 78030 - protein, 37 aa, Artificial Sequence; identical to SEQ ID NO: 3516
  GFR-binding peptide
  MOD_RES (1)..(3)..(36)..(37): Xaa is C or S
  MOD_RES (14)..(15)..(16)..(17)..(18): Xaa is A or G
  MOD_RES (19)..(20)..(21)..(22): Xaa is A or G or is absent

SEQ ID NO: 78031 - protein, 34 aa, Artificial Sequence; identical to SEQ ID NO: 3517
  GFR-binding peptide
  MOD_RES (2)..(34): Xaa is C or S

SEQ ID NO: 78032 - protein, 35 aa, Artificial Sequence; identical to SEQ ID NO: 61080
  GFR-binding peptide
  MOD_RES (33)..(34): Xaa is C or S
  MOD_RES (11)..(12)..(13)..(14)..(15): Xaa is A or G
  MOD_RES (16)..(17)..(18)..(19): Xaa is A or G or is absent

SEQ ID NO: 78033 - protein, 32 aa, Artificial Sequence; identical to SEQ ID NO: 5443
  GFR-binding peptide
  MOD_RES (31)..(32): Xaa is C or S

SEQ ID NO: 78034 - protein, 41 aa, Artificial Sequence
  GFR-binding peptide
  MOD_RES (1)..(3)..(37)..(38): Xaa is C or S
  MOD_RES (15)..(16)..(17)..(18)..(19): Xaa is A or G
  MOD_RES (20)..(21)..(22)..(23): Xaa is A or G or is absent
XGXESVAMGQYNKLXXXXXXXXXLYLISIASLKTPVXXAKS

SEQ ID NO: 78035 - protein, 38 aa, Artificial Sequence; identical to SEQ ID NO: 5444
  GFR-binding peptide
  MOD_RES (2)..(4)..(38): Xaa is C or S
  MOD_RES (16)..(17)..(18)..(19)..(20): Xaa is A or G
  MOD_RES (21)..(22)..(23)..(24): Xaa is A or G or is absent

SEQ ID NO: 78036 - protein, 33 aa, Artificial Sequence; identical to SEQ ID NO: 5445
  GFR-binding peptide
  MOD_RES (31)..(32): Xaa is C or S

SEQ ID NO: 78037 - protein, 32 aa, Artificial Sequence; identical to SEQ ID NO: 64536
  GFR-binding peptide
  MOD_RES (1)..(1): Xaa is C or S

SEQ ID NO: 78038 - protein, 32 aa, Artificial Sequence; identical to SEQ ID NO: 3520
  GFR-binding peptide
  MOD_RES (1)..(1): Xaa is C or S

SEQ ID NO: 78039 - protein, 37 aa, Artificial Sequence; identical to SEQ ID NO: 12866
  GFR-binding peptide
  MOD_RES (1)..(35)..(36): Xaa is C or S
  MOD_RES (13)..(14)..(15)..(16)..(17): Xaa is A or G
  MOD_RES (18)..(19)..(20)..(21): Xaa is A or G or is absent

SEQ ID NO: 78040 - protein, 42 aa, Artificial Sequence; identical to SEQ ID NO: 3521
  GFR-binding peptide
  MOD_RES (2)..(4)..(36): Xaa is C or S

SEQ ID NO: 78041 - protein, 41 aa, Artificial Sequence; identical to SEQ ID NO: 3522
  GFR-binding peptide
  MOD_RES (2)..(4)..(37)..(38): Xaa is C or S
  MOD_RES (15)..(16)..(17)..(18)..(19): Xaa is A or G
  MOD_RES (20)..(21)..(22)..(23): Xaa is A or G or is absent

SEQ ID NO: 78042 - protein, 40 aa, Artificial Sequence; identical to SEQ ID NO: 3523
  GFR-binding peptide
  MOD_RES (2)..(34)..(35): Xaa is C or S

SEQ ID NO: 78043 - protein, 41 aa, Artificial Sequence
  GFR-binding peptide
  MOD_RES (2)..(4)..(36)..(37): Xaa is C or S
SXGXRDVVMGQYNKLIIQQKDNLYLMSIASMKTPTXXPGAS

SEQ ID NO: 78044 - protein, 34 aa, Artificial Sequence
  GFR-binding peptide
  MOD_RES (1)..(3)..(34): Xaa is C or S
XGXEEVIMQYNKLLLVRGNDLYLMSIASTKVPAX

SEQ ID NO: 78045 - protein, 35 aa, Artificial Sequence; identical to SEQ ID NO: 5448
  GFR-binding peptide
  MOD_RES (1)..(3): Xaa is C or S
  MOD_RES (14)..(15)..(16)..(17)..(18): Xaa is A or G
  MOD_RES (19)..(20)..(21)..(22): Xaa is A or G or is absent

SEQ ID NO: 78046 - protein, 33 aa, Artificial Sequence; identical to SEQ ID NO: 12868
  GFR-binding peptide
  MOD_RES (12)..(13)..(14)..(15)..(16): Xaa is A or G
  MOD_RES (17)..(18)..(19)..(20): Xaa is A or G or is absent

SEQ ID NO: 78047 - protein, 34 aa, Artificial Sequence; identical to SEQ ID NO: 3524
  GFR-binding peptide
  MOD_RES (1)..(32)..(33): Xaa is C or S

SEQ ID NO: 78048 - protein, 33 aa, Artificial Sequence; identical to SEQ ID NO: 5451
  GFR-binding peptide
  MOD_RES (12)..(13)..(14)..(15)..(16): Xaa is A or G
  MOD_RES (17)..(18)..(19)..(20): Xaa is A or G or is absent

SEQ ID NO: 78049 - protein, 34 aa, Artificial Sequence; identical to SEQ ID NO: 5452
  GFR-binding peptide
  MOD_RES (2)..(34): Xaa is C or S

SEQ ID NO: 78050 - protein, 38 aa, Artificial Sequence; identical to SEQ ID NO: 24513
  GFR-binding peptide
  MOD_RES (2)..(4)..(36)..(37): Xaa is C or S

SEQ ID NO: 78051 - protein, 34 aa, Artificial Sequence; identical to SEQ ID NO: 5455
  GFR-binding peptide
  MOD_RES (31)..(32): Xaa is C or S

SEQ ID NO: 78052 - protein, 36 aa, Artificial Sequence; identical to SEQ ID NO: 3527
  GFR-binding peptide
  MOD_RES (1)..(3)..(34)..(35): Xaa is C or S

SEQ ID NO: 78053 - protein, 41 aa, Artificial Sequence; identical to SEQ ID NO: 5456
  GFR-binding peptide
  MOD_RES (1)..(3)..(37)..(38): Xaa is C or S
  MOD_RES (15)..(16)..(17)..(18)..(19): Xaa is A or G
  MOD_RES (20)..(21)..(22)..(23): Xaa is A or G or is absent

SEQ ID NO: 78054 - protein, 35 aa, Artificial Sequence; identical to SEQ ID NO: 24517
  GFR-binding peptide
  MOD_RES (1)..(33)..(34): Xaa is C or S

SEQ ID NO: 78055 - protein, 38 aa, Artificial Sequence; identical to SEQ ID NO: 3528
  GFR-binding peptide
  MOD_RES (2)..(4)..(35)..(36): Xaa is C or S

SEQ ID NO: 78056 - protein, 31 aa, Artificial Sequence; identical to SEQ ID NO: 5457
  GFR-binding peptide
  MOD_RES (1)..(1): Xaa is C or S

SEQ ID NO: 78057 - protein, 40 aa, Artificial Sequence; identical to SEQ ID NO: 5459
  GFR-binding peptide
  MOD_RES (2)..(35)..(36): Xaa is C or S
  MOD_RES (13)..(14)..(15)..(16)..(17): Xaa is A or G
  MOD_RES (18)..(19)..(20)..(21): Xaa is A or G or is absent

SEQ ID NO: 78058 - protein, 38 aa, Artificial Sequence; identical to SEQ ID NO: 3529
  GFR-binding peptide
  MOD_RES (34)..(35): Xaa is C or S
  MOD_RES (12)..(13)..(14)..(15)..(16): Xaa is A or G
  MOD_RES (17)..(18)..(19)..(20): Xaa is A or G or is absent

SEQ ID NO: 78059 - protein, 41 aa, Artificial Sequence; identical to SEQ ID NO: 5460
  GFR-binding peptide
  MOD_RES (2)..(4)..(37)..(38): Xaa is C or S

SEQ ID NO: 78060 - protein, 36 aa, Artificial Sequence; identical to SEQ ID NO: 3530
  GFR-binding peptide
  MOD_RES (32)..(33): Xaa is C or S

SEQ ID NO: 78061 - protein, 32 aa, Artificial Sequence; identical to SEQ ID NO: 56432
  GFR-binding peptide
  MOD_RES (11)..(12)..(13)..(14)..(15): Xaa is A or G
  MOD_RES (16)..(17)..(18)..(19): Xaa is A or G or is absent

SEQ ID NO: 78062 - protein, 33 aa, Artificial Sequence; identical to SEQ ID NO: 12879
  GFR-binding peptide
  MOD_RES (12)..(13)..(14)..(15)..(16): Xaa is A or G
  MOD_RES (17)..(18)..(19)..(20): Xaa is A or G or is absent

SEQ ID NO: 78063 - protein, 36 aa, Artificial Sequence; identical to SEQ ID NO: 5463
  GFR-binding peptide
  MOD_RES (1)..(3): Xaa is C or S
  MOD_RES (15)..(16)..(17)..(18)..(19): Xaa is A or G
  MOD_RES (20)..(21)..(22)..(23): Xaa is A or G or is absent

SEQ ID NO: 78064 - protein, 38 aa, Artificial Sequence; identical to SEQ ID NO: 3532
  GFR-binding peptide
  MOD_RES (34)..(35): Xaa is C or S
  MOD_RES (12)..(13)..(14)..(15)..(16): Xaa is A or G
  MOD_RES (17)..(18)..(19)..(20): Xaa is A or G or is absent

SEQ ID NO: 78065 - protein, 39 aa, Artificial Sequence; identical to SEQ ID NO: 5464
  GFR-binding peptide
  MOD_RES (2)..(4)..(39): Xaa is C or S
  MOD_RES (17)..(18)..(19)..(20)..(21): Xaa is A or G
  MOD_RES (22)..(23)..(24)..(25): Xaa is A or G or is absent

SEQ ID NO: 78066 - protein, 34 aa, Artificial Sequence; identical to SEQ ID NO: 24523
  GFR-binding peptide
  MOD_RES (31)..(32): Xaa is C or S

SEQ ID NO: 78067 - protein, 38 aa, Artificial Sequence; identical to SEQ ID NO: 56437
  GFR-binding peptide
  MOD_RES (2)..(4)..(35)..(36): Xaa is C or S

SEQ ID NO: 78068 - protein, 40 aa, Artificial Sequence
  GFR-binding peptide
  MOD_RES (2)..(36)..(37): Xaa is C or S
  MOD_RES (14)..(15)..(16)..(17)..(18): Xaa is A or G
  MOD_RES (19)..(20)..(21)..(22): Xaa is A or G or is absent
AXSEVTMNQYNKLXXXXXXXXXLYLISIASMKEPVXXPEP

SEQ ID NO: 78069 - protein, 38 aa, Artificial Sequence
  GFR-binding peptide
  MOD_RES (33)..(34): Xaa is C or S
  MOD_RES (11)..(12)..(13)..(14)..(15): Xaa is A or G
  MOD_RES (16)..(17)..(18)..(19): Xaa is A or G or is absent
SVAMGQYNKLXXXXXXXXXLYLISIASLKTPVXXAKSA

SEQ ID NO: 78070 - protein, 36 aa, Artificial Sequence; identical to SEQ ID NO: 3537
  GFR-binding peptide
  MOD_RES (32)..(33): Xaa is C or S

SEQ ID NO: 78071 - protein, 38 aa, Artificial Sequence; identical to SEQ ID NO: 24526
  GFR-binding peptide
  MOD_RES (2)..(34)..(35): Xaa is C or S

SEQ ID NO: 78072 - protein, 31 aa, Artificial Sequence; identical to SEQ ID NO: 56443
  GFR-binding peptide

SEQ ID NO: 78073 - protein, 40 aa, Artificial Sequence; identical to SEQ ID NO: 12885
  GFR-binding peptide
  MOD_RES (34)..(35): Xaa is C or S
  MOD_RES (12)..(13)..(14)..(15)..(16): Xaa is A or G
  MOD_RES (17)..(18)..(19)..(20): Xaa is A or G or is absent

SEQ ID NO: 78074 - protein, 39 aa, Artificial Sequence; identical to SEQ ID NO: 5471
  GFR-binding peptide
  MOD_RES (1)..(36)..(37): Xaa is C or S
  MOD_RES (14)..(15)..(16)..(17)..(18): Xaa is A or G
  MOD_RES (19)..(20)..(21)..(22): Xaa is A or G or is absent

SEQ ID NO: 78075 - protein, 38 aa, Artificial Sequence; identical to SEQ ID NO: 24531
  GFR-binding peptide
  MOD_RES (1)..(3)..(37)..(38): Xaa is C or S
  MOD_RES (15)..(16)..(17)..(18)..(19): Xaa is A or G
  MOD_RES (20)..(21)..(22)..(23): Xaa is A or G or is absent

SEQ ID NO: 78076 - protein, 34 aa, Artificial Sequence; identical to SEQ ID NO: 26585
  GFR-binding peptide
  MOD_RES (33)..(34): Xaa is C or S
  MOD_RES (11)..(12)..(13)..(14)..(15): Xaa is A or G
  MOD_RES (16)..(17)..(18)..(19): Xaa is A or G or is absent

SEQ ID NO: 78077 - protein, 43 aa, Artificial Sequence; identical to SEQ ID NO: 10947
  GFR-binding peptide
  MOD_RES (1)..(3)..(37)..(38): Xaa is C or S
  MOD_RES (15)..(16)..(17)..(18)..(19): Xaa is A or G
  MOD_RES (20)..(21)..(22)..(23): Xaa is A or G or is absent

SEQ ID NO: 78078 - protein, 37 aa, Artificial Sequence; identical to SEQ ID NO: 3539
  GFR-binding peptide
  MOD_RES (2)..(35)..(36): Xaa is C or S

SEQ ID NO: 78079 - protein, 37 aa, Artificial Sequence; identical to SEQ ID NO: 5474
  GFR-binding peptide
  MOD_RES (2)..(33)..(34): Xaa is C or S

SEQ ID NO: 78080 - protein, 35 aa, Artificial Sequence
  GFR-binding peptide
  MOD_RES (34)..(35): Xaa is C or S
  MOD_RES (12)..(13)..(14)..(15)..(16): Xaa is A or G
  MOD_RES (17)..(18)..(19)..(20): Xaa is A or G or is absent
AEVVMDQYNKLXXXXXXXXXLYLISIASLRAPVXX

SEQ ID NO: 78081 - protein, 38 aa, Artificial Sequence
  GFR-binding peptide
  MOD_RES (1)..(33)..(34): Xaa is C or S
XRDVVMGQYNKLIIQQKDNLYLMSIASMKTPTXXPGAS

SEQ ID NO: 78082 - protein, 36 aa, Artificial Sequence
  GFR-binding peptide
  MOD_RES (34)..(35): Xaa is C or S
  MOD_RES (12)..(13)..(14)..(15)..(16): Xaa is A or G
  MOD_RES (17)..(18)..(19)..(20): Xaa is A or G or is absent
SEVTMNQYNKLXXXXXXXXXLYLISIASMKEPVXXP

SEQ ID NO: 78083 - protein, 44 aa, Artificial Sequence; identical to SEQ ID NO: 5477
  GFR-binding peptide
  MOD_RES (2)..(4)..(38)..(39): Xaa is C or S
  MOD_RES (16)..(17)..(18)..(19)..(20): Xaa is A or G
  MOD_RES (21)..(22)..(23)..(24): Xaa is A or G or is absent

SEQ ID NO: 78084 - protein, 38 aa, Artificial Sequence; identical to SEQ ID NO: 5479
  GFR-binding peptide
  MOD_RES (1)..(33)..(34): Xaa is C or S

SEQ ID NO: 78085 - protein, 37 aa, Artificial Sequence; identical to SEQ ID NO: 5480
  GFR-binding peptide
  MOD_RES (1)..(34)..(35): Xaa is C or S
  MOD_RES (12)..(13)..(14)..(15)..(16): Xaa is A or G
  MOD_RES (17)..(18)..(19)..(20): Xaa is A or G or is absent

SEQ ID NO: 78086 - protein, 38 aa, Artificial Sequence; identical to SEQ ID NO: 3543
  GFR-binding peptide
  MOD_RES (1)..(3)..(35)..(36): Xaa is C or S

SEQ ID NO: 78087 - protein, 38 aa, Artificial Sequence; identical to SEQ ID NO: 5481
  GFR-binding peptide
  MOD_RES (2)..(4)..(37)..(38): Xaa is C or S

SEQ ID NO: 78088 - protein, 41 aa, Artificial Sequence; identical to SEQ ID NO: 10950
  GFR-binding peptide
  MOD_RES (2)..(36)..(37): Xaa is C or S
  MOD_RES (14)..(15)..(16)..(17)..(18): Xaa is A or G
  MOD_RES (19)..(20)..(21)..(22): Xaa is A or G or is absent

SEQ ID NO: 78089 - protein, 39 aa, Artificial Sequence; identical to SEQ ID NO: 64571
  GFR-binding peptide
  MOD_RES (1)..(3)..(37)..(38): Xaa is C or S
  MOD_RES (15)..(16)..(17)..(18)..(19): Xaa is A or G
  MOD_RES (20)..(21)..(22)..(23): Xaa is A or G or is absent

SEQ ID NO: 78090 - protein, 34 aa, Artificial Sequence; identical to SEQ ID NO: 3547
  GFR-binding peptide
  MOD_RES (2)..(33)..(34): Xaa is C or S

SEQ ID NO: 78091 - protein, 39 aa, Artificial Sequence; identical to SEQ ID NO: 5484
  GFR-binding peptide
  MOD_RES (2)..(35)..(36): Xaa is C or S
  MOD_RES (13)..(14)..(15)..(16)..(17): Xaa is A or G
  MOD_RES (18)..(19)..(20)..(21): Xaa is A or G or is absent

SEQ ID NO: 78092 - protein, 39 aa, Artificial Sequence; identical to SEQ ID NO: 5485
  GFR-binding peptide
  MOD_RES (2)..(37)..(38): Xaa is C or S
  MOD_RES (15)..(16)..(17)..(18)..(19): Xaa is A or G
  MOD_RES (20)..(21)..(22)..(23): Xaa is A or G or is absent

SEQ ID NO: 78093 - protein, 38 aa, Artificial Sequence; identical to SEQ ID NO: 56461
  GFR-binding peptide
  MOD_RES (2)..(4)..(37)..(38): Xaa is C or S
  MOD_RES (15)..(16)..(17)..(18)..(19): Xaa is A or G
  MOD_RES (20)..(21)..(22)..(23): Xaa is A or G or is absent

SEQ ID NO: 78094 - protein, 39 aa, Artificial Sequence; identical to SEQ ID NO: 3548
  GFR-binding peptide
  MOD_RES (1)..(35)..(36): Xaa is C or S
  MOD_RES (13)..(14)..(15)..(16)..(17): Xaa is A or G
  MOD_RES (18)..(19)..(20)..(21): Xaa is A or G or is absent

SEQ ID NO: 78095 - protein, 38 aa, Artificial Sequence; identical to SEQ ID NO: 26596
  GFR-binding peptide
  MOD_RES (1)..(33)..(34): Xaa is C or S

SEQ ID NO: 78096 - protein, 36 aa, Artificial Sequence
  GFR-binding peptide
  MOD_RES (33)..(34): Xaa is C or S
  MOD_RES (11)..(12)..(13)..(14)..(15): Xaa is A or G
  MOD_RES (16)..(17)..(18)..(19): Xaa is A or G or is absent
EEVIMQYNKLXXXXXXXXXLYLMSIASTKVPAXXTS

SEQ ID NO: 78097 - protein, 34 aa, Artificial Sequence; identical to SEQ ID NO: 3549
  GFR-binding peptide
  MOD_RES (2)..(2): Xaa is C or S
  MOD_RES (13)..(14)..(15)..(16)..(17): Xaa is A or G
  MOD_RES (18)..(19)..(20)..(21): Xaa is A or G or is absent

SEQ ID NO: 78098 - protein, 32 aa, Artificial Sequence; identical to SEQ ID NO: 5492
  GFR-binding peptide
  MOD_RES (31)..(32): Xaa is C or S

SEQ ID NO: 78099 - protein, 40 aa, Artificial Sequence; identical to SEQ ID NO: 5494
  GFR-binding peptide
  MOD_RES (2)..(4)..(38): Xaa is C or S
  MOD_RES (16)..(17)..(18)..(19)..(20): Xaa is A or G
  MOD_RES (21)..(22)..(23)..(24): Xaa is A or G or is absent

SEQ ID NO: 78100 - protein, 42 aa, Artificial Sequence; identical to SEQ ID NO: 5495
  GFR-binding peptide
  MOD_RES (2)..(4)..(38)..(39): Xaa is C or S
  MOD_RES (16)..(17)..(18)..(19)..(20): Xaa is A or G
  MOD_RES (21)..(22)..(23)..(24): Xaa is A or G or is absent

SEQ ID NO: 78101 - protein, 35 aa, Artificial Sequence; identical to SEQ ID NO: 5498
  GFR-binding peptide
  MOD_RES (2)..(2): Xaa is C or S
  MOD_RES (14)..(15)..(16)..(17)..(18): Xaa is A or G
  MOD_RES (19)..(20)..(21)..(22): Xaa is A or G or is absent

SEQ ID NO: 78102 - protein, 40 aa, Artificial Sequence; identical to SEQ ID NO: 3550
  GFR-binding peptide
  MOD_RES (2)..(4)..(38)..(39): Xaa is C or S
  MOD_RES (16)..(17)..(18)..(19)..(20): Xaa is A or G
  MOD_RES (21)..(22)..(23)..(24): Xaa is A or G or is absent

SEQ ID NO: 78103 - protein, 34 aa, Artificial Sequence; identical to SEQ ID NO: 26599
  GFR-binding peptide
  MOD_RES (1)..(3): Xaa is C or S

SEQ ID NO: 78104 - protein, 34 aa, Artificial Sequence; identical to SEQ ID NO: 5499
  GFR-binding peptide
  MOD_RES (2)..(2): Xaa is C or S
  MOD_RES (13)..(14)..(15)..(16)..(17): Xaa is A or G
  MOD_RES (18)..(19)..(20)..(21): Xaa is A or G or is absent

SEQ ID NO: 78105 - protein, 39 aa, Artificial Sequence
  GFR-binding peptide
  MOD_RES (33)..(34): Xaa is C or S
  MOD_RES (11)..(12)..(13)..(14)..(15): Xaa is A or G
  MOD_RES (16)..(17)..(18)..(19): Xaa is A or G or is absent
RVVMNQYNKLXXXXXXXXXLYLVSIASLKTPAXXPKPVH

SEQ ID NO: 78106 - protein, 34 aa, Artificial Sequence; identical to SEQ ID NO: 3551
  GFR-binding peptide
  MOD_RES (32)..(33): Xaa is C or S

SEQ ID NO: 78107 - protein, 38 aa, Artificial Sequence
  GFR-binding peptide
  MOD_RES (1)..(3)..(35)..(36): Xaa is C or S
XGXAEVVMDQYNKLVVNNAADLYLISIASLRAPVXXSA

SEQ ID NO: 78108 - protein, 39 aa, Artificial Sequence; identical to SEQ ID NO: 24554
  GFR-binding peptide
  MOD_RES (2)..(36)..(37): Xaa is C or S
  MOD_RES (14)..(15)..(16)..(17)..(18): Xaa is A or G
  MOD_RES (19)..(20)..(21)..(22): Xaa is A or G or is absent

SEQ ID NO: 78109 - protein, 39 aa, Artificial Sequence; identical to SEQ ID NO: 5501
  GFR-binding peptide
  MOD_RES (1)..(35)..(36): Xaa is C or S
  MOD_RES (13)..(14)..(15)..(16)..(17): Xaa is A or G
  MOD_RES (18)..(19)..(20)..(21): Xaa is A or G or is absent

SEQ ID NO: 78110 - protein, 37 aa, Artificial Sequence; identical to SEQ ID NO: 3552
  GFR-binding peptide
  MOD_RES (2)..(4)..(37): Xaa is C or S

SEQ ID NO: 78111 - protein, 40 aa, Artificial Sequence; identical to SEQ ID NO: 5502
  GFR-binding peptide
  MOD_RES (1)..(3)..(38)..(39): Xaa is C or S
  MOD_RES (16)..(17)..(18)..(19)..(20): Xaa is A or G
  MOD_RES (21)..(22)..(23)..(24): Xaa is A or G or is absent

SEQ ID NO: 78112 - protein, 35 aa, Artificial Sequence; identical to SEQ ID NO: 5503
  GFR-binding peptide
  MOD_RES (2)..(2): Xaa is C or S
  MOD_RES (14)..(15)..(16)..(17)..(18): Xaa is A or G
  MOD_RES (19)..(20)..(21)..(22): Xaa is A or G or is absent

SEQ ID NO: 78113 - protein, 36 aa, Artificial Sequence
  GFR-binding peptide
  MOD_RES (1)..(35)..(36): Xaa is C or S
  MOD_RES (13)..(14)..(15)..(16)..(17): Xaa is A or G
  MOD_RES (18)..(19)..(20)..(21): Xaa is A or G or is absent
XRDVVMGQYNKLXXXXXXXXXLYLMSIASMKTPTXX

SEQ ID NO: 78114 - protein, 41 aa, Artificial Sequence; identical to SEQ ID NO: 3555
  GFR-binding peptide
  MOD_RES (1)..(3)..(36)..(37): Xaa is C or S

SEQ ID NO: 78115 - protein, 39 aa, Artificial Sequence; identical to SEQ ID NO: 3556
  GFR-binding peptide
  MOD_RES (2)..(33)..(34): Xaa is C or S

SEQ ID NO: 78116 - protein, 40 aa, Artificial Sequence; identical to SEQ ID NO: 5507
  GFR-binding peptide
  MOD_RES (1)..(3)..(36)..(37): Xaa is C or S
  MOD_RES (14)..(15)..(16)..(17)..(18): Xaa is A or G
  MOD_RES (19)..(20)..(21)..(22): Xaa is A or G or is absent

SEQ ID NO: 78117 - protein, 35 aa, Artificial Sequence; identical to SEQ ID NO: 24568
  GFR-binding peptide
  MOD_RES (34)..(35): Xaa is C or S
  MOD_RES (12)..(13)..(14)..(15)..(16): Xaa is A or G
  MOD_RES (17)..(18)..(19)..(20): Xaa is A or G or is absent

SEQ ID NO: 78118 - protein, 39 aa, Artificial Sequence; identical to SEQ ID NO: 3560
  GFR-binding peptide
  MOD_RES (1)..(3)..(37)..(38): Xaa is C or S
  MOD_RES (15)..(16)..(17)..(18)..(19): Xaa is A or G
  MOD_RES (20)..(21)..(22)..(23): Xaa is A or G or is absent

SEQ ID NO: 78119 - protein, 36 aa, Artificial Sequence; identical to SEQ ID NO: 5508
  GFR-binding peptide
  MOD_RES (2)..(36): Xaa is C or S
  MOD_RES (14)..(15)..(16)..(17)..(18): Xaa is A or G
  MOD_RES (19)..(20)..(21)..(22): Xaa is A or G or is absent

SEQ ID NO: 78120 - protein, 35 aa, Artificial Sequence; identical to SEQ ID NO: 3562
  GFR-binding peptide
  MOD_RES (2)..(4): Xaa is C or S

SEQ ID NO: 78121 - protein, 36 aa, Artificial Sequence; identical to SEQ ID NO: 26616
  GFR-binding peptide
  MOD_RES (1)..(33)..(34): Xaa is C or S

SEQ ID NO: 78122 - protein, 36 aa, Artificial Sequence; identical to SEQ ID NO: 3563
  GFR-binding peptide
  MOD_RES (31)..(32): Xaa is C or S

SEQ ID NO: 78123 - protein, 40 aa, Artificial Sequence; identical to SEQ ID NO: 12922
  GFR-binding peptide
  MOD_RES (34)..(35): Xaa is C or S
  MOD_RES (12)..(13)..(14)..(15)..(16): Xaa is A or G
  MOD_RES (17)..(18)..(19)..(20): Xaa is A or G or is absent

SEQ ID NO: 78124 - protein, 33 aa, Artificial Sequence; identical to SEQ ID NO: 10982
  GFR-binding peptide
  MOD_RES (32)..(33): Xaa is C or S

SEQ ID NO: 78125 - protein, 41 aa, Artificial Sequence; identical to SEQ ID NO: 5511
  GFR-binding peptide
  MOD_RES (1)..(35)..(36): Xaa is C or S
  MOD_RES (13)..(14)..(15)..(16)..(17): Xaa is A or G
  MOD_RES (18)..(19)..(20)..(21): Xaa is A or G or is absent

SEQ ID NO: 78126 - protein, 32 aa, Artificial Sequence
  GFR-binding peptide
  MOD_RES (2)..(2): Xaa is C or S
GXEEVIMQYNKLLLVRGNDLYLMSIASTKVPA

SEQ ID NO: 78127 - protein, 38 aa, Artificial Sequence; identical to SEQ ID NO: 56491
  GFR-binding peptide
  MOD_RES (33)..(34): Xaa is C or S
  MOD_RES (11)..(12)..(13)..(14)..(15): Xaa is A or G
  MOD_RES (16)..(17)..(18)..(19): Xaa is A or G or is absent

SEQ ID NO: 78128 - protein, 37 aa, Artificial Sequence; identical to SEQ ID NO: 3567
  GFR-binding peptide
  MOD_RES (33)..(34): Xaa is C or S
  MOD_RES (11)..(12)..(13)..(14)..(15): Xaa is A or G
  MOD_RES (16)..(17)..(18)..(19): Xaa is A or G or is absent

SEQ ID NO: 78129 - protein, 32 aa, Artificial Sequence; identical to SEQ ID NO: 56493
  GFR-binding peptide
  MOD_RES (31)..(32): Xaa is C or S

SEQ ID NO: 78130 - protein, 39 aa, Artificial Sequence; identical to SEQ ID NO: 56496
  GFR-binding peptide
  MOD_RES (1)..(3)..(35)..(36): Xaa is C or S

SEQ ID NO: 78131 - protein, 30 aa, Artificial Sequence; identical to SEQ ID NO: 3571
  GFR-binding peptide

SEQ ID NO: 78132 - protein, 39 aa, Artificial Sequence; identical to SEQ ID NO: 5522
  GFR-binding peptide
  MOD_RES (1)..(3)..(36)..(37): Xaa is C or S

SEQ ID NO: 78133 - protein, 38 aa, Artificial Sequence
  GFR-binding peptide
  MOD_RES (1)..(33)..(34): Xaa is C or S
XSEVTMNQYNKLVVNKNEDLYLISIASMKEPVXXPEPI

SEQ ID NO: 78134 - protein, 38 aa, Artificial Sequence
  GFR-binding peptide
  MOD_RES (2)..(4)..(36)..(37): Xaa is C or S
RXGXAEVVMDQYNKLVVNNAADLYLISIASLRAPVXXS

SEQ ID NO: 78135 - protein, 38 aa, Artificial Sequence; identical to SEQ ID NO: 3573
  GFR-binding peptide
  MOD_RES (2)..(4)..(35)..(36): Xaa is C or S

SEQ ID NO: 78136 - protein, 40 aa, Artificial Sequence; identical to SEQ ID NO: 24582
  GFR-binding peptide
  MOD_RES (2)..(34)..(35): Xaa is C or S

SEQ ID NO: 78137 - protein, 36 aa, Artificial Sequence; identical to SEQ ID NO: 3575
  GFR-binding peptide
  MOD_RES (2)..(35)..(36): Xaa is C or S
  MOD_RES (13)..(14)..(15)..(16)..(17): Xaa is A or G
  MOD_RES (18)..(19)..(20)..(21): Xaa is A or G or is absent

SEQ ID NO: 78138 - protein, 43 aa, Artificial Sequence
  GFR-binding peptide
  MOD_RES (1)..(3)..(37)..(38): Xaa is C or S
  MOD_RES (15)..(16)..(17)..(18)..(19): Xaa is A or G
  MOD_RES (20)..(21)..(22)..(23): Xaa is A or G or is absent
XGXRDVVMGQYNKLXXXXXXXXXLYLMSIASMKTPTXXPGASG

SEQ ID NO: 78139 - protein, 40 aa, Artificial Sequence; identical to SEQ ID NO: 3576
  GFR-binding peptide
  MOD_RES (2)..(36)..(37): Xaa is C or S
  MOD_RES (14)..(15)..(16)..(17)..(18): Xaa is A or G
  MOD_RES (19)..(20)..(21)..(22): Xaa is A or G or is absent

SEQ ID NO: 78140 - protein, 36 aa, Artificial Sequence
  GFR-binding peptide
  MOD_RES (2)..(4)..(35)..(36): Xaa is C or S
LXGXEEVIMQYNKLLLVRGNDLYLMSIASTKVPAXX

SEQ ID NO: 78141 - protein, 42 aa, Artificial Sequence
  GFR-binding peptide
  MOD_RES (2)..(4)..(38)..(39): Xaa is C or S
  MOD_RES (16)..(17)..(18)..(19)..(20): Xaa is A or G
  MOD_RES (21)..(22)..(23)..(24): Xaa is A or G or is absent
RXGXAEVVMDQYNKLXXXXXXXXXLYLISIASLRAPVXXSAP

SEQ ID NO: 78142 - protein, 38 aa, Artificial Sequence; identical to SEQ ID NO: 12943
  GFR-binding peptide
  MOD_RES (2)..(34)..(35): Xaa is C or S

SEQ ID NO: 78143 - protein, 37 aa, Artificial Sequence; identical to SEQ ID NO: 3582
  GFR-binding peptide
  MOD_RES (34)..(35): Xaa is C or S
  MOD_RES (12)..(13)..(14)..(15)..(16): Xaa is A or G
  MOD_RES (17)..(18)..(19)..(20): Xaa is A or G or is absent

SEQ ID NO: 78144 - protein, 40 aa, Artificial Sequence
  GFR-binding peptide
  MOD_RES (34)..(35): Xaa is C or S
  MOD_RES (12)..(13)..(14)..(15)..(16): Xaa is A or G
  MOD_RES (17)..(18)..(19)..(20): Xaa is A or G or is absent
RDVVMGQYNKLXXXXXXXXXLYLMSIASMKTPTXXPGASG

SEQ ID NO: 78145 - protein, 36 aa, Artificial Sequence; identical to SEQ ID NO: 3589
  GFR-binding peptide
  MOD_RES (1)..(3)..(36): Xaa is C or S
  MOD_RES (14)..(15)..(16)..(17)..(18): Xaa is A or G
  MOD_RES (19)..(20)..(21)..(22): Xaa is A or G or is absent

SEQ ID NO: 78146 - protein, 38 aa, Artificial Sequence; identical to SEQ ID NO: 5530
  GFR-binding peptide
  MOD_RES (2)..(36)..(37): Xaa is C or S
  MOD_RES (14)..(15)..(16)..(17)..(18): Xaa is A or G
  MOD_RES (19)..(20)..(21)..(22): Xaa is A or G or is absent

SEQ ID NO: 78147 - protein, 39 aa, Artificial Sequence; identical to SEQ ID NO: 26642
  GFR-binding peptide
  MOD_RES (33)..(34): Xaa is C or S
  MOD_RES (11)..(12)..(13)..(14)..(15): Xaa is A or G
  MOD_RES (16)..(17)..(18)..(19): Xaa is A or G or is absent

SEQ ID NO: 78148 - protein, 39 aa, Artificial Sequence; identical to SEQ ID NO: 3590
  GFR-binding peptide
  MOD_RES (2)..(34)..(35): Xaa is C or S

SEQ ID NO: 78149 - protein, 41 aa, Artificial Sequence; identical to SEQ ID NO: 3593
  GFR-binding peptide
  MOD_RES (1)..(3)..(36)..(37): Xaa is C or S

SEQ ID NO: 78150 - protein, 39 aa, Artificial Sequence; identical to SEQ ID NO: 5534
  GFR-binding peptide
  MOD_RES (2)..(36)..(37): Xaa is C or S
  MOD_RES (14)..(15)..(16)..(17)..(18): Xaa is A or G
  MOD_RES (19)..(20)..(21)..(22): Xaa is A or G or is absent

SEQ ID NO: 78151 - protein, 39 aa, Artificial Sequence; identical to SEQ ID NO: 5535
  GFR-binding peptide
  MOD_RES (34)..(35): Xaa is C or S
  MOD_RES (12)..(13)..(14)..(15)..(16): Xaa is A or G
  MOD_RES (17)..(18)..(19)..(20): Xaa is A or G or is absent

SEQ ID NO: 78152 - protein, 36 aa, Artificial Sequence; identical to SEQ ID NO: 24607
  GFR-binding peptide
  MOD_RES (32)..(33): Xaa is C or S

SEQ ID NO: 78153 - protein, 38 aa, Artificial Sequence; identical to SEQ ID NO: 3596
  GFR-binding peptide
  MOD_RES (2)..(4)..(36): Xaa is C or S

SEQ ID NO: 78154 - protein, 38 aa, Artificial Sequence; identical to SEQ ID NO: 5536
  GFR-binding peptide
  MOD_RES (2)..(36)..(37): Xaa is C or S
  MOD_RES (14)..(15)..(16)..(17)..(18): Xaa is A or G
  MOD_RES (19)..(20)..(21)..(22): Xaa is A or G or is absent

SEQ ID NO: 78155 - protein, 34 aa, Artificial Sequence; identical to SEQ ID NO: 12952
  GFR-binding peptide
  MOD_RES (31)..(32): Xaa is C or S

SEQ ID NO: 78156 - protein, 32 aa, Artificial Sequence; identical to SEQ ID NO: 3599
  GFR-binding peptide
  MOD_RES (31)..(32): Xaa is C or S

SEQ ID NO: 78157 - protein, 35 aa, Artificial Sequence; identical to SEQ ID NO: 5540
  GFR-binding peptide
  MOD_RES (2)..(2): Xaa is C or S
  MOD_RES (14)..(15)..(16)..(17)..(18): Xaa is A or G
  MOD_RES (19)..(20)..(21)..(22): Xaa is A or G or is absent

SEQ ID NO: 78158 - protein, 42 aa, Artificial Sequence; identical to SEQ ID NO: 3601
  GFR-binding peptide
  MOD_RES (1)..(3)..(36)..(37): Xaa is C or S
  MOD_RES (14)..(15)..(16)..(17)..(18): Xaa is A or G
  MOD_RES (19)..(20)..(21)..(22): Xaa is A or G or is absent

SEQ ID NO: 78159 - protein, 40 aa, Artificial Sequence; identical to SEQ ID NO: 5541
  GFR-binding peptide
  MOD_RES (1)..(35)..(36): Xaa is C or S
  MOD_RES (13)..(14)..(15)..(16)..(17): Xaa is A or G
  MOD_RES (18)..(19)..(20)..(21): Xaa is A or G or is absent

SEQ ID NO: 78160 - protein, 35 aa, Artificial Sequence
  GFR-binding peptide
  MOD_RES (1)..(33)..(34): Xaa is C or S
XSEVTMNQYNKLVVNKNEDLYLISIASMKEPVXXP

SEQ ID NO: 78161 - protein, 34 aa, Artificial Sequence; identical to SEQ ID NO: 24613
  GFR-binding peptide
  MOD_RES (1)..(1): Xaa is C or S
  MOD_RES (13)..(14)..(15)..(16)..(17): Xaa is A or G
  MOD_RES (18)..(19)..(20)..(21): Xaa is A or G or is absent

SEQ ID NO: 78162 - protein, 36 aa, Artificial Sequence; identical to SEQ ID NO: 56524
  GFR-binding peptide
  MOD_RES (1)..(34)..(35): Xaa is C or S
  MOD_RES (12)..(13)..(14)..(15)..(16): Xaa is A or G
  MOD_RES (17)..(18)..(19)..(20): Xaa is A or G or is absent

SEQ ID NO: 78163 - protein, 40 aa, Artificial Sequence; identical to SEQ ID NO: 5544
  GFR-binding peptide
  MOD_RES (1)..(3)..(37)..(38): Xaa is C or S
  MOD_RES (15)..(16)..(17)..(18)..(19): Xaa is A or G
  MOD_RES (20)..(21)..(22)..(23): Xaa is A or G or is absent

SEQ ID NO: 78164 - protein, 34 aa, Artificial Sequence; identical to SEQ ID NO: 24615
  GFR-binding peptide
  MOD_RES (34)..(34): Xaa is C or S
  MOD_RES (12)..(13)..(14)..(15)..(16): Xaa is A or G
  MOD_RES (17)..(18)..(19)..(20): Xaa is A or G or is absent

SEQ ID NO: 78165 - protein, 38 aa, Artificial Sequence; identical to SEQ ID NO: 3607
  GFR-binding peptide
  MOD_RES (1)..(34)..(35): Xaa is C or S

SEQ ID NO: 78166 - protein, 31 aa, Artificial Sequence; identical to SEQ ID NO: 5546
  GFR-binding peptide

SEQ ID NO: 78167 - protein, 36 aa, Artificial Sequence; identical to SEQ ID NO: 5547
  GFR-binding peptide
  MOD_RES (1)..(3)..(36): Xaa is C or S
  MOD_RES (14)..(15)..(16)..(17)..(18): Xaa is A or G
  MOD_RES (19)..(20)..(21)..(22): Xaa is A or G or is absent

SEQ ID NO: 78168 - protein, 39 aa, Artificial Sequence; identical to SEQ ID NO: 3609
  GFR-binding peptide
  MOD_RES (1)..(3)..(34)..(35): Xaa is C or S

SEQ ID NO: 78169 - protein, 34 aa, Artificial Sequence; identical to SEQ ID NO: 5551
  GFR-binding peptide
  MOD_RES (2)..(4): Xaa is C or S

SEQ ID NO: 78170 - protein, 36 aa, Artificial Sequence; identical to SEQ ID NO: 26665
  GFR-binding peptide
  MOD_RES (32)..(33): Xaa is C or S

SEQ ID NO: 78171 - protein, 37 aa, Artificial Sequence; identical to SEQ ID NO: 26666
  GFR-binding peptide
  MOD_RES (2)..(4): Xaa is C or S
  MOD_RES (16)..(17)..(18)..(19)..(20): Xaa is A or G
  MOD_RES (21)..(22)..(23)..(24): Xaa is A or G or is absent

SEQ ID NO: 78172 - protein, 38 aa, Artificial Sequence; identical to SEQ ID NO: 11027
  GFR-binding peptide
  MOD_RES (2)..(34)..(35): Xaa is C or S

SEQ ID NO: 78173 - protein, 33 aa, Artificial Sequence
  GFR-binding peptide
  MOD_RES (33)..(33): Xaa is C or S
  MOD_RES (11)..(12)..(13)..(14)..(15): Xaa is A or G
  MOD_RES (16)..(17)..(18)..(19): Xaa is A or G or is absent
EEVIMQYNKLXXXXXXXXXLYLMSIASTKVPAX

SEQ ID NO: 78174 - protein, 34 aa, Artificial Sequence; identical to SEQ ID NO: 3615
  GFR-binding peptide
  MOD_RES (31)..(32): Xaa is C or S

SEQ ID NO: 78175 - protein, 32 aa, Artificial Sequence; identical to SEQ ID NO: 26668
  GFR-binding peptide
  MOD_RES (32)..(32): Xaa is C or S

SEQ ID NO: 78176 - protein, 34 aa, Artificial Sequence
  GFR-binding peptide
  MOD_RES (32)..(33): Xaa is C or S
SEVTMNQYNKLVVNKNEDLYLISIASMKEPVXXP

SEQ ID NO: 78177 - protein, 36 aa, Artificial Sequence; identical to SEQ ID NO: 61180
  GFR-binding peptide
  MOD_RES (34)..(35): Xaa is C or S
  MOD_RES (12)..(13)..(14)..(15)..(16): Xaa is A or G
  MOD_RES (17)..(18)..(19)..(20): Xaa is A or G or is absent

SEQ ID NO: 78178 - protein, 38 aa, Artificial Sequence; identical to SEQ ID NO: 24625
  GFR-binding peptide
  MOD_RES (1)..(3)..(37)..(38): Xaa is C or S
  MOD_RES (15)..(16)..(17)..(18)..(19): Xaa is A or G
  MOD_RES (20)..(21)..(22)..(23): Xaa is A or G or is absent

SEQ ID NO: 78179 - protein, 35 aa, Artificial Sequence
  GFR-binding peptide
  MOD_RES (1)..(34)..(35): Xaa is C or S
  MOD_RES (12)..(13)..(14)..(15)..(16): Xaa is A or G
  MOD_RES (17)..(18)..(19)..(20): Xaa is A or G or is absent
XEEVIMQYNKLXXXXXXXXXLYLMSIASTKVPAXX

SEQ ID NO: 78180 - protein, 34 aa, Artificial Sequence
  GFR-binding peptide
  MOD_RES (32)..(33): Xaa is C or S
RDVVMGQYNKLIIQQKDNLYLMSIASMKTPTXXP

SEQ ID NO: 78181 - protein, 38 aa, Artificial Sequence; identical to SEQ ID NO: 3618
  GFR-binding peptide
  MOD_RES (33)..(34): Xaa is C or S
  MOD_RES (11)..(12)..(13)..(14)..(15): Xaa is A or G
  MOD_RES (16)..(17)..(18)..(19): Xaa is A or G or is absent

SEQ ID NO: 78182 - protein, 32 aa, Artificial Sequence
  GFR-binding peptide
  MOD_RES (11)..(12)..(13)..(14)..(15): Xaa is A or G
  MOD_RES (16)..(17)..(18)..(19): Xaa is A or G or is absent
EVVMDQYNKLXXXXXXXXXLYLISIASLRAPV

SEQ ID NO: 78183 - protein, 37 aa, Artificial Sequence
  GFR-binding peptide
  MOD_RES (1)..(33)..(34): Xaa is C or S
XAEVVMDQYNKLVVNNAADLYLISIASLRAPVXXSAP

SEQ ID NO: 78184 - protein, 37 aa, Artificial Sequence; identical to SEQ ID NO: 11036
  GFR-binding peptide
  MOD_RES (1)..(35)..(36): Xaa is C or S
  MOD_RES (13)..(14)..(15)..(16)..(17): Xaa is A or G
  MOD_RES (18)..(19)..(20)..(21): Xaa is A or G or is absent

SEQ ID NO: 78185 - protein, 42 aa, Artificial Sequence; identical to SEQ ID NO: 5559
  GFR-binding peptide
  MOD_RES (2)..(4)..(39)..(40): Xaa is C or S
  MOD_RES (17)..(18)..(19)..(20)..(21): Xaa is A or G
  MOD_RES (22)..(23)..(24)..(25): Xaa is A or G or is absent

SEQ ID NO: 78186 - protein, 40 aa, Artificial Sequence; identical to SEQ ID NO: 3621
  GFR-binding peptide
  MOD_RES (2)..(4)..(37)..(38): Xaa is C or S
  MOD_RES (15)..(16)..(17)..(18)..(19): Xaa is A or G
  MOD_RES (20)..(21)..(22)..(23): Xaa is A or G or is absent

SEQ ID NO: 78187 - protein, 36 aa, Artificial Sequence; identical to SEQ ID NO: 5562
  GFR-binding peptide
  MOD_RES (31)..(32): Xaa is C or S

SEQ ID NO: 78188 - protein, 36 aa, Artificial Sequence; identical to SEQ ID NO: 24629
  GFR-binding peptide
  MOD_RES (31)..(32): Xaa is C or S

SEQ ID NO: 78189 - protein, 36 aa, Artificial Sequence; identical to SEQ ID NO: 5563
  GFR-binding peptide
  MOD_RES (2)..(36): Xaa is C or S
  MOD_RES (14)..(15)..(16)..(17)..(18): Xaa is A or G
  MOD_RES (19)..(20)..(21)..(22): Xaa is A or G or is absent

SEQ ID NO: 78190 - protein, 37 aa, Artificial Sequence; identical to SEQ ID NO: 56551
  GFR-binding peptide
  MOD_RES (2)..(4)..(35)..(36): Xaa is C or S

SEQ ID NO: 78191 - protein, 35 aa, Artificial Sequence; identical to SEQ ID NO: 3622
  GFR-binding peptide
  MOD_RES (2)..(35): Xaa is C or S

SEQ ID NO: 78192 - protein, 38 aa, Artificial Sequence; identical to SEQ ID NO: 5565
  GFR-binding peptide
  MOD_RES (2)..(37)..(38): Xaa is C or S
  MOD_RES (15)..(16)..(17)..(18)..(19): Xaa is A or G
  MOD_RES (20)..(21)..(22)..(23): Xaa is A or G or is absent

SEQ ID NO: 78193 - protein, 33 aa, Artificial Sequence; identical to SEQ ID NO: 3626
  GFR-binding peptide
  MOD_RES (1)..(33): Xaa is C or S

SEQ ID NO: 78194 - protein, 34 aa, Artificial Sequence
  GFR-binding peptide
  MOD_RES (1)..(1): Xaa is C or S
  MOD_RES (13)..(14)..(15)..(16)..(17): Xaa is A or G
  MOD_RES (18)..(19)..(20)..(21): Xaa is A or G or is absent
XAEVVMDQYNKLXXXXXXXXXLYLISIASLRAPV

SEQ ID NO: 78195 - protein, 43 aa, Artificial Sequence; identical to SEQ ID NO: 3628
  GFR-binding peptide
  MOD_RES (1)..(3)..(37)..(38): Xaa is C or S
  MOD_RES (15)..(16)..(17)..(18)..(19): Xaa is A or G
  MOD_RES (20)..(21)..(22)..(23): Xaa is A or G or is absent

SEQ ID NO: 78196 - protein, 36 aa, Artificial Sequence; identical to SEQ ID NO: 5568
  GFR-binding peptide
  MOD_RES (34)..(35): Xaa is C or S
  MOD_RES (12)..(13)..(14)..(15)..(16): Xaa is A or G
  MOD_RES (17)..(18)..(19)..(20): Xaa is A or G or is absent

SEQ ID NO: 78197 - protein, 39 aa, Artificial Sequence
  GFR-binding peptide
  MOD_RES (1)..(33)..(34): Xaa is C or S
XSEVTMNQYNKLVVNKNEDLYLISIASMKEPVXXPEPIG

SEQ ID NO: 78198 - protein, 34 aa, Artificial Sequence
  GFR-binding peptide
  MOD_RES (31)..(32): Xaa is C or S
EEVIMQYNKLLLVRGNDLYLMSIASTKVPAXXTS

SEQ ID NO: 78199 - protein, 38 aa, Artificial Sequence; identical to SEQ ID NO: 3630
  GFR-binding peptide
  MOD_RES (33)..(34): Xaa is C or S
  MOD_RES (11)..(12)..(13)..(14)..(15): Xaa is A or G
  MOD_RES (16)..(17)..(18)..(19): Xaa is A or G or is absent

SEQ ID NO: 78200 - protein, 39 aa, Artificial Sequence
  GFR-binding peptide
  MOD_RES (1)..(3)..(35)..(36): Xaa is C or S
XGXRDVVMGQYNKLIIQQKDNLYLMSIASMKTPTXXPGA

SEQ ID NO: 78201 - protein, 34 aa, Artificial Sequence; identical to SEQ ID NO: 3631
  GFR-binding peptide
  MOD_RES (1)..(33)..(34): Xaa is C or S

SEQ ID NO: 78202 - protein, 38 aa, Artificial Sequence; identical to SEQ ID NO: 5570
  GFR-binding peptide
  MOD_RES (33)..(33): Xaa is C or S
  MOD_RES (11)..(12)..(13)..(14)..(15): Xaa is A or G
  MOD_RES (16)..(17)..(18)..(19): Xaa is A or G or is absent

SEQ ID NO: 78203 - protein, 39 aa, Artificial Sequence; identical to SEQ ID NO: 3632
  GFR-binding peptide
  MOD_RES (33)..(34): Xaa is C or S

SEQ ID NO: 78204 - protein, 33 aa, Artificial Sequence; identical to SEQ ID NO: 5571
  GFR-binding peptide
  MOD_RES (12)..(13)..(14)..(15)..(16): Xaa is A or G
  MOD_RES (17)..(18)..(19)..(20): Xaa is A or G or is absent

SEQ ID NO: 78205 - protein, 35 aa, Artificial Sequence; identical to SEQ ID NO: 5572
  GFR-binding peptide
  MOD_RES (2)..(33)..(34): Xaa is C or S

SEQ ID NO: 78206 - protein, 36 aa, Artificial Sequence; identical to SEQ ID NO: 5573
  GFR-binding peptide
  MOD_RES (34)..(35): Xaa is C or S
  MOD_RES (12)..(13)..(14)..(15)..(16): Xaa is A or G
  MOD_RES (17)..(18)..(19)..(20): Xaa is A or G or is absent

SEQ ID NO: 78207 - protein, 42 aa, Artificial Sequence; identical to SEQ ID NO: 5575
  GFR-binding peptide
  MOD_RES (1)..(3)..(37)..(38): Xaa is C or S
  MOD_RES (15)..(16)..(17)..(18)..(19): Xaa is A or G
  MOD_RES (20)..(21)..(22)..(23): Xaa is A or G or is absent

SEQ ID NO: 78208 - protein, 37 aa, Artificial Sequence
  GFR-binding peptide
  MOD_RES (31)..(32): Xaa is C or S
EEVIMQYNKLLLVRGNDLYLMSIASTKVPAXXTSPVR

SEQ ID NO: 78209 - protein, 38 aa, Artificial Sequence; identical to SEQ ID NO: 5578
  GFR-binding peptide
  MOD_RES (1)..(3)..(37)..(38): Xaa is C or S
  MOD_RES (15)..(16)..(17)..(18)..(19): Xaa is A or G
  MOD_RES (20)..(21)..(22)..(23): Xaa is A or G or is absent

SEQ ID NO: 78210 - protein, 35 aa, Artificial Sequence; identical to SEQ ID NO: 3637
  GFR-binding peptide
  MOD_RES (2)..(35): Xaa is C or S
  MOD_RES (13)..(14)..(15)..(16)..(17): Xaa is A or G
  MOD_RES (18)..(19)..(20)..(21): Xaa is A or G or is absent

SEQ ID NO: 78211 - protein, 36 aa, Artificial Sequence; identical to SEQ ID NO: 3639
  GFR-binding peptide
  MOD_RES (2)..(4)..(35)..(36): Xaa is C or S

SEQ ID NO: 78212 - protein, 40 aa, Artificial Sequence; identical to SEQ ID NO: 56579
  GFR-binding peptide
  MOD_RES (2)..(36)..(37): Xaa is C or S
  MOD_RES (14)..(15)..(16)..(17)..(18): Xaa is A or G
  MOD_RES (19)..(20)..(21)..(22): Xaa is A or G or is absent

SEQ ID NO: 78213 - protein, 36 aa, Artificial Sequence; identical to SEQ ID NO: 3640
  GFR-binding peptide
  MOD_RES (1)..(35)..(36): Xaa is C or S
  MOD_RES (13)..(14)..(15)..(16)..(17): Xaa is A or G
  MOD_RES (18)..(19)..(20)..(21): Xaa is A or G or is absent

SEQ ID NO: 78214 - protein, 31 aa, Artificial Sequence; identical to SEQ ID NO: 5582
  GFR-binding peptide

SEQ ID NO: 78215 - protein, 32 aa, Artificial Sequence; identical to SEQ ID NO: 5583
  GFR-binding peptide
  MOD_RES (31)..(32): Xaa is C or S

SEQ ID NO: 78216 - protein, 35 aa, Artificial Sequence; identical to SEQ ID NO: 5584
  GFR-binding peptide
  MOD_RES (33)..(34): Xaa is C or S
  MOD_RES (11)..(12)..(13)..(14)..(15): Xaa is A or G
  MOD_RES (16)..(17)..(18)..(19): Xaa is A or G or is absent

SEQ ID NO: 78217 - protein, 37 aa, Artificial Sequence; identical to SEQ ID NO: 5586
  GFR-binding peptide
  MOD_RES (2)..(35)..(36): Xaa is C or S
  MOD_RES (13)..(14)..(15)..(16)..(17): Xaa is A or G
  MOD_RES (18)..(19)..(20)..(21): Xaa is A or G or is absent

SEQ ID NO: 78218 - protein, 39 aa, Artificial Sequence
  GFR-binding peptide
  MOD_RES (1)..(35)..(36): Xaa is C or S
  MOD_RES (13)..(14)..(15)..(16)..(17): Xaa is A or G
  MOD_RES (18)..(19)..(20)..(21): Xaa is A or G or is absent
XESVAMGQYNKLXXXXXXXXXLYLISIASLKTPVXXAKS

SEQ ID NO: 78219 - protein, 37 aa, Artificial Sequence; identical to SEQ ID NO: 5587
  GFR-binding peptide
  MOD_RES (33)..(34): Xaa is C or S

SEQ ID NO: 78220 - protein, 39 aa, Artificial Sequence
  GFR-binding peptide
  MOD_RES (2)..(34)..(35): Xaa is C or S
AXSEVTMNQYNKLVVNKNEDLYLISIASMKEPVXXPEPI

SEQ ID NO: 78221 - protein, 32 aa, Artificial Sequence; identical to SEQ ID NO: 3643
  GFR-binding peptide
  MOD_RES (1)..(1): Xaa is C or S

SEQ ID NO: 78222 - protein, 33 aa, Artificial Sequence; identical to SEQ ID NO: 5588
  GFR-binding peptide
  MOD_RES (12)..(13)..(14)..(15)..(16): Xaa is A or G
  MOD_RES (17)..(18)..(19)..(20): Xaa is A or G or is absent

SEQ ID NO: 78223 - protein, 37 aa, Artificial Sequence; identical to SEQ ID NO: 5589
  GFR-binding peptide
  MOD_RES (1)..(3)..(36)..(37): Xaa is C or S
  MOD_RES (14)..(15)..(16)..(17)..(18): Xaa is A or G
  MOD_RES (19)..(20)..(21)..(22): Xaa is A or G or is absent

SEQ ID NO: 78224 - protein, 34 aa, Artificial Sequence; identical to SEQ ID NO: 56582
  GFR-binding peptide
  MOD_RES (2)..(34): Xaa is C or S

SEQ ID NO: 78225 - protein, 38 aa, Artificial Sequence; identical to SEQ ID NO: 3644
  GFR-binding peptide
  MOD_RES (1)..(33)..(34): Xaa is C or S

SEQ ID NO: 78226 - protein, 37 aa, Artificial Sequence; identical to SEQ ID NO: 3645
  GFR-binding peptide
  MOD_RES (31)..(32): Xaa is C or S

SEQ ID NO: 78227 - protein, 39 aa, Artificial Sequence; identical to SEQ ID NO: 5593
  GFR-binding peptide
  MOD_RES (1)..(3)..(37)..(38): Xaa is C or S
  MOD_RES (15)..(16)..(17)..(18)..(19): Xaa is A or G
  MOD_RES (20)..(21)..(22)..(23): Xaa is A or G or is absent

SEQ ID NO: 78228 - protein, 38 aa, Artificial Sequence; identical to SEQ ID NO: 3648
  GFR-binding peptide
  MOD_RES (2)..(36)..(37): Xaa is C or S
  MOD_RES (14)..(15)..(16)..(17)..(18): Xaa is A or G
  MOD_RES (19)..(20)..(21)..(22): Xaa is A or G or is absent

SEQ ID NO: 78229 - protein, 37 aa, Artificial Sequence; identical to SEQ ID NO: 56588
  GFR-binding peptide
  MOD_RES (2)..(33)..(34): Xaa is C or S

SEQ ID NO: 78230 - protein, 37 aa, Artificial Sequence; identical to SEQ ID NO: 3649
  GFR-binding peptide
  MOD_RES (1)..(34)..(35): Xaa is C or S
  MOD_RES (12)..(13)..(14)..(15)..(16): Xaa is A or G
  MOD_RES (17)..(18)..(19)..(20): Xaa is A or G or is absent

SEQ ID NO: 78231 - protein, 39 aa, Artificial Sequence
  GFR-binding peptide
  MOD_RES (2)..(4)..(36)..(37): Xaa is C or S
SXGXRDVVMGQYNKLIIQQKDNLYLMSIASMKTPTXXPG

SEQ ID NO: 78232 - protein, 34 aa, Artificial Sequence; identical to SEQ ID NO: 5595
  GFR-binding peptide
  MOD_RES (1)..(33)..(34): Xaa is C or S

SEQ ID NO: 78233 - protein, 44 aa, Artificial Sequence
  GFR-binding peptide
  MOD_RES (2)..(4)..(38)..(39): Xaa is C or S
  MOD_RES (16)..(17)..(18)..(19)..(20): Xaa is A or G
  MOD_RES (21)..(22)..(23)..(24): Xaa is A or G or is absent
RXGXAEVVMDQYNKLXXXXXXXXXLYLISIASLRAPVXXSAPAA

SEQ ID NO: 78234 - protein, 37 aa, Artificial Sequence; identical to SEQ ID NO: 5596
  GFR-binding peptide
  MOD_RES (1)..(34)..(35): Xaa is C or S
  MOD_RES (12)..(13)..(14)..(15)..(16): Xaa is A or G
  MOD_RES (17)..(18)..(19)..(20): Xaa is A or G or is absent

SEQ ID NO: 78235 - protein, 31 aa, Artificial Sequence; identical to SEQ ID NO: 3652
  GFR-binding peptide

SEQ ID NO: 78236 - protein, 34 aa, Artificial Sequence; identical to SEQ ID NO: 13009
  GFR-binding peptide
  MOD_RES (2)..(34): Xaa is C or S

SEQ ID NO: 78237 - protein, 41 aa, Artificial Sequence; identical to SEQ ID NO: 5597
  GFR-binding peptide
  MOD_RES (1)..(3)..(38)..(39): Xaa is C or S
  MOD_RES (16)..(17)..(18)..(19)..(20): Xaa is A or G
  MOD_RES (21)..(22)..(23)..(24): Xaa is A or G or is absent

SEQ ID NO: 78238 - protein, 37 aa, Artificial Sequence; identical to SEQ ID NO: 3653
  GFR-binding peptide
  MOD_RES (2)..(34)..(35): Xaa is C or S

SEQ ID NO: 78239 - protein, 34 aa, Artificial Sequence
  GFR-binding peptide
  MOD_RES (34)..(34): Xaa is C or S
  MOD_RES (12)..(13)..(14)..(15)..(16): Xaa is A or G
  MOD_RES (17)..(18)..(19)..(20): Xaa is A or G or is absent
ESVAMGQYNKLXXXXXXXXXLYLISIASLKTPVX

SEQ ID NO: 78240 - protein, 37 aa, Artificial Sequence; identical to SEQ ID NO: 62954
  GFR-binding peptide
  MOD_RES (33)..(34): Xaa is C or S
  MOD_RES (11)..(12)..(13)..(14)..(15): Xaa is A or G
  MOD_RES (16)..(17)..(18)..(19): Xaa is A or G or is absent

SEQ ID NO: 78241 - protein, 36 aa, Artificial Sequence
  GFR-binding peptide
  MOD_RES (1)..(3): Xaa is C or S
  MOD_RES (15)..(16)..(17)..(18)..(19): Xaa is A or G
  MOD_RES (20)..(21)..(22)..(23): Xaa is A or G or is absent
XGXAEVVMDQYNKLXXXXXXXXXLYLISIASLRAPV

SEQ ID NO: 78242 - protein, 38 aa, Artificial Sequence
  GFR-binding peptide
  MOD_RES (2)..(36)..(37): Xaa is C or S
  MOD_RES (14)..(15)..(16)..(17)..(18): Xaa is A or G
  MOD_RES (19)..(20)..(21)..(22): Xaa is A or G or is absent
AXSEVTMNQYNKLXXXXXXXXXLYLISIASMKEPVXXP

SEQ ID NO: 78243 - protein, 38 aa, Artificial Sequence
  GFR-binding peptide
  MOD_RES (2)..(4)..(38): Xaa is C or S
  MOD_RES (16)..(17)..(18)..(19)..(20): Xaa is A or G
  MOD_RES (21)..(22)..(23)..(24): Xaa is A or G or is absent
RXGXESVAMGQYNKLXXXXXXXXXLYLISIASLKTPVX

SEQ ID NO: 78244 - protein, 34 aa, Artificial Sequence; identical to SEQ ID NO: 56598
  GFR-binding peptide
  MOD_RES (2)..(33)..(34): Xaa is C or S

SEQ ID NO: 78245 - protein, 39 aa, Artificial Sequence; identical to SEQ ID NO: 5604
  GFR-binding peptide
  MOD_RES (33)..(34): Xaa is C or S
  MOD_RES (11)..(12)..(13)..(14)..(15): Xaa is A or G
  MOD_RES (16)..(17)..(18)..(19): Xaa is A or G or is absent

SEQ ID NO: 78246 - protein, 36 aa, Artificial Sequence; identical to SEQ ID NO: 3658
  GFR-binding peptide
  MOD_RES (32)..(33): Xaa is C or S

SEQ ID NO: 78247 - protein, 33 aa, Artificial Sequence; identical to SEQ ID NO: 56602
  GFR-binding peptide
  MOD_RES (32)..(33): Xaa is C or S

SEQ ID NO: 78248 - protein, 36 aa, Artificial Sequence; identical to SEQ ID NO: 5605
  GFR-binding peptide
  MOD_RES (1)..(3)..(36): Xaa is C or S
  MOD_RES (14)..(15)..(16)..(17)..(18): Xaa is A or G
  MOD_RES (19)..(20)..(21)..(22): Xaa is A or G or is absent

SEQ ID NO: 78249 - protein, 39 aa, Artificial Sequence; identical to SEQ ID NO: 13023
  GFR-binding peptide
  MOD_RES (1)..(3)..(37)..(38): Xaa is C or S
  MOD_RES (15)..(16)..(17)..(18)..(19): Xaa is A or G
  MOD_RES (20)..(21)..(22)..(23): Xaa is A or G or is absent

SEQ ID NO: 78250 - protein, 38 aa, Artificial Sequence; identical to SEQ ID NO: 5607
  GFR-binding peptide
  MOD_RES (2)..(33)..(34): Xaa is C or S

SEQ ID NO: 78251 - protein, 36 aa, Artificial Sequence; identical to SEQ ID NO: 56604
  GFR-binding peptide
  MOD_RES (32)..(33): Xaa is C or S

SEQ ID NO: 78252 - protein, 35 aa, Artificial Sequence; identical to SEQ ID NO: 59452
  GFR-binding peptide
  MOD_RES (31)..(32): Xaa is C or S

SEQ ID NO: 78253 - protein, 41 aa, Artificial Sequence; identical to SEQ ID NO: 26720
  GFR-binding peptide
  MOD_RES (1)..(35)..(36): Xaa is C or S
  MOD_RES (13)..(14)..(15)..(16)..(17): Xaa is A or G
  MOD_RES (18)..(19)..(20)..(21): Xaa is A or G or is absent

SEQ ID NO: 78254 - protein, 36 aa, Artificial Sequence; identical to SEQ ID NO: 3661
  GFR-binding peptide
  MOD_RES (1)..(3)..(35)..(36): Xaa is C or S

SEQ ID NO: 78255 - protein, 34 aa, Artificial Sequence; identical to SEQ ID NO: 3662
  GFR-binding peptide
  MOD_RES (33)..(34): Xaa is C or S
  MOD_RES (11)..(12)..(13)..(14)..(15): Xaa is A or G
  MOD_RES (16)..(17)..(18)..(19): Xaa is A or G or is absent

SEQ ID NO: 78256 - protein, 37 aa, Artificial Sequence; identical to SEQ ID NO: 3663
  GFR-binding peptide
  MOD_RES (2)..(4)..(37): Xaa is C or S
  MOD_RES (15)..(16)..(17)..(18)..(19): Xaa is A or G
  MOD_RES (20)..(21)..(22)..(23): Xaa is A or G or is absent

SEQ ID NO: 78257 - protein, 36 aa, Artificial Sequence; identical to SEQ ID NO: 5609
  GFR-binding peptide
  MOD_RES (2)..(4)..(36): Xaa is C or S

SEQ ID NO: 78258 - protein, 40 aa, Artificial Sequence; identical to SEQ ID NO: 24684
  GFR-binding peptide
  MOD_RES (2)..(34)..(35): Xaa is C or S

SEQ ID NO: 78259 - protein, 39 aa, Artificial Sequence; identical to SEQ ID NO: 56614
  GFR-binding peptide
  MOD_RES (34)..(35): Xaa is C or S
  MOD_RES (12)..(13)..(14)..(15)..(16): Xaa is A or G
  MOD_RES (17)..(18)..(19)..(20): Xaa is A or G or is absent

SEQ ID NO: 78260 - protein, 38 aa, Artificial Sequence
  GFR-binding peptide
  MOD_RES (32)..(33): Xaa is C or S
ESVAMGQYNKLYTVVGKDLYLISIASLKTPVXXAKSAK

SEQ ID NO: 78261 - protein, 37 aa, Artificial Sequence; identical to SEQ ID NO: 5610
  GFR-binding peptide
  MOD_RES (2)..(33)..(34): Xaa is C or S

SEQ ID NO: 78262 - protein, 34 aa, Artificial Sequence; identical to SEQ ID NO: 5613
  GFR-binding peptide
  MOD_RES (31)..(32): Xaa is C or S

SEQ ID NO: 78263 - protein, 37 aa, Artificial Sequence; identical to SEQ ID NO: 5614
  GFR-binding peptide
  MOD_RES (31)..(32): Xaa is C or S

SEQ ID NO: 78264 - protein, 41 aa, Artificial Sequence; identical to SEQ ID NO: 3668
  GFR-binding peptide
  MOD_RES (1)..(3)..(35)..(36): Xaa is C or S

SEQ ID NO: 78265 - protein, 34 aa, Artificial Sequence; identical to SEQ ID NO: 5615
  GFR-binding peptide
  MOD_RES (1)..(1): Xaa is C or S
  MOD_RES (13)..(14)..(15)..(16)..(17): Xaa is A or G
  MOD_RES (18)..(19)..(20)..(21): Xaa is A or G or is absent

SEQ ID NO: 78266 - protein, 41 aa, Artificial Sequence; identical to SEQ ID NO: 5616
  GFR-binding peptide
  MOD_RES (1)..(35)..(36): Xaa is C or S
  MOD_RES (13)..(14)..(15)..(16)..(17): Xaa is A or G
  MOD_RES (18)..(19)..(20)..(21): Xaa is A or G or is absent

SEQ ID NO: 78267 - protein, 40 aa, Artificial Sequence; identical to SEQ ID NO: 5617
  GFR-binding peptide
  MOD_RES (2)..(4)..(36)..(37): Xaa is C or S

SEQ ID NO: 78268 - protein, 37 aa, Artificial Sequence; identical to SEQ ID NO: 5618
  GFR-binding peptide
  MOD_RES (33)..(34): Xaa is C or S
  MOD_RES (11)..(12)..(13)..(14)..(15): Xaa is A or G
  MOD_RES (16)..(17)..(18)..(19): Xaa is A or G or is absent

SEQ ID NO: 78269 - protein, 35 aa, Artificial Sequence; identical to SEQ ID NO: 3671
  GFR-binding peptide
  MOD_RES (2)..(34)..(35): Xaa is C or S

SEQ ID NO: 78270 - protein, 39 aa, Artificial Sequence; identical to SEQ ID NO: 3674
  GFR-binding peptide
  MOD_RES (1)..(35)..(36): Xaa is C or S
  MOD_RES (13)..(14)..(15)..(16)..(17): Xaa is A or G
  MOD_RES (18)..(19)..(20)..(21): Xaa is A or G or is absent

SEQ ID NO: 78271 - protein, 40 aa, Artificial Sequence; identical to SEQ ID NO: 3675
  GFR-binding peptide
  MOD_RES (1)..(35)..(36): Xaa is C or S
  MOD_RES (13)..(14)..(15)..(16)..(17): Xaa is A or G
  MOD_RES (18)..(19)..(20)..(21): Xaa is A or G or is absent

SEQ ID NO: 78272 - protein, 32 aa, Artificial Sequence; identical to SEQ ID NO: 26737
  GFR-binding peptide
  MOD_RES (11)..(12)..(13)..(14)..(15): Xaa is A or G
  MOD_RES (16)..(17)..(18)..(19): Xaa is A or G or is absent

SEQ ID NO: 78273 - protein, 41 aa, Artificial Sequence
  GFR-binding peptide
  MOD_RES (1)..(35)..(36): Xaa is C or S
  MOD_RES (13)..(14)..(15)..(16)..(17): Xaa is A or G
  MOD_RES (18)..(19)..(20)..(21): Xaa is A or G or is absent
XSRVVMNQYNKLXXXXXXXXXLYLVSIASLKTPAXXPKPVH

SEQ ID NO: 78274 - protein, 35 aa, Artificial Sequence; identical to SEQ ID NO: 13037
  GFR-binding peptide
  MOD_RES (1)..(33)..(34): Xaa is C or S

SEQ ID NO: 78275 - protein, 34 aa, Artificial Sequence; identical to SEQ ID NO: 3682
  GFR-binding peptide
  MOD_RES (1)..(32)..(33): Xaa is C or S

SEQ ID NO: 78276 - protein, 34 aa, Artificial Sequence
  GFR-binding peptide
  MOD_RES (33)..(34): Xaa is C or S
  MOD_RES (11)..(12)..(13)..(14)..(15): Xaa is A or G
  MOD_RES (16)..(17)..(18)..(19): Xaa is A or G or is absent
EVTMNQYNKLXXXXXXXXXLYLISIASMKEPVXX

SEQ ID NO: 78277 - protein, 33 aa, Artificial Sequence; identical to SEQ ID NO: 56621
  GFR-binding peptide
  MOD_RES (1)..(33): Xaa is C or S

SEQ ID NO: 78278 - protein, 36 aa, Artificial Sequence; identical to SEQ ID NO: 24701
  GFR-binding peptide
  MOD_RES (33)..(34): Xaa is C or S
  MOD_RES (11)..(12)..(13)..(14)..(15): Xaa is A or G
  MOD_RES (16)..(17)..(18)..(19): Xaa is A or G or is absent

SEQ ID NO: 78279 - protein, 39 aa, Artificial Sequence
  GFR-binding peptide
  MOD_RES (33)..(34): Xaa is C or S
  MOD_RES (11)..(12)..(13)..(14)..(15): Xaa is A or G
  MOD_RES (16)..(17)..(18)..(19): Xaa is A or G or is absent
DVVMGQYNKLXXXXXXXXXLYLMSIASMKTPTXXPGASG

SEQ ID NO: 78280 - protein, 35 aa, Artificial Sequence; identical to SEQ ID NO: 3685
  GFR-binding peptide
  MOD_RES (33)..(34): Xaa is C or S
  MOD_RES (11)..(12)..(13)..(14)..(15): Xaa is A or G
  MOD_RES (16)..(17)..(18)..(19): Xaa is A or G or is absent

SEQ ID NO: 78281 - protein, 35 aa, Artificial Sequence
  GFR-binding peptide
  MOD_RES (1)..(35): Xaa is C or S
  MOD_RES (13)..(14)..(15)..(16)..(17): Xaa is A or G
  MOD_RES (18)..(19)..(20)..(21): Xaa is A or G or is absent
XRDVVMGQYNKLXXXXXXXXXLYLMSIASMKTPTX

SEQ ID NO: 78282 - protein, 36 aa, Artificial Sequence; identical to SEQ ID NO: 5626
  GFR-binding peptide
  MOD_RES (34)..(35): Xaa is C or S
  MOD_RES (12)..(13)..(14)..(15)..(16): Xaa is A or G
  MOD_RES (17)..(18)..(19)..(20): Xaa is A or G or is absent

SEQ ID NO: 78283 - protein, 33 aa, Artificial Sequence; identical to SEQ ID NO: 26745
  GFR-binding peptide
  MOD_RES (33)..(33): Xaa is C or S
  MOD_RES (11)..(12)..(13)..(14)..(15): Xaa is A or G
  MOD_RES (16)..(17)..(18)..(19): Xaa is A or G or is absent

SEQ ID NO: 78284 - protein, 41 aa, Artificial Sequence; identical to SEQ ID NO: 5629
  GFR-binding peptide
  MOD_RES (2)..(4)..(35)..(36): Xaa is C or S

SEQ ID NO: 78285 - protein, 38 aa, Artificial Sequence; identical to SEQ ID NO: 3687
  GFR-binding peptide
  MOD_RES (1)..(3)..(37)..(38): Xaa is C or S
  MOD_RES (15)..(16)..(17)..(18)..(19): Xaa is A or G
  MOD_RES (20)..(21)..(22)..(23): Xaa is A or G or is absent

SEQ ID NO: 78286 - protein, 37 aa, Artificial Sequence
  GFR-binding peptide
  MOD_RES (1)..(35)..(36): Xaa is C or S
  MOD_RES (13)..(14)..(15)..(16)..(17): Xaa is A or G
  MOD_RES (18)..(19)..(20)..(21): Xaa is A or G or is absent
XRDVVMGQYNKLXXXXXXXXXLYLMSIASMKTPTXXP

SEQ ID NO: 78287 - protein, 39 aa, Artificial Sequence; identical to SEQ ID NO: 56629
  GFR-binding peptide
  MOD_RES (2)..(4)..(36)..(37): Xaa is C or S

SEQ ID NO: 78288 - protein, 39 aa, Artificial Sequence; identical to SEQ ID NO: 5632
  GFR-binding peptide
  MOD_RES (2)..(4)..(35)..(36): Xaa is C or S

SEQ ID NO: 78289 - protein, 36 aa, Artificial Sequence; identical to SEQ ID NO: 5635
  GFR-binding peptide
  MOD_RES (1)..(3)..(35)..(36): Xaa is C or S

SEQ ID NO: 78290 - protein, 38 aa, Artificial Sequence; identical to SEQ ID NO: 3688
  GFR-binding peptide
  MOD_RES (2)..(35)..(36): Xaa is C or S
  MOD_RES (13)..(14)..(15)..(16)..(17): Xaa is A or G
  MOD_RES (18)..(19)..(20)..(21): Xaa is A or G or is absent

SEQ ID NO: 78291 - protein, 41 aa, Artificial Sequence; identical to SEQ ID NO: 3689
  GFR-binding peptide
  MOD_RES (2)..(4)..(35)..(36): Xaa is C or S

SEQ ID NO: 78292 - protein, 40 aa, Artificial Sequence; identical to SEQ ID NO: 3691
  GFR-binding peptide
  MOD_RES (1)..(3)..(34)..(35): Xaa is C or S

SEQ ID NO: 78293 - protein, 34 aa, Artificial Sequence; identical to SEQ ID NO: 3692
  GFR-binding peptide
  MOD_RES (2)..(34): Xaa is C or S

SEQ ID NO: 78294 - protein, 41 aa, Artificial Sequence
  GFR-binding peptide
  MOD_RES (1)..(35)..(36): Xaa is C or S
  MOD_RES (13)..(14)..(15)..(16)..(17): Xaa is A or G
  MOD_RES (18)..(19)..(20)..(21): Xaa is A or G or is absent
XSEVTMNQYNKLXXXXXXXXXLYLISIASMKEPVXXPEPIG

SEQ ID NO: 78295 - protein, 41 aa, Artificial Sequence; identical to SEQ ID NO: 3695
  GFR-binding peptide
  MOD_RES (2)..(35)..(36): Xaa is C or S
  MOD_RES (13)..(14)..(15)..(16)..(17): Xaa is A or G
  MOD_RES (18)..(19)..(20)..(21): Xaa is A or G or is absent

SEQ ID NO: 78296 - protein, 34 aa, Artificial Sequence; identical to SEQ ID NO: 3696
  GFR-binding peptide
  MOD_RES (1)..(33)..(34): Xaa is C or S

SEQ ID NO: 78297 - protein, 37 aa, Artificial Sequence; identical to SEQ ID NO: 3697
  GFR-binding peptide
  MOD_RES (31)..(32): Xaa is C or S

SEQ ID NO: 78298 - protein, 42 aa, Artificial Sequence; identical to SEQ ID NO: 59480
  GFR-binding peptide
  MOD_RES (2)..(4)..(38)..(39): Xaa is C or S
  MOD_RES (16)..(17)..(18)..(19)..(20): Xaa is A or G
  MOD_RES (21)..(22)..(23)..(24): Xaa is A or G or is absent

SEQ ID NO: 78299 - protein, 36 aa, Artificial Sequence; identical to SEQ ID NO: 3698
  GFR-binding peptide
  MOD_RES (1)..(36): Xaa is C or S
  MOD_RES (14)..(15)..(16)..(17)..(18): Xaa is A or G
  MOD_RES (19)..(20)..(21)..(22): Xaa is A or G or is absent

SEQ ID NO: 78300 - protein, 41 aa, Artificial Sequence; identical to SEQ ID NO: 3699
  GFR-binding peptide
  MOD_RES (2)..(4)..(37)..(38): Xaa is C or S

SEQ ID NO: 78301 - protein, 37 aa, Artificial Sequence; identical to SEQ ID NO: 56638
  GFR-binding peptide
  MOD_RES (31)..(32): Xaa is C or S

SEQ ID NO: 78302 - protein, 42 aa, Artificial Sequence; identical to SEQ ID NO: 3700
  GFR-binding peptide
  MOD_RES (2)..(36)..(37): Xaa is C or S
  MOD_RES (14)..(15)..(16)..(17)..(18): Xaa is A or G
  MOD_RES (19)..(20)..(21)..(22): Xaa is A or G or is absent

SEQ ID NO: 78303 - protein, 36 aa, Artificial Sequence; identical to SEQ ID NO: 3702
  GFR-binding peptide
  MOD_RES (2)..(4)..(35)..(36): Xaa is C or S

SEQ ID NO: 78304 - protein, 36 aa, Artificial Sequence; identical to SEQ ID NO: 3704
  GFR-binding peptide
  MOD_RES (31)..(32): Xaa is C or S

SEQ ID NO: 78305 - protein, 33 aa, Artificial Sequence; identical to SEQ ID NO: 5637
  GFR-binding peptide
  MOD_RES (2)..(2): Xaa is C or S

SEQ ID NO: 78306 - protein, 37 aa, Artificial Sequence; identical to SEQ ID NO: 5638
  GFR-binding peptide
  MOD_RES (33)..(34): Xaa is C or S
  MOD_RES (11)..(12)..(13)..(14)..(15): Xaa is A or G
  MOD_RES (16)..(17)..(18)..(19): Xaa is A or G or is absent

SEQ ID NO: 78307 - protein, 40 aa, Artificial Sequence; identical to SEQ ID NO: 11129
  GFR-binding peptide
  MOD_RES (2)..(4)..(38)..(39): Xaa is C or S
  MOD_RES (16)..(17)..(18)..(19)..(20): Xaa is A or G
  MOD_RES (21)..(22)..(23)..(24): Xaa is A or G or is absent

SEQ ID NO: 78308 - protein, 40 aa, Artificial Sequence; identical to SEQ ID NO: 3705
  GFR-binding peptide
  MOD_RES (2)..(34)..(35): Xaa is C or S

SEQ ID NO: 78309 - protein, 33 aa, Artificial Sequence; identical to SEQ ID NO: 3706
  GFR-binding peptide
  MOD_RES (32)..(33): Xaa is C or S

SEQ ID NO: 78310 - protein, 38 aa, Artificial Sequence
  GFR-binding peptide
  MOD_RES (2)..(4)..(35)..(36): Xaa is C or S
LXGXEEVIMQYNKLLLVRGNDLYLMSIASTKVPAXXTS

SEQ ID NO: 78311 - protein, 40 aa, Artificial Sequence; identical to SEQ ID NO: 5639
  GFR-binding peptide
  MOD_RES (1)..(36)..(37): Xaa is C or S
  MOD_RES (14)..(15)..(16)..(17)..(18): Xaa is A or G
  MOD_RES (19)..(20)..(21)..(22): Xaa is A or G or is absent

SEQ ID NO: 78312 - protein, 36 aa, Artificial Sequence; identical to SEQ ID NO: 3707
  GFR-binding peptide
  MOD_RES (33)..(34): Xaa is C or S
  MOD_RES (11)..(12)..(13)..(14)..(15): Xaa is A or G
  MOD_RES (16)..(17)..(18)..(19): Xaa is A or G or is absent

SEQ ID NO: 78313 - protein, 40 aa, Artificial Sequence; identical to SEQ ID NO: 5640
  GFR-binding peptide
  MOD_RES (1)..(3)..(35)..(36): Xaa is C or S

SEQ ID NO: 78314 - protein, 33 aa, Artificial Sequence
  GFR-binding peptide
  MOD_RES (2)..(2): Xaa is C or S
GXAEVVMDQYNKLVVNNAADLYLISIASLRAPV

SEQ ID NO: 78315 - protein, 41 aa, Artificial Sequence; identical to SEQ ID NO: 24728
  GFR-binding peptide
  MOD_RES (1)..(3)..(37)..(38): Xaa is C or S
  MOD_RES (15)..(16)..(17)..(18)..(19): Xaa is A or G
  MOD_RES (20)..(21)..(22)..(23): Xaa is A or G or is absent

SEQ ID NO: 78316 - protein, 34 aa, Artificial Sequence; identical to SEQ ID NO: 13069
  GFR-binding peptide
  MOD_RES (1)..(1): Xaa is C or S
  MOD_RES (13)..(14)..(15)..(16)..(17): Xaa is A or G
  MOD_RES (18)..(19)..(20)..(21): Xaa is A or G or is absent

SEQ ID NO: 78317 - protein, 37 aa, Artificial Sequence; identical to SEQ ID NO: 11136
  GFR-binding peptide
  MOD_RES (2)..(36)..(37): Xaa is C or S
  MOD_RES (14)..(15)..(16)..(17)..(18): Xaa is A or G
  MOD_RES (19)..(20)..(21)..(22): Xaa is A or G or is absent

SEQ ID NO: 78318 - protein, 37 aa, Artificial Sequence; identical to SEQ ID NO: 3710
  GFR-binding peptide
  MOD_RES (2)..(4)..(36)..(37): Xaa is C or S

SEQ ID NO: 78319 - protein, 40 aa, Artificial Sequence; identical to SEQ ID NO: 56657
  GFR-binding peptide
  MOD_RES (2)..(4)..(38)..(39): Xaa is C or S
  MOD_RES (16)..(17)..(18)..(19)..(20): Xaa is A or G
  MOD_RES (21)..(22)..(23)..(24): Xaa is A or G or is absent

SEQ ID NO: 78320 - protein, 38 aa, Artificial Sequence; identical to SEQ ID NO: 3711
  GFR-binding peptide
  MOD_RES (1)..(3)..(36)..(37): Xaa is C or S
  MOD_RES (14)..(15)..(16)..(17)..(18): Xaa is A or G
  MOD_RES (19)..(20)..(21)..(22): Xaa is A or G or is absent

SEQ ID NO: 78321 - protein, 42 aa, Artificial Sequence; identical to SEQ ID NO: 5644
  GFR-binding peptide
  MOD_RES (2)..(4)..(38)..(39): Xaa is C or S
  MOD_RES (16)..(17)..(18)..(19)..(20): Xaa is A or G
  MOD_RES (21)..(22)..(23)..(24): Xaa is A or G or is absent

SEQ ID NO: 78322 - protein, 39 aa, Artificial Sequence; identical to SEQ ID NO: 5645
  GFR-binding peptide
  MOD_RES (33)..(34): Xaa is C or S
  MOD_RES (11)..(12)..(13)..(14)..(15): Xaa is A or G
  MOD_RES (16)..(17)..(18)..(19): Xaa is A or G or is absent

SEQ ID NO: 78323 - protein, 44 aa, Artificial Sequence; identical to SEQ ID NO: 5647
  GFR-binding peptide
  MOD_RES (2)..(4)..(38)..(39): Xaa is C or S
  MOD_RES (16)..(17)..(18)..(19)..(20): Xaa is A or G
  MOD_RES (21)..(22)..(23)..(24): Xaa is A or G or is absent

SEQ ID NO: 78324 - protein, 36 aa, Artificial Sequence; identical to SEQ ID NO: 5649
  GFR-binding peptide
  MOD_RES (2)..(2): Xaa is C or S
  MOD_RES (15)..(16)..(17)..(18)..(19): Xaa is A or G
  MOD_RES (20)..(21)..(22)..(23): Xaa is A or G or is absent

SEQ ID NO: 78325 - protein, 36 aa, Artificial Sequence; identical to SEQ ID NO: 3716
  GFR-binding peptide
  MOD_RES (31)..(32): Xaa is C or S

SEQ ID NO: 78326 - protein, 31 aa, Artificial Sequence; identical to SEQ ID NO: 26778
  GFR-binding peptide
  MOD_RES (31)..(31): Xaa is C or S

SEQ ID NO: 78327 - protein, 39 aa, Artificial Sequence; identical to SEQ ID NO: 5651
  GFR-binding peptide
  MOD_RES (1)..(3)..(38)..(39): Xaa is C or S
  MOD_RES (16)..(17)..(18)..(19)..(20): Xaa is A or G
  MOD_RES (21)..(22)..(23)..(24): Xaa is A or G or is absent

SEQ ID NO: 78328 - protein, 40 aa, Artificial Sequence; identical to SEQ ID NO: 26780
  GFR-binding peptide
  MOD_RES (1)..(35)..(36): Xaa is C or S
  MOD_RES (13)..(14)..(15)..(16)..(17): Xaa is A or G
  MOD_RES (18)..(19)..(20)..(21): Xaa is A or G or is absent

SEQ ID NO: 78329 - protein, 42 aa, Artificial Sequence; identical to SEQ ID NO: 5655
  GFR-binding peptide
  MOD_RES (1)..(3)..(36)..(37): Xaa is C or S
  MOD_RES (14)..(15)..(16)..(17)..(18): Xaa is A or G
  MOD_RES (19)..(20)..(21)..(22): Xaa is A or G or is absent

SEQ ID NO: 78330 - protein, 34 aa, Artificial Sequence; identical to SEQ ID NO: 63001
  GFR-binding peptide
  MOD_RES (2)..(34): Xaa is C or S

SEQ ID NO: 78331 - protein, 37 aa, Artificial Sequence
  GFR-binding peptide
  MOD_RES (1)..(35)..(36): Xaa is C or S
  MOD_RES (13)..(14)..(15)..(16)..(17): Xaa is A or G
  MOD_RES (18)..(19)..(20)..(21): Xaa is A or G or is absent
XAEVVMDQYNKLXXXXXXXXXLYLISIASLRAPVXXS

SEQ ID NO: 78332 - protein, 40 aa, Artificial Sequence; identical to SEQ ID NO: 26784
  GFR-binding peptide
  MOD_RES (1)..(3)..(35)..(36): Xaa is C or S

SEQ ID NO: 78333 - protein, 40 aa, Artificial Sequence
  GFR-binding peptide
  MOD_RES (34)..(35): Xaa is C or S
  MOD_RES (12)..(13)..(14)..(15)..(16): Xaa is A or G
  MOD_RES (17)..(18)..(19)..(20): Xaa is A or G or is absent
ESVAMGQYNKLXXXXXXXXXLYLISIASLKTPVXXAKSAK

SEQ ID NO: 78334 - protein, 33 aa, Artificial Sequence
  GFR-binding peptide
  MOD_RES (31)..(32): Xaa is C or S
SVAMGQYNKLYTVVGKDLYLISIASLKTPVXXA

SEQ ID NO: 78335 - protein, 43 aa, Artificial Sequence; identical to SEQ ID NO: 5656
  GFR-binding peptide
  MOD_RES (2)..(4)..(37)..(38): Xaa is C or S
  MOD_RES (15)..(16)..(17)..(18)..(19): Xaa is A or G
  MOD_RES (20)..(21)..(22)..(23): Xaa is A or G or is absent

SEQ ID NO: 78336 - protein, 33 aa, Artificial Sequence; identical to SEQ ID NO: 5657
  GFR-binding peptide
  MOD_RES (1)..(3): Xaa is C or S

SEQ ID NO: 78337 - protein, 38 aa, Artificial Sequence
  GFR-binding peptide
  MOD_RES (2)..(36)..(37): Xaa is C or S
  MOD_RES (14)..(15)..(16)..(17)..(18): Xaa is A or G
  MOD_RES (19)..(20)..(21)..(22): Xaa is A or G or is absent
GXAEVVMDQYNKLXXXXXXXXXLYLISIASLRAPVXXS

SEQ ID NO: 78338 - protein, 38 aa, Artificial Sequence; identical to SEQ ID NO: 3723
  GFR-binding peptide
  MOD_RES (2)..(35)..(36): Xaa is C or S
  MOD_RES (13)..(14)..(15)..(16)..(17): Xaa is A or G
  MOD_RES (18)..(19)..(20)..(21): Xaa is A or G or is absent

SEQ ID NO: 78339 - protein, 40 aa, Artificial Sequence; identical to SEQ ID NO: 5658
  GFR-binding peptide
  MOD_RES (1)..(35): Xaa is C or S
  MOD_RES (13)..(14)..(15)..(16)..(17): Xaa is A or G
  MOD_RES (18)..(19)..(20)..(21): Xaa is A or G or is absent

SEQ ID NO: 78340 - protein, 39 aa, Artificial Sequence; identical to SEQ ID NO: 26789
  GFR-binding peptide
  MOD_RES (2)..(4)..(36)..(37): Xaa is C or S

SEQ ID NO: 78341 - protein, 37 aa, Artificial Sequence
  GFR-binding peptide
  MOD_RES (2)..(4)..(36)..(37): Xaa is C or S
RXGXAEVVMDQYNKLVVNNAADLYLISIASLRAPVXX

SEQ ID NO: 78342 - protein, 44 aa, Artificial Sequence
  GFR-binding peptide
  MOD_RES (2)..(4)..(38)..(39): Xaa is C or S
  MOD_RES (16)..(17)..(18)..(19)..(20): Xaa is A or G
  MOD_RES (21)..(22)..(23)..(24): Xaa is A or G or is absent
RXGXESVAMGQYNKLXXXXXXXXXLYLISIASLKTPVXXAKSAK

SEQ ID NO: 78343 - protein, 35 aa, Artificial Sequence; identical to SEQ ID NO: 61283
  GFR-binding peptide
  MOD_RES (32)..(33): Xaa is C or S

SEQ ID NO: 78344 - protein, 41 aa, Artificial Sequence
  GFR-binding peptide
  MOD_RES (2)..(4)..(38)..(39): Xaa is C or S
  MOD_RES (16)..(17)..(18)..(19)..(20): Xaa is A or G
  MOD_RES (21)..(22)..(23)..(24): Xaa is A or G or is absent
RXGXAEVVMDQYNKLXXXXXXXXXLYLISIASLRAPVXXSA

SEQ ID NO: 78345 - protein, 41 aa, Artificial Sequence
  GFR-binding peptide
  MOD_RES (1)..(3)..(35)..(36): Xaa is C or S
XGXSRVVMNQYNKLIVNSSDDLYLVSIASLKTPAXXPKPVH

SEQ ID NO: 78346 - protein, 40 aa, Artificial Sequence; identical to SEQ ID NO: 5659
  GFR-binding peptide
  MOD_RES (2)..(4)..(36)..(37): Xaa is C or S

SEQ ID NO: 78347 - protein, 40 aa, Artificial Sequence
  GFR-binding peptide
  MOD_RES (2)..(35)..(36): Xaa is C or S
  MOD_RES (13)..(14)..(15)..(16)..(17): Xaa is A or G
  MOD_RES (18)..(19)..(20)..(21): Xaa is A or G or is absent
GXEEVIMQYNKLXXXXXXXXXLYLMSIASTKVPAXXTSPV

SEQ ID NO: 78348 - protein, 35 aa, Artificial Sequence
  GFR-binding peptide
  MOD_RES (2)..(34)..(35): Xaa is C or S
AXSEVTMNQYNKLVVNKNEDLYLISIASMKEPVXX

SEQ ID NO: 78349 - protein, 39 aa, Artificial Sequence; identical to SEQ ID NO: 5663
  GFR-binding peptide
  MOD_RES (1)..(3)..(35): Xaa is C or S

SEQ ID NO: 78350 - protein, 38 aa, Artificial Sequence; identical to SEQ ID NO: 26796
  GFR-binding peptide
  MOD_RES (1)..(3)..(35)..(36): Xaa is C or S

SEQ ID NO: 78351 - protein, 36 aa, Artificial Sequence; identical to SEQ ID NO: 3728
  GFR-binding peptide
  MOD_RES (1)..(3)..(35)..(36): Xaa is C or S

SEQ ID NO: 78352 - protein, 41 aa, Artificial Sequence
  GFR-binding peptide
  MOD_RES (1)..(3)..(35)..(36): Xaa is C or S
XGXRDVVMGQYNKLIIQQKDNLYLMSIASMKTPTXXPGASG

SEQ ID NO: 78353 - protein, 33 aa, Artificial Sequence
  GFR-binding peptide
  MOD_RES (2)..(2): Xaa is C or S
GXESVAMGQYNKLYTVVGKDLYLISIASLKTPV

SEQ ID NO: 78354 - protein, 33 aa, Artificial Sequence; identical to SEQ ID NO: 5667
  GFR-binding peptide
  MOD_RES (2)..(2): Xaa is C or S

SEQ ID NO: 78355 - protein, 38 aa, Artificial Sequence; identical to SEQ ID NO: 3731
  GFR-binding peptide
  MOD_RES (1)..(35)..(36): Xaa is C or S
  MOD_RES (13)..(14)..(15)..(16)..(17): Xaa is A or G
  MOD_RES (18)..(19)..(20)..(21): Xaa is A or G or is absent

SEQ ID NO: 78356 - protein, 39 aa, Artificial Sequence; identical to SEQ ID NO: 3732
  GFR-binding peptide
  MOD_RES (33)..(34): Xaa is C or S
  MOD_RES (11)..(12)..(13)..(14)..(15): Xaa is A or G
  MOD_RES (16)..(17)..(18)..(19): Xaa is A or G or is absent

SEQ ID NO: 78357 - protein, 36 aa, Artificial Sequence; identical to SEQ ID NO: 5670
  GFR-binding peptide
  MOD_RES (33)..(34): Xaa is C or S
  MOD_RES (11)..(12)..(13)..(14)..(15): Xaa is A or G
  MOD_RES (16)..(17)..(18)..(19): Xaa is A or G or is absent

SEQ ID NO: 78358 - protein, 36 aa, Artificial Sequence; identical to SEQ ID NO: 13109
  GFR-binding peptide
  MOD_RES (1)..(3)..(35)..(36): Xaa is C or S

SEQ ID NO: 78359 - protein, 40 aa, Artificial Sequence; identical to SEQ ID NO: 3735
  GFR-binding peptide
  MOD_RES (2)..(36)..(37): Xaa is C or S
  MOD_RES (14)..(15)..(16)..(17)..(18): Xaa is A or G
  MOD_RES (19)..(20)..(21)..(22): Xaa is A or G or is absent

SEQ ID NO: 78360 - protein, 41 aa, Artificial Sequence
  GFR-binding peptide
  MOD_RES (2)..(35)..(36): Xaa is C or S
  MOD_RES (13)..(14)..(15)..(16)..(17): Xaa is A or G
  MOD_RES (18)..(19)..(20)..(21): Xaa is A or G or is absent
GXEEVIMQYNKLXXXXXXXXXLYLMSIASTKVPAXXTSPVR

SEQ ID NO: 78361 - protein, 37 aa, Artificial Sequence; identical to SEQ ID NO: 5671
  GFR-binding peptide
  MOD_RES (1)..(34)..(35): Xaa is C or S
  MOD_RES (12)..(13)..(14)..(15)..(16): Xaa is A or G
  MOD_RES (17)..(18)..(19)..(20): Xaa is A or G or is absent

SEQ ID NO: 78362 - protein, 33 aa, Artificial Sequence; identical to SEQ ID NO: 3737
  GFR-binding peptide
  MOD_RES (1)..(1): Xaa is C or S

SEQ ID NO: 78363 - protein, 39 aa, Artificial Sequence; identical to SEQ ID NO: 3738
  GFR-binding peptide
  MOD_RES (34)..(35): Xaa is C or S
  MOD_RES (12)..(13)..(14)..(15)..(16): Xaa is A or G
  MOD_RES (17)..(18)..(19)..(20): Xaa is A or G or is absent

SEQ ID NO: 78364 - protein, 40 aa, Artificial Sequence; identical to SEQ ID NO: 3741
  GFR-binding peptide
  MOD_RES (1)..(34)..(35): Xaa is C or S

SEQ ID NO: 78365 - protein, 37 aa, Artificial Sequence; identical to SEQ ID NO: 3742
  GFR-binding peptide
  MOD_RES (34)..(35): Xaa is C or S
  MOD_RES (12)..(13)..(14)..(15)..(16): Xaa is A or G
  MOD_RES (17)..(18)..(19)..(20): Xaa is A or G or is absent

SEQ ID NO: 78366 - protein, 33 aa, Artificial Sequence; identical to SEQ ID NO: 5677
  GFR-binding peptide
  MOD_RES (2)..(33): Xaa is C or S

SEQ ID NO: 78367 - protein, 37 aa, Artificial Sequence; identical to SEQ ID NO: 24770
  GFR-binding peptide
  MOD_RES (31)..(32): Xaa is C or S

SEQ ID NO: 78368 - protein, 40 aa, Artificial Sequence; identical to SEQ ID NO: 5678
  GFR-binding peptide
  MOD_RES (1)..(35)..(36): Xaa is C or S
  MOD_RES (13)..(14)..(15)..(16)..(17): Xaa is A or G
  MOD_RES (18)..(19)..(20)..(21): Xaa is A or G or is absent

SEQ ID NO: 78369 - protein, 40 aa, Artificial Sequence; identical to SEQ ID NO: 56696
  GFR-binding peptide
  MOD_RES (34)..(35): Xaa is C or S
  MOD_RES (12)..(13)..(14)..(15)..(16): Xaa is A or G
  MOD_RES (17)..(18)..(19)..(20): Xaa is A or G or is absent

SEQ ID NO: 78370 - protein, 35 aa, Artificial Sequence; identical to SEQ ID NO: 5679
  GFR-binding peptide
  MOD_RES (1)..(3)..(35): Xaa is C or S

SEQ ID NO: 78371 - protein, 39 aa, Artificial Sequence; identical to SEQ ID NO: 5680
  GFR-binding peptide
  MOD_RES (34)..(35): Xaa is C or S
  MOD_RES (12)..(13)..(14)..(15)..(16): Xaa is A or G
  MOD_RES (17)..(18)..(19)..(20): Xaa is A or G or is absent

SEQ ID NO: 78372 - protein, 31 aa, Artificial Sequence; identical to SEQ ID NO: 24774
  GFR-binding peptide

SEQ ID NO: 78373 - protein, 37 aa, Artificial Sequence; identical to SEQ ID NO: 5682
  GFR-binding peptide
  MOD_RES (1)..(3)..(36)..(37): Xaa is C or S
  MOD_RES (14)..(15)..(16)..(17)..(18): Xaa is A or G
  MOD_RES (19)..(20)..(21)..(22): Xaa is A or G or is absent

SEQ ID NO: 78374 - protein, 36 aa, Artificial Sequence; identical to SEQ ID NO: 3747
  GFR-binding peptide
  MOD_RES (1)..(3): Xaa is C or S
  MOD_RES (15)..(16)..(17)..(18)..(19): Xaa is A or G
  MOD_RES (20)..(21)..(22)..(23): Xaa is A or G or is absent

SEQ ID NO: 78375 - protein, 37 aa, Artificial Sequence; identical to SEQ ID NO: 5683
  GFR-binding peptide
  MOD_RES (2)..(34)..(35): Xaa is C or S

SEQ ID NO: 78376 - protein, 38 aa, Artificial Sequence; identical to SEQ ID NO: 3748
  GFR-binding peptide
  MOD_RES (35)..(36): Xaa is C or S
  MOD_RES (13)..(14)..(15)..(16)..(17): Xaa is A or G
  MOD_RES (18)..(19)..(20)..(21): Xaa is A or G or is absent

SEQ ID NO: 78377 - protein, 35 aa, Artificial Sequence; identical to SEQ ID NO: 56706
  GFR-binding peptide
  MOD_RES (33)..(34): Xaa is C or S
  MOD_RES (11)..(12)..(13)..(14)..(15): Xaa is A or G
  MOD_RES (16)..(17)..(18)..(19): Xaa is A or G or is absent

SEQ ID NO: 78378 - protein, 36 aa, Artificial Sequence; identical to SEQ ID NO: 5685
  GFR-binding peptide
  MOD_RES (1)..(3): Xaa is C or S
  MOD_RES (15)..(16)..(17)..(18)..(19): Xaa is A or G
  MOD_RES (20)..(21)..(22)..(23): Xaa is A or G or is absent

SEQ ID NO: 78379 - protein, 31 aa, Artificial Sequence
  GFR-binding peptide
  MOD_RES (31)..(31): Xaa is C or S
EVVMDQYNKLVVNNAADLYLISIASLRAPVX

SEQ ID NO: 78380 - protein, 37 aa, Artificial Sequence; identical to SEQ ID NO: 3749
  GFR-binding peptide
  MOD_RES (2)..(4)..(37): Xaa is C or S
  MOD_RES (15)..(16)..(17)..(18)..(19): Xaa is A or G
  MOD_RES (20)..(21)..(22)..(23): Xaa is A or G or is absent

SEQ ID NO: 78381 - protein, 33 aa, Artificial Sequence; identical to SEQ ID NO: 5687
  GFR-binding peptide
  MOD_RES (12)..(13)..(14)..(15)..(16): Xaa is A or G
  MOD_RES (17)..(18)..(19)..(20): Xaa is A or G or is absent

SEQ ID NO: 78382 - protein, 35 aa, Artificial Sequence; identical to SEQ ID NO: 5688
  GFR-binding peptide
  MOD_RES (1)..(32)..(33): Xaa is C or S

SEQ ID NO: 78383 - protein, 35 aa, Artificial Sequence; identical to SEQ ID NO: 24780
  GFR-binding peptide
  MOD_RES (33)..(34): Xaa is C or S
  MOD_RES (11)..(12)..(13)..(14)..(15): Xaa is A or G
  MOD_RES (16)..(17)..(18)..(19): Xaa is A or G or is absent

SEQ ID NO: 78384 - protein, 39 aa, Artificial Sequence; identical to SEQ ID NO: 3750
  GFR-binding peptide
  MOD_RES (1)..(3)..(34)..(35): Xaa is C or S

SEQ ID NO: 78385 - protein, 30 aa, Artificial Sequence
  GFR-binding peptide
EVVMDQYNKLVVNNAADLYLISIASLRAPV

SEQ ID NO: 78386 - protein, 43 aa, Artificial Sequence; identical to SEQ ID NO: 5690
  GFR-binding peptide
  MOD_RES (1)..(3)..(37)..(38): Xaa is C or S
  MOD_RES (15)..(16)..(17)..(18)..(19): Xaa is A or G
  MOD_RES (20)..(21)..(22)..(23): Xaa is A or G or is absent

SEQ ID NO: 78387 - protein, 35 aa, Artificial Sequence; identical to SEQ ID NO: 5691
  GFR-binding peptide
  MOD_RES (2)..(33)..(34): Xaa is C or S

SEQ ID NO: 78388 - protein, 37 aa, Artificial Sequence; identical to SEQ ID NO: 3752
  GFR-binding peptide
  MOD_RES (1)..(35)..(36): Xaa is C or S
  MOD_RES (13)..(14)..(15)..(16)..(17): Xaa is A or G
  MOD_RES (18)..(19)..(20)..(21): Xaa is A or G or is absent

SEQ ID NO: 78389 - protein, 30 aa, Artificial Sequence; identical to SEQ ID NO: 56713
  GFR-binding peptide

SEQ ID NO: 78390 - protein, 36 aa, Artificial Sequence; identical to SEQ ID NO: 5692
  GFR-binding peptide
  MOD_RES (1)..(33)..(34): Xaa is C or S

SEQ ID NO: 78391 - protein, 37 aa, Artificial Sequence; identical to SEQ ID NO: 13132
  GFR-binding peptide
  MOD_RES (31)..(32): Xaa is C or S

SEQ ID NO: 78392 - protein, 39 aa, Artificial Sequence; identical to SEQ ID NO: 61313
  GFR-binding peptide
  MOD_RES (33)..(34): Xaa is C or S
  MOD_RES (11)..(12)..(13)..(14)..(15): Xaa is A or G
  MOD_RES (16)..(17)..(18)..(19): Xaa is A or G or is absent

SEQ ID NO: 78393 - protein, 36 aa, Artificial Sequence; identical to SEQ ID NO: 5693
  GFR-binding peptide
  MOD_RES (34)..(35): Xaa is C or S
  MOD_RES (12)..(13)..(14)..(15)..(16): Xaa is A or G
  MOD_RES (17)..(18)..(19)..(20): Xaa is A or G or is absent

SEQ ID NO: 78394 - protein, 38 aa, Artificial Sequence; identical to SEQ ID NO: 3755
  GFR-binding peptide
  MOD_RES (2)..(36)..(37): Xaa is C or S
  MOD_RES (14)..(15)..(16)..(17)..(18): Xaa is A or G
  MOD_RES (19)..(20)..(21)..(22): Xaa is A or G or is absent

SEQ ID NO: 78395 - protein, 37 aa, Artificial Sequence; identical to SEQ ID NO: 3756
  GFR-binding peptide
  MOD_RES (34)..(35): Xaa is C or S
  MOD_RES (12)..(13)..(14)..(15)..(16): Xaa is A or G
  MOD_RES (17)..(18)..(19)..(20): Xaa is A or G or is absent

SEQ ID NO: 78396 - protein, 34 aa, Artificial Sequence; identical to SEQ ID NO: 56717
  GFR-binding peptide
  MOD_RES (1)..(3): Xaa is C or S

SEQ ID NO: 78397 - protein, 40 aa, Artificial Sequence; identical to SEQ ID NO: 3757
  GFR-binding peptide
  MOD_RES (1)..(3)..(37)..(38): Xaa is C or S
  MOD_RES (15)..(16)..(17)..(18)..(19): Xaa is A or G
  MOD_RES (20)..(21)..(22)..(23): Xaa is A or G or is absent

SEQ ID NO: 78398 - protein, 37 aa, Artificial Sequence; identical to SEQ ID NO: 24788
  GFR-binding peptide
  MOD_RES (32)..(33): Xaa is C or S

SEQ ID NO: 78399 - protein, 30 aa, Artificial Sequence; identical to SEQ ID NO: 5696
  GFR-binding peptide

SEQ ID NO: 78400 - protein, 38 aa, Artificial Sequence; identical to SEQ ID NO: 3758
  GFR-binding peptide
  MOD_RES (2)..(4)..(38): Xaa is C or S
  MOD_RES (16)..(17)..(18)..(19)..(20): Xaa is A or G
  MOD_RES (21)..(22)..(23)..(24): Xaa is A or G or is absent

SEQ ID NO: 78401 - protein, 36 aa, Artificial Sequence; identical to SEQ ID NO: 3760
  GFR-binding peptide
  MOD_RES (2)..(35)..(36): Xaa is C or S
  MOD_RES (13)..(14)..(15)..(16)..(17): Xaa is A or G
  MOD_RES (18)..(19)..(20)..(21): Xaa is A or G or is absent

SEQ ID NO: 78402 - protein, 37 aa, Artificial Sequence; identical to SEQ ID NO: 3761
  GFR-binding peptide
  MOD_RES (31)..(32): Xaa is C or S

SEQ ID NO: 78403 - protein, 35 aa, Artificial Sequence; identical to SEQ ID NO: 3763
  GFR-binding peptide
  MOD_RES (2)..(4): Xaa is C or S

SEQ ID NO: 78404 - protein, 40 aa, Artificial Sequence; identical to SEQ ID NO: 56726
  GFR-binding peptide
  MOD_RES (1)..(35)..(36): Xaa is C or S
  MOD_RES (13)..(14)..(15)..(16)..(17): Xaa is A or G
  MOD_RES (18)..(19)..(20)..(21): Xaa is A or G or is absent

SEQ ID NO: 78405 - protein, 41 aa, Artificial Sequence; identical to SEQ ID NO: 3765
  GFR-binding peptide
  MOD_RES (2)..(36)..(37): Xaa is C or S
  MOD_RES (14)..(15)..(16)..(17)..(18): Xaa is A or G
  MOD_RES (19)..(20)..(21)..(22): Xaa is A or G or is absent

SEQ ID NO: 78406 - protein, 39 aa, Artificial Sequence
  GFR-binding peptide
  MOD_RES (2)..(4)..(37)..(38): Xaa is C or S
  MOD_RES (15)..(16)..(17)..(18)..(19): Xaa is A or G
  MOD_RES (20)..(21)..(22)..(23): Xaa is A or G or is absent
LXGXEEVIMQYNKLXXXXXXXXXLYLMSIASTKVPAXXT

SEQ ID NO: 78407 - protein, 31 aa, Artificial Sequence; identical to SEQ ID NO: 5701
  GFR-binding peptide

SEQ ID NO: 78408 - protein, 39 aa, Artificial Sequence; identical to SEQ ID NO: 56732
  GFR-binding peptide
  MOD_RES (2)..(4)..(37)..(38): Xaa is C or S
  MOD_RES (15)..(16)..(17)..(18)..(19): Xaa is A or G
  MOD_RES (20)..(21)..(22)..(23): Xaa is A or G or is absent

SEQ ID NO: 78409 - protein, 37 aa, Artificial Sequence; identical to SEQ ID NO: 3768
  GFR-binding peptide
  MOD_RES (33)..(34): Xaa is C or S
  MOD_RES (11)..(12)..(13)..(14)..(15): Xaa is A or G
  MOD_RES (16)..(17)..(18)..(19): Xaa is A or G or is absent

SEQ ID NO: 78410 - protein, 41 aa, Artificial Sequence; identical to SEQ ID NO: 26827
  GFR-binding peptide
  MOD_RES (1)..(35)..(36): Xaa is C or S
  MOD_RES (13)..(14)..(15)..(16)..(17): Xaa is A or G
  MOD_RES (18)..(19)..(20)..(21): Xaa is A or G or is absent

SEQ ID NO: 78411 - protein, 38 aa, Artificial Sequence; identical to SEQ ID NO: 3770
  GFR-binding peptide
  MOD_RES (2)..(34)..(35): Xaa is C or S

SEQ ID NO: 78412 - protein, 34 aa, Artificial Sequence; identical to SEQ ID NO: 3771
  GFR-binding peptide
  MOD_RES (33)..(34): Xaa is C or S
  MOD_RES (11)..(12)..(13)..(14)..(15): Xaa is A or G
  MOD_RES (16)..(17)..(18)..(19): Xaa is A or G or is absent

SEQ ID NO: 78413 - protein, 39 aa, Artificial Sequence; identical to SEQ ID NO: 5703
  GFR-binding peptide
  MOD_RES (2)..(4)..(38)..(39): Xaa is C or S
  MOD_RES (16)..(17)..(18)..(19)..(20): Xaa is A or G
  MOD_RES (21)..(22)..(23)..(24): Xaa is A or G or is absent

SEQ ID NO: 78414 - protein, 35 aa, Artificial Sequence; identical to SEQ ID NO: 26829
  GFR-binding peptide
  MOD_RES (2)..(4): Xaa is C or S

SEQ ID NO: 78415 - protein, 37 aa, Artificial Sequence; identical to SEQ ID NO: 5705
  GFR-binding peptide
  MOD_RES (2)..(4): Xaa is C or S
  MOD_RES (16)..(17)..(18)..(19)..(20): Xaa is A or G
  MOD_RES (21)..(22)..(23)..(24): Xaa is A or G or is absent

SEQ ID NO: 78416 - protein, 36 aa, Artificial Sequence; identical to SEQ ID NO: 3777
  GFR-binding peptide
  MOD_RES (1)..(35)..(36): Xaa is C or S
  MOD_RES (13)..(14)..(15)..(16)..(17): Xaa is A or G
  MOD_RES (18)..(19)..(20)..(21): Xaa is A or G or is absent

SEQ ID NO: 78417 - protein, 39 aa, Artificial Sequence
  GFR-binding peptide
  MOD_RES (2)..(4)..(36)..(37): Xaa is C or S
RXGXAEVVMDQYNKLVVNNAADLYLISIASLRAPVXXSA

SEQ ID NO: 78418 - protein, 31 aa, Artificial Sequence; identical to SEQ ID NO: 3779
  GFR-binding peptide
  MOD_RES (1)..(1): Xaa is C or S

SEQ ID NO: 78419 - protein, 38 aa, Artificial Sequence
  GFR-binding peptide
  MOD_RES (2)..(36)..(37): Xaa is C or S
  MOD_RES (14)..(15)..(16)..(17)..(18): Xaa is A or G
  MOD_RES (19)..(20)..(21)..(22): Xaa is A or G or is absent
GXESVAMGQYNKLXXXXXXXXXLYLISIASLKTPVXXA

SEQ ID NO: 78420 - protein, 35 aa, Artificial Sequence; identical to SEQ ID NO: 5708
  GFR-binding peptide
  MOD_RES (2)..(4): Xaa is C or S

SEQ ID NO: 78421 - protein, 35 aa, Artificial Sequence
  GFR-binding peptide
  MOD_RES (34)..(35): Xaa is C or S
  MOD_RES (12)..(13)..(14)..(15)..(16): Xaa is A or G
  MOD_RES (17)..(18)..(19)..(20): Xaa is A or G or is absent
RDVVMGQYNKLXXXXXXXXXLYLMSIASMKTPTXX

SEQ ID NO: 78422 - protein, 39 aa, Artificial Sequence; identical to SEQ ID NO: 3781
  GFR-binding peptide
  MOD_RES (1)..(3)..(36)..(37): Xaa is C or S
  MOD_RES (14)..(15)..(16)..(17)..(18): Xaa is A or G
  MOD_RES (19)..(20)..(21)..(22): Xaa is A or G or is absent

SEQ ID NO: 78423 - protein, 35 aa, Artificial Sequence; identical to SEQ ID NO: 5709
  GFR-binding peptide
  MOD_RES (1)..(35): Xaa is C or S
  MOD_RES (13)..(14)..(15)..(16)..(17): Xaa is A or G
  MOD_RES (18)..(19)..(20)..(21): Xaa is A or G or is absent

SEQ ID NO: 78424 - protein, 34 aa, Artificial Sequence; identical to SEQ ID NO: 3783
  GFR-binding peptide
  MOD_RES (1)..(34): Xaa is C or S

SEQ ID NO: 78425 - protein, 39 aa, Artificial Sequence; identical to SEQ ID NO: 5712
  GFR-binding peptide
  MOD_RES (2)..(34)..(35): Xaa is C or S

SEQ ID NO: 78426 - protein, 38 aa, Artificial Sequence
  GFR-binding peptide
  MOD_RES (34)..(35): Xaa is C or S
  MOD_RES (12)..(13)..(14)..(15)..(16): Xaa is A or G
  MOD_RES (17)..(18)..(19)..(20): Xaa is A or G or is absent
ESVAMGQYNKLXXXXXXXXXLYLISIASLKTPVXXAKS

SEQ ID NO: 78427 - protein, 40 aa, Artificial Sequence
  GFR-binding peptide
  MOD_RES (1)..(35)..(36): Xaa is C or S
  MOD_RES (13)..(14)..(15)..(16)..(17): Xaa is A or G
  MOD_RES (18)..(19)..(20)..(21): Xaa is A or G or is absent
XSEVTMNQYNKLXXXXXXXXXLYLISIASMKEPVXXPEPI

SEQ ID NO: 78428 - protein, 36 aa, Artificial Sequence; identical to SEQ ID NO: 5714
  GFR-binding peptide
  MOD_RES (33)..(34): Xaa is C or S
  MOD_RES (11)..(12)..(13)..(14)..(15): Xaa is A or G
  MOD_RES (16)..(17)..(18)..(19): Xaa is A or G or is absent

SEQ ID NO: 78429 - protein, 36 aa, Artificial Sequence; identical to SEQ ID NO: 3786
  GFR-binding peptide
  MOD_RES (1)..(3): Xaa is C or S
  MOD_RES (15)..(16)..(17)..(18)..(19): Xaa is A or G
  MOD_RES (20)..(21)..(22)..(23): Xaa is A or G or is absent

SEQ ID NO: 78430 - protein, 38 aa, Artificial Sequence; identical to SEQ ID NO: 64788
  GFR-binding peptide
  MOD_RES (2)..(4)..(36)..(37): Xaa is C or S

SEQ ID NO: 78431 - protein, 38 aa, Artificial Sequence; identical to SEQ ID NO: 56755
  GFR-binding peptide
  MOD_RES (1)..(3)..(36)..(37): Xaa is C or S
  MOD_RES (14)..(15)..(16)..(17)..(18): Xaa is A or G
  MOD_RES (19)..(20)..(21)..(22): Xaa is A or G or is absent

SEQ ID NO: 78432 - protein, 39 aa, Artificial Sequence
  GFR-binding peptide
  MOD_RES (1)..(35)..(36): Xaa is C or S
  MOD_RES (13)..(14)..(15)..(16)..(17): Xaa is A or G
  MOD_RES (18)..(19)..(20)..(21): Xaa is A or G or is absent
XAEVVMDQYNKLXXXXXXXXXLYLISIASLRAPVXXSAP

SEQ ID NO: 78433 - protein, 40 aa, Artificial Sequence; identical to SEQ ID NO: 11215
  GFR-binding peptide
  MOD_RES (1)..(35)..(36): Xaa is C or S
  MOD_RES (13)..(14)..(15)..(16)..(17): Xaa is A or G
  MOD_RES (18)..(19)..(20)..(21): Xaa is A or G or is absent

SEQ ID NO: 78434 - protein, 35 aa, Artificial Sequence; identical to SEQ ID NO: 3788
  GFR-binding peptide
  MOD_RES (2)..(2): Xaa is C or S
  MOD_RES (14)..(15)..(16)..(17)..(18): Xaa is A or G
  MOD_RES (19)..(20)..(21)..(22): Xaa is A or G or is absent

SEQ ID NO: 78435 - protein, 41 aa, Artificial Sequence; identical to SEQ ID NO: 3789
  GFR-binding peptide
  MOD_RES (2)..(4)..(36)..(37): Xaa is C or S

SEQ ID NO: 78436 - protein, 35 aa, Artificial Sequence; identical to SEQ ID NO: 61332
  GFR-binding peptide
  MOD_RES (1)..(33)..(34): Xaa is C or S

SEQ ID NO: 78437 - protein, 35 aa, Artificial Sequence; identical to SEQ ID NO: 5719
  GFR-binding peptide
  MOD_RES (31)..(32): Xaa is C or S

SEQ ID NO: 78438 - protein, 33 aa, Artificial Sequence; identical to SEQ ID NO: 59558
  GFR-binding peptide
  MOD_RES (33)..(33): Xaa is C or S
  MOD_RES (11)..(12)..(13)..(14)..(15): Xaa is A or G
  MOD_RES (16)..(17)..(18)..(19): Xaa is A or G or is absent

SEQ ID NO: 78439 - protein, 43 aa, Artificial Sequence; identical to SEQ ID NO: 61334
  GFR-binding peptide
  MOD_RES (2)..(4)..(38)..(39): Xaa is C or S
  MOD_RES (16)..(17)..(18)..(19)..(20): Xaa is A or G
  MOD_RES (21)..(22)..(23)..(24): Xaa is A or G or is absent

SEQ ID NO: 78440 - protein, 38 aa, Artificial Sequence; identical to SEQ ID NO: 5721
  GFR-binding peptide
  MOD_RES (1)..(35)..(36): Xaa is C or S
  MOD_RES (13)..(14)..(15)..(16)..(17): Xaa is A or G
  MOD_RES (18)..(19)..(20)..(21): Xaa is A or G or is absent

SEQ ID NO: 78441 - protein, 33 aa, Artificial Sequence; identical to SEQ ID NO: 3792
  GFR-binding peptide
  MOD_RES (1)..(33): Xaa is C or S

SEQ ID NO: 78442 - protein, 38 aa, Artificial Sequence; identical to SEQ ID NO: 3793
  GFR-binding peptide
  MOD_RES (33)..(34): Xaa is C or S
  MOD_RES (11)..(12)..(13)..(14)..(15): Xaa is A or G
  MOD_RES (16)..(17)..(18)..(19): Xaa is A or G or is absent

SEQ ID NO: 78443 - protein, 31 aa, Artificial Sequence; identical to SEQ ID NO: 3794
  GFR-binding peptide

SEQ ID NO: 78444 - protein, 38 aa, Artificial Sequence; identical to SEQ ID NO: 5724
  GFR-binding peptide
  MOD_RES (2)..(33)..(34): Xaa is C or S

SEQ ID NO: 78445 - protein, 40 aa, Artificial Sequence; identical to SEQ ID NO: 3795
  GFR-binding peptide
  MOD_RES (2)..(36)..(37): Xaa is C or S
  MOD_RES (14)..(15)..(16)..(17)..(18): Xaa is A or G
  MOD_RES (19)..(20)..(21)..(22): Xaa is A or G or is absent

SEQ ID NO: 78446 - protein, 37 aa, Artificial Sequence; identical to SEQ ID NO: 26850
  GFR-binding peptide
  MOD_RES (1)..(35)..(36): Xaa is C or S
  MOD_RES (13)..(14)..(15)..(16)..(17): Xaa is A or G
  MOD_RES (18)..(19)..(20)..(21): Xaa is A or G or is absent

SEQ ID NO: 78447 - protein, 37 aa, Artificial Sequence; identical to SEQ ID NO: 11220
  GFR-binding peptide
  MOD_RES (33)..(34): Xaa is C or S
  MOD_RES (11)..(12)..(13)..(14)..(15): Xaa is A or G
  MOD_RES (16)..(17)..(18)..(19): Xaa is A or G or is absent

SEQ ID NO: 78448 - protein, 36 aa, Artificial Sequence
  GFR-binding peptide
  MOD_RES (33)..(34): Xaa is C or S
  MOD_RES (11)..(12)..(13)..(14)..(15): Xaa is A or G
  MOD_RES (16)..(17)..(18)..(19): Xaa is A or G or is absent
EVVMDQYNKLXXXXXXXXXLYLISIASLRAPVXXSA

SEQ ID NO: 78449 - protein, 40 aa, Artificial Sequence; identical to SEQ ID NO: 5726
  GFR-binding peptide
  MOD_RES (2)..(4)..(38)..(39): Xaa is C or S
  MOD_RES (16)..(17)..(18)..(19)..(20): Xaa is A or G
  MOD_RES (21)..(22)..(23)..(24): Xaa is A or G or is absent

SEQ ID NO: 78450 - protein, 36 aa, Artificial Sequence; identical to SEQ ID NO: 3797
  GFR-binding peptide
  MOD_RES (2)..(4)..(36): Xaa is C or S

SEQ ID NO: 78451 - protein, 31 aa, Artificial Sequence
  GFR-binding peptide
SEVTMNQYNKLVVNKNEDLYLISIASMKEPV

SEQ ID NO: 78452 - protein, 36 aa, Artificial Sequence
  GFR-binding peptide
  MOD_RES (31)..(32): Xaa is C or S
DVVMGQYNKLIIQQKDNLYLMSIASMKTPTXXPGAS

SEQ ID NO: 78453 - protein, 40 aa, Artificial Sequence; identical to SEQ ID NO: 26856
  GFR-binding peptide
  MOD_RES (1)..(3)..(37)..(38): Xaa is C or S
  MOD_RES (15)..(16)..(17)..(18)..(19): Xaa is A or G
  MOD_RES (20)..(21)..(22)..(23): Xaa is A or G or is absent

SEQ ID NO: 78454 - protein, 39 aa, Artificial Sequence
  GFR-binding peptide
  MOD_RES (1)..(34)..(35): Xaa is C or S
  MOD_RES (12)..(13)..(14)..(15)..(16): Xaa is A or G
  MOD_RES (17)..(18)..(19)..(20): Xaa is A or G or is absent
XEEVIMQYNKLXXXXXXXXXLYLMSIASTKVPAXXTSPV

SEQ ID NO: 78455 - protein, 35 aa, Artificial Sequence
  GFR-binding peptide
  MOD_RES (1)..(35): Xaa is C or S
  MOD_RES (13)..(14)..(15)..(16)..(17): Xaa is A or G
  MOD_RES (18)..(19)..(20)..(21): Xaa is A or G or is absent
XESVAMGQYNKLXXXXXXXXXLYLISIASLKTPVX

SEQ ID NO: 78456 - protein, 38 aa, Artificial Sequence; identical to SEQ ID NO: 63069
  GFR-binding peptide
  MOD_RES (1)..(35)..(36): Xaa is C or S
  MOD_RES (13)..(14)..(15)..(16)..(17): Xaa is A or G
  MOD_RES (18)..(19)..(20)..(21): Xaa is A or G or is absent

SEQ ID NO: 78457 - protein, 39 aa, Artificial Sequence; identical to SEQ ID NO: 3801
  GFR-binding peptide
  MOD_RES (33)..(34): Xaa is C or S
  MOD_RES (11)..(12)..(13)..(14)..(15): Xaa is A or G
  MOD_RES (16)..(17)..(18)..(19): Xaa is A or G or is absent

SEQ ID NO: 78458 - protein, 41 aa, Artificial Sequence
  GFR-binding peptide
  MOD_RES (1)..(35)..(36): Xaa is C or S
  MOD_RES (13)..(14)..(15)..(16)..(17): Xaa is A or G
  MOD_RES (18)..(19)..(20)..(21): Xaa is A or G or is absent
XESVAMGQYNKLXXXXXXXXXLYLISIASLKTPVXXAKSAK

SEQ ID NO: 78459 - protein, 43 aa, Artificial Sequence
  GFR-binding peptide
  MOD_RES (2)..(4)..(38)..(39): Xaa is C or S
  MOD_RES (16)..(17)..(18)..(19)..(20): Xaa is A or G
  MOD_RES (21)..(22)..(23)..(24): Xaa is A or G or is absent
SXGXRDVVMGQYNKLXXXXXXXXXLYLMSIASMKTPTXXPGAS

SEQ ID NO: 78460 - protein, 35 aa, Artificial Sequence; identical to SEQ ID NO: 56776
  GFR-binding peptide
  MOD_RES (1)..(3): Xaa is C or S
  MOD_RES (14)..(15)..(16)..(17)..(18): Xaa is A or G
  MOD_RES (19)..(20)..(21)..(22): Xaa is A or G or is absent

SEQ ID NO: 78461 - protein, 38 aa, Artificial Sequence; identical to SEQ ID NO: 64809
  GFR-binding peptide
  MOD_RES (32)..(33): Xaa is C or S

SEQ ID NO: 78462 - protein, 34 aa, Artificial Sequence; identical to SEQ ID NO: 3803
  GFR-binding peptide
  MOD_RES (1)..(33)..(34): Xaa is C or S

SEQ ID NO: 78463 - protein, 39 aa, Artificial Sequence; identical to SEQ ID NO: 3805
  GFR-binding peptide
  MOD_RES (2)..(4)..(37)..(38): Xaa is C or S
  MOD_RES (15)..(16)..(17)..(18)..(19): Xaa is A or G
  MOD_RES (20)..(21)..(22)..(23): Xaa is A or G or is absent

SEQ ID NO: 78464 - protein, 41 aa, Artificial Sequence; identical to SEQ ID NO: 5731
  GFR-binding peptide
  MOD_RES (1)..(3)..(35)..(36): Xaa is C or S

SEQ ID NO: 78465 - protein, 35 aa, Artificial Sequence; identical to SEQ ID NO: 3809
  GFR-binding peptide
  MOD_RES (1)..(34)..(35): Xaa is C or S
  MOD_RES (12)..(13)..(14)..(15)..(16): Xaa is A or G
  MOD_RES (17)..(18)..(19)..(20): Xaa is A or G or is absent

SEQ ID NO: 78466 - protein, 39 aa, Artificial Sequence; identical to SEQ ID NO: 5733
  GFR-binding peptide
  MOD_RES (2)..(4)..(35)..(36): Xaa is C or S

SEQ ID NO: 78467 - protein, 38 aa, Artificial Sequence; identical to SEQ ID NO: 5734
  GFR-binding peptide
  MOD_RES (2)..(4)..(36)..(37): Xaa is C or S

SEQ ID NO: 78468 - protein, 39 aa, Artificial Sequence
  GFR-binding peptide
  MOD_RES (1)..(33)..(34): Xaa is C or S
XAEVVMDQYNKLVVNNAADLYLISIASLRAPVXXSAPAA

SEQ ID NO: 78469 - protein, 40 aa, Artificial Sequence; identical to SEQ ID NO: 63077
  GFR-binding peptide
  MOD_RES (1)..(35)..(36): Xaa is C or S
  MOD_RES (13)..(14)..(15)..(16)..(17): Xaa is A or G
  MOD_RES (18)..(19)..(20)..(21): Xaa is A or G or is absent

SEQ ID NO: 78470 - protein, 37 aa, Artificial Sequence; identical to SEQ ID NO: 56781
  GFR-binding peptide
  MOD_RES (33)..(34): Xaa is C or S
  MOD_RES (11)..(12)..(13)..(14)..(15): Xaa is A or G
  MOD_RES (16)..(17)..(18)..(19): Xaa is A or G or is absent

SEQ ID NO: 78471 - protein, 37 aa, Artificial Sequence
  GFR-binding peptide
  MOD_RES (2)..(35)..(36): Xaa is C or S
  MOD_RES (13)..(14)..(15)..(16)..(17): Xaa is A or G
  MOD_RES (18)..(19)..(20)..(21): Xaa is A or G or is absent
GXEEVIMQYNKLXXXXXXXXXLYLMSIASTKVPAXXT

SEQ ID NO: 78472 - protein, 34 aa, Artificial Sequence; identical to SEQ ID NO: 11234
  GFR-binding peptide
  MOD_RES (1)..(3): Xaa is C or S

SEQ ID NO: 78473 - protein, 37 aa, Artificial Sequence; identical to SEQ ID NO: 5738
  GFR-binding peptide
  MOD_RES (32)..(33): Xaa is C or S

SEQ ID NO: 78474 - protein, 39 aa, Artificial Sequence
  GFR-binding peptide
  MOD_RES (2)..(36)..(37): Xaa is C or S
  MOD_RES (14)..(15)..(16)..(17)..(18): Xaa is A or G
  MOD_RES (19)..(20)..(21)..(22): Xaa is A or G or is absent
GXAEVVMDQYNKLXXXXXXXXXLYLISIASLRAPVXXSA

SEQ ID NO: 78475 - protein, 37 aa, Artificial Sequence; identical to SEQ ID NO: 5739
  GFR-binding peptide
  MOD_RES (2)..(4)..(37): Xaa is C or S
  MOD_RES (15)..(16)..(17)..(18)..(19): Xaa is A or G
  MOD_RES (20)..(21)..(22)..(23): Xaa is A or G or is absent

SEQ ID NO: 78476 - protein, 38 aa, Artificial Sequence; identical to SEQ ID NO: 3816
  GFR-binding peptide
  MOD_RES (2)..(4)..(36)..(37): Xaa is C or S

SEQ ID NO: 78477 - protein, 35 aa, Artificial Sequence; identical to SEQ ID NO: 5742
  GFR-binding peptide
  MOD_RES (2)..(4): Xaa is C or S

SEQ ID NO: 78478 - protein, 37 aa, Artificial Sequence; identical to SEQ ID NO: 5743
  GFR-binding peptide
  MOD_RES (1)..(34)..(35): Xaa is C or S
  MOD_RES (12)..(13)..(14)..(15)..(16): Xaa is A or G
  MOD_RES (17)..(18)..(19)..(20): Xaa is A or G or is absent

SEQ ID NO: 78479 - protein, 42 aa, Artificial Sequence; identical to SEQ ID NO: 5745
  GFR-binding peptide
  MOD_RES (2)..(4)..(37)..(38): Xaa is C or S
  MOD_RES (15)..(16)..(17)..(18)..(19): Xaa is A or G
  MOD_RES (20)..(21)..(22)..(23): Xaa is A or G or is absent

SEQ ID NO: 78480 - protein, 32 aa, Artificial Sequence; identical to SEQ ID NO: 5746
  GFR-binding peptide
  MOD_RES (11)..(12)..(13)..(14)..(15): Xaa is A or G
  MOD_RES (16)..(17)..(18)..(19): Xaa is A or G or is absent

SEQ ID NO: 78481 - protein, 38 aa, Artificial Sequence; identical to SEQ ID NO: 3817
  GFR-binding peptide
  MOD_RES (1)..(3)..(36)..(37): Xaa is C or S
  MOD_RES (14)..(15)..(16)..(17)..(18): Xaa is A or G
  MOD_RES (19)..(20)..(21)..(22): Xaa is A or G or is absent

SEQ ID NO: 78482 - protein, 39 aa, Artificial Sequence; identical to SEQ ID NO: 3818
  GFR-binding peptide
  MOD_RES (1)..(33)..(34): Xaa is C or S

SEQ ID NO: 78483 - protein, 35 aa, Artificial Sequence; identical to SEQ ID NO: 3820
  GFR-binding peptide
  MOD_RES (2)..(33)..(34): Xaa is C or S

SEQ ID NO: 78484 - protein, 32 aa, Artificial Sequence
  GFR-binding peptide
  MOD_RES (1)..(1): Xaa is C or S
XESVAMGQYNKLYTVVGKDLYLISIASLKTPV

SEQ ID NO: 78485 - protein, 31 aa, Artificial Sequence; identical to SEQ ID NO: 3821
  GFR-binding peptide

SEQ ID NO: 78486 - protein, 32 aa, Artificial Sequence; identical to SEQ ID NO: 13185
  GFR-binding peptide
  MOD_RES (31)..(32): Xaa is C or S

SEQ ID NO: 78487 - protein, 39 aa, Artificial Sequence; identical to SEQ ID NO: 5750
  GFR-binding peptide
  MOD_RES (1)..(35)..(36): Xaa is C or S
  MOD_RES (13)..(14)..(15)..(16)..(17): Xaa is A or G
  MOD_RES (18)..(19)..(20)..(21): Xaa is A or G or is absent

SEQ ID NO: 78488 - protein, 42 aa, Artificial Sequence; identical to SEQ ID NO: 56793
  GFR-binding peptide
  MOD_RES (2)..(4)..(36)..(37): Xaa is C or S

SEQ ID NO: 78489 - protein, 35 aa, Artificial Sequence; identical to SEQ ID NO: 3825
  GFR-binding peptide
  MOD_RES (31)..(32): Xaa is C or S

SEQ ID NO: 78490 - protein, 38 aa, Artificial Sequence; identical to SEQ ID NO: 5753
  GFR-binding peptide
  MOD_RES (2)..(4)..(37)..(38): Xaa is C or S
  MOD_RES (15)..(16)..(17)..(18)..(19): Xaa is A or G
  MOD_RES (20)..(21)..(22)..(23): Xaa is A or G or is absent

SEQ ID NO: 78491 - protein, 36 aa, Artificial Sequence; identical to SEQ ID NO: 56796
  GFR-binding peptide
  MOD_RES (1)..(3)..(36): Xaa is C or S
  MOD_RES (14)..(15)..(16)..(17)..(18): Xaa is A or G
  MOD_RES (19)..(20)..(21)..(22): Xaa is A or G or is absent

SEQ ID NO: 78492 - protein, 36 aa, Artificial Sequence; identical to SEQ ID NO: 56797
  GFR-binding peptide
  MOD_RES (2)..(33)..(34): Xaa is C or S

SEQ ID NO: 78493 - protein, 42 aa, Artificial Sequence
  GFR-binding peptide
  MOD_RES (2)..(4)..(38)..(39): Xaa is C or S
  MOD_RES (16)..(17)..(18)..(19)..(20): Xaa is A or G
  MOD_RES (21)..(22)..(23)..(24): Xaa is A or G or is absent
SXGXRDVVMGQYNKLXXXXXXXXXLYLMSIASMKTPTXXPGA

SEQ ID NO: 78494 - protein, 37 aa, Artificial Sequence; identical to SEQ ID NO: 5758
  GFR-binding peptide
  MOD_RES (1)..(3): Xaa is C or S
  MOD_RES (16)..(17)..(18)..(19)..(20): Xaa is A or G
  MOD_RES (21)..(22)..(23)..(24): Xaa is A or G or is absent

SEQ ID NO: 78495 - protein, 38 aa, Artificial Sequence; identical to SEQ ID NO: 5759
  GFR-binding peptide
  MOD_RES (1)..(35)..(36): Xaa is C or S
  MOD_RES (13)..(14)..(15)..(16)..(17): Xaa is A or G
  MOD_RES (18)..(19)..(20)..(21): Xaa is A or G or is absent

SEQ ID NO: 78496 - protein, 38 aa, Artificial Sequence; identical to SEQ ID NO: 5762
  GFR-binding peptide
  MOD_RES (33)..(34): Xaa is C or S
  MOD_RES (11)..(12)..(13)..(14)..(15): Xaa is A or G
  MOD_RES (16)..(17)..(18)..(19): Xaa is A or G or is absent

SEQ ID NO: 78497 - protein, 34 aa, Artificial Sequence; identical to SEQ ID NO: 5763
  GFR-binding peptide
  MOD_RES (33)..(34): Xaa is C or S
  MOD_RES (11)..(12)..(13)..(14)..(15): Xaa is A or G
  MOD_RES (16)..(17)..(18)..(19): Xaa is A or G or is absent

SEQ ID NO: 78498 - protein, 32 aa, Artificial Sequence; identical to SEQ ID NO: 3829
  GFR-binding peptide
  MOD_RES (1)..(1): Xaa is C or S

SEQ ID NO: 78499 - protein, 34 aa, Artificial Sequence
  GFR-binding peptide
  MOD_RES (2)..(2): Xaa is C or S
  MOD_RES (13)..(14)..(15)..(16)..(17): Xaa is A or G
  MOD_RES (18)..(19)..(20)..(21): Xaa is A or G or is absent
GXEEVIMQYNKLXXXXXXXXXLYLMSIASTKVPA

SEQ ID NO: 78500 - protein, 34 aa, Artificial Sequence
  GFR-binding peptide
  MOD_RES (31)..(32): Xaa is C or S
DVVMGQYNKLIIQQKDNLYLMSIASMKTPTXXPG

SEQ ID NO: 78501 - protein, 39 aa, Artificial Sequence; identical to SEQ ID NO: 5765
  GFR-binding peptide
  MOD_RES (1)..(35)..(36): Xaa is C or S
  MOD_RES (13)..(14)..(15)..(16)..(17): Xaa is A or G
  MOD_RES (18)..(19)..(20)..(21): Xaa is A or G or is absent

SEQ ID NO: 78502 - protein, 40 aa, Artificial Sequence; identical to SEQ ID NO: 56808
  GFR-binding peptide
  MOD_RES (2)..(34)..(35): Xaa is C or S

SEQ ID NO: 78503 - protein, 38 aa, Artificial Sequence; identical to SEQ ID NO: 5766
  GFR-binding peptide
  MOD_RES (1)..(34)..(35): Xaa is C or S
  MOD_RES (12)..(13)..(14)..(15)..(16): Xaa is A or G
  MOD_RES (17)..(18)..(19)..(20): Xaa is A or G or is absent

SEQ ID NO: 78504 - protein, 43 aa, Artificial Sequence; identical to SEQ ID NO: 3832
  GFR-binding peptide
  MOD_RES (1)..(3)..(37)..(38): Xaa is C or S
  MOD_RES (15)..(16)..(17)..(18)..(19): Xaa is A or G
  MOD_RES (20)..(21)..(22)..(23): Xaa is A or G or is absent

SEQ ID NO: 78505 - protein, 39 aa, Artificial Sequence; identical to SEQ ID NO: 26901
  GFR-binding peptide
  MOD_RES (2)..(34)..(35): Xaa is C or S

SEQ ID NO: 78506 - protein, 38 aa, Artificial Sequence
  GFR-binding peptide
  MOD_RES (33)..(34): Xaa is C or S
  MOD_RES (11)..(12)..(13)..(14)..(15): Xaa is A or G
  MOD_RES (16)..(17)..(18)..(19): Xaa is A or G or is absent
DVVMGQYNKLXXXXXXXXXLYLMSIASMKTPTXXPGAS

SEQ ID NO: 78507 - protein, 39 aa, Artificial Sequence
  GFR-binding peptide
  MOD_RES (33)..(34): Xaa is C or S
  MOD_RES (11)..(12)..(13)..(14)..(15): Xaa is A or G
  MOD_RES (16)..(17)..(18)..(19): Xaa is A or G or is absent
EEVIMQYNKLXXXXXXXXXLYLMSIASTKVPAXXTSPVR

SEQ ID NO: 78508 - protein, 40 aa, Artificial Sequence
  GFR-binding peptide
  MOD_RES (2)..(34)..(35): Xaa is C or S
GXSRVVMNQYNKLIVNSSDDLYLVSIASLKTPAXXPKPVH

SEQ ID NO: 78509 - protein, 38 aa, Artificial Sequence; identical to SEQ ID NO: 13203
  GFR-binding peptide
  MOD_RES (1)..(35)..(36): Xaa is C or S
  MOD_RES (13)..(14)..(15)..(16)..(17): Xaa is A or G
  MOD_RES (18)..(19)..(20)..(21): Xaa is A or G or is absent

SEQ ID NO: 78510 - protein, 35 aa, Artificial Sequence
  GFR-binding peptide
  MOD_RES (2)..(34)..(35): Xaa is C or S
GXRDVVMGQYNKLIIQQKDNLYLMSIASMKTPTXX

SEQ ID NO: 78511 - protein, 37 aa, Artificial Sequence
  GFR-binding peptide
  MOD_RES (1)..(33)..(34): Xaa is C or S
XRDVVMGQYNKLIIQQKDNLYLMSIASMKTPTXXPGA

SEQ ID NO: 78512 - protein, 39 aa, Artificial Sequence
  GFR-binding peptide
  MOD_RES (2)..(4)..(36)..(37): Xaa is C or S
RXGXESVAMGQYNKLYTVVGKDLYLISIASLKTPVXXAK

SEQ ID NO: 78513 - protein, 36 aa, Artificial Sequence
  GFR-binding peptide
  MOD_RES (31)..(32): Xaa is C or S
EVVMDQYNKLVVNNAADLYLISIASLRAPVXXSAPA

SEQ ID NO: 78514 - protein, 34 aa, Artificial Sequence; identical to SEQ ID NO: 5769
  GFR-binding peptide
  MOD_RES (1)..(33)..(34): Xaa is C or S

SEQ ID NO: 78515 - protein, 40 aa, Artificial Sequence; identical to SEQ ID NO: 3838
  GFR-binding peptide
  MOD_RES (1)..(3)..(35)..(36): Xaa is C or S

SEQ ID NO: 78516 - protein, 35 aa, Artificial Sequence; identical to SEQ ID NO: 5770
  GFR-binding peptide
  MOD_RES (1)..(1): Xaa is C or S
  MOD_RES (14)..(15)..(16)..(17)..(18): Xaa is A or G
  MOD_RES (19)..(20)..(21)..(22): Xaa is A or G or is absent

SEQ ID NO: 78517 - protein, 41 aa, Artificial Sequence; identical to SEQ ID NO: 13208
  GFR-binding peptide
  MOD_RES (2)..(4)..(36)..(37): Xaa is C or S

SEQ ID NO: 78518 - protein, 37 aa, Artificial Sequence; identical to SEQ ID NO: 5771
  GFR-binding peptide
  MOD_RES (2)..(33)..(34): Xaa is C or S

SEQ ID NO: 78519 - protein, 39 aa, Artificial Sequence; identical to SEQ ID NO: 3840
  GFR-binding peptide
  MOD_RES (2)..(34): Xaa is C or S

SEQ ID NO: 78520 - protein, 35 aa, Artificial Sequence; identical to SEQ ID NO: 56817
  GFR-binding peptide
  MOD_RES (34)..(35): Xaa is C or S
  MOD_RES (12)..(13)..(14)..(15)..(16): Xaa is A or G
  MOD_RES (17)..(18)..(19)..(20): Xaa is A or G or is absent

SEQ ID NO: 78521 - protein, 38 aa, Artificial Sequence; identical to SEQ ID NO: 5773
  GFR-binding peptide
  MOD_RES (1)..(35)..(36): Xaa is C or S
  MOD_RES (13)..(14)..(15)..(16)..(17): Xaa is A or G
  MOD_RES (18)..(19)..(20)..(21): Xaa is A or G or is absent

SEQ ID NO: 78522 - protein, 36 aa, Artificial Sequence; identical to SEQ ID NO: 5774
  GFR-binding peptide
  MOD_RES (2)..(35)..(36): Xaa is C or S

SEQ ID NO: 78523 - protein, 43 aa, Artificial Sequence; identical to SEQ ID NO: 5778
  GFR-binding peptide
  MOD_RES (2)..(37)..(38): Xaa is C or S
  MOD_RES (15)..(16)..(17)..(18)..(19): Xaa is A or G
  MOD_RES (20)..(21)..(22)..(23): Xaa is A or G or is absent

SEQ ID NO: 78524 - protein, 33 aa, Artificial Sequence
  GFR-binding peptide
  MOD_RES (1)..(33): Xaa is C or S
XSEVTMNQYNKLVVNKNEDLYLISIASMKEPVX

SEQ ID NO: 78525 - protein, 40 aa, Artificial Sequence; identical to SEQ ID NO: 13213
  GFR-binding peptide
  MOD_RES (2)..(34)..(35): Xaa is C or S

SEQ ID NO: 78526 - protein, 38 aa, Artificial Sequence; identical to SEQ ID NO: 24894
  GFR-binding peptide
  MOD_RES (33)..(34): Xaa is C or S
  MOD_RES (11)..(12)..(13)..(14)..(15): Xaa is A or G
  MOD_RES (16)..(17)..(18)..(19): Xaa is A or G or is absent

SEQ ID NO: 78527 - protein, 40 aa, Artificial Sequence; identical to SEQ ID NO: 3845
  GFR-binding peptide
  MOD_RES (2)..(34)..(35): Xaa is C or S

SEQ ID NO: 78528 - protein, 37 aa, Artificial Sequence
  GFR-binding peptide
  MOD_RES (32)..(33): Xaa is C or S
AEVVMDQYNKLVVNNAADLYLISIASLRAPVXXSAPA

SEQ ID NO: 78529 - protein, 40 aa, Artificial Sequence
  GFR-binding peptide
  MOD_RES (2)..(4)..(37)..(38): Xaa is C or S
  MOD_RES (15)..(16)..(17)..(18)..(19): Xaa is A or G
  MOD_RES (20)..(21)..(22)..(23): Xaa is A or G or is absent
LXGXEEVIMQYNKLXXXXXXXXXLYLMSIASTKVPAXXTS

SEQ ID NO: 78530 - protein, 38 aa, Artificial Sequence; identical to SEQ ID NO: 24899
  GFR-binding peptide
  MOD_RES (1)..(35)..(36): Xaa is C or S
  MOD_RES (13)..(14)..(15)..(16)..(17): Xaa is A or G
  MOD_RES (18)..(19)..(20)..(21): Xaa is A or G or is absent

SEQ ID NO: 78531 - protein, 34 aa, Artificial Sequence; identical to SEQ ID NO: 3846
  GFR-binding peptide
  MOD_RES (2)..(33)..(34): Xaa is C or S

SEQ ID NO: 78532 - protein, 32 aa, Artificial Sequence; identical to SEQ ID NO: 5783
  GFR-binding peptide
  MOD_RES (1)..(32): Xaa is C or S

SEQ ID NO: 78533 - protein, 36 aa, Artificial Sequence; identical to SEQ ID NO: 56828
  GFR-binding peptide
  MOD_RES (1)..(3)..(35)..(36): Xaa is C or S

SEQ ID NO: 78534 - protein, 38 aa, Artificial Sequence; identical to SEQ ID NO: 5784
  GFR-binding peptide
  MOD_RES (32)..(33): Xaa is C or S

SEQ ID NO: 78535 - protein, 36 aa, Artificial Sequence; identical to SEQ ID NO: 3849
  GFR-binding peptide
  MOD_RES (33)..(34): Xaa is C or S
  MOD_RES (11)..(12)..(13)..(14)..(15): Xaa is A or G
  MOD_RES (16)..(17)..(18)..(19): Xaa is A or G or is absent

SEQ ID NO: 78536 - protein, 40 aa, Artificial Sequence; identical to SEQ ID NO: 5787
  GFR-binding peptide
  MOD_RES (1)..(3)..(35): Xaa is C or S

SEQ ID NO: 78537 - protein, 38 aa, Artificial Sequence
  GFR-binding peptide
  MOD_RES (2)..(34)..(35): Xaa is C or S
GXAEVVMDQYNKLVVNNAADLYLISIASLRAPVXXSAP

SEQ ID NO: 78538 - protein, 36 aa, Artificial Sequence; identical to SEQ ID NO: 5788
  GFR-binding peptide
  MOD_RES (34)..(35): Xaa is C or S
  MOD_RES (12)..(13)..(14)..(15)..(16): Xaa is A or G
  MOD_RES (17)..(18)..(19)..(20): Xaa is A or G or is absent

SEQ ID NO: 78539 - protein, 38 aa, Artificial Sequence; identical to SEQ ID NO: 11278
  GFR-binding peptide
  MOD_RES (2)..(36)..(37): Xaa is C or S
  MOD_RES (14)..(15)..(16)..(17)..(18): Xaa is A or G
  MOD_RES (19)..(20)..(21)..(22): Xaa is A or G or is absent

SEQ ID NO: 78540 - protein, 38 aa, Artificial Sequence
  GFR-binding peptide
  MOD_RES (2)..(34)..(35): Xaa is C or S
GXRDVVMGQYNKLIIQQKDNLYLMSIASMKTPTXXPGA

SEQ ID NO: 78541 - protein, 35 aa, Artificial Sequence; identical to SEQ ID NO: 63131
  GFR-binding peptide
  MOD_RES (1)..(3)..(35): Xaa is C or S

SEQ ID NO: 78542 - protein, 37 aa, Artificial Sequence; identical to SEQ ID NO: 59631
  GFR-binding peptide
  MOD_RES (1)..(35)..(36): Xaa is C or S
  MOD_RES (13)..(14)..(15)..(16)..(17): Xaa is A or G
  MOD_RES (18)..(19)..(20)..(21): Xaa is A or G or is absent

SEQ ID NO: 78543 - protein, 37 aa, Artificial Sequence
  GFR-binding peptide
  MOD_RES (2)..(34)..(35): Xaa is C or S
GXRDVVMGQYNKLIIQQKDNLYLMSIASMKTPTXXPG

SEQ ID NO: 78544 - protein, 33 aa, Artificial Sequence
  GFR-binding peptide
  MOD_RES (33)..(33): Xaa is C or S
  MOD_RES (11)..(12)..(13)..(14)..(15): Xaa is A or G
  MOD_RES (16)..(17)..(18)..(19): Xaa is A or G or is absent
EVVMDQYNKLXXXXXXXXXLYLISIASLRAPVX

SEQ ID NO: 78545 - protein, 37 aa, Artificial Sequence; identical to SEQ ID NO: 3854
  GFR-binding peptide
  MOD_RES (1)..(35)..(36): Xaa is C or S
  MOD_RES (13)..(14)..(15)..(16)..(17): Xaa is A or G
  MOD_RES (18)..(19)..(20)..(21): Xaa is A or G or is absent

SEQ ID NO: 78546 - protein, 36 aa, Artificial Sequence; identical to SEQ ID NO: 3855
  GFR-binding peptide
  MOD_RES (1)..(3)..(34)..(35): Xaa is C or S

SEQ ID NO: 78547 - protein, 42 aa, Artificial Sequence; identical to SEQ ID NO: 5798
  GFR-binding peptide
  MOD_RES (2)..(4)..(36)..(37): Xaa is C or S

SEQ ID NO: 78548 - protein, 32 aa, Artificial Sequence; identical to SEQ ID NO: 5799
  GFR-binding peptide
  MOD_RES (1)..(32): Xaa is C or S

SEQ ID NO: 78549 - protein, 38 aa, Artificial Sequence; identical to SEQ ID NO: 5801
  GFR-binding peptide
  MOD_RES (2)..(4)..(38): Xaa is C or S
  MOD_RES (16)..(17)..(18)..(19)..(20): Xaa is A or G
  MOD_RES (21)..(22)..(23)..(24): Xaa is A or G or is absent

SEQ ID NO: 78550 - protein, 39 aa, Artificial Sequence; identical to SEQ ID NO: 56844
  GFR-binding peptide
  MOD_RES (2)..(33)..(34): Xaa is C or S

SEQ ID NO: 78551 - protein, 38 aa, Artificial Sequence; identical to SEQ ID NO: 3859
  GFR-binding peptide
  MOD_RES (34)..(35): Xaa is C or S
  MOD_RES (12)..(13)..(14)..(15)..(16): Xaa is A or G
  MOD_RES (17)..(18)..(19)..(20): Xaa is A or G or is absent

SEQ ID NO: 78552 - protein, 41 aa, Artificial Sequence; identical to SEQ ID NO: 3860
  GFR-binding peptide
  MOD_RES (2)..(4)..(38)..(39): Xaa is C or S
  MOD_RES (16)..(17)..(18)..(19)..(20): Xaa is A or G
  MOD_RES (21)..(22)..(23)..(24): Xaa is A or G or is absent

SEQ ID NO: 78553 - protein, 40 aa, Artificial Sequence; identical to SEQ ID NO: 3861
  GFR-binding peptide
  MOD_RES (34)..(35): Xaa is C or S
  MOD_RES (12)..(13)..(14)..(15)..(16): Xaa is A or G
  MOD_RES (17)..(18)..(19)..(20): Xaa is A or G or is absent

SEQ ID NO: 78554 - protein, 39 aa, Artificial Sequence; identical to SEQ ID NO: 5802
  GFR-binding peptide
  MOD_RES (1)..(3)..(36)..(37): Xaa is C or S

SEQ ID NO: 78555 - protein, 38 aa, Artificial Sequence; identical to SEQ ID NO: 5803
  GFR-binding peptide
  MOD_RES (2)..(4)..(37)..(38): Xaa is C or S
  MOD_RES (15)..(16)..(17)..(18)..(19): Xaa is A or G
  MOD_RES (20)..(21)..(22)..(23): Xaa is A or G or is absent

SEQ ID NO: 78556 - protein, 36 aa, Artificial Sequence; identical to SEQ ID NO: 5804
  GFR-binding peptide
  MOD_RES (1)..(35)..(36): Xaa is C or S
  MOD_RES (13)..(14)..(15)..(16)..(17): Xaa is A or G
  MOD_RES (18)..(19)..(20)..(21): Xaa is A or G or is absent

SEQ ID NO: 78557 - protein, 42 aa, Artificial Sequence; identical to SEQ ID NO: 3864
  GFR-binding peptide
  MOD_RES (2)..(36)..(37): Xaa is C or S
  MOD_RES (14)..(15)..(16)..(17)..(18): Xaa is A or G
  MOD_RES (19)..(20)..(21)..(22): Xaa is A or G or is absent

SEQ ID NO: 78558 - protein, 41 aa, Artificial Sequence; identical to SEQ ID NO: 13238
  GFR-binding peptide
  MOD_RES (1)..(3)..(35)..(36): Xaa is C or S

SEQ ID NO: 78559 - protein, 39 aa, Artificial Sequence; identical to SEQ ID NO: 11295
  GFR-binding peptide
  MOD_RES (1)..(3)..(35)..(36): Xaa is C or S

SEQ ID NO: 78560 - protein, 37 aa, Artificial Sequence
  GFR-binding peptide
  MOD_RES (1)..(3)..(35)..(36): Xaa is C or S
XGXRDVVMGQYNKLIIQQKDNLYLMSIASMKTPTXXP

SEQ ID NO: 78561 - protein, 39 aa, Artificial Sequence; identical to SEQ ID NO: 56854
  GFR-binding peptide
  MOD_RES (33)..(34): Xaa is C or S
  MOD_RES (11)..(12)..(13)..(14)..(15): Xaa is A or G
  MOD_RES (16)..(17)..(18)..(19): Xaa is A or G or is absent

SEQ ID NO: 78562 - protein, 38 aa, Artificial Sequence; identical to SEQ ID NO: 3868
  GFR-binding peptide
  MOD_RES (1)..(3)..(35)..(36): Xaa is C or S

SEQ ID NO: 78563 - protein, 38 aa, Artificial Sequence
  GFR-binding peptide
  MOD_RES (33)..(34): Xaa is C or S
  MOD_RES (11)..(12)..(13)..(14)..(15): Xaa is A or G
  MOD_RES (16)..(17)..(18)..(19): Xaa is A or G or is absent
EVTMNQYNKLXXXXXXXXXLYLISIASMKEPVXXPEPI

SEQ ID NO: 78564 - protein, 31 aa, Artificial Sequence; identical to SEQ ID NO: 5810
  GFR-binding peptide
  MOD_RES (1)..(1): Xaa is C or S

SEQ ID NO: 78565 - protein, 36 aa, Artificial Sequence; identical to SEQ ID NO: 5811
  GFR-binding peptide
  MOD_RES (2)..(34)..(35): Xaa is C or S

SEQ ID NO: 78566 - protein, 37 aa, Artificial Sequence
  GFR-binding peptide
  MOD_RES (1)..(33)..(34): Xaa is C or S
XSEVTMNQYNKLVVNKNEDLYLISIASMKEPVXXPEP

SEQ ID NO: 78567 - protein, 31 aa, Artificial Sequence; identical to SEQ ID NO: 63155
  GFR-binding peptide

SEQ ID NO: 78568 - protein, 34 aa, Artificial Sequence; identical to SEQ ID NO: 5813
  GFR-binding peptide
  MOD_RES (2)..(4): Xaa is C or S

SEQ ID NO: 78569 - protein, 30 aa, Artificial Sequence; identical to SEQ ID NO: 5814
  GFR-binding peptide

SEQ ID NO: 78570 - protein, 41 aa, Artificial Sequence
  GFR-binding peptide
  MOD_RES (1)..(3)..(35)..(36): Xaa is C or S
XAXSEVTMNQYNKLVVNKNEDLYLISIASMKEPVXXPEPIG

SEQ ID NO: 78571 - protein, 41 aa, Artificial Sequence; identical to SEQ ID NO: 3872
  GFR-binding peptide
  MOD_RES (2)..(36)..(37): Xaa is C or S
  MOD_RES (14)..(15)..(16)..(17)..(18): Xaa is A or G
  MOD_RES (19)..(20)..(21)..(22): Xaa is A or G or is absent

SEQ ID NO: 78572 - protein, 39 aa, Artificial Sequence
  GFR-binding peptide
  MOD_RES (34)..(35): Xaa is C or S
  MOD_RES (12)..(13)..(14)..(15)..(16): Xaa is A or G
  MOD_RES (17)..(18)..(19)..(20): Xaa is A or G or is absent
ESVAMGQYNKLXXXXXXXXXLYLISIASLKTPVXXAKSA

SEQ ID NO: 78573 - protein, 33 aa, Artificial Sequence
  GFR-binding peptide
  MOD_RES (31)..(32): Xaa is C or S
EVVMDQYNKLVVNNAADLYLISIASLRAPVXXS

SEQ ID NO: 78574 - protein, 36 aa, Artificial Sequence
  GFR-binding peptide
  MOD_RES (1)..(33)..(34): Xaa is C or S
XESVAMGQYNKLYTVVGKDLYLISIASLKTPVXXAK

SEQ ID NO: 78575 - protein, 38 aa, Artificial Sequence; identical to SEQ ID NO: 5816
  GFR-binding peptide
  MOD_RES (2)..(33)..(34): Xaa is C or S

SEQ ID NO: 78576 - protein, 35 aa, Artificial Sequence; identical to SEQ ID NO: 13249
  GFR-binding peptide
  MOD_RES (2)..(4): Xaa is C or S

SEQ ID NO: 78577 - protein, 36 aa, Artificial Sequence; identical to SEQ ID NO: 3875
  GFR-binding peptide
  MOD_RES (2)..(4)..(36): Xaa is C or S

SEQ ID NO: 78578 - protein, 38 aa, Artificial Sequence; identical to SEQ ID NO: 5818
  GFR-binding peptide
  MOD_RES (1)..(3)..(34)..(35): Xaa is C or S

SEQ ID NO: 78579 - protein, 42 aa, Artificial Sequence; identical to SEQ ID NO: 3876
  GFR-binding peptide
  MOD_RES (2)..(4)..(37)..(38): Xaa is C or S
  MOD_RES (15)..(16)..(17)..(18)..(19): Xaa is A or G
  MOD_RES (20)..(21)..(22)..(23): Xaa is A or G or is absent

SEQ ID NO: 78580 - protein, 33 aa, Artificial Sequence; identical to SEQ ID NO: 3877
  GFR-binding peptide
  MOD_RES (32)..(33): Xaa is C or S

SEQ ID NO: 78581 - protein, 38 aa, Artificial Sequence; identical to SEQ ID NO: 11304
  GFR-binding peptide
  MOD_RES (2)..(4)..(38): Xaa is C or S
  MOD_RES (16)..(17)..(18)..(19)..(20): Xaa is A or G
  MOD_RES (21)..(22)..(23)..(24): Xaa is A or G or is absent

SEQ ID NO: 78582 - protein, 41 aa, Artificial Sequence; identical to SEQ ID NO: 5821
  GFR-binding peptide
  MOD_RES (1)..(36)..(37): Xaa is C or S
  MOD_RES (14)..(15)..(16)..(17)..(18): Xaa is A or G
  MOD_RES (19)..(20)..(21)..(22): Xaa is A or G or is absent

SEQ ID NO: 78583 - protein, 42 aa, Artificial Sequence; identical to SEQ ID NO: 64886
  GFR-binding peptide
  MOD_RES (2)..(4)..(36)..(37): Xaa is C or S

SEQ ID NO: 78584 - protein, 37 aa, Artificial Sequence; identical to SEQ ID NO: 3879
  GFR-binding peptide
  MOD_RES (1)..(34)..(35): Xaa is C or S

SEQ ID NO: 78585 - protein, 35 aa, Artificial Sequence; identical to SEQ ID NO: 5822
  GFR-binding peptide
  MOD_RES (1)..(32)..(33): Xaa is C or S

SEQ ID NO: 78586 - protein, 39 aa, Artificial Sequence; identical to SEQ ID NO: 5823
  GFR-binding peptide
  MOD_RES (34)..(35): Xaa is C or S
  MOD_RES (12)..(13)..(14)..(15)..(16): Xaa is A or G
  MOD_RES (17)..(18)..(19)..(20): Xaa is A or G or is absent

SEQ ID NO: 78587 - protein, 35 aa, Artificial Sequence; identical to SEQ ID NO: 11305
  GFR-binding peptide
  MOD_RES (32)..(33): Xaa is C or S

SEQ ID NO: 78588 - protein, 36 aa, Artificial Sequence; identical to SEQ ID NO: 63162
  GFR-binding peptide
  MOD_RES (2)..(34)..(35): Xaa is C or S

SEQ ID NO: 78589 - protein, 32 aa, Artificial Sequence
  GFR-binding peptide
  MOD_RES (31)..(32): Xaa is C or S
SVAMGQYNKLYTVVGKDLYLISIASLKTPVXX

SEQ ID NO: 78590 - protein, 36 aa, Artificial Sequence; identical to SEQ ID NO: 3882
  GFR-binding peptide
  MOD_RES (31)..(32): Xaa is C or S

SEQ ID NO: 78591 - protein, 36 aa, Artificial Sequence
  GFR-binding peptide
  MOD_RES (1)..(35)..(36): Xaa is C or S
  MOD_RES (13)..(14)..(15)..(16)..(17): Xaa is A or G
  MOD_RES (18)..(19)..(20)..(21): Xaa is A or G or is absent
XESVAMGQYNKLXXXXXXXXXLYLISIASLKTPVXX

SEQ ID NO: 78592 - protein, 34 aa, Artificial Sequence; identical to SEQ ID NO: 5826
  GFR-binding peptide
  MOD_RES (32)..(33): Xaa is C or S

SEQ ID NO: 78593 - protein, 33 aa, Artificial Sequence; identical to SEQ ID NO: 56875
  GFR-binding peptide
  MOD_RES (31)..(32): Xaa is C or S

SEQ ID NO: 78594 - protein, 34 aa, Artificial Sequence; identical to SEQ ID NO: 13260
  GFR-binding peptide
  MOD_RES (34)..(34): Xaa is C or S
  MOD_RES (12)..(13)..(14)..(15)..(16): Xaa is A or G
  MOD_RES (17)..(18)..(19)..(20): Xaa is A or G or is absent

SEQ ID NO: 78595 - protein, 39 aa, Artificial Sequence; identical to SEQ ID NO: 3883
  GFR-binding peptide
  MOD_RES (1)..(3)..(35)..(36): Xaa is C or S

SEQ ID NO: 78596 - protein, 44 aa, Artificial Sequence
  GFR-binding peptide
  MOD_RES (2)..(4)..(38)..(39): Xaa is C or S
  MOD_RES (16)..(17)..(18)..(19)..(20): Xaa is A or G
  MOD_RES (21)..(22)..(23)..(24): Xaa is A or G or is absent
RXAXSEVTMNQYNKLXXXXXXXXXLYLISIASMKEPVXXPEPIG

SEQ ID NO: 78597 - protein, 43 aa, Artificial Sequence; identical to SEQ ID NO: 56884
  GFR-binding peptide
  MOD_RES (2)..(4)..(38)..(39): Xaa is C or S
  MOD_RES (16)..(17)..(18)..(19)..(20): Xaa is A or G
  MOD_RES (21)..(22)..(23)..(24): Xaa is A or G or is absent

SEQ ID NO: 78598 - protein, 36 aa, Artificial Sequence; identical to SEQ ID NO: 5831
  GFR-binding peptide
  MOD_RES (2)..(2): Xaa is C or S
  MOD_RES (15)..(16)..(17)..(18)..(19): Xaa is A or G
  MOD_RES (20)..(21)..(22)..(23): Xaa is A or G or is absent

SEQ ID NO: 78599 - protein, 33 aa, Artificial Sequence; identical to SEQ ID NO: 5834
  GFR-binding peptide
  MOD_RES (2)..(2): Xaa is C or S

SEQ ID NO: 78600 - protein, 42 aa, Artificial Sequence
  GFR-binding peptide
  MOD_RES (1)..(3)..(36)..(37): Xaa is C or S
  MOD_RES (14)..(15)..(16)..(17)..(18): Xaa is A or G
  MOD_RES (19)..(20)..(21)..(22): Xaa is A or G or is absent
XGXEEVIMQYNKLXXXXXXXXXLYLMSIASTKVPAXXTSPVR

SEQ ID NO: 78601 - protein, 33 aa, Artificial Sequence; identical to SEQ ID NO: 3886
  GFR-binding peptide
  MOD_RES (2)..(2): Xaa is C or S

SEQ ID NO: 78602 - protein, 31 aa, Artificial Sequence
  GFR-binding peptide
AEVVMDQYNKLVVNNAADLYLISIASLRAPV

SEQ ID NO: 78603 - protein, 40 aa, Artificial Sequence; identical to SEQ ID NO: 3887
  GFR-binding peptide
  MOD_RES (35)..(36): Xaa is C or S
  MOD_RES (13)..(14)..(15)..(16)..(17): Xaa is A or G
  MOD_RES (18)..(19)..(20)..(21): Xaa is A or G or is absent

SEQ ID NO: 78604 - protein, 38 aa, Artificial Sequence; identical to SEQ ID NO: 3888
  GFR-binding peptide
  MOD_RES (1)..(3)..(34)..(35): Xaa is C or S

SEQ ID NO: 78605 - protein, 41 aa, Artificial Sequence; identical to SEQ ID NO: 26962
  GFR-binding peptide
  MOD_RES (1)..(3)..(35)..(36): Xaa is C or S

SEQ ID NO: 78606 - protein, 37 aa, Artificial Sequence; identical to SEQ ID NO: 5836
  GFR-binding peptide
  MOD_RES (2)..(35)..(36): Xaa is C or S
  MOD_RES (13)..(14)..(15)..(16)..(17): Xaa is A or G
  MOD_RES (18)..(19)..(20)..(21): Xaa is A or G or is absent

SEQ ID NO: 78607 - protein, 34 aa, Artificial Sequence; identical to SEQ ID NO: 13270
  GFR-binding peptide
  MOD_RES (34)..(34): Xaa is C or S
  MOD_RES (12)..(13)..(14)..(15)..(16): Xaa is A or G
  MOD_RES (17)..(18)..(19)..(20): Xaa is A or G or is absent

SEQ ID NO: 78608 - protein, 38 aa, Artificial Sequence; identical to SEQ ID NO: 56895
  GFR-binding peptide
  MOD_RES (1)..(3)..(34)..(35): Xaa is C or S

SEQ ID NO: 78609 - protein, 34 aa, Artificial Sequence; identical to SEQ ID NO: 5839
  GFR-binding peptide
  MOD_RES (31)..(32): Xaa is C or S

SEQ ID NO: 78610 - protein, 35 aa, Artificial Sequence
  GFR-binding peptide
  MOD_RES (31)..(32): Xaa is C or S
EVVMDQYNKLVVNNAADLYLISIASLRAPVXXSAP

SEQ ID NO: 78611 - protein, 40 aa, Artificial Sequence; identical to SEQ ID NO: 3895
  GFR-binding peptide
  MOD_RES (1)..(3)..(35)..(36): Xaa is C or S

SEQ ID NO: 78612 - protein, 41 aa, Artificial Sequence; identical to SEQ ID NO: 5840
  GFR-binding peptide
  MOD_RES (1)..(3)..(36)..(37): Xaa is C or S
  MOD_RES (14)..(15)..(16)..(17)..(18): Xaa is A or G
  MOD_RES (19)..(20)..(21)..(22): Xaa is A or G or is absent

SEQ ID NO: 78613 - protein, 36 aa, Artificial Sequence; identical to SEQ ID NO: 5841
  GFR-binding peptide
  MOD_RES (2)..(33)..(34): Xaa is C or S

SEQ ID NO: 78614 - protein, 34 aa, Artificial Sequence; identical to SEQ ID NO: 3896
  GFR-binding peptide
  MOD_RES (1)..(3): Xaa is C or S

SEQ ID NO: 78615 - protein, 39 aa, Artificial Sequence; identical to SEQ ID NO: 13275
  GFR-binding peptide
  MOD_RES (1)..(33)..(34): Xaa is C or S

SEQ ID NO: 78616 - protein, 42 aa, Artificial Sequence; identical to SEQ ID NO: 3898
  GFR-binding peptide
  MOD_RES (2)..(4)..(36)..(37): Xaa is C or S

SEQ ID NO: 78617 - protein, 39 aa, Artificial Sequence; identical to SEQ ID NO: 5847
  GFR-binding peptide
  MOD_RES (33)..(34): Xaa is C or S
  MOD_RES (11)..(12)..(13)..(14)..(15): Xaa is A or G
  MOD_RES (16)..(17)..(18)..(19): Xaa is A or G or is absent

SEQ ID NO: 78618 - protein, 35 aa, Artificial Sequence; identical to SEQ ID NO: 5848
  GFR-binding peptide
  MOD_RES (2)..(33)..(34): Xaa is C or S

SEQ ID NO: 78619 - protein, 39 aa, Artificial Sequence; identical to SEQ ID NO: 5849
  GFR-binding peptide
  MOD_RES (2)..(34)..(35): Xaa is C or S

SEQ ID NO: 78620 - protein, 36 aa, Artificial Sequence; identical to SEQ ID NO: 3899
  GFR-binding peptide
  MOD_RES (2)..(34)..(35): Xaa is C or S

SEQ ID NO: 78621 - protein, 35 aa, Artificial Sequence; identical to SEQ ID NO: 64915
  GFR-binding peptide
  MOD_RES (2)..(4): Xaa is C or S

SEQ ID NO: 78622 - protein, 37 aa, Artificial Sequence; identical to SEQ ID NO: 3901
  GFR-binding peptide
  MOD_RES (2)..(4)..(35)..(36): Xaa is C or S

SEQ ID NO: 78623 - protein, 37 aa, Artificial Sequence; identical to SEQ ID NO: 56907
  GFR-binding peptide
  MOD_RES (1)..(32)..(33): Xaa is C or S

SEQ ID NO: 78624 - protein, 32 aa, Artificial Sequence; identical to SEQ ID NO: 24983
  GFR-binding peptide
  MOD_RES (1)..(1): Xaa is C or S

SEQ ID NO: 78625 - protein, 37 aa, Artificial Sequence; identical to SEQ ID NO: 5853
  GFR-binding peptide
  MOD_RES (32)..(33): Xaa is C or S

SEQ ID NO: 78626 - protein, 39 aa, Artificial Sequence
  GFR-binding peptide
  MOD_RES (2)..(4)..(38)..(39): Xaa is C or S
  MOD_RES (16)..(17)..(18)..(19)..(20): Xaa is A or G
  MOD_RES (21)..(22)..(23)..(24): Xaa is A or G or is absent
RXGXESVAMGQYNKLXXXXXXXXXLYLISIASLKTPVXX

SEQ ID NO: 78627 - protein, 37 aa, Artificial Sequence; identical to SEQ ID NO: 26986
  GFR-binding peptide
  MOD_RES (32)..(33): Xaa is C or S

SEQ ID NO: 78628 - protein, 41 aa, Artificial Sequence; identical to SEQ ID NO: 5860
  GFR-binding peptide
  MOD_RES (2)..(4)..(38)..(39): Xaa is C or S
  MOD_RES (16)..(17)..(18)..(19)..(20): Xaa is A or G
  MOD_RES (21)..(22)..(23)..(24): Xaa is A or G or is absent

SEQ ID NO: 78629 - protein, 37 aa, Artificial Sequence; identical to SEQ ID NO: 5861
  GFR-binding peptide
  MOD_RES (31)..(32): Xaa is C or S

SEQ ID NO: 78630 - protein, 36 aa, Artificial Sequence; identical to SEQ ID NO: 5863
  GFR-binding peptide
  MOD_RES (32)..(32): Xaa is C or S

SEQ ID NO: 78631 - protein, 35 aa, Artificial Sequence
  GFR-binding peptide
  MOD_RES (31)..(32): Xaa is C or S
DVVMGQYNKLIIQQKDNLYLMSIASMKTPTXXPGA

SEQ ID NO: 78632 - protein, 36 aa, Artificial Sequence
  GFR-binding peptide
  MOD_RES (2)..(4)..(36): Xaa is C or S
SXGXRDVVMGQYNKLIIQQKDNLYLMSIASMKTPTX

SEQ ID NO: 78633 - protein, 34 aa, Artificial Sequence; identical to SEQ ID NO: 5865
  GFR-binding peptide
  MOD_RES (32)..(33): Xaa is C or S

SEQ ID NO: 78634 - protein, 31 aa, Artificial Sequence
  GFR-binding peptide
  MOD_RES (31)..(31): Xaa is C or S
EVTMNQYNKLVVNKNEDLYLISIASMKEPVX

SEQ ID NO: 78635 - protein, 37 aa, Artificial Sequence; identical to SEQ ID NO: 3907
  GFR-binding peptide
  MOD_RES (1)..(3)..(37): Xaa is C or S
  MOD_RES (15)..(16)..(17)..(18)..(19): Xaa is A or G
  MOD_RES (20)..(21)..(22)..(23): Xaa is A or G or is absent

SEQ ID NO: 78636 - protein, 31 aa, Artificial Sequence; identical to SEQ ID NO: 5867
  GFR-binding peptide

SEQ ID NO: 78637 - protein, 37 aa, Artificial Sequence; identical to SEQ ID NO: 26993
  GFR-binding peptide
  MOD_RES (33)..(34): Xaa is C or S
  MOD_RES (11)..(12)..(13)..(14)..(15): Xaa is A or G
  MOD_RES (16)..(17)..(18)..(19): Xaa is A or G or is absent

SEQ ID NO: 78638 - protein, 40 aa, Artificial Sequence; identical to SEQ ID NO: 5868
  GFR-binding peptide
  MOD_RES (2)..(4)..(38)..(39): Xaa is C or S
  MOD_RES (16)..(17)..(18)..(19)..(20): Xaa is A or G
  MOD_RES (21)..(22)..(23)..(24): Xaa is A or G or is absent

SEQ ID NO: 78639 - protein, 35 aa, Artificial Sequence; identical to SEQ ID NO: 3910
  GFR-binding peptide
  MOD_RES (31)..(32): Xaa is C or S

SEQ ID NO: 78640 - protein, 41 aa, Artificial Sequence; identical to SEQ ID NO: 3911
  GFR-binding peptide
  MOD_RES (2)..(35)..(36): Xaa is C or S
  MOD_RES (13)..(14)..(15)..(16)..(17): Xaa is A or G
  MOD_RES (18)..(19)..(20)..(21): Xaa is A or G or is absent

SEQ ID NO: 78641 - protein, 40 aa, Artificial Sequence; identical to SEQ ID NO: 5869
  GFR-binding peptide
  MOD_RES (1)..(3)..(37)..(38): Xaa is C or S
  MOD_RES (15)..(16)..(17)..(18)..(19): Xaa is A or G
  MOD_RES (20)..(21)..(22)..(23): Xaa is A or G or is absent

SEQ ID NO: 78642 - protein, 33 aa, Artificial Sequence; identical to SEQ ID NO: 56924
  GFR-binding peptide
  MOD_RES (2)..(2): Xaa is C or S

SEQ ID NO: 78643 - protein, 41 aa, Artificial Sequence; identical to SEQ ID NO: 11333
  GFR-binding peptide
  MOD_RES (2)..(4)..(38)..(39): Xaa is C or S
  MOD_RES (16)..(17)..(18)..(19)..(20): Xaa is A or G
  MOD_RES (21)..(22)..(23)..(24): Xaa is A or G or is absent

SEQ ID NO: 78644 - protein, 40 aa, Artificial Sequence; identical to SEQ ID NO: 3914
  GFR-binding peptide
  MOD_RES (2)..(35)..(36): Xaa is C or S

SEQ ID NO: 78645 - protein, 37 aa, Artificial Sequence; identical to SEQ ID NO: 5871
  GFR-binding peptide
  MOD_RES (1)..(33)..(34): Xaa is C or S

SEQ ID NO: 78646 - protein, 42 aa, Artificial Sequence
  GFR-binding peptide
  MOD_RES (2)..(36)..(37): Xaa is C or S
  MOD_RES (14)..(15)..(16)..(17)..(18): Xaa is A or G
  MOD_RES (19)..(20)..(21)..(22): Xaa is A or G or is absent
GXRDVVMGQYNKLXXXXXXXXXLYLMSIASMKTPTXXPGASG

SEQ ID NO: 78647 - protein, 32 aa, Artificial Sequence; identical to SEQ ID NO: 5873
  GFR-binding peptide
  MOD_RES (31)..(32): Xaa is C or S

SEQ ID NO: 78648 - protein, 34 aa, Artificial Sequence; identical to SEQ ID NO: 5874
  GFR-binding peptide
  MOD_RES (33)..(34): Xaa is C or S
  MOD_RES (11)..(12)..(13)..(14)..(15): Xaa is A or G
  MOD_RES (16)..(17)..(18)..(19): Xaa is A or G or is absent

SEQ ID NO: 78649 - protein, 34 aa, Artificial Sequence
  GFR-binding peptide
  MOD_RES (34)..(34): Xaa is C or S
  MOD_RES (12)..(13)..(14)..(15)..(16): Xaa is A or G
  MOD_RES (17)..(18)..(19)..(20): Xaa is A or G or is absent
SEVTMNQYNKLXXXXXXXXXLYLISIASMKEPVX

SEQ ID NO: 78650 - protein, 39 aa, Artificial Sequence; identical to SEQ ID NO: 3918
  GFR-binding peptide
  MOD_RES (33)..(34): Xaa is C or S
  MOD_RES (11)..(12)..(13)..(14)..(15): Xaa is A or G
  MOD_RES (16)..(17)..(18)..(19): Xaa is A or G or is absent

SEQ ID NO: 78651 - protein, 34 aa, Artificial Sequence
  GFR-binding peptide
  MOD_RES (31)..(32): Xaa is C or S
SVAMGQYNKLYTVVGKDLYLISIASLKTPVXXAK

SEQ ID NO: 78652 - protein, 37 aa, Artificial Sequence; identical to SEQ ID NO: 3923
  GFR-binding peptide
  MOD_RES (2)..(4)..(36): Xaa is C or S

SEQ ID NO: 78653 - protein, 34 aa, Artificial Sequence; identical to SEQ ID NO: 5878
  GFR-binding peptide
  MOD_RES (1)..(1): Xaa is C or S
  MOD_RES (13)..(14)..(15)..(16)..(17): Xaa is A or G
  MOD_RES (18)..(19)..(20)..(21): Xaa is A or G or is absent

SEQ ID NO: 78654 - protein, 36 aa, Artificial Sequence; identical to SEQ ID NO: 5880
  GFR-binding peptide
  MOD_RES (33)..(34): Xaa is C or S
  MOD_RES (11)..(12)..(13)..(14)..(15): Xaa is A or G
  MOD_RES (16)..(17)..(18)..(19): Xaa is A or G or is absent

SEQ ID NO: 78655 - protein, 41 aa, Artificial Sequence
  GFR-binding peptide
  MOD_RES (2)..(4)..(36)..(37): Xaa is C or S
RXAXSEVTMNQYNKLVVNKNEDLYLISIASMKEPVXXPEPI

SEQ ID NO: 78656 - protein, 43 aa, Artificial Sequence; identical to SEQ ID NO: 5882
  GFR-binding peptide
  MOD_RES (2)..(4)..(37)..(38): Xaa is C or S
  MOD_RES (15)..(16)..(17)..(18)..(19): Xaa is A or G
  MOD_RES (20)..(21)..(22)..(23): Xaa is A or G or is absent

SEQ ID NO: 78657 - protein, 33 aa, Artificial Sequence
  GFR-binding peptide
  MOD_RES (1)..(33): Xaa is C or S
XRDVVMGQYNKLIIQQKDNLYLMSIASMKTPTX

SEQ ID NO: 78658 - protein, 41 aa, Artificial Sequence; identical to SEQ ID NO: 5883
  GFR-binding peptide
  MOD_RES (2)..(4)..(35)..(36): Xaa is C or S

SEQ ID NO: 78659 - protein, 35 aa, Artificial Sequence
  GFR-binding peptide
  MOD_RES (1)..(3)..(35): Xaa is C or S
XGXAEVVMDQYNKLVVNNAADLYLISIASLRAPVX

SEQ ID NO: 78660 - protein, 35 aa, Artificial Sequence; identical to SEQ ID NO: 5884
  GFR-binding peptide
  MOD_RES (31)..(32): Xaa is C or S

SEQ ID NO: 78661 - protein, 38 aa, Artificial Sequence; identical to SEQ ID NO: 3927
  GFR-binding peptide
  MOD_RES (33)..(34): Xaa is C or S
  MOD_RES (11)..(12)..(13)..(14)..(15): Xaa is A or G
  MOD_RES (16)..(17)..(18)..(19): Xaa is A or G or is absent

SEQ ID NO: 78662 - protein, 35 aa, Artificial Sequence; identical to SEQ ID NO: 5885
  GFR-binding peptide
  MOD_RES (2)..(34)..(35): Xaa is C or S

SEQ ID NO: 78663 - protein, 32 aa, Artificial Sequence; identical to SEQ ID NO: 56937
  GFR-binding peptide
  MOD_RES (2)..(2): Xaa is C or S

SEQ ID NO: 78664 - protein, 36 aa, Artificial Sequence; identical to SEQ ID NO: 5886
  GFR-binding peptide
  MOD_RES (2)..(4)..(36): Xaa is C or S

SEQ ID NO: 78665 - protein, 35 aa, Artificial Sequence; identical to SEQ ID NO: 3930
  GFR-binding peptide
  MOD_RES (1)..(33)..(34): Xaa is C or S

SEQ ID NO: 78666 - protein, 35 aa, Artificial Sequence; identical to SEQ ID NO: 3931
  GFR-binding peptide
  MOD_RES (33)..(34): Xaa is C or S
  MOD_RES (11)..(12)..(13)..(14)..(15): Xaa is A or G
  MOD_RES (16)..(17)..(18)..(19): Xaa is A or G or is absent

SEQ ID NO: 78667 - protein, 36 aa, Artificial Sequence; identical to SEQ ID NO: 25010
  GFR-binding peptide
  MOD_RES (2)..(4)..(36): Xaa is C or S

SEQ ID NO: 78668 - protein, 40 aa, Artificial Sequence
  GFR-binding peptide
  MOD_RES (2)..(36)..(37): Xaa is C or S
  MOD_RES (14)..(15)..(16)..(17)..(18): Xaa is A or G
  MOD_RES (19)..(20)..(21)..(22): Xaa is A or G or is absent
GXAEVVMDQYNKLXXXXXXXXXLYLISIASLRAPVXXSAP

SEQ ID NO: 78669 - protein, 39 aa, Artificial Sequence; identical to SEQ ID NO: 5888
  GFR-binding peptide
  MOD_RES (1)..(34)..(35): Xaa is C or S
  MOD_RES (12)..(13)..(14)..(15)..(16): Xaa is A or G
  MOD_RES (17)..(18)..(19)..(20): Xaa is A or G or is absent

SEQ ID NO: 78670 - protein, 35 aa, Artificial Sequence; identical to SEQ ID NO: 3933
  GFR-binding peptide
  MOD_RES (1)..(3)..(34)..(35): Xaa is C or S

SEQ ID NO: 78671 - protein, 35 aa, Artificial Sequence; identical to SEQ ID NO: 11350
  GFR-binding peptide
  MOD_RES (32)..(33): Xaa is C or S

SEQ ID NO: 78672 - protein, 41 aa, Artificial Sequence; identical to SEQ ID NO: 13317
  GFR-binding peptide
  MOD_RES (1)..(3)..(37)..(38): Xaa is C or S
  MOD_RES (15)..(16)..(17)..(18)..(19): Xaa is A or G
  MOD_RES (20)..(21)..(22)..(23): Xaa is A or G or is absent

SEQ ID NO: 78673 - protein, 38 aa, Artificial Sequence; identical to SEQ ID NO: 5890
  GFR-binding peptide
  MOD_RES (1)..(3)..(35)..(36): Xaa is C or S

SEQ ID NO: 78674 - protein, 35 aa, Artificial Sequence; identical to SEQ ID NO: 5891
  GFR-binding peptide
  MOD_RES (1)..(35): Xaa is C or S
  MOD_RES (13)..(14)..(15)..(16)..(17): Xaa is A or G
  MOD_RES (18)..(19)..(20)..(21): Xaa is A or G or is absent

SEQ ID NO: 78675 - protein, 40 aa, Artificial Sequence; identical to SEQ ID NO: 56949
  GFR-binding peptide
  MOD_RES (1)..(34)..(35): Xaa is C or S
  MOD_RES (12)..(13)..(14)..(15)..(16): Xaa is A or G
  MOD_RES (17)..(18)..(19)..(20): Xaa is A or G or is absent

SEQ ID NO: 78676 - protein, 33 aa, Artificial Sequence; identical to SEQ ID NO: 5894
  GFR-binding peptide
  MOD_RES (1)..(1): Xaa is C or S
  MOD_RES (12)..(13)..(14)..(15)..(16): Xaa is A or G
  MOD_RES (17)..(18)..(19)..(20): Xaa is A or G or is absent

SEQ ID NO: 78677 - protein, 38 aa, Artificial Sequence; identical to SEQ ID NO: 13321
  GFR-binding peptide
  MOD_RES (2)..(36)..(37): Xaa is C or S
  MOD_RES (14)..(15)..(16)..(17)..(18): Xaa is A or G
  MOD_RES (19)..(20)..(21)..(22): Xaa is A or G or is absent

SEQ ID NO: 78678 - protein, 39 aa, Artificial Sequence; identical to SEQ ID NO: 25023
  GFR-binding peptide
  MOD_RES (34)..(35): Xaa is C or S
  MOD_RES (12)..(13)..(14)..(15)..(16): Xaa is A or G
  MOD_RES (17)..(18)..(19)..(20): Xaa is A or G or is absent

SEQ ID NO: 78679 - protein, 38 aa, Artificial Sequence; identical to SEQ ID NO: 3941
  GFR-binding peptide
  MOD_RES (1)..(33): Xaa is C or S

SEQ ID NO: 78680 - protein, 36 aa, Artificial Sequence; identical to SEQ ID NO: 5899
  GFR-binding peptide
  MOD_RES (1)..(3): Xaa is C or S
  MOD_RES (15)..(16)..(17)..(18)..(19): Xaa is A or G
  MOD_RES (20)..(21)..(22)..(23): Xaa is A or G or is absent

SEQ ID NO: 78681 - protein, 38 aa, Artificial Sequence; identical to SEQ ID NO: 3942
  GFR-binding peptide
  MOD_RES (2)..(4)..(37)..(38): Xaa is C or S
  MOD_RES (15)..(16)..(17)..(18)..(19): Xaa is A or G
  MOD_RES (20)..(21)..(22)..(23): Xaa is A or G or is absent

SEQ ID NO: 78682 - protein, 35 aa, Artificial Sequence; identical to SEQ ID NO: 3943
  GFR-binding peptide
  MOD_RES (1)..(3)..(34)..(35): Xaa is C or S

SEQ ID NO: 78683 - protein, 42 aa, Artificial Sequence; identical to SEQ ID NO: 5901
  GFR-binding peptide
  MOD_RES (2)..(4)..(38)..(39): Xaa is C or S
  MOD_RES (16)..(17)..(18)..(19)..(20): Xaa is A or G
  MOD_RES (21)..(22)..(23)..(24): Xaa is A or G or is absent

SEQ ID NO: 78684 - protein, 33 aa, Artificial Sequence
  GFR-binding peptide
  MOD_RES (33)..(33): Xaa is C or S
  MOD_RES (11)..(12)..(13)..(14)..(15): Xaa is A or G
  MOD_RES (16)..(17)..(18)..(19): Xaa is A or G or is absent
SVAMGQYNKLXXXXXXXXXLYLISIASLKTPVX

SEQ ID NO: 78685 - protein, 34 aa, Artificial Sequence
  GFR-binding peptide
  MOD_RES (1)..(33)..(34): Xaa is C or S
XAEVVMDQYNKLVVNNAADLYLISIASLRAPVXX

SEQ ID NO: 78686 - protein, 32 aa, Artificial Sequence; identical to SEQ ID NO: 5902
  GFR-binding peptide
  MOD_RES (2)..(2): Xaa is C or S

SEQ ID NO: 78687 - protein, 39 aa, Artificial Sequence; identical to SEQ ID NO: 5904
  GFR-binding peptide
  MOD_RES (2)..(4)..(37)..(38): Xaa is C or S
  MOD_RES (15)..(16)..(17)..(18)..(19): Xaa is A or G
  MOD_RES (20)..(21)..(22)..(23): Xaa is A or G or is absent

SEQ ID NO: 78688 - protein, 38 aa, Artificial Sequence; identical to SEQ ID NO: 5905
  GFR-binding peptide
  MOD_RES (1)..(35)..(36): Xaa is C or S
  MOD_RES (13)..(14)..(15)..(16)..(17): Xaa is A or G
  MOD_RES (18)..(19)..(20)..(21): Xaa is A or G or is absent

SEQ ID NO: 78689 - protein, 39 aa, Artificial Sequence; identical to SEQ ID NO: 5907
  GFR-binding peptide
  MOD_RES (2)..(4)..(36)..(37): Xaa is C or S

SEQ ID NO: 78690 - protein, 37 aa, Artificial Sequence; identical to SEQ ID NO: 27026
  GFR-binding peptide
  MOD_RES (2)..(4)..(36)..(37): Xaa is C or S

SEQ ID NO: 78691 - protein, 41 aa, Artificial Sequence; identical to SEQ ID NO: 3947
  GFR-binding peptide
  MOD_RES (1)..(3)..(35): Xaa is C or S

SEQ ID NO: 78692 - protein, 39 aa, Artificial Sequence; identical to SEQ ID NO: 3948
  GFR-binding peptide
  MOD_RES (1)..(3)..(37)..(38): Xaa is C or S
  MOD_RES (15)..(16)..(17)..(18)..(19): Xaa is A or G
  MOD_RES (20)..(21)..(22)..(23): Xaa is A or G or is absent

SEQ ID NO: 78693 - protein, 39 aa, Artificial Sequence; identical to SEQ ID NO: 3949
  GFR-binding peptide
  MOD_RES (2)..(36)..(37): Xaa is C or S
  MOD_RES (14)..(15)..(16)..(17)..(18): Xaa is A or G
  MOD_RES (19)..(20)..(21)..(22): Xaa is A or G or is absent

SEQ ID NO: 78694 - protein, 34 aa, Artificial Sequence; identical to SEQ ID NO: 3950
  GFR-binding peptide
  MOD_RES (1)..(3): Xaa is C or S

SEQ ID NO: 78695 - protein, 38 aa, Artificial Sequence; identical to SEQ ID NO: 5909
  GFR-binding peptide
  MOD_RES (2)..(36): Xaa is C or S
  MOD_RES (14)..(15)..(16)..(17)..(18): Xaa is A or G
  MOD_RES (19)..(20)..(21)..(22): Xaa is A or G or is absent

SEQ ID NO: 78696 - protein, 40 aa, Artificial Sequence
  GFR-binding peptide
  MOD_RES (1)..(35)..(36): Xaa is C or S
  MOD_RES (13)..(14)..(15)..(16)..(17): Xaa is A or G
  MOD_RES (18)..(19)..(20)..(21): Xaa is A or G or is absent
XAEVVMDQYNKLXXXXXXXXXLYLISIASLRAPVXXSAPA

SEQ ID NO: 78697 - protein, 40 aa, Artificial Sequence; identical to SEQ ID NO: 5912
  GFR-binding peptide
  MOD_RES (2)..(4)..(38)..(39): Xaa is C or S
  MOD_RES (16)..(17)..(18)..(19)..(20): Xaa is A or G
  MOD_RES (21)..(22)..(23)..(24): Xaa is A or G or is absent

SEQ ID NO: 78698 - protein, 40 aa, Artificial Sequence; identical to SEQ ID NO: 3952
  GFR-binding peptide
  MOD_RES (34)..(35): Xaa is C or S
  MOD_RES (12)..(13)..(14)..(15)..(16): Xaa is A or G
  MOD_RES (17)..(18)..(19)..(20): Xaa is A or G or is absent

SEQ ID NO: 78699 - protein, 37 aa, Artificial Sequence
  GFR-binding peptide
  MOD_RES (2)..(36)..(37): Xaa is C or S
  MOD_RES (14)..(15)..(16)..(17)..(18): Xaa is A or G
  MOD_RES (19)..(20)..(21)..(22): Xaa is A or G or is absent
AXSEVTMNQYNKLXXXXXXXXXLYLISIASMKEPVXX

SEQ ID NO: 78700 - protein, 38 aa, Artificial Sequence; identical to SEQ ID NO: 11371
  GFR-binding peptide
  MOD_RES (1)..(3)..(35)..(36): Xaa is C or S

SEQ ID NO: 78701 - protein, 39 aa, Artificial Sequence; identical to SEQ ID NO: 3955
  GFR-binding peptide
  MOD_RES (2)..(4)..(36)..(37): Xaa is C or S

SEQ ID NO: 78702 - protein, 43 aa, Artificial Sequence; identical to SEQ ID NO: 3956
  GFR-binding peptide
  MOD_RES (2)..(4)..(37)..(38): Xaa is C or S
  MOD_RES (15)..(16)..(17)..(18)..(19): Xaa is A or G
  MOD_RES (20)..(21)..(22)..(23): Xaa is A or G or is absent

SEQ ID NO: 78703 - protein, 42 aa, Artificial Sequence
  GFR-binding peptide
  MOD_RES (2)..(4)..(38)..(39): Xaa is C or S
  MOD_RES (16)..(17)..(18)..(19)..(20): Xaa is A or G
  MOD_RES (21)..(22)..(23)..(24): Xaa is A or G or is absent
RXAXSEVTMNQYNKLXXXXXXXXXLYLISIASMKEPVXXPEP

SEQ ID NO: 78704 - protein, 38 aa, Artificial Sequence; identical to SEQ ID NO: 5916
  GFR-binding peptide
  MOD_RES (32)..(33): Xaa is C or S

SEQ ID NO: 78705 - protein, 32 aa, Artificial Sequence
  GFR-binding peptide
  MOD_RES (31)..(32): Xaa is C or S
EVTMNQYNKLVVNKNEDLYLISIASMKEPVXX

SEQ ID NO: 78706 - protein, 37 aa, Artificial Sequence; identical to SEQ ID NO: 11377
  GFR-binding peptide
  MOD_RES (2)..(4): Xaa is C or S
  MOD_RES (16)..(17)..(18)..(19)..(20): Xaa is A or G
  MOD_RES (21)..(22)..(23)..(24): Xaa is A or G or is absent

SEQ ID NO: 78707 - protein, 39 aa, Artificial Sequence; identical to SEQ ID NO: 61487
  GFR-binding peptide
  MOD_RES (2)..(34)..(35): Xaa is C or S

SEQ ID NO: 78708 - protein, 38 aa, Artificial Sequence; identical to SEQ ID NO: 3960
  GFR-binding peptide
  MOD_RES (33)..(34): Xaa is C or S
  MOD_RES (11)..(12)..(13)..(14)..(15): Xaa is A or G
  MOD_RES (16)..(17)..(18)..(19): Xaa is A or G or is absent

SEQ ID NO: 78709 - protein, 40 aa, Artificial Sequence; identical to SEQ ID NO: 5918
  GFR-binding peptide
  MOD_RES (2)..(4)..(35)..(36): Xaa is C or S

SEQ ID NO: 78710 - protein, 37 aa, Artificial Sequence
  GFR-binding peptide
  MOD_RES (31)..(32): Xaa is C or S
SVAMGQYNKLYTVVGKDLYLISIASLKTPVXXAKSAK

SEQ ID NO: 78711 - protein, 34 aa, Artificial Sequence; identical to SEQ ID NO: 63235
  GFR-binding peptide
  MOD_RES (32)..(33): Xaa is C or S

SEQ ID NO: 78712 - protein, 37 aa, Artificial Sequence; identical to SEQ ID NO: 5919
  GFR-binding peptide
  MOD_RES (2)..(34): Xaa is C or S

SEQ ID NO: 78713 - protein, 37 aa, Artificial Sequence; identical to SEQ ID NO: 3967
  GFR-binding peptide
  MOD_RES (2)..(4)..(36)..(37): Xaa is C or S

SEQ ID NO: 78714 - protein, 38 aa, Artificial Sequence; identical to SEQ ID NO: 25048
  GFR-binding peptide
  MOD_RES (34)..(35): Xaa is C or S
  MOD_RES (12)..(13)..(14)..(15)..(16): Xaa is A or G
  MOD_RES (17)..(18)..(19)..(20): Xaa is A or G or is absent

SEQ ID NO: 78715 - protein, 33 aa, Artificial Sequence
  GFR-binding peptide
  MOD_RES (1)..(32)..(33): Xaa is C or S
XEEVIMQYNKLLLVRGNDLYLMSIASTKVPAXX

SEQ ID NO: 78716 - protein, 34 aa, Artificial Sequence; identical to SEQ ID NO: 3968
  GFR-binding peptide
  MOD_RES (1)..(34): Xaa is C or S
  MOD_RES (12)..(13)..(14)..(15)..(16): Xaa is A or G
  MOD_RES (17)..(18)..(19)..(20): Xaa is A or G or is absent

SEQ ID NO: 78717 - protein, 33 aa, Artificial Sequence
  GFR-binding peptide
  MOD_RES (31)..(32): Xaa is C or S
EVTMNQYNKLVVNKNEDLYLISIASMKEPVXXP

SEQ ID NO: 78718 - protein, 33 aa, Artificial Sequence
  GFR-binding peptide
  MOD_RES (32)..(33): Xaa is C or S
AEVVMDQYNKLVVNNAADLYLISIASLRAPVXX

SEQ ID NO: 78719 - protein, 41 aa, Artificial Sequence
  GFR-binding peptide
  MOD_RES (2)..(4)..(38)..(39): Xaa is C or S
  MOD_RES (16)..(17)..(18)..(19)..(20): Xaa is A or G
  MOD_RES (21)..(22)..(23)..(24): Xaa is A or G or is absent
SXGXRDVVMGQYNKLXXXXXXXXXLYLMSIASMKTPTXXPG

SEQ ID NO: 78720 - protein, 41 aa, Artificial Sequence; identical to SEQ ID NO: 11391
  GFR-binding peptide
  MOD_RES (1)..(35)..(36): Xaa is C or S
  MOD_RES (13)..(14)..(15)..(16)..(17): Xaa is A or G
  MOD_RES (18)..(19)..(20)..(21): Xaa is A or G or is absent

SEQ ID NO: 78721 - protein, 35 aa, Artificial Sequence; identical to SEQ ID NO: 27041
  GFR-binding peptide
  MOD_RES (2)..(34)..(35): Xaa is C or S

SEQ ID NO: 78722 - protein, 39 aa, Artificial Sequence; identical to SEQ ID NO: 5926
  GFR-binding peptide
  MOD_RES (2)..(33)..(34): Xaa is C or S

SEQ ID NO: 78723 - protein, 37 aa, Artificial Sequence; identical to SEQ ID NO: 5928
  GFR-binding peptide
  MOD_RES (1)..(3)..(36)..(37): Xaa is C or S

SEQ ID NO: 78724 - protein, 39 aa, Artificial Sequence; identical to SEQ ID NO: 3972
  GFR-binding peptide
  MOD_RES (33)..(34): Xaa is C or S
  MOD_RES (11)..(12)..(13)..(14)..(15): Xaa is A or G
  MOD_RES (16)..(17)..(18)..(19): Xaa is A or G or is absent

SEQ ID NO: 78725 - protein, 34 aa, Artificial Sequence; identical to SEQ ID NO: 11395
  GFR-binding peptide
  MOD_RES (1)..(33)..(34): Xaa is C or S

SEQ ID NO: 78726 - protein, 32 aa, Artificial Sequence
  GFR-binding peptide
  MOD_RES (1)..(1): Xaa is C or S
XSEVTMNQYNKLVVNKNEDLYLISIASMKEPV

SEQ ID NO: 78727 - protein, 41 aa, Artificial Sequence; identical to SEQ ID NO: 5929
  GFR-binding peptide
  MOD_RES (2)..(4)..(37)..(38): Xaa is C or S
  MOD_RES (15)..(16)..(17)..(18)..(19): Xaa is A or G
  MOD_RES (20)..(21)..(22)..(23): Xaa is A or G or is absent

SEQ ID NO: 78728 - protein, 36 aa, Artificial Sequence; identical to SEQ ID NO: 61499
  GFR-binding peptide
  MOD_RES (2)..(36): Xaa is C or S
  MOD_RES (14)..(15)..(16)..(17)..(18): Xaa is A or G
  MOD_RES (19)..(20)..(21)..(22): Xaa is A or G or is absent

SEQ ID NO: 78729 - protein, 36 aa, Artificial Sequence; identical to SEQ ID NO: 13356
  GFR-binding peptide
  MOD_RES (1)..(33)..(34): Xaa is C or S

SEQ ID NO: 78730 - protein, 41 aa, Artificial Sequence; identical to SEQ ID NO: 5932
  GFR-binding peptide
  MOD_RES (2)..(4)..(36)..(37): Xaa is C or S

SEQ ID NO: 78731 - protein, 34 aa, Artificial Sequence; identical to SEQ ID NO: 3976
  GFR-binding peptide
  MOD_RES (31)..(32): Xaa is C or S

SEQ ID NO: 78732 - protein, 40 aa, Artificial Sequence; identical to SEQ ID NO: 5934
  GFR-binding peptide
  MOD_RES (1)..(34)..(35): Xaa is C or S

SEQ ID NO: 78733 - protein, 37 aa, Artificial Sequence; identical to SEQ ID NO: 5936
  GFR-binding peptide
  MOD_RES (1)..(36)..(37): Xaa is C or S
  MOD_RES (14)..(15)..(16)..(17)..(18): Xaa is A or G
  MOD_RES (19)..(20)..(21)..(22): Xaa is A or G or is absent

SEQ ID NO: 78734 - protein, 32 aa, Artificial Sequence; identical to SEQ ID NO: 5937
  GFR-binding peptide
  MOD_RES (32)..(32): Xaa is C or S

SEQ ID NO: 78735 - protein, 36 aa, Artificial Sequence; identical to SEQ ID NO: 3978
  GFR-binding peptide
  MOD_RES (1)..(3)..(34)..(35): Xaa is C or S

SEQ ID NO: 78736 - protein, 34 aa, Artificial Sequence; identical to SEQ ID NO: 3979
  GFR-binding peptide
  MOD_RES (1)..(3): Xaa is C or S

SEQ ID NO: 78737 - protein, 39 aa, Artificial Sequence; identical to SEQ ID NO: 56992
  GFR-binding peptide
  MOD_RES (2)..(34)..(35): Xaa is C or S

SEQ ID NO: 78738 - protein, 41 aa, Artificial Sequence; identical to SEQ ID NO: 3981
  GFR-binding peptide
  MOD_RES (1)..(3)..(37)..(38): Xaa is C or S
  MOD_RES (15)..(16)..(17)..(18)..(19): Xaa is A or G
  MOD_RES (20)..(21)..(22)..(23): Xaa is A or G or is absent

SEQ ID NO: 78739 - protein, 33 aa, Artificial Sequence; identical to SEQ ID NO: 56995
  GFR-binding peptide
  MOD_RES (1)..(1): Xaa is C or S
  MOD_RES (12)..(13)..(14)..(15)..(16): Xaa is A or G
  MOD_RES (17)..(18)..(19)..(20): Xaa is A or G or is absent

SEQ ID NO: 78740 - protein, 39 aa, Artificial Sequence; identical to SEQ ID NO: 3982
  GFR-binding peptide
  MOD_RES (2)..(35)..(36): Xaa is C or S
  MOD_RES (13)..(14)..(15)..(16)..(17): Xaa is A or G
  MOD_RES (18)..(19)..(20)..(21): Xaa is A or G or is absent

SEQ ID NO: 78741 - protein, 38 aa, Artificial Sequence; identical to SEQ ID NO: 3983
  GFR-binding peptide
  MOD_RES (1)..(35): Xaa is C or S
  MOD_RES (13)..(14)..(15)..(16)..(17): Xaa is A or G
  MOD_RES (18)..(19)..(20)..(21): Xaa is A or G or is absent

SEQ ID NO: 78742 - protein, 40 aa, Artificial Sequence
  GFR-binding peptide
  MOD_RES (34)..(35): Xaa is C or S
  MOD_RES (12)..(13)..(14)..(15)..(16): Xaa is A or G
  MOD_RES (17)..(18)..(19)..(20): Xaa is A or G or is absent
SEVTMNQYNKLXXXXXXXXXLYLISIASMKEPVXXPEPIG

SEQ ID NO: 78743 - protein, 34 aa, Artificial Sequence; identical to SEQ ID NO: 5940
  GFR-binding peptide
  MOD_RES (1)..(3)..(34): Xaa is C or S

SEQ ID NO: 78744 - protein, 33 aa, Artificial Sequence; identical to SEQ ID NO: 5941
  GFR-binding peptide
  MOD_RES (12)..(13)..(14)..(15)..(16): Xaa is A or G
  MOD_RES (17)..(18)..(19)..(20): Xaa is A or G or is absent

SEQ ID NO: 78745 - protein, 37 aa, Artificial Sequence; identical to SEQ ID NO: 13367
  GFR-binding peptide
  MOD_RES (32)..(33): Xaa is C or S

SEQ ID NO: 78746 - protein, 40 aa, Artificial Sequence; identical to SEQ ID NO: 5943
  GFR-binding peptide
  MOD_RES (2)..(35)..(36): Xaa is C or S
  MOD_RES (13)..(14)..(15)..(16)..(17): Xaa is A or G
  MOD_RES (18)..(19)..(20)..(21): Xaa is A or G or is absent

SEQ ID NO: 78747 - protein, 40 aa, Artificial Sequence
  GFR-binding peptide
  MOD_RES (1)..(3)..(34)..(35): Xaa is C or S
XGXEEVIMQYNKLLLVRGNDLYLMSIASTKVPAXXTSPVR

SEQ ID NO: 78748 - protein, 36 aa, Artificial Sequence; identical to SEQ ID NO: 3985
  GFR-binding peptide
  MOD_RES (1)..(34)..(35): Xaa is C or S
  MOD_RES (12)..(13)..(14)..(15)..(16): Xaa is A or G
  MOD_RES (17)..(18)..(19)..(20): Xaa is A or G or is absent

SEQ ID NO: 78749 - protein, 35 aa, Artificial Sequence; identical to SEQ ID NO: 3986
  GFR-binding peptide
  MOD_RES (31)..(32): Xaa is C or S

SEQ ID NO: 78750 - protein, 43 aa, Artificial Sequence; identical to SEQ ID NO: 13372
  GFR-binding peptide
  MOD_RES (2)..(4)..(38)..(39): Xaa is C or S
  MOD_RES (16)..(17)..(18)..(19)..(20): Xaa is A or G
  MOD_RES (21)..(22)..(23)..(24): Xaa is A or G or is absent

SEQ ID NO: 78751 - protein, 41 aa, Artificial Sequence; identical to SEQ ID NO: 5949
  GFR-binding peptide
  MOD_RES (1)..(3)..(38)..(39): Xaa is C or S
  MOD_RES (16)..(17)..(18)..(19)..(20): Xaa is A or G
  MOD_RES (21)..(22)..(23)..(24): Xaa is A or G or is absent

SEQ ID NO: 78752 - protein, 33 aa, Artificial Sequence; identical to SEQ ID NO: 3989
  GFR-binding peptide
  MOD_RES (31)..(32): Xaa is C or S

SEQ ID NO: 78753 - protein, 37 aa, Artificial Sequence; identical to SEQ ID NO: 57004
  GFR-binding peptide
  MOD_RES (2)..(4): Xaa is C or S
  MOD_RES (16)..(17)..(18)..(19)..(20): Xaa is A or G
  MOD_RES (21)..(22)..(23)..(24): Xaa is A or G or is absent

SEQ ID NO: 78754 - protein, 39 aa, Artificial Sequence; identical to SEQ ID NO: 3990
  GFR-binding peptide
  MOD_RES (1)..(35): Xaa is C or S
  MOD_RES (13)..(14)..(15)..(16)..(17): Xaa is A or G
  MOD_RES (18)..(19)..(20)..(21): Xaa is A or G or is absent

SEQ ID NO: 78755 - protein, 35 aa, Artificial Sequence; identical to SEQ ID NO: 57005
  GFR-binding peptide
  MOD_RES (1)..(33)..(34): Xaa is C or S

SEQ ID NO: 78756 - protein, 42 aa, Artificial Sequence; identical to SEQ ID NO: 25076
  GFR-binding peptide
  MOD_RES (2)..(4)..(36)..(37): Xaa is C or S

SEQ ID NO: 78757 - protein, 37 aa, Artificial Sequence; identical to SEQ ID NO: 59757
  GFR-binding peptide
  MOD_RES (1)..(3)..(37): Xaa is C or S
  MOD_RES (15)..(16)..(17)..(18)..(19): Xaa is A or G
  MOD_RES (20)..(21)..(22)..(23): Xaa is A or G or is absent

SEQ ID NO: 78758 - protein, 36 aa, Artificial Sequence; identical to SEQ ID NO: 5956
  GFR-binding peptide
  MOD_RES (2)..(4): Xaa is C or S
  MOD_RES (15)..(16)..(17)..(18)..(19): Xaa is A or G
  MOD_RES (20)..(21)..(22)..(23): Xaa is A or G or is absent

SEQ ID NO: 78759 - protein, 31 aa, Artificial Sequence; identical to SEQ ID NO: 13378
  GFR-binding peptide
  MOD_RES (31)..(31): Xaa is C or S

SEQ ID NO: 78760 - protein, 37 aa, Artificial Sequence; identical to SEQ ID NO: 3997
  GFR-binding peptide
  MOD_RES (1)..(3)..(35)..(36): Xaa is C or S

SEQ ID NO: 78761 - protein, 38 aa, Artificial Sequence
  GFR-binding peptide
  MOD_RES (33)..(34): Xaa is C or S
  MOD_RES (11)..(12)..(13)..(14)..(15): Xaa is A or G
  MOD_RES (16)..(17)..(18)..(19): Xaa is A or G or is absent
EVVMDQYNKLXXXXXXXXXLYLISIASLRAPVXXSAPA

SEQ ID NO: 78762 - protein, 33 aa, Artificial Sequence; identical to SEQ ID NO: 5957
  GFR-binding peptide
  MOD_RES (33)..(33): Xaa is C or S
  MOD_RES (11)..(12)..(13)..(14)..(15): Xaa is A or G
  MOD_RES (16)..(17)..(18)..(19): Xaa is A or G or is absent

SEQ ID NO: 78763 - protein, 38 aa, Artificial Sequence; identical to SEQ ID NO: 13382
  GFR-binding peptide
  MOD_RES (1)..(33)..(34): Xaa is C or S

SEQ ID NO: 78764 - protein, 36 aa, Artificial Sequence; identical to SEQ ID NO: 4000
  GFR-binding peptide
  MOD_RES (31)..(32): Xaa is C or S

SEQ ID NO: 78765 - protein, 39 aa, Artificial Sequence; identical to SEQ ID NO: 4003
  GFR-binding peptide
  MOD_RES (1)..(3)..(35)..(36): Xaa is C or S

SEQ ID NO: 78766 - protein, 40 aa, Artificial Sequence; identical to SEQ ID NO: 4004
  GFR-binding peptide
  MOD_RES (1)..(3)..(37)..(38): Xaa is C or S
  MOD_RES (15)..(16)..(17)..(18)..(19): Xaa is A or G
  MOD_RES (20)..(21)..(22)..(23): Xaa is A or G or is absent

SEQ ID NO: 78767 - protein, 41 aa, Artificial Sequence; identical to SEQ ID NO: 5962
  GFR-binding peptide
  MOD_RES (2)..(4)..(38)..(39): Xaa is C or S
  MOD_RES (16)..(17)..(18)..(19)..(20): Xaa is A or G
  MOD_RES (21)..(22)..(23)..(24): Xaa is A or G or is absent

SEQ ID NO: 78768 - protein, 38 aa, Artificial Sequence; identical to SEQ ID NO: 27078
  GFR-binding peptide
  MOD_RES (1)..(35)..(36): Xaa is C or S
  MOD_RES (13)..(14)..(15)..(16)..(17): Xaa is A or G
  MOD_RES (18)..(19)..(20)..(21): Xaa is A or G or is absent

SEQ ID NO: 78769 - protein, 35 aa, Artificial Sequence; identical to SEQ ID NO: 65014
  GFR-binding peptide
  MOD_RES (34)..(35): Xaa is C or S
  MOD_RES (12)..(13)..(14)..(15)..(16): Xaa is A or G
  MOD_RES (17)..(18)..(19)..(20): Xaa is A or G or is absent

SEQ ID NO: 78770 - protein, 38 aa, Artificial Sequence; identical to SEQ ID NO: 5964
  GFR-binding peptide
  MOD_RES (2)..(34)..(35): Xaa is C or S

SEQ ID NO: 78771 - protein, 34 aa, Artificial Sequence; identical to SEQ ID NO: 5966
  GFR-binding peptide
  MOD_RES (31)..(32): Xaa is C or S

SEQ ID NO: 78772 - protein, 41 aa, Artificial Sequence; identical to SEQ ID NO: 5967
  GFR-binding peptide
  MOD_RES (1)..(35)..(36): Xaa is C or S
  MOD_RES (13)..(14)..(15)..(16)..(17): Xaa is A or G
  MOD_RES (18)..(19)..(20)..(21): Xaa is A or G or is absent

SEQ ID NO: 78773 - protein, 37 aa, Artificial Sequence; identical to SEQ ID NO: 5968
  GFR-binding peptide
  MOD_RES (33)..(34): Xaa is C or S
  MOD_RES (11)..(12)..(13)..(14)..(15): Xaa is A or G
  MOD_RES (16)..(17)..(18)..(19): Xaa is A or G or is absent

SEQ ID NO: 78774 - protein, 35 aa, Artificial Sequence
  GFR-binding peptide
  MOD_RES (34)..(35): Xaa is C or S
  MOD_RES (12)..(13)..(14)..(15)..(16): Xaa is A or G
  MOD_RES (17)..(18)..(19)..(20): Xaa is A or G or is absent
SEVTMNQYNKLXXXXXXXXXLYLISIASMKEPVXX

SEQ ID NO: 78775 - protein, 34 aa, Artificial Sequence; identical to SEQ ID NO: 5969
  GFR-binding peptide
  MOD_RES (2)..(34): Xaa is C or S

SEQ ID NO: 78776 - protein, 39 aa, Artificial Sequence; identical to SEQ ID NO: 25087
  GFR-binding peptide
  MOD_RES (2)..(34)..(35): Xaa is C or S

SEQ ID NO: 78777 - protein, 33 aa, Artificial Sequence
  GFR-binding peptide
  MOD_RES (2)..(2): Xaa is C or S
GXRDVVMGQYNKLIIQQKDNLYLMSIASMKTPT

SEQ ID NO: 78778 - protein, 36 aa, Artificial Sequence; identical to SEQ ID NO: 4007
  GFR-binding peptide
  MOD_RES (1)..(32)..(33): Xaa is C or S

SEQ ID NO: 78779 - protein, 36 aa, Artificial Sequence; identical to SEQ ID NO: 57025
  GFR-binding peptide
  MOD_RES (2)..(36): Xaa is C or S
  MOD_RES (14)..(15)..(16)..(17)..(18): Xaa is A or G
  MOD_RES (19)..(20)..(21)..(22): Xaa is A or G or is absent

SEQ ID NO: 78780 - protein, 39 aa, Artificial Sequence; identical to SEQ ID NO: 5973
  GFR-binding peptide
  MOD_RES (1)..(34)..(35): Xaa is C or S

SEQ ID NO: 78781 - protein, 35 aa, Artificial Sequence; identical to SEQ ID NO: 5974
  GFR-binding peptide
  MOD_RES (2)..(34)..(35): Xaa is C or S

SEQ ID NO: 78782 - protein, 36 aa, Artificial Sequence; identical to SEQ ID NO: 5979
  GFR-binding peptide
  MOD_RES (1)..(3)..(36): Xaa is C or S
  MOD_RES (14)..(15)..(16)..(17)..(18): Xaa is A or G
  MOD_RES (19)..(20)..(21)..(22): Xaa is A or G or is absent

SEQ ID NO: 78783 - protein, 40 aa, Artificial Sequence; identical to SEQ ID NO: 5981
  GFR-binding peptide
  MOD_RES (1)..(35)..(36): Xaa is C or S
  MOD_RES (13)..(14)..(15)..(16)..(17): Xaa is A or G
  MOD_RES (18)..(19)..(20)..(21): Xaa is A or G or is absent

SEQ ID NO: 78784 - protein, 38 aa, Artificial Sequence; identical to SEQ ID NO: 63277
  GFR-binding peptide
  MOD_RES (1)..(3)..(35)..(36): Xaa is C or S

SEQ ID NO: 78785 - protein, 32 aa, Artificial Sequence; identical to SEQ ID NO: 5983
  GFR-binding peptide
  MOD_RES (11)..(12)..(13)..(14)..(15): Xaa is A or G
  MOD_RES (16)..(17)..(18)..(19): Xaa is A or G or is absent

SEQ ID NO: 78786 - protein, 43 aa, Artificial Sequence
  GFR-binding peptide
  MOD_RES (2)..(4)..(38)..(39): Xaa is C or S
  MOD_RES (16)..(17)..(18)..(19)..(20): Xaa is A or G
  MOD_RES (21)..(22)..(23)..(24): Xaa is A or G or is absent
RXGXESVAMGQYNKLXXXXXXXXXLYLISIASLKTPVXXAKSA

SEQ ID NO: 78787 - protein, 41 aa, Artificial Sequence; identical to SEQ ID NO: 4010
  GFR-binding peptide
  MOD_RES (2)..(4)..(39)..(40): Xaa is C or S
  MOD_RES (17)..(18)..(19)..(20)..(21): Xaa is A or G
  MOD_RES (22)..(23)..(24)..(25): Xaa is A or G or is absent

SEQ ID NO: 78788 - protein, 36 aa, Artificial Sequence; identical to SEQ ID NO: 5984
  GFR-binding peptide
  MOD_RES (31)..(31): Xaa is C or S

SEQ ID NO: 78789 - protein, 42 aa, Artificial Sequence; identical to SEQ ID NO: 5986
  GFR-binding peptide
  MOD_RES (1)..(3)..(36)..(37): Xaa is C or S
  MOD_RES (14)..(15)..(16)..(17)..(18): Xaa is A or G
  MOD_RES (19)..(20)..(21)..(22): Xaa is A or G or is absent

SEQ ID NO: 78790 - protein, 37 aa, Artificial Sequence; identical to SEQ ID NO: 27099
  GFR-binding peptide
  MOD_RES (1)..(3)..(35)..(36): Xaa is C or S

SEQ ID NO: 78791 - protein, 36 aa, Artificial Sequence; identical to SEQ ID NO: 4011
  GFR-binding peptide
  MOD_RES (2)..(34)..(35): Xaa is C or S

SEQ ID NO: 78792 - protein, 34 aa, Artificial Sequence; identical to SEQ ID NO: 4013
  GFR-binding peptide
  MOD_RES (2)..(2): Xaa is C or S
  MOD_RES (13)..(14)..(15)..(16)..(17): Xaa is A or G
  MOD_RES (18)..(19)..(20)..(21): Xaa is A or G or is absent

SEQ ID NO: 78793 - protein, 37 aa, Artificial Sequence
  GFR-binding peptide
  MOD_RES (2)..(4)..(37): Xaa is C or S
  MOD_RES (15)..(16)..(17)..(18)..(19): Xaa is A or G
  MOD_RES (20)..(21)..(22)..(23): Xaa is A or G or is absent
LXGXEEVIMQYNKLXXXXXXXXXLYLMSIASTKVPAX

SEQ ID NO: 78794 - protein, 38 aa, Artificial Sequence; identical to SEQ ID NO: 4014
  GFR-binding peptide
  MOD_RES (1)..(3)..(35)..(36): Xaa is C or S

SEQ ID NO: 78795 - protein, 41 aa, Artificial Sequence; identical to SEQ ID NO: 25094
  GFR-binding peptide
  MOD_RES (2)..(4)..(38)..(39): Xaa is C or S
  MOD_RES (16)..(17)..(18)..(19)..(20): Xaa is A or G
  MOD_RES (21)..(22)..(23)..(24): Xaa is A or G or is absent

SEQ ID NO: 78796 - protein, 40 aa, Artificial Sequence; identical to SEQ ID NO: 5989
  GFR-binding peptide
  MOD_RES (1)..(34)..(35): Xaa is C or S
  MOD_RES (12)..(13)..(14)..(15)..(16): Xaa is A or G
  MOD_RES (17)..(18)..(19)..(20): Xaa is A or G or is absent

SEQ ID NO: 78797 - protein, 37 aa, Artificial Sequence; identical to SEQ ID NO: 4016
  GFR-binding peptide
  MOD_RES (1)..(32)..(33): Xaa is C or S

SEQ ID NO: 78798 - protein, 39 aa, Artificial Sequence
  GFR-binding peptide
  MOD_RES (1)..(35)..(36): Xaa is C or S
  MOD_RES (13)..(14)..(15)..(16)..(17): Xaa is A or G
  MOD_RES (18)..(19)..(20)..(21): Xaa is A or G or is absent
XSEVTMNQYNKLXXXXXXXXXLYLISIASMKEPVXXPEP

SEQ ID NO: 78799 - protein, 40 aa, Artificial Sequence; identical to SEQ ID NO: 63285
  GFR-binding peptide
  MOD_RES (34)..(35): Xaa is C or S
  MOD_RES (12)..(13)..(14)..(15)..(16): Xaa is A or G
  MOD_RES (17)..(18)..(19)..(20): Xaa is A or G or is absent

SEQ ID NO: 78800 - protein, 39 aa, Artificial Sequence; identical to SEQ ID NO: 11445
  GFR-binding peptide
  MOD_RES (2)..(4)..(36)..(37): Xaa is C or S

SEQ ID NO: 78801 - protein, 35 aa, Artificial Sequence; identical to SEQ ID NO: 5992
  GFR-binding peptide
  MOD_RES (31)..(32): Xaa is C or S

SEQ ID NO: 78802 - protein, 33 aa, Artificial Sequence; identical to SEQ ID NO: 27106
  GFR-binding peptide
  MOD_RES (2)..(2): Xaa is C or S

SEQ ID NO: 78803 - protein, 34 aa, Artificial Sequence; identical to SEQ ID NO: 4020
  GFR-binding peptide
  MOD_RES (33)..(33): Xaa is C or S
  MOD_RES (11)..(12)..(13)..(14)..(15): Xaa is A or G
  MOD_RES (16)..(17)..(18)..(19): Xaa is A or G or is absent

SEQ ID NO: 78804 - protein, 34 aa, Artificial Sequence; identical to SEQ ID NO: 11448
  GFR-binding peptide
  MOD_RES (33)..(34): Xaa is C or S
  MOD_RES (11)..(12)..(13)..(14)..(15): Xaa is A or G
  MOD_RES (16)..(17)..(18)..(19): Xaa is A or G or is absent

SEQ ID NO: 78805 - protein, 37 aa, Artificial Sequence; identical to SEQ ID NO: 4024
  GFR-binding peptide
  MOD_RES (1)..(3)..(35)..(36): Xaa is C or S

SEQ ID NO: 78806 - protein, 42 aa, Artificial Sequence
  GFR-binding peptide
  MOD_RES (2)..(4)..(36)..(37): Xaa is C or S
HXGXSRVVMNQYNKLIVNSSDDLYLVSIASLKTPAXXPKPVH

SEQ ID NO: 78807 - protein, 37 aa, Artificial Sequence; identical to SEQ ID NO: 4025
  GFR-binding peptide
  MOD_RES (2)..(36)..(37): Xaa is C or S
  MOD_RES (14)..(15)..(16)..(17)..(18): Xaa is A or G
  MOD_RES (19)..(20)..(21)..(22): Xaa is A or G or is absent

SEQ ID NO: 78808 - protein, 36 aa, Artificial Sequence; identical to SEQ ID NO: 63291
  GFR-binding peptide
  MOD_RES (2)..(4)..(36): Xaa is C or S

SEQ ID NO: 78809 - protein, 42 aa, Artificial Sequence; identical to SEQ ID NO: 4026
  GFR-binding peptide
  MOD_RES (2)..(4)..(36)..(37): Xaa is C or S

SEQ ID NO: 78810 - protein, 36 aa, Artificial Sequence
  GFR-binding peptide
  MOD_RES (2)..(34)..(35): Xaa is C or S
GXESVAMGQYNKLYTVVGKDLYLISIASLKTPVXXA

SEQ ID NO: 78811 - protein, 33 aa, Artificial Sequence
  GFR-binding peptide
  MOD_RES (12)..(13)..(14)..(15)..(16): Xaa is A or G
  MOD_RES (17)..(18)..(19)..(20): Xaa is A or G or is absent
AEVVMDQYNKLXXXXXXXXXLYLISIASLRAPV

SEQ ID NO: 78812 - protein, 34 aa, Artificial Sequence; identical to SEQ ID NO: 65043
  GFR-binding peptide
  MOD_RES (34)..(34): Xaa is C or S
  MOD_RES (12)..(13)..(14)..(15)..(16): Xaa is A or G
  MOD_RES (17)..(18)..(19)..(20): Xaa is A or G or is absent

SEQ ID NO: 78813 - protein, 32 aa, Artificial Sequence; identical to SEQ ID NO: 4031
  GFR-binding peptide
  MOD_RES (1)..(1): Xaa is C or S

SEQ ID NO: 78814 - protein, 43 aa, Artificial Sequence; identical to SEQ ID NO: 6003
  GFR-binding peptide
  MOD_RES (2)..(4)..(37)..(38): Xaa is C or S

SEQ ID NO: 78815 - protein, 41 aa, Artificial Sequence; identical to SEQ ID NO: 4033
  GFR-binding peptide
  MOD_RES (1)..(3)..(37)..(38): Xaa is C or S
  MOD_RES (15)..(16)..(17)..(18)..(19): Xaa is A or G
  MOD_RES (20)..(21)..(22)..(23): Xaa is A or G or is absent

SEQ ID NO: 78816 - protein, 38 aa, Artificial Sequence; identical to SEQ ID NO: 11464
  GFR-binding peptide
  MOD_RES (2)..(4)..(36)..(37): Xaa is C or S

SEQ ID NO: 78817 - protein, 37 aa, Artificial Sequence; identical to SEQ ID NO: 13413
  GFR-binding peptide
  MOD_RES (2)..(36)..(37): Xaa is C or S
  MOD_RES (14)..(15)..(16)..(17)..(18): Xaa is A or G
  MOD_RES (19)..(20)..(21)..(22): Xaa is A or G or is absent

SEQ ID NO: 78818 - protein, 38 aa, Artificial Sequence
  GFR-binding peptide
  MOD_RES (34)..(35): Xaa is C or S
  MOD_RES (12)..(13)..(14)..(15)..(16): Xaa is A or G
  MOD_RES (17)..(18)..(19)..(20): Xaa is A or G or is absent
RDVVMGQYNKLXXXXXXXXXLYLMSIASMKTPTXXPGA

SEQ ID NO: 78819 - protein, 42 aa, Artificial Sequence; identical to SEQ ID NO: 6005
  GFR-binding peptide
  MOD_RES (2)..(36)..(37): Xaa is C or S
  MOD_RES (14)..(15)..(16)..(17)..(18): Xaa is A or G
  MOD_RES (19)..(20)..(21)..(22): Xaa is A or G or is absent

SEQ ID NO: 78820 - protein, 36 aa, Artificial Sequence; identical to SEQ ID NO: 11469
  GFR-binding peptide
  MOD_RES (34)..(35): Xaa is C or S
  MOD_RES (12)..(13)..(14)..(15)..(16): Xaa is A or G
  MOD_RES (17)..(18)..(19)..(20): Xaa is A or G or is absent

SEQ ID NO: 78821 - protein, 35 aa, Artificial Sequence; identical to SEQ ID NO: 13417
  GFR-binding peptide
  MOD_RES (34)..(35): Xaa is C or S
  MOD_RES (12)..(13)..(14)..(15)..(16): Xaa is A or G
  MOD_RES (17)..(18)..(19)..(20): Xaa is A or G or is absent

SEQ ID NO: 78822 - protein, 39 aa, Artificial Sequence; identical to SEQ ID NO: 4039
  GFR-binding peptide
  MOD_RES (1)..(34)..(35): Xaa is C or S

SEQ ID NO: 78823 - protein, 44 aa, Artificial Sequence; identical to SEQ ID NO: 11470
  GFR-binding peptide
  MOD_RES (2)..(4)..(38)..(39): Xaa is C or S
  MOD_RES (16)..(17)..(18)..(19)..(20): Xaa is A or G
  MOD_RES (21)..(22)..(23)..(24): Xaa is A or G or is absent

SEQ ID NO: 78824 - protein, 35 aa, Artificial Sequence; identical to SEQ ID NO: 6013
  GFR-binding peptide
  MOD_RES (34)..(35): Xaa is C or S
  MOD_RES (12)..(13)..(14)..(15)..(16): Xaa is A or G
  MOD_RES (17)..(18)..(19)..(20): Xaa is A or G or is absent

SEQ ID NO: 78825 - protein, 40 aa, Artificial Sequence; identical to SEQ ID NO: 6014
  GFR-binding peptide
  MOD_RES (1)..(3)..(36)..(37): Xaa is C or S
  MOD_RES (14)..(15)..(16)..(17)..(18): Xaa is A or G
  MOD_RES (19)..(20)..(21)..(22): Xaa is A or G or is absent

SEQ ID NO: 78826 - protein, 40 aa, Artificial Sequence
  GFR-binding peptide
  MOD_RES (2)..(34)..(35): Xaa is C or S
GXAEVVMDQYNKLVVNNAADLYLISIASLRAPVXXSAPAA

SEQ ID NO: 78827 - protein, 39 aa, Artificial Sequence; identical to SEQ ID NO: 63307
  GFR-binding peptide
  MOD_RES (1)..(3)..(35)..(36): Xaa is C or S

SEQ ID NO: 78828 - protein, 36 aa, Artificial Sequence; identical to SEQ ID NO: 25118
  GFR-binding peptide
  MOD_RES (2)..(36): Xaa is C or S
  MOD_RES (14)..(15)..(16)..(17)..(18): Xaa is A or G
  MOD_RES (19)..(20)..(21)..(22): Xaa is A or G or is absent

SEQ ID NO: 78829 - protein, 37 aa, Artificial Sequence; identical to SEQ ID NO: 6016
  GFR-binding peptide
  MOD_RES (1)..(35)..(36): Xaa is C or S
  MOD_RES (13)..(14)..(15)..(16)..(17): Xaa is A or G
  MOD_RES (18)..(19)..(20)..(21): Xaa is A or G or is absent

SEQ ID NO: 78830 - protein, 42 aa, Artificial Sequence; identical to SEQ ID NO: 4042
  GFR-binding peptide
  MOD_RES (2)..(4)..(38)..(39): Xaa is C or S
  MOD_RES (16)..(17)..(18)..(19)..(20): Xaa is A or G
  MOD_RES (21)..(22)..(23)..(24): Xaa is A or G or is absent

SEQ ID NO: 78831 - protein, 39 aa, Artificial Sequence; identical to SEQ ID NO: 25121
  GFR-binding peptide
  MOD_RES (1)..(3)..(35)..(36): Xaa is C or S

SEQ ID NO: 78832 - protein, 39 aa, Artificial Sequence; identical to SEQ ID NO: 13426
  GFR-binding peptide
  MOD_RES (1)..(35)..(36): Xaa is C or S
  MOD_RES (13)..(14)..(15)..(16)..(17): Xaa is A or G
  MOD_RES (18)..(19)..(20)..(21): Xaa is A or G or is absent

SEQ ID NO: 78833 - protein, 37 aa, Artificial Sequence
  GFR-binding peptide
  MOD_RES (1)..(3)..(34)..(35): Xaa is C or S
XGXEEVIMQYNKLLLVRGNDLYLMSIASTKVPAXXTS

SEQ ID NO: 78834 - protein, 37 aa, Artificial Sequence; identical to SEQ ID NO: 13428
  GFR-binding peptide
  MOD_RES (31)..(32): Xaa is C or S

SEQ ID NO: 78835 - protein, 40 aa, Artificial Sequence; identical to SEQ ID NO: 4047
  GFR-binding peptide
  MOD_RES (2)..(4)..(38)..(39): Xaa is C or S
  MOD_RES (16)..(17)..(18)..(19)..(20): Xaa is A or G
  MOD_RES (21)..(22)..(23)..(24): Xaa is A or G or is absent

SEQ ID NO: 78836 - protein, 31 aa, Artificial Sequence
  GFR-binding peptide
  MOD_RES (31)..(31): Xaa is C or S
SVAMGQYNKLYTVVGKDLYLISIASLKTPVX

SEQ ID NO: 78837 - protein, 42 aa, Artificial Sequence; identical to SEQ ID NO: 13430
  GFR-binding peptide
  MOD_RES (2)..(4)..(38)..(39): Xaa is C or S
  MOD_RES (16)..(17)..(18)..(19)..(20): Xaa is A or G
  MOD_RES (21)..(22)..(23)..(24): Xaa is A or G or is absent

SEQ ID NO: 78838 - protein, 40 aa, Artificial Sequence; identical to SEQ ID NO: 4049
  GFR-binding peptide
  MOD_RES (1)..(35)..(36): Xaa is C or S
  MOD_RES (13)..(14)..(15)..(16)..(17): Xaa is A or G
  MOD_RES (18)..(19)..(20)..(21): Xaa is A or G or is absent

SEQ ID NO: 78839 - protein, 40 aa, Artificial Sequence; identical to SEQ ID NO: 4050
  GFR-binding peptide
  MOD_RES (2)..(35)..(36): Xaa is C or S
  MOD_RES (13)..(14)..(15)..(16)..(17): Xaa is A or G
  MOD_RES (18)..(19)..(20)..(21): Xaa is A or G or is absent

SEQ ID NO: 78840 - protein, 35 aa, Artificial Sequence
  GFR-binding peptide
  MOD_RES (1)..(32)..(33): Xaa is C or S
XEEVIMQYNKLLLVRGNDLYLMSIASTKVPAXXTS

SEQ ID NO: 78841 - protein, 41 aa, Artificial Sequence; identical to SEQ ID NO: 65080
  GFR-binding peptide
  MOD_RES (2)..(36)..(37): Xaa is C or S
  MOD_RES (14)..(15)..(16)..(17)..(18): Xaa is A or G
  MOD_RES (19)..(20)..(21)..(22): Xaa is A or G or is absent

SEQ ID NO: 78842 - protein, 39 aa, Artificial Sequence; identical to SEQ ID NO: 4054
  GFR-binding peptide
  MOD_RES (33)..(34): Xaa is C or S
  MOD_RES (11)..(12)..(13)..(14)..(15): Xaa is A or G
  MOD_RES (16)..(17)..(18)..(19): Xaa is A or G or is absent

SEQ ID NO: 78843 - protein, 42 aa, Artificial Sequence; identical to SEQ ID NO: 4055
  GFR-binding peptide
  MOD_RES (1)..(36)..(37): Xaa is C or S
  MOD_RES (14)..(15)..(16)..(17)..(18): Xaa is A or G
  MOD_RES (19)..(20)..(21)..(22): Xaa is A or G or is absent

SEQ ID NO: 78844 - protein, 40 aa, Artificial Sequence
  GFR-binding peptide
  MOD_RES (1)..(3)..(36)..(37): Xaa is C or S
  MOD_RES (14)..(15)..(16)..(17)..(18): Xaa is A or G
  MOD_RES (19)..(20)..(21)..(22): Xaa is A or G or is absent
XGXEEVIMQYNKLXXXXXXXXXLYLMSIASTKVPAXXTSP

SEQ ID NO: 78845 - protein, 35 aa, Artificial Sequence; identical to SEQ ID NO: 4057
  GFR-binding peptide
  MOD_RES (1)..(3): Xaa is C or S
  MOD_RES (14)..(15)..(16)..(17)..(18): Xaa is A or G
  MOD_RES (19)..(20)..(21)..(22): Xaa is A or G or is absent

SEQ ID NO: 78846 - protein, 38 aa, Artificial Sequence; identical to SEQ ID NO: 4058
  GFR-binding peptide
  MOD_RES (2)..(4)..(36)..(37): Xaa is C or S

SEQ ID NO: 78847 - protein, 32 aa, Artificial Sequence; identical to SEQ ID NO: 6028
  GFR-binding peptide
  MOD_RES (1)..(32): Xaa is C or S

SEQ ID NO: 78848 - protein, 36 aa, Artificial Sequence; identical to SEQ ID NO: 4059
  GFR-binding peptide
  MOD_RES (2)..(4): Xaa is C or S
  MOD_RES (15)..(16)..(17)..(18)..(19): Xaa is A or G
  MOD_RES (20)..(21)..(22)..(23): Xaa is A or G or is absent

SEQ ID NO: 78849 - protein, 35 aa, Artificial Sequence; identical to SEQ ID NO: 4060
  GFR-binding peptide
  MOD_RES (2)..(34): Xaa is C or S

SEQ ID NO: 78850 - protein, 36 aa, Artificial Sequence
  GFR-binding peptide
  MOD_RES (2)..(36): Xaa is C or S
  MOD_RES (14)..(15)..(16)..(17)..(18): Xaa is A or G
  MOD_RES (19)..(20)..(21)..(22): Xaa is A or G or is absent
GXAEVVMDQYNKLXXXXXXXXXLYLISIASLRAPVX

SEQ ID NO: 78851 - protein, 33 aa, Artificial Sequence; identical to SEQ ID NO: 11493
  GFR-binding peptide
  MOD_RES (1)..(33): Xaa is C or S

SEQ ID NO: 78852 - protein, 34 aa, Artificial Sequence; identical to SEQ ID NO: 6031
  GFR-binding peptide
  MOD_RES (34)..(34): Xaa is C or S
  MOD_RES (12)..(13)..(14)..(15)..(16): Xaa is A or G
  MOD_RES (17)..(18)..(19)..(20): Xaa is A or G or is absent

SEQ ID NO: 78853 - protein, 40 aa, Artificial Sequence; identical to SEQ ID NO: 6033
  GFR-binding peptide
  MOD_RES (2)..(36)..(37): Xaa is C or S
  MOD_RES (14)..(15)..(16)..(17)..(18): Xaa is A or G
  MOD_RES (19)..(20)..(21)..(22): Xaa is A or G or is absent

SEQ ID NO: 78854 - protein, 36 aa, Artificial Sequence; identical to SEQ ID NO: 6034
  GFR-binding peptide
  MOD_RES (32)..(33): Xaa is C or S

SEQ ID NO: 78855 - protein, 34 aa, Artificial Sequence; identical to SEQ ID NO: 6035
  GFR-binding peptide
  MOD_RES (32)..(33): Xaa is C or S

SEQ ID NO: 78856 - protein, 32 aa, Artificial Sequence; identical to SEQ ID NO: 4064
  GFR-binding peptide
  MOD_RES (2)..(2): Xaa is C or S

SEQ ID NO: 78857 - protein, 34 aa, Artificial Sequence; identical to SEQ ID NO: 6037
  GFR-binding peptide
  MOD_RES (34)..(34): Xaa is C or S
  MOD_RES (12)..(13)..(14)..(15)..(16): Xaa is A or G
  MOD_RES (17)..(18)..(19)..(20): Xaa is A or G or is absent

SEQ ID NO: 78858 - protein, 33 aa, Artificial Sequence; identical to SEQ ID NO: 4065
  GFR-binding peptide
  MOD_RES (33)..(33): Xaa is C or S
  MOD_RES (11)..(12)..(13)..(14)..(15): Xaa is A or G
  MOD_RES (16)..(17)..(18)..(19): Xaa is A or G or is absent

SEQ ID NO: 78859 - protein, 39 aa, Artificial Sequence; identical to SEQ ID NO: 6040
  GFR-binding peptide
  MOD_RES (1)..(3)..(37)..(38): Xaa is C or S
  MOD_RES (15)..(16)..(17)..(18)..(19): Xaa is A or G
  MOD_RES (20)..(21)..(22)..(23): Xaa is A or G or is absent

SEQ ID NO: 78860 - protein, 38 aa, Artificial Sequence
  GFR-binding peptide
  MOD_RES (2)..(34)..(35): Xaa is C or S
GXESVAMGQYNKLYTVVGKDLYLISIASLKTPVXXAKS

SEQ ID NO: 78861 - protein, 35 aa, Artificial Sequence; identical to SEQ ID NO: 4067
  GFR-binding peptide
  MOD_RES (32)..(33): Xaa is C or S

SEQ ID NO: 78862 - protein, 40 aa, Artificial Sequence; identical to SEQ ID NO: 4070
  GFR-binding peptide
  MOD_RES (2)..(4)..(38)..(39): Xaa is C or S
  MOD_RES (16)..(17)..(18)..(19)..(20): Xaa is A or G
  MOD_RES (21)..(22)..(23)..(24): Xaa is A or G or is absent

SEQ ID NO: 78863 - protein, 41 aa, Artificial Sequence; identical to SEQ ID NO: 6043
  GFR-binding peptide
  MOD_RES (2)..(4)..(36)..(37): Xaa is C or S

SEQ ID NO: 78864 - protein, 32 aa, Artificial Sequence; identical to SEQ ID NO: 6044
  GFR-binding peptide
  MOD_RES (2)..(2): Xaa is C or S

SEQ ID NO: 78865 - protein, 42 aa, Artificial Sequence; identical to SEQ ID NO: 6046
  GFR-binding peptide
  MOD_RES (1)..(3)..(36)..(37): Xaa is C or S
  MOD_RES (14)..(15)..(16)..(17)..(18): Xaa is A or G
  MOD_RES (19)..(20)..(21)..(22): Xaa is A or G or is absent

SEQ ID NO: 78866 - protein, 35 aa, Artificial Sequence; identical to SEQ ID NO: 57094
  GFR-binding peptide
  MOD_RES (1)..(32)..(33): Xaa is C or S

SEQ ID NO: 78867 - protein, 37 aa, Artificial Sequence; identical to SEQ ID NO: 13448
  GFR-binding peptide
  MOD_RES (1)..(33)..(34): Xaa is C or S

SEQ ID NO: 78868 - protein, 39 aa, Artificial Sequence; identical to SEQ ID NO: 4073
  GFR-binding peptide
  MOD_RES (1)..(35)..(36): Xaa is C or S
  MOD_RES (13)..(14)..(15)..(16)..(17): Xaa is A or G
  MOD_RES (18)..(19)..(20)..(21): Xaa is A or G or is absent

SEQ ID NO: 78869 - protein, 38 aa, Artificial Sequence; identical to SEQ ID NO: 4074
  GFR-binding peptide
  MOD_RES (2)..(4): Xaa is C or S
  MOD_RES (17)..(18)..(19)..(20)..(21): Xaa is A or G
  MOD_RES (22)..(23)..(24)..(25): Xaa is A or G or is absent

SEQ ID NO: 78870 - protein, 41 aa, Artificial Sequence; identical to SEQ ID NO: 6048
  GFR-binding peptide
  MOD_RES (1)..(3)..(37)..(38): Xaa is C or S
  MOD_RES (15)..(16)..(17)..(18)..(19): Xaa is A or G
  MOD_RES (20)..(21)..(22)..(23): Xaa is A or G or is absent

SEQ ID NO: 78871 - protein, 39 aa, Artificial Sequence; identical to SEQ ID NO: 4075
  GFR-binding peptide
  MOD_RES (1)..(33)..(34): Xaa is C or S

SEQ ID NO: 78872 - protein, 35 aa, Artificial Sequence
  GFR-binding peptide
  MOD_RES (2)..(33)..(34): Xaa is C or S
GXEEVIMQYNKLLLVRGNDLYLMSIASTKVPAXXT

SEQ ID NO: 78873 - protein, 41 aa, Artificial Sequence; identical to SEQ ID NO: 6049
  GFR-binding peptide
  MOD_RES (1)..(35)..(36): Xaa is C or S
  MOD_RES (13)..(14)..(15)..(16)..(17): Xaa is A or G
  MOD_RES (18)..(19)..(20)..(21): Xaa is A or G or is absent

SEQ ID NO: 78874 - protein, 37 aa, Artificial Sequence; identical to SEQ ID NO: 6050
  GFR-binding peptide
  MOD_RES (2)..(4)..(36)..(37): Xaa is C or S

SEQ ID NO: 78875 - protein, 32 aa, Artificial Sequence; identical to SEQ ID NO: 11506
  GFR-binding peptide
  MOD_RES (1)..(1): Xaa is C or S

SEQ ID NO: 78876 - protein, 35 aa, Artificial Sequence
  GFR-binding peptide
  MOD_RES (2)..(4)..(35): Xaa is C or S
LXGXEEVIMQYNKLLLVRGNDLYLMSIASTKVPAX

SEQ ID NO: 78877 - protein, 44 aa, Artificial Sequence; identical to SEQ ID NO: 6053
  GFR-binding peptide
  MOD_RES (1)..(3)..(38)..(39): Xaa is C or S
  MOD_RES (16)..(17)..(18)..(19)..(20): Xaa is A or G
  MOD_RES (21)..(22)..(23)..(24): Xaa is A or G or is absent

SEQ ID NO: 78878 - protein, 33 aa, Artificial Sequence; identical to SEQ ID NO: 27171
  GFR-binding peptide
  MOD_RES (32)..(33): Xaa is C or S

SEQ ID NO: 78879 - protein, 38 aa, Artificial Sequence; identical to SEQ ID NO: 25154
  GFR-binding peptide
  MOD_RES (2)..(36)..(37): Xaa is C or S
  MOD_RES (14)..(15)..(16)..(17)..(18): Xaa is A or G
  MOD_RES (19)..(20)..(21)..(22): Xaa is A or G or is absent

SEQ ID NO: 78880 - protein, 36 aa, Artificial Sequence; identical to SEQ ID NO: 6055
  GFR-binding peptide
  MOD_RES (1)..(33)..(34): Xaa is C or S

SEQ ID NO: 78881 - protein, 37 aa, Artificial Sequence; identical to SEQ ID NO: 61607
  GFR-binding peptide
  MOD_RES (1)..(3)..(35)..(36): Xaa is C or S

SEQ ID NO: 78882 - protein, 41 aa, Artificial Sequence; identical to SEQ ID NO: 25157
  GFR-binding peptide
  MOD_RES (2)..(36)..(37): Xaa is C or S
  MOD_RES (14)..(15)..(16)..(17)..(18): Xaa is A or G
  MOD_RES (19)..(20)..(21)..(22): Xaa is A or G or is absent

SEQ ID NO: 78883 - protein, 41 aa, Artificial Sequence; identical to SEQ ID NO: 4080
  GFR-binding peptide
  MOD_RES (35)..(36): Xaa is C or S
  MOD_RES (13)..(14)..(15)..(16)..(17): Xaa is A or G
  MOD_RES (18)..(19)..(20)..(21): Xaa is A or G or is absent

SEQ ID NO: 78884 - protein, 39 aa, Artificial Sequence
  GFR-binding peptide
  MOD_RES (1)..(3)..(34)..(35): Xaa is C or S
XGXEEVIMQYNKLLLVRGNDLYLMSIASTKVPAXXTSPV

SEQ ID NO: 78885 - protein, 35 aa, Artificial Sequence; identical to SEQ ID NO: 4082
  GFR-binding peptide
  MOD_RES (33)..(34): Xaa is C or S
  MOD_RES (11)..(12)..(13)..(14)..(15): Xaa is A or G
  MOD_RES (16)..(17)..(18)..(19): Xaa is A or G or is absent

SEQ ID NO: 78886 - protein, 39 aa, Artificial Sequence; identical to SEQ ID NO: 6059
  GFR-binding peptide
  MOD_RES (1)..(3)..(35)..(36): Xaa is C or S

SEQ ID NO: 78887 - protein, 38 aa, Artificial Sequence; identical to SEQ ID NO: 4087
  GFR-binding peptide
  MOD_RES (34)..(35): Xaa is C or S
  MOD_RES (12)..(13)..(14)..(15)..(16): Xaa is A or G
  MOD_RES (17)..(18)..(19)..(20): Xaa is A or G or is absent

SEQ ID NO: 78888 - protein, 30 aa, Artificial Sequence; identical to SEQ ID NO: 4088
  GFR-binding peptide

SEQ ID NO: 78889 - protein, 38 aa, Artificial Sequence; identical to SEQ ID NO: 4089
  GFR-binding peptide
  MOD_RES (1)..(3)..(37)..(38): Xaa is C or S
  MOD_RES (15)..(16)..(17)..(18)..(19): Xaa is A or G
  MOD_RES (20)..(21)..(22)..(23): Xaa is A or G or is absent

SEQ ID NO: 78890 - protein, 36 aa, Artificial Sequence; identical to SEQ ID NO: 4090
  GFR-binding peptide
  MOD_RES (33)..(34): Xaa is C or S
  MOD_RES (11)..(12)..(13)..(14)..(15): Xaa is A or G
  MOD_RES (16)..(17)..(18)..(19): Xaa is A or G or is absent

SEQ ID NO: 78891 - protein, 43 aa, Artificial Sequence; identical to SEQ ID NO: 6061
  GFR-binding peptide
  MOD_RES (1)..(3)..(37)..(38): Xaa is C or S
  MOD_RES (15)..(16)..(17)..(18)..(19): Xaa is A or G
  MOD_RES (20)..(21)..(22)..(23): Xaa is A or G or is absent

SEQ ID NO: 78892 - protein, 43 aa, Artificial Sequence; identical to SEQ ID NO: 6063
  GFR-binding peptide
  MOD_RES (2)..(4)..(38)..(39): Xaa is C or S
  MOD_RES (16)..(17)..(18)..(19)..(20): Xaa is A or G
  MOD_RES (21)..(22)..(23)..(24): Xaa is A or G or is absent

SEQ ID NO: 78893 - protein, 38 aa, Artificial Sequence; identical to SEQ ID NO: 4094
  GFR-binding peptide
  MOD_RES (2)..(34)..(35): Xaa is C or S

SEQ ID NO: 78894 - protein, 35 aa, Artificial Sequence; identical to SEQ ID NO: 6064
  GFR-binding peptide
  MOD_RES (31)..(32): Xaa is C or S

SEQ ID NO: 78895 - protein, 40 aa, Artificial Sequence; identical to SEQ ID NO: 4098
  GFR-binding peptide
  MOD_RES (1)..(3)..(34)..(35): Xaa is C or S

SEQ ID NO: 78896 - protein, 38 aa, Artificial Sequence; identical to SEQ ID NO: 4099
  GFR-binding peptide
  MOD_RES (1)..(33)..(34): Xaa is C or S

SEQ ID NO: 78897 - protein, 34 aa, Artificial Sequence; identical to SEQ ID NO: 4100
  GFR-binding peptide
  MOD_RES (1)..(34): Xaa is C or S
  MOD_RES (12)..(13)..(14)..(15)..(16): Xaa is A or G
  MOD_RES (17)..(18)..(19)..(20): Xaa is A or G or is absent

SEQ ID NO: 78898 - protein, 38 aa, Artificial Sequence; identical to SEQ ID NO: 4101
  GFR-binding peptide
  MOD_RES (1)..(32)..(33): Xaa is C or S

SEQ ID NO: 78899 - protein, 37 aa, Artificial Sequence; identical to SEQ ID NO: 4102
  GFR-binding peptide
  MOD_RES (2)..(37): Xaa is C or S
  MOD_RES (15)..(16)..(17)..(18)..(19): Xaa is A or G
  MOD_RES (20)..(21)..(22)..(23): Xaa is A or G or is absent

SEQ ID NO: 78900 - protein, 36 aa, Artificial Sequence; identical to SEQ ID NO: 4103
  GFR-binding peptide
  MOD_RES (1)..(35)..(36): Xaa is C or S
  MOD_RES (13)..(14)..(15)..(16)..(17): Xaa is A or G
  MOD_RES (18)..(19)..(20)..(21): Xaa is A or G or is absent

SEQ ID NO: 78901 - protein, 39 aa, Artificial Sequence; identical to SEQ ID NO: 4104
  GFR-binding peptide
  MOD_RES (1)..(3)..(34)..(35): Xaa is C or S

SEQ ID NO: 78902 - protein, 38 aa, Artificial Sequence; identical to SEQ ID NO: 4105
  GFR-binding peptide
  MOD_RES (2)..(35)..(36): Xaa is C or S

SEQ ID NO: 78903 - protein, 39 aa, Artificial Sequence; identical to SEQ ID NO: 6071
  GFR-binding peptide
  MOD_RES (2)..(4)..(37)..(38): Xaa is C or S
  MOD_RES (15)..(16)..(17)..(18)..(19): Xaa is A or G
  MOD_RES (20)..(21)..(22)..(23): Xaa is A or G or is absent

SEQ ID NO: 78904 - protein, 35 aa, Artificial Sequence; identical to SEQ ID NO: 6074
  GFR-binding peptide
  MOD_RES (33)..(34): Xaa is C or S
  MOD_RES (11)..(12)..(13)..(14)..(15): Xaa is A or G
  MOD_RES (16)..(17)..(18)..(19): Xaa is A or G or is absent

SEQ ID NO: 78905 - protein, 36 aa, Artificial Sequence; identical to SEQ ID NO: 6075
  GFR-binding peptide
  MOD_RES (34)..(34): Xaa is C or S
  MOD_RES (12)..(13)..(14)..(15)..(16): Xaa is A or G
  MOD_RES (17)..(18)..(19)..(20): Xaa is A or G or is absent

SEQ ID NO: 78906 - protein, 34 aa, Artificial Sequence; identical to SEQ ID NO: 4107
  GFR-binding peptide
  MOD_RES (31)..(32): Xaa is C or S

SEQ ID NO: 78907 - protein, 35 aa, Artificial Sequence
  GFR-binding peptide
  MOD_RES (31)..(32): Xaa is C or S
SVAMGQYNKLYTVVGKDLYLISIASLKTPVXXAKS

SEQ ID NO: 78908 - protein, 42 aa, Artificial Sequence; identical to SEQ ID NO: 4109
  GFR-binding peptide
  MOD_RES (1)..(3)..(37)..(38): Xaa is C or S
  MOD_RES (15)..(16)..(17)..(18)..(19): Xaa is A or G
  MOD_RES (20)..(21)..(22)..(23): Xaa is A or G or is absent

SEQ ID NO: 78909 - protein, 41 aa, Artificial Sequence; identical to SEQ ID NO: 4111
  GFR-binding peptide
  MOD_RES (2)..(36)..(37): Xaa is C or S
  MOD_RES (14)..(15)..(16)..(17)..(18): Xaa is A or G
  MOD_RES (19)..(20)..(21)..(22): Xaa is A or G or is absent

SEQ ID NO: 78910 - protein, 35 aa, Artificial Sequence; identical to SEQ ID NO: 4113
  GFR-binding peptide
  MOD_RES (33)..(34): Xaa is C or S
  MOD_RES (11)..(12)..(13)..(14)..(15): Xaa is A or G
  MOD_RES (16)..(17)..(18)..(19): Xaa is A or G or is absent

SEQ ID NO: 78911 - protein, 34 aa, Artificial Sequence
  GFR-binding peptide
  MOD_RES (1)..(1): Xaa is C or S
  MOD_RES (13)..(14)..(15)..(16)..(17): Xaa is A or G
  MOD_RES (18)..(19)..(20)..(21): Xaa is A or G or is absent
XESVAMGQYNKLXXXXXXXXXLYLISIASLKTPV

SEQ ID NO: 78912 - protein, 36 aa, Artificial Sequence; identical to SEQ ID NO: 6078
  GFR-binding peptide
  MOD_RES (31)..(32): Xaa is C or S

SEQ ID NO: 78913 - protein, 38 aa, Artificial Sequence; identical to SEQ ID NO: 6079
  GFR-binding peptide
  MOD_RES (2)..(34)..(35): Xaa is C or S

SEQ ID NO: 78914 - protein, 38 aa, Artificial Sequence; identical to SEQ ID NO: 13487
  GFR-binding peptide
  MOD_RES (1)..(3)..(37)..(38): Xaa is C or S
  MOD_RES (15)..(16)..(17)..(18)..(19): Xaa is A or G
  MOD_RES (20)..(21)..(22)..(23): Xaa is A or G or is absent

SEQ ID NO: 78915 - protein, 34 aa, Artificial Sequence; identical to SEQ ID NO: 6080
  GFR-binding peptide
  MOD_RES (2)..(33)..(34): Xaa is C or S

SEQ ID NO: 78916 - protein, 36 aa, Artificial Sequence; identical to SEQ ID NO: 4119
  GFR-binding peptide
  MOD_RES (2)..(4)..(35)..(36): Xaa is C or S

SEQ ID NO: 78917 - protein, 36 aa, Artificial Sequence; identical to SEQ ID NO: 4120
  GFR-binding peptide
  MOD_RES (1)..(33)..(34): Xaa is C or S

SEQ ID NO: 78918 - protein, 36 aa, Artificial Sequence
  GFR-binding peptide
  MOD_RES (1)..(3): Xaa is C or S
  MOD_RES (15)..(16)..(17)..(18)..(19): Xaa is A or G
  MOD_RES (20)..(21)..(22)..(23): Xaa is A or G or is absent
XGXRDVVMGQYNKLXXXXXXXXXLYLMSIASMKTPT

SEQ ID NO: 78919 - protein, 40 aa, Artificial Sequence; identical to SEQ ID NO: 6082
  GFR-binding peptide
  MOD_RES (2)..(4)..(36): Xaa is C or S

SEQ ID NO: 78920 - protein, 36 aa, Artificial Sequence; identical to SEQ ID NO: 4122
  GFR-binding peptide
  MOD_RES (31)..(32): Xaa is C or S

SEQ ID NO: 78921 - protein, 41 aa, Artificial Sequence
  GFR-binding peptide
  MOD_RES (1)..(3)..(35)..(36): Xaa is C or S
XGXESVAMGQYNKLYTVVGKDLYLISIASLKTPVXXAKSAK

SEQ ID NO: 78922 - protein, 40 aa, Artificial Sequence
  GFR-binding peptide
  MOD_RES (2)..(36)..(37): Xaa is C or S
  MOD_RES (14)..(15)..(16)..(17)..(18): Xaa is A or G
  MOD_RES (19)..(20)..(21)..(22): Xaa is A or G or is absent
GXRDVVMGQYNKLXXXXXXXXXLYLMSIASMKTPTXXPGA

SEQ ID NO: 78923 - protein, 40 aa, Artificial Sequence; identical to SEQ ID NO: 4123
  GFR-binding peptide
  MOD_RES (2)..(4)..(39)..(40): Xaa is C or S
  MOD_RES (17)..(18)..(19)..(20)..(21): Xaa is A or G
  MOD_RES (22)..(23)..(24)..(25): Xaa is A or G or is absent

SEQ ID NO: 78924 - protein, 36 aa, Artificial Sequence
  GFR-binding peptide
  MOD_RES (31)..(32): Xaa is C or S
EVTMNQYNKLVVNKNEDLYLISIASMKEPVXXPEPI

SEQ ID NO: 78925 - protein, 35 aa, Artificial Sequence; identical to SEQ ID NO: 4126
  GFR-binding peptide
  MOD_RES (31)..(32): Xaa is C or S

SEQ ID NO: 78926 - protein, 37 aa, Artificial Sequence; identical to SEQ ID NO: 6084
  GFR-binding peptide
  MOD_RES (31)..(32): Xaa is C or S

SEQ ID NO: 78927 - protein, 41 aa, Artificial Sequence; identical to SEQ ID NO: 6085
  GFR-binding peptide
  MOD_RES (2)..(35)..(36): Xaa is C or S
  MOD_RES (13)..(14)..(15)..(16)..(17): Xaa is A or G
  MOD_RES (18)..(19)..(20)..(21): Xaa is A or G or is absent

SEQ ID NO: 78928 - protein, 37 aa, Artificial Sequence; identical to SEQ ID NO: 4129
  GFR-binding peptide
  MOD_RES (1)..(32)..(33): Xaa is C or S

SEQ ID NO: 78929 - protein, 39 aa, Artificial Sequence; identical to SEQ ID NO: 4131
  GFR-binding peptide
  MOD_RES (2)..(4)..(37)..(38): Xaa is C or S

SEQ ID NO: 78930 - protein, 39 aa, Artificial Sequence
  GFR-binding peptide
  MOD_RES (1)..(33)..(34): Xaa is C or S
XESVAMGQYNKLYTVVGKDLYLISIASLKTPVXXAKSAK

SEQ ID NO: 78931 - protein, 33 aa, Artificial Sequence
  GFR-binding peptide
  MOD_RES (1)..(33): Xaa is C or S
XESVAMGQYNKLYTVVGKDLYLISIASLKTPVX

SEQ ID NO: 78932 - protein, 37 aa, Artificial Sequence; identical to SEQ ID NO: 4134
  GFR-binding peptide
  MOD_RES (1)..(33)..(34): Xaa is C or S

SEQ ID NO: 78933 - protein, 37 aa, Artificial Sequence; identical to SEQ ID NO: 6086
  GFR-binding peptide
  MOD_RES (33)..(34): Xaa is C or S
  MOD_RES (11)..(12)..(13)..(14)..(15): Xaa is A or G
  MOD_RES (16)..(17)..(18)..(19): Xaa is A or G or is absent

SEQ ID NO: 78934 - protein, 41 aa, Artificial Sequence; identical to SEQ ID NO: 4135
  GFR-binding peptide
  MOD_RES (2)..(4)..(37)..(38): Xaa is C or S
  MOD_RES (15)..(16)..(17)..(18)..(19): Xaa is A or G
  MOD_RES (20)..(21)..(22)..(23): Xaa is A or G or is absent

SEQ ID NO: 78935 - protein, 37 aa, Artificial Sequence; identical to SEQ ID NO: 59849
  GFR-binding peptide
  MOD_RES (31)..(32): Xaa is C or S

SEQ ID NO: 78936 - protein, 36 aa, Artificial Sequence
  GFR-binding peptide
  MOD_RES (1)..(3)..(35)..(36): Xaa is C or S
XGXESVAMGQYNKLYTVVGKDLYLISIASLKTPVXX

SEQ ID NO: 78937 - protein, 37 aa, Artificial Sequence
  GFR-binding peptide
  MOD_RES (2)..(36)..(37): Xaa is C or S
  MOD_RES (14)..(15)..(16)..(17)..(18): Xaa is A or G
  MOD_RES (19)..(20)..(21)..(22): Xaa is A or G or is absent
GXESVAMGQYNKLXXXXXXXXXLYLISIASLKTPVXX

SEQ ID NO: 78938 - protein, 37 aa, Artificial Sequence; identical to SEQ ID NO: 4136
  GFR-binding peptide
  MOD_RES (2)..(36)..(37): Xaa is C or S
  MOD_RES (14)..(15)..(16)..(17)..(18): Xaa is A or G
  MOD_RES (19)..(20)..(21)..(22): Xaa is A or G or is absent

SEQ ID NO: 78939 - protein, 35 aa, Artificial Sequence; identical to SEQ ID NO: 6087
  GFR-binding peptide
  MOD_RES (1)..(34)..(35): Xaa is C or S
  MOD_RES (12)..(13)..(14)..(15)..(16): Xaa is A or G
  MOD_RES (17)..(18)..(19)..(20): Xaa is A or G or is absent

SEQ ID NO: 78940 - protein, 35 aa, Artificial Sequence
  GFR-binding peptide
  MOD_RES (33)..(34): Xaa is C or S
  MOD_RES (11)..(12)..(13)..(14)..(15): Xaa is A or G
  MOD_RES (16)..(17)..(18)..(19): Xaa is A or G or is absent
EVTMNQYNKLXXXXXXXXXLYLISIASMKEPVXXP

SEQ ID NO: 78941 - protein, 42 aa, Artificial Sequence; identical to SEQ ID NO: 6088
  GFR-binding peptide
  MOD_RES (1)..(3)..(36)..(37): Xaa is C or S

SEQ ID NO: 78942 - protein, 40 aa, Artificial Sequence; identical to SEQ ID NO: 4140
  GFR-binding peptide
  MOD_RES (2)..(37)..(38): Xaa is C or S
  MOD_RES (15)..(16)..(17)..(18)..(19): Xaa is A or G
  MOD_RES (20)..(21)..(22)..(23): Xaa is A or G or is absent

SEQ ID NO: 78943 - protein, 35 aa, Artificial Sequence; identical to SEQ ID NO: 25198
  GFR-binding peptide
  MOD_RES (2)..(2): Xaa is C or S
  MOD_RES (14)..(15)..(16)..(17)..(18): Xaa is A or G
  MOD_RES (19)..(20)..(21)..(22): Xaa is A or G or is absent

SEQ ID NO: 78944 - protein, 40 aa, Artificial Sequence; identical to SEQ ID NO: 4144
  GFR-binding peptide
  MOD_RES (1)..(34)..(35): Xaa is C or S
  MOD_RES (12)..(13)..(14)..(15)..(16): Xaa is A or G
  MOD_RES (17)..(18)..(19)..(20): Xaa is A or G or is absent

SEQ ID NO: 78945 - protein, 34 aa, Artificial Sequence; identical to SEQ ID NO: 4147
  GFR-binding peptide
  MOD_RES (1)..(1): Xaa is C or S
  MOD_RES (13)..(14)..(15)..(16)..(17): Xaa is A or G
  MOD_RES (18)..(19)..(20)..(21): Xaa is A or G or is absent

SEQ ID NO: 78946 - protein, 30 aa, Artificial Sequence; identical to SEQ ID NO: 6091
  GFR-binding peptide

SEQ ID NO: 78947 - protein, 32 aa, Artificial Sequence; identical to SEQ ID NO: 59863
  GFR-binding peptide
  MOD_RES (11)..(12)..(13)..(14)..(15): Xaa is A or G
  MOD_RES (16)..(17)..(18)..(19): Xaa is A or G or is absent

SEQ ID NO: 78948 - protein, 31 aa, Artificial Sequence; identical to SEQ ID NO: 6093
  GFR-binding peptide
  MOD_RES (31)..(31): Xaa is C or S

SEQ ID NO: 78949 - protein, 37 aa, Artificial Sequence; identical to SEQ ID NO: 13509
  GFR-binding peptide
  MOD_RES (32)..(33): Xaa is C or S

SEQ ID NO: 78950 - protein, 42 aa, Artificial Sequence; identical to SEQ ID NO: 6094
  GFR-binding peptide
  MOD_RES (2)..(4)..(37)..(38): Xaa is C or S

SEQ ID NO: 78951 - protein, 37 aa, Artificial Sequence; identical to SEQ ID NO: 4149
  GFR-binding peptide
  MOD_RES (2)..(4)..(36)..(37): Xaa is C or S

SEQ ID NO: 78952 - protein, 44 aa, Artificial Sequence; identical to SEQ ID NO: 6096
  GFR-binding peptide
  MOD_RES (2)..(4)..(38)..(39): Xaa is C or S
  MOD_RES (16)..(17)..(18)..(19)..(20): Xaa is A or G
  MOD_RES (21)..(22)..(23)..(24): Xaa is A or G or is absent

SEQ ID NO: 78953 - protein, 38 aa, Artificial Sequence; identical to SEQ ID NO: 59864
  GFR-binding peptide
  MOD_RES (2)..(36)..(37): Xaa is C or S
  MOD_RES (14)..(15)..(16)..(17)..(18): Xaa is A or G
  MOD_RES (19)..(20)..(21)..(22): Xaa is A or G or is absent

SEQ ID NO: 78954 - protein, 37 aa, Artificial Sequence; identical to SEQ ID NO: 6099
  GFR-binding peptide
  MOD_RES (33)..(34): Xaa is C or S
  MOD_RES (11)..(12)..(13)..(14)..(15): Xaa is A or G
  MOD_RES (16)..(17)..(18)..(19): Xaa is A or G or is absent

SEQ ID NO: 78955 - protein, 38 aa, Artificial Sequence; identical to SEQ ID NO: 27230
  GFR-binding peptide
  MOD_RES (2)..(4)..(36)..(37): Xaa is C or S

SEQ ID NO: 78956 - protein, 35 aa, Artificial Sequence
  GFR-binding peptide
  MOD_RES (2)..(35): Xaa is C or S
  MOD_RES (13)..(14)..(15)..(16)..(17): Xaa is A or G
  MOD_RES (18)..(19)..(20)..(21): Xaa is A or G or is absent
GXEEVIMQYNKLXXXXXXXXXLYLMSIASTKVPAX

SEQ ID NO: 78957 - protein, 40 aa, Artificial Sequence; identical to SEQ ID NO: 4150
  GFR-binding peptide
  MOD_RES (1)..(34)..(35): Xaa is C or S
  MOD_RES (12)..(13)..(14)..(15)..(16): Xaa is A or G
  MOD_RES (17)..(18)..(19)..(20): Xaa is A or G or is absent

SEQ ID NO: 78958 - protein, 35 aa, Artificial Sequence; identical to SEQ ID NO: 4151
  GFR-binding peptide
  MOD_RES (1)..(3)..(35): Xaa is C or S

SEQ ID NO: 78959 - protein, 38 aa, Artificial Sequence; identical to SEQ ID NO: 6102
  GFR-binding peptide
  MOD_RES (1)..(36)..(37): Xaa is C or S
  MOD_RES (14)..(15)..(16)..(17)..(18): Xaa is A or G
  MOD_RES (19)..(20)..(21)..(22): Xaa is A or G or is absent

SEQ ID NO: 78960 - protein, 40 aa, Artificial Sequence
  GFR-binding peptide
  MOD_RES (2)..(4)..(36)..(37): Xaa is C or S
RXGXESVAMGQYNKLYTVVGKDLYLISIASLKTPVXXAKS

SEQ ID NO: 78961 - protein, 38 aa, Artificial Sequence
  GFR-binding peptide
  MOD_RES (32)..(33): Xaa is C or S
SEVTMNQYNKLVVNKNEDLYLISIASMKEPVXXPEPIG

SEQ ID NO: 78962 - protein, 33 aa, Artificial Sequence; identical to SEQ ID NO: 6105
  GFR-binding peptide
  MOD_RES (1)..(3): Xaa is C or S

SEQ ID NO: 78963 - protein, 39 aa, Artificial Sequence; identical to SEQ ID NO: 6107
  GFR-binding peptide
  MOD_RES (33)..(34): Xaa is C or S
  MOD_RES (11)..(12)..(13)..(14)..(15): Xaa is A or G
  MOD_RES (16)..(17)..(18)..(19): Xaa is A or G or is absent

SEQ ID NO: 78964 - protein, 38 aa, Artificial Sequence; identical to SEQ ID NO: 4155
  GFR-binding peptide
  MOD_RES (2)..(4)..(36)..(37): Xaa is C or S

SEQ ID NO: 78965 - protein, 35 aa, Artificial Sequence; identical to SEQ ID NO: 6108
  GFR-binding peptide
  MOD_RES (1)..(3)..(35): Xaa is C or S

SEQ ID NO: 78966 - protein, 40 aa, Artificial Sequence; identical to SEQ ID NO: 6109
  GFR-binding peptide
  MOD_RES (2)..(35)..(36): Xaa is C or S
  MOD_RES (13)..(14)..(15)..(16)..(17): Xaa is A or G
  MOD_RES (18)..(19)..(20)..(21): Xaa is A or G or is absent

SEQ ID NO: 78967 - protein, 36 aa, Artificial Sequence; identical to SEQ ID NO: 4156
  GFR-binding peptide
  MOD_RES (31)..(32): Xaa is C or S

SEQ ID NO: 78968 - protein, 37 aa, Artificial Sequence; identical to SEQ ID NO: 13523
  GFR-binding peptide
  MOD_RES (1)..(3)..(37): Xaa is C or S
  MOD_RES (15)..(16)..(17)..(18)..(19): Xaa is A or G
  MOD_RES (20)..(21)..(22)..(23): Xaa is A or G or is absent

SEQ ID NO: 78969 - protein, 33 aa, Artificial Sequence; identical to SEQ ID NO: 4158
  GFR-binding peptide
  MOD_RES (31)..(32): Xaa is C or S

SEQ ID NO: 78970 - protein, 39 aa, Artificial Sequence; identical to SEQ ID NO: 4159
  GFR-binding peptide
  MOD_RES (2)..(4)..(36): Xaa is C or S

SEQ ID NO: 78971 - protein, 38 aa, Artificial Sequence; identical to SEQ ID NO: 4160
  GFR-binding peptide
  MOD_RES (2)..(36)..(37): Xaa is C or S
  MOD_RES (14)..(15)..(16)..(17)..(18): Xaa is A or G
  MOD_RES (19)..(20)..(21)..(22): Xaa is A or G or is absent

SEQ ID NO: 78972 - protein, 34 aa, Artificial Sequence; identical to SEQ ID NO: 11577
  GFR-binding peptide
  MOD_RES (32)..(33): Xaa is C or S

SEQ ID NO: 78973 - protein, 35 aa, Artificial Sequence; identical to SEQ ID NO: 6113
  GFR-binding peptide
  MOD_RES (31)..(32): Xaa is C or S

SEQ ID NO: 78974 - protein, 37 aa, Artificial Sequence; identical to SEQ ID NO: 6116
  GFR-binding peptide
  MOD_RES (35)..(36): Xaa is C or S
  MOD_RES (13)..(14)..(15)..(16)..(17): Xaa is A or G
  MOD_RES (18)..(19)..(20)..(21): Xaa is A or G or is absent

SEQ ID NO: 78975 - protein, 39 aa, Artificial Sequence; identical to SEQ ID NO: 4168
  GFR-binding peptide
  MOD_RES (2)..(4)..(38)..(39): Xaa is C or S
  MOD_RES (16)..(17)..(18)..(19)..(20): Xaa is A or G
  MOD_RES (21)..(22)..(23)..(24): Xaa is A or G or is absent

SEQ ID NO: 78976 - protein, 34 aa, Artificial Sequence; identical to SEQ ID NO: 6120
  GFR-binding peptide
  MOD_RES (32)..(33): Xaa is C or S

SEQ ID NO: 78977 - protein, 35 aa, Artificial Sequence; identical to SEQ ID NO: 4169
  GFR-binding peptide
  MOD_RES (2)..(2): Xaa is C or S
  MOD_RES (14)..(15)..(16)..(17)..(18): Xaa is A or G
  MOD_RES (19)..(20)..(21)..(22): Xaa is A or G or is absent

SEQ ID NO: 78978 - protein, 34 aa, Artificial Sequence; identical to SEQ ID NO: 4170
  GFR-binding peptide
  MOD_RES (33)..(34): Xaa is C or S

SEQ ID NO: 78979 - protein, 33 aa, Artificial Sequence; identical to SEQ ID NO: 27252
  GFR-binding peptide
  MOD_RES (31)..(32): Xaa is C or S

SEQ ID NO: 78980 - protein, 35 aa, Artificial Sequence; identical to SEQ ID NO: 6122
  GFR-binding peptide
  MOD_RES (2)..(35): Xaa is C or S
  MOD_RES (13)..(14)..(15)..(16)..(17): Xaa is A or G
  MOD_RES (18)..(19)..(20)..(21): Xaa is A or G or is absent

SEQ ID NO: 78981 - protein, 37 aa, Artificial Sequence; identical to SEQ ID NO: 6123
  GFR-binding peptide
  MOD_RES (1)..(33)..(34): Xaa is C or S

SEQ ID NO: 78982 - protein, 35 aa, Artificial Sequence; identical to SEQ ID NO: 4171
  GFR-binding peptide
  MOD_RES (32)..(33): Xaa is C or S

SEQ ID NO: 78983 - protein, 37 aa, Artificial Sequence; identical to SEQ ID NO: 4172
  GFR-binding peptide
  MOD_RES (31)..(32): Xaa is C or S

SEQ ID NO: 78984 - protein, 34 aa, Artificial Sequence; identical to SEQ ID NO: 6127
  GFR-binding peptide
  MOD_RES (33)..(34): Xaa is C or S
  MOD_RES (11)..(12)..(13)..(14)..(15): Xaa is A or G
  MOD_RES (16)..(17)..(18)..(19): Xaa is A or G or is absent

SEQ ID NO: 78985 - protein, 38 aa, Artificial Sequence; identical to SEQ ID NO: 4174
  GFR-binding peptide
  MOD_RES (2)..(4)..(38): Xaa is C or S
  MOD_RES (16)..(17)..(18)..(19)..(20): Xaa is A or G
  MOD_RES (21)..(22)..(23)..(24): Xaa is A or G or is absent

SEQ ID NO: 78986 - protein, 35 aa, Artificial Sequence; identical to SEQ ID NO: 4176
  GFR-binding peptide
  MOD_RES (1)..(35): Xaa is C or S
  MOD_RES (13)..(14)..(15)..(16)..(17): Xaa is A or G
  MOD_RES (18)..(19)..(20)..(21): Xaa is A or G or is absent

SEQ ID NO: 78987 - protein, 38 aa, Artificial Sequence; identical to SEQ ID NO: 4178
  GFR-binding peptide
  MOD_RES (1)..(3)..(37): Xaa is C or S
  MOD_RES (15)..(16)..(17)..(18)..(19): Xaa is A or G
  MOD_RES (20)..(21)..(22)..(23): Xaa is A or G or is absent

SEQ ID NO: 78988 - protein, 38 aa, Artificial Sequence; identical to SEQ ID NO: 4182
  GFR-binding peptide
  MOD_RES (2)..(4)..(35)..(36): Xaa is C or S

SEQ ID NO: 78989 - protein, 30 aa, Artificial Sequence; identical to SEQ ID NO: 6132
  GFR-binding peptide

SEQ ID NO: 78990 - protein, 40 aa, Artificial Sequence; identical to SEQ ID NO: 6134
  GFR-binding peptide
  MOD_RES (2)..(34)..(35): Xaa is C or S

SEQ ID NO: 78991 - protein, 35 aa, Artificial Sequence; identical to SEQ ID NO: 4183
  GFR-binding peptide
  MOD_RES (1)..(33)..(34): Xaa is C or S

SEQ ID NO: 78992 - protein, 37 aa, Artificial Sequence; identical to SEQ ID NO: 6136
  GFR-binding peptide
  MOD_RES (1)..(3)..(34)..(35): Xaa is C or S

SEQ ID NO: 78993 - protein, 34 aa, Artificial Sequence
  GFR-binding peptide
  MOD_RES (1)..(3): Xaa is C or S
XAXSEVTMNQYNKLVVNKNEDLYLISIASMKEPV

SEQ ID NO: 78994 - protein, 40 aa, Artificial Sequence; identical to SEQ ID NO: 6138
  GFR-binding peptide
  MOD_RES (1)..(35)..(36): Xaa is C or S
  MOD_RES (13)..(14)..(15)..(16)..(17): Xaa is A or G
  MOD_RES (18)..(19)..(20)..(21): Xaa is A or G or is absent

SEQ ID NO: 78995 - protein, 37 aa, Artificial Sequence; identical to SEQ ID NO: 6141
  GFR-binding peptide
  MOD_RES (1)..(33)..(34): Xaa is C or S

SEQ ID NO: 78996 - protein, 38 aa, Artificial Sequence; identical to SEQ ID NO: 4186
  GFR-binding peptide
  MOD_RES (1)..(32)..(33): Xaa is C or S

SEQ ID NO: 78997 - protein, 37 aa, Artificial Sequence
  GFR-binding peptide
  MOD_RES (1)..(3)..(35)..(36): Xaa is C or S
XGXESVAMGQYNKLYTVVGKDLYLISIASLKTPVXXA

SEQ ID NO: 78998 - protein, 33 aa, Artificial Sequence; identical to SEQ ID NO: 11602
  GFR-binding peptide
  MOD_RES (2)..(2): Xaa is C or S

SEQ ID NO: 78999 - protein, 34 aa, Artificial Sequence; identical to SEQ ID NO: 4189
  GFR-binding peptide
  MOD_RES (32)..(33): Xaa is C or S

SEQ ID NO: 79000 - protein, 34 aa, Artificial Sequence; identical to SEQ ID NO: 61680
  GFR-binding peptide
  MOD_RES (1)..(1): Xaa is C or S
  MOD_RES (13)..(14)..(15)..(16)..(17): Xaa is A or G
  MOD_RES (18)..(19)..(20)..(21): Xaa is A or G or is absent

SEQ ID NO: 79001 - protein, 40 aa, Artificial Sequence; identical to SEQ ID NO: 6144
  GFR-binding peptide
  MOD_RES (1)..(3)..(36)..(37): Xaa is C or S
  MOD_RES (14)..(15)..(16)..(17)..(18): Xaa is A or G
  MOD_RES (19)..(20)..(21)..(22): Xaa is A or G or is absent

SEQ ID NO: 79002 - protein, 37 aa, Artificial Sequence; identical to SEQ ID NO: 6148
  GFR-binding peptide
  MOD_RES (2)..(4): Xaa is C or S
  MOD_RES (16)..(17)..(18)..(19)..(20): Xaa is A or G
  MOD_RES (21)..(22)..(23)..(24): Xaa is A or G or is absent

SEQ ID NO: 79003 - protein, 40 aa, Artificial Sequence; identical to SEQ ID NO: 6151
  GFR-binding peptide
  MOD_RES (2)..(36)..(37): Xaa is C or S
  MOD_RES (14)..(15)..(16)..(17)..(18): Xaa is A or G
  MOD_RES (19)..(20)..(21)..(22): Xaa is A or G or is absent

SEQ ID NO: 79004 - protein, 35 aa, Artificial Sequence
  GFR-binding peptide
  MOD_RES (2)..(34)..(35): Xaa is C or S
GXESVAMGQYNKLYTVVGKDLYLISIASLKTPVXX

SEQ ID NO: 79005 - protein, 37 aa, Artificial Sequence; identical to SEQ ID NO: 4197
  GFR-binding peptide
  MOD_RES (1)..(3)..(35)..(36): Xaa is C or S

SEQ ID NO: 79006 - protein, 33 aa, Artificial Sequence; identical to SEQ ID NO: 59901
  GFR-binding peptide
  MOD_RES (31)..(32): Xaa is C or S

SEQ ID NO: 79007 - protein, 36 aa, Artificial Sequence; identical to SEQ ID NO: 4198
  GFR-binding peptide
  MOD_RES (35)..(36): Xaa is C or S
  MOD_RES (13)..(14)..(15)..(16)..(17): Xaa is A or G
  MOD_RES (18)..(19)..(20)..(21): Xaa is A or G or is absent

SEQ ID NO: 79008 - protein, 40 aa, Artificial Sequence; identical to SEQ ID NO: 6155
  GFR-binding peptide
  MOD_RES (2)..(34)..(35): Xaa is C or S

SEQ ID NO: 79009 - protein, 36 aa, Artificial Sequence; identical to SEQ ID NO: 6156
  GFR-binding peptide
  MOD_RES (1)..(3)..(36): Xaa is C or S

SEQ ID NO: 79010 - protein, 40 aa, Artificial Sequence; identical to SEQ ID NO: 27290
  GFR-binding peptide
  MOD_RES (2)..(4)..(36)..(37): Xaa is C or S

SEQ ID NO: 79011 - protein, 35 aa, Artificial Sequence; identical to SEQ ID NO: 6157
  GFR-binding peptide
  MOD_RES (2)..(34)..(35): Xaa is C or S

SEQ ID NO: 79012 - protein, 39 aa, Artificial Sequence; identical to SEQ ID NO: 6158
  GFR-binding peptide
  MOD_RES (2)..(4)..(36)..(37): Xaa is C or S

SEQ ID NO: 79013 - protein, 38 aa, Artificial Sequence; identical to SEQ ID NO: 6159
  GFR-binding peptide
  MOD_RES (2)..(4)..(38): Xaa is C or S
  MOD_RES (16)..(17)..(18)..(19)..(20): Xaa is A or G
  MOD_RES (21)..(22)..(23)..(24): Xaa is A or G or is absent

SEQ ID NO: 79014 - protein, 35 aa, Artificial Sequence
  GFR-binding peptide
  MOD_RES (1)..(3)..(35): Xaa is C or S
XGXRDVVMGQYNKLIIQQKDNLYLMSIASMKTPTX

SEQ ID NO: 79015 - protein, 41 aa, Artificial Sequence; identical to SEQ ID NO: 4201
  GFR-binding peptide
  MOD_RES (2)..(4)..(35)..(36): Xaa is C or S

SEQ ID NO: 79016 - protein, 38 aa, Artificial Sequence
  GFR-binding peptide
  MOD_RES (2)..(4)..(38): Xaa is C or S
  MOD_RES (16)..(17)..(18)..(19)..(20): Xaa is A or G
  MOD_RES (21)..(22)..(23)..(24): Xaa is A or G or is absent
SXGXRDVVMGQYNKLXXXXXXXXXLYLMSIASMKTPTX

SEQ ID NO: 79017 - protein, 32 aa, Artificial Sequence; identical to SEQ ID NO: 4202
  GFR-binding peptide
  MOD_RES (11)..(12)..(13)..(14)..(15): Xaa is A or G
  MOD_RES (16)..(17)..(18)..(19): Xaa is A or G or is absent

SEQ ID NO: 79018 - protein, 33 aa, Artificial Sequence; identical to SEQ ID NO: 57210
  GFR-binding peptide
  MOD_RES (1)..(32)..(33): Xaa is C or S

SEQ ID NO: 79019 - protein, 39 aa, Artificial Sequence; identical to SEQ ID NO: 27298
  GFR-binding peptide
  MOD_RES (2)..(4)..(38)..(39): Xaa is C or S
  MOD_RES (16)..(17)..(18)..(19)..(20): Xaa is A or G
  MOD_RES (21)..(22)..(23)..(24): Xaa is A or G or is absent

SEQ ID NO: 79020 - protein, 37 aa, Artificial Sequence; identical to SEQ ID NO: 4205
  GFR-binding peptide
  MOD_RES (1)..(3)..(37): Xaa is C or S
  MOD_RES (15)..(16)..(17)..(18)..(19): Xaa is A or G
  MOD_RES (20)..(21)..(22)..(23): Xaa is A or G or is absent

SEQ ID NO: 79021 - protein, 38 aa, Artificial Sequence; identical to SEQ ID NO: 4207
  GFR-binding peptide
  MOD_RES (2)..(36)..(37): Xaa is C or S
  MOD_RES (14)..(15)..(16)..(17)..(18): Xaa is A or G
  MOD_RES (19)..(20)..(21)..(22): Xaa is A or G or is absent

SEQ ID NO: 79022 - protein, 32 aa, Artificial Sequence; identical to SEQ ID NO: 6161
  GFR-binding peptide
  MOD_RES (32)..(32): Xaa is C or S

SEQ ID NO: 79023 - protein, 34 aa, Artificial Sequence; identical to SEQ ID NO: 27299
  GFR-binding peptide
  MOD_RES (1)..(3): Xaa is C or S

SEQ ID NO: 79024 - protein, 41 aa, Artificial Sequence; identical to SEQ ID NO: 13560
  GFR-binding peptide
  MOD_RES (2)..(36)..(37): Xaa is C or S
  MOD_RES (14)..(15)..(16)..(17)..(18): Xaa is A or G
  MOD_RES (19)..(20)..(21)..(22): Xaa is A or G or is absent

SEQ ID NO: 79025 - protein, 39 aa, Artificial Sequence; identical to SEQ ID NO: 11618
  GFR-binding peptide
  MOD_RES (1)..(3)..(37)..(38): Xaa is C or S
  MOD_RES (15)..(16)..(17)..(18)..(19): Xaa is A or G
  MOD_RES (20)..(21)..(22)..(23): Xaa is A or G or is absent

SEQ ID NO: 79026 - protein, 38 aa, Artificial Sequence
  GFR-binding peptide
  MOD_RES (32)..(33): Xaa is C or S
RDVVMGQYNKLIIQQKDNLYLMSIASMKTPTXXPGASG

SEQ ID NO: 79027 - protein, 41 aa, Artificial Sequence; identical to SEQ ID NO: 63443
  GFR-binding peptide
  MOD_RES (1)..(3)..(37)..(38): Xaa is C or S
  MOD_RES (15)..(16)..(17)..(18)..(19): Xaa is A or G
  MOD_RES (20)..(21)..(22)..(23): Xaa is A or G or is absent

SEQ ID NO: 79028 - protein, 32 aa, Artificial Sequence; identical to SEQ ID NO: 61704
  GFR-binding peptide
  MOD_RES (31)..(32): Xaa is C or S

SEQ ID NO: 79029 - protein, 35 aa, Artificial Sequence; identical to SEQ ID NO: 11621
  GFR-binding peptide
  MOD_RES (1)..(3)..(35): Xaa is C or S

SEQ ID NO: 79030 - protein, 33 aa, Artificial Sequence; identical to SEQ ID NO: 4211
  GFR-binding peptide
  MOD_RES (33)..(33): Xaa is C or S
  MOD_RES (11)..(12)..(13)..(14)..(15): Xaa is A or G
  MOD_RES (16)..(17)..(18)..(19): Xaa is A or G or is absent

SEQ ID NO: 79031 - protein, 35 aa, Artificial Sequence
  GFR-binding peptide
  MOD_RES (2)..(34)..(35): Xaa is C or S
GXAEVVMDQYNKLVVNNAADLYLISIASLRAPVXX

SEQ ID NO: 79032 - protein, 35 aa, Artificial Sequence; identical to SEQ ID NO: 4214
  GFR-binding peptide
  MOD_RES (2)..(2): Xaa is C or S
  MOD_RES (14)..(15)..(16)..(17)..(18): Xaa is A or G
  MOD_RES (19)..(20)..(21)..(22): Xaa is A or G or is absent

SEQ ID NO: 79033 - protein, 37 aa, Artificial Sequence; identical to SEQ ID NO: 4215
  GFR-binding peptide
  MOD_RES (1)..(35)..(36): Xaa is C or S
  MOD_RES (13)..(14)..(15)..(16)..(17): Xaa is A or G
  MOD_RES (18)..(19)..(20)..(21): Xaa is A or G or is absent

SEQ ID NO: 79034 - protein, 37 aa, Artificial Sequence; identical to SEQ ID NO: 6168
  GFR-binding peptide
  MOD_RES (1)..(3)..(34)..(35): Xaa is C or S

SEQ ID NO: 79035 - protein, 38 aa, Artificial Sequence; identical to SEQ ID NO: 6170
  GFR-binding peptide
  MOD_RES (1)..(3)..(38): Xaa is C or S
  MOD_RES (16)..(17)..(18)..(19)..(20): Xaa is A or G
  MOD_RES (21)..(22)..(23)..(24): Xaa is A or G or is absent

SEQ ID NO: 79036 - protein, 36 aa, Artificial Sequence; identical to SEQ ID NO: 4218
  GFR-binding peptide
  MOD_RES (1)..(3)..(35)..(36): Xaa is C or S

SEQ ID NO: 79037 - protein, 35 aa, Artificial Sequence
  GFR-binding peptide
  MOD_RES (2)..(4): Xaa is C or S
RXGXESVAMGQYNKLYTVVGKDLYLISIASLKTPV

SEQ ID NO: 79038 - protein, 39 aa, Artificial Sequence; identical to SEQ ID NO: 6173
  GFR-binding peptide
  MOD_RES (2)..(36)..(37): Xaa is C or S
  MOD_RES (14)..(15)..(16)..(17)..(18): Xaa is A or G
  MOD_RES (19)..(20)..(21)..(22): Xaa is A or G or is absent

SEQ ID NO: 79039 - protein, 32 aa, Artificial Sequence; identical to SEQ ID NO: 4220
  GFR-binding peptide
  MOD_RES (1)..(32): Xaa is C or S

SEQ ID NO: 79040 - protein, 35 aa, Artificial Sequence; identical to SEQ ID NO: 61708
  GFR-binding peptide
  MOD_RES (1)..(35): Xaa is C or S
  MOD_RES (13)..(14)..(15)..(16)..(17): Xaa is A or G
  MOD_RES (18)..(19)..(20)..(21): Xaa is A or G or is absent

SEQ ID NO: 79041 - protein, 35 aa, Artificial Sequence; identical to SEQ ID NO: 6174
  GFR-binding peptide
  MOD_RES (2)..(4)..(35): Xaa is C or S

SEQ ID NO: 79042 - protein, 31 aa, Artificial Sequence; identical to SEQ ID NO: 4221
  GFR-binding peptide
  MOD_RES (1)..(1): Xaa is C or S

SEQ ID NO: 79043 - protein, 37 aa, Artificial Sequence; identical to SEQ ID NO: 4223
  GFR-binding peptide
  MOD_RES (2)..(36)..(37): Xaa is C or S
  MOD_RES (14)..(15)..(16)..(17)..(18): Xaa is A or G
  MOD_RES (19)..(20)..(21)..(22): Xaa is A or G or is absent

SEQ ID NO: 79044 - protein, 33 aa, Artificial Sequence; identical to SEQ ID NO: 6179
  GFR-binding peptide
  MOD_RES (31)..(32): Xaa is C or S

SEQ ID NO: 79045 - protein, 40 aa, Artificial Sequence; identical to SEQ ID NO: 4226
  GFR-binding peptide
  MOD_RES (1)..(3)..(34)..(35): Xaa is C or S

SEQ ID NO: 79046 - protein, 71 aa, Artificial Sequence
  GFR-binding peptide
  MOD_RES (2)..(33)..(39)..(40): Xaa is C or S
KXSKVVMQYNKLVKPTRGVLYLISIASLDQPVXKIPKAXXVPTELNAISMLYFDENEKVVLKKYRDMVVEG

SEQ ID NO: 79047 - protein, 38 aa, Artificial Sequence; identical to SEQ ID NO: 7973
  GFR-binding peptide
  MOD_RES (4)..(5)..(38): Xaa is C or S
  MOD_RES (19)..(20)..(21)..(22)..(23): Xaa is A or G
  MOD_RES (24)..(25)..(26)..(27): Xaa is A or G or is absent

SEQ ID NO: 79048 - protein, 43 aa, Artificial Sequence; identical to SEQ ID NO: 6182
  GFR-binding peptide
  MOD_RES (5)..(6)..(40)..(42): Xaa is C or S
  MOD_RES (20)..(21)..(22)..(23)..(24): Xaa is A or G
  MOD_RES (25)..(26)..(27)..(28): Xaa is A or G or is absent

SEQ ID NO: 79049 - protein, 35 aa, Artificial Sequence; identical to SEQ ID NO: 6183
  GFR-binding peptide
  MOD_RES (32)..(34): Xaa is C or S

SEQ ID NO: 79050 - protein, 34 aa, Artificial Sequence; identical to SEQ ID NO: 6184
  GFR-binding peptide
  MOD_RES (14)..(15)..(16)..(17)..(18): Xaa is A or G
  MOD_RES (19)..(20)..(21)..(22): Xaa is A or G or is absent

SEQ ID NO: 79051 - protein, 42 aa, Artificial Sequence; identical to SEQ ID NO: 6186
  GFR-binding peptide
  MOD_RES (4)..(5)..(40)..(42): Xaa is C or S
  MOD_RES (19)..(20)..(21)..(22)..(23): Xaa is A or G
  MOD_RES (24)..(25)..(26)..(27): Xaa is A or G or is absent

SEQ ID NO: 79052 - protein, 40 aa, Artificial Sequence; identical to SEQ ID NO: 6187
  GFR-binding peptide
  MOD_RES (4)..(5)..(38)..(40): Xaa is C or S
  MOD_RES (19)..(20)..(21)..(22)..(23): Xaa is A or G
  MOD_RES (24)..(25)..(26)..(27): Xaa is A or G or is absent

SEQ ID NO: 79053 - protein, 31 aa, Artificial Sequence; identical to SEQ ID NO: 68624
  GFR-binding peptide
  MOD_RES (1)..(1): Xaa is C or S

SEQ ID NO: 79054 - protein, 37 aa, Artificial Sequence
  GFR-binding peptide
  MOD_RES (6)..(7): Xaa is C or S
GSAGPXXTPTKMSAISMLYLNDKQQIILKNYQGMVVD

SEQ ID NO: 79055 - protein, 33 aa, Artificial Sequence; identical to SEQ ID NO: 6189
  GFR-binding peptide
  MOD_RES (32)..(32): Xaa is C or S

SEQ ID NO: 79056 - protein, 38 aa, Artificial Sequence; identical to SEQ ID NO: 6191
  GFR-binding peptide
  MOD_RES (1)..(2)..(36)..(38): Xaa is C or S
  MOD_RES (16)..(17)..(18)..(19)..(20): Xaa is A or G
  MOD_RES (21)..(22)..(23)..(24): Xaa is A or G or is absent

SEQ ID NO: 79057 - protein, 44 aa, Artificial Sequence; identical to SEQ ID NO: 57242
  GFR-binding peptide
  MOD_RES (6)..(7)..(41)..(43): Xaa is C or S
  MOD_RES (21)..(22)..(23)..(24)..(25): Xaa is A or G
  MOD_RES (26)..(27)..(28)..(29): Xaa is A or G or is absent

SEQ ID NO: 79058 - protein, 38 aa, Artificial Sequence; identical to SEQ ID NO: 57243
  GFR-binding peptide
  MOD_RES (1)..(2)..(36)..(38): Xaa is C or S
  MOD_RES (16)..(17)..(18)..(19)..(20): Xaa is A or G
  MOD_RES (21)..(22)..(23)..(24): Xaa is A or G or is absent

SEQ ID NO: 79059 - protein, 38 aa, Artificial Sequence; identical to SEQ ID NO: 29257
  GFR-binding peptide
  MOD_RES (1)..(35)..(37): Xaa is C or S
  MOD_RES (15)..(16)..(17)..(18)..(19): Xaa is A or G
  MOD_RES (20)..(21)..(22)..(23): Xaa is A or G or is absent

SEQ ID NO: 79060 - protein, 39 aa, Artificial Sequence
  GFR-binding peptide
  MOD_RES (2)..(3)..(37)..(39): Xaa is C or S
  MOD_RES (17)..(18)..(19)..(20)..(21): Xaa is A or G
  MOD_RES (22)..(23)..(24)..(25): Xaa is A or G or is absent
PXXTPTKMSAISMLYLXXXXXXXXXLKNYQGMVVDRXGX

SEQ ID NO: 79061 - protein, 37 aa, Artificial Sequence; identical to SEQ ID NO: 7974
  GFR-binding peptide
  MOD_RES (2)..(3)..(34)..(36): Xaa is C or S

SEQ ID NO: 79062 - protein, 36 aa, Artificial Sequence; identical to SEQ ID NO: 15267
  GFR-binding peptide
  MOD_RES (34)..(36): Xaa is C or S
  MOD_RES (14)..(15)..(16)..(17)..(18): Xaa is A or G
  MOD_RES (19)..(20)..(21)..(22): Xaa is A or G or is absent

SEQ ID NO: 79063 - protein, 39 aa, Artificial Sequence; identical to SEQ ID NO: 65217
  GFR-binding peptide
  MOD_RES (6)..(7)..(39): Xaa is C or S

SEQ ID NO: 79064 - protein, 38 aa, Artificial Sequence; identical to SEQ ID NO: 6195
  GFR-binding peptide
  MOD_RES (4)..(5)..(36)..(38): Xaa is C or S

SEQ ID NO: 79065 - protein, 42 aa, Artificial Sequence; identical to SEQ ID NO: 7977
  GFR-binding peptide
  MOD_RES (5)..(6)..(39)..(41): Xaa is C or S
  MOD_RES (20)..(21)..(22)..(23)..(24): Xaa is A or G
  MOD_RES (25)..(26)..(27)..(28): Xaa is A or G or is absent

SEQ ID NO: 79066 - protein, 38 aa, Artificial Sequence; identical to SEQ ID NO: 7979
  GFR-binding peptide
  MOD_RES (5)..(6)..(38): Xaa is C or S

SEQ ID NO: 79067 - protein, 37 aa, Artificial Sequence
  GFR-binding peptide
  MOD_RES (4)..(5): Xaa is C or S
  MOD_RES (19)..(20)..(21)..(22)..(23): Xaa is A or G
  MOD_RES (24)..(25)..(26)..(27): Xaa is A or G or is absent
SKAXXVPTKLSAISILYLXXXXXXXXXLKNYQGMAVS

SEQ ID NO: 79068 - protein, 43 aa, Artificial Sequence; identical to SEQ ID NO: 7981
  GFR-binding peptide
  MOD_RES (7)..(41)..(43): Xaa is C or S
  MOD_RES (21)..(22)..(23)..(24)..(25): Xaa is A or G
  MOD_RES (26)..(27)..(28)..(29): Xaa is A or G or is absent

SEQ ID NO: 79069 - protein, 36 aa, Artificial Sequence
  GFR-binding peptide
  MOD_RES (1)..(2)..(36): Xaa is C or S
  MOD_RES (16)..(17)..(18)..(19)..(20): Xaa is A or G
  MOD_RES (21)..(22)..(23)..(24): Xaa is A or G or is absent
XXVPEKMSAISILYLXXXXXXXXXLKNYQNMTVESX

SEQ ID NO: 79070 - protein, 36 aa, Artificial Sequence; identical to SEQ ID NO: 57248
  GFR-binding peptide
  MOD_RES (3)..(4): Xaa is C or S
  MOD_RES (18)..(19)..(20)..(21)..(22): Xaa is A or G
  MOD_RES (23)..(24)..(25)..(26): Xaa is A or G or is absent

SEQ ID NO: 79071 - protein, 41 aa, Artificial Sequence; identical to SEQ ID NO: 57249
  GFR-binding peptide
  MOD_RES (5)..(6)..(40): Xaa is C or S
  MOD_RES (20)..(21)..(22)..(23)..(24): Xaa is A or G
  MOD_RES (25)..(26)..(27)..(28): Xaa is A or G or is absent

SEQ ID NO: 79072 - protein, 35 aa, Artificial Sequence; identical to SEQ ID NO: 6199
  GFR-binding peptide
  MOD_RES (4)..(5): Xaa is C or S

SEQ ID NO: 79073 - protein, 44 aa, Artificial Sequence; identical to SEQ ID NO: 7986
  GFR-binding peptide
  MOD_RES (6)..(7)..(41)..(43): Xaa is C or S
  MOD_RES (21)..(22)..(23)..(24)..(25): Xaa is A or G
  MOD_RES (26)..(27)..(28)..(29): Xaa is A or G or is absent

SEQ ID NO: 79074 - protein, 39 aa, Artificial Sequence; identical to SEQ ID NO: 6204
  GFR-binding peptide
  MOD_RES (1)..(2)..(37)..(39): Xaa is C or S
  MOD_RES (16)..(17)..(18)..(19)..(20): Xaa is A or G
  MOD_RES (21)..(22)..(23)..(24): Xaa is A or G or is absent

SEQ ID NO: 79075 - protein, 32 aa, Artificial Sequence; identical to SEQ ID NO: 6206
  GFR-binding peptide
  MOD_RES (14)..(15)..(16)..(17)..(18): Xaa is A or G
  MOD_RES (19)..(20)..(21)..(22): Xaa is A or G or is absent

SEQ ID NO: 79076 - protein, 31 aa, Artificial Sequence; identical to SEQ ID NO: 57259
  GFR-binding peptide
  MOD_RES (31)..(31): Xaa is C or S

SEQ ID NO: 79077 - protein, 39 aa, Artificial Sequence; identical to SEQ ID NO: 6208
  GFR-binding peptide
  MOD_RES (4)..(5)..(37)..(39): Xaa is C or S

SEQ ID NO: 79078 - protein, 35 aa, Artificial Sequence; identical to SEQ ID NO: 6209
  GFR-binding peptide
  MOD_RES (3)..(4)..(35): Xaa is C or S

SEQ ID NO: 79079 - protein, 33 aa, Artificial Sequence
  GFR-binding peptide
  MOD_RES (33)..(33): Xaa is C or S
  MOD_RES (14)..(15)..(16)..(17)..(18): Xaa is A or G
  MOD_RES (19)..(20)..(21)..(22): Xaa is A or G or is absent
APVKTSAISMLYLXXXXXXXXXLKNYQMIVEEX

SEQ ID NO: 79080 - protein, 35 aa, Artificial Sequence; identical to SEQ ID NO: 27350
  GFR-binding peptide
  MOD_RES (2)..(3): Xaa is C or S
  MOD_RES (17)..(18)..(19)..(20)..(21): Xaa is A or G
  MOD_RES (22)..(23)..(24)..(25): Xaa is A or G or is absent

SEQ ID NO: 79081 - protein, 35 aa, Artificial Sequence; identical to SEQ ID NO: 29269
  GFR-binding peptide
  MOD_RES (1)..(33)..(35): Xaa is C or S

SEQ ID NO: 79082 - protein, 35 aa, Artificial Sequence; identical to SEQ ID NO: 7994
  GFR-binding peptide
  MOD_RES (1)..(32)..(34): Xaa is C or S

SEQ ID NO: 79083 - protein, 40 aa, Artificial Sequence; identical to SEQ ID NO: 6211
  GFR-binding peptide
  MOD_RES (4)..(5)..(38)..(40): Xaa is C or S
  MOD_RES (19)..(20)..(21)..(22)..(23): Xaa is A or G
  MOD_RES (24)..(25)..(26)..(27): Xaa is A or G or is absent

SEQ ID NO: 79084 - protein, 38 aa, Artificial Sequence
  GFR-binding peptide
  MOD_RES (2)..(3)..(35)..(37): Xaa is C or S
PXXVPEKMSAISILYLDENKNVVLKNYQNMTVESXAXR

SEQ ID NO: 79085 - protein, 34 aa, Artificial Sequence; identical to SEQ ID NO: 29271
  GFR-binding peptide
  MOD_RES (1)..(2)..(34): Xaa is C or S

SEQ ID NO: 79086 - protein, 34 aa, Artificial Sequence; identical to SEQ ID NO: 6213
  GFR-binding peptide
  MOD_RES (33)..(33): Xaa is C or S
  MOD_RES (14)..(15)..(16)..(17)..(18): Xaa is A or G
  MOD_RES (19)..(20)..(21)..(22): Xaa is A or G or is absent

SEQ ID NO: 79087 - protein, 35 aa, Artificial Sequence; identical to SEQ ID NO: 7996
  GFR-binding peptide
  MOD_RES (1)..(34): Xaa is C or S

SEQ ID NO: 79088 - protein, 39 aa, Artificial Sequence
  GFR-binding peptide
  MOD_RES (6)..(7): Xaa is C or S
  MOD_RES (21)..(22)..(23)..(24)..(25): Xaa is A or G
  MOD_RES (26)..(27)..(28)..(29): Xaa is A or G or is absent
KASKAXXVPTKLSAISILYLXXXXXXXXXLKNYQGMAVS

SEQ ID NO: 79089 - protein, 36 aa, Artificial Sequence; identical to SEQ ID NO: 13601
  GFR-binding peptide
  MOD_RES (1)..(35): Xaa is C or S
  MOD_RES (15)..(16)..(17)..(18)..(19): Xaa is A or G
  MOD_RES (20)..(21)..(22)..(23): Xaa is A or G or is absent

SEQ ID NO: 79090 - protein, 40 aa, Artificial Sequence
  GFR-binding peptide
  MOD_RES (2)..(3)..(37)..(39): Xaa is C or S
  MOD_RES (17)..(18)..(19)..(20)..(21): Xaa is A or G
  MOD_RES (22)..(23)..(24)..(25): Xaa is A or G or is absent
AXXVPTKLSAISILYLXXXXXXXXXLKNYQGMAVSEXGXR

SEQ ID NO: 79091 - protein, 39 aa, Artificial Sequence; identical to SEQ ID NO: 29273
  GFR-binding peptide
  MOD_RES (2)..(3)..(37)..(39): Xaa is C or S
  MOD_RES (17)..(18)..(19)..(20)..(21): Xaa is A or G
  MOD_RES (22)..(23)..(24)..(25): Xaa is A or G or is absent

SEQ ID NO: 79092 - protein, 37 aa, Artificial Sequence; identical to SEQ ID NO: 6218
  GFR-binding peptide
  MOD_RES (6)..(7): Xaa is C or S

SEQ ID NO: 79093 - protein, 41 aa, Artificial Sequence; identical to SEQ ID NO: 7999
  GFR-binding peptide
  MOD_RES (5)..(6)..(38)..(40): Xaa is C or S

SEQ ID NO: 79094 - protein, 44 aa, Artificial Sequence; identical to SEQ ID NO: 6219
  GFR-binding peptide
  MOD_RES (6)..(7)..(41)..(43): Xaa is C or S
  MOD_RES (21)..(22)..(23)..(24)..(25): Xaa is A or G
  MOD_RES (26)..(27)..(28)..(29): Xaa is A or G or is absent

SEQ ID NO: 79095 - protein, 40 aa, Artificial Sequence
  GFR-binding peptide
  MOD_RES (5)..(6)..(40): Xaa is C or S
  MOD_RES (20)..(21)..(22)..(23)..(24): Xaa is A or G
  MOD_RES (25)..(26)..(27)..(28): Xaa is A or G or is absent
ASKAXXVPTKLSAISILYLXXXXXXXXXLKNYQGMAVSEX

SEQ ID NO: 79096 - protein, 32 aa, Artificial Sequence; identical to SEQ ID NO: 29279
  GFR-binding peptide
  MOD_RES (14)..(15)..(16)..(17)..(18): Xaa is A or G
  MOD_RES (19)..(20)..(21)..(22): Xaa is A or G or is absent

SEQ ID NO: 79097 - protein, 37 aa, Artificial Sequence; identical to SEQ ID NO: 65247
  GFR-binding peptide
  MOD_RES (5)..(6): Xaa is C or S

SEQ ID NO: 79098 - protein, 31 aa, Artificial Sequence; identical to SEQ ID NO: 27359
  GFR-binding peptide
  MOD_RES (1)..(1): Xaa is C or S

SEQ ID NO: 79099 - protein, 38 aa, Artificial Sequence; identical to SEQ ID NO: 6224
  GFR-binding peptide
  MOD_RES (7)..(7): Xaa is C or S

SEQ ID NO: 79100 - protein, 37 aa, Artificial Sequence
  GFR-binding peptide
  MOD_RES (1)..(35)..(37): Xaa is C or S
  MOD_RES (15)..(16)..(17)..(18)..(19): Xaa is A or G
  MOD_RES (20)..(21)..(22)..(23): Xaa is A or G or is absent
XTPTKMSAISMLYLXXXXXXXXXLKNYQGMVVDRXGX

SEQ ID NO: 79101 - protein, 33 aa, Artificial Sequence; identical to SEQ ID NO: 15294
  GFR-binding peptide
  MOD_RES (1)..(33): Xaa is C or S

SEQ ID NO: 79102 - protein, 40 aa, Artificial Sequence; identical to SEQ ID NO: 27360
  GFR-binding peptide
  MOD_RES (5)..(6)..(40): Xaa is C or S
  MOD_RES (20)..(21)..(22)..(23)..(24): Xaa is A or G
  MOD_RES (25)..(26)..(27)..(28): Xaa is A or G or is absent

SEQ ID NO: 79103 - protein, 41 aa, Artificial Sequence
  GFR-binding peptide
  MOD_RES (4)..(5)..(39)..(41): Xaa is C or S
  MOD_RES (19)..(20)..(21)..(22)..(23): Xaa is A or G
  MOD_RES (24)..(25)..(26)..(27): Xaa is A or G or is absent
PASXXVPARLSAISILYLXXXXXXXXXLKNYQDMVVEAXGX

SEQ ID NO: 79104 - protein, 40 aa, Artificial Sequence; identical to SEQ ID NO: 6226
  GFR-binding peptide
  MOD_RES (5)..(6)..(39): Xaa is C or S

SEQ ID NO: 79105 - protein, 41 aa, Artificial Sequence; identical to SEQ ID NO: 57280
  GFR-binding peptide
  MOD_RES (6)..(7)..(39)..(41): Xaa is C or S

SEQ ID NO: 79106 - protein, 37 aa, Artificial Sequence; identical to SEQ ID NO: 6230
  GFR-binding peptide
  MOD_RES (34)..(36): Xaa is C or S
  MOD_RES (14)..(15)..(16)..(17)..(18): Xaa is A or G
  MOD_RES (19)..(20)..(21)..(22): Xaa is A or G or is absent

SEQ ID NO: 79107 - protein, 36 aa, Artificial Sequence
  GFR-binding peptide
  MOD_RES (2)..(3)..(35): Xaa is C or S
PXXVPEKMSAISILYLDENKNVVLKNYQNMTVESXA

SEQ ID NO: 79108 - protein, 37 aa, Artificial Sequence; identical to SEQ ID NO: 8005
  GFR-binding peptide
  MOD_RES (4)..(4): Xaa is C or S
  MOD_RES (18)..(19)..(20)..(21)..(22): Xaa is A or G
  MOD_RES (23)..(24)..(25)..(26): Xaa is A or G or is absent

SEQ ID NO: 79109 - protein, 36 aa, Artificial Sequence; identical to SEQ ID NO: 8007
  GFR-binding peptide
  MOD_RES (3)..(4)..(35): Xaa is C or S

SEQ ID NO: 79110 - protein, 36 aa, Artificial Sequence; identical to SEQ ID NO: 8008
  GFR-binding peptide
  MOD_RES (1)..(2)..(35): Xaa is C or S

SEQ ID NO: 79111 - protein, 41 aa, Artificial Sequence; identical to SEQ ID NO: 13612
  GFR-binding peptide
  MOD_RES (6)..(7)..(39)..(41): Xaa is C or S

SEQ ID NO: 79112 - protein, 36 aa, Artificial Sequence; identical to SEQ ID NO: 15303
  GFR-binding peptide
  MOD_RES (1)..(2)..(34)..(36): Xaa is C or S

SEQ ID NO: 79113 - protein, 34 aa, Artificial Sequence; identical to SEQ ID NO: 57288
  GFR-binding peptide
  MOD_RES (2)..(3)..(34): Xaa is C or S

SEQ ID NO: 79114 - protein, 40 aa, Artificial Sequence; identical to SEQ ID NO: 29289
  GFR-binding peptide
  MOD_RES (2)..(3)..(37)..(39): Xaa is C or S
  MOD_RES (17)..(18)..(19)..(20)..(21): Xaa is A or G
  MOD_RES (22)..(23)..(24)..(25): Xaa is A or G or is absent

SEQ ID NO: 79115 - protein, 35 aa, Artificial Sequence; identical to SEQ ID NO: 15305
  GFR-binding peptide
  MOD_RES (2)..(3): Xaa is C or S
  MOD_RES (17)..(18)..(19)..(20)..(21): Xaa is A or G
  MOD_RES (22)..(23)..(24)..(25): Xaa is A or G or is absent

SEQ ID NO: 79116 - protein, 35 aa, Artificial Sequence; identical to SEQ ID NO: 6238
  GFR-binding peptide
  MOD_RES (1)..(32)..(34): Xaa is C or S

SEQ ID NO: 79117 - protein, 35 aa, Artificial Sequence; identical to SEQ ID NO: 57292
  GFR-binding peptide
  MOD_RES (1)..(2)..(34): Xaa is C or S

SEQ ID NO: 79118 - protein, 40 aa, Artificial Sequence; identical to SEQ ID NO: 6239
  GFR-binding peptide
  MOD_RES (4)..(5)..(38)..(40): Xaa is C or S

SEQ ID NO: 79119 - protein, 37 aa, Artificial Sequence; identical to SEQ ID NO: 27379
  GFR-binding peptide
  MOD_RES (4)..(5)..(37): Xaa is C or S

SEQ ID NO: 79120 - protein, 42 aa, Artificial Sequence; identical to SEQ ID NO: 8013
  GFR-binding peptide
  MOD_RES (5)..(6)..(40)..(42): Xaa is C or S
  MOD_RES (20)..(21)..(22)..(23)..(24): Xaa is A or G
  MOD_RES (25)..(26)..(27)..(28): Xaa is A or G or is absent

SEQ ID NO: 79121 - protein, 34 aa, Artificial Sequence; identical to SEQ ID NO: 8014
  GFR-binding peptide
  MOD_RES (2)..(3)..(34): Xaa is C or S

SEQ ID NO: 79122 - protein, 33 aa, Artificial Sequence
  GFR-binding peptide
  MOD_RES (1)..(2): Xaa is C or S
XXTPTKMSAISMLYLNDKQQIILKNYQGMVVDR

SEQ ID NO: 79123 - protein, 39 aa, Artificial Sequence; identical to SEQ ID NO: 6241
  GFR-binding peptide
  MOD_RES (4)..(5)..(38): Xaa is C or S
  MOD_RES (19)..(20)..(21)..(22)..(23): Xaa is A or G
  MOD_RES (24)..(25)..(26)..(27): Xaa is A or G or is absent

SEQ ID NO: 79124 - protein, 37 aa, Artificial Sequence; identical to SEQ ID NO: 6242
  GFR-binding peptide
  MOD_RES (2)..(3)..(35)..(37): Xaa is C or S

SEQ ID NO: 79125 - protein, 42 aa, Artificial Sequence; identical to SEQ ID NO: 8016
  GFR-binding peptide
  MOD_RES (5)..(6)..(39)..(41): Xaa is C or S

SEQ ID NO: 79126 - protein, 39 aa, Artificial Sequence; identical to SEQ ID NO: 6243
  GFR-binding peptide
  MOD_RES (3)..(4)..(38): Xaa is C or S
  MOD_RES (18)..(19)..(20)..(21)..(22): Xaa is A or G
  MOD_RES (23)..(24)..(25)..(26): Xaa is A or G or is absent

SEQ ID NO: 79127 - protein, 39 aa, Artificial Sequence; identical to SEQ ID NO: 8017
  GFR-binding peptide
  MOD_RES (3)..(4)..(38): Xaa is C or S
  MOD_RES (18)..(19)..(20)..(21)..(22): Xaa is A or G
  MOD_RES (23)..(24)..(25)..(26): Xaa is A or G or is absent

SEQ ID NO: 79128 - protein, 34 aa, Artificial Sequence; identical to SEQ ID NO: 8019
  GFR-binding peptide
  MOD_RES (34)..(34): Xaa is C or S
  MOD_RES (14)..(15)..(16)..(17)..(18): Xaa is A or G
  MOD_RES (19)..(20)..(21)..(22): Xaa is A or G or is absent

SEQ ID NO: 79129 - protein, 39 aa, Artificial Sequence; identical to SEQ ID NO: 8020
  GFR-binding peptide
  MOD_RES (7)..(39): Xaa is C or S

SEQ ID NO: 79130 - protein, 31 aa, Artificial Sequence; identical to SEQ ID NO: 15316
  GFR-binding peptide
  MOD_RES (1)..(1): Xaa is C or S

SEQ ID NO: 79131 - protein, 40 aa, Artificial Sequence; identical to SEQ ID NO: 8022
  GFR-binding peptide
  MOD_RES (7)..(7): Xaa is C or S
  MOD_RES (21)..(22)..(23)..(24)..(25): Xaa is A or G
  MOD_RES (26)..(27)..(28)..(29): Xaa is A or G or is absent

SEQ ID NO: 79132 - protein, 37 aa, Artificial Sequence; identical to SEQ ID NO: 6245
  GFR-binding peptide
  MOD_RES (4)..(5)..(37): Xaa is C or S

SEQ ID NO: 79133 - protein, 32 aa, Artificial Sequence; identical to SEQ ID NO: 57305
  GFR-binding peptide
  MOD_RES (1)..(1): Xaa is C or S

SEQ ID NO: 79134 - protein, 34 aa, Artificial Sequence
  GFR-binding peptide
  MOD_RES (1)..(34): Xaa is C or S
  MOD_RES (15)..(16)..(17)..(18)..(19): Xaa is A or G
  MOD_RES (20)..(21)..(22)..(23): Xaa is A or G or is absent
XAPVKTSAISMLYLXXXXXXXXXLKNYQMIVEEX

SEQ ID NO: 79135 - protein, 36 aa, Artificial Sequence
  GFR-binding peptide
  MOD_RES (3)..(4)..(36): Xaa is C or S
EPXXVPEKMSAISILYLDENKNVVLKNYQNMTVESX

SEQ ID NO: 79136 - protein, 41 aa, Artificial Sequence; identical to SEQ ID NO: 6248
  GFR-binding peptide
  MOD_RES (5)..(39)..(41): Xaa is C or S
  MOD_RES (19)..(20)..(21)..(22)..(23): Xaa is A or G
  MOD_RES (24)..(25)..(26)..(27): Xaa is A or G or is absent

SEQ ID NO: 79137 - protein, 35 aa, Artificial Sequence
  GFR-binding peptide
  MOD_RES (3)..(4): Xaa is C or S
EPXXVPEKMSAISILYLDENKNVVLKNYQNMTVES

SEQ ID NO: 79138 - protein, 34 aa, Artificial Sequence; identical to SEQ ID NO: 6249
  GFR-binding peptide
  MOD_RES (3)..(4): Xaa is C or S

SEQ ID NO: 79139 - protein, 38 aa, Artificial Sequence; identical to SEQ ID NO: 29297
  GFR-binding peptide
  MOD_RES (6)..(7): Xaa is C or S

SEQ ID NO: 79140 - protein, 41 aa, Artificial Sequence
  GFR-binding peptide
  MOD_RES (5)..(6)..(40): Xaa is C or S
  MOD_RES (20)..(21)..(22)..(23)..(24): Xaa is A or G
  MOD_RES (25)..(26)..(27)..(28): Xaa is A or G or is absent
APASXXVPARLSAISILYLXXXXXXXXXLKNYQDMVVEAXG

SEQ ID NO: 79141 - protein, 39 aa, Artificial Sequence; identical to SEQ ID NO: 8025
  GFR-binding peptide
  MOD_RES (6)..(7)..(38): Xaa is C or S

SEQ ID NO: 79142 - protein, 38 aa, Artificial Sequence; identical to SEQ ID NO: 6254
  GFR-binding peptide
  MOD_RES (4)..(5): Xaa is C or S
  MOD_RES (19)..(20)..(21)..(22)..(23): Xaa is A or G
  MOD_RES (24)..(25)..(26)..(27): Xaa is A or G or is absent

SEQ ID NO: 79143 - protein, 34 aa, Artificial Sequence
  GFR-binding peptide
  MOD_RES (2)..(3)..(34): Xaa is C or S
TXXAPVKTSAISMLYLDNGRVLLLKNYQMIVEEX

SEQ ID NO: 79144 - protein, 34 aa, Artificial Sequence
  GFR-binding peptide
  MOD_RES (2)..(3): Xaa is C or S
SXXVPARLSAISILYLDAANNVVLKNYQDMVVEA

SEQ ID NO: 79145 - protein, 42 aa, Artificial Sequence; identical to SEQ ID NO: 6256
  GFR-binding peptide
  MOD_RES (5)..(6)..(40)..(42): Xaa is C or S
  MOD_RES (20)..(21)..(22)..(23)..(24): Xaa is A or G
  MOD_RES (25)..(26)..(27)..(28): Xaa is A or G or is absent

SEQ ID NO: 79146 - protein, 37 aa, Artificial Sequence; identical to SEQ ID NO: 8028
  GFR-binding peptide
  MOD_RES (1)..(35)..(37): Xaa is C or S
  MOD_RES (15)..(16)..(17)..(18)..(19): Xaa is A or G
  MOD_RES (20)..(21)..(22)..(23): Xaa is A or G or is absent

SEQ ID NO: 79147 - protein, 34 aa, Artificial Sequence; identical to SEQ ID NO: 6259
  GFR-binding peptide
  MOD_RES (1)..(34): Xaa is C or S
  MOD_RES (15)..(16)..(17)..(18)..(19): Xaa is A or G
  MOD_RES (20)..(21)..(22)..(23): Xaa is A or G or is absent

SEQ ID NO: 79148 - protein, 38 aa, Artificial Sequence
  GFR-binding peptide
  MOD_RES (5)..(6): Xaa is C or S
  MOD_RES (20)..(21)..(22)..(23)..(24): Xaa is A or G
  MOD_RES (25)..(26)..(27)..(28): Xaa is A or G or is absent
VPSTXXAPVKTSAISMLYLXXXXXXXXXLKNYQMIVEE

SEQ ID NO: 79149 - protein, 43 aa, Artificial Sequence; identical to SEQ ID NO: 6260
  GFR-binding peptide
  MOD_RES (5)..(6)..(40)..(42): Xaa is C or S
  MOD_RES (20)..(21)..(22)..(23)..(24): Xaa is A or G
  MOD_RES (25)..(26)..(27)..(28): Xaa is A or G or is absent

SEQ ID NO: 79150 - protein, 33 aa, Artificial Sequence; identical to SEQ ID NO: 6261
  GFR-binding peptide
  MOD_RES (1)..(1): Xaa is C or S
  MOD_RES (15)..(16)..(17)..(18)..(19): Xaa is A or G
  MOD_RES (20)..(21)..(22)..(23): Xaa is A or G or is absent

SEQ ID NO: 79151 - protein, 38 aa, Artificial Sequence; identical to SEQ ID NO: 6262
  GFR-binding peptide
  MOD_RES (4)..(5)..(38): Xaa is C or S
  MOD_RES (19)..(20)..(21)..(22)..(23): Xaa is A or G
  MOD_RES (24)..(25)..(26)..(27): Xaa is A or G or is absent

SEQ ID NO: 79152 - protein, 42 aa, Artificial Sequence; identical to SEQ ID NO: 57318
  GFR-binding peptide
  MOD_RES (6)..(7)..(41): Xaa is C or S
  MOD_RES (21)..(22)..(23)..(24)..(25): Xaa is A or G
  MOD_RES (26)..(27)..(28)..(29): Xaa is A or G or is absent

SEQ ID NO: 79153 - protein, 38 aa, Artificial Sequence
  GFR-binding peptide
  MOD_RES (1)..(35)..(37): Xaa is C or S
  MOD_RES (15)..(16)..(17)..(18)..(19): Xaa is A or G
  MOD_RES (20)..(21)..(22)..(23): Xaa is A or G or is absent
XVPEKMSAISILYLXXXXXXXXXLKNYQNMTVESXAXR

SEQ ID NO: 79154 - protein, 37 aa, Artificial Sequence; identical to SEQ ID NO: 6263
  GFR-binding peptide
  MOD_RES (1)..(35)..(37): Xaa is C or S
  MOD_RES (15)..(16)..(17)..(18)..(19): Xaa is A or G
  MOD_RES (20)..(21)..(22)..(23): Xaa is A or G or is absent

SEQ ID NO: 79155 - protein, 40 aa, Artificial Sequence; identical to SEQ ID NO: 8033
  GFR-binding peptide
  MOD_RES (4)..(5)..(37)..(39): Xaa is C or S

SEQ ID NO: 79156 - protein, 35 aa, Artificial Sequence
  GFR-binding peptide
  MOD_RES (34)..(34): Xaa is C or S
  MOD_RES (14)..(15)..(16)..(17)..(18): Xaa is A or G
  MOD_RES (19)..(20)..(21)..(22): Xaa is A or G or is absent
VPARLSAISILYLXXXXXXXXXLKNYQDMVVEAXG

SEQ ID NO: 79157 - protein, 34 aa, Artificial Sequence; identical to SEQ ID NO: 57320
  GFR-binding peptide
  MOD_RES (31)..(33): Xaa is C or S

SEQ ID NO: 79158 - protein, 34 aa, Artificial Sequence; identical to SEQ ID NO: 6265
  GFR-binding peptide
  MOD_RES (1)..(2)..(34): Xaa is C or S

SEQ ID NO: 79159 - protein, 39 aa, Artificial Sequence; identical to SEQ ID NO: 6266
  GFR-binding peptide
  MOD_RES (6)..(7): Xaa is C or S
  MOD_RES (21)..(22)..(23)..(24)..(25): Xaa is A or G
  MOD_RES (26)..(27)..(28)..(29): Xaa is A or G or is absent

SEQ ID NO: 79160 - protein, 38 aa, Artificial Sequence; identical to SEQ ID NO: 8036
  GFR-binding peptide
  MOD_RES (5)..(6): Xaa is C or S
  MOD_RES (20)..(21)..(22)..(23)..(24): Xaa is A or G
  MOD_RES (25)..(26)..(27)..(28): Xaa is A or G or is absent

SEQ ID NO: 79161 - protein, 33 aa, Artificial Sequence; identical to SEQ ID NO: 8037
  GFR-binding peptide
  MOD_RES (1)..(32): Xaa is C or S

SEQ ID NO: 79162 - protein, 39 aa, Artificial Sequence; identical to SEQ ID NO: 57326
  GFR-binding peptide
  MOD_RES (3)..(4)..(38): Xaa is C or S
  MOD_RES (18)..(19)..(20)..(21)..(22): Xaa is A or G
  MOD_RES (23)..(24)..(25)..(26): Xaa is A or G or is absent

SEQ ID NO: 79163 - protein, 36 aa, Artificial Sequence; identical to SEQ ID NO: 66956
  GFR-binding peptide
  MOD_RES (5)..(6): Xaa is C or S

SEQ ID NO: 79164 - protein, 41 aa, Artificial Sequence; identical to SEQ ID NO: 6267
  GFR-binding peptide
  MOD_RES (4)..(5)..(38)..(40): Xaa is C or S
  MOD_RES (19)..(20)..(21)..(22)..(23): Xaa is A or G
  MOD_RES (24)..(25)..(26)..(27): Xaa is A or G or is absent

SEQ ID NO: 79165 - protein, 35 aa, Artificial Sequence; identical to SEQ ID NO: 6270
  GFR-binding peptide
  MOD_RES (1)..(2): Xaa is C or S
  MOD_RES (16)..(17)..(18)..(19)..(20): Xaa is A or G
  MOD_RES (21)..(22)..(23)..(24): Xaa is A or G or is absent

SEQ ID NO: 79166 - protein, 39 aa, Artificial Sequence; identical to SEQ ID NO: 8038
  GFR-binding peptide
  MOD_RES (1)..(2)..(36)..(38): Xaa is C or S
  MOD_RES (16)..(17)..(18)..(19)..(20): Xaa is A or G
  MOD_RES (21)..(22)..(23)..(24): Xaa is A or G or is absent

SEQ ID NO: 79167 - protein, 33 aa, Artificial Sequence; identical to SEQ ID NO: 8039
  GFR-binding peptide
  MOD_RES (1)..(32): Xaa is C or S

SEQ ID NO: 79168 - protein, 37 aa, Artificial Sequence; identical to SEQ ID NO: 8040
  GFR-binding peptide
  MOD_RES (1)..(2)..(36): Xaa is C or S
  MOD_RES (16)..(17)..(18)..(19)..(20): Xaa is A or G
  MOD_RES (21)..(22)..(23)..(24): Xaa is A or G or is absent

SEQ ID NO: 79169 - protein, 38 aa, Artificial Sequence
  GFR-binding peptide
  MOD_RES (5)..(6)..(38): Xaa is C or S
APASXXVPARLSAISILYLDAANNVVLKNYQDMVVEAX

SEQ ID NO: 79170 - protein, 41 aa, Artificial Sequence; identical to SEQ ID NO: 65296
  GFR-binding peptide
  MOD_RES (3)..(4)..(38)..(40): Xaa is C or S
  MOD_RES (18)..(19)..(20)..(21)..(22): Xaa is A or G
  MOD_RES (23)..(24)..(25)..(26): Xaa is A or G or is absent

SEQ ID NO: 79171 - protein, 38 aa, Artificial Sequence; identical to SEQ ID NO: 8044
  GFR-binding peptide
  MOD_RES (3)..(4)..(38): Xaa is C or S
  MOD_RES (18)..(19)..(20)..(21)..(22): Xaa is A or G
  MOD_RES (23)..(24)..(25)..(26): Xaa is A or G or is absent

SEQ ID NO: 79172 - protein, 40 aa, Artificial Sequence; identical to SEQ ID NO: 8045
  GFR-binding peptide
  MOD_RES (4)..(5)..(37)..(39): Xaa is C or S

SEQ ID NO: 79173 - protein, 36 aa, Artificial Sequence; identical to SEQ ID NO: 8046
  GFR-binding peptide
  MOD_RES (1)..(2)..(33)..(35): Xaa is C or S

SEQ ID NO: 79174 - protein, 42 aa, Artificial Sequence; identical to SEQ ID NO: 6280
  GFR-binding peptide
  MOD_RES (4)..(5)..(39)..(41): Xaa is C or S
  MOD_RES (19)..(20)..(21)..(22)..(23): Xaa is A or G
  MOD_RES (24)..(25)..(26)..(27): Xaa is A or G or is absent

SEQ ID NO: 79175 - protein, 39 aa, Artificial Sequence; identical to SEQ ID NO: 6282
  GFR-binding peptide
  MOD_RES (3)..(4)..(38): Xaa is C or S
  MOD_RES (18)..(19)..(20)..(21)..(22): Xaa is A or G
  MOD_RES (23)..(24)..(25)..(26): Xaa is A or G or is absent

SEQ ID NO: 79176 - protein, 32 aa, Artificial Sequence; identical to SEQ ID NO: 8048
  GFR-binding peptide
  MOD_RES (1)..(2): Xaa is C or S

SEQ ID NO: 79177 - protein, 38 aa, Artificial Sequence; identical to SEQ ID NO: 6283
  GFR-binding peptide
  MOD_RES (1)..(2)..(36)..(38): Xaa is C or S
  MOD_RES (16)..(17)..(18)..(19)..(20): Xaa is A or G
  MOD_RES (21)..(22)..(23)..(24): Xaa is A or G or is absent

SEQ ID NO: 79178 - protein, 33 aa, Artificial Sequence; identical to SEQ ID NO: 8050
  GFR-binding peptide
  MOD_RES (1)..(1): Xaa is C or S
  MOD_RES (15)..(16)..(17)..(18)..(19): Xaa is A or G
  MOD_RES (20)..(21)..(22)..(23): Xaa is A or G or is absent

SEQ ID NO: 79179 - protein, 32 aa, Artificial Sequence; identical to SEQ ID NO: 8053
  GFR-binding peptide
  MOD_RES (32)..(32): Xaa is C or S

SEQ ID NO: 79180 - protein, 40 aa, Artificial Sequence; identical to SEQ ID NO: 65301
  GFR-binding peptide
  MOD_RES (2)..(3)..(37)..(39): Xaa is C or S
  MOD_RES (17)..(18)..(19)..(20)..(21): Xaa is A or G
  MOD_RES (22)..(23)..(24)..(25): Xaa is A or G or is absent

SEQ ID NO: 79181 - protein, 40 aa, Artificial Sequence; identical to SEQ ID NO: 57338
  GFR-binding peptide
  MOD_RES (5)..(6)..(38)..(40): Xaa is C or S

SEQ ID NO: 79182 - protein, 34 aa, Artificial Sequence; identical to SEQ ID NO: 6287
  GFR-binding peptide
  MOD_RES (1)..(2): Xaa is C or S
  MOD_RES (16)..(17)..(18)..(19)..(20): Xaa is A or G
  MOD_RES (21)..(22)..(23)..(24): Xaa is A or G or is absent

SEQ ID NO: 79183 - protein, 44 aa, Artificial Sequence; identical to SEQ ID NO: 6288
  GFR-binding peptide
  MOD_RES (6)..(7)..(42)..(44): Xaa is C or S
  MOD_RES (21)..(22)..(23)..(24)..(25): Xaa is A or G
  MOD_RES (26)..(27)..(28)..(29): Xaa is A or G or is absent

SEQ ID NO: 79184 - protein, 35 aa, Artificial Sequence; identical to SEQ ID NO: 6290
  GFR-binding peptide
  MOD_RES (3)..(4)..(35): Xaa is C or S

SEQ ID NO: 79185 - protein, 41 aa, Artificial Sequence; identical to SEQ ID NO: 6294
  GFR-binding peptide
  MOD_RES (5)..(6)..(40): Xaa is C or S
  MOD_RES (20)..(21)..(22)..(23)..(24): Xaa is A or G
  MOD_RES (25)..(26)..(27)..(28): Xaa is A or G or is absent

SEQ ID NO: 79186 - protein, 36 aa, Artificial Sequence; identical to SEQ ID NO: 8059
  GFR-binding peptide
  MOD_RES (1)..(35): Xaa is C or S
  MOD_RES (15)..(16)..(17)..(18)..(19): Xaa is A or G
  MOD_RES (20)..(21)..(22)..(23): Xaa is A or G or is absent

SEQ ID NO: 79187 - protein, 36 aa, Artificial Sequence; identical to SEQ ID NO: 6298
  GFR-binding peptide
  MOD_RES (2)..(3)..(36): Xaa is C or S
  MOD_RES (17)..(18)..(19)..(20)..(21): Xaa is A or G
  MOD_RES (22)..(23)..(24)..(25): Xaa is A or G or is absent

SEQ ID NO: 79188 - protein, 38 aa, Artificial Sequence; identical to SEQ ID NO: 8061
  GFR-binding peptide
  MOD_RES (5)..(6): Xaa is C or S
  MOD_RES (20)..(21)..(22)..(23)..(24): Xaa is A or G
  MOD_RES (25)..(26)..(27)..(28): Xaa is A or G or is absent

SEQ ID NO: 79189 - protein, 38 aa, Artificial Sequence; identical to SEQ ID NO: 8063
  GFR-binding peptide
  MOD_RES (4)..(5)..(37): Xaa is C or S

SEQ ID NO: 79190 - protein, 39 aa, Artificial Sequence; identical to SEQ ID NO: 68711
  GFR-binding peptide
  MOD_RES (3)..(4)..(38): Xaa is C or S
  MOD_RES (18)..(19)..(20)..(21)..(22): Xaa is A or G
  MOD_RES (23)..(24)..(25)..(26): Xaa is A or G or is absent

SEQ ID NO: 79191 - protein, 38 aa, Artificial Sequence; identical to SEQ ID NO: 13680
  GFR-binding peptide
  MOD_RES (5)..(6)..(38): Xaa is C or S

SEQ ID NO: 79192 - protein, 42 aa, Artificial Sequence
  GFR-binding peptide
  MOD_RES (6)..(7)..(41): Xaa is C or S
  MOD_RES (21)..(22)..(23)..(24)..(25): Xaa is A or G
  MOD_RES (26)..(27)..(28)..(29): Xaa is A or G or is absent
AAPASXXVPARLSAISILYLXXXXXXXXXLKNYQDMVVEAXG

SEQ ID NO: 79193 - protein, 34 aa, Artificial Sequence
  GFR-binding peptide
  MOD_RES (1)..(2)..(34): Xaa is C or S
XXVPTKLSAISILYLDKGVVTYLKNYQGMAVSEX

SEQ ID NO: 79194 - protein, 40 aa, Artificial Sequence
  GFR-binding peptide
  MOD_RES (6)..(7): Xaa is C or S
  MOD_RES (21)..(22)..(23)..(24)..(25): Xaa is A or G
  MOD_RES (26)..(27)..(28)..(29): Xaa is A or G or is absent
AAPASXXVPARLSAISILYLXXXXXXXXXLKNYQDMVVEA

SEQ ID NO: 79195 - protein, 36 aa, Artificial Sequence
  GFR-binding peptide
  MOD_RES (1)..(2)..(35): Xaa is C or S
  MOD_RES (16)..(17)..(18)..(19)..(20): Xaa is A or G
  MOD_RES (21)..(22)..(23)..(24): Xaa is A or G or is absent
XXAPVKTSAISMLYLXXXXXXXXXLKNYQMIVEEXG

SEQ ID NO: 79196 - protein, 38 aa, Artificial Sequence; identical to SEQ ID NO: 6302
  GFR-binding peptide
  MOD_RES (2)..(3)..(35)..(37): Xaa is C or S

SEQ ID NO: 79197 - protein, 35 aa, Artificial Sequence; identical to SEQ ID NO: 8069
  GFR-binding peptide
  MOD_RES (1)..(2): Xaa is C or S
  MOD_RES (16)..(17)..(18)..(19)..(20): Xaa is A or G
  MOD_RES (21)..(22)..(23)..(24): Xaa is A or G or is absent

SEQ ID NO: 79198 - protein, 36 aa, Artificial Sequence; identical to SEQ ID NO: 8070
  GFR-binding peptide
  MOD_RES (1)..(35): Xaa is C or S
  MOD_RES (15)..(16)..(17)..(18)..(19): Xaa is A or G
  MOD_RES (20)..(21)..(22)..(23): Xaa is A or G or is absent

SEQ ID NO: 79199 - protein, 35 aa, Artificial Sequence
  GFR-binding peptide
  MOD_RES (2)..(3)..(35): Xaa is C or S
PXXTPTKMSAISMLYLNDKQQIILKNYQGMVVDRX

SEQ ID NO: 79200 - protein, 33 aa, Artificial Sequence; identical to SEQ ID NO: 8073
  GFR-binding peptide
  MOD_RES (33)..(33): Xaa is C or S
  MOD_RES (14)..(15)..(16)..(17)..(18): Xaa is A or G
  MOD_RES (19)..(20)..(21)..(22): Xaa is A or G or is absent

SEQ ID NO: 79201 - protein, 34 aa, Artificial Sequence; identical to SEQ ID NO: 6303
  GFR-binding peptide
  MOD_RES (1)..(2): Xaa is C or S
  MOD_RES (16)..(17)..(18)..(19)..(20): Xaa is A or G
  MOD_RES (21)..(22)..(23)..(24): Xaa is A or G or is absent

SEQ ID NO: 79202 - protein, 39 aa, Artificial Sequence
  GFR-binding peptide
  MOD_RES (5)..(6)..(38): Xaa is C or S
ASKAXXVPTKLSAISILYLDKGVVTYLKNYQGMAVSEXG

SEQ ID NO: 79203 - protein, 35 aa, Artificial Sequence; identical to SEQ ID NO: 8075
  GFR-binding peptide
  MOD_RES (34)..(34): Xaa is C or S
  MOD_RES (14)..(15)..(16)..(17)..(18): Xaa is A or G
  MOD_RES (19)..(20)..(21)..(22): Xaa is A or G or is absent

SEQ ID NO: 79204 - protein, 39 aa, Artificial Sequence; identical to SEQ ID NO: 6306
  GFR-binding peptide
  MOD_RES (1)..(2)..(36)..(38): Xaa is C or S
  MOD_RES (16)..(17)..(18)..(19)..(20): Xaa is A or G
  MOD_RES (21)..(22)..(23)..(24): Xaa is A or G or is absent

SEQ ID NO: 79205 - protein, 34 aa, Artificial Sequence; identical to SEQ ID NO: 8076
  GFR-binding peptide
  MOD_RES (1)..(34): Xaa is C or S
  MOD_RES (15)..(16)..(17)..(18)..(19): Xaa is A or G
  MOD_RES (20)..(21)..(22)..(23): Xaa is A or G or is absent

SEQ ID NO: 79206 - protein, 38 aa, Artificial Sequence; identical to SEQ ID NO: 6307
  GFR-binding peptide
  MOD_RES (5)..(6): Xaa is C or S
  MOD_RES (20)..(21)..(22)..(23)..(24): Xaa is A or G
  MOD_RES (25)..(26)..(27)..(28): Xaa is A or G or is absent

SEQ ID NO: 79207 - protein, 34 aa, Artificial Sequence; identical to SEQ ID NO: 6308
  GFR-binding peptide
  MOD_RES (1)..(2): Xaa is C or S
  MOD_RES (16)..(17)..(18)..(19)..(20): Xaa is A or G
  MOD_RES (21)..(22)..(23)..(24): Xaa is A or G or is absent

SEQ ID NO: 79208 - protein, 38 aa, Artificial Sequence; identical to SEQ ID NO: 57363
  GFR-binding peptide
  MOD_RES (2)..(3)..(37): Xaa is C or S
  MOD_RES (17)..(18)..(19)..(20)..(21): Xaa is A or G
  MOD_RES (22)..(23)..(24)..(25): Xaa is A or G or is absent

SEQ ID NO: 79209 - protein, 32 aa, Artificial Sequence; identical to SEQ ID NO: 6309
  GFR-binding peptide
  MOD_RES (2)..(2): Xaa is C or S

SEQ ID NO: 79210 - protein, 37 aa, Artificial Sequence
  GFR-binding peptide
  MOD_RES (3)..(4)..(37): Xaa is C or S
  MOD_RES (18)..(19)..(20)..(21)..(22): Xaa is A or G
  MOD_RES (23)..(24)..(25)..(26): Xaa is A or G or is absent
STXXAPVKTSAISMLYLXXXXXXXXXLKNYQMIVEEX

SEQ ID NO: 79211 - protein, 37 aa, Artificial Sequence
  GFR-binding peptide
  MOD_RES (1)..(2)..(36): Xaa is C or S
  MOD_RES (16)..(17)..(18)..(19)..(20): Xaa is A or G
  MOD_RES (21)..(22)..(23)..(24): Xaa is A or G or is absent
XXTPTKMSAISMLYLXXXXXXXXXLKNYQGMVVDRXG

SEQ ID NO: 79212 - protein, 32 aa, Artificial Sequence; identical to SEQ ID NO: 8084
  GFR-binding peptide
  MOD_RES (14)..(15)..(16)..(17)..(18): Xaa is A or G
  MOD_RES (19)..(20)..(21)..(22): Xaa is A or G or is absent

SEQ ID NO: 79213 - protein, 33 aa, Artificial Sequence
  GFR-binding peptide
  MOD_RES (1)..(32): Xaa is C or S
XAPVKTSAISMLYLDNGRVLLLKNYQMIVEEXG

SEQ ID NO: 79214 - protein, 40 aa, Artificial Sequence; identical to SEQ ID NO: 13695
  GFR-binding peptide
  MOD_RES (6)..(7)..(39): Xaa is C or S

SEQ ID NO: 79215 - protein, 35 aa, Artificial Sequence; identical to SEQ ID NO: 70400
  GFR-binding peptide
  MOD_RES (1)..(2)..(34): Xaa is C or S

SEQ ID NO: 79216 - protein, 35 aa, Artificial Sequence
  GFR-binding peptide
  MOD_RES (3)..(4): Xaa is C or S
GPXXTPTKMSAISMLYLNDKQQIILKNYQGMVVDR

SEQ ID NO: 79217 - protein, 38 aa, Artificial Sequence
  GFR-binding peptide
  MOD_RES (1)..(2)..(36)..(38): Xaa is C or S
  MOD_RES (16)..(17)..(18)..(19)..(20): Xaa is A or G
  MOD_RES (21)..(22)..(23)..(24): Xaa is A or G or is absent
XXVPTKLSAISILYLXXXXXXXXXLKNYQGMAVSEXGX

SEQ ID NO: 79218 - protein, 37 aa, Artificial Sequence; identical to SEQ ID NO: 27454
  GFR-binding peptide
  MOD_RES (3)..(4)..(36): Xaa is C or S

SEQ ID NO: 79219 - protein, 37 aa, Artificial Sequence
  GFR-binding peptide
  MOD_RES (1)..(2)..(36): Xaa is C or S
  MOD_RES (16)..(17)..(18)..(19)..(20): Xaa is A or G
  MOD_RES (21)..(22)..(23)..(24): Xaa is A or G or is absent
XXVPARLSAISILYLXXXXXXXXXLKNYQDMVVEAXG

SEQ ID NO: 79220 - protein, 36 aa, Artificial Sequence; identical to SEQ ID NO: 6317
  GFR-binding peptide
  MOD_RES (4)..(5)..(36): Xaa is C or S

SEQ ID NO: 79221 - protein, 36 aa, Artificial Sequence
  GFR-binding peptide
  MOD_RES (3)..(4): Xaa is C or S
  MOD_RES (18)..(19)..(20)..(21)..(22): Xaa is A or G
  MOD_RES (23)..(24)..(25)..(26): Xaa is A or G or is absent
KAXXVPTKLSAISILYLXXXXXXXXXLKNYQGMAVS

SEQ ID NO: 79222 - protein, 39 aa, Artificial Sequence; identical to SEQ ID NO: 8087
  GFR-binding peptide
  MOD_RES (2)..(3)..(37)..(39): Xaa is C or S
  MOD_RES (17)..(18)..(19)..(20)..(21): Xaa is A or G
  MOD_RES (22)..(23)..(24)..(25): Xaa is A or G or is absent

SEQ ID NO: 79223 - protein, 38 aa, Artificial Sequence; identical to SEQ ID NO: 27459
  GFR-binding peptide
  MOD_RES (4)..(5)..(37): Xaa is C or S

SEQ ID NO: 79224 - protein, 33 aa, Artificial Sequence; identical to SEQ ID NO: 8088
  GFR-binding peptide
  MOD_RES (1)..(1): Xaa is C or S
  MOD_RES (15)..(16)..(17)..(18)..(19): Xaa is A or G
  MOD_RES (20)..(21)..(22)..(23): Xaa is A or G or is absent

SEQ ID NO: 79225 - protein, 34 aa, Artificial Sequence; identical to SEQ ID NO: 8089
  GFR-binding peptide
  MOD_RES (2)..(3)..(34): Xaa is C or S

SEQ ID NO: 79226 - protein, 37 aa, Artificial Sequence; identical to SEQ ID NO: 6322
  GFR-binding peptide
  MOD_RES (2)..(3)..(37): Xaa is C or S
  MOD_RES (17)..(18)..(19)..(20)..(21): Xaa is A or G
  MOD_RES (22)..(23)..(24)..(25): Xaa is A or G or is absent

SEQ ID NO: 79227 - protein, 37 aa, Artificial Sequence; identical to SEQ ID NO: 57371
  GFR-binding peptide
  MOD_RES (3)..(4)..(37): Xaa is C or S
  MOD_RES (18)..(19)..(20)..(21)..(22): Xaa is A or G
  MOD_RES (23)..(24)..(25)..(26): Xaa is A or G or is absent

SEQ ID NO: 79228 - protein, 35 aa, Artificial Sequence; identical to SEQ ID NO: 6323
  GFR-binding peptide
  MOD_RES (1)..(34): Xaa is C or S
  MOD_RES (15)..(16)..(17)..(18)..(19): Xaa is A or G
  MOD_RES (20)..(21)..(22)..(23): Xaa is A or G or is absent

SEQ ID NO: 79229 - protein, 33 aa, Artificial Sequence; identical to SEQ ID NO: 8092
  GFR-binding peptide
  MOD_RES (33)..(33): Xaa is C or S

SEQ ID NO: 79230 - protein, 35 aa, Artificial Sequence; identical to SEQ ID NO: 6325
  GFR-binding peptide
  MOD_RES (34)..(34): Xaa is C or S
  MOD_RES (14)..(15)..(16)..(17)..(18): Xaa is A or G
  MOD_RES (19)..(20)..(21)..(22): Xaa is A or G or is absent

SEQ ID NO: 79231 - protein, 33 aa, Artificial Sequence; identical to SEQ ID NO: 68734
  GFR-binding peptide
  MOD_RES (14)..(15)..(16)..(17)..(18): Xaa is A or G
  MOD_RES (19)..(20)..(21)..(22): Xaa is A or G or is absent

SEQ ID NO: 79232 - protein, 37 aa, Artificial Sequence; identical to SEQ ID NO: 8094
  GFR-binding peptide
  MOD_RES (34)..(36): Xaa is C or S
  MOD_RES (14)..(15)..(16)..(17)..(18): Xaa is A or G
  MOD_RES (19)..(20)..(21)..(22): Xaa is A or G or is absent

SEQ ID NO: 79233 - protein, 38 aa, Artificial Sequence; identical to SEQ ID NO: 57374
  GFR-binding peptide
  MOD_RES (4)..(5)..(37): Xaa is C or S

SEQ ID NO: 79234 - protein, 39 aa, Artificial Sequence
  GFR-binding peptide
  MOD_RES (5)..(6)..(38): Xaa is C or S
SAGPXXTPTKMSAISMLYLNDKQQIILKNYQGMVVDRXG

SEQ ID NO: 79235 - protein, 36 aa, Artificial Sequence; identical to SEQ ID NO: 8095
  GFR-binding peptide
  MOD_RES (1)..(35): Xaa is C or S
  MOD_RES (15)..(16)..(17)..(18)..(19): Xaa is A or G
  MOD_RES (20)..(21)..(22)..(23): Xaa is A or G or is absent

SEQ ID NO: 79236 - protein, 42 aa, Artificial Sequence; identical to SEQ ID NO: 8096
  GFR-binding peptide
  MOD_RES (4)..(5)..(39)..(41): Xaa is C or S
  MOD_RES (19)..(20)..(21)..(22)..(23): Xaa is A or G
  MOD_RES (24)..(25)..(26)..(27): Xaa is A or G or is absent

SEQ ID NO: 79237 - protein, 42 aa, Artificial Sequence; identical to SEQ ID NO: 8097
  GFR-binding peptide
  MOD_RES (6)..(7)..(41): Xaa is C or S
  MOD_RES (21)..(22)..(23)..(24)..(25): Xaa is A or G
  MOD_RES (26)..(27)..(28)..(29): Xaa is A or G or is absent

SEQ ID NO: 79238 - protein, 36 aa, Artificial Sequence; identical to SEQ ID NO: 57379
  GFR-binding peptide
  MOD_RES (5)..(6): Xaa is C or S

SEQ ID NO: 79239 - protein, 36 aa, Artificial Sequence; identical to SEQ ID NO: 29383
  GFR-binding peptide
  MOD_RES (2)..(3)..(35): Xaa is C or S

SEQ ID NO: 79240 - protein, 41 aa, Artificial Sequence; identical to SEQ ID NO: 57381
  GFR-binding peptide
  MOD_RES (5)..(6)..(39)..(41): Xaa is C or S
  MOD_RES (20)..(21)..(22)..(23)..(24): Xaa is A or G
  MOD_RES (25)..(26)..(27)..(28): Xaa is A or G or is absent

SEQ ID NO: 79241 - protein, 33 aa, Artificial Sequence; identical to SEQ ID NO: 27471
  GFR-binding peptide
  MOD_RES (2)..(3): Xaa is C or S

SEQ ID NO: 79242 - protein, 38 aa, Artificial Sequence; identical to SEQ ID NO: 29387
  GFR-binding peptide
  MOD_RES (3)..(4)..(36)..(38): Xaa is C or S

SEQ ID NO: 79243 - protein, 40 aa, Artificial Sequence; identical to SEQ ID NO: 65352
  GFR-binding peptide
  MOD_RES (6)..(7)..(39): Xaa is C or S

SEQ ID NO: 79244 - protein, 39 aa, Artificial Sequence; identical to SEQ ID NO: 8102
  GFR-binding peptide
  MOD_RES (4)..(5)..(39): Xaa is C or S
  MOD_RES (19)..(20)..(21)..(22)..(23): Xaa is A or G
  MOD_RES (24)..(25)..(26)..(27): Xaa is A or G or is absent

SEQ ID NO: 79245 - protein, 43 aa, Artificial Sequence
  GFR-binding peptide
  MOD_RES (6)..(7)..(41)..(43): Xaa is C or S
  MOD_RES (21)..(22)..(23)..(24)..(25): Xaa is A or G
  MOD_RES (26)..(27)..(28)..(29): Xaa is A or G or is absent
HVPKPXXAPTKLSAISVLYLXXXXXXXXXLKNYQNMVVRSXGX

SEQ ID NO: 79246 - protein, 34 aa, Artificial Sequence; identical to SEQ ID NO: 6337
  GFR-binding peptide
  MOD_RES (1)..(32)..(34): Xaa is C or S

SEQ ID NO: 79247 - protein, 33 aa, Artificial Sequence; identical to SEQ ID NO: 6338
  GFR-binding peptide
  MOD_RES (2)..(3): Xaa is C or S

SEQ ID NO: 79248 - protein, 39 aa, Artificial Sequence; identical to SEQ ID NO: 8105
  GFR-binding peptide
  MOD_RES (4)..(5)..(38): Xaa is C or S

SEQ ID NO: 79249 - protein, 42 aa, Artificial Sequence; identical to SEQ ID NO: 29392
  GFR-binding peptide
  MOD_RES (6)..(7)..(39)..(41): Xaa is C or S

SEQ ID NO: 79250 - protein, 38 aa, Artificial Sequence; identical to SEQ ID NO: 13721
  GFR-binding peptide
  MOD_RES (5)..(6): Xaa is C or S
  MOD_RES (20)..(21)..(22)..(23)..(24): Xaa is A or G
  MOD_RES (25)..(26)..(27)..(28): Xaa is A or G or is absent

SEQ ID NO: 79251 - protein, 40 aa, Artificial Sequence; identical to SEQ ID NO: 15404
  GFR-binding peptide
  MOD_RES (2)..(3)..(37)..(39): Xaa is C or S
  MOD_RES (17)..(18)..(19)..(20)..(21): Xaa is A or G
  MOD_RES (22)..(23)..(24)..(25): Xaa is A or G or is absent

SEQ ID NO: 79252 - protein, 32 aa, Artificial Sequence
  GFR-binding peptide
  MOD_RES (14)..(15)..(16)..(17)..(18): Xaa is A or G
  MOD_RES (19)..(20)..(21)..(22): Xaa is A or G or is absent
TPTKMSAISMLYLXXXXXXXXXLKNYQGMVVD

SEQ ID NO: 79253 - protein, 36 aa, Artificial Sequence; identical to SEQ ID NO: 70423
  GFR-binding peptide
  MOD_RES (34)..(36): Xaa is C or S
  MOD_RES (14)..(15)..(16)..(17)..(18): Xaa is A or G
  MOD_RES (19)..(20)..(21)..(22): Xaa is A or G or is absent

SEQ ID NO: 79254 - protein, 39 aa, Artificial Sequence; identical to SEQ ID NO: 8107
  GFR-binding peptide
  MOD_RES (4)..(38): Xaa is C or S
  MOD_RES (18)..(19)..(20)..(21)..(22): Xaa is A or G
  MOD_RES (23)..(24)..(25)..(26): Xaa is A or G or is absent

SEQ ID NO: 79255 - protein, 39 aa, Artificial Sequence; identical to SEQ ID NO: 8108
  GFR-binding peptide
  MOD_RES (5)..(6): Xaa is C or S
  MOD_RES (20)..(21)..(22)..(23)..(24): Xaa is A or G
  MOD_RES (25)..(26)..(27)..(28): Xaa is A or G or is absent

SEQ ID NO: 79256 - protein, 35 aa, Artificial Sequence; identical to SEQ ID NO: 15410
  GFR-binding peptide
  MOD_RES (32)..(34): Xaa is C or S

SEQ ID NO: 79257 - protein, 35 aa, Artificial Sequence; identical to SEQ ID NO: 8109
  GFR-binding peptide
  MOD_RES (1)..(1): Xaa is C or S
  MOD_RES (15)..(16)..(17)..(18)..(19): Xaa is A or G
  MOD_RES (20)..(21)..(22)..(23): Xaa is A or G or is absent

SEQ ID NO: 79258 - protein, 36 aa, Artificial Sequence; identical to SEQ ID NO: 8110
  GFR-binding peptide
  MOD_RES (3)..(35): Xaa is C or S

SEQ ID NO: 79259 - protein, 39 aa, Artificial Sequence; identical to SEQ ID NO: 8112
  GFR-binding peptide
  MOD_RES (6)..(7)..(39): Xaa is C or S

SEQ ID NO: 79260 - protein, 31 aa, Artificial Sequence; identical to SEQ ID NO: 6347
  GFR-binding peptide
  MOD_RES (1)..(1): Xaa is C or S

SEQ ID NO: 79261 - protein, 34 aa, Artificial Sequence; identical to SEQ ID NO: 13732
  GFR-binding peptide
  MOD_RES (2)..(3): Xaa is C or S

SEQ ID NO: 79262 - protein, 34 aa, Artificial Sequence
  GFR-binding peptide
  MOD_RES (1)..(2)..(34): Xaa is C or S
XXVPEKMSAISILYLDENKNVVLKNYQNMTVESX

SEQ ID NO: 79263 - protein, 38 aa, Artificial Sequence; identical to SEQ ID NO: 15413
  GFR-binding peptide
  MOD_RES (4)..(5): Xaa is C or S
  MOD_RES (19)..(20)..(21)..(22)..(23): Xaa is A or G
  MOD_RES (24)..(25)..(26)..(27): Xaa is A or G or is absent

SEQ ID NO: 79264 - protein, 35 aa, Artificial Sequence; identical to SEQ ID NO: 8116
  GFR-binding peptide
  MOD_RES (33)..(35): Xaa is C or S
  MOD_RES (14)..(15)..(16)..(17)..(18): Xaa is A or G
  MOD_RES (19)..(20)..(21)..(22): Xaa is A or G or is absent

SEQ ID NO: 79265 - protein, 44 aa, Artificial Sequence; identical to SEQ ID NO: 57413
  GFR-binding peptide
  MOD_RES (6)..(7)..(41)..(43): Xaa is C or S
  MOD_RES (21)..(22)..(23)..(24)..(25): Xaa is A or G
  MOD_RES (26)..(27)..(28)..(29): Xaa is A or G or is absent

SEQ ID NO: 79266 - protein, 40 aa, Artificial Sequence
  GFR-binding peptide
  MOD_RES (6)..(7)..(39): Xaa is C or S
GSAGPXXTPTKMSAISMLYLNDKQQIILKNYQGMVVDRXG

SEQ ID NO: 79267 - protein, 41 aa, Artificial Sequence
  GFR-binding peptide
  MOD_RES (3)..(4)..(38)..(40): Xaa is C or S
  MOD_RES (18)..(19)..(20)..(21)..(22): Xaa is A or G
  MOD_RES (23)..(24)..(25)..(26): Xaa is A or G or is absent
KAXXVPTKLSAISILYLXXXXXXXXXLKNYQGMAVSEXGXR

SEQ ID NO: 79268 - protein, 40 aa, Artificial Sequence; identical to SEQ ID NO: 8119
  GFR-binding peptide
  MOD_RES (2)..(3)..(37)..(39): Xaa is C or S
  MOD_RES (17)..(18)..(19)..(20)..(21): Xaa is A or G
  MOD_RES (22)..(23)..(24)..(25): Xaa is A or G or is absent

SEQ ID NO: 79269 - protein, 35 aa, Artificial Sequence
  GFR-binding peptide
  MOD_RES (1)..(33)..(35): Xaa is C or S
XVPEKMSAISILYLDENKNVVLKNYQNMTVESXAX

SEQ ID NO: 79270 - protein, 38 aa, Artificial Sequence; identical to SEQ ID NO: 6351
  GFR-binding peptide
  MOD_RES (5)..(6): Xaa is C or S
  MOD_RES (20)..(21)..(22)..(23)..(24): Xaa is A or G
  MOD_RES (25)..(26)..(27)..(28): Xaa is A or G or is absent

SEQ ID NO: 79271 - protein, 40 aa, Artificial Sequence
  GFR-binding peptide
  MOD_RES (6)..(7): Xaa is C or S
  MOD_RES (21)..(22)..(23)..(24)..(25): Xaa is A or G
  MOD_RES (26)..(27)..(28)..(29): Xaa is A or G or is absent
HVPKPXXAPTKLSAISVLYLXXXXXXXXXLKNYQNMVVRS

SEQ ID NO: 79272 - protein, 38 aa, Artificial Sequence; identical to SEQ ID NO: 67039
  GFR-binding peptide
  MOD_RES (5)..(6)..(38): Xaa is C or S

SEQ ID NO: 79273 - protein, 40 aa, Artificial Sequence; identical to SEQ ID NO: 6352
  GFR-binding peptide
  MOD_RES (4)..(5)..(37)..(39): Xaa is C or S

SEQ ID NO: 79274 - protein, 34 aa, Artificial Sequence
  GFR-binding peptide
  MOD_RES (2)..(3): Xaa is C or S
AXXVPTKLSAISILYLDKGVVTYLKNYQGMAVSE

SEQ ID NO: 79275 - protein, 30 aa, Artificial Sequence; identical to SEQ ID NO: 29405
  GFR-binding peptide

SEQ ID NO: 79276 - protein, 36 aa, Artificial Sequence; identical to SEQ ID NO: 8121
  GFR-binding peptide
  MOD_RES (33)..(35): Xaa is C or S
  MOD_RES (14)..(15)..(16)..(17)..(18): Xaa is A or G
  MOD_RES (19)..(20)..(21)..(22): Xaa is A or G or is absent

SEQ ID NO: 79277 - protein, 42 aa, Artificial Sequence; identical to SEQ ID NO: 8122
  GFR-binding peptide
  MOD_RES (5)..(39)..(41): Xaa is C or S
  MOD_RES (19)..(20)..(21)..(22)..(23): Xaa is A or G
  MOD_RES (24)..(25)..(26)..(27): Xaa is A or G or is absent

SEQ ID NO: 79278 - protein, 32 aa, Artificial Sequence; identical to SEQ ID NO: 6354
  GFR-binding peptide
  MOD_RES (1)..(2): Xaa is C or S

SEQ ID NO: 79279 - protein, 42 aa, Artificial Sequence; identical to SEQ ID NO: 8123
  GFR-binding peptide
  MOD_RES (4)..(5)..(39)..(41): Xaa is C or S
  MOD_RES (19)..(20)..(21)..(22)..(23): Xaa is A or G
  MOD_RES (24)..(25)..(26)..(27): Xaa is A or G or is absent

SEQ ID NO: 79280 - protein, 33 aa, Artificial Sequence; identical to SEQ ID NO: 8124
  GFR-binding peptide
  MOD_RES (1)..(2): Xaa is C or S

SEQ ID NO: 79281 - protein, 36 aa, Artificial Sequence; identical to SEQ ID NO: 15425
  GFR-binding peptide
  MOD_RES (2)..(3): Xaa is C or S
  MOD_RES (17)..(18)..(19)..(20)..(21): Xaa is A or G
  MOD_RES (22)..(23)..(24)..(25): Xaa is A or G or is absent

SEQ ID NO: 79282 - protein, 33 aa, Artificial Sequence; identical to SEQ ID NO: 6355
  GFR-binding peptide
  MOD_RES (1)..(1): Xaa is C or S
  MOD_RES (15)..(16)..(17)..(18)..(19): Xaa is A or G
  MOD_RES (20)..(21)..(22)..(23): Xaa is A or G or is absent

SEQ ID NO: 79283 - protein, 33 aa, Artificial Sequence; identical to SEQ ID NO: 8125
  GFR-binding peptide
  MOD_RES (31)..(33): Xaa is C or S

SEQ ID NO: 79284 - protein, 41 aa, Artificial Sequence; identical to SEQ ID NO: 27494
  GFR-binding peptide
  MOD_RES (4)..(5)..(39)..(41): Xaa is C or S
  MOD_RES (19)..(20)..(21)..(22)..(23): Xaa is A or G
  MOD_RES (24)..(25)..(26)..(27): Xaa is A or G or is absent

SEQ ID NO: 79285 - protein, 37 aa, Artificial Sequence; identical to SEQ ID NO: 15427
  GFR-binding peptide
  MOD_RES (4)..(5): Xaa is C or S
  MOD_RES (19)..(20)..(21)..(22)..(23): Xaa is A or G
  MOD_RES (24)..(25)..(26)..(27): Xaa is A or G or is absent

SEQ ID NO: 79286 - protein, 38 aa, Artificial Sequence; identical to SEQ ID NO: 6359
  GFR-binding peptide
  MOD_RES (6)..(7)..(38): Xaa is C or S

SEQ ID NO: 79287 - protein, 38 aa, Artificial Sequence; identical to SEQ ID NO: 8129
  GFR-binding peptide
  MOD_RES (5)..(6): Xaa is C or S
  MOD_RES (20)..(21)..(22)..(23)..(24): Xaa is A or G
  MOD_RES (25)..(26)..(27)..(28): Xaa is A or G or is absent

SEQ ID NO: 79288 - protein, 43 aa, Artificial Sequence; identical to SEQ ID NO: 68768
  GFR-binding peptide
  MOD_RES (6)..(7)..(41)..(43): Xaa is C or S
  MOD_RES (21)..(22)..(23)..(24)..(25): Xaa is A or G
  MOD_RES (26)..(27)..(28)..(29): Xaa is A or G or is absent

SEQ ID NO: 79289 - protein, 39 aa, Artificial Sequence; identical to SEQ ID NO: 8132
  GFR-binding peptide
  MOD_RES (6)..(7): Xaa is C or S
  MOD_RES (21)..(22)..(23)..(24)..(25): Xaa is A or G
  MOD_RES (26)..(27)..(28)..(29): Xaa is A or G or is absent

SEQ ID NO: 79290 - protein, 33 aa, Artificial Sequence; identical to SEQ ID NO: 6361
  GFR-binding peptide
  MOD_RES (1)..(1): Xaa is C or S
  MOD_RES (15)..(16)..(17)..(18)..(19): Xaa is A or G
  MOD_RES (20)..(21)..(22)..(23): Xaa is A or G or is absent

SEQ ID NO: 79291 - protein, 42 aa, Artificial Sequence; identical to SEQ ID NO: 27499
  GFR-binding peptide
  MOD_RES (5)..(6)..(40)..(42): Xaa is C or S
  MOD_RES (20)..(21)..(22)..(23)..(24): Xaa is A or G
  MOD_RES (25)..(26)..(27)..(28): Xaa is A or G or is absent

SEQ ID NO: 79292 - protein, 37 aa, Artificial Sequence; identical to SEQ ID NO: 27501
  GFR-binding peptide
  MOD_RES (1)..(35)..(37): Xaa is C or S
  MOD_RES (15)..(16)..(17)..(18)..(19): Xaa is A or G
  MOD_RES (20)..(21)..(22)..(23): Xaa is A or G or is absent

SEQ ID NO: 79293 - protein, 35 aa, Artificial Sequence; identical to SEQ ID NO: 6362
  GFR-binding peptide
  MOD_RES (1)..(1): Xaa is C or S
  MOD_RES (15)..(16)..(17)..(18)..(19): Xaa is A or G
  MOD_RES (20)..(21)..(22)..(23): Xaa is A or G or is absent

SEQ ID NO: 79294 - protein, 34 aa, Artificial Sequence; identical to SEQ ID NO: 8137
  GFR-binding peptide
  MOD_RES (32)..(34): Xaa is C or S

SEQ ID NO: 79295 - protein, 32 aa, Artificial Sequence; identical to SEQ ID NO: 6363
  GFR-binding peptide
  MOD_RES (1)..(32): Xaa is C or S

SEQ ID NO: 79296 - protein, 40 aa, Artificial Sequence; identical to SEQ ID NO: 27502
  GFR-binding peptide
  MOD_RES (3)..(4)..(38)..(40): Xaa is C or S
  MOD_RES (18)..(19)..(20)..(21)..(22): Xaa is A or G
  MOD_RES (23)..(24)..(25)..(26): Xaa is A or G or is absent

SEQ ID NO: 79297 - protein, 40 aa, Artificial Sequence
  GFR-binding peptide
  MOD_RES (2)..(3)..(37)..(39): Xaa is C or S
  MOD_RES (17)..(18)..(19)..(20)..(21): Xaa is A or G
  MOD_RES (22)..(23)..(24)..(25): Xaa is A or G or is absent
PXXTPTKMSAISMLYLXXXXXXXXXLKNYQGMVVDRXGXS

SEQ ID NO: 79298 - protein, 32 aa, Artificial Sequence; identical to SEQ ID NO: 6367
  GFR-binding peptide
  MOD_RES (14)..(15)..(16)..(17)..(18): Xaa is A or G
  MOD_RES (19)..(20)..(21)..(22): Xaa is A or G or is absent

SEQ ID NO: 79299 - protein, 35 aa, Artificial Sequence; identical to SEQ ID NO: 6368
  GFR-binding peptide
  MOD_RES (1)..(2): Xaa is C or S
  MOD_RES (16)..(17)..(18)..(19)..(20): Xaa is A or G
  MOD_RES (21)..(22)..(23)..(24): Xaa is A or G or is absent

SEQ ID NO: 79300 - protein, 43 aa, Artificial Sequence; identical to SEQ ID NO: 6370
  GFR-binding peptide
  MOD_RES (4)..(5)..(40)..(42): Xaa is C or S
  MOD_RES (19)..(20)..(21)..(22)..(23): Xaa is A or G
  MOD_RES (24)..(25)..(26)..(27): Xaa is A or G or is absent

SEQ ID NO: 79301 - protein, 31 aa, Artificial Sequence; identical to SEQ ID NO: 6371
  GFR-binding peptide
  MOD_RES (31)..(31): Xaa is C or S

SEQ ID NO: 79302 - protein, 39 aa, Artificial Sequence; identical to SEQ ID NO: 6373
  GFR-binding peptide
  MOD_RES (3)..(4)..(38): Xaa is C or S
  MOD_RES (18)..(19)..(20)..(21)..(22): Xaa is A or G
  MOD_RES (23)..(24)..(25)..(26): Xaa is A or G or is absent

SEQ ID NO: 79303 - protein, 38 aa, Artificial Sequence; identical to SEQ ID NO: 6374
  GFR-binding peptide
  MOD_RES (35)..(37): Xaa is C or S
  MOD_RES (14)..(15)..(16)..(17)..(18): Xaa is A or G
  MOD_RES (19)..(20)..(21)..(22): Xaa is A or G or is absent

SEQ ID NO: 79304 - protein, 43 aa, Artificial Sequence; identical to SEQ ID NO: 8140
  GFR-binding peptide
  MOD_RES (6)..(7)..(42): Xaa is C or S
  MOD_RES (21)..(22)..(23)..(24)..(25): Xaa is A or G
  MOD_RES (26)..(27)..(28)..(29): Xaa is A or G or is absent

SEQ ID NO: 79305 - protein, 34 aa, Artificial Sequence; identical to SEQ ID NO: 8142
  GFR-binding peptide
  MOD_RES (1)..(33): Xaa is C or S

SEQ ID NO: 79306 - protein, 38 aa, Artificial Sequence; identical to SEQ ID NO: 8143
  GFR-binding peptide
  MOD_RES (5)..(6): Xaa is C or S
  MOD_RES (20)..(21)..(22)..(23)..(24): Xaa is A or G
  MOD_RES (25)..(26)..(27)..(28): Xaa is A or G or is absent

SEQ ID NO: 79307 - protein, 35 aa, Artificial Sequence; identical to SEQ ID NO: 6378
  GFR-binding peptide
  MOD_RES (35)..(35): Xaa is C or S
  MOD_RES (14)..(15)..(16)..(17)..(18): Xaa is A or G
  MOD_RES (19)..(20)..(21)..(22): Xaa is A or G or is absent

SEQ ID NO: 79308 - protein, 36 aa, Artificial Sequence
  GFR-binding peptide
  MOD_RES (4)..(5): Xaa is C or S
PASXXVPARLSAISILYLDAANNVVLKNYQDMVVEA

SEQ ID NO: 79309 - protein, 35 aa, Artificial Sequence; identical to SEQ ID NO: 8145
  GFR-binding peptide
  MOD_RES (2)..(3)..(34): Xaa is C or S

SEQ ID NO: 79310 - protein, 41 aa, Artificial Sequence; identical to SEQ ID NO: 29433
  GFR-binding peptide
  MOD_RES (5)..(6)..(38)..(40): Xaa is C or S

SEQ ID NO: 79311 - protein, 35 aa, Artificial Sequence; identical to SEQ ID NO: 8147
  GFR-binding peptide
  MOD_RES (1)..(2)..(33)..(35): Xaa is C or S

SEQ ID NO: 79312 - protein, 40 aa, Artificial Sequence; identical to SEQ ID NO: 6379
  GFR-binding peptide
  MOD_RES (3)..(4)..(37)..(39): Xaa is C or S
  MOD_RES (18)..(19)..(20)..(21)..(22): Xaa is A or G
  MOD_RES (23)..(24)..(25)..(26): Xaa is A or G or is absent

SEQ ID NO: 79313 - protein, 38 aa, Artificial Sequence; identical to SEQ ID NO: 6380
  GFR-binding peptide
  MOD_RES (6)..(7): Xaa is C or S

SEQ ID NO: 79314 - protein, 35 aa, Artificial Sequence; identical to SEQ ID NO: 8148
  GFR-binding peptide
  MOD_RES (4)..(5): Xaa is C or S

SEQ ID NO: 79315 - protein, 39 aa, Artificial Sequence; identical to SEQ ID NO: 6381
  GFR-binding peptide
  MOD_RES (4)..(5)..(36)..(38): Xaa is C or S

SEQ ID NO: 79316 - protein, 34 aa, Artificial Sequence; identical to SEQ ID NO: 57452
  GFR-binding peptide
  MOD_RES (3)..(4): Xaa is C or S

SEQ ID NO: 79317 - protein, 39 aa, Artificial Sequence; identical to SEQ ID NO: 6383
  GFR-binding peptide
  MOD_RES (5)..(6): Xaa is C or S
  MOD_RES (20)..(21)..(22)..(23)..(24): Xaa is A or G
  MOD_RES (25)..(26)..(27)..(28): Xaa is A or G or is absent

SEQ ID NO: 79318 - protein, 35 aa, Artificial Sequence; identical to SEQ ID NO: 6384
  GFR-binding peptide
  MOD_RES (33)..(35): Xaa is C or S
  MOD_RES (14)..(15)..(16)..(17)..(18): Xaa is A or G
  MOD_RES (19)..(20)..(21)..(22): Xaa is A or G or is absent

SEQ ID NO: 79319 - protein, 35 aa, Artificial Sequence; identical to SEQ ID NO: 57454
  GFR-binding peptide
  MOD_RES (1)..(34): Xaa is C or S
  MOD_RES (15)..(16)..(17)..(18)..(19): Xaa is A or G
  MOD_RES (20)..(21)..(22)..(23): Xaa is A or G or is absent

SEQ ID NO: 79320 - protein, 33 aa, Artificial Sequence; identical to SEQ ID NO: 8150
  GFR-binding peptide
  MOD_RES (2)..(3): Xaa is C or S

SEQ ID NO: 79321 - protein, 36 aa, Artificial Sequence; identical to SEQ ID NO: 8151
  GFR-binding peptide
  MOD_RES (1)..(2)..(35): Xaa is C or S
  MOD_RES (16)..(17)..(18)..(19)..(20): Xaa is A or G
  MOD_RES (21)..(22)..(23)..(24): Xaa is A or G or is absent

SEQ ID NO: 79322 - protein, 33 aa, Artificial Sequence; identical to SEQ ID NO: 8152
  GFR-binding peptide
  MOD_RES (2)..(3): Xaa is C or S

SEQ ID NO: 79323 - protein, 40 aa, Artificial Sequence; identical to SEQ ID NO: 8153
  GFR-binding peptide
  MOD_RES (5)..(6): Xaa is C or S
  MOD_RES (20)..(21)..(22)..(23)..(24): Xaa is A or G
  MOD_RES (25)..(26)..(27)..(28): Xaa is A or G or is absent

SEQ ID NO: 79324 - protein, 32 aa, Artificial Sequence
  GFR-binding peptide
  MOD_RES (14)..(15)..(16)..(17)..(18): Xaa is A or G
  MOD_RES (19)..(20)..(21)..(22): Xaa is A or G or is absent
VPTKLSAISILYLXXXXXXXXXLKNYQGMAVS

SEQ ID NO: 79325 - protein, 40 aa, Artificial Sequence; identical to SEQ ID NO: 8155
  GFR-binding peptide
  MOD_RES (5)..(39): Xaa is C or S
  MOD_RES (19)..(20)..(21)..(22)..(23): Xaa is A or G
  MOD_RES (24)..(25)..(26)..(27): Xaa is A or G or is absent

SEQ ID NO: 79326 - protein, 40 aa, Artificial Sequence; identical to SEQ ID NO: 15449
  GFR-binding peptide
  MOD_RES (4)..(5)..(37)..(39): Xaa is C or S

SEQ ID NO: 79327 - protein, 40 aa, Artificial Sequence; identical to SEQ ID NO: 6387
  GFR-binding peptide
  MOD_RES (7)..(39): Xaa is C or S

SEQ ID NO: 79328 - protein, 36 aa, Artificial Sequence; identical to SEQ ID NO: 8158
  GFR-binding peptide
  MOD_RES (33)..(35): Xaa is C or S

SEQ ID NO: 79329 - protein, 33 aa, Artificial Sequence; identical to SEQ ID NO: 8159
  GFR-binding peptide
  MOD_RES (2)..(3): Xaa is C or S

SEQ ID NO: 79330 - protein, 39 aa, Artificial Sequence; identical to SEQ ID NO: 13775
  GFR-binding peptide
  MOD_RES (6)..(7): Xaa is C or S
  MOD_RES (21)..(22)..(23)..(24)..(25): Xaa is A or G
  MOD_RES (26)..(27)..(28)..(29): Xaa is A or G or is absent

SEQ ID NO: 79331 - protein, 41 aa, Artificial Sequence; identical to SEQ ID NO: 8160
  GFR-binding peptide
  MOD_RES (5)..(6)..(40): Xaa is C or S
  MOD_RES (20)..(21)..(22)..(23)..(24): Xaa is A or G
  MOD_RES (25)..(26)..(27)..(28): Xaa is A or G or is absent

SEQ ID NO: 79332 - protein, 38 aa, Artificial Sequence; identical to SEQ ID NO: 8161
  GFR-binding peptide
  MOD_RES (5)..(6)..(37): Xaa is C or S

SEQ ID NO: 79333 - protein, 39 aa, Artificial Sequence
  GFR-binding peptide
  MOD_RES (3)..(4)..(38): Xaa is C or S
  MOD_RES (18)..(19)..(20)..(21)..(22): Xaa is A or G
  MOD_RES (23)..(24)..(25)..(26): Xaa is A or G or is absent
KAXXVPTKLSAISILYLXXXXXXXXXLKNYQGMAVSEXG

SEQ ID NO: 79334 - protein, 36 aa, Artificial Sequence; identical to SEQ ID NO: 8162
  GFR-binding peptide
  MOD_RES (2)..(3)..(36): Xaa is C or S
  MOD_RES (17)..(18)..(19)..(20)..(21): Xaa is A or G
  MOD_RES (22)..(23)..(24)..(25): Xaa is A or G or is absent

SEQ ID NO: 79335 - protein, 34 aa, Artificial Sequence; identical to SEQ ID NO: 6392
  GFR-binding peptide
  MOD_RES (32)..(34): Xaa is C or S

SEQ ID NO: 79336 - protein, 41 aa, Artificial Sequence; identical to SEQ ID NO: 13777
  GFR-binding peptide
  MOD_RES (5)..(6)..(38)..(40): Xaa is C or S

SEQ ID NO: 79337 - protein, 38 aa, Artificial Sequence; identical to SEQ ID NO: 6394
  GFR-binding peptide
  MOD_RES (3)..(4)..(35)..(37): Xaa is C or S

SEQ ID NO: 79338 - protein, 38 aa, Artificial Sequence
  GFR-binding peptide
  MOD_RES (6)..(7)..(38): Xaa is C or S
RVPSTXXAPVKTSAISMLYLDNGRVLLLKNYQMIVEEX

SEQ ID NO: 79339 - protein, 36 aa, Artificial Sequence
  GFR-binding peptide
  MOD_RES (1)..(2)..(34)..(36): Xaa is C or S
XXVPARLSAISILYLDAANNVVLKNYQDMVVEAXGX

SEQ ID NO: 79340 - protein, 36 aa, Artificial Sequence; identical to SEQ ID NO: 8163
  GFR-binding peptide
  MOD_RES (3)..(4): Xaa is C or S
  MOD_RES (18)..(19)..(20)..(21)..(22): Xaa is A or G
  MOD_RES (23)..(24)..(25)..(26): Xaa is A or G or is absent

SEQ ID NO: 79341 - protein, 37 aa, Artificial Sequence; identical to SEQ ID NO: 27536
  GFR-binding peptide
  MOD_RES (1)..(2)..(36): Xaa is C or S
  MOD_RES (16)..(17)..(18)..(19)..(20): Xaa is A or G
  MOD_RES (21)..(22)..(23)..(24): Xaa is A or G or is absent

SEQ ID NO: 79342 - protein, 39 aa, Artificial Sequence; identical to SEQ ID NO: 57465
  GFR-binding peptide
  MOD_RES (4)..(5)..(39): Xaa is C or S
  MOD_RES (19)..(20)..(21)..(22)..(23): Xaa is A or G
  MOD_RES (24)..(25)..(26)..(27): Xaa is A or G or is absent

SEQ ID NO: 79343 - protein, 34 aa, Artificial Sequence; identical to SEQ ID NO: 8165
  GFR-binding peptide
  MOD_RES (33)..(33): Xaa is C or S
  MOD_RES (14)..(15)..(16)..(17)..(18): Xaa is A or G
  MOD_RES (19)..(20)..(21)..(22): Xaa is A or G or is absent

SEQ ID NO: 79344 - protein, 33 aa, Artificial Sequence; identical to SEQ ID NO: 13782
  GFR-binding peptide
  MOD_RES (2)..(3): Xaa is C or S

SEQ ID NO: 79345 - protein, 33 aa, Artificial Sequence; identical to SEQ ID NO: 8168
  GFR-binding peptide
  MOD_RES (1)..(2)..(33): Xaa is C or S

SEQ ID NO: 79346 - protein, 36 aa, Artificial Sequence; identical to SEQ ID NO: 6404
  GFR-binding peptide
  MOD_RES (1)..(35): Xaa is C or S
  MOD_RES (15)..(16)..(17)..(18)..(19): Xaa is A or G
  MOD_RES (20)..(21)..(22)..(23): Xaa is A or G or is absent

SEQ ID NO: 79347 - protein, 41 aa, Artificial Sequence
  GFR-binding peptide
  MOD_RES (6)..(7)..(39)..(41): Xaa is C or S
AAPASXXVPARLSAISILYLDAANNVVLKNYQDMVVEAXGX

SEQ ID NO: 79348 - protein, 38 aa, Artificial Sequence; identical to SEQ ID NO: 8170
  GFR-binding peptide
  MOD_RES (2)..(3)..(36)..(38): Xaa is C or S

SEQ ID NO: 79349 - protein, 41 aa, Artificial Sequence; identical to SEQ ID NO: 8171
  GFR-binding peptide
  MOD_RES (5)..(6)..(40): Xaa is C or S
  MOD_RES (20)..(21)..(22)..(23)..(24): Xaa is A or G
  MOD_RES (25)..(26)..(27)..(28): Xaa is A or G or is absent

SEQ ID NO: 79350 - protein, 38 aa, Artificial Sequence; identical to SEQ ID NO: 6405
  GFR-binding peptide
  MOD_RES (3)..(4)..(37): Xaa is C or S

SEQ ID NO: 79351 - protein, 34 aa, Artificial Sequence; identical to SEQ ID NO: 57471
  GFR-binding peptide
  MOD_RES (2)..(3): Xaa is C or S

SEQ ID NO: 79352 - protein, 42 aa, Artificial Sequence; identical to SEQ ID NO: 29473
  GFR-binding peptide
  MOD_RES (6)..(7)..(41): Xaa is C or S
  MOD_RES (21)..(22)..(23)..(24)..(25): Xaa is A or G
  MOD_RES (26)..(27)..(28)..(29): Xaa is A or G or is absent

SEQ ID NO: 79353 - protein, 38 aa, Artificial Sequence
  GFR-binding peptide
  MOD_RES (1)..(2)..(35)..(37): Xaa is C or S
  MOD_RES (16)..(17)..(18)..(19)..(20): Xaa is A or G
  MOD_RES (21)..(22)..(23)..(24): Xaa is A or G or is absent
XXAPVKTSAISMLYLXXXXXXXXXLKNYQMIVEEXGXL

SEQ ID NO: 79354 - protein, 35 aa, Artificial Sequence
  GFR-binding peptide
  MOD_RES (1)..(35): Xaa is C or S
  MOD_RES (15)..(16)..(17)..(18)..(19): Xaa is A or G
  MOD_RES (20)..(21)..(22)..(23): Xaa is A or G or is absent
XVPEKMSAISILYLXXXXXXXXXLKNYQNMTVESX

SEQ ID NO: 79355 - protein, 41 aa, Artificial Sequence; identical to SEQ ID NO: 29474
  GFR-binding peptide
  MOD_RES (3)..(4)..(38)..(40): Xaa is C or S
  MOD_RES (18)..(19)..(20)..(21)..(22): Xaa is A or G
  MOD_RES (23)..(24)..(25)..(26): Xaa is A or G or is absent

SEQ ID NO: 79356 - protein, 39 aa, Artificial Sequence; identical to SEQ ID NO: 6408
  GFR-binding peptide
  MOD_RES (4)..(5): Xaa is C or S
  MOD_RES (19)..(20)..(21)..(22)..(23): Xaa is A or G
  MOD_RES (24)..(25)..(26)..(27): Xaa is A or G or is absent

SEQ ID NO: 79357 - protein, 42 aa, Artificial Sequence; identical to SEQ ID NO: 13785
  GFR-binding peptide
  MOD_RES (5)..(6)..(40)..(42): Xaa is C or S
  MOD_RES (20)..(21)..(22)..(23)..(24): Xaa is A or G
  MOD_RES (25)..(26)..(27)..(28): Xaa is A or G or is absent

SEQ ID NO: 79358 - protein, 44 aa, Artificial Sequence; identical to SEQ ID NO: 29475
  GFR-binding peptide
  MOD_RES (6)..(7)..(41)..(43): Xaa is C or S
  MOD_RES (21)..(22)..(23)..(24)..(25): Xaa is A or G
  MOD_RES (26)..(27)..(28)..(29): Xaa is A or G or is absent

SEQ ID NO: 79359 - protein, 33 aa, Artificial Sequence; identical to SEQ ID NO: 6409
  GFR-binding peptide
  MOD_RES (2)..(2): Xaa is C or S

SEQ ID NO: 79360 - protein, 32 aa, Artificial Sequence; identical to SEQ ID NO: 8175
  GFR-binding peptide
  MOD_RES (31)..(31): Xaa is C or S

SEQ ID NO: 79361 - protein, 34 aa, Artificial Sequence; identical to SEQ ID NO: 8176
  GFR-binding peptide
  MOD_RES (1)..(2): Xaa is C or S

SEQ ID NO: 79362 - protein, 34 aa, Artificial Sequence
  GFR-binding peptide
  MOD_RES (32)..(34): Xaa is C or S
TPTKMSAISMLYLNDKQQIILKNYQGMVVDRXGX

SEQ ID NO: 79363 - protein, 38 aa, Artificial Sequence; identical to SEQ ID NO: 57479
  GFR-binding peptide
  MOD_RES (4)..(5): Xaa is C or S
  MOD_RES (19)..(20)..(21)..(22)..(23): Xaa is A or G
  MOD_RES (24)..(25)..(26)..(27): Xaa is A or G or is absent

SEQ ID NO: 79364 - protein, 37 aa, Artificial Sequence; identical to SEQ ID NO: 6411
  GFR-binding peptide
  MOD_RES (4)..(5): Xaa is C or S
  MOD_RES (19)..(20)..(21)..(22)..(23): Xaa is A or G
  MOD_RES (24)..(25)..(26)..(27): Xaa is A or G or is absent

SEQ ID NO: 79365 - protein, 38 aa, Artificial Sequence; identical to SEQ ID NO: 8180
  GFR-binding peptide
  MOD_RES (4)..(5)..(37): Xaa is C or S

SEQ ID NO: 79366 - protein, 38 aa, Artificial Sequence; identical to SEQ ID NO: 57482
  GFR-binding peptide
  MOD_RES (3)..(4)..(36)..(38): Xaa is C or S

SEQ ID NO: 79367 - protein, 39 aa, Artificial Sequence; identical to SEQ ID NO: 8182
  GFR-binding peptide
  MOD_RES (4)..(5)..(36)..(38): Xaa is C or S

SEQ ID NO: 79368 - protein, 35 aa, Artificial Sequence; identical to SEQ ID NO: 8183
  GFR-binding peptide
  MOD_RES (2)..(3): Xaa is C or S
  MOD_RES (17)..(18)..(19)..(20)..(21): Xaa is A or G
  MOD_RES (22)..(23)..(24)..(25): Xaa is A or G or is absent

SEQ ID NO: 79369 - protein, 36 aa, Artificial Sequence; identical to SEQ ID NO: 67098
  GFR-binding peptide
  MOD_RES (1)..(2)..(36): Xaa is C or S
  MOD_RES (16)..(17)..(18)..(19)..(20): Xaa is A or G
  MOD_RES (21)..(22)..(23)..(24): Xaa is A or G or is absent

SEQ ID NO: 79370 - protein, 34 aa, Artificial Sequence; identical to SEQ ID NO: 6415
  GFR-binding peptide
  MOD_RES (1)..(1): Xaa is C or S
  MOD_RES (15)..(16)..(17)..(18)..(19): Xaa is A or G
  MOD_RES (20)..(21)..(22)..(23): Xaa is A or G or is absent

SEQ ID NO: 79371 - protein, 38 aa, Artificial Sequence
  GFR-binding peptide
  MOD_RES (4)..(5)..(37): Xaa is C or S
PEPXXVPEKMSAISILYLDENKNVVLKNYQNMTVESXA

SEQ ID NO: 79372 - protein, 34 aa, Artificial Sequence; identical to SEQ ID NO: 13795
  GFR-binding peptide
  MOD_RES (32)..(34): Xaa is C or S

SEQ ID NO: 79373 - protein, 34 aa, Artificial Sequence
  GFR-binding peptide
  MOD_RES (1)..(33): Xaa is C or S
XVPEKMSAISILYLDENKNVVLKNYQNMTVESXA

SEQ ID NO: 79374 - protein, 39 aa, Artificial Sequence; identical to SEQ ID NO: 6418
  GFR-binding peptide
  MOD_RES (5)..(6)..(37)..(39): Xaa is C or S

SEQ ID NO: 79375 - protein, 32 aa, Artificial Sequence; identical to SEQ ID NO: 8185
  GFR-binding peptide
  MOD_RES (14)..(15)..(16)..(17)..(18): Xaa is A or G
  MOD_RES (19)..(20)..(21)..(22): Xaa is A or G or is absent

SEQ ID NO: 79376 - protein, 42 aa, Artificial Sequence
  GFR-binding peptide
  MOD_RES (5)..(6)..(40)..(42): Xaa is C or S
  MOD_RES (20)..(21)..(22)..(23)..(24): Xaa is A or G
  MOD_RES (25)..(26)..(27)..(28): Xaa is A or G or is absent
IPEPXXVPEKMSAISILYLXXXXXXXXXLKNYQNMTVESXAX

SEQ ID NO: 79377 - protein, 37 aa, Artificial Sequence; identical to SEQ ID NO: 15484
  GFR-binding peptide
  MOD_RES (1)..(2)..(34)..(36): Xaa is C or S

SEQ ID NO: 79378 - protein, 37 aa, Artificial Sequence; identical to SEQ ID NO: 6419
  GFR-binding peptide
  MOD_RES (2)..(36): Xaa is C or S
  MOD_RES (16)..(17)..(18)..(19)..(20): Xaa is A or G
  MOD_RES (21)..(22)..(23)..(24): Xaa is A or G or is absent

SEQ ID NO: 79379 - protein, 43 aa, Artificial Sequence; identical to SEQ ID NO: 8186
  GFR-binding peptide
  MOD_RES (6)..(7)..(40)..(42): Xaa is C or S
  MOD_RES (21)..(22)..(23)..(24)..(25): Xaa is A or G
  MOD_RES (26)..(27)..(28)..(29): Xaa is A or G or is absent

SEQ ID NO: 79380 - protein, 38 aa, Artificial Sequence; identical to SEQ ID NO: 8188
  GFR-binding peptide
  MOD_RES (4)..(5)..(38): Xaa is C or S

SEQ ID NO: 79381 - protein, 37 aa, Artificial Sequence
  GFR-binding peptide
  MOD_RES (4)..(5)..(36): Xaa is C or S
PSTXXAPVKTSAISMLYLDNGRVLLLKNYQMIVEEXG

SEQ ID NO: 79382 - protein, 39 aa, Artificial Sequence; identical to SEQ ID NO: 8189
  GFR-binding peptide
  MOD_RES (5)..(6)..(38): Xaa is C or S

SEQ ID NO: 79383 - protein, 41 aa, Artificial Sequence; identical to SEQ ID NO: 8190
  GFR-binding peptide
  MOD_RES (5)..(6)..(40): Xaa is C or S
  MOD_RES (20)..(21)..(22)..(23)..(24): Xaa is A or G
  MOD_RES (25)..(26)..(27)..(28): Xaa is A or G or is absent

SEQ ID NO: 79384 - protein, 36 aa, Artificial Sequence; identical to SEQ ID NO: 8191
  GFR-binding peptide
  MOD_RES (33)..(35): Xaa is C or S
  MOD_RES (14)..(15)..(16)..(17)..(18): Xaa is A or G
  MOD_RES (19)..(20)..(21)..(22): Xaa is A or G or is absent

SEQ ID NO: 79385 - protein, 35 aa, Artificial Sequence; identical to SEQ ID NO: 13800
  GFR-binding peptide
  MOD_RES (2)..(3)..(35): Xaa is C or S

SEQ ID NO: 79386 - protein, 34 aa, Artificial Sequence
  GFR-binding peptide
  MOD_RES (34)..(34): Xaa is C or S
  MOD_RES (14)..(15)..(16)..(17)..(18): Xaa is A or G
  MOD_RES (19)..(20)..(21)..(22): Xaa is A or G or is absent
TPTKMSAISMLYLXXXXXXXXXLKNYQGMVVDRX

SEQ ID NO: 79387 - protein, 39 aa, Artificial Sequence; identical to SEQ ID NO: 6424
  GFR-binding peptide
  MOD_RES (2)..(36)..(38): Xaa is C or S
  MOD_RES (16)..(17)..(18)..(19)..(20): Xaa is A or G
  MOD_RES (21)..(22)..(23)..(24): Xaa is A or G or is absent

SEQ ID NO: 79388 - protein, 34 aa, Artificial Sequence; identical to SEQ ID NO: 57499
  GFR-binding peptide
  MOD_RES (1)..(2)..(34): Xaa is C or S

SEQ ID NO: 79389 - protein, 30 aa, Artificial Sequence; identical to SEQ ID NO: 15493
  GFR-binding peptide

SEQ ID NO: 79390 - protein, 37 aa, Artificial Sequence
  GFR-binding peptide
  MOD_RES (1)..(35)..(37): Xaa is C or S
  MOD_RES (15)..(16)..(17)..(18)..(19): Xaa is A or G
  MOD_RES (20)..(21)..(22)..(23): Xaa is A or G or is absent
XVPEKMSAISILYLXXXXXXXXXLKNYQNMTVESXAX

SEQ ID NO: 79391 - protein, 34 aa, Artificial Sequence; identical to SEQ ID NO: 8193
  GFR-binding peptide
  MOD_RES (1)..(32)..(34): Xaa is C or S

SEQ ID NO: 79392 - protein, 38 aa, Artificial Sequence; identical to SEQ ID NO: 6428
  GFR-binding peptide
  MOD_RES (4)..(5)..(38): Xaa is C or S
  MOD_RES (19)..(20)..(21)..(22)..(23): Xaa is A or G
  MOD_RES (24)..(25)..(26)..(27): Xaa is A or G or is absent

SEQ ID NO: 79393 - protein, 34 aa, Artificial Sequence; identical to SEQ ID NO: 8194
  GFR-binding peptide
  MOD_RES (14)..(15)..(16)..(17)..(18): Xaa is A or G
  MOD_RES (19)..(20)..(21)..(22): Xaa is A or G or is absent

SEQ ID NO: 79394 - protein, 38 aa, Artificial Sequence; identical to SEQ ID NO: 29504
  GFR-binding peptide
  MOD_RES (6)..(7): Xaa is C or S

SEQ ID NO: 79395 - protein, 40 aa, Artificial Sequence; identical to SEQ ID NO: 8195
  GFR-binding peptide
  MOD_RES (3)..(4)..(37)..(39): Xaa is C or S
  MOD_RES (18)..(19)..(20)..(21)..(22): Xaa is A or G
  MOD_RES (23)..(24)..(25)..(26): Xaa is A or G or is absent

SEQ ID NO: 79396 - protein, 33 aa, Artificial Sequence; identical to SEQ ID NO: 6430
  GFR-binding peptide
  MOD_RES (32)..(32): Xaa is C or S

SEQ ID NO: 79397 - protein, 36 aa, Artificial Sequence; identical to SEQ ID NO: 6431
  GFR-binding peptide
  MOD_RES (1)..(2)..(34)..(36): Xaa is C or S

SEQ ID NO: 79398 - protein, 39 aa, Artificial Sequence
  GFR-binding peptide
  MOD_RES (3)..(4)..(38): Xaa is C or S
  MOD_RES (18)..(19)..(20)..(21)..(22): Xaa is A or G
  MOD_RES (23)..(24)..(25)..(26): Xaa is A or G or is absent
EPXXVPEKMSAISILYLXXXXXXXXXLKNYQNMTVESXA

SEQ ID NO: 79399 - protein, 34 aa, Artificial Sequence; identical to SEQ ID NO: 57508
  GFR-binding peptide
  MOD_RES (34)..(34): Xaa is C or S
  MOD_RES (14)..(15)..(16)..(17)..(18): Xaa is A or G
  MOD_RES (19)..(20)..(21)..(22): Xaa is A or G or is absent

SEQ ID NO: 79400 - protein, 37 aa, Artificial Sequence; identical to SEQ ID NO: 6432
  GFR-binding peptide
  MOD_RES (4)..(5)..(36): Xaa is C or S

SEQ ID NO: 79401 - protein, 32 aa, Artificial Sequence; identical to SEQ ID NO: 13813
  GFR-binding peptide
  MOD_RES (1)..(2): Xaa is C or S

SEQ ID NO: 79402 - protein, 43 aa, Artificial Sequence; identical to SEQ ID NO: 6433
  GFR-binding peptide
  MOD_RES (6)..(7)..(41)..(43): Xaa is C or S
  MOD_RES (21)..(22)..(23)..(24)..(25): Xaa is A or G
  MOD_RES (26)..(27)..(28)..(29): Xaa is A or G or is absent

SEQ ID NO: 79403 - protein, 44 aa, Artificial Sequence; identical to SEQ ID NO: 8197
  GFR-binding peptide
  MOD_RES (6)..(7)..(41)..(43): Xaa is C or S
  MOD_RES (21)..(22)..(23)..(24)..(25): Xaa is A or G
  MOD_RES (26)..(27)..(28)..(29): Xaa is A or G or is absent

SEQ ID NO: 79404 - protein, 39 aa, Artificial Sequence; identical to SEQ ID NO: 57510
  GFR-binding peptide
  MOD_RES (4)..(5)..(36)..(38): Xaa is C or S

SEQ ID NO: 79405 - protein, 40 aa, Artificial Sequence; identical to SEQ ID NO: 6434
  GFR-binding peptide
  MOD_RES (6)..(7): Xaa is C or S
  MOD_RES (21)..(22)..(23)..(24)..(25): Xaa is A or G
  MOD_RES (26)..(27)..(28)..(29): Xaa is A or G or is absent

SEQ ID NO: 79406 - protein, 41 aa, Artificial Sequence; identical to SEQ ID NO: 6435
  GFR-binding peptide
  MOD_RES (4)..(5)..(39)..(41): Xaa is C or S
  MOD_RES (19)..(20)..(21)..(22)..(23): Xaa is A or G
  MOD_RES (24)..(25)..(26)..(27): Xaa is A or G or is absent

SEQ ID NO: 79407 - protein, 41 aa, Artificial Sequence; identical to SEQ ID NO: 6436
  GFR-binding peptide
  MOD_RES (5)..(6)..(38)..(40): Xaa is C or S

SEQ ID NO: 79408 - protein, 41 aa, Artificial Sequence; identical to SEQ ID NO: 6437
  GFR-binding peptide
  MOD_RES (3)..(4)..(38)..(40): Xaa is C or S
  MOD_RES (18)..(19)..(20)..(21)..(22): Xaa is A or G
  MOD_RES (23)..(24)..(25)..(26): Xaa is A or G or is absent

SEQ ID NO: 79409 - protein, 38 aa, Artificial Sequence; identical to SEQ ID NO: 8199
  GFR-binding peptide
  MOD_RES (3)..(4)..(37): Xaa is C or S
  MOD_RES (18)..(19)..(20)..(21)..(22): Xaa is A or G
  MOD_RES (23)..(24)..(25)..(26): Xaa is A or G or is absent

SEQ ID NO: 79410 - protein, 38 aa, Artificial Sequence; identical to SEQ ID NO: 6441
  GFR-binding peptide
  MOD_RES (3)..(4)..(37): Xaa is C or S
  MOD_RES (18)..(19)..(20)..(21)..(22): Xaa is A or G
  MOD_RES (23)..(24)..(25)..(26): Xaa is A or G or is absent

SEQ ID NO: 79411 - protein, 37 aa, Artificial Sequence; identical to SEQ ID NO: 8201
  GFR-binding peptide
  MOD_RES (3)..(4)..(36): Xaa is C or S

SEQ ID NO: 79412 - protein, 40 aa, Artificial Sequence; identical to SEQ ID NO: 8203
  GFR-binding peptide
  MOD_RES (1)..(2)..(37)..(39): Xaa is C or S
  MOD_RES (16)..(17)..(18)..(19)..(20): Xaa is A or G
  MOD_RES (21)..(22)..(23)..(24): Xaa is A or G or is absent

SEQ ID NO: 79413 - protein, 34 aa, Artificial Sequence; identical to SEQ ID NO: 6442
  GFR-binding peptide
  MOD_RES (2)..(34): Xaa is C or S

SEQ ID NO: 79414 - protein, 32 aa, Artificial Sequence; identical to SEQ ID NO: 29518
  GFR-binding peptide
  MOD_RES (1)..(2): Xaa is C or S

SEQ ID NO: 79415 - protein, 34 aa, Artificial Sequence
  GFR-binding peptide
  MOD_RES (1)..(2)..(33): Xaa is C or S
XXAPVKTSAISMLYLDNGRVLLLKNYQMIVEEXG

SEQ ID NO: 79416 - protein, 41 aa, Artificial Sequence; identical to SEQ ID NO: 6443
  GFR-binding peptide
  MOD_RES (3)..(4)..(38)..(40): Xaa is C or S
  MOD_RES (18)..(19)..(20)..(21)..(22): Xaa is A or G
  MOD_RES (23)..(24)..(25)..(26): Xaa is A or G or is absent

SEQ ID NO: 79417 - protein, 33 aa, Artificial Sequence; identical to SEQ ID NO: 57523
  GFR-binding peptide
  MOD_RES (31)..(33): Xaa is C or S

SEQ ID NO: 79418 - protein, 33 aa, Artificial Sequence; identical to SEQ ID NO: 57524
  GFR-binding peptide
  MOD_RES (2)..(3): Xaa is C or S

SEQ ID NO: 79419 - protein, 36 aa, Artificial Sequence; identical to SEQ ID NO: 57526
  GFR-binding peptide
  MOD_RES (3)..(4): Xaa is C or S
  MOD_RES (18)..(19)..(20)..(21)..(22): Xaa is A or G
  MOD_RES (23)..(24)..(25)..(26): Xaa is A or G or is absent

SEQ ID NO: 79420 - protein, 34 aa, Artificial Sequence; identical to SEQ ID NO: 8208
  GFR-binding peptide
  MOD_RES (1)..(2): Xaa is C or S
  MOD_RES (16)..(17)..(18)..(19)..(20): Xaa is A or G
  MOD_RES (21)..(22)..(23)..(24): Xaa is A or G or is absent

SEQ ID NO: 79421 - protein, 36 aa, Artificial Sequence; identical to SEQ ID NO: 6445
  GFR-binding peptide
  MOD_RES (4)..(5): Xaa is C or S

SEQ ID NO: 79422 - protein, 32 aa, Artificial Sequence
  GFR-binding peptide
  MOD_RES (32)..(32): Xaa is C or S
VPARLSAISILYLDAANNVVLKNYQDMVVEAX

SEQ ID NO: 79423 - protein, 36 aa, Artificial Sequence
  GFR-binding peptide
  MOD_RES (1)..(2)..(36): Xaa is C or S
  MOD_RES (16)..(17)..(18)..(19)..(20): Xaa is A or G
  MOD_RES (21)..(22)..(23)..(24): Xaa is A or G or is absent
XXVPARLSAISILYLXXXXXXXXXLKNYQDMVVEAX

SEQ ID NO: 79424 - protein, 34 aa, Artificial Sequence
  GFR-binding peptide
  MOD_RES (1)..(2): Xaa is C or S
  MOD_RES (16)..(17)..(18)..(19)..(20): Xaa is A or G
  MOD_RES (21)..(22)..(23)..(24): Xaa is A or G or is absent
XXTPTKMSAISMLYLXXXXXXXXXLKNYQGMVVD

SEQ ID NO: 79425 - protein, 37 aa, Artificial Sequence; identical to SEQ ID NO: 6448
  GFR-binding peptide
  MOD_RES (34)..(36): Xaa is C or S
  MOD_RES (14)..(15)..(16)..(17)..(18): Xaa is A or G
  MOD_RES (19)..(20)..(21)..(22): Xaa is A or G or is absent

SEQ ID NO: 79426 - protein, 38 aa, Artificial Sequence; identical to SEQ ID NO: 15515
  GFR-binding peptide
  MOD_RES (3)..(4)..(36)..(38): Xaa is C or S

SEQ ID NO: 79427 - protein, 34 aa, Artificial Sequence; identical to SEQ ID NO: 6449
  GFR-binding peptide
  MOD_RES (31)..(33): Xaa is C or S

SEQ ID NO: 79428 - protein, 39 aa, Artificial Sequence; identical to SEQ ID NO: 8212
  GFR-binding peptide
  MOD_RES (5)..(6)..(39): Xaa is C or S
  MOD_RES (20)..(21)..(22)..(23)..(24): Xaa is A or G
  MOD_RES (25)..(26)..(27)..(28): Xaa is A or G or is absent

SEQ ID NO: 79429 - protein, 38 aa, Artificial Sequence; identical to SEQ ID NO: 6450
  GFR-binding peptide
  MOD_RES (5)..(6): Xaa is C or S

SEQ ID NO: 79430 - protein, 36 aa, Artificial Sequence; identical to SEQ ID NO: 15518
  GFR-binding peptide
  MOD_RES (1)..(33)..(35): Xaa is C or S

SEQ ID NO: 79431 - protein, 34 aa, Artificial Sequence; identical to SEQ ID NO: 8215
  GFR-binding peptide
  MOD_RES (1)..(2)..(33): Xaa is C or S

SEQ ID NO: 79432 - protein, 41 aa, Artificial Sequence; identical to SEQ ID NO: 8217
  GFR-binding peptide
  MOD_RES (6)..(7)..(39)..(41): Xaa is C or S

SEQ ID NO: 79433 - protein, 36 aa, Artificial Sequence; identical to SEQ ID NO: 57533
  GFR-binding peptide
  MOD_RES (3)..(4)..(36): Xaa is C or S

SEQ ID NO: 79434 - protein, 40 aa, Artificial Sequence; identical to SEQ ID NO: 29535
  GFR-binding peptide
  MOD_RES (4)..(5)..(39): Xaa is C or S
  MOD_RES (19)..(20)..(21)..(22)..(23): Xaa is A or G
  MOD_RES (24)..(25)..(26)..(27): Xaa is A or G or is absent

SEQ ID NO: 79435 - protein, 38 aa, Artificial Sequence; identical to SEQ ID NO: 8218
  GFR-binding peptide
  MOD_RES (6)..(7)..(38): Xaa is C or S

SEQ ID NO: 79436 - protein, 42 aa, Artificial Sequence
  GFR-binding peptide
  MOD_RES (5)..(6)..(40)..(42): Xaa is C or S
  MOD_RES (20)..(21)..(22)..(23)..(24): Xaa is A or G
  MOD_RES (25)..(26)..(27)..(28): Xaa is A or G or is absent
APASXXVPARLSAISILYLXXXXXXXXXLKNYQDMVVEAXGX

SEQ ID NO: 79437 - protein, 39 aa, Artificial Sequence
  GFR-binding peptide
  MOD_RES (6)..(7)..(39): Xaa is C or S
HVPKPXXAPTKLSAISVLYLDDSSNVILKNYQNMVVRSX

SEQ ID NO: 79438 - protein, 42 aa, Artificial Sequence; identical to SEQ ID NO: 68851
  GFR-binding peptide
  MOD_RES (6)..(7)..(41): Xaa is C or S
  MOD_RES (21)..(22)..(23)..(24)..(25): Xaa is A or G
  MOD_RES (26)..(27)..(28)..(29): Xaa is A or G or is absent

SEQ ID NO: 79439 - protein, 35 aa, Artificial Sequence; identical to SEQ ID NO: 6458
  GFR-binding peptide
  MOD_RES (2)..(3)..(35): Xaa is C or S

SEQ ID NO: 79440 - protein, 37 aa, Artificial Sequence; identical to SEQ ID NO: 27612
  GFR-binding peptide
  MOD_RES (1)..(35)..(37): Xaa is C or S
  MOD_RES (15)..(16)..(17)..(18)..(19): Xaa is A or G
  MOD_RES (20)..(21)..(22)..(23): Xaa is A or G or is absent

SEQ ID NO: 79441 - protein, 39 aa, Artificial Sequence
  GFR-binding peptide
  MOD_RES (4)..(5)..(37)..(39): Xaa is C or S
PASXXVPARLSAISILYLDAANNVVLKNYQDMVVEAXGX

SEQ ID NO: 79442 - protein, 38 aa, Artificial Sequence; identical to SEQ ID NO: 8220
  GFR-binding peptide
  MOD_RES (4)..(5)..(36)..(38): Xaa is C or S

SEQ ID NO: 79443 - protein, 38 aa, Artificial Sequence; identical to SEQ ID NO: 29539
  GFR-binding peptide
  MOD_RES (2)..(3)..(37): Xaa is C or S
  MOD_RES (17)..(18)..(19)..(20)..(21): Xaa is A or G
  MOD_RES (22)..(23)..(24)..(25): Xaa is A or G or is absent

SEQ ID NO: 79444 - protein, 39 aa, Artificial Sequence; identical to SEQ ID NO: 6461
  GFR-binding peptide
  MOD_RES (5)..(6)..(37)..(39): Xaa is C or S

SEQ ID NO: 79445 - protein, 41 aa, Artificial Sequence; identical to SEQ ID NO: 70551
  GFR-binding peptide
  MOD_RES (5)..(6)..(38)..(40): Xaa is C or S

SEQ ID NO: 79446 - protein, 35 aa, Artificial Sequence
  GFR-binding peptide
  MOD_RES (32)..(34): Xaa is C or S
TPTKMSAISMLYLNDKQQIILKNYQGMVVDRXGXS

SEQ ID NO: 79447 - protein, 37 aa, Artificial Sequence
  GFR-binding peptide
  MOD_RES (3)..(4)..(36): Xaa is C or S
ASXXVPARLSAISILYLDAANNVVLKNYQDMVVEAXG

SEQ ID NO: 79448 - protein, 36 aa, Artificial Sequence; identical to SEQ ID NO: 8223
  GFR-binding peptide
  MOD_RES (2)..(3)..(36): Xaa is C or S
  MOD_RES (17)..(18)..(19)..(20)..(21): Xaa is A or G
  MOD_RES (22)..(23)..(24)..(25): Xaa is A or G or is absent

SEQ ID NO: 79449 - protein, 40 aa, Artificial Sequence; identical to SEQ ID NO: 8226
  GFR-binding peptide
  MOD_RES (5)..(6)..(39): Xaa is C or S
  MOD_RES (20)..(21)..(22)..(23)..(24): Xaa is A or G
  MOD_RES (25)..(26)..(27)..(28): Xaa is A or G or is absent

SEQ ID NO: 79450 - protein, 37 aa, Artificial Sequence; identical to SEQ ID NO: 57545
  GFR-binding peptide
  MOD_RES (2)..(3)..(35)..(37): Xaa is C or S

SEQ ID NO: 79451 - protein, 36 aa, Artificial Sequence; identical to SEQ ID NO: 15536
  GFR-binding peptide
  MOD_RES (1)..(35): Xaa is C or S
  MOD_RES (15)..(16)..(17)..(18)..(19): Xaa is A or G
  MOD_RES (20)..(21)..(22)..(23): Xaa is A or G or is absent

SEQ ID NO: 79452 - protein, 30 aa, Artificial Sequence
  GFR-binding peptide
VPTKLSAISILYLDKGVVTYLKNYQGMAVS

SEQ ID NO: 79453 - protein, 41 aa, Artificial Sequence
  GFR-binding peptide
  MOD_RES (6)..(7)..(41): Xaa is C or S
  MOD_RES (21)..(22)..(23)..(24)..(25): Xaa is A or G
  MOD_RES (26)..(27)..(28)..(29): Xaa is A or G or is absent
GSAGPXXTPTKMSAISMLYLXXXXXXXXXLKNYQGMVVDRX

SEQ ID NO: 79454 - protein, 37 aa, Artificial Sequence; identical to SEQ ID NO: 8227
  GFR-binding peptide
  MOD_RES (3)..(4)..(36): Xaa is C or S

SEQ ID NO: 79455 - protein, 33 aa, Artificial Sequence
  GFR-binding peptide
  MOD_RES (1)..(1): Xaa is C or S
  MOD_RES (15)..(16)..(17)..(18)..(19): Xaa is A or G
  MOD_RES (20)..(21)..(22)..(23): Xaa is A or G or is absent
XTPTKMSAISMLYLXXXXXXXXXLKNYQGMVVD

SEQ ID NO: 79456 - protein, 37 aa, Artificial Sequence; identical to SEQ ID NO: 27620
  GFR-binding peptide
  MOD_RES (3)..(4): Xaa is C or S
  MOD_RES (18)..(19)..(20)..(21)..(22): Xaa is A or G
  MOD_RES (23)..(24)..(25)..(26): Xaa is A or G or is absent

SEQ ID NO: 79457 - protein, 38 aa, Artificial Sequence; identical to SEQ ID NO: 70556
  GFR-binding peptide
  MOD_RES (1)..(2)..(36)..(38): Xaa is C or S
  MOD_RES (16)..(17)..(18)..(19)..(20): Xaa is A or G
  MOD_RES (21)..(22)..(23)..(24): Xaa is A or G or is absent

SEQ ID NO: 79458 - protein, 38 aa, Artificial Sequence; identical to SEQ ID NO: 6467
  GFR-binding peptide
  MOD_RES (2)..(3)..(36)..(38): Xaa is C or S
  MOD_RES (17)..(18)..(19)..(20)..(21): Xaa is A or G
  MOD_RES (22)..(23)..(24)..(25): Xaa is A or G or is absent

SEQ ID NO: 79459 - protein, 34 aa, Artificial Sequence; identical to SEQ ID NO: 8229
  GFR-binding peptide
  MOD_RES (33)..(33): Xaa is C or S
  MOD_RES (14)..(15)..(16)..(17)..(18): Xaa is A or G
  MOD_RES (19)..(20)..(21)..(22): Xaa is A or G or is absent

SEQ ID NO: 79460 - protein, 35 aa, Artificial Sequence; identical to SEQ ID NO: 27624
  GFR-binding peptide
  MOD_RES (1)..(35): Xaa is C or S
  MOD_RES (15)..(16)..(17)..(18)..(19): Xaa is A or G
  MOD_RES (20)..(21)..(22)..(23): Xaa is A or G or is absent

SEQ ID NO: 79461 - protein, 36 aa, Artificial Sequence; identical to SEQ ID NO: 6470
  GFR-binding peptide
  MOD_RES (34)..(36): Xaa is C or S
  MOD_RES (14)..(15)..(16)..(17)..(18): Xaa is A or G
  MOD_RES (19)..(20)..(21)..(22): Xaa is A or G or is absent

SEQ ID NO: 79462 - protein, 39 aa, Artificial Sequence; identical to SEQ ID NO: 27626
  GFR-binding peptide
  MOD_RES (2)..(3)..(37)..(39): Xaa is C or S
  MOD_RES (17)..(18)..(19)..(20)..(21): Xaa is A or G
  MOD_RES (22)..(23)..(24)..(25): Xaa is A or G or is absent

SEQ ID NO: 79463 - protein, 40 aa, Artificial Sequence; identical to SEQ ID NO: 8230
  GFR-binding peptide
  MOD_RES (4)..(5)..(39): Xaa is C or S
  MOD_RES (19)..(20)..(21)..(22)..(23): Xaa is A or G
  MOD_RES (24)..(25)..(26)..(27): Xaa is A or G or is absent

SEQ ID NO: 79464 - protein, 36 aa, Artificial Sequence
  GFR-binding peptide
  MOD_RES (34)..(36): Xaa is C or S
  MOD_RES (14)..(15)..(16)..(17)..(18): Xaa is A or G
  MOD_RES (19)..(20)..(21)..(22): Xaa is A or G or is absent
VPTKLSAISILYLXXXXXXXXXLKNYQGMAVSEXGX

SEQ ID NO: 79465 - protein, 36 aa, Artificial Sequence; identical to SEQ ID NO: 6473
  GFR-binding peptide
  MOD_RES (4)..(5)..(36): Xaa is C or S

SEQ ID NO: 79466 - protein, 36 aa, Artificial Sequence; identical to SEQ ID NO: 57556
  GFR-binding peptide
  MOD_RES (4)..(5)..(36): Xaa is C or S

SEQ ID NO: 79467 - protein, 37 aa, Artificial Sequence
  GFR-binding peptide
  MOD_RES (5)..(6): Xaa is C or S
ASKAXXVPTKLSAISILYLDKGVVTYLKNYQGMAVSE

SEQ ID NO: 79468 - protein, 37 aa, Artificial Sequence
  GFR-binding peptide
  MOD_RES (2)..(3)..(34)..(36): Xaa is C or S
TXXAPVKTSAISMLYLDNGRVLLLKNYQMIVEEXGXL

SEQ ID NO: 79469 - protein, 37 aa, Artificial Sequence; identical to SEQ ID NO: 6477
  GFR-binding peptide
  MOD_RES (1)..(2)..(35)..(37): Xaa is C or S
  MOD_RES (16)..(17)..(18)..(19)..(20): Xaa is A or G
  MOD_RES (21)..(22)..(23)..(24): Xaa is A or G or is absent

SEQ ID NO: 79470 - protein, 33 aa, Artificial Sequence; identical to SEQ ID NO: 6478
  GFR-binding peptide
  MOD_RES (2)..(3): Xaa is C or S

SEQ ID NO: 79471 - protein, 37 aa, Artificial Sequence; identical to SEQ ID NO: 8232
  GFR-binding peptide
  MOD_RES (2)..(3)..(34)..(36): Xaa is C or S

SEQ ID NO: 79472 - protein, 43 aa, Artificial Sequence; identical to SEQ ID NO: 8233
  GFR-binding peptide
  MOD_RES (4)..(5)..(40)..(42): Xaa is C or S
  MOD_RES (19)..(20)..(21)..(22)..(23): Xaa is A or G
  MOD_RES (24)..(25)..(26)..(27): Xaa is A or G or is absent

SEQ ID NO: 79473 - protein, 36 aa, Artificial Sequence; identical to SEQ ID NO: 13852
  GFR-binding peptide
  MOD_RES (3)..(4): Xaa is C or S
  MOD_RES (18)..(19)..(20)..(21)..(22): Xaa is A or G
  MOD_RES (23)..(24)..(25)..(26): Xaa is A or G or is absent

SEQ ID NO: 79474 - protein, 42 aa, Artificial Sequence; identical to SEQ ID NO: 6480
  GFR-binding peptide
  MOD_RES (7)..(39)..(41): Xaa is C or S

SEQ ID NO: 79475 - protein, 37 aa, Artificial Sequence; identical to SEQ ID NO: 15547
  GFR-binding peptide
  MOD_RES (1)..(2)..(34)..(36): Xaa is C or S

SEQ ID NO: 79476 - protein, 36 aa, Artificial Sequence; identical to SEQ ID NO: 8236
  GFR-binding peptide
  MOD_RES (2)..(36): Xaa is C or S
  MOD_RES (16)..(17)..(18)..(19)..(20): Xaa is A or G
  MOD_RES (21)..(22)..(23)..(24): Xaa is A or G or is absent

SEQ ID NO: 79477 - protein, 41 aa, Artificial Sequence; identical to SEQ ID NO: 6481
  GFR-binding peptide
  MOD_RES (6)..(40): Xaa is C or S
  MOD_RES (20)..(21)..(22)..(23)..(24): Xaa is A or G
  MOD_RES (25)..(26)..(27)..(28): Xaa is A or G or is absent

SEQ ID NO: 79478 - protein, 37 aa, Artificial Sequence
  GFR-binding peptide
  MOD_RES (34)..(36): Xaa is C or S
  MOD_RES (14)..(15)..(16)..(17)..(18): Xaa is A or G
  MOD_RES (19)..(20)..(21)..(22): Xaa is A or G or is absent
VPARLSAISILYLXXXXXXXXXLKNYQDMVVEAXGXR

SEQ ID NO: 79479 - protein, 34 aa, Artificial Sequence; identical to SEQ ID NO: 8239
  GFR-binding peptide
  MOD_RES (34)..(34): Xaa is C or S
  MOD_RES (14)..(15)..(16)..(17)..(18): Xaa is A or G
  MOD_RES (19)..(20)..(21)..(22): Xaa is A or G or is absent

SEQ ID NO: 79480 - protein, 35 aa, Artificial Sequence; identical to SEQ ID NO: 8240
  GFR-binding peptide
  MOD_RES (1)..(2): Xaa is C or S
  MOD_RES (16)..(17)..(18)..(19)..(20): Xaa is A or G
  MOD_RES (21)..(22)..(23)..(24): Xaa is A or G or is absent

SEQ ID NO: 79481 - protein, 34 aa, Artificial Sequence; identical to SEQ ID NO: 6487
  GFR-binding peptide
  MOD_RES (1)..(2)..(34): Xaa is C or S

SEQ ID NO: 79482 - protein, 39 aa, Artificial Sequence; identical to SEQ ID NO: 8241
  GFR-binding peptide
  MOD_RES (3)..(4)..(38): Xaa is C or S
  MOD_RES (18)..(19)..(20)..(21)..(22): Xaa is A or G
  MOD_RES (23)..(24)..(25)..(26): Xaa is A or G or is absent

SEQ ID NO: 79483 - protein, 39 aa, Artificial Sequence
  GFR-binding peptide
  MOD_RES (4)..(5)..(36)..(38): Xaa is C or S
PSTXXAPVKTSAISMLYLDNGRVLLLKNYQMIVEEXGXL

SEQ ID NO: 79484 - protein, 37 aa, Artificial Sequence; identical to SEQ ID NO: 57569
  GFR-binding peptide
  MOD_RES (6)..(7): Xaa is C or S

SEQ ID NO: 79485 - protein, 35 aa, Artificial Sequence
  GFR-binding peptide
  MOD_RES (2)..(3)..(35): Xaa is C or S
AXXVPTKLSAISILYLDKGVVTYLKNYQGMAVSEX

SEQ ID NO: 79486 - protein, 32 aa, Artificial Sequence; identical to SEQ ID NO: 57572
  GFR-binding peptide
  MOD_RES (32)..(32): Xaa is C or S

SEQ ID NO: 79487 - protein, 44 aa, Artificial Sequence; identical to SEQ ID NO: 6490
  GFR-binding peptide
  MOD_RES (6)..(7)..(41)..(43): Xaa is C or S
  MOD_RES (21)..(22)..(23)..(24)..(25): Xaa is A or G
  MOD_RES (26)..(27)..(28)..(29): Xaa is A or G or is absent

SEQ ID NO: 79488 - protein, 37 aa, Artificial Sequence; identical to SEQ ID NO: 65520
  GFR-binding peptide
  MOD_RES (3)..(4): Xaa is C or S
  MOD_RES (18)..(19)..(20)..(21)..(22): Xaa is A or G
  MOD_RES (23)..(24)..(25)..(26): Xaa is A or G or is absent

SEQ ID NO: 79489 - protein, 36 aa, Artificial Sequence; identical to SEQ ID NO: 15562
  GFR-binding peptide
  MOD_RES (5)..(6): Xaa is C or S

SEQ ID NO: 79490 - protein, 39 aa, Artificial Sequence; identical to SEQ ID NO: 15563
  GFR-binding peptide
  MOD_RES (1)..(2)..(36)..(38): Xaa is C or S
  MOD_RES (16)..(17)..(18)..(19)..(20): Xaa is A or G
  MOD_RES (21)..(22)..(23)..(24): Xaa is A or G or is absent

SEQ ID NO: 79491 - protein, 36 aa, Artificial Sequence; identical to SEQ ID NO: 8248
  GFR-binding peptide
  MOD_RES (4)..(36): Xaa is C or S

SEQ ID NO: 79492 - protein, 35 aa, Artificial Sequence; identical to SEQ ID NO: 8249
  GFR-binding peptide
  MOD_RES (2)..(3): Xaa is C or S
  MOD_RES (17)..(18)..(19)..(20)..(21): Xaa is A or G
  MOD_RES (22)..(23)..(24)..(25): Xaa is A or G or is absent

SEQ ID NO: 79493 - protein, 36 aa, Artificial Sequence
  GFR-binding peptide
  MOD_RES (4)..(5)..(36): Xaa is C or S
PSTXXAPVKTSAISMLYLDNGRVLLLKNYQMIVEEX

SEQ ID NO: 79494 - protein, 35 aa, Artificial Sequence
  GFR-binding peptide
  MOD_RES (1)..(35): Xaa is C or S
  MOD_RES (15)..(16)..(17)..(18)..(19): Xaa is A or G
  MOD_RES (20)..(21)..(22)..(23): Xaa is A or G or is absent
XVPARLSAISILYLXXXXXXXXXLKNYQDMVVEAX

SEQ ID NO: 79495 - protein, 31 aa, Artificial Sequence
  GFR-binding peptide
  MOD_RES (1)..(1): Xaa is C or S
XTPTKMSAISMLYLNDKQQIILKNYQGMVVD

SEQ ID NO: 79496 - protein, 33 aa, Artificial Sequence; identical to SEQ ID NO: 27656
  GFR-binding peptide
  MOD_RES (1)..(1): Xaa is C or S
  MOD_RES (15)..(16)..(17)..(18)..(19): Xaa is A or G
  MOD_RES (20)..(21)..(22)..(23): Xaa is A or G or is absent

SEQ ID NO: 79497 - protein, 31 aa, Artificial Sequence; identical to SEQ ID NO: 15569
  GFR-binding peptide

SEQ ID NO: 79498 - protein, 41 aa, Artificial Sequence; identical to SEQ ID NO: 57579
  GFR-binding peptide
  MOD_RES (4)..(5)..(38)..(40): Xaa is C or S
  MOD_RES (19)..(20)..(21)..(22)..(23): Xaa is A or G
  MOD_RES (24)..(25)..(26)..(27): Xaa is A or G or is absent

SEQ ID NO: 79499 - protein, 36 aa, Artificial Sequence
  GFR-binding peptide
  MOD_RES (5)..(6): Xaa is C or S
ASKAXXVPTKLSAISILYLDKGVVTYLKNYQGMAVS

SEQ ID NO: 79500 - protein, 32 aa, Artificial Sequence; identical to SEQ ID NO: 68893
  GFR-binding peptide
  MOD_RES (1)..(1): Xaa is C or S

SEQ ID NO: 79501 - protein, 32 aa, Artificial Sequence; identical to SEQ ID NO: 6496
  GFR-binding peptide
  MOD_RES (14)..(15)..(16)..(17)..(18): Xaa is A or G
  MOD_RES (19)..(20)..(21)..(22): Xaa is A or G or is absent

SEQ ID NO: 79502 - protein, 33 aa, Artificial Sequence; identical to SEQ ID NO: 6498
  GFR-binding peptide
  MOD_RES (33)..(33): Xaa is C or S
  MOD_RES (14)..(15)..(16)..(17)..(18): Xaa is A or G
  MOD_RES (19)..(20)..(21)..(22): Xaa is A or G or is absent

SEQ ID NO: 79503 - protein, 34 aa, Artificial Sequence; identical to SEQ ID NO: 8255
  GFR-binding peptide
  MOD_RES (31)..(33): Xaa is C or S

SEQ ID NO: 79504 - protein, 42 aa, Artificial Sequence
  GFR-binding peptide
  MOD_RES (5)..(6)..(39)..(41): Xaa is C or S
  MOD_RES (20)..(21)..(22)..(23)..(24): Xaa is A or G
  MOD_RES (25)..(26)..(27)..(28): Xaa is A or G or is absent
VPSTXXAPVKTSAISMLYLXXXXXXXXXLKNYQMIVEEXGXL

SEQ ID NO: 79505 - protein, 35 aa, Artificial Sequence; identical to SEQ ID NO: 6500
  GFR-binding peptide
  MOD_RES (2)..(3): Xaa is C or S
  MOD_RES (17)..(18)..(19)..(20)..(21): Xaa is A or G
  MOD_RES (22)..(23)..(24)..(25): Xaa is A or G or is absent

SEQ ID NO: 79506 - protein, 37 aa, Artificial Sequence; identical to SEQ ID NO: 8256
  GFR-binding peptide
  MOD_RES (5)..(5): Xaa is C or S
  MOD_RES (19)..(20)..(21)..(22)..(23): Xaa is A or G
  MOD_RES (24)..(25)..(26)..(27): Xaa is A or G or is absent

SEQ ID NO: 79507 - protein, 41 aa, Artificial Sequence
  GFR-binding peptide
  MOD_RES (5)..(6)..(40): Xaa is C or S
  MOD_RES (20)..(21)..(22)..(23)..(24): Xaa is A or G
  MOD_RES (25)..(26)..(27)..(28): Xaa is A or G or is absent
SAGPXXTPTKMSAISMLYLXXXXXXXXXLKNYQGMVVDRXG

SEQ ID NO: 79508 - protein, 40 aa, Artificial Sequence; identical to SEQ ID NO: 6504
  GFR-binding peptide
  MOD_RES (5)..(6)..(37)..(39): Xaa is C or S

SEQ ID NO: 79509 - protein, 34 aa, Artificial Sequence; identical to SEQ ID NO: 8262
  GFR-binding peptide
  MOD_RES (1)..(2)..(33): Xaa is C or S

SEQ ID NO: 79510 - protein, 41 aa, Artificial Sequence; identical to SEQ ID NO: 57584
  GFR-binding peptide
  MOD_RES (6)..(7)..(38)..(40): Xaa is C or S

SEQ ID NO: 79511 - protein, 34 aa, Artificial Sequence
  GFR-binding peptide
  MOD_RES (32)..(34): Xaa is C or S
VPTKLSAISILYLDKGVVTYLKNYQGMAVSEXGX

SEQ ID NO: 79512 - protein, 34 aa, Artificial Sequence; identical to SEQ ID NO: 8264
  GFR-binding peptide
  MOD_RES (1)..(33): Xaa is C or S

SEQ ID NO: 79513 - protein, 43 aa, Artificial Sequence
  GFR-binding peptide
  MOD_RES (6)..(7)..(40)..(42): Xaa is C or S
  MOD_RES (21)..(22)..(23)..(24)..(25): Xaa is A or G
  MOD_RES (26)..(27)..(28)..(29): Xaa is A or G or is absent
RVPSTXXAPVKTSAISMLYLXXXXXXXXXLKNYQMIVEEXGXL

SEQ ID NO: 79514 - protein, 36 aa, Artificial Sequence; identical to SEQ ID NO: 6506
  GFR-binding peptide
  MOD_RES (2)..(3)..(36): Xaa is C or S
  MOD_RES (17)..(18)..(19)..(20)..(21): Xaa is A or G
  MOD_RES (22)..(23)..(24)..(25): Xaa is A or G or is absent

SEQ ID NO: 79515 - protein, 37 aa, Artificial Sequence; identical to SEQ ID NO: 29588
  GFR-binding peptide
  MOD_RES (1)..(2)..(34)..(36): Xaa is C or S

SEQ ID NO: 79516 - protein, 38 aa, Artificial Sequence; identical to SEQ ID NO: 8266
  GFR-binding peptide
  MOD_RES (5)..(37): Xaa is C or S

SEQ ID NO: 79517 - protein, 41 aa, Artificial Sequence; identical to SEQ ID NO: 6507
  GFR-binding peptide
  MOD_RES (6)..(7)..(39)..(41): Xaa is C or S

SEQ ID NO: 79518 - protein, 39 aa, Artificial Sequence; identical to SEQ ID NO: 8268
  GFR-binding peptide
  MOD_RES (3)..(4)..(36)..(38): Xaa is C or S

SEQ ID NO: 79519 - protein, 33 aa, Artificial Sequence; identical to SEQ ID NO: 6508
  GFR-binding peptide
  MOD_RES (1)..(33): Xaa is C or S

SEQ ID NO: 79520 - protein, 37 aa, Artificial Sequence; identical to SEQ ID NO: 27670
  GFR-binding peptide
  MOD_RES (2)..(3)..(37): Xaa is C or S
  MOD_RES (17)..(18)..(19)..(20)..(21): Xaa is A or G
  MOD_RES (22)..(23)..(24)..(25): Xaa is A or G or is absent

SEQ ID NO: 79521 - protein, 39 aa, Artificial Sequence; identical to SEQ ID NO: 29595
  GFR-binding peptide
  MOD_RES (4)..(5)..(37)..(39): Xaa is C or S

SEQ ID NO: 79522 - protein, 31 aa, Artificial Sequence; identical to SEQ ID NO: 6513
  GFR-binding peptide
  MOD_RES (1)..(1): Xaa is C or S

SEQ ID NO: 79523 - protein, 37 aa, Artificial Sequence; identical to SEQ ID NO: 6514
  GFR-binding peptide
  MOD_RES (6)..(6): Xaa is C or S

SEQ ID NO: 79524 - protein, 41 aa, Artificial Sequence; identical to SEQ ID NO: 8271
  GFR-binding peptide
  MOD_RES (7)..(41): Xaa is C or S
  MOD_RES (21)..(22)..(23)..(24)..(25): Xaa is A or G
  MOD_RES (26)..(27)..(28)..(29): Xaa is A or G or is absent

SEQ ID NO: 79525 - protein, 35 aa, Artificial Sequence; identical to SEQ ID NO: 6515
  GFR-binding peptide
  MOD_RES (2)..(2): Xaa is C or S
  MOD_RES (16)..(17)..(18)..(19)..(20): Xaa is A or G
  MOD_RES (21)..(22)..(23)..(24): Xaa is A or G or is absent

SEQ ID NO: 79526 - protein, 34 aa, Artificial Sequence; identical to SEQ ID NO: 57594
  GFR-binding peptide
  MOD_RES (1)..(32)..(34): Xaa is C or S

SEQ ID NO: 79527 - protein, 40 aa, Artificial Sequence; identical to SEQ ID NO: 8275
  GFR-binding peptide
  MOD_RES (6)..(7): Xaa is C or S
  MOD_RES (21)..(22)..(23)..(24)..(25): Xaa is A or G
  MOD_RES (26)..(27)..(28)..(29): Xaa is A or G or is absent

SEQ ID NO: 79528 - protein, 33 aa, Artificial Sequence; identical to SEQ ID NO: 8276
  GFR-binding peptide
  MOD_RES (1)..(1): Xaa is C or S
  MOD_RES (15)..(16)..(17)..(18)..(19): Xaa is A or G
  MOD_RES (20)..(21)..(22)..(23): Xaa is A or G or is absent

SEQ ID NO: 79529 - protein, 41 aa, Artificial Sequence; identical to SEQ ID NO: 6518
  GFR-binding peptide
  MOD_RES (6)..(7)..(40): Xaa is C or S
  MOD_RES (21)..(22)..(23)..(24)..(25): Xaa is A or G
  MOD_RES (26)..(27)..(28)..(29): Xaa is A or G or is absent

SEQ ID NO: 79530 - protein, 33 aa, Artificial Sequence; identical to SEQ ID NO: 8277
  GFR-binding peptide
  MOD_RES (1)..(1): Xaa is C or S
  MOD_RES (15)..(16)..(17)..(18)..(19): Xaa is A or G
  MOD_RES (20)..(21)..(22)..(23): Xaa is A or G or is absent

SEQ ID NO: 79531 - protein, 35 aa, Artificial Sequence; identical to SEQ ID NO: 8278
  GFR-binding peptide
  MOD_RES (34)..(34): Xaa is C or S
  MOD_RES (14)..(15)..(16)..(17)..(18): Xaa is A or G
  MOD_RES (19)..(20)..(21)..(22): Xaa is A or G or is absent

SEQ ID NO: 79532 - protein, 37 aa, Artificial Sequence; identical to SEQ ID NO: 27679
  GFR-binding peptide
  MOD_RES (3)..(4): Xaa is C or S
  MOD_RES (18)..(19)..(20)..(21)..(22): Xaa is A or G
  MOD_RES (23)..(24)..(25)..(26): Xaa is A or G or is absent

SEQ ID NO: 79533 - protein, 39 aa, Artificial Sequence; identical to SEQ ID NO: 6521
  GFR-binding peptide
  MOD_RES (2)..(3)..(36)..(38): Xaa is C or S
  MOD_RES (17)..(18)..(19)..(20)..(21): Xaa is A or G
  MOD_RES (22)..(23)..(24)..(25): Xaa is A or G or is absent

SEQ ID NO: 79534 - protein, 37 aa, Artificial Sequence; identical to SEQ ID NO: 6522
  GFR-binding peptide
  MOD_RES (4)..(5)..(37): Xaa is C or S

SEQ ID NO: 79535 - protein, 38 aa, Artificial Sequence; identical to SEQ ID NO: 6523
  GFR-binding peptide
  MOD_RES (5)..(5): Xaa is C or S
  MOD_RES (19)..(20)..(21)..(22)..(23): Xaa is A or G
  MOD_RES (24)..(25)..(26)..(27): Xaa is A or G or is absent

SEQ ID NO: 79536 - protein, 31 aa, Artificial Sequence; identical to SEQ ID NO: 27687
  GFR-binding peptide

SEQ ID NO: 79537 - protein, 37 aa, Artificial Sequence; identical to SEQ ID NO: 6526
  GFR-binding peptide
  MOD_RES (6)..(7): Xaa is C or S

SEQ ID NO: 79538 - protein, 35 aa, Artificial Sequence; identical to SEQ ID NO: 57609
  GFR-binding peptide
  MOD_RES (1)..(2)..(33)..(35): Xaa is C or S

SEQ ID NO: 79539 - protein, 38 aa, Artificial Sequence; identical to SEQ ID NO: 8286
  GFR-binding peptide
  MOD_RES (2)..(3)..(36)..(38): Xaa is C or S
  MOD_RES (17)..(18)..(19)..(20)..(21): Xaa is A or G
  MOD_RES (22)..(23)..(24)..(25): Xaa is A or G or is absent

SEQ ID NO: 79540 - protein, 41 aa, Artificial Sequence
  GFR-binding peptide
  MOD_RES (5)..(6)..(38)..(40): Xaa is C or S
ASKAXXVPTKLSAISILYLDKGVVTYLKNYQGMAVSEXGXR

SEQ ID NO: 79541 - protein, 37 aa, Artificial Sequence; identical to SEQ ID NO: 6529
  GFR-binding peptide
  MOD_RES (5)..(37): Xaa is C or S

SEQ ID NO: 79542 - protein, 32 aa, Artificial Sequence; identical to SEQ ID NO: 6530
  GFR-binding peptide
  MOD_RES (32)..(32): Xaa is C or S

SEQ ID NO: 79543 - protein, 37 aa, Artificial Sequence; identical to SEQ ID NO: 67181
  GFR-binding peptide
  MOD_RES (1)..(2)..(36): Xaa is C or S
  MOD_RES (16)..(17)..(18)..(19)..(20): Xaa is A or G
  MOD_RES (21)..(22)..(23)..(24): Xaa is A or G or is absent

SEQ ID NO: 79544 - protein, 38 aa, Artificial Sequence
  GFR-binding peptide
  MOD_RES (4)..(5): Xaa is C or S
  MOD_RES (19)..(20)..(21)..(22)..(23): Xaa is A or G
  MOD_RES (24)..(25)..(26)..(27): Xaa is A or G or is absent
PEPXXVPEKMSAISILYLXXXXXXXXXLKNYQNMTVES

SEQ ID NO: 79545 - protein, 39 aa, Artificial Sequence; identical to SEQ ID NO: 8290
  GFR-binding peptide
  MOD_RES (4)..(5)..(37)..(39): Xaa is C or S

SEQ ID NO: 79546 - protein, 36 aa, Artificial Sequence
  GFR-binding peptide
  MOD_RES (33)..(35): Xaa is C or S
  MOD_RES (14)..(15)..(16)..(17)..(18): Xaa is A or G
  MOD_RES (19)..(20)..(21)..(22): Xaa is A or G or is absent
APVKTSAISMLYLXXXXXXXXXLKNYQMIVEEXGXL

SEQ ID NO: 79547 - protein, 43 aa, Artificial Sequence; identical to SEQ ID NO: 8291
  GFR-binding peptide
  MOD_RES (5)..(6)..(40)..(42): Xaa is C or S
  MOD_RES (20)..(21)..(22)..(23)..(24): Xaa is A or G
  MOD_RES (25)..(26)..(27)..(28): Xaa is A or G or is absent

SEQ ID NO: 79548 - protein, 39 aa, Artificial Sequence; identical to SEQ ID NO: 6535
  GFR-binding peptide
  MOD_RES (4)..(5)..(36)..(38): Xaa is C or S

SEQ ID NO: 79549 - protein, 36 aa, Artificial Sequence; identical to SEQ ID NO: 57614
  GFR-binding peptide
  MOD_RES (1)..(2)..(33)..(35): Xaa is C or S

SEQ ID NO: 79550 - protein, 35 aa, Artificial Sequence; identical to SEQ ID NO: 15600
  GFR-binding peptide
  MOD_RES (34)..(34): Xaa is C or S
  MOD_RES (14)..(15)..(16)..(17)..(18): Xaa is A or G
  MOD_RES (19)..(20)..(21)..(22): Xaa is A or G or is absent

SEQ ID NO: 79551 - protein, 36 aa, Artificial Sequence; identical to SEQ ID NO: 13902
  GFR-binding peptide
  MOD_RES (2)..(3)..(35): Xaa is C or S

SEQ ID NO: 79552 - protein, 36 aa, Artificial Sequence; identical to SEQ ID NO: 57619
  GFR-binding peptide
  MOD_RES (34)..(36): Xaa is C or S
  MOD_RES (14)..(15)..(16)..(17)..(18): Xaa is A or G
  MOD_RES (19)..(20)..(21)..(22): Xaa is A or G or is absent

SEQ ID NO: 79553 - protein, 40 aa, Artificial Sequence; identical to SEQ ID NO: 8298
  GFR-binding peptide
  MOD_RES (4)..(5)..(38)..(40): Xaa is C or S
  MOD_RES (19)..(20)..(21)..(22)..(23): Xaa is A or G
  MOD_RES (24)..(25)..(26)..(27): Xaa is A or G or is absent

SEQ ID NO: 79554 - protein, 36 aa, Artificial Sequence; identical to SEQ ID NO: 6540
  GFR-binding peptide
  MOD_RES (34)..(36): Xaa is C or S
  MOD_RES (14)..(15)..(16)..(17)..(18): Xaa is A or G
  MOD_RES (19)..(20)..(21)..(22): Xaa is A or G or is absent

SEQ ID NO: 79555 - protein, 38 aa, Artificial Sequence; identical to SEQ ID NO: 6541
  GFR-binding peptide
  MOD_RES (1)..(2)..(36)..(38): Xaa is C or S
  MOD_RES (16)..(17)..(18)..(19)..(20): Xaa is A or G
  MOD_RES (21)..(22)..(23)..(24): Xaa is A or G or is absent

SEQ ID NO: 79556 - protein, 36 aa, Artificial Sequence; identical to SEQ ID NO: 57623
  GFR-binding peptide
  MOD_RES (1)..(2)..(35): Xaa is C or S
  MOD_RES (16)..(17)..(18)..(19)..(20): Xaa is A or G
  MOD_RES (21)..(22)..(23)..(24): Xaa is A or G or is absent

SEQ ID NO: 79557 - protein, 40 aa, Artificial Sequence; identical to SEQ ID NO: 70620
  GFR-binding peptide
  MOD_RES (4)..(5)..(37)..(39): Xaa is C or S

SEQ ID NO: 79558 - protein, 35 aa, Artificial Sequence; identical to SEQ ID NO: 6542
  GFR-binding peptide
  MOD_RES (1)..(32)..(34): Xaa is C or S

SEQ ID NO: 79559 - protein, 37 aa, Artificial Sequence; identical to SEQ ID NO: 6543
  GFR-binding peptide
  MOD_RES (4)..(5)..(36): Xaa is C or S

SEQ ID NO: 79560 - protein, 35 aa, Artificial Sequence; identical to SEQ ID NO: 6544
  GFR-binding peptide
  MOD_RES (1)..(2)..(33)..(35): Xaa is C or S

SEQ ID NO: 79561 - protein, 42 aa, Artificial Sequence; identical to SEQ ID NO: 29618
  GFR-binding peptide
  MOD_RES (4)..(5)..(39)..(41): Xaa is C or S
  MOD_RES (19)..(20)..(21)..(22)..(23): Xaa is A or G
  MOD_RES (24)..(25)..(26)..(27): Xaa is A or G or is absent

SEQ ID NO: 79562 - protein, 38 aa, Artificial Sequence; identical to SEQ ID NO: 6545
  GFR-binding peptide
  MOD_RES (1)..(2)..(36)..(38): Xaa is C or S
  MOD_RES (16)..(17)..(18)..(19)..(20): Xaa is A or G
  MOD_RES (21)..(22)..(23)..(24): Xaa is A or G or is absent

SEQ ID NO: 79563 - protein, 34 aa, Artificial Sequence; identical to SEQ ID NO: 29620
  GFR-binding peptide
  MOD_RES (1)..(1): Xaa is C or S
  MOD_RES (15)..(16)..(17)..(18)..(19): Xaa is A or G
  MOD_RES (20)..(21)..(22)..(23): Xaa is A or G or is absent

SEQ ID NO: 79564 - protein, 33 aa, Artificial Sequence
  GFR-binding peptide
  MOD_RES (1)..(2): Xaa is C or S
XXVPEKMSAISILYLDENKNVVLKNYQNMTVES

SEQ ID NO: 79565 - protein, 37 aa, Artificial Sequence; identical to SEQ ID NO: 8303
  GFR-binding peptide
  MOD_RES (2)..(3)..(36): Xaa is C or S
  MOD_RES (17)..(18)..(19)..(20)..(21): Xaa is A or G
  MOD_RES (22)..(23)..(24)..(25): Xaa is A or G or is absent

SEQ ID NO: 79566 - protein, 37 aa, Artificial Sequence; identical to SEQ ID NO: 6546
  GFR-binding peptide
  MOD_RES (4)..(5): Xaa is C or S
  MOD_RES (19)..(20)..(21)..(22)..(23): Xaa is A or G
  MOD_RES (24)..(25)..(26)..(27): Xaa is A or G or is absent

SEQ ID NO: 79567 - protein, 36 aa, Artificial Sequence; identical to SEQ ID NO: 6547
  GFR-binding peptide
  MOD_RES (1)..(35): Xaa is C or S
  MOD_RES (15)..(16)..(17)..(18)..(19): Xaa is A or G
  MOD_RES (20)..(21)..(22)..(23): Xaa is A or G or is absent

SEQ ID NO: 79568 - protein, 38 aa, Artificial Sequence; identical to SEQ ID NO: 57633
  GFR-binding peptide
  MOD_RES (5)..(6)..(38): Xaa is C or S

SEQ ID NO: 79569 - protein, 31 aa, Artificial Sequence; identical to SEQ ID NO: 8305
  GFR-binding peptide

SEQ ID NO: 79570 - protein, 35 aa, Artificial Sequence; identical to SEQ ID NO: 13917
  GFR-binding peptide
  MOD_RES (1)..(35): Xaa is C or S
  MOD_RES (15)..(16)..(17)..(18)..(19): Xaa is A or G
  MOD_RES (20)..(21)..(22)..(23): Xaa is A or G or is absent

SEQ ID NO: 79571 - protein, 35 aa, Artificial Sequence; identical to SEQ ID NO: 8308
  GFR-binding peptide
  MOD_RES (1)..(34): Xaa is C or S
  MOD_RES (15)..(16)..(17)..(18)..(19): Xaa is A or G
  MOD_RES (20)..(21)..(22)..(23): Xaa is A or G or is absent

SEQ ID NO: 79572 - protein, 33 aa, Artificial Sequence; identical to SEQ ID NO: 6550
  GFR-binding peptide
  MOD_RES (33)..(33): Xaa is C or S
  MOD_RES (14)..(15)..(16)..(17)..(18): Xaa is A or G
  MOD_RES (19)..(20)..(21)..(22): Xaa is A or G or is absent

SEQ ID NO: 79573 - protein, 39 aa, Artificial Sequence; identical to SEQ ID NO: 27710
  GFR-binding peptide
  MOD_RES (6)..(7): Xaa is C or S
  MOD_RES (21)..(22)..(23)..(24)..(25): Xaa is A or G
  MOD_RES (26)..(27)..(28)..(29): Xaa is A or G or is absent

SEQ ID NO: 79574 - protein, 34 aa, Artificial Sequence; identical to SEQ ID NO: 6551
  GFR-binding peptide
  MOD_RES (4)..(4): Xaa is C or S

SEQ ID NO: 79575 - protein, 37 aa, Artificial Sequence; identical to SEQ ID NO: 8309
  GFR-binding peptide
  MOD_RES (2)..(3)..(37): Xaa is C or S
  MOD_RES (17)..(18)..(19)..(20)..(21): Xaa is A or G
  MOD_RES (22)..(23)..(24)..(25): Xaa is A or G or is absent

SEQ ID NO: 79576 - protein, 38 aa, Artificial Sequence; identical to SEQ ID NO: 13925
  GFR-binding peptide
  MOD_RES (4)..(5): Xaa is C or S
  MOD_RES (19)..(20)..(21)..(22)..(23): Xaa is A or G
  MOD_RES (24)..(25)..(26)..(27): Xaa is A or G or is absent

SEQ ID NO: 79577 - protein, 38 aa, Artificial Sequence; identical to SEQ ID NO: 6556
  GFR-binding peptide
  MOD_RES (1)..(35)..(37): Xaa is C or S
  MOD_RES (15)..(16)..(17)..(18)..(19): Xaa is A or G
  MOD_RES (20)..(21)..(22)..(23): Xaa is A or G or is absent

SEQ ID NO: 79578 - protein, 33 aa, Artificial Sequence; identical to SEQ ID NO: 8311
  GFR-binding peptide
  MOD_RES (3)..(3): Xaa is C or S

SEQ ID NO: 79579 - protein, 33 aa, Artificial Sequence; identical to SEQ ID NO: 8312
  GFR-binding peptide
  MOD_RES (1)..(2)..(33): Xaa is C or S

SEQ ID NO: 79580 - protein, 37 aa, Artificial Sequence; identical to SEQ ID NO: 15617
  GFR-binding peptide
  MOD_RES (2)..(3)..(35)..(37): Xaa is C or S

SEQ ID NO: 79581 - protein, 36 aa, Artificial Sequence; identical to SEQ ID NO: 6558
  GFR-binding peptide
  MOD_RES (1)..(34)..(36): Xaa is C or S
  MOD_RES (15)..(16)..(17)..(18)..(19): Xaa is A or G
  MOD_RES (20)..(21)..(22)..(23): Xaa is A or G or is absent

SEQ ID NO: 79582 - protein, 41 aa, Artificial Sequence; identical to SEQ ID NO: 8315
  GFR-binding peptide
  MOD_RES (6)..(7)..(41): Xaa is C or S
  MOD_RES (21)..(22)..(23)..(24)..(25): Xaa is A or G
  MOD_RES (26)..(27)..(28)..(29): Xaa is A or G or is absent

SEQ ID NO: 79583 - protein, 42 aa, Artificial Sequence; identical to SEQ ID NO: 57645
  GFR-binding peptide
  MOD_RES (4)..(5)..(39)..(41): Xaa is C or S
  MOD_RES (19)..(20)..(21)..(22)..(23): Xaa is A or G
  MOD_RES (24)..(25)..(26)..(27): Xaa is A or G or is absent

SEQ ID NO: 79584 - protein, 36 aa, Artificial Sequence; identical to SEQ ID NO: 8316
  GFR-binding peptide
  MOD_RES (3)..(4)..(36): Xaa is C or S

SEQ ID NO: 79585 - protein, 38 aa, Artificial Sequence; identical to SEQ ID NO: 15620
  GFR-binding peptide
  MOD_RES (1)..(2)..(36)..(38): Xaa is C or S
  MOD_RES (16)..(17)..(18)..(19)..(20): Xaa is A or G
  MOD_RES (21)..(22)..(23)..(24): Xaa is A or G or is absent

SEQ ID NO: 79586 - protein, 37 aa, Artificial Sequence; identical to SEQ ID NO: 57646
  GFR-binding peptide
  MOD_RES (1)..(2)..(36): Xaa is C or S
  MOD_RES (16)..(17)..(18)..(19)..(20): Xaa is A or G
  MOD_RES (21)..(22)..(23)..(24): Xaa is A or G or is absent

SEQ ID NO: 79587 - protein, 36 aa, Artificial Sequence; identical to SEQ ID NO: 8317
  GFR-binding peptide
  MOD_RES (3)..(4): Xaa is C or S
  MOD_RES (18)..(19)..(20)..(21)..(22): Xaa is A or G
  MOD_RES (23)..(24)..(25)..(26): Xaa is A or G or is absent

SEQ ID NO: 79588 - protein, 34 aa, Artificial Sequence; identical to SEQ ID NO: 8320
  GFR-binding peptide
  MOD_RES (1)..(32)..(34): Xaa is C or S

SEQ ID NO: 79589 - protein, 36 aa, Artificial Sequence; identical to SEQ ID NO: 15624
  GFR-binding peptide
  MOD_RES (1)..(33)..(35): Xaa is C or S

SEQ ID NO: 79590 - protein, 35 aa, Artificial Sequence
  GFR-binding peptide
  MOD_RES (2)..(3)..(35): Xaa is C or S
SXXVPARLSAISILYLDAANNVVLKNYQDMVVEAX

SEQ ID NO: 79591 - protein, 34 aa, Artificial Sequence; identical to SEQ ID NO: 57651
  GFR-binding peptide
  MOD_RES (1)..(1): Xaa is C or S
  MOD_RES (15)..(16)..(17)..(18)..(19): Xaa is A or G
  MOD_RES (20)..(21)..(22)..(23): Xaa is A or G or is absent

SEQ ID NO: 79592 - protein, 32 aa, Artificial Sequence
  GFR-binding peptide
  MOD_RES (1)..(2): Xaa is C or S
XXTPTKMSAISMLYLNDKQQIILKNYQGMVVD

SEQ ID NO: 79593 - protein, 40 aa, Artificial Sequence
  GFR-binding peptide
  MOD_RES (5)..(6)..(38)..(40): Xaa is C or S
APASXXVPARLSAISILYLDAANNVVLKNYQDMVVEAXGX

SEQ ID NO: 79594 - protein, 33 aa, Artificial Sequence
  GFR-binding peptide
  MOD_RES (31)..(33): Xaa is C or S
APVKTSAISMLYLDNGRVLLLKNYQMIVEEXGX

SEQ ID NO: 79595 - protein, 35 aa, Artificial Sequence; identical to SEQ ID NO: 6562
  GFR-binding peptide
  MOD_RES (4)..(4): Xaa is C or S

SEQ ID NO: 79596 - protein, 38 aa, Artificial Sequence; identical to SEQ ID NO: 8326
  GFR-binding peptide
  MOD_RES (2)..(3)..(38): Xaa is C or S
  MOD_RES (17)..(18)..(19)..(20)..(21): Xaa is A or G
  MOD_RES (22)..(23)..(24)..(25): Xaa is A or G or is absent

SEQ ID NO: 79597 - protein, 33 aa, Artificial Sequence
  GFR-binding peptide
  MOD_RES (2)..(3): Xaa is C or S
TXXAPVKTSAISMLYLDNGRVLLLKNYQMIVEE

SEQ ID NO: 79598 - protein, 35 aa, Artificial Sequence
  GFR-binding peptide
  MOD_RES (34)..(34): Xaa is C or S
  MOD_RES (14)..(15)..(16)..(17)..(18): Xaa is A or G
  MOD_RES (19)..(20)..(21)..(22): Xaa is A or G or is absent
VPEKMSAISILYLXXXXXXXXXLKNYQNMTVESXA

SEQ ID NO: 79599 - protein, 43 aa, Artificial Sequence; identical to SEQ ID NO: 27735
  GFR-binding peptide
  MOD_RES (5)..(6)..(40)..(42): Xaa is C or S
  MOD_RES (20)..(21)..(22)..(23)..(24): Xaa is A or G
  MOD_RES (25)..(26)..(27)..(28): Xaa is A or G or is absent

SEQ ID NO: 79600 - protein, 36 aa, Artificial Sequence; identical to SEQ ID NO: 6572
  GFR-binding peptide
  MOD_RES (4)..(5): Xaa is C or S

SEQ ID NO: 79601 - protein, 33 aa, Artificial Sequence; identical to SEQ ID NO: 15627
  GFR-binding peptide
  MOD_RES (1)..(1): Xaa is C or S
  MOD_RES (15)..(16)..(17)..(18)..(19): Xaa is A or G
  MOD_RES (20)..(21)..(22)..(23): Xaa is A or G or is absent

SEQ ID NO: 79602 - protein, 36 aa, Artificial Sequence; identical to SEQ ID NO: 8331
  GFR-binding peptide
  MOD_RES (1)..(2)..(34)..(36): Xaa is C or S

SEQ ID NO: 79603 - protein, 37 aa, Artificial Sequence; identical to SEQ ID NO: 29652
  GFR-binding peptide
  MOD_RES (34)..(36): Xaa is C or S
  MOD_RES (14)..(15)..(16)..(17)..(18): Xaa is A or G
  MOD_RES (19)..(20)..(21)..(22): Xaa is A or G or is absent

SEQ ID NO: 79604 - protein, 37 aa, Artificial Sequence; identical to SEQ ID NO: 8333
  GFR-binding peptide
  MOD_RES (3)..(4)..(36): Xaa is C or S

SEQ ID NO: 79605 - protein, 43 aa, Artificial Sequence; identical to SEQ ID NO: 6573
  GFR-binding peptide
  MOD_RES (5)..(6)..(41)..(43): Xaa is C or S
  MOD_RES (20)..(21)..(22)..(23)..(24): Xaa is A or G
  MOD_RES (25)..(26)..(27)..(28): Xaa is A or G or is absent

SEQ ID NO: 79606 - protein, 41 aa, Artificial Sequence; identical to SEQ ID NO: 6574
  GFR-binding peptide
  MOD_RES (6)..(7)..(41): Xaa is C or S
  MOD_RES (21)..(22)..(23)..(24)..(25): Xaa is A or G
  MOD_RES (26)..(27)..(28)..(29): Xaa is A or G or is absent

SEQ ID NO: 79607 - protein, 34 aa, Artificial Sequence; identical to SEQ ID NO: 6575
  GFR-binding peptide
  MOD_RES (31)..(33): Xaa is C or S

SEQ ID NO: 79608 - protein, 38 aa, Artificial Sequence; identical to SEQ ID NO: 8337
  GFR-binding peptide
  MOD_RES (2)..(3)..(36)..(38): Xaa is C or S

SEQ ID NO: 79609 - protein, 34 aa, Artificial Sequence
  GFR-binding peptide
  MOD_RES (1)..(1): Xaa is C or S
  MOD_RES (15)..(16)..(17)..(18)..(19): Xaa is A or G
  MOD_RES (20)..(21)..(22)..(23): Xaa is A or G or is absent
XVPARLSAISILYLXXXXXXXXXLKNYQDMVVEA

SEQ ID NO: 79610 - protein, 37 aa, Artificial Sequence; identical to SEQ ID NO: 8341
  GFR-binding peptide
  MOD_RES (3)..(35)..(37): Xaa is C or S

SEQ ID NO: 79611 - protein, 30 aa, Artificial Sequence; identical to SEQ ID NO: 6580
  GFR-binding peptide

SEQ ID NO: 79612 - protein, 36 aa, Artificial Sequence; identical to SEQ ID NO: 8342
  GFR-binding peptide
  MOD_RES (4)..(5)..(36): Xaa is C or S

SEQ ID NO: 79613 - protein, 34 aa, Artificial Sequence; identical to SEQ ID NO: 8343
  GFR-binding peptide
  MOD_RES (3)..(4): Xaa is C or S

SEQ ID NO: 79614 - protein, 41 aa, Artificial Sequence
  GFR-binding peptide
  MOD_RES (4)..(5)..(39)..(41): Xaa is C or S
  MOD_RES (19)..(20)..(21)..(22)..(23): Xaa is A or G
  MOD_RES (24)..(25)..(26)..(27): Xaa is A or G or is absent
PEPXXVPEKMSAISILYLXXXXXXXXXLKNYQNMTVESXAX

SEQ ID NO: 79615 - protein, 38 aa, Artificial Sequence; identical to SEQ ID NO: 57669
  GFR-binding peptide
  MOD_RES (4)..(5)..(38): Xaa is C or S
  MOD_RES (19)..(20)..(21)..(22)..(23): Xaa is A or G
  MOD_RES (24)..(25)..(26)..(27): Xaa is A or G or is absent

SEQ ID NO: 79616 - protein, 33 aa, Artificial Sequence; identical to SEQ ID NO: 8344
  GFR-binding peptide
  MOD_RES (31)..(33): Xaa is C or S

SEQ ID NO: 79617 - protein, 33 aa, Artificial Sequence; identical to SEQ ID NO: 13953
  GFR-binding peptide
  MOD_RES (1)..(2): Xaa is C or S

SEQ ID NO: 79618 - protein, 37 aa, Artificial Sequence; identical to SEQ ID NO: 8346
  GFR-binding peptide
  MOD_RES (3)..(4)..(36): Xaa is C or S

SEQ ID NO: 79619 - protein, 39 aa, Artificial Sequence; identical to SEQ ID NO: 8347
  GFR-binding peptide
  MOD_RES (5)..(6)..(39): Xaa is C or S
  MOD_RES (20)..(21)..(22)..(23)..(24): Xaa is A or G
  MOD_RES (25)..(26)..(27)..(28): Xaa is A or G or is absent

SEQ ID NO: 79620 - protein, 37 aa, Artificial Sequence; identical to SEQ ID NO: 8348
  GFR-binding peptide
  MOD_RES (1)..(35)..(37): Xaa is C or S
  MOD_RES (15)..(16)..(17)..(18)..(19): Xaa is A or G
  MOD_RES (20)..(21)..(22)..(23): Xaa is A or G or is absent

SEQ ID NO: 79621 - protein, 34 aa, Artificial Sequence; identical to SEQ ID NO: 57672
  GFR-binding peptide
  MOD_RES (1)..(2): Xaa is C or S
  MOD_RES (16)..(17)..(18)..(19)..(20): Xaa is A or G
  MOD_RES (21)..(22)..(23)..(24): Xaa is A or G or is absent

SEQ ID NO: 79622 - protein, 42 aa, Artificial Sequence; identical to SEQ ID NO: 8349
  GFR-binding peptide
  MOD_RES (5)..(6)..(40)..(42): Xaa is C or S
  MOD_RES (20)..(21)..(22)..(23)..(24): Xaa is A or G
  MOD_RES (25)..(26)..(27)..(28): Xaa is A or G or is absent

SEQ ID NO: 79623 - protein, 41 aa, Artificial Sequence; identical to SEQ ID NO: 29665
  GFR-binding peptide
  MOD_RES (5)..(6)..(40): Xaa is C or S
  MOD_RES (20)..(21)..(22)..(23)..(24): Xaa is A or G
  MOD_RES (25)..(26)..(27)..(28): Xaa is A or G or is absent

SEQ ID NO: 79624 - protein, 34 aa, Artificial Sequence; identical to SEQ ID NO: 29666
  GFR-binding peptide
  MOD_RES (1)..(2): Xaa is C or S
  MOD_RES (16)..(17)..(18)..(19)..(20): Xaa is A or G
  MOD_RES (21)..(22)..(23)..(24): Xaa is A or G or is absent

SEQ ID NO: 79625 - protein, 34 aa, Artificial Sequence; identical to SEQ ID NO: 6585
  GFR-binding peptide
  MOD_RES (34)..(34): Xaa is C or S
  MOD_RES (14)..(15)..(16)..(17)..(18): Xaa is A or G
  MOD_RES (19)..(20)..(21)..(22): Xaa is A or G or is absent

SEQ ID NO: 79626 - protein, 38 aa, Artificial Sequence
  GFR-binding peptide
  MOD_RES (2)..(3)..(37): Xaa is C or S
  MOD_RES (17)..(18)..(19)..(20)..(21): Xaa is A or G
  MOD_RES (22)..(23)..(24)..(25): Xaa is A or G or is absent
PXXTPTKMSAISMLYLXXXXXXXXXLKNYQGMVVDRXG

SEQ ID NO: 79627 - protein, 38 aa, Artificial Sequence; identical to SEQ ID NO: 8350
  GFR-binding peptide
  MOD_RES (2)..(3)..(35)..(37): Xaa is C or S

SEQ ID NO: 79628 - protein, 36 aa, Artificial Sequence
  GFR-binding peptide
  MOD_RES (1)..(2)..(34)..(36): Xaa is C or S
XXTPTKMSAISMLYLNDKQQIILKNYQGMVVDRXGX

SEQ ID NO: 79629 - protein, 34 aa, Artificial Sequence; identical to SEQ ID NO: 6589
  GFR-binding peptide
  MOD_RES (1)..(1): Xaa is C or S
  MOD_RES (15)..(16)..(17)..(18)..(19): Xaa is A or G
  MOD_RES (20)..(21)..(22)..(23): Xaa is A or G or is absent

SEQ ID NO: 79630 - protein, 34 aa, Artificial Sequence; identical to SEQ ID NO: 6590
  GFR-binding peptide
  MOD_RES (1)..(34): Xaa is C or S

SEQ ID NO: 79631 - protein, 33 aa, Artificial Sequence
  GFR-binding peptide
  MOD_RES (14)..(15)..(16)..(17)..(18): Xaa is A or G
  MOD_RES (19)..(20)..(21)..(22): Xaa is A or G or is absent
VPEKMSAISILYLXXXXXXXXXLKNYQNMTVES

SEQ ID NO: 79632 - protein, 39 aa, Artificial Sequence; identical to SEQ ID NO: 6593
  GFR-binding peptide
  MOD_RES (2)..(3)..(37)..(39): Xaa is C or S
  MOD_RES (17)..(18)..(19)..(20)..(21): Xaa is A or G
  MOD_RES (22)..(23)..(24)..(25): Xaa is A or G or is absent

SEQ ID NO: 79633 - protein, 36 aa, Artificial Sequence
  GFR-binding peptide
  MOD_RES (4)..(5): Xaa is C or S
AGPXXTPTKMSAISMLYLNDKQQIILKNYQGMVVDR

SEQ ID NO: 79634 - protein, 34 aa, Artificial Sequence; identical to SEQ ID NO: 8354
  GFR-binding peptide
  MOD_RES (33)..(33): Xaa is C or S

SEQ ID NO: 79635 - protein, 35 aa, Artificial Sequence
  GFR-binding peptide
  MOD_RES (34)..(34): Xaa is C or S
  MOD_RES (14)..(15)..(16)..(17)..(18): Xaa is A or G
  MOD_RES (19)..(20)..(21)..(22): Xaa is A or G or is absent
TPTKMSAISMLYLXXXXXXXXXLKNYQGMVVDRXG

SEQ ID NO: 79636 - protein, 35 aa, Artificial Sequence; identical to SEQ ID NO: 6594
  GFR-binding peptide
  MOD_RES (1)..(2): Xaa is C or S
  MOD_RES (16)..(17)..(18)..(19)..(20): Xaa is A or G
  MOD_RES (21)..(22)..(23)..(24): Xaa is A or G or is absent

SEQ ID NO: 79637 - protein, 32 aa, Artificial Sequence; identical to SEQ ID NO: 13962
  GFR-binding peptide
  MOD_RES (1)..(1): Xaa is C or S

SEQ ID NO: 79638 - protein, 41 aa, Artificial Sequence; identical to SEQ ID NO: 8355
  GFR-binding peptide
  MOD_RES (5)..(6)..(38)..(40): Xaa is C or S

SEQ ID NO: 79639 - protein, 38 aa, Artificial Sequence; identical to SEQ ID NO: 8357
  GFR-binding peptide
  MOD_RES (4)..(5)..(36)..(38): Xaa is C or S

SEQ ID NO: 79640 - protein, 40 aa, Artificial Sequence
  GFR-binding peptide
  MOD_RES (4)..(5)..(37)..(39): Xaa is C or S
PEPXXVPEKMSAISILYLDENKNVVLKNYQNMTVESXAXR

SEQ ID NO: 79641 - protein, 38 aa, Artificial Sequence; identical to SEQ ID NO: 57687
  GFR-binding peptide
  MOD_RES (5)..(6)..(37): Xaa is C or S

SEQ ID NO: 79642 - protein, 34 aa, Artificial Sequence; identical to SEQ ID NO: 57688
  GFR-binding peptide
  MOD_RES (1)..(34): Xaa is C or S
  MOD_RES (15)..(16)..(17)..(18)..(19): Xaa is A or G
  MOD_RES (20)..(21)..(22)..(23): Xaa is A or G or is absent

SEQ ID NO: 79643 - protein, 39 aa, Artificial Sequence; identical to SEQ ID NO: 8359
  GFR-binding peptide
  MOD_RES (4)..(5)..(38): Xaa is C or S
  MOD_RES (19)..(20)..(21)..(22)..(23): Xaa is A or G
  MOD_RES (24)..(25)..(26)..(27): Xaa is A or G or is absent

SEQ ID NO: 79644 - protein, 38 aa, Artificial Sequence; identical to SEQ ID NO: 57689
  GFR-binding peptide
  MOD_RES (3)..(4)..(38): Xaa is C or S
  MOD_RES (18)..(19)..(20)..(21)..(22): Xaa is A or G
  MOD_RES (23)..(24)..(25)..(26): Xaa is A or G or is absent

SEQ ID NO: 79645 - protein, 34 aa, Artificial Sequence; identical to SEQ ID NO: 29678
  GFR-binding peptide
  MOD_RES (3)..(4): Xaa is C or S

SEQ ID NO: 79646 - protein, 38 aa, Artificial Sequence; identical to SEQ ID NO: 8361
  GFR-binding peptide
  MOD_RES (4)..(5)..(38): Xaa is C or S
  MOD_RES (19)..(20)..(21)..(22)..(23): Xaa is A or G
  MOD_RES (24)..(25)..(26)..(27): Xaa is A or G or is absent

SEQ ID NO: 79647 - protein, 33 aa, Artificial Sequence; identical to SEQ ID NO: 29682
  GFR-binding peptide
  MOD_RES (1)..(33): Xaa is C or S

SEQ ID NO: 79648 - protein, 36 aa, Artificial Sequence; identical to SEQ ID NO: 6602
  GFR-binding peptide
  MOD_RES (1)..(2)..(35): Xaa is C or S
  MOD_RES (16)..(17)..(18)..(19)..(20): Xaa is A or G
  MOD_RES (21)..(22)..(23)..(24): Xaa is A or G or is absent

SEQ ID NO: 79649 - protein, 40 aa, Artificial Sequence; identical to SEQ ID NO: 15664
  GFR-binding peptide
  MOD_RES (3)..(4)..(38)..(40): Xaa is C or S
  MOD_RES (18)..(19)..(20)..(21)..(22): Xaa is A or G
  MOD_RES (23)..(24)..(25)..(26): Xaa is A or G or is absent

SEQ ID NO: 79650 - protein, 39 aa, Artificial Sequence; identical to SEQ ID NO: 57695
  GFR-binding peptide
  MOD_RES (6)..(7)..(39): Xaa is C or S

SEQ ID NO: 79651 - protein, 38 aa, Artificial Sequence; identical to SEQ ID NO: 8365
  GFR-binding peptide
  MOD_RES (4)..(5)..(36)..(38): Xaa is C or S

SEQ ID NO: 79652 - protein, 35 aa, Artificial Sequence; identical to SEQ ID NO: 27762
  GFR-binding peptide
  MOD_RES (1)..(33)..(35): Xaa is C or S

SEQ ID NO: 79653 - protein, 35 aa, Artificial Sequence; identical to SEQ ID NO: 8368
  GFR-binding peptide
  MOD_RES (2)..(3): Xaa is C or S
  MOD_RES (17)..(18)..(19)..(20)..(21): Xaa is A or G
  MOD_RES (22)..(23)..(24)..(25): Xaa is A or G or is absent

SEQ ID NO: 79654 - protein, 31 aa, Artificial Sequence
  GFR-binding peptide
TPTKMSAISMLYLNDKQQIILKNYQGMVVDR

SEQ ID NO: 79655 - protein, 41 aa, Artificial Sequence; identical to SEQ ID NO: 13973
  GFR-binding peptide
  MOD_RES (6)..(7)..(41): Xaa is C or S
  MOD_RES (21)..(22)..(23)..(24)..(25): Xaa is A or G
  MOD_RES (26)..(27)..(28)..(29): Xaa is A or G or is absent

SEQ ID NO: 79656 - protein, 36 aa, Artificial Sequence; identical to SEQ ID NO: 6608
  GFR-binding peptide
  MOD_RES (2)..(3)..(35): Xaa is C or S

SEQ ID NO: 79657 - protein, 36 aa, Artificial Sequence; identical to SEQ ID NO: 29693
  GFR-binding peptide
  MOD_RES (1)..(2)..(36): Xaa is C or S
  MOD_RES (16)..(17)..(18)..(19)..(20): Xaa is A or G
  MOD_RES (21)..(22)..(23)..(24): Xaa is A or G or is absent

SEQ ID NO: 79658 - protein, 30 aa, Artificial Sequence; identical to SEQ ID NO: 6610
  GFR-binding peptide

SEQ ID NO: 79659 - protein, 33 aa, Artificial Sequence; identical to SEQ ID NO: 6611
  GFR-binding peptide
  MOD_RES (1)..(2): Xaa is C or S

SEQ ID NO: 79660 - protein, 38 aa, Artificial Sequence; identical to SEQ ID NO: 67260
  GFR-binding peptide
  MOD_RES (4)..(5)..(37): Xaa is C or S

SEQ ID NO: 79661 - protein, 34 aa, Artificial Sequence; identical to SEQ ID NO: 8374
  GFR-binding peptide
  MOD_RES (1)..(1): Xaa is C or S
  MOD_RES (15)..(16)..(17)..(18)..(19): Xaa is A or G
  MOD_RES (20)..(21)..(22)..(23): Xaa is A or G or is absent

SEQ ID NO: 79662 - protein, 36 aa, Artificial Sequence
  GFR-binding peptide
  MOD_RES (1)..(35): Xaa is C or S
  MOD_RES (15)..(16)..(17)..(18)..(19): Xaa is A or G
  MOD_RES (20)..(21)..(22)..(23): Xaa is A or G or is absent
XVPTKLSAISILYLXXXXXXXXXLKNYQGMAVSEXG

SEQ ID NO: 79663 - protein, 39 aa, Artificial Sequence; identical to SEQ ID NO: 8375
  GFR-binding peptide
  MOD_RES (2)..(3)..(38): Xaa is C or S
  MOD_RES (17)..(18)..(19)..(20)..(21): Xaa is A or G
  MOD_RES (22)..(23)..(24)..(25): Xaa is A or G or is absent

SEQ ID NO: 79664 - protein, 36 aa, Artificial Sequence
  GFR-binding peptide
  MOD_RES (4)..(5): Xaa is C or S
SKAXXVPTKLSAISILYLDKGVVTYLKNYQGMAVSE

SEQ ID NO: 79665 - protein, 32 aa, Artificial Sequence; identical to SEQ ID NO: 13978
  GFR-binding peptide
  MOD_RES (14)..(15)..(16)..(17)..(18): Xaa is A or G
  MOD_RES (19)..(20)..(21)..(22): Xaa is A or G or is absent

SEQ ID NO: 79666 - protein, 31 aa, Artificial Sequence; identical to SEQ ID NO: 8378
  GFR-binding peptide

SEQ ID NO: 79667 - protein, 35 aa, Artificial Sequence; identical to SEQ ID NO: 8379
  GFR-binding peptide
  MOD_RES (2)..(3): Xaa is C or S
  MOD_RES (17)..(18)..(19)..(20)..(21): Xaa is A or G
  MOD_RES (22)..(23)..(24)..(25): Xaa is A or G or is absent

SEQ ID NO: 79668 - protein, 31 aa, Artificial Sequence; identical to SEQ ID NO: 6613
  GFR-binding peptide
  MOD_RES (1)..(1): Xaa is C or S

SEQ ID NO: 79669 - protein, 35 aa, Artificial Sequence; identical to SEQ ID NO: 6615
  GFR-binding peptide
  MOD_RES (2)..(3)..(35): Xaa is C or S

SEQ ID NO: 79670 - protein, 36 aa, Artificial Sequence
  GFR-binding peptide
  MOD_RES (3)..(4)..(36): Xaa is C or S
GPXXTPTKMSAISMLYLNDKQQIILKNYQGMVVDRX

SEQ ID NO: 79671 - protein, 40 aa, Artificial Sequence; identical to SEQ ID NO: 8382
  GFR-binding peptide
  MOD_RES (5)..(6)..(38)..(40): Xaa is C or S

SEQ ID NO: 79672 - protein, 31 aa, Artificial Sequence; identical to SEQ ID NO: 6616
  GFR-binding peptide
  MOD_RES (31)..(31): Xaa is C or S

SEQ ID NO: 79673 - protein, 38 aa, Artificial Sequence; identical to SEQ ID NO: 8383
  GFR-binding peptide
  MOD_RES (5)..(6): Xaa is C or S
  MOD_RES (20)..(21)..(22)..(23)..(24): Xaa is A or G
  MOD_RES (25)..(26)..(27)..(28): Xaa is A or G or is absent

SEQ ID NO: 79674 - protein, 36 aa, Artificial Sequence; identical to SEQ ID NO: 57717
  GFR-binding peptide
  MOD_RES (2)..(3)..(34)..(36): Xaa is C or S

SEQ ID NO: 79675 - protein, 39 aa, Artificial Sequence; identical to SEQ ID NO: 6617
  GFR-binding peptide
  MOD_RES (5)..(6)..(39): Xaa is C or S
  MOD_RES (20)..(21)..(22)..(23)..(24): Xaa is A or G
  MOD_RES (25)..(26)..(27)..(28): Xaa is A or G or is absent

SEQ ID NO: 79676 - protein, 38 aa, Artificial Sequence; identical to SEQ ID NO: 67273
  GFR-binding peptide
  MOD_RES (4)..(5): Xaa is C or S
  MOD_RES (19)..(20)..(21)..(22)..(23): Xaa is A or G
  MOD_RES (24)..(25)..(26)..(27): Xaa is A or G or is absent

SEQ ID NO: 79677 - protein, 38 aa, Artificial Sequence; identical to SEQ ID NO: 57720
  GFR-binding peptide
  MOD_RES (3)..(4)..(37): Xaa is C or S
  MOD_RES (18)..(19)..(20)..(21)..(22): Xaa is A or G
  MOD_RES (23)..(24)..(25)..(26): Xaa is A or G or is absent

SEQ ID NO: 79678 - protein, 38 aa, Artificial Sequence
  GFR-binding peptide
  MOD_RES (1)..(35)..(37): Xaa is C or S
  MOD_RES (15)..(16)..(17)..(18)..(19): Xaa is A or G
  MOD_RES (20)..(21)..(22)..(23): Xaa is A or G or is absent
XVPARLSAISILYLXXXXXXXXXLKNYQDMVVEAXGXR

SEQ ID NO: 79679 - protein, 39 aa, Artificial Sequence; identical to SEQ ID NO: 57721
  GFR-binding peptide
  MOD_RES (1)..(2)..(36)..(38): Xaa is C or S
  MOD_RES (16)..(17)..(18)..(19)..(20): Xaa is A or G
  MOD_RES (21)..(22)..(23)..(24): Xaa is A or G or is absent

SEQ ID NO: 79680 - protein, 40 aa, Artificial Sequence; identical to SEQ ID NO: 57722
  GFR-binding peptide
  MOD_RES (3)..(4)..(38)..(40): Xaa is C or S
  MOD_RES (18)..(19)..(20)..(21)..(22): Xaa is A or G
  MOD_RES (23)..(24)..(25)..(26): Xaa is A or G or is absent

SEQ ID NO: 79681 - protein, 38 aa, Artificial Sequence; identical to SEQ ID NO: 70711
  GFR-binding peptide
  MOD_RES (5)..(6): Xaa is C or S
  MOD_RES (20)..(21)..(22)..(23)..(24): Xaa is A or G
  MOD_RES (25)..(26)..(27)..(28): Xaa is A or G or is absent

SEQ ID NO: 79682 - protein, 38 aa, Artificial Sequence
  GFR-binding peptide
  MOD_RES (3)..(4)..(38): Xaa is C or S
  MOD_RES (18)..(19)..(20)..(21)..(22): Xaa is A or G
  MOD_RES (23)..(24)..(25)..(26): Xaa is A or G or is absent
ASXXVPARLSAISILYLXXXXXXXXXLKNYQDMVVEAX

SEQ ID NO: 79683 - protein, 33 aa, Artificial Sequence; identical to SEQ ID NO: 8390
  GFR-binding peptide
  MOD_RES (33)..(33): Xaa is C or S
  MOD_RES (14)..(15)..(16)..(17)..(18): Xaa is A or G
  MOD_RES (19)..(20)..(21)..(22): Xaa is A or G or is absent

SEQ ID NO: 79684 - protein, 41 aa, Artificial Sequence; identical to SEQ ID NO: 6621
  GFR-binding peptide
  MOD_RES (4)..(5)..(38)..(40): Xaa is C or S
  MOD_RES (19)..(20)..(21)..(22)..(23): Xaa is A or G
  MOD_RES (24)..(25)..(26)..(27): Xaa is A or G or is absent

SEQ ID NO: 79685 - protein, 32 aa, Artificial Sequence
  GFR-binding peptide
  MOD_RES (32)..(32): Xaa is C or S
TPTKMSAISMLYLNDKQQIILKNYQGMVVDRX

SEQ ID NO: 79686 - protein, 39 aa, Artificial Sequence; identical to SEQ ID NO: 6623
  GFR-binding peptide
  MOD_RES (6)..(7): Xaa is C or S
  MOD_RES (21)..(22)..(23)..(24)..(25): Xaa is A or G
  MOD_RES (26)..(27)..(28)..(29): Xaa is A or G or is absent

SEQ ID NO: 79687 - protein, 36 aa, Artificial Sequence; identical to SEQ ID NO: 6624
  GFR-binding peptide
  MOD_RES (33)..(35): Xaa is C or S

SEQ ID NO: 79688 - protein, 36 aa, Artificial Sequence; identical to SEQ ID NO: 15689
  GFR-binding peptide
  MOD_RES (1)..(2)..(36): Xaa is C or S
  MOD_RES (16)..(17)..(18)..(19)..(20): Xaa is A or G
  MOD_RES (21)..(22)..(23)..(24): Xaa is A or G or is absent

SEQ ID NO: 79689 - protein, 39 aa, Artificial Sequence
  GFR-binding peptide
  MOD_RES (3)..(4)..(38): Xaa is C or S
  MOD_RES (18)..(19)..(20)..(21)..(22): Xaa is A or G
  MOD_RES (23)..(24)..(25)..(26): Xaa is A or G or is absent
GPXXTPTKMSAISMLYLXXXXXXXXXLKNYQGMVVDRXG

SEQ ID NO: 79690 - protein, 39 aa, Artificial Sequence
  GFR-binding peptide
  MOD_RES (6)..(7): Xaa is C or S
  MOD_RES (21)..(22)..(23)..(24)..(25): Xaa is A or G
  MOD_RES (26)..(27)..(28)..(29): Xaa is A or G or is absent
GIPEPXXVPEKMSAISILYLXXXXXXXXXLKNYQNMTVE

SEQ ID NO: 79691 - protein, 37 aa, Artificial Sequence; identical to SEQ ID NO: 6625
  GFR-binding peptide
  MOD_RES (2)..(3)..(36): Xaa is C or S

SEQ ID NO: 79692 - protein, 35 aa, Artificial Sequence; identical to SEQ ID NO: 15691
  GFR-binding peptide
  MOD_RES (1)..(2)..(34): Xaa is C or S

SEQ ID NO: 79693 - protein, 32 aa, Artificial Sequence
  GFR-binding peptide
  MOD_RES (1)..(1): Xaa is C or S
XVPARLSAISILYLDAANNVVLKNYQDMVVEA

SEQ ID NO: 79694 - protein, 36 aa, Artificial Sequence; identical to SEQ ID NO: 8397
  GFR-binding peptide
  MOD_RES (3)..(4)..(35): Xaa is C or S

SEQ ID NO: 79695 - protein, 39 aa, Artificial Sequence
  GFR-binding peptide
  MOD_RES (3)..(4)..(36)..(38): Xaa is C or S
EPXXVPEKMSAISILYLDENKNVVLKNYQNMTVESXAXR

SEQ ID NO: 79696 - protein, 32 aa, Artificial Sequence; identical to SEQ ID NO: 8400
  GFR-binding peptide
  MOD_RES (1)..(32): Xaa is C or S

SEQ ID NO: 79697 - protein, 34 aa, Artificial Sequence
  GFR-binding peptide
  MOD_RES (1)..(1): Xaa is C or S
  MOD_RES (15)..(16)..(17)..(18)..(19): Xaa is A or G
  MOD_RES (20)..(21)..(22)..(23): Xaa is A or G or is absent
XTPTKMSAISMLYLXXXXXXXXXLKNYQGMVVDR

SEQ ID NO: 79698 - protein, 38 aa, Artificial Sequence; identical to SEQ ID NO: 57730
  GFR-binding peptide
  MOD_RES (6)..(7)..(38): Xaa is C or S

SEQ ID NO: 79699 - protein, 36 aa, Artificial Sequence; identical to SEQ ID NO: 8401
  GFR-binding peptide
  MOD_RES (1)..(2)..(35): Xaa is C or S
  MOD_RES (16)..(17)..(18)..(19)..(20): Xaa is A or G
  MOD_RES (21)..(22)..(23)..(24): Xaa is A or G or is absent

SEQ ID NO: 79700 - protein, 38 aa, Artificial Sequence
  GFR-binding peptide
  MOD_RES (4)..(5)..(38): Xaa is C or S
  MOD_RES (19)..(20)..(21)..(22)..(23): Xaa is A or G
  MOD_RES (24)..(25)..(26)..(27): Xaa is A or G or is absent
PSTXXAPVKTSAISMLYLXXXXXXXXXLKNYQMIVEEX

SEQ ID NO: 79701 - protein, 37 aa, Artificial Sequence
  GFR-binding peptide
  MOD_RES (3)..(4): Xaa is C or S
  MOD_RES (18)..(19)..(20)..(21)..(22): Xaa is A or G
  MOD_RES (23)..(24)..(25)..(26): Xaa is A or G or is absent
EPXXVPEKMSAISILYLXXXXXXXXXLKNYQNMTVES

SEQ ID NO: 79702 - protein, 36 aa, Artificial Sequence
  GFR-binding peptide
  MOD_RES (3)..(4)..(36): Xaa is C or S
ASXXVPARLSAISILYLDAANNVVLKNYQDMVVEAX

SEQ ID NO: 79703 - protein, 37 aa, Artificial Sequence; identical to SEQ ID NO: 15702
  GFR-binding peptide
  MOD_RES (1)..(35)..(37): Xaa is C or S
  MOD_RES (15)..(16)..(17)..(18)..(19): Xaa is A or G
  MOD_RES (20)..(21)..(22)..(23): Xaa is A or G or is absent

SEQ ID NO: 79704 - protein, 35 aa, Artificial Sequence; identical to SEQ ID NO: 57738
  GFR-binding peptide
  MOD_RES (4)..(5): Xaa is C or S

SEQ ID NO: 79705 - protein, 40 aa, Artificial Sequence; identical to SEQ ID NO: 14001
  GFR-binding peptide
  MOD_RES (4)..(5)..(39): Xaa is C or S
  MOD_RES (19)..(20)..(21)..(22)..(23): Xaa is A or G
  MOD_RES (24)..(25)..(26)..(27): Xaa is A or G or is absent

SEQ ID NO: 79706 - protein, 39 aa, Artificial Sequence; identical to SEQ ID NO: 65656
  GFR-binding peptide
  MOD_RES (1)..(2)..(36)..(38): Xaa is C or S
  MOD_RES (16)..(17)..(18)..(19)..(20): Xaa is A or G
  MOD_RES (21)..(22)..(23)..(24): Xaa is A or G or is absent

SEQ ID NO: 79707 - protein, 37 aa, Artificial Sequence; identical to SEQ ID NO: 6632
  GFR-binding peptide
  MOD_RES (2)..(3)..(37): Xaa is C or S
  MOD_RES (17)..(18)..(19)..(20)..(21): Xaa is A or G
  MOD_RES (22)..(23)..(24)..(25): Xaa is A or G or is absent

SEQ ID NO: 79708 - protein, 33 aa, Artificial Sequence; identical to SEQ ID NO: 57746
  GFR-binding peptide
  MOD_RES (1)..(32): Xaa is C or S

SEQ ID NO: 79709 - protein, 36 aa, Artificial Sequence; identical to SEQ ID NO: 8408
  GFR-binding peptide
  MOD_RES (2)..(3)..(36): Xaa is C or S
  MOD_RES (17)..(18)..(19)..(20)..(21): Xaa is A or G
  MOD_RES (22)..(23)..(24)..(25): Xaa is A or G or is absent

SEQ ID NO: 79710 - protein, 40 aa, Artificial Sequence; identical to SEQ ID NO: 6635
  GFR-binding peptide
  MOD_RES (6)..(7)..(40): Xaa is C or S
  MOD_RES (21)..(22)..(23)..(24)..(25): Xaa is A or G
  MOD_RES (26)..(27)..(28)..(29): Xaa is A or G or is absent

SEQ ID NO: 79711 - protein, 32 aa, Artificial Sequence; identical to SEQ ID NO: 6637
  GFR-binding peptide
  MOD_RES (14)..(15)..(16)..(17)..(18): Xaa is A or G
  MOD_RES (19)..(20)..(21)..(22): Xaa is A or G or is absent

SEQ ID NO: 79712 - protein, 39 aa, Artificial Sequence; identical to SEQ ID NO: 8410
  GFR-binding peptide
  MOD_RES (6)..(7)..(39): Xaa is C or S

SEQ ID NO: 79713 - protein, 33 aa, Artificial Sequence; identical to SEQ ID NO: 27803
  GFR-binding peptide
  MOD_RES (14)..(15)..(16)..(17)..(18): Xaa is A or G
  MOD_RES (19)..(20)..(21)..(22): Xaa is A or G or is absent

SEQ ID NO: 79714 - protein, 34 aa, Artificial Sequence; identical to SEQ ID NO: 8411
  GFR-binding peptide
  MOD_RES (1)..(2)..(33): Xaa is C or S

SEQ ID NO: 79715 - protein, 37 aa, Artificial Sequence; identical to SEQ ID NO: 8412
  GFR-binding peptide
  MOD_RES (1)..(2)..(36): Xaa is C or S
  MOD_RES (16)..(17)..(18)..(19)..(20): Xaa is A or G
  MOD_RES (21)..(22)..(23)..(24): Xaa is A or G or is absent

SEQ ID NO: 79716 - protein, 38 aa, Artificial Sequence; identical to SEQ ID NO: 8413
  GFR-binding peptide
  MOD_RES (5)..(6)..(38): Xaa is C or S

SEQ ID NO: 79717 - protein, 33 aa, Artificial Sequence
  GFR-binding peptide
  MOD_RES (14)..(15)..(16)..(17)..(18): Xaa is A or G
  MOD_RES (19)..(20)..(21)..(22): Xaa is A or G or is absent
VPTKLSAISILYLXXXXXXXXXLKNYQGMAVSE

SEQ ID NO: 79718 - protein, 40 aa, Artificial Sequence; identical to SEQ ID NO: 57756
  GFR-binding peptide
  MOD_RES (4)..(5)..(38)..(40): Xaa is C or S
  MOD_RES (19)..(20)..(21)..(22)..(23): Xaa is A or G
  MOD_RES (24)..(25)..(26)..(27): Xaa is A or G or is absent

SEQ ID NO: 79719 - protein, 37 aa, Artificial Sequence; identical to SEQ ID NO: 6645
  GFR-binding peptide
  MOD_RES (3)..(4)..(37): Xaa is C or S
  MOD_RES (18)..(19)..(20)..(21)..(22): Xaa is A or G
  MOD_RES (23)..(24)..(25)..(26): Xaa is A or G or is absent

SEQ ID NO: 79720 - protein, 36 aa, Artificial Sequence; identical to SEQ ID NO: 8417
  GFR-binding peptide
  MOD_RES (1)..(2)..(36): Xaa is C or S
  MOD_RES (16)..(17)..(18)..(19)..(20): Xaa is A or G
  MOD_RES (21)..(22)..(23)..(24): Xaa is A or G or is absent

SEQ ID NO: 79721 - protein, 39 aa, Artificial Sequence; identical to SEQ ID NO: 8418
  GFR-binding peptide
  MOD_RES (3)..(4)..(36)..(38): Xaa is C or S

SEQ ID NO: 79722 - protein, 35 aa, Artificial Sequence; identical to SEQ ID NO: 8419
  GFR-binding peptide
  MOD_RES (1)..(2)..(33)..(35): Xaa is C or S

SEQ ID NO: 79723 - protein, 35 aa, Artificial Sequence
  GFR-binding peptide
  MOD_RES (1)..(33)..(35): Xaa is C or S
XVPTKLSAISILYLDKGVVTYLKNYQGMAVSEXGX

SEQ ID NO: 79724 - protein, 35 aa, Artificial Sequence
  GFR-binding peptide
  MOD_RES (4)..(5): Xaa is C or S
PEPXXVPEKMSAISILYLDENKNVVLKNYQNMTVE

SEQ ID NO: 79725 - protein, 38 aa, Artificial Sequence; identical to SEQ ID NO: 8420
  GFR-binding peptide
  MOD_RES (3)..(4)..(35)..(37): Xaa is C or S

SEQ ID NO: 79726 - protein, 34 aa, Artificial Sequence; identical to SEQ ID NO: 8421
  GFR-binding peptide
  MOD_RES (1)..(2)..(34): Xaa is C or S

SEQ ID NO: 79727 - protein, 31 aa, Artificial Sequence; identical to SEQ ID NO: 57770
  GFR-binding peptide
  MOD_RES (1)..(1): Xaa is C or S

SEQ ID NO: 79728 - protein, 41 aa, Artificial Sequence; identical to SEQ ID NO: 6649
  GFR-binding peptide
  MOD_RES (4)..(5)..(39)..(41): Xaa is C or S
  MOD_RES (19)..(20)..(21)..(22)..(23): Xaa is A or G
  MOD_RES (24)..(25)..(26)..(27): Xaa is A or G or is absent

SEQ ID NO: 79729 - protein, 38 aa, Artificial Sequence; identical to SEQ ID NO: 8425
  GFR-binding peptide
  MOD_RES (1)..(2)..(37): Xaa is C or S
  MOD_RES (16)..(17)..(18)..(19)..(20): Xaa is A or G
  MOD_RES (21)..(22)..(23)..(24): Xaa is A or G or is absent

SEQ ID NO: 79730 - protein, 35 aa, Artificial Sequence; identical to SEQ ID NO: 29739
  GFR-binding peptide
  MOD_RES (32)..(34): Xaa is C or S

SEQ ID NO: 79731 - protein, 32 aa, Artificial Sequence; identical to SEQ ID NO: 29740
  GFR-binding peptide
  MOD_RES (1)..(2): Xaa is C or S

SEQ ID NO: 79732 - protein, 44 aa, Artificial Sequence; identical to SEQ ID NO: 8426
  GFR-binding peptide
  MOD_RES (7)..(41)..(43): Xaa is C or S
  MOD_RES (21)..(22)..(23)..(24)..(25): Xaa is A or G
  MOD_RES (26)..(27)..(28)..(29): Xaa is A or G or is absent

SEQ ID NO: 79733 - protein, 35 aa, Artificial Sequence; identical to SEQ ID NO: 6652
  GFR-binding peptide
  MOD_RES (2)..(3): Xaa is C or S
  MOD_RES (17)..(18)..(19)..(20)..(21): Xaa is A or G
  MOD_RES (22)..(23)..(24)..(25): Xaa is A or G or is absent

SEQ ID NO: 79734 - protein, 36 aa, Artificial Sequence; identical to SEQ ID NO: 8428
  GFR-binding peptide
  MOD_RES (1)..(2)..(34)..(36): Xaa is C or S

SEQ ID NO: 79735 - protein, 37 aa, Artificial Sequence; identical to SEQ ID NO: 6654
  GFR-binding peptide
  MOD_RES (3)..(4)..(35)..(37): Xaa is C or S

SEQ ID NO: 79736 - protein, 36 aa, Artificial Sequence; identical to SEQ ID NO: 6655
  GFR-binding peptide
  MOD_RES (4)..(5): Xaa is C or S

SEQ ID NO: 79737 - protein, 41 aa, Artificial Sequence; identical to SEQ ID NO: 8429
  GFR-binding peptide
  MOD_RES (4)..(5)..(39)..(41): Xaa is C or S
  MOD_RES (19)..(20)..(21)..(22)..(23): Xaa is A or G
  MOD_RES (24)..(25)..(26)..(27): Xaa is A or G or is absent

SEQ ID NO: 79738 - protein, 32 aa, Artificial Sequence; identical to SEQ ID NO: 6657
  GFR-binding peptide
  MOD_RES (1)..(2): Xaa is C or S

SEQ ID NO: 79739 - protein, 37 aa, Artificial Sequence; identical to SEQ ID NO: 29744
  GFR-binding peptide
  MOD_RES (6)..(7): Xaa is C or S

SEQ ID NO: 79740 - protein, 37 aa, Artificial Sequence; identical to SEQ ID NO: 8432
  GFR-binding peptide
  MOD_RES (5)..(6)..(37): Xaa is C or S

SEQ ID NO: 79741 - protein, 43 aa, Artificial Sequence; identical to SEQ ID NO: 6658
  GFR-binding peptide
  MOD_RES (5)..(6)..(40)..(42): Xaa is C or S
  MOD_RES (20)..(21)..(22)..(23)..(24): Xaa is A or G
  MOD_RES (25)..(26)..(27)..(28): Xaa is A or G or is absent

SEQ ID NO: 79742 - protein, 33 aa, Artificial Sequence; identical to SEQ ID NO: 8433
  GFR-binding peptide
  MOD_RES (1)..(1): Xaa is C or S
  MOD_RES (15)..(16)..(17)..(18)..(19): Xaa is A or G
  MOD_RES (20)..(21)..(22)..(23): Xaa is A or G or is absent

SEQ ID NO: 79743 - protein, 37 aa, Artificial Sequence; identical to SEQ ID NO: 29748
  GFR-binding peptide
  MOD_RES (2)..(3)..(35)..(37): Xaa is C or S

SEQ ID NO: 79744 - protein, 41 aa, Artificial Sequence; identical to SEQ ID NO: 8436
  GFR-binding peptide
  MOD_RES (3)..(4)..(38)..(40): Xaa is C or S
  MOD_RES (18)..(19)..(20)..(21)..(22): Xaa is A or G
  MOD_RES (23)..(24)..(25)..(26): Xaa is A or G or is absent

SEQ ID NO: 79745 - protein, 35 aa, Artificial Sequence
  GFR-binding peptide
  MOD_RES (2)..(3): Xaa is C or S
  MOD_RES (17)..(18)..(19)..(20)..(21): Xaa is A or G
  MOD_RES (22)..(23)..(24)..(25): Xaa is A or G or is absent
TXXAPVKTSAISMLYLXXXXXXXXXLKNYQMIVEE

SEQ ID NO: 79746 - protein, 36 aa, Artificial Sequence; identical to SEQ ID NO: 29751
  GFR-binding peptide
  MOD_RES (1)..(35): Xaa is C or S
  MOD_RES (15)..(16)..(17)..(18)..(19): Xaa is A or G
  MOD_RES (20)..(21)..(22)..(23): Xaa is A or G or is absent

SEQ ID NO: 79747 - protein, 37 aa, Artificial Sequence; identical to SEQ ID NO: 8440
  GFR-binding peptide
  MOD_RES (5)..(6): Xaa is C or S

SEQ ID NO: 79748 - protein, 37 aa, Artificial Sequence; identical to SEQ ID NO: 6664
  GFR-binding peptide
  MOD_RES (4)..(5): Xaa is C or S

SEQ ID NO: 79749 - protein, 38 aa, Artificial Sequence; identical to SEQ ID NO: 8442
  GFR-binding peptide
  MOD_RES (1)..(2)..(35)..(37): Xaa is C or S
  MOD_RES (16)..(17)..(18)..(19)..(20): Xaa is A or G
  MOD_RES (21)..(22)..(23)..(24): Xaa is A or G or is absent

SEQ ID NO: 79750 - protein, 33 aa, Artificial Sequence; identical to SEQ ID NO: 29755
  GFR-binding peptide
  MOD_RES (1)..(2): Xaa is C or S

SEQ ID NO: 79751 - protein, 32 aa, Artificial Sequence; identical to SEQ ID NO: 8444
  GFR-binding peptide
  MOD_RES (1)..(2): Xaa is C or S

SEQ ID NO: 79752 - protein, 37 aa, Artificial Sequence
  GFR-binding peptide
  MOD_RES (5)..(6)..(37): Xaa is C or S
VPSTXXAPVKTSAISMLYLDNGRVLLLKNYQMIVEEX

SEQ ID NO: 79753 - protein, 40 aa, Artificial Sequence; identical to SEQ ID NO: 6669
  GFR-binding peptide
  MOD_RES (5)..(6)..(40): Xaa is C or S
  MOD_RES (20)..(21)..(22)..(23)..(24): Xaa is A or G
  MOD_RES (25)..(26)..(27)..(28): Xaa is A or G or is absent

SEQ ID NO: 79754 - protein, 34 aa, Artificial Sequence; identical to SEQ ID NO: 8446
  GFR-binding peptide
  MOD_RES (1)..(1): Xaa is C or S
  MOD_RES (15)..(16)..(17)..(18)..(19): Xaa is A or G
  MOD_RES (20)..(21)..(22)..(23): Xaa is A or G or is absent

SEQ ID NO: 79755 - protein, 35 aa, Artificial Sequence; identical to SEQ ID NO: 6670
  GFR-binding peptide
  MOD_RES (3)..(4): Xaa is C or S

SEQ ID NO: 79756 - protein, 40 aa, Artificial Sequence
  GFR-binding peptide
  MOD_RES (5)..(6)..(38)..(40): Xaa is C or S
SAGPXXTPTKMSAISMLYLNDKQQIILKNYQGMVVDRXGX

SEQ ID NO: 79757 - protein, 38 aa, Artificial Sequence; identical to SEQ ID NO: 14032
  GFR-binding peptide
  MOD_RES (6)..(7): Xaa is C or S

SEQ ID NO: 79758 - protein, 40 aa, Artificial Sequence
  GFR-binding peptide
  MOD_RES (5)..(6)..(38)..(40): Xaa is C or S
IPEPXXVPEKMSAISILYLDENKNVVLKNYQNMTVESXAX

SEQ ID NO: 79759 - protein, 38 aa, Artificial Sequence; identical to SEQ ID NO: 15745
  GFR-binding peptide
  MOD_RES (3)..(4)..(38): Xaa is C or S
  MOD_RES (18)..(19)..(20)..(21)..(22): Xaa is A or G
  MOD_RES (23)..(24)..(25)..(26): Xaa is A or G or is absent

SEQ ID NO: 79760 - protein, 36 aa, Artificial Sequence; identical to SEQ ID NO: 6671
  GFR-binding peptide
  MOD_RES (1)..(35): Xaa is C or S
  MOD_RES (15)..(16)..(17)..(18)..(19): Xaa is A or G
  MOD_RES (20)..(21)..(22)..(23): Xaa is A or G or is absent

SEQ ID NO: 79761 - protein, 33 aa, Artificial Sequence; identical to SEQ ID NO: 6672
  GFR-binding peptide
  MOD_RES (33)..(33): Xaa is C or S
  MOD_RES (14)..(15)..(16)..(17)..(18): Xaa is A or G
  MOD_RES (19)..(20)..(21)..(22): Xaa is A or G or is absent

SEQ ID NO: 79762 - protein, 34 aa, Artificial Sequence; identical to SEQ ID NO: 6674
  GFR-binding peptide
  MOD_RES (1)..(1): Xaa is C or S
  MOD_RES (15)..(16)..(17)..(18)..(19): Xaa is A or G
  MOD_RES (20)..(21)..(22)..(23): Xaa is A or G or is absent

SEQ ID NO: 79763 - protein, 40 aa, Artificial Sequence
  GFR-binding peptide
  MOD_RES (4)..(5)..(37)..(39): Xaa is C or S
AGPXXTPTKMSAISMLYLNDKQQIILKNYQGMVVDRXGXS

SEQ ID NO: 79764 - protein, 39 aa, Artificial Sequence; identical to SEQ ID NO: 27841
  GFR-binding peptide
  MOD_RES (4)..(5)..(39): Xaa is C or S
  MOD_RES (19)..(20)..(21)..(22)..(23): Xaa is A or G
  MOD_RES (24)..(25)..(26)..(27): Xaa is A or G or is absent

SEQ ID NO: 79765 - protein, 40 aa, Artificial Sequence; identical to SEQ ID NO: 15753
  GFR-binding peptide
  MOD_RES (5)..(6)..(40): Xaa is C or S
  MOD_RES (20)..(21)..(22)..(23)..(24): Xaa is A or G
  MOD_RES (25)..(26)..(27)..(28): Xaa is A or G or is absent

SEQ ID NO: 79766 - protein, 36 aa, Artificial Sequence; identical to SEQ ID NO: 57806
  GFR-binding peptide
  MOD_RES (2)..(3): Xaa is C or S
  MOD_RES (17)..(18)..(19)..(20)..(21): Xaa is A or G
  MOD_RES (22)..(23)..(24)..(25): Xaa is A or G or is absent

SEQ ID NO: 79767 - protein, 38 aa, Artificial Sequence; identical to SEQ ID NO: 6677
  GFR-binding peptide
  MOD_RES (2)..(3)..(37): Xaa is C or S
  MOD_RES (17)..(18)..(19)..(20)..(21): Xaa is A or G
  MOD_RES (22)..(23)..(24)..(25): Xaa is A or G or is absent

SEQ ID NO: 79768 - protein, 33 aa, Artificial Sequence; identical to SEQ ID NO: 6679
  GFR-binding peptide
  MOD_RES (1)..(2): Xaa is C or S

SEQ ID NO: 79769 - protein, 39 aa, Artificial Sequence; identical to SEQ ID NO: 29767
  GFR-binding peptide
  MOD_RES (1)..(2)..(36)..(38): Xaa is C or S
  MOD_RES (16)..(17)..(18)..(19)..(20): Xaa is A or G
  MOD_RES (21)..(22)..(23)..(24): Xaa is A or G or is absent

SEQ ID NO: 79770 - protein, 38 aa, Artificial Sequence
  GFR-binding peptide
  MOD_RES (3)..(4)..(36)..(38): Xaa is C or S
GPXXTPTKMSAISMLYLNDKQQIILKNYQGMVVDRXGX

SEQ ID NO: 79771 - protein, 39 aa, Artificial Sequence; identical to SEQ ID NO: 6689
  GFR-binding peptide
  MOD_RES (2)..(3)..(36)..(38): Xaa is C or S
  MOD_RES (17)..(18)..(19)..(20)..(21): Xaa is A or G
  MOD_RES (22)..(23)..(24)..(25): Xaa is A or G or is absent

SEQ ID NO: 79772 - protein, 40 aa, Artificial Sequence; identical to SEQ ID NO: 6690
  GFR-binding peptide
  MOD_RES (3)..(4)..(38)..(40): Xaa is C or S
  MOD_RES (18)..(19)..(20)..(21)..(22): Xaa is A or G
  MOD_RES (23)..(24)..(25)..(26): Xaa is A or G or is absent

SEQ ID NO: 79773 - protein, 39 aa, Artificial Sequence; identical to SEQ ID NO: 8457
  GFR-binding peptide
  MOD_RES (2)..(3)..(37)..(39): Xaa is C or S
  MOD_RES (17)..(18)..(19)..(20)..(21): Xaa is A or G
  MOD_RES (22)..(23)..(24)..(25): Xaa is A or G or is absent

SEQ ID NO: 79774 - protein, 40 aa, Artificial Sequence
  GFR-binding peptide
  MOD_RES (5)..(6)..(40): Xaa is C or S
  MOD_RES (20)..(21)..(22)..(23)..(24): Xaa is A or G
  MOD_RES (25)..(26)..(27)..(28): Xaa is A or G or is absent
SAGPXXTPTKMSAISMLYLXXXXXXXXXLKNYQGMVVDRX

SEQ ID NO: 79775 - protein, 37 aa, Artificial Sequence; identical to SEQ ID NO: 8458
  GFR-binding peptide
  MOD_RES (6)..(7): Xaa is C or S

SEQ ID NO: 79776 - protein, 37 aa, Artificial Sequence; identical to SEQ ID NO: 6693
  GFR-binding peptide
  MOD_RES (1)..(2)..(37): Xaa is C or S
  MOD_RES (16)..(17)..(18)..(19)..(20): Xaa is A or G
  MOD_RES (21)..(22)..(23)..(24): Xaa is A or G or is absent

SEQ ID NO: 79777 - protein, 36 aa, Artificial Sequence
  GFR-binding peptide
  MOD_RES (1)..(35): Xaa is C or S
  MOD_RES (15)..(16)..(17)..(18)..(19): Xaa is A or G
  MOD_RES (20)..(21)..(22)..(23): Xaa is A or G or is absent
XTPTKMSAISMLYLXXXXXXXXXLKNYQGMVVDRXG

SEQ ID NO: 79778 - protein, 36 aa, Artificial Sequence; identical to SEQ ID NO: 14053
  GFR-binding peptide
  MOD_RES (2)..(3)..(35): Xaa is C or S

SEQ ID NO: 79779 - protein, 33 aa, Artificial Sequence; identical to SEQ ID NO: 8460
  GFR-binding peptide
  MOD_RES (2)..(3): Xaa is C or S

SEQ ID NO: 79780 - protein, 42 aa, Artificial Sequence
  GFR-binding peptide
  MOD_RES (6)..(7)..(41): Xaa is C or S
  MOD_RES (21)..(22)..(23)..(24)..(25): Xaa is A or G
  MOD_RES (26)..(27)..(28)..(29): Xaa is A or G or is absent
GIPEPXXVPEKMSAISILYLXXXXXXXXXLKNYQNMTVESXA

SEQ ID NO: 79781 - protein, 37 aa, Artificial Sequence; identical to SEQ ID NO: 8462
  GFR-binding peptide
  MOD_RES (2)..(3)..(35)..(37): Xaa is C or S

SEQ ID NO: 79782 - protein, 36 aa, Artificial Sequence; identical to SEQ ID NO: 69108
  GFR-binding peptide
  MOD_RES (3)..(4)..(36): Xaa is C or S

SEQ ID NO: 79783 - protein, 36 aa, Artificial Sequence; identical to SEQ ID NO: 29781
  GFR-binding peptide
  MOD_RES (1)..(33)..(35): Xaa is C or S

SEQ ID NO: 79784 - protein, 38 aa, Artificial Sequence; identical to SEQ ID NO: 29782
  GFR-binding peptide
  MOD_RES (5)..(6): Xaa is C or S
  MOD_RES (20)..(21)..(22)..(23)..(24): Xaa is A or G
  MOD_RES (25)..(26)..(27)..(28): Xaa is A or G or is absent

SEQ ID NO: 79785 - protein, 34 aa, Artificial Sequence; identical to SEQ ID NO: 8464
  GFR-binding peptide
  MOD_RES (3)..(4): Xaa is C or S

SEQ ID NO: 79786 - protein, 33 aa, Artificial Sequence; identical to SEQ ID NO: 6706
  GFR-binding peptide
  MOD_RES (31)..(33): Xaa is C or S

SEQ ID NO: 79787 - protein, 40 aa, Artificial Sequence; identical to SEQ ID NO: 6708
  GFR-binding peptide
  MOD_RES (3)..(4)..(38)..(40): Xaa is C or S
  MOD_RES (18)..(19)..(20)..(21)..(22): Xaa is A or G
  MOD_RES (23)..(24)..(25)..(26): Xaa is A or G or is absent

SEQ ID NO: 79788 - protein, 43 aa, Artificial Sequence; identical to SEQ ID NO: 6711
  GFR-binding peptide
  MOD_RES (6)..(7)..(41)..(43): Xaa is C or S
  MOD_RES (21)..(22)..(23)..(24)..(25): Xaa is A or G
  MOD_RES (26)..(27)..(28)..(29): Xaa is A or G or is absent

SEQ ID NO: 79789 - protein, 33 aa, Artificial Sequence; identical to SEQ ID NO: 8473
  GFR-binding peptide
  MOD_RES (31)..(33): Xaa is C or S

SEQ ID NO: 79790 - protein, 40 aa, Artificial Sequence; identical to SEQ ID NO: 8474
  GFR-binding peptide
  MOD_RES (3)..(4)..(38)..(40): Xaa is C or S
  MOD_RES (18)..(19)..(20)..(21)..(22): Xaa is A or G
  MOD_RES (23)..(24)..(25)..(26): Xaa is A or G or is absent

SEQ ID NO: 79791 - protein, 38 aa, Artificial Sequence; identical to SEQ ID NO: 14066
  GFR-binding peptide
  MOD_RES (1)..(35)..(37): Xaa is C or S
  MOD_RES (15)..(16)..(17)..(18)..(19): Xaa is A or G
  MOD_RES (20)..(21)..(22)..(23): Xaa is A or G or is absent

SEQ ID NO: 79792 - protein, 39 aa, Artificial Sequence; identical to SEQ ID NO: 8476
  GFR-binding peptide
  MOD_RES (5)..(6)..(37)..(39): Xaa is C or S

SEQ ID NO: 79793 - protein, 36 aa, Artificial Sequence
  GFR-binding peptide
  MOD_RES (2)..(3)..(35): Xaa is C or S
SXXVPARLSAISILYLDAANNVVLKNYQDMVVEAXG

SEQ ID NO: 79794 - protein, 38 aa, Artificial Sequence; identical to SEQ ID NO: 6713
  GFR-binding peptide
  MOD_RES (2)..(3)..(35)..(37): Xaa is C or S

SEQ ID NO: 79795 - protein, 37 aa, Artificial Sequence; identical to SEQ ID NO: 15783
  GFR-binding peptide
  MOD_RES (3)..(4)..(36): Xaa is C or S

SEQ ID NO: 79796 - protein, 37 aa, Artificial Sequence; identical to SEQ ID NO: 57834
  GFR-binding peptide
  MOD_RES (2)..(3)..(36): Xaa is C or S
  MOD_RES (17)..(18)..(19)..(20)..(21): Xaa is A or G
  MOD_RES (22)..(23)..(24)..(25): Xaa is A or G or is absent

SEQ ID NO: 79797 - protein, 40 aa, Artificial Sequence; identical to SEQ ID NO: 8480
  GFR-binding peptide
  MOD_RES (5)..(6)..(37)..(39): Xaa is C or S

SEQ ID NO: 79798 - protein, 35 aa, Artificial Sequence; identical to SEQ ID NO: 57835
  GFR-binding peptide
  MOD_RES (34)..(34): Xaa is C or S
  MOD_RES (14)..(15)..(16)..(17)..(18): Xaa is A or G
  MOD_RES (19)..(20)..(21)..(22): Xaa is A or G or is absent

SEQ ID NO: 79799 - protein, 34 aa, Artificial Sequence; identical to SEQ ID NO: 67370
  GFR-binding peptide
  MOD_RES (1)..(2): Xaa is C or S
  MOD_RES (16)..(17)..(18)..(19)..(20): Xaa is A or G
  MOD_RES (21)..(22)..(23)..(24): Xaa is A or G or is absent

SEQ ID NO: 79800 - protein, 33 aa, Artificial Sequence; identical to SEQ ID NO: 57838
  GFR-binding peptide
  MOD_RES (1)..(1): Xaa is C or S
  MOD_RES (15)..(16)..(17)..(18)..(19): Xaa is A or G
  MOD_RES (20)..(21)..(22)..(23): Xaa is A or G or is absent

SEQ ID NO: 79801 - protein, 38 aa, Artificial Sequence
  GFR-binding peptide
  MOD_RES (3)..(4)..(38): Xaa is C or S
  MOD_RES (18)..(19)..(20)..(21)..(22): Xaa is A or G
  MOD_RES (23)..(24)..(25)..(26): Xaa is A or G or is absent
EPXXVPEKMSAISILYLXXXXXXXXXLKNYQNMTVESX

SEQ ID NO: 79802 - protein, 35 aa, Artificial Sequence; identical to SEQ ID NO: 6719
  GFR-binding peptide
  MOD_RES (1)..(32)..(34): Xaa is C or S

SEQ ID NO: 79803 - protein, 44 aa, Artificial Sequence; identical to SEQ ID NO: 6720
  GFR-binding peptide
  MOD_RES (7)..(41)..(43): Xaa is C or S
  MOD_RES (21)..(22)..(23)..(24)..(25): Xaa is A or G
  MOD_RES (26)..(27)..(28)..(29): Xaa is A or G or is absent

SEQ ID NO: 79804 - protein, 39 aa, Artificial Sequence; identical to SEQ ID NO: 14073
  GFR-binding peptide
  MOD_RES (3)..(4)..(38): Xaa is C or S
  MOD_RES (18)..(19)..(20)..(21)..(22): Xaa is A or G
  MOD_RES (23)..(24)..(25)..(26): Xaa is A or G or is absent

SEQ ID NO: 79805 - protein, 37 aa, Artificial Sequence; identical to SEQ ID NO: 6722
  GFR-binding peptide
  MOD_RES (35)..(37): Xaa is C or S
  MOD_RES (14)..(15)..(16)..(17)..(18): Xaa is A or G
  MOD_RES (19)..(20)..(21)..(22): Xaa is A or G or is absent

SEQ ID NO: 79806 - protein, 32 aa, Artificial Sequence
  GFR-binding peptide
  MOD_RES (14)..(15)..(16)..(17)..(18): Xaa is A or G
  MOD_RES (19)..(20)..(21)..(22): Xaa is A or G or is absent
APVKTSAISMLYLXXXXXXXXXLKNYQMIVEE

SEQ ID NO: 79807 - protein, 38 aa, Artificial Sequence
  GFR-binding peptide
  MOD_RES (3)..(4)..(36)..(38): Xaa is C or S
KAXXVPTKLSAISILYLDKGVVTYLKNYQGMAVSEXGX

SEQ ID NO: 79808 - protein, 35 aa, Artificial Sequence; identical to SEQ ID NO: 8490
  GFR-binding peptide
  MOD_RES (1)..(35): Xaa is C or S
  MOD_RES (15)..(16)..(17)..(18)..(19): Xaa is A or G
  MOD_RES (20)..(21)..(22)..(23): Xaa is A or G or is absent

SEQ ID NO: 79809 - protein, 34 aa, Artificial Sequence; identical to SEQ ID NO: 15792
  GFR-binding peptide
  MOD_RES (3)..(4): Xaa is C or S

SEQ ID NO: 79810 - protein, 39 aa, Artificial Sequence; identical to SEQ ID NO: 6726
  GFR-binding peptide
  MOD_RES (5)..(6)..(39): Xaa is C or S
  MOD_RES (20)..(21)..(22)..(23)..(24): Xaa is A or G
  MOD_RES (25)..(26)..(27)..(28): Xaa is A or G or is absent

SEQ ID NO: 79811 - protein, 35 aa, Artificial Sequence; identical to SEQ ID NO: 6727
  GFR-binding peptide
  MOD_RES (1)..(2)..(35): Xaa is C or S
  MOD_RES (16)..(17)..(18)..(19)..(20): Xaa is A or G
  MOD_RES (21)..(22)..(23)..(24): Xaa is A or G or is absent

SEQ ID NO: 79812 - protein, 37 aa, Artificial Sequence
  GFR-binding peptide
  MOD_RES (2)..(3)..(37): Xaa is C or S
  MOD_RES (17)..(18)..(19)..(20)..(21): Xaa is A or G
  MOD_RES (22)..(23)..(24)..(25): Xaa is A or G or is absent
PXXVPEKMSAISILYLXXXXXXXXXLKNYQNMTVESX

SEQ ID NO: 79813 - protein, 38 aa, Artificial Sequence; identical to SEQ ID NO: 8496
  GFR-binding peptide
  MOD_RES (1)..(35)..(37): Xaa is C or S
  MOD_RES (15)..(16)..(17)..(18)..(19): Xaa is A or G
  MOD_RES (20)..(21)..(22)..(23): Xaa is A or G or is absent

SEQ ID NO: 79814 - protein, 38 aa, Artificial Sequence; identical to SEQ ID NO: 8497
  GFR-binding peptide
  MOD_RES (5)..(6)..(37): Xaa is C or S

SEQ ID NO: 79815 - protein, 39 aa, Artificial Sequence; identical to SEQ ID NO: 27895
  GFR-binding peptide
  MOD_RES (6)..(7)..(39): Xaa is C or S

SEQ ID NO: 79816 - protein, 36 aa, Artificial Sequence; identical to SEQ ID NO: 8500
  GFR-binding peptide
  MOD_RES (5)..(6): Xaa is C or S

SEQ ID NO: 79817 - protein, 34 aa, Artificial Sequence; identical to SEQ ID NO: 6732
  GFR-binding peptide
  MOD_RES (2)..(3): Xaa is C or S

SEQ ID NO: 79818 - protein, 42 aa, Artificial Sequence; identical to SEQ ID NO: 27897
  GFR-binding peptide
  MOD_RES (4)..(5)..(39)..(41): Xaa is C or S
  MOD_RES (19)..(20)..(21)..(22)..(23): Xaa is A or G
  MOD_RES (24)..(25)..(26)..(27): Xaa is A or G or is absent

SEQ ID NO: 79819 - protein, 33 aa, Artificial Sequence; identical to SEQ ID NO: 6733
  GFR-binding peptide
  MOD_RES (1)..(2): Xaa is C or S

SEQ ID NO: 79820 - protein, 34 aa, Artificial Sequence; identical to SEQ ID NO: 8505
  GFR-binding peptide
  MOD_RES (3)..(4): Xaa is C or S

SEQ ID NO: 79821 - protein, 36 aa, Artificial Sequence
  GFR-binding peptide
  MOD_RES (1)..(2)..(34)..(36): Xaa is C or S
XXVPEKMSAISILYLDENKNVVLKNYQNMTVESXAX

SEQ ID NO: 79822 - protein, 37 aa, Artificial Sequence; identical to SEQ ID NO: 6735
  GFR-binding peptide
  MOD_RES (1)..(2)..(36): Xaa is C or S
  MOD_RES (16)..(17)..(18)..(19)..(20): Xaa is A or G
  MOD_RES (21)..(22)..(23)..(24): Xaa is A or G or is absent

SEQ ID NO: 79823 - protein, 33 aa, Artificial Sequence; identical to SEQ ID NO: 6736
  GFR-binding peptide
  MOD_RES (1)..(33): Xaa is C or S

SEQ ID NO: 79824 - protein, 40 aa, Artificial Sequence
  GFR-binding peptide
  MOD_RES (5)..(6)..(38)..(40): Xaa is C or S
ASKAXXVPTKLSAISILYLDKGVVTYLKNYQGMAVSEXGX

SEQ ID NO: 79825 - protein, 39 aa, Artificial Sequence; identical to SEQ ID NO: 29828
  GFR-binding peptide
  MOD_RES (3)..(4)..(38): Xaa is C or S
  MOD_RES (18)..(19)..(20)..(21)..(22): Xaa is A or G
  MOD_RES (23)..(24)..(25)..(26): Xaa is A or G or is absent

SEQ ID NO: 79826 - protein, 38 aa, Artificial Sequence
  GFR-binding peptide
  MOD_RES (3)..(4)..(38): Xaa is C or S
  MOD_RES (18)..(19)..(20)..(21)..(22): Xaa is A or G
  MOD_RES (23)..(24)..(25)..(26): Xaa is A or G or is absent
KAXXVPTKLSAISILYLXXXXXXXXXLKNYQGMAVSEX

SEQ ID NO: 79827 - protein, 37 aa, Artificial Sequence; identical to SEQ ID NO: 8513
  GFR-binding peptide
  MOD_RES (2)..(3)..(35)..(37): Xaa is C or S

SEQ ID NO: 79828 - protein, 36 aa, Artificial Sequence; identical to SEQ ID NO: 14088
  GFR-binding peptide
  MOD_RES (3)..(4)..(36): Xaa is C or S

SEQ ID NO: 79829 - protein, 38 aa, Artificial Sequence; identical to SEQ ID NO: 14090
  GFR-binding peptide
  MOD_RES (5)..(6): Xaa is C or S
  MOD_RES (20)..(21)..(22)..(23)..(24): Xaa is A or G
  MOD_RES (25)..(26)..(27)..(28): Xaa is A or G or is absent

SEQ ID NO: 79830 - protein, 37 aa, Artificial Sequence
  GFR-binding peptide
  MOD_RES (4)..(5): Xaa is C or S
  MOD_RES (19)..(20)..(21)..(22)..(23): Xaa is A or G
  MOD_RES (24)..(25)..(26)..(27): Xaa is A or G or is absent
PEPXXVPEKMSAISILYLXXXXXXXXXLKNYQNMTVE

SEQ ID NO: 79831 - protein, 39 aa, Artificial Sequence
  GFR-binding peptide
  MOD_RES (6)..(7)..(39): Xaa is C or S
GSAGPXXTPTKMSAISMLYLNDKQQIILKNYQGMVVDRX

SEQ ID NO: 79832 - protein, 36 aa, Artificial Sequence; identical to SEQ ID NO: 8517
  GFR-binding peptide
  MOD_RES (3)..(4): Xaa is C or S
  MOD_RES (18)..(19)..(20)..(21)..(22): Xaa is A or G
  MOD_RES (23)..(24)..(25)..(26): Xaa is A or G or is absent

SEQ ID NO: 79833 - protein, 32 aa, Artificial Sequence; identical to SEQ ID NO: 6745
  GFR-binding peptide
  MOD_RES (14)..(15)..(16)..(17)..(18): Xaa is A or G
  MOD_RES (19)..(20)..(21)..(22): Xaa is A or G or is absent

SEQ ID NO: 79834 - protein, 36 aa, Artificial Sequence
  GFR-binding peptide
  MOD_RES (3)..(4): Xaa is C or S
  MOD_RES (18)..(19)..(20)..(21)..(22): Xaa is A or G
  MOD_RES (23)..(24)..(25)..(26): Xaa is A or G or is absent
GPXXTPTKMSAISMLYLXXXXXXXXXLKNYQGMVVD

SEQ ID NO: 79835 - protein, 39 aa, Artificial Sequence; identical to SEQ ID NO: 6746
  GFR-binding peptide
  MOD_RES (5)..(6)..(39): Xaa is C or S
  MOD_RES (20)..(21)..(22)..(23)..(24): Xaa is A or G
  MOD_RES (25)..(26)..(27)..(28): Xaa is A or G or is absent

SEQ ID NO: 79836 - protein, 37 aa, Artificial Sequence
  GFR-binding peptide
  MOD_RES (5)..(6): Xaa is C or S
SAGPXXTPTKMSAISMLYLNDKQQIILKNYQGMVVDR

SEQ ID NO: 79837 - protein, 36 aa, Artificial Sequence
  GFR-binding peptide
  MOD_RES (2)..(3): Xaa is C or S
  MOD_RES (17)..(18)..(19)..(20)..(21): Xaa is A or G
  MOD_RES (22)..(23)..(24)..(25): Xaa is A or G or is absent
SXXVPARLSAISILYLXXXXXXXXXLKNYQDMVVEA

SEQ ID NO: 79838 - protein, 37 aa, Artificial Sequence; identical to SEQ ID NO: 8518
  GFR-binding peptide
  MOD_RES (4)..(5): Xaa is C or S
  MOD_RES (19)..(20)..(21)..(22)..(23): Xaa is A or G
  MOD_RES (24)..(25)..(26)..(27): Xaa is A or G or is absent

SEQ ID NO: 79839 - protein, 40 aa, Artificial Sequence; identical to SEQ ID NO: 8523
  GFR-binding peptide
  MOD_RES (4)..(5)..(40): Xaa is C or S
  MOD_RES (19)..(20)..(21)..(22)..(23): Xaa is A or G
  MOD_RES (24)..(25)..(26)..(27): Xaa is A or G or is absent

SEQ ID NO: 79840 - protein, 37 aa, Artificial Sequence; identical to SEQ ID NO: 8524
  GFR-binding peptide
  MOD_RES (5)..(6): Xaa is C or S

SEQ ID NO: 79841 - protein, 39 aa, Artificial Sequence; identical to SEQ ID NO: 8525
  GFR-binding peptide
  MOD_RES (4)..(5)..(38): Xaa is C or S

SEQ ID NO: 79842 - protein, 33 aa, Artificial Sequence; identical to SEQ ID NO: 8526
  GFR-binding peptide
  MOD_RES (1)..(2)..(33): Xaa is C or S

SEQ ID NO: 79843 - protein, 33 aa, Artificial Sequence
  GFR-binding peptide
  MOD_RES (1)..(2): Xaa is C or S
XXVPTKLSAISILYLDKGVVTYLKNYQGMAVSE

SEQ ID NO: 79844 - protein, 37 aa, Artificial Sequence; identical to SEQ ID NO: 6748
  GFR-binding peptide
  MOD_RES (2)..(3)..(36): Xaa is C or S
  MOD_RES (17)..(18)..(19)..(20)..(21): Xaa is A or G
  MOD_RES (22)..(23)..(24)..(25): Xaa is A or G or is absent

SEQ ID NO: 79845 - protein, 42 aa, Artificial Sequence; identical to SEQ ID NO: 15824
  GFR-binding peptide
  MOD_RES (6)..(7)..(39)..(41): Xaa is C or S

SEQ ID NO: 79846 - protein, 33 aa, Artificial Sequence; identical to SEQ ID NO: 8529
  GFR-binding peptide
  MOD_RES (1)..(32): Xaa is C or S

SEQ ID NO: 79847 - protein, 35 aa, Artificial Sequence; identical to SEQ ID NO: 15826
  GFR-binding peptide
  MOD_RES (1)..(35): Xaa is C or S
  MOD_RES (15)..(16)..(17)..(18)..(19): Xaa is A or G
  MOD_RES (20)..(21)..(22)..(23): Xaa is A or G or is absent

SEQ ID NO: 79848 - protein, 38 aa, Artificial Sequence; identical to SEQ ID NO: 15828
  GFR-binding peptide
  MOD_RES (2)..(3)..(35)..(37): Xaa is C or S

SEQ ID NO: 79849 - protein, 36 aa, Artificial Sequence
  GFR-binding peptide
  MOD_RES (2)..(3)..(34)..(36): Xaa is C or S
TXXAPVKTSAISMLYLDNGRVLLLKNYQMIVEEXGX

SEQ ID NO: 79850 - protein, 37 aa, Artificial Sequence; identical to SEQ ID NO: 6750
  GFR-binding peptide
  MOD_RES (2)..(3)..(34)..(36): Xaa is C or S

SEQ ID NO: 79851 - protein, 36 aa, Artificial Sequence; identical to SEQ ID NO: 6751
  GFR-binding peptide
  MOD_RES (1)..(2)..(36): Xaa is C or S
  MOD_RES (16)..(17)..(18)..(19)..(20): Xaa is A or G
  MOD_RES (21)..(22)..(23)..(24): Xaa is A or G or is absent

SEQ ID NO: 79852 - protein, 41 aa, Artificial Sequence; identical to SEQ ID NO: 8533
  GFR-binding peptide
  MOD_RES (5)..(6)..(38)..(40): Xaa is C or S

SEQ ID NO: 79853 - protein, 38 aa, Artificial Sequence; identical to SEQ ID NO: 8534
  GFR-binding peptide
  MOD_RES (1)..(2)..(35)..(37): Xaa is C or S
  MOD_RES (16)..(17)..(18)..(19)..(20): Xaa is A or G
  MOD_RES (21)..(22)..(23)..(24): Xaa is A or G or is absent

SEQ ID NO: 79854 - protein, 39 aa, Artificial Sequence; identical to SEQ ID NO: 8535
  GFR-binding peptide
  MOD_RES (6)..(7)..(39): Xaa is C or S

SEQ ID NO: 79855 - protein, 36 aa, Artificial Sequence; identical to SEQ ID NO: 8536
  GFR-binding peptide
  MOD_RES (5)..(6): Xaa is C or S

SEQ ID NO: 79856 - protein, 40 aa, Artificial Sequence; identical to SEQ ID NO: 69165
  GFR-binding peptide
  MOD_RES (3)..(4)..(38)..(40): Xaa is C or S
  MOD_RES (18)..(19)..(20)..(21)..(22): Xaa is A or G
  MOD_RES (23)..(24)..(25)..(26): Xaa is A or G or is absent

SEQ ID NO: 79857 - protein, 38 aa, Artificial Sequence; identical to SEQ ID NO: 14102
  GFR-binding peptide
  MOD_RES (6)..(7): Xaa is C or S

SEQ ID NO: 79858 - protein, 43 aa, Artificial Sequence
  GFR-binding peptide
  MOD_RES (5)..(6)..(40)..(42): Xaa is C or S
  MOD_RES (20)..(21)..(22)..(23)..(24): Xaa is A or G
  MOD_RES (25)..(26)..(27)..(28): Xaa is A or G or is absent
IPEPXXVPEKMSAISILYLXXXXXXXXXLKNYQNMTVESXAXR

SEQ ID NO: 79859 - protein, 37 aa, Artificial Sequence; identical to SEQ ID NO: 8538
  GFR-binding peptide
  MOD_RES (6)..(7): Xaa is C or S

SEQ ID NO: 79860 - protein, 42 aa, Artificial Sequence; identical to SEQ ID NO: 6753
  GFR-binding peptide
  MOD_RES (6)..(7)..(41): Xaa is C or S
  MOD_RES (21)..(22)..(23)..(24)..(25): Xaa is A or G
  MOD_RES (26)..(27)..(28)..(29): Xaa is A or G or is absent

SEQ ID NO: 79861 - protein, 37 aa, Artificial Sequence; identical to SEQ ID NO: 8541
  GFR-binding peptide
  MOD_RES (4)..(5): Xaa is C or S
  MOD_RES (19)..(20)..(21)..(22)..(23): Xaa is A or G
  MOD_RES (24)..(25)..(26)..(27): Xaa is A or G or is absent

SEQ ID NO: 79862 - protein, 38 aa, Artificial Sequence; identical to SEQ ID NO: 57874
  GFR-binding peptide
  MOD_RES (5)..(6): Xaa is C or S
  MOD_RES (20)..(21)..(22)..(23)..(24): Xaa is A or G
  MOD_RES (25)..(26)..(27)..(28): Xaa is A or G or is absent

SEQ ID NO: 79863 - protein, 33 aa, Artificial Sequence; identical to SEQ ID NO: 15839
  GFR-binding peptide
  MOD_RES (1)..(1): Xaa is C or S
  MOD_RES (15)..(16)..(17)..(18)..(19): Xaa is A or G
  MOD_RES (20)..(21)..(22)..(23): Xaa is A or G or is absent

SEQ ID NO: 79864 - protein, 34 aa, Artificial Sequence; identical to SEQ ID NO: 6756
  GFR-binding peptide
  MOD_RES (1)..(2): Xaa is C or S
  MOD_RES (16)..(17)..(18)..(19)..(20): Xaa is A or G
  MOD_RES (21)..(22)..(23)..(24): Xaa is A or G or is absent

SEQ ID NO: 79865 - protein, 37 aa, Artificial Sequence; identical to SEQ ID NO: 8545
  GFR-binding peptide
  MOD_RES (2)..(3)..(37): Xaa is C or S
  MOD_RES (17)..(18)..(19)..(20)..(21): Xaa is A or G
  MOD_RES (22)..(23)..(24)..(25): Xaa is A or G or is absent

SEQ ID NO: 79866 - protein, 39 aa, Artificial Sequence; identical to SEQ ID NO: 67432
  GFR-binding peptide
  MOD_RES (3)..(4)..(36)..(38): Xaa is C or S

SEQ ID NO: 79867 - protein, 32 aa, Artificial Sequence; identical to SEQ ID NO: 6757
  GFR-binding peptide
  MOD_RES (1)..(1): Xaa is C or S

SEQ ID NO: 79868 - protein, 39 aa, Artificial Sequence; identical to SEQ ID NO: 8546
  GFR-binding peptide
  MOD_RES (4)..(5)..(36)..(38): Xaa is C or S

SEQ ID NO: 79869 - protein, 36 aa, Artificial Sequence; identical to SEQ ID NO: 29861
  GFR-binding peptide
  MOD_RES (34)..(36): Xaa is C or S
  MOD_RES (14)..(15)..(16)..(17)..(18): Xaa is A or G
  MOD_RES (19)..(20)..(21)..(22): Xaa is A or G or is absent

SEQ ID NO: 79870 - protein, 39 aa, Artificial Sequence; identical to SEQ ID NO: 15845
  GFR-binding peptide
  MOD_RES (3)..(4)..(36)..(38): Xaa is C or S

SEQ ID NO: 79871 - protein, 32 aa, Artificial Sequence; identical to SEQ ID NO: 8549
  GFR-binding peptide
  MOD_RES (1)..(1): Xaa is C or S

SEQ ID NO: 79872 - protein, 39 aa, Artificial Sequence; identical to SEQ ID NO: 8550
  GFR-binding peptide
  MOD_RES (4)..(5): Xaa is C or S
  MOD_RES (19)..(20)..(21)..(22)..(23): Xaa is A or G
  MOD_RES (24)..(25)..(26)..(27): Xaa is A or G or is absent

SEQ ID NO: 79873 - protein, 35 aa, Artificial Sequence; identical to SEQ ID NO: 6763
  GFR-binding peptide
  MOD_RES (4)..(5): Xaa is C or S

SEQ ID NO: 79874 - protein, 39 aa, Artificial Sequence; identical to SEQ ID NO: 6764
  GFR-binding peptide
  MOD_RES (6)..(7): Xaa is C or S
  MOD_RES (21)..(22)..(23)..(24)..(25): Xaa is A or G
  MOD_RES (26)..(27)..(28)..(29): Xaa is A or G or is absent

SEQ ID NO: 79875 - protein, 37 aa, Artificial Sequence; identical to SEQ ID NO: 8551
  GFR-binding peptide
  MOD_RES (2)..(3)..(35)..(37): Xaa is C or S

SEQ ID NO: 79876 - protein, 38 aa, Artificial Sequence; identical to SEQ ID NO: 29864
  GFR-binding peptide
  MOD_RES (5)..(6)..(38): Xaa is C or S

SEQ ID NO: 79877 - protein, 36 aa, Artificial Sequence; identical to SEQ ID NO: 14116
  GFR-binding peptide
  MOD_RES (5)..(6): Xaa is C or S

SEQ ID NO: 79878 - protein, 38 aa, Artificial Sequence; identical to SEQ ID NO: 8553
  GFR-binding peptide
  MOD_RES (4)..(5)..(37): Xaa is C or S

SEQ ID NO: 79879 - protein, 37 aa, Artificial Sequence; identical to SEQ ID NO: 8554
  GFR-binding peptide
  MOD_RES (4)..(5): Xaa is C or S
  MOD_RES (19)..(20)..(21)..(22)..(23): Xaa is A or G
  MOD_RES (24)..(25)..(26)..(27): Xaa is A or G or is absent

SEQ ID NO: 79880 - protein, 42 aa, Artificial Sequence; identical to SEQ ID NO: 6765
  GFR-binding peptide
  MOD_RES (5)..(6)..(39)..(41): Xaa is C or S
  MOD_RES (20)..(21)..(22)..(23)..(24): Xaa is A or G
  MOD_RES (25)..(26)..(27)..(28): Xaa is A or G or is absent

SEQ ID NO: 79881 - protein, 38 aa, Artificial Sequence; identical to SEQ ID NO: 6766
  GFR-binding peptide
  MOD_RES (1)..(2)..(36)..(38): Xaa is C or S
  MOD_RES (16)..(17)..(18)..(19)..(20): Xaa is A or G
  MOD_RES (21)..(22)..(23)..(24): Xaa is A or G or is absent

SEQ ID NO: 79882 - protein, 37 aa, Artificial Sequence; identical to SEQ ID NO: 57883
  GFR-binding peptide
  MOD_RES (3)..(4)..(35)..(37): Xaa is C or S

SEQ ID NO: 79883 - protein, 41 aa, Artificial Sequence; identical to SEQ ID NO: 8556
  GFR-binding peptide
  MOD_RES (6)..(7)..(41): Xaa is C or S
  MOD_RES (21)..(22)..(23)..(24)..(25): Xaa is A or G
  MOD_RES (26)..(27)..(28)..(29): Xaa is A or G or is absent

SEQ ID NO: 79884 - protein, 35 aa, Artificial Sequence; identical to SEQ ID NO: 14123
  GFR-binding peptide
  MOD_RES (34)..(34): Xaa is C or S
  MOD_RES (14)..(15)..(16)..(17)..(18): Xaa is A or G
  MOD_RES (19)..(20)..(21)..(22): Xaa is A or G or is absent

SEQ ID NO: 79885 - protein, 41 aa, Artificial Sequence; identical to SEQ ID NO: 8557
  GFR-binding peptide
  MOD_RES (3)..(4)..(38)..(40): Xaa is C or S
  MOD_RES (18)..(19)..(20)..(21)..(22): Xaa is A or G
  MOD_RES (23)..(24)..(25)..(26): Xaa is A or G or is absent

SEQ ID NO: 79886 - protein, 40 aa, Artificial Sequence; identical to SEQ ID NO: 6768
  GFR-binding peptide
  MOD_RES (4)..(5)..(38)..(40): Xaa is C or S

SEQ ID NO: 79887 - protein, 33 aa, Artificial Sequence; identical to SEQ ID NO: 6769
  GFR-binding peptide
  MOD_RES (1)..(1): Xaa is C or S

SEQ ID NO: 79888 - protein, 32 aa, Artificial Sequence; identical to SEQ ID NO: 8558
  GFR-binding peptide
  MOD_RES (1)..(1): Xaa is C or S

SEQ ID NO: 79889 - protein, 35 aa, Artificial Sequence; identical to SEQ ID NO: 6770
  GFR-binding peptide
  MOD_RES (2)..(3): Xaa is C or S
  MOD_RES (17)..(18)..(19)..(20)..(21): Xaa is A or G
  MOD_RES (22)..(23)..(24)..(25): Xaa is A or G or is absent

SEQ ID NO: 79890 - protein, 40 aa, Artificial Sequence; identical to SEQ ID NO: 57889
  GFR-binding peptide
  MOD_RES (3)..(4)..(37)..(39): Xaa is C or S
  MOD_RES (18)..(19)..(20)..(21)..(22): Xaa is A or G
  MOD_RES (23)..(24)..(25)..(26): Xaa is A or G or is absent

SEQ ID NO: 79891 - protein, 40 aa, Artificial Sequence; identical to SEQ ID NO: 8560
  GFR-binding peptide
  MOD_RES (5)..(6)..(39): Xaa is C or S
  MOD_RES (20)..(21)..(22)..(23)..(24): Xaa is A or G
  MOD_RES (25)..(26)..(27)..(28): Xaa is A or G or is absent

SEQ ID NO: 79892 - protein, 36 aa, Artificial Sequence; identical to SEQ ID NO: 8561
  GFR-binding peptide
  MOD_RES (2)..(3)..(34)..(36): Xaa is C or S

SEQ ID NO: 79893 - protein, 37 aa, Artificial Sequence; identical to SEQ ID NO: 8563
  GFR-binding peptide
  MOD_RES (34)..(36): Xaa is C or S
  MOD_RES (14)..(15)..(16)..(17)..(18): Xaa is A or G
  MOD_RES (19)..(20)..(21)..(22): Xaa is A or G or is absent

SEQ ID NO: 79894 - protein, 36 aa, Artificial Sequence; identical to SEQ ID NO: 8564
  GFR-binding peptide
  MOD_RES (2)..(3)..(34)..(36): Xaa is C or S

SEQ ID NO: 79895 - protein, 41 aa, Artificial Sequence; identical to SEQ ID NO: 6772
  GFR-binding peptide
  MOD_RES (6)..(7)..(40): Xaa is C or S

SEQ ID NO: 79896 - protein, 36 aa, Artificial Sequence; identical to SEQ ID NO: 8565
  GFR-binding peptide
  MOD_RES (1)..(34)..(36): Xaa is C or S

SEQ ID NO: 79897 - protein, 37 aa, Artificial Sequence
  GFR-binding peptide
  MOD_RES (1)..(2)..(34)..(36): Xaa is C or S
XXTPTKMSAISMLYLNDKQQIILKNYQGMVVDRXGXS

SEQ ID NO: 79898 - protein, 39 aa, Artificial Sequence; identical to SEQ ID NO: 6773
  GFR-binding peptide
  MOD_RES (1)..(2)..(36)..(38): Xaa is C or S
  MOD_RES (16)..(17)..(18)..(19)..(20): Xaa is A or G
  MOD_RES (21)..(22)..(23)..(24): Xaa is A or G or is absent

SEQ ID NO: 79899 - protein, 41 aa, Artificial Sequence; identical to SEQ ID NO: 6774
  GFR-binding peptide
  MOD_RES (2)..(3)..(38)..(40): Xaa is C or S
  MOD_RES (17)..(18)..(19)..(20)..(21): Xaa is A or G
  MOD_RES (22)..(23)..(24)..(25): Xaa is A or G or is absent

SEQ ID NO: 79900 - protein, 39 aa, Artificial Sequence; identical to SEQ ID NO: 27951
  GFR-binding peptide
  MOD_RES (5)..(6): Xaa is C or S
  MOD_RES (20)..(21)..(22)..(23)..(24): Xaa is A or G
  MOD_RES (25)..(26)..(27)..(28): Xaa is A or G or is absent

SEQ ID NO: 79901 - protein, 40 aa, Artificial Sequence; identical to SEQ ID NO: 8566
  GFR-binding peptide
  MOD_RES (6)..(7)..(39): Xaa is C or S

SEQ ID NO: 79902 - protein, 42 aa, Artificial Sequence
  GFR-binding peptide
  MOD_RES (6)..(7)..(41): Xaa is C or S
  MOD_RES (21)..(22)..(23)..(24)..(25): Xaa is A or G
  MOD_RES (26)..(27)..(28)..(29): Xaa is A or G or is absent
HVPKPXXAPTKLSAISVLYLXXXXXXXXXLKNYQNMVVRSXG

SEQ ID NO: 79903 - protein, 37 aa, Artificial Sequence
  GFR-binding peptide
  MOD_RES (4)..(5)..(37): Xaa is C or S
SKAXXVPTKLSAISILYLDKGVVTYLKNYQGMAVSEX

SEQ ID NO: 79904 - protein, 40 aa, Artificial Sequence; identical to SEQ ID NO: 6775
  GFR-binding peptide
  MOD_RES (3)..(4)..(37)..(39): Xaa is C or S
  MOD_RES (18)..(19)..(20)..(21)..(22): Xaa is A or G
  MOD_RES (23)..(24)..(25)..(26): Xaa is A or G or is absent

SEQ ID NO: 79905 - protein, 39 aa, Artificial Sequence
  GFR-binding peptide
  MOD_RES (1)..(2)..(36)..(38): Xaa is C or S
  MOD_RES (16)..(17)..(18)..(19)..(20): Xaa is A or G
  MOD_RES (21)..(22)..(23)..(24): Xaa is A or G or is absent
XXVPEKMSAISILYLXXXXXXXXXLKNYQNMTVESXAXR

SEQ ID NO: 79906 - protein, 42 aa, Artificial Sequence; identical to SEQ ID NO: 6778
  GFR-binding peptide
  MOD_RES (5)..(6)..(41): Xaa is C or S
  MOD_RES (20)..(21)..(22)..(23)..(24): Xaa is A or G
  MOD_RES (25)..(26)..(27)..(28): Xaa is A or G or is absent

SEQ ID NO: 79907 - protein, 36 aa, Artificial Sequence; identical to SEQ ID NO: 27958
  GFR-binding peptide
  MOD_RES (1)..(2)..(34)..(36): Xaa is C or S

SEQ ID NO: 79908 - protein, 35 aa, Artificial Sequence; identical to SEQ ID NO: 57901
  GFR-binding peptide
  MOD_RES (1)..(35): Xaa is C or S
  MOD_RES (15)..(16)..(17)..(18)..(19): Xaa is A or G
  MOD_RES (20)..(21)..(22)..(23): Xaa is A or G or is absent

SEQ ID NO: 79909 - protein, 40 aa, Artificial Sequence; identical to SEQ ID NO: 6780
  GFR-binding peptide
  MOD_RES (6)..(7)..(38)..(40): Xaa is C or S

SEQ ID NO: 79910 - protein, 41 aa, Artificial Sequence; identical to SEQ ID NO: 14130
  GFR-binding peptide
  MOD_RES (4)..(5)..(39)..(41): Xaa is C or S
  MOD_RES (19)..(20)..(21)..(22)..(23): Xaa is A or G
  MOD_RES (24)..(25)..(26)..(27): Xaa is A or G or is absent

SEQ ID NO: 79911 - protein, 38 aa, Artificial Sequence
  GFR-binding peptide
  MOD_RES (5)..(6)..(38): Xaa is C or S
ASKAXXVPTKLSAISILYLDKGVVTYLKNYQGMAVSEX

SEQ ID NO: 79912 - protein, 40 aa, Artificial Sequence; identical to SEQ ID NO: 6781
  GFR-binding peptide
  MOD_RES (2)..(3)..(38)..(40): Xaa is C or S
  MOD_RES (17)..(18)..(19)..(20)..(21): Xaa is A or G
  MOD_RES (22)..(23)..(24)..(25): Xaa is A or G or is absent

SEQ ID NO: 79913 - protein, 34 aa, Artificial Sequence; identical to SEQ ID NO: 70845
  GFR-binding peptide
  MOD_RES (3)..(4): Xaa is C or S

SEQ ID NO: 79914 - protein, 41 aa, Artificial Sequence; identical to SEQ ID NO: 29883
  GFR-binding peptide
  MOD_RES (5)..(6)..(38)..(40): Xaa is C or S

SEQ ID NO: 79915 - protein, 37 aa, Artificial Sequence; identical to SEQ ID NO: 8567
  GFR-binding peptide
  MOD_RES (1)..(2)..(36): Xaa is C or S
  MOD_RES (16)..(17)..(18)..(19)..(20): Xaa is A or G
  MOD_RES (21)..(22)..(23)..(24): Xaa is A or G or is absent

SEQ ID NO: 79916 - protein, 37 aa, Artificial Sequence; identical to SEQ ID NO: 6782
  GFR-binding peptide
  MOD_RES (34)..(36): Xaa is C or S
  MOD_RES (14)..(15)..(16)..(17)..(18): Xaa is A or G
  MOD_RES (19)..(20)..(21)..(22): Xaa is A or G or is absent

SEQ ID NO: 79917 - protein, 35 aa, Artificial Sequence; identical to SEQ ID NO: 6783
  GFR-binding peptide
  MOD_RES (1)..(2)..(35): Xaa is C or S

SEQ ID NO: 79918 - protein, 37 aa, Artificial Sequence; identical to SEQ ID NO: 6786
  GFR-binding peptide
  MOD_RES (1)..(34)..(36): Xaa is C or S
  MOD_RES (15)..(16)..(17)..(18)..(19): Xaa is A or G
  MOD_RES (20)..(21)..(22)..(23): Xaa is A or G or is absent

SEQ ID NO: 79919 - protein, 36 aa, Artificial Sequence; identical to SEQ ID NO: 6787
  GFR-binding peptide
  MOD_RES (2)..(3): Xaa is C or S
  MOD_RES (17)..(18)..(19)..(20)..(21): Xaa is A or G
  MOD_RES (22)..(23)..(24)..(25): Xaa is A or G or is absent

SEQ ID NO: 79920 - protein, 35 aa, Artificial Sequence; identical to SEQ ID NO: 8570
  GFR-binding peptide
  MOD_RES (33)..(35): Xaa is C or S
  MOD_RES (14)..(15)..(16)..(17)..(18): Xaa is A or G
  MOD_RES (19)..(20)..(21)..(22): Xaa is A or G or is absent

SEQ ID NO: 79921 - protein, 39 aa, Artificial Sequence
  GFR-binding peptide
  MOD_RES (5)..(6): Xaa is C or S
  MOD_RES (20)..(21)..(22)..(23)..(24): Xaa is A or G
  MOD_RES (25)..(26)..(27)..(28): Xaa is A or G or is absent
SAGPXXTPTKMSAISMLYLXXXXXXXXXLKNYQGMVVDR

SEQ ID NO: 79922 - protein, 37 aa, Artificial Sequence; identical to SEQ ID NO: 6789
  GFR-binding peptide
  MOD_RES (4)..(5)..(37): Xaa is C or S

SEQ ID NO: 79923 - protein, 35 aa, Artificial Sequence; identical to SEQ ID NO: 6794
  GFR-binding peptide
  MOD_RES (3)..(4): Xaa is C or S

SEQ ID NO: 79924 - protein, 41 aa, Artificial Sequence; identical to SEQ ID NO: 8571
  GFR-binding peptide
  MOD_RES (6)..(7)..(39)..(41): Xaa is C or S

SEQ ID NO: 79925 - protein, 32 aa, Artificial Sequence; identical to SEQ ID NO: 14144
  GFR-binding peptide
  MOD_RES (14)..(15)..(16)..(17)..(18): Xaa is A or G
  MOD_RES (19)..(20)..(21)..(22): Xaa is A or G or is absent

SEQ ID NO: 79926 - protein, 33 aa, Artificial Sequence; identical to SEQ ID NO: 69205
  GFR-binding peptide
  MOD_RES (32)..(32): Xaa is C or S

SEQ ID NO: 79927 - protein, 40 aa, Artificial Sequence; identical to SEQ ID NO: 8573
  GFR-binding peptide
  MOD_RES (4)..(5)..(37)..(39): Xaa is C or S

SEQ ID NO: 79928 - protein, 37 aa, Artificial Sequence; identical to SEQ ID NO: 8574
  GFR-binding peptide
  MOD_RES (5)..(6)..(37): Xaa is C or S

SEQ ID NO: 79929 - protein, 37 aa, Artificial Sequence; identical to SEQ ID NO: 8575
  GFR-binding peptide
  MOD_RES (2)..(3)..(34)..(36): Xaa is C or S

SEQ ID NO: 79930 - protein, 31 aa, Artificial Sequence; identical to SEQ ID NO: 8576
  GFR-binding peptide
  MOD_RES (1)..(1): Xaa is C or S

SEQ ID NO: 79931 - protein, 34 aa, Artificial Sequence; identical to SEQ ID NO: 57917
  GFR-binding peptide
  MOD_RES (33)..(33): Xaa is C or S
  MOD_RES (14)..(15)..(16)..(17)..(18): Xaa is A or G
  MOD_RES (19)..(20)..(21)..(22): Xaa is A or G or is absent

SEQ ID NO: 79932 - protein, 34 aa, Artificial Sequence; identical to SEQ ID NO: 6797
  GFR-binding peptide
  MOD_RES (34)..(34): Xaa is C or S
  MOD_RES (14)..(15)..(16)..(17)..(18): Xaa is A or G
  MOD_RES (19)..(20)..(21)..(22): Xaa is A or G or is absent

SEQ ID NO: 79933 - protein, 39 aa, Artificial Sequence; identical to SEQ ID NO: 8580
  GFR-binding peptide
  MOD_RES (3)..(4)..(36)..(38): Xaa is C or S

SEQ ID NO: 79934 - protein, 32 aa, Artificial Sequence
  GFR-binding peptide
  MOD_RES (1)..(2): Xaa is C or S
XXAPVKTSAISMLYLDNGRVLLLKNYQMIVEE

SEQ ID NO: 79935 - protein, 38 aa, Artificial Sequence; identical to SEQ ID NO: 6801
  GFR-binding peptide
  MOD_RES (4)..(5)..(38): Xaa is C or S
  MOD_RES (19)..(20)..(21)..(22)..(23): Xaa is A or G
  MOD_RES (24)..(25)..(26)..(27): Xaa is A or G or is absent

SEQ ID NO: 79936 - protein, 31 aa, Artificial Sequence; identical to SEQ ID NO: 6805
  GFR-binding peptide
  MOD_RES (1)..(1): Xaa is C or S

SEQ ID NO: 79937 - protein, 34 aa, Artificial Sequence; identical to SEQ ID NO: 8581
  GFR-binding peptide
  MOD_RES (1)..(33): Xaa is C or S

SEQ ID NO: 79938 - protein, 38 aa, Artificial Sequence
  GFR-binding peptide
  MOD_RES (5)..(6)..(37): Xaa is C or S
VPSTXXAPVKTSAISMLYLDNGRVLLLKNYQMIVEEXG

SEQ ID NO: 79939 - protein, 41 aa, Artificial Sequence; identical to SEQ ID NO: 57931
  GFR-binding peptide
  MOD_RES (5)..(6)..(38)..(40): Xaa is C or S

SEQ ID NO: 79940 - protein, 31 aa, Artificial Sequence; identical to SEQ ID NO: 6808
  GFR-binding peptide
  MOD_RES (1)..(1): Xaa is C or S

SEQ ID NO: 79941 - protein, 38 aa, Artificial Sequence
  GFR-binding peptide
  MOD_RES (3)..(4)..(38): Xaa is C or S
  MOD_RES (18)..(19)..(20)..(21)..(22): Xaa is A or G
  MOD_RES (23)..(24)..(25)..(26): Xaa is A or G or is absent
GPXXTPTKMSAISMLYLXXXXXXXXXLKNYQGMVVDRX

SEQ ID NO: 79942 - protein, 42 aa, Artificial Sequence; identical to SEQ ID NO: 8585
  GFR-binding peptide
  MOD_RES (6)..(7)..(40)..(42): Xaa is C or S
  MOD_RES (21)..(22)..(23)..(24)..(25): Xaa is A or G
  MOD_RES (26)..(27)..(28)..(29): Xaa is A or G or is absent

SEQ ID NO: 79943 - protein, 41 aa, Artificial Sequence; identical to SEQ ID NO: 8586
  GFR-binding peptide
  MOD_RES (5)..(6)..(39)..(41): Xaa is C or S
  MOD_RES (20)..(21)..(22)..(23)..(24): Xaa is A or G
  MOD_RES (25)..(26)..(27)..(28): Xaa is A or G or is absent

SEQ ID NO: 79944 - protein, 37 aa, Artificial Sequence; identical to SEQ ID NO: 57933
  GFR-binding peptide
  MOD_RES (5)..(6): Xaa is C or S

SEQ ID NO: 79945 - protein, 41 aa, Artificial Sequence; identical to SEQ ID NO: 8588
  GFR-binding peptide
  MOD_RES (4)..(5)..(39)..(41): Xaa is C or S
  MOD_RES (19)..(20)..(21)..(22)..(23): Xaa is A or G
  MOD_RES (24)..(25)..(26)..(27): Xaa is A or G or is absent

SEQ ID NO: 79946 - protein, 34 aa, Artificial Sequence
  GFR-binding peptide
  MOD_RES (34)..(34): Xaa is C or S
  MOD_RES (14)..(15)..(16)..(17)..(18): Xaa is A or G
  MOD_RES (19)..(20)..(21)..(22): Xaa is A or G or is absent
VPEKMSAISILYLXXXXXXXXXLKNYQNMTVESX

SEQ ID NO: 79947 - protein, 34 aa, Artificial Sequence; identical to SEQ ID NO: 6815
  GFR-binding peptide
  MOD_RES (2)..(3): Xaa is C or S

SEQ ID NO: 79948 - protein, 37 aa, Artificial Sequence; identical to SEQ ID NO: 8590
  GFR-binding peptide
  MOD_RES (3)..(4)..(35)..(37): Xaa is C or S

SEQ ID NO: 79949 - protein, 36 aa, Artificial Sequence; identical to SEQ ID NO: 6816
  GFR-binding peptide
  MOD_RES (3)..(4): Xaa is C or S
  MOD_RES (18)..(19)..(20)..(21)..(22): Xaa is A or G
  MOD_RES (23)..(24)..(25)..(26): Xaa is A or G or is absent

SEQ ID NO: 79950 - protein, 41 aa, Artificial Sequence
  GFR-binding peptide
  MOD_RES (5)..(6)..(40): Xaa is C or S
  MOD_RES (20)..(21)..(22)..(23)..(24): Xaa is A or G
  MOD_RES (25)..(26)..(27)..(28): Xaa is A or G or is absent
IPEPXXVPEKMSAISILYLXXXXXXXXXLKNYQNMTVESXA

SEQ ID NO: 79951 - protein, 41 aa, Artificial Sequence; identical to SEQ ID NO: 6817
  GFR-binding peptide
  MOD_RES (5)..(6)..(38)..(40): Xaa is C or S

SEQ ID NO: 79952 - protein, 38 aa, Artificial Sequence
  GFR-binding peptide
  MOD_RES (6)..(7): Xaa is C or S
HVPKPXXAPTKLSAISVLYLDDSSNVILKNYQNMVVRS

SEQ ID NO: 79953 - protein, 41 aa, Artificial Sequence; identical to SEQ ID NO: 70870
  GFR-binding peptide
  MOD_RES (6)..(7)..(41): Xaa is C or S
  MOD_RES (21)..(22)..(23)..(24)..(25): Xaa is A or G
  MOD_RES (26)..(27)..(28)..(29): Xaa is A or G or is absent

SEQ ID NO: 79954 - protein, 39 aa, Artificial Sequence; identical to SEQ ID NO: 8592
  GFR-binding peptide
  MOD_RES (2)..(3)..(36)..(38): Xaa is C or S
  MOD_RES (17)..(18)..(19)..(20)..(21): Xaa is A or G
  MOD_RES (22)..(23)..(24)..(25): Xaa is A or G or is absent

SEQ ID NO: 79955 - protein, 43 aa, Artificial Sequence; identical to SEQ ID NO: 8593
  GFR-binding peptide
  MOD_RES (5)..(6)..(41)..(43): Xaa is C or S
  MOD_RES (20)..(21)..(22)..(23)..(24): Xaa is A or G
  MOD_RES (25)..(26)..(27)..(28): Xaa is A or G or is absent

SEQ ID NO: 79956 - protein, 35 aa, Artificial Sequence; identical to SEQ ID NO: 8594
  GFR-binding peptide
  MOD_RES (1)..(34): Xaa is C or S
  MOD_RES (15)..(16)..(17)..(18)..(19): Xaa is A or G
  MOD_RES (20)..(21)..(22)..(23): Xaa is A or G or is absent

SEQ ID NO: 79957 - protein, 35 aa, Artificial Sequence; identical to SEQ ID NO: 15899
  GFR-binding peptide
  MOD_RES (2)..(3): Xaa is C or S
  MOD_RES (17)..(18)..(19)..(20)..(21): Xaa is A or G
  MOD_RES (22)..(23)..(24)..(25): Xaa is A or G or is absent

SEQ ID NO: 79958 - protein, 37 aa, Artificial Sequence; identical to SEQ ID NO: 29922
  GFR-binding peptide
  MOD_RES (4)..(5)..(37): Xaa is C or S

SEQ ID NO: 79959 - protein, 32 aa, Artificial Sequence
  GFR-binding peptide
  MOD_RES (14)..(15)..(16)..(17)..(18): Xaa is A or G
  MOD_RES (19)..(20)..(21)..(22): Xaa is A or G or is absent
VPEKMSAISILYLXXXXXXXXXLKNYQNMTVE

SEQ ID NO: 79960 - protein, 37 aa, Artificial Sequence; identical to SEQ ID NO: 8597
  GFR-binding peptide
  MOD_RES (1)..(36): Xaa is C or S
  MOD_RES (15)..(16)..(17)..(18)..(19): Xaa is A or G
  MOD_RES (20)..(21)..(22)..(23): Xaa is A or G or is absent

SEQ ID NO: 79961 - protein, 36 aa, Artificial Sequence; identical to SEQ ID NO: 28000
  GFR-binding peptide
  MOD_RES (2)..(3): Xaa is C or S
  MOD_RES (17)..(18)..(19)..(20)..(21): Xaa is A or G
  MOD_RES (22)..(23)..(24)..(25): Xaa is A or G or is absent

SEQ ID NO: 79962 - protein, 42 aa, Artificial Sequence; identical to SEQ ID NO: 8601
  GFR-binding peptide
  MOD_RES (6)..(7)..(40)..(42): Xaa is C or S
  MOD_RES (21)..(22)..(23)..(24)..(25): Xaa is A or G
  MOD_RES (26)..(27)..(28)..(29): Xaa is A or G or is absent

SEQ ID NO: 79963 - protein, 35 aa, Artificial Sequence; identical to SEQ ID NO: 29932
  GFR-binding peptide
  MOD_RES (1)..(35): Xaa is C or S
  MOD_RES (15)..(16)..(17)..(18)..(19): Xaa is A or G
  MOD_RES (20)..(21)..(22)..(23): Xaa is A or G or is absent

SEQ ID NO: 79964 - protein, 42 aa, Artificial Sequence
  GFR-binding peptide
  MOD_RES (5)..(6)..(40)..(42): Xaa is C or S
  MOD_RES (20)..(21)..(22)..(23)..(24): Xaa is A or G
  MOD_RES (25)..(26)..(27)..(28): Xaa is A or G or is absent
SAGPXXTPTKMSAISMLYLXXXXXXXXXLKNYQGMVVDRXGX

SEQ ID NO: 79965 - protein, 38 aa, Artificial Sequence; identical to SEQ ID NO: 6825
  GFR-binding peptide
  MOD_RES (1)..(2)..(35)..(37): Xaa is C or S
  MOD_RES (16)..(17)..(18)..(19)..(20): Xaa is A or G
  MOD_RES (21)..(22)..(23)..(24): Xaa is A or G or is absent

SEQ ID NO: 79966 - protein, 36 aa, Artificial Sequence; identical to SEQ ID NO: 14167
  GFR-binding peptide
  MOD_RES (4)..(5): Xaa is C or S

SEQ ID NO: 79967 - protein, 42 aa, Artificial Sequence; identical to SEQ ID NO: 57953
  GFR-binding peptide
  MOD_RES (5)..(6)..(40)..(42): Xaa is C or S
  MOD_RES (20)..(21)..(22)..(23)..(24): Xaa is A or G
  MOD_RES (25)..(26)..(27)..(28): Xaa is A or G or is absent

SEQ ID NO: 79968 - protein, 40 aa, Artificial Sequence; identical to SEQ ID NO: 6831
  GFR-binding peptide
  MOD_RES (6)..(7)..(38)..(40): Xaa is C or S

SEQ ID NO: 79969 - protein, 38 aa, Artificial Sequence
  GFR-binding peptide
  MOD_RES (2)..(3)..(35)..(37): Xaa is C or S
AXXVPTKLSAISILYLDKGVVTYLKNYQGMAVSEXGXR

SEQ ID NO: 79970 - protein, 44 aa, Artificial Sequence; identical to SEQ ID NO: 29939
  GFR-binding peptide
  MOD_RES (6)..(7)..(41)..(43): Xaa is C or S
  MOD_RES (21)..(22)..(23)..(24)..(25): Xaa is A or G
  MOD_RES (26)..(27)..(28)..(29): Xaa is A or G or is absent

SEQ ID NO: 79971 - protein, 37 aa, Artificial Sequence
  GFR-binding peptide
  MOD_RES (3)..(4): Xaa is C or S
  MOD_RES (18)..(19)..(20)..(21)..(22): Xaa is A or G
  MOD_RES (23)..(24)..(25)..(26): Xaa is A or G or is absent
KAXXVPTKLSAISILYLXXXXXXXXXLKNYQGMAVSE

SEQ ID NO: 79972 - protein, 37 aa, Artificial Sequence; identical to SEQ ID NO: 15909
  GFR-binding peptide
  MOD_RES (3)..(4): Xaa is C or S
  MOD_RES (18)..(19)..(20)..(21)..(22): Xaa is A or G
  MOD_RES (23)..(24)..(25)..(26): Xaa is A or G or is absent

SEQ ID NO: 79973 - protein, 34 aa, Artificial Sequence
  GFR-binding peptide
  MOD_RES (1)..(33): Xaa is C or S
XVPTKLSAISILYLDKGVVTYLKNYQGMAVSEXG

SEQ ID NO: 79974 - protein, 38 aa, Artificial Sequence
  GFR-binding peptide
  MOD_RES (3)..(4)..(37): Xaa is C or S
  MOD_RES (18)..(19)..(20)..(21)..(22): Xaa is A or G
  MOD_RES (23)..(24)..(25)..(26): Xaa is A or G or is absent
STXXAPVKTSAISMLYLXXXXXXXXXLKNYQMIVEEXG

SEQ ID NO: 79975 - protein, 39 aa, Artificial Sequence; identical to SEQ ID NO: 6832
  GFR-binding peptide
  MOD_RES (6)..(6): Xaa is C or S
  MOD_RES (20)..(21)..(22)..(23)..(24): Xaa is A or G
  MOD_RES (25)..(26)..(27)..(28): Xaa is A or G or is absent

SEQ ID NO: 79976 - protein, 34 aa, Artificial Sequence; identical to SEQ ID NO: 8608
  GFR-binding peptide
  MOD_RES (1)..(32)..(34): Xaa is C or S

SEQ ID NO: 79977 - protein, 42 aa, Artificial Sequence; identical to SEQ ID NO: 8609
  GFR-binding peptide
  MOD_RES (6)..(7)..(42): Xaa is C or S
  MOD_RES (21)..(22)..(23)..(24)..(25): Xaa is A or G
  MOD_RES (26)..(27)..(28)..(29): Xaa is A or G or is absent

SEQ ID NO: 79978 - protein, 39 aa, Artificial Sequence; identical to SEQ ID NO: 8610
  GFR-binding peptide
  MOD_RES (6)..(7)..(38): Xaa is C or S

SEQ ID NO: 79979 - protein, 40 aa, Artificial Sequence; identical to SEQ ID NO: 6834
  GFR-binding peptide
  MOD_RES (5)..(6)..(40): Xaa is C or S
  MOD_RES (20)..(21)..(22)..(23)..(24): Xaa is A or G
  MOD_RES (25)..(26)..(27)..(28): Xaa is A or G or is absent

SEQ ID NO: 79980 - protein, 38 aa, Artificial Sequence; identical to SEQ ID NO: 8613
  GFR-binding peptide
  MOD_RES (3)..(4)..(37): Xaa is C or S
  MOD_RES (18)..(19)..(20)..(21)..(22): Xaa is A or G
  MOD_RES (23)..(24)..(25)..(26): Xaa is A or G or is absent

SEQ ID NO: 79981 - protein, 32 aa, Artificial Sequence
  GFR-binding peptide
  MOD_RES (1)..(1): Xaa is C or S
XVPEKMSAISILYLDENKNVVLKNYQNMTVES

SEQ ID NO: 79982 - protein, 39 aa, Artificial Sequence; identical to SEQ ID NO: 8615
  GFR-binding peptide
  MOD_RES (1)..(2)..(36)..(38): Xaa is C or S
  MOD_RES (16)..(17)..(18)..(19)..(20): Xaa is A or G
  MOD_RES (21)..(22)..(23)..(24): Xaa is A or G or is absent

SEQ ID NO: 79983 - protein, 36 aa, Artificial Sequence; identical to SEQ ID NO: 14179
  GFR-binding peptide
  MOD_RES (1)..(2)..(36): Xaa is C or S
  MOD_RES (16)..(17)..(18)..(19)..(20): Xaa is A or G
  MOD_RES (21)..(22)..(23)..(24): Xaa is A or G or is absent

SEQ ID NO: 79984 - protein, 36 aa, Artificial Sequence; identical to SEQ ID NO: 57961
  GFR-binding peptide
  MOD_RES (2)..(3)..(35): Xaa is C or S

SEQ ID NO: 79985 - protein, 37 aa, Artificial Sequence; identical to SEQ ID NO: 29954
  GFR-binding peptide
  MOD_RES (4)..(5): Xaa is C or S
  MOD_RES (19)..(20)..(21)..(22)..(23): Xaa is A or G
  MOD_RES (24)..(25)..(26)..(27): Xaa is A or G or is absent

SEQ ID NO: 79986 - protein, 34 aa, Artificial Sequence; identical to SEQ ID NO: 14180
  GFR-binding peptide
  MOD_RES (1)..(2): Xaa is C or S
  MOD_RES (16)..(17)..(18)..(19)..(20): Xaa is A or G
  MOD_RES (21)..(22)..(23)..(24): Xaa is A or G or is absent

SEQ ID NO: 79987 - protein, 33 aa, Artificial Sequence; identical to SEQ ID NO: 6840
  GFR-binding peptide
  MOD_RES (1)..(2)..(33): Xaa is C or S

SEQ ID NO: 79988 - protein, 37 aa, Artificial Sequence; identical to SEQ ID NO: 28022
  GFR-binding peptide
  MOD_RES (3)..(4)..(36): Xaa is C or S

SEQ ID NO: 79989 - protein, 30 aa, Artificial Sequence; identical to SEQ ID NO: 6843
  GFR-binding peptide

SEQ ID NO: 79990 - protein, 38 aa, Artificial Sequence; identical to SEQ ID NO: 6844
  GFR-binding peptide
  MOD_RES (1)..(35)..(37): Xaa is C or S
  MOD_RES (15)..(16)..(17)..(18)..(19): Xaa is A or G
  MOD_RES (20)..(21)..(22)..(23): Xaa is A or G or is absent

SEQ ID NO: 79991 - protein, 38 aa, Artificial Sequence; identical to SEQ ID NO: 6845
  GFR-binding peptide
  MOD_RES (3)..(4)..(38): Xaa is C or S
  MOD_RES (18)..(19)..(20)..(21)..(22): Xaa is A or G
  MOD_RES (23)..(24)..(25)..(26): Xaa is A or G or is absent

SEQ ID NO: 79992 - protein, 37 aa, Artificial Sequence; identical to SEQ ID NO: 57969
  GFR-binding peptide
  MOD_RES (1)..(34)..(36): Xaa is C or S
  MOD_RES (15)..(16)..(17)..(18)..(19): Xaa is A or G
  MOD_RES (20)..(21)..(22)..(23): Xaa is A or G or is absent

SEQ ID NO: 79993 - protein, 35 aa, Artificial Sequence
  GFR-binding peptide
  MOD_RES (34)..(34): Xaa is C or S
  MOD_RES (14)..(15)..(16)..(17)..(18): Xaa is A or G
  MOD_RES (19)..(20)..(21)..(22): Xaa is A or G or is absent
VPTKLSAISILYLXXXXXXXXXLKNYQGMAVSEXG

SEQ ID NO: 79994 - protein, 38 aa, Artificial Sequence; identical to SEQ ID NO: 29961
  GFR-binding peptide
  MOD_RES (1)..(35)..(37): Xaa is C or S
  MOD_RES (15)..(16)..(17)..(18)..(19): Xaa is A or G
  MOD_RES (20)..(21)..(22)..(23): Xaa is A or G or is absent

SEQ ID NO: 79995 - protein, 38 aa, Artificial Sequence
  GFR-binding peptide
  MOD_RES (1)..(2)..(36)..(38): Xaa is C or S
  MOD_RES (16)..(17)..(18)..(19)..(20): Xaa is A or G
  MOD_RES (21)..(22)..(23)..(24): Xaa is A or G or is absent
XXVPARLSAISILYLXXXXXXXXXLKNYQDMVVEAXGX

SEQ ID NO: 79996 - protein, 40 aa, Artificial Sequence; identical to SEQ ID NO: 57974
  GFR-binding peptide
  MOD_RES (5)..(6)..(37)..(39): Xaa is C or S

SEQ ID NO: 79997 - protein, 35 aa, Artificial Sequence; identical to SEQ ID NO: 6849
  GFR-binding peptide
  MOD_RES (1)..(2)..(35): Xaa is C or S
  MOD_RES (16)..(17)..(18)..(19)..(20): Xaa is A or G
  MOD_RES (21)..(22)..(23)..(24): Xaa is A or G or is absent

SEQ ID NO: 79998 - protein, 39 aa, Artificial Sequence
  GFR-binding peptide
  MOD_RES (1)..(2)..(36)..(38): Xaa is C or S
  MOD_RES (16)..(17)..(18)..(19)..(20): Xaa is A or G
  MOD_RES (21)..(22)..(23)..(24): Xaa is A or G or is absent
XXTPTKMSAISMLYLXXXXXXXXXLKNYQGMVVDRXGXS

SEQ ID NO: 79999 - protein, 38 aa, Artificial Sequence; identical to SEQ ID NO: 57976
  GFR-binding peptide
  MOD_RES (1)..(35)..(37): Xaa is C or S
  MOD_RES (15)..(16)..(17)..(18)..(19): Xaa is A or G
  MOD_RES (20)..(21)..(22)..(23): Xaa is A or G or is absent

SEQ ID NO: 80000 - protein, 36 aa, Artificial Sequence; identical to SEQ ID NO: 6850
  GFR-binding peptide
  MOD_RES (4)..(4): Xaa is C or S
  MOD_RES (18)..(19)..(20)..(21)..(22): Xaa is A or G
  MOD_RES (23)..(24)..(25)..(26): Xaa is A or G or is absent

SEQ ID NO: 80001 - protein, 38 aa, Artificial Sequence; identical to SEQ ID NO: 8628
  GFR-binding peptide
  MOD_RES (1)..(36)..(38): Xaa is C or S
  MOD_RES (15)..(16)..(17)..(18)..(19): Xaa is A or G
  MOD_RES (20)..(21)..(22)..(23): Xaa is A or G or is absent

SEQ ID NO: 80002 - protein, 37 aa, Artificial Sequence; identical to SEQ ID NO: 70911
  GFR-binding peptide
  MOD_RES (3)..(4)..(36): Xaa is C or S

SEQ ID NO: 80003 - protein, 36 aa, Artificial Sequence; identical to SEQ ID NO: 8629
  GFR-binding peptide
  MOD_RES (34)..(36): Xaa is C or S
  MOD_RES (14)..(15)..(16)..(17)..(18): Xaa is A or G
  MOD_RES (19)..(20)..(21)..(22): Xaa is A or G or is absent

SEQ ID NO: 80004 - protein, 39 aa, Artificial Sequence
  GFR-binding peptide
  MOD_RES (1)..(2)..(36)..(38): Xaa is C or S
  MOD_RES (16)..(17)..(18)..(19)..(20): Xaa is A or G
  MOD_RES (21)..(22)..(23)..(24): Xaa is A or G or is absent
XXVPARLSAISILYLXXXXXXXXXLKNYQDMVVEAXGXR

SEQ ID NO: 80005 - protein, 37 aa, Artificial Sequence; identical to SEQ ID NO: 8631
  GFR-binding peptide
  MOD_RES (1)..(34)..(36): Xaa is C or S
  MOD_RES (15)..(16)..(17)..(18)..(19): Xaa is A or G
  MOD_RES (20)..(21)..(22)..(23): Xaa is A or G or is absent

SEQ ID NO: 80006 - protein, 42 aa, Artificial Sequence; identical to SEQ ID NO: 8633
  GFR-binding peptide
  MOD_RES (3)..(4)..(39)..(41): Xaa is C or S
  MOD_RES (18)..(19)..(20)..(21)..(22): Xaa is A or G
  MOD_RES (23)..(24)..(25)..(26): Xaa is A or G or is absent

SEQ ID NO: 80007 - protein, 37 aa, Artificial Sequence; identical to SEQ ID NO: 6853
  GFR-binding peptide
  MOD_RES (2)..(3)..(37): Xaa is C or S
  MOD_RES (17)..(18)..(19)..(20)..(21): Xaa is A or G
  MOD_RES (22)..(23)..(24)..(25): Xaa is A or G or is absent

SEQ ID NO: 80008 - protein, 36 aa, Artificial Sequence; identical to SEQ ID NO: 8636
  GFR-binding peptide
  MOD_RES (3)..(4)..(36): Xaa is C or S

SEQ ID NO: 80009 - protein, 40 aa, Artificial Sequence
  GFR-binding peptide
  MOD_RES (3)..(4)..(38)..(40): Xaa is C or S
  MOD_RES (18)..(19)..(20)..(21)..(22): Xaa is A or G
  MOD_RES (23)..(24)..(25)..(26): Xaa is A or G or is absent
EPXXVPEKMSAISILYLXXXXXXXXXLKNYQNMTVESXAX

SEQ ID NO: 80010 - protein, 33 aa, Artificial Sequence; identical to SEQ ID NO: 6857
  GFR-binding peptide
  MOD_RES (32)..(32): Xaa is C or S

SEQ ID NO: 80011 - protein, 37 aa, Artificial Sequence; identical to SEQ ID NO: 6858
  GFR-binding peptide
  MOD_RES (1)..(35)..(37): Xaa is C or S
  MOD_RES (15)..(16)..(17)..(18)..(19): Xaa is A or G
  MOD_RES (20)..(21)..(22)..(23): Xaa is A or G or is absent

SEQ ID NO: 80012 - protein, 34 aa, Artificial Sequence; identical to SEQ ID NO: 15934
  GFR-binding peptide
  MOD_RES (1)..(33): Xaa is C or S

SEQ ID NO: 80013 - protein, 39 aa, Artificial Sequence; identical to SEQ ID NO: 57985
  GFR-binding peptide
  MOD_RES (6)..(7): Xaa is C or S
  MOD_RES (21)..(22)..(23)..(24)..(25): Xaa is A or G
  MOD_RES (26)..(27)..(28)..(29): Xaa is A or G or is absent

SEQ ID NO: 80014 - protein, 38 aa, Artificial Sequence; identical to SEQ ID NO: 6862
  GFR-binding peptide
  MOD_RES (4)..(5): Xaa is C or S
  MOD_RES (19)..(20)..(21)..(22)..(23): Xaa is A or G
  MOD_RES (24)..(25)..(26)..(27): Xaa is A or G or is absent

SEQ ID NO: 80015 - protein, 43 aa, Artificial Sequence; identical to SEQ ID NO: 6864
  GFR-binding peptide
  MOD_RES (6)..(7)..(40)..(42): Xaa is C or S
  MOD_RES (21)..(22)..(23)..(24)..(25): Xaa is A or G
  MOD_RES (26)..(27)..(28)..(29): Xaa is A or G or is absent

SEQ ID NO: 80016 - protein, 35 aa, Artificial Sequence; identical to SEQ ID NO: 8646
  GFR-binding peptide
  MOD_RES (3)..(35): Xaa is C or S

SEQ ID NO: 80017 - protein, 37 aa, Artificial Sequence; identical to SEQ ID NO: 15942
  GFR-binding peptide
  MOD_RES (34)..(36): Xaa is C or S
  MOD_RES (14)..(15)..(16)..(17)..(18): Xaa is A or G
  MOD_RES (19)..(20)..(21)..(22): Xaa is A or G or is absent

SEQ ID NO: 80018 - protein, 40 aa, Artificial Sequence; identical to SEQ ID NO: 15943
  GFR-binding peptide
  MOD_RES (4)..(5)..(39): Xaa is C or S
  MOD_RES (19)..(20)..(21)..(22)..(23): Xaa is A or G
  MOD_RES (24)..(25)..(26)..(27): Xaa is A or G or is absent

SEQ ID NO: 80019 - protein, 37 aa, Artificial Sequence; identical to SEQ ID NO: 8647
  GFR-binding peptide
  MOD_RES (3)..(4)..(36): Xaa is C or S

SEQ ID NO: 80020 - protein, 36 aa, Artificial Sequence; identical to SEQ ID NO: 8649
  GFR-binding peptide
  MOD_RES (3)..(4): Xaa is C or S
  MOD_RES (18)..(19)..(20)..(21)..(22): Xaa is A or G
  MOD_RES (23)..(24)..(25)..(26): Xaa is A or G or is absent

SEQ ID NO: 80021 - protein, 35 aa, Artificial Sequence; identical to SEQ ID NO: 8651
  GFR-binding peptide
  MOD_RES (3)..(4)..(35): Xaa is C or S

SEQ ID NO: 80022 - protein, 40 aa, Artificial Sequence; identical to SEQ ID NO: 6869
  GFR-binding peptide
  MOD_RES (3)..(4)..(37)..(39): Xaa is C or S
  MOD_RES (18)..(19)..(20)..(21)..(22): Xaa is A or G
  MOD_RES (23)..(24)..(25)..(26): Xaa is A or G or is absent

SEQ ID NO: 80023 - protein, 39 aa, Artificial Sequence; identical to SEQ ID NO: 57995
  GFR-binding peptide
  MOD_RES (5)..(6)..(37)..(39): Xaa is C or S

SEQ ID NO: 80024 - protein, 39 aa, Artificial Sequence; identical to SEQ ID NO: 8652
  GFR-binding peptide
  MOD_RES (6)..(7): Xaa is C or S
  MOD_RES (21)..(22)..(23)..(24)..(25): Xaa is A or G
  MOD_RES (26)..(27)..(28)..(29): Xaa is A or G or is absent

SEQ ID NO: 80025 - protein, 35 aa, Artificial Sequence; identical to SEQ ID NO: 6870
  GFR-binding peptide
  MOD_RES (1)..(33)..(35): Xaa is C or S

SEQ ID NO: 80026 - protein, 36 aa, Artificial Sequence; identical to SEQ ID NO: 28049
  GFR-binding peptide
  MOD_RES (1)..(2)..(36): Xaa is C or S
  MOD_RES (16)..(17)..(18)..(19)..(20): Xaa is A or G
  MOD_RES (21)..(22)..(23)..(24): Xaa is A or G or is absent

SEQ ID NO: 80027 - protein, 41 aa, Artificial Sequence; identical to SEQ ID NO: 57997
  GFR-binding peptide
  MOD_RES (6)..(7)..(41): Xaa is C or S
  MOD_RES (21)..(22)..(23)..(24)..(25): Xaa is A or G
  MOD_RES (26)..(27)..(28)..(29): Xaa is A or G or is absent

SEQ ID NO: 80028 - protein, 34 aa, Artificial Sequence
  GFR-binding peptide
  MOD_RES (1)..(33): Xaa is C or S
XVPARLSAISILYLDAANNVVLKNYQDMVVEAXG

SEQ ID NO: 80029 - protein, 35 aa, Artificial Sequence; identical to SEQ ID NO: 15950
  GFR-binding peptide
  MOD_RES (1)..(2)..(34): Xaa is C or S

SEQ ID NO: 80030 - protein, 35 aa, Artificial Sequence; identical to SEQ ID NO: 6872
  GFR-binding peptide
  MOD_RES (3)..(4): Xaa is C or S

SEQ ID NO: 80031 - protein, 38 aa, Artificial Sequence; identical to SEQ ID NO: 6873
  GFR-binding peptide
  MOD_RES (3)..(4): Xaa is C or S
  MOD_RES (18)..(19)..(20)..(21)..(22): Xaa is A or G
  MOD_RES (23)..(24)..(25)..(26): Xaa is A or G or is absent

SEQ ID NO: 80032 - protein, 38 aa, Artificial Sequence; identical to SEQ ID NO: 8656
  GFR-binding peptide
  MOD_RES (4)..(5): Xaa is C or S
  MOD_RES (19)..(20)..(21)..(22)..(23): Xaa is A or G
  MOD_RES (24)..(25)..(26)..(27): Xaa is A or G or is absent

SEQ ID NO: 80033 - protein, 33 aa, Artificial Sequence; identical to SEQ ID NO: 8658
  GFR-binding peptide
  MOD_RES (1)..(2)..(33): Xaa is C or S

SEQ ID NO: 80034 - protein, 35 aa, Artificial Sequence; identical to SEQ ID NO: 6875
  GFR-binding peptide
  MOD_RES (1)..(2)..(35): Xaa is C or S
  MOD_RES (16)..(17)..(18)..(19)..(20): Xaa is A or G
  MOD_RES (21)..(22)..(23)..(24): Xaa is A or G or is absent

SEQ ID NO: 80035 - protein, 40 aa, Artificial Sequence; identical to SEQ ID NO: 8659
  GFR-binding peptide
  MOD_RES (3)..(4)..(39): Xaa is C or S
  MOD_RES (18)..(19)..(20)..(21)..(22): Xaa is A or G
  MOD_RES (23)..(24)..(25)..(26): Xaa is A or G or is absent

SEQ ID NO: 80036 - protein, 37 aa, Artificial Sequence
  GFR-binding peptide
  MOD_RES (4)..(5): Xaa is C or S
  MOD_RES (19)..(20)..(21)..(22)..(23): Xaa is A or G
  MOD_RES (24)..(25)..(26)..(27): Xaa is A or G or is absent
AGPXXTPTKMSAISMLYLXXXXXXXXXLKNYQGMVVD

SEQ ID NO: 80037 - protein, 34 aa, Artificial Sequence; identical to SEQ ID NO: 8660
  GFR-binding peptide
  MOD_RES (1)..(1): Xaa is C or S
  MOD_RES (15)..(16)..(17)..(18)..(19): Xaa is A or G
  MOD_RES (20)..(21)..(22)..(23): Xaa is A or G or is absent

SEQ ID NO: 80038 - protein, 38 aa, Artificial Sequence; identical to SEQ ID NO: 8661
  GFR-binding peptide
  MOD_RES (4)..(5): Xaa is C or S
  MOD_RES (19)..(20)..(21)..(22)..(23): Xaa is A or G
  MOD_RES (24)..(25)..(26)..(27): Xaa is A or G or is absent

SEQ ID NO: 80039 - protein, 35 aa, Artificial Sequence; identical to SEQ ID NO: 6877
  GFR-binding peptide
  MOD_RES (2)..(3)..(34): Xaa is C or S

SEQ ID NO: 80040 - protein, 38 aa, Artificial Sequence; identical to SEQ ID NO: 8667
  GFR-binding peptide
  MOD_RES (2)..(3)..(37): Xaa is C or S
  MOD_RES (17)..(18)..(19)..(20)..(21): Xaa is A or G
  MOD_RES (22)..(23)..(24)..(25): Xaa is A or G or is absent

SEQ ID NO: 80041 - protein, 36 aa, Artificial Sequence; identical to SEQ ID NO: 30005
  GFR-binding peptide
  MOD_RES (2)..(3): Xaa is C or S
  MOD_RES (17)..(18)..(19)..(20)..(21): Xaa is A or G
  MOD_RES (22)..(23)..(24)..(25): Xaa is A or G or is absent

SEQ ID NO: 80042 - protein, 43 aa, Artificial Sequence; identical to SEQ ID NO: 8670
  GFR-binding peptide
  MOD_RES (6)..(7)..(41)..(43): Xaa is C or S
  MOD_RES (21)..(22)..(23)..(24)..(25): Xaa is A or G
  MOD_RES (26)..(27)..(28)..(29): Xaa is A or G or is absent

SEQ ID NO: 80043 - protein, 37 aa, Artificial Sequence
  GFR-binding peptide
  MOD_RES (3)..(4): Xaa is C or S
  MOD_RES (18)..(19)..(20)..(21)..(22): Xaa is A or G
  MOD_RES (23)..(24)..(25)..(26): Xaa is A or G or is absent
ASXXVPARLSAISILYLXXXXXXXXXLKNYQDMVVEA

SEQ ID NO: 80044 - protein, 35 aa, Artificial Sequence; identical to SEQ ID NO: 58007
  GFR-binding peptide
  MOD_RES (2)..(3)..(34): Xaa is C or S

SEQ ID NO: 80045 - protein, 43 aa, Artificial Sequence; identical to SEQ ID NO: 15968
  GFR-binding peptide
  MOD_RES (6)..(7)..(41)..(43): Xaa is C or S
  MOD_RES (21)..(22)..(23)..(24)..(25): Xaa is A or G
  MOD_RES (26)..(27)..(28)..(29): Xaa is A or G or is absent

SEQ ID NO: 80046 - protein, 39 aa, Artificial Sequence; identical to SEQ ID NO: 6883
  GFR-binding peptide
  MOD_RES (4)..(5)..(38): Xaa is C or S
  MOD_RES (19)..(20)..(21)..(22)..(23): Xaa is A or G
  MOD_RES (24)..(25)..(26)..(27): Xaa is A or G or is absent

SEQ ID NO: 80047 - protein, 33 aa, Artificial Sequence
  GFR-binding peptide
  MOD_RES (1)..(1): Xaa is C or S
  MOD_RES (15)..(16)..(17)..(18)..(19): Xaa is A or G
  MOD_RES (20)..(21)..(22)..(23): Xaa is A or G or is absent
XVPEKMSAISILYLXXXXXXXXXLKNYQNMTVE

SEQ ID NO: 80048 - protein, 38 aa, Artificial Sequence; identical to SEQ ID NO: 6885
  GFR-binding peptide
  MOD_RES (4)..(36)..(38): Xaa is C or S

SEQ ID NO: 80049 - protein, 35 aa, Artificial Sequence; identical to SEQ ID NO: 6886
  GFR-binding peptide
  MOD_RES (3)..(4): Xaa is C or S

SEQ ID NO: 80050 - protein, 44 aa, Artificial Sequence
  GFR-binding peptide
  MOD_RES (6)..(7)..(41)..(43): Xaa is C or S
  MOD_RES (21)..(22)..(23)..(24)..(25): Xaa is A or G
  MOD_RES (26)..(27)..(28)..(29): Xaa is A or G or is absent
GSAGPXXTPTKMSAISMLYLXXXXXXXXXLKNYQGMVVDRXGXS

SEQ ID NO: 80051 - protein, 38 aa, Artificial Sequence; identical to SEQ ID NO: 8674
  GFR-binding peptide
  MOD_RES (3)..(4)..(35)..(37): Xaa is C or S

SEQ ID NO: 80052 - protein, 39 aa, Artificial Sequence
  GFR-binding peptide
  MOD_RES (2)..(3)..(37)..(39): Xaa is C or S
  MOD_RES (17)..(18)..(19)..(20)..(21): Xaa is A or G
  MOD_RES (22)..(23)..(24)..(25): Xaa is A or G or is absent
PXXVPEKMSAISILYLXXXXXXXXXLKNYQNMTVESXAX

SEQ ID NO: 80053 - protein, 37 aa, Artificial Sequence; identical to SEQ ID NO: 6890
  GFR-binding peptide
  MOD_RES (4)..(5)..(36): Xaa is C or S

SEQ ID NO: 80054 - protein, 32 aa, Artificial Sequence; identical to SEQ ID NO: 58016
  GFR-binding peptide
  MOD_RES (1)..(32): Xaa is C or S

SEQ ID NO: 80055 - protein, 35 aa, Artificial Sequence
  GFR-binding peptide
  MOD_RES (3)..(4): Xaa is C or S
KAXXVPTKLSAISILYLDKGVVTYLKNYQGMAVSE

SEQ ID NO: 80056 - protein, 40 aa, Artificial Sequence
  GFR-binding peptide
  MOD_RES (3)..(4)..(38)..(40): Xaa is C or S
  MOD_RES (18)..(19)..(20)..(21)..(22): Xaa is A or G
  MOD_RES (23)..(24)..(25)..(26): Xaa is A or G or is absent
GPXXTPTKMSAISMLYLXXXXXXXXXLKNYQGMVVDRXGX

SEQ ID NO: 80057 - protein, 32 aa, Artificial Sequence
  GFR-binding peptide
  MOD_RES (1)..(1): Xaa is C or S
XVPTKLSAISILYLDKGVVTYLKNYQGMAVSE

SEQ ID NO: 80058 - protein, 43 aa, Artificial Sequence
  GFR-binding peptide
  MOD_RES (6)..(7)..(41)..(43): Xaa is C or S
  MOD_RES (21)..(22)..(23)..(24)..(25): Xaa is A or G
  MOD_RES (26)..(27)..(28)..(29): Xaa is A or G or is absent
KASKAXXVPTKLSAISILYLXXXXXXXXXLKNYQGMAVSEXGX

SEQ ID NO: 80059 - protein, 39 aa, Artificial Sequence; identical to SEQ ID NO: 15976
  GFR-binding peptide
  MOD_RES (4)..(5)..(39): Xaa is C or S
  MOD_RES (19)..(20)..(21)..(22)..(23): Xaa is A or G
  MOD_RES (24)..(25)..(26)..(27): Xaa is A or G or is absent

SEQ ID NO: 80060 - protein, 41 aa, Artificial Sequence; identical to SEQ ID NO: 6893
  GFR-binding peptide
  MOD_RES (6)..(7)..(38)..(40): Xaa is C or S

SEQ ID NO: 80061 - protein, 44 aa, Artificial Sequence; identical to SEQ ID NO: 6895
  GFR-binding peptide
  MOD_RES (6)..(7)..(41)..(43): Xaa is C or S
  MOD_RES (21)..(22)..(23)..(24)..(25): Xaa is A or G
  MOD_RES (26)..(27)..(28)..(29): Xaa is A or G or is absent

SEQ ID NO: 80062 - protein, 38 aa, Artificial Sequence; identical to SEQ ID NO: 30015
  GFR-binding peptide
  MOD_RES (4)..(5): Xaa is C or S
  MOD_RES (19)..(20)..(21)..(22)..(23): Xaa is A or G
  MOD_RES (24)..(25)..(26)..(27): Xaa is A or G or is absent

SEQ ID NO: 80063 - protein, 36 aa, Artificial Sequence; identical to SEQ ID NO: 8677
  GFR-binding peptide
  MOD_RES (1)..(2): Xaa is C or S
  MOD_RES (16)..(17)..(18)..(19)..(20): Xaa is A or G
  MOD_RES (21)..(22)..(23)..(24): Xaa is A or G or is absent

SEQ ID NO: 80064 - protein, 39 aa, Artificial Sequence; identical to SEQ ID NO: 6896
  GFR-binding peptide
  MOD_RES (4)..(5)..(39): Xaa is C or S
  MOD_RES (19)..(20)..(21)..(22)..(23): Xaa is A or G
  MOD_RES (24)..(25)..(26)..(27): Xaa is A or G or is absent

SEQ ID NO: 80065 - protein, 34 aa, Artificial Sequence; identical to SEQ ID NO: 15979
  GFR-binding peptide
  MOD_RES (34)..(34): Xaa is C or S
  MOD_RES (14)..(15)..(16)..(17)..(18): Xaa is A or G
  MOD_RES (19)..(20)..(21)..(22): Xaa is A or G or is absent

SEQ ID NO: 80066 - protein, 43 aa, Artificial Sequence; identical to SEQ ID NO: 6897
  GFR-binding peptide
  MOD_RES (5)..(6)..(40)..(42): Xaa is C or S
  MOD_RES (20)..(21)..(22)..(23)..(24): Xaa is A or G
  MOD_RES (25)..(26)..(27)..(28): Xaa is A or G or is absent

SEQ ID NO: 80067 - protein, 38 aa, Artificial Sequence; identical to SEQ ID NO: 6898
  GFR-binding peptide
  MOD_RES (2)..(3)..(36)..(38): Xaa is C or S
  MOD_RES (17)..(18)..(19)..(20)..(21): Xaa is A or G
  MOD_RES (22)..(23)..(24)..(25): Xaa is A or G or is absent

SEQ ID NO: 80068 - protein, 35 aa, Artificial Sequence; identical to SEQ ID NO: 28082
  GFR-binding peptide
  MOD_RES (3)..(4): Xaa is C or S

SEQ ID NO: 80069 - protein, 36 aa, Artificial Sequence
  GFR-binding peptide
  MOD_RES (3)..(4)..(35): Xaa is C or S
STXXAPVKTSAISMLYLDNGRVLLLKNYQMIVEEXG

SEQ ID NO: 80070 - protein, 39 aa, Artificial Sequence; identical to SEQ ID NO: 15982
  GFR-binding peptide
  MOD_RES (3)..(4)..(38): Xaa is C or S
  MOD_RES (18)..(19)..(20)..(21)..(22): Xaa is A or G
  MOD_RES (23)..(24)..(25)..(26): Xaa is A or G or is absent

SEQ ID NO: 80071 - protein, 37 aa, Artificial Sequence; identical to SEQ ID NO: 6901
  GFR-binding peptide
  MOD_RES (3)..(4): Xaa is C or S
  MOD_RES (18)..(19)..(20)..(21)..(22): Xaa is A or G
  MOD_RES (23)..(24)..(25)..(26): Xaa is A or G or is absent

SEQ ID NO: 80072 - protein, 40 aa, Artificial Sequence; identical to SEQ ID NO: 6902
  GFR-binding peptide
  MOD_RES (2)..(3)..(37)..(39): Xaa is C or S
  MOD_RES (17)..(18)..(19)..(20)..(21): Xaa is A or G
  MOD_RES (22)..(23)..(24)..(25): Xaa is A or G or is absent

SEQ ID NO: 80073 - protein, 39 aa, Artificial Sequence; identical to SEQ ID NO: 15985
  GFR-binding peptide
  MOD_RES (4)..(5)..(37)..(39): Xaa is C or S

SEQ ID NO: 80074 - protein, 38 aa, Artificial Sequence; identical to SEQ ID NO: 8680
  GFR-binding peptide
  MOD_RES (5)..(6)..(37): Xaa is C or S

SEQ ID NO: 80075 - protein, 42 aa, Artificial Sequence
  GFR-binding peptide
  MOD_RES (6)..(7)..(39)..(41): Xaa is C or S
KASKAXXVPTKLSAISILYLDKGVVTYLKNYQGMAVSEXGXR

SEQ ID NO: 80076 - protein, 42 aa, Artificial Sequence; identical to SEQ ID NO: 58033
  GFR-binding peptide
  MOD_RES (6)..(7)..(40)..(42): Xaa is C or S
  MOD_RES (21)..(22)..(23)..(24)..(25): Xaa is A or G
  MOD_RES (26)..(27)..(28)..(29): Xaa is A or G or is absent

SEQ ID NO: 80077 - protein, 35 aa, Artificial Sequence
  GFR-binding peptide
  MOD_RES (1)..(2)..(33)..(35): Xaa is C or S
XXAPVKTSAISMLYLDNGRVLLLKNYQMIVEEXGX

SEQ ID NO: 80078 - protein, 40 aa, Artificial Sequence; identical to SEQ ID NO: 6903
  GFR-binding peptide
  MOD_RES (4)..(38)..(40): Xaa is C or S
  MOD_RES (18)..(19)..(20)..(21)..(22): Xaa is A or G
  MOD_RES (23)..(24)..(25)..(26): Xaa is A or G or is absent

SEQ ID NO: 80079 - protein, 32 aa, Artificial Sequence; identical to SEQ ID NO: 6905
  GFR-binding peptide
  MOD_RES (14)..(15)..(16)..(17)..(18): Xaa is A or G
  MOD_RES (19)..(20)..(21)..(22): Xaa is A or G or is absent

SEQ ID NO: 80080 - protein, 35 aa, Artificial Sequence; identical to SEQ ID NO: 58037
  GFR-binding peptide
  MOD_RES (1)..(32)..(34): Xaa is C or S

SEQ ID NO: 80081 - protein, 41 aa, Artificial Sequence; identical to SEQ ID NO: 58039
  GFR-binding peptide
  MOD_RES (4)..(5)..(39)..(41): Xaa is C or S
  MOD_RES (19)..(20)..(21)..(22)..(23): Xaa is A or G
  MOD_RES (24)..(25)..(26)..(27): Xaa is A or G or is absent

SEQ ID NO: 80082 - protein, 37 aa, Artificial Sequence
  GFR-binding peptide
  MOD_RES (2)..(3)..(35)..(37): Xaa is C or S
PXXVPEKMSAISILYLDENKNVVLKNYQNMTVESXAX

SEQ ID NO: 80083 - protein, 33 aa, Artificial Sequence; identical to SEQ ID NO: 30027
  GFR-binding peptide
  MOD_RES (1)..(33): Xaa is C or S

SEQ ID NO: 80084 - protein, 35 aa, Artificial Sequence; identical to SEQ ID NO: 8688
  GFR-binding peptide
  MOD_RES (1)..(2)..(34): Xaa is C or S

SEQ ID NO: 80085 - protein, 39 aa, Artificial Sequence; identical to SEQ ID NO: 8691
  GFR-binding peptide
  MOD_RES (4)..(5)..(37)..(39): Xaa is C or S

SEQ ID NO: 80086 - protein, 44 aa, Artificial Sequence; identical to SEQ ID NO: 70981
  GFR-binding peptide
  MOD_RES (6)..(7)..(41)..(43): Xaa is C or S
  MOD_RES (21)..(22)..(23)..(24)..(25): Xaa is A or G
  MOD_RES (26)..(27)..(28)..(29): Xaa is A or G or is absent

SEQ ID NO: 80087 - protein, 37 aa, Artificial Sequence; identical to SEQ ID NO: 8693
  GFR-binding peptide
  MOD_RES (3)..(4)..(35)..(37): Xaa is C or S

SEQ ID NO: 80088 - protein, 31 aa, Artificial Sequence; identical to SEQ ID NO: 6916
  GFR-binding peptide
  MOD_RES (1)..(1): Xaa is C or S

SEQ ID NO: 80089 - protein, 37 aa, Artificial Sequence; identical to SEQ ID NO: 14258
  GFR-binding peptide
  MOD_RES (3)..(4): Xaa is C or S
  MOD_RES (18)..(19)..(20)..(21)..(22): Xaa is A or G
  MOD_RES (23)..(24)..(25)..(26): Xaa is A or G or is absent

SEQ ID NO: 80090 - protein, 41 aa, Artificial Sequence; identical to SEQ ID NO: 6917
  GFR-binding peptide
  MOD_RES (4)..(5)..(40): Xaa is C or S
  MOD_RES (19)..(20)..(21)..(22)..(23): Xaa is A or G
  MOD_RES (24)..(25)..(26)..(27): Xaa is A or G or is absent

SEQ ID NO: 80091 - protein, 37 aa, Artificial Sequence; identical to SEQ ID NO: 8695
  GFR-binding peptide
  MOD_RES (1)..(2)..(35)..(37): Xaa is C or S

SEQ ID NO: 80092 - protein, 37 aa, Artificial Sequence; identical to SEQ ID NO: 8696
  GFR-binding peptide
  MOD_RES (1)..(2)..(35)..(37): Xaa is C or S
  MOD_RES (16)..(17)..(18)..(19)..(20): Xaa is A or G
  MOD_RES (21)..(22)..(23)..(24): Xaa is A or G or is absent

SEQ ID NO: 80093 - protein, 36 aa, Artificial Sequence; identical to SEQ ID NO: 30034
  GFR-binding peptide
  MOD_RES (3)..(4): Xaa is C or S
  MOD_RES (18)..(19)..(20)..(21)..(22): Xaa is A or G
  MOD_RES (23)..(24)..(25)..(26): Xaa is A or G or is absent

SEQ ID NO: 80094 - protein, 39 aa, Artificial Sequence
  GFR-binding peptide
  MOD_RES (2)..(3)..(37)..(39): Xaa is C or S
  MOD_RES (17)..(18)..(19)..(20)..(21): Xaa is A or G
  MOD_RES (22)..(23)..(24)..(25): Xaa is A or G or is absent
SXXVPARLSAISILYLXXXXXXXXXLKNYQDMVVEAXGX

SEQ ID NO: 80095 - protein, 40 aa, Artificial Sequence
  GFR-binding peptide
  MOD_RES (6)..(7)..(40): Xaa is C or S
  MOD_RES (21)..(22)..(23)..(24)..(25): Xaa is A or G
  MOD_RES (26)..(27)..(28)..(29): Xaa is A or G or is absent
RVPSTXXAPVKTSAISMLYLXXXXXXXXXLKNYQMIVEEX

SEQ ID NO: 80096 - protein, 34 aa, Artificial Sequence; identical to SEQ ID NO: 6920
  GFR-binding peptide
  MOD_RES (1)..(2): Xaa is C or S
  MOD_RES (16)..(17)..(18)..(19)..(20): Xaa is A or G
  MOD_RES (21)..(22)..(23)..(24): Xaa is A or G or is absent

SEQ ID NO: 80097 - protein, 34 aa, Artificial Sequence; identical to SEQ ID NO: 8697
  GFR-binding peptide
  MOD_RES (1)..(34): Xaa is C or S
  MOD_RES (15)..(16)..(17)..(18)..(19): Xaa is A or G
  MOD_RES (20)..(21)..(22)..(23): Xaa is A or G or is absent

SEQ ID NO: 80098 - protein, 39 aa, Artificial Sequence
  GFR-binding peptide
  MOD_RES (3)..(4)..(37)..(39): Xaa is C or S
  MOD_RES (18)..(19)..(20)..(21)..(22): Xaa is A or G
  MOD_RES (23)..(24)..(25)..(26): Xaa is A or G or is absent
STXXAPVKTSAISMLYLXXXXXXXXXLKNYQMIVEEXGX

SEQ ID NO: 80099 - protein, 37 aa, Artificial Sequence; identical to SEQ ID NO: 8699
  GFR-binding peptide
  MOD_RES (1)..(34)..(36): Xaa is C or S

SEQ ID NO: 80100 - protein, 35 aa, Artificial Sequence; identical to SEQ ID NO: 6924
  GFR-binding peptide
  MOD_RES (2)..(3)..(35): Xaa is C or S

SEQ ID NO: 80101 - protein, 39 aa, Artificial Sequence; identical to SEQ ID NO: 8702
  GFR-binding peptide
  MOD_RES (4)..(5)..(39): Xaa is C or S
  MOD_RES (19)..(20)..(21)..(22)..(23): Xaa is A or G
  MOD_RES (24)..(25)..(26)..(27): Xaa is A or G or is absent

SEQ ID NO: 80102 - protein, 35 aa, Artificial Sequence; identical to SEQ ID NO: 58052
  GFR-binding peptide
  MOD_RES (4)..(5): Xaa is C or S

SEQ ID NO: 80103 - protein, 43 aa, Artificial Sequence; identical to SEQ ID NO: 30042
  GFR-binding peptide
  MOD_RES (5)..(6)..(40)..(42): Xaa is C or S
  MOD_RES (20)..(21)..(22)..(23)..(24): Xaa is A or G
  MOD_RES (25)..(26)..(27)..(28): Xaa is A or G or is absent

SEQ ID NO: 80104 - protein, 43 aa, Artificial Sequence; identical to SEQ ID NO: 58054
  GFR-binding peptide
  MOD_RES (6)..(7)..(41)..(43): Xaa is C or S
  MOD_RES (21)..(22)..(23)..(24)..(25): Xaa is A or G
  MOD_RES (26)..(27)..(28)..(29): Xaa is A or G or is absent

SEQ ID NO: 80105 - protein, 34 aa, Artificial Sequence; identical to SEQ ID NO: 6929
  GFR-binding peptide
  MOD_RES (2)..(3)..(34): Xaa is C or S

SEQ ID NO: 80106 - protein, 40 aa, Artificial Sequence; identical to SEQ ID NO: 30044
  GFR-binding peptide
  MOD_RES (4)..(5)..(37)..(39): Xaa is C or S

SEQ ID NO: 80107 - protein, 43 aa, Artificial Sequence; identical to SEQ ID NO: 8706
  GFR-binding peptide
  MOD_RES (5)..(6)..(40)..(42): Xaa is C or S
  MOD_RES (20)..(21)..(22)..(23)..(24): Xaa is A or G
  MOD_RES (25)..(26)..(27)..(28): Xaa is A or G or is absent

SEQ ID NO: 80108 - protein, 35 aa, Artificial Sequence
  GFR-binding peptide
  MOD_RES (3)..(4): Xaa is C or S
ASXXVPARLSAISILYLDAANNVVLKNYQDMVVEA

SEQ ID NO: 80109 - protein, 38 aa, Artificial Sequence; identical to SEQ ID NO: 6930
  GFR-binding peptide
  MOD_RES (6)..(7)..(38): Xaa is C or S

SEQ ID NO: 80110 - protein, 34 aa, Artificial Sequence
  GFR-binding peptide
  MOD_RES (1)..(33): Xaa is C or S
XTPTKMSAISMLYLNDKQQIILKNYQGMVVDRXG

SEQ ID NO: 80111 - protein, 34 aa, Artificial Sequence
  GFR-binding peptide
  MOD_RES (1)..(2): Xaa is C or S
  MOD_RES (16)..(17)..(18)..(19)..(20): Xaa is A or G
  MOD_RES (21)..(22)..(23)..(24): Xaa is A or G or is absent
XXVPARLSAISILYLXXXXXXXXXLKNYQDMVVE

SEQ ID NO: 80112 - protein, 33 aa, Artificial Sequence; identical to SEQ ID NO: 6934
  GFR-binding peptide
  MOD_RES (14)..(15)..(16)..(17)..(18): Xaa is A or G
  MOD_RES (19)..(20)..(21)..(22): Xaa is A or G or is absent

SEQ ID NO: 80113 - protein, 36 aa, Artificial Sequence; identical to SEQ ID NO: 8711
  GFR-binding peptide
  MOD_RES (1)..(2)..(35): Xaa is C or S
  MOD_RES (16)..(17)..(18)..(19)..(20): Xaa is A or G
  MOD_RES (21)..(22)..(23)..(24): Xaa is A or G or is absent

SEQ ID NO: 80114 - protein, 39 aa, Artificial Sequence; identical to SEQ ID NO: 6935
  GFR-binding peptide
  MOD_RES (1)..(2)..(36)..(38): Xaa is C or S
  MOD_RES (16)..(17)..(18)..(19)..(20): Xaa is A or G
  MOD_RES (21)..(22)..(23)..(24): Xaa is A or G or is absent

SEQ ID NO: 80115 - protein, 32 aa, Artificial Sequence; identical to SEQ ID NO: 8715
  GFR-binding peptide
  MOD_RES (1)..(1): Xaa is C or S

SEQ ID NO: 80116 - protein, 37 aa, Artificial Sequence; identical to SEQ ID NO: 67601
  GFR-binding peptide
  MOD_RES (1)..(2)..(34)..(36): Xaa is C or S

SEQ ID NO: 80117 - protein, 39 aa, Artificial Sequence; identical to SEQ ID NO: 71007
  GFR-binding peptide
  MOD_RES (4)..(5)..(39): Xaa is C or S
  MOD_RES (19)..(20)..(21)..(22)..(23): Xaa is A or G
  MOD_RES (24)..(25)..(26)..(27): Xaa is A or G or is absent

SEQ ID NO: 80118 - protein, 42 aa, Artificial Sequence; identical to SEQ ID NO: 58061
  GFR-binding peptide
  MOD_RES (5)..(6)..(39)..(41): Xaa is C or S
  MOD_RES (20)..(21)..(22)..(23)..(24): Xaa is A or G
  MOD_RES (25)..(26)..(27)..(28): Xaa is A or G or is absent

SEQ ID NO: 80119 - protein, 40 aa, Artificial Sequence
  GFR-binding peptide
  MOD_RES (4)..(5)..(39): Xaa is C or S
  MOD_RES (19)..(20)..(21)..(22)..(23): Xaa is A or G
  MOD_RES (24)..(25)..(26)..(27): Xaa is A or G or is absent
SKAXXVPTKLSAISILYLXXXXXXXXXLKNYQGMAVSEXG

SEQ ID NO: 80120 - protein, 37 aa, Artificial Sequence; identical to SEQ ID NO: 6941
  GFR-binding peptide
  MOD_RES (2)..(3)..(35)..(37): Xaa is C or S

SEQ ID NO: 80121 - protein, 37 aa, Artificial Sequence
  GFR-binding peptide
  MOD_RES (2)..(3)..(37): Xaa is C or S
  MOD_RES (17)..(18)..(19)..(20)..(21): Xaa is A or G
  MOD_RES (22)..(23)..(24)..(25): Xaa is A or G or is absent
AXXVPTKLSAISILYLXXXXXXXXXLKNYQGMAVSEX

SEQ ID NO: 80122 - protein, 41 aa, Artificial Sequence; identical to SEQ ID NO: 8719
  GFR-binding peptide
  MOD_RES (3)..(4)..(38)..(40): Xaa is C or S
  MOD_RES (18)..(19)..(20)..(21)..(22): Xaa is A or G
  MOD_RES (23)..(24)..(25)..(26): Xaa is A or G or is absent

SEQ ID NO: 80123 - protein, 40 aa, Artificial Sequence; identical to SEQ ID NO: 6942
  GFR-binding peptide
  MOD_RES (6)..(7): Xaa is C or S
  MOD_RES (21)..(22)..(23)..(24)..(25): Xaa is A or G
  MOD_RES (26)..(27)..(28)..(29): Xaa is A or G or is absent

SEQ ID NO: 80124 - protein, 40 aa, Artificial Sequence; identical to SEQ ID NO: 8720
  GFR-binding peptide
  MOD_RES (6)..(7): Xaa is C or S
  MOD_RES (21)..(22)..(23)..(24)..(25): Xaa is A or G
  MOD_RES (26)..(27)..(28)..(29): Xaa is A or G or is absent

SEQ ID NO: 80125 - protein, 43 aa, Artificial Sequence; identical to SEQ ID NO: 58066
  GFR-binding peptide
  MOD_RES (6)..(7)..(40)..(42): Xaa is C or S
  MOD_RES (21)..(22)..(23)..(24)..(25): Xaa is A or G
  MOD_RES (26)..(27)..(28)..(29): Xaa is A or G or is absent

SEQ ID NO: 80126 - protein, 40 aa, Artificial Sequence; identical to SEQ ID NO: 6946
  GFR-binding peptide
  MOD_RES (6)..(7)..(38)..(40): Xaa is C or S

SEQ ID NO: 80127 - protein, 37 aa, Artificial Sequence; identical to SEQ ID NO: 6947
  GFR-binding peptide
  MOD_RES (3)..(4): Xaa is C or S
  MOD_RES (18)..(19)..(20)..(21)..(22): Xaa is A or G
  MOD_RES (23)..(24)..(25)..(26): Xaa is A or G or is absent

SEQ ID NO: 80128 - protein, 38 aa, Artificial Sequence; identical to SEQ ID NO: 8724
  GFR-binding peptide
  MOD_RES (1)..(2)..(35)..(37): Xaa is C or S

SEQ ID NO: 80129 - protein, 42 aa, Artificial Sequence; identical to SEQ ID NO: 8725
  GFR-binding peptide
  MOD_RES (6)..(7)..(40)..(42): Xaa is C or S

SEQ ID NO: 80130 - protein, 37 aa, Artificial Sequence
  GFR-binding peptide
  MOD_RES (1)..(35)..(37): Xaa is C or S
  MOD_RES (15)..(16)..(17)..(18)..(19): Xaa is A or G
  MOD_RES (20)..(21)..(22)..(23): Xaa is A or G or is absent
XVPARLSAISILYLXXXXXXXXXLKNYQDMVVEAXGX

SEQ ID NO: 80131 - protein, 35 aa, Artificial Sequence
  GFR-binding peptide
  MOD_RES (2)..(3): Xaa is C or S
  MOD_RES (17)..(18)..(19)..(20)..(21): Xaa is A or G
  MOD_RES (22)..(23)..(24)..(25): Xaa is A or G or is absent
SXXVPARLSAISILYLXXXXXXXXXLKNYQDMVVE

SEQ ID NO: 80132 - protein, 37 aa, Artificial Sequence; identical to SEQ ID NO: 8728
  GFR-binding peptide
  MOD_RES (5)..(6): Xaa is C or S

SEQ ID NO: 80133 - protein, 38 aa, Artificial Sequence
  GFR-binding peptide
  MOD_RES (4)..(5): Xaa is C or S
  MOD_RES (19)..(20)..(21)..(22)..(23): Xaa is A or G
  MOD_RES (24)..(25)..(26)..(27): Xaa is A or G or is absent
PASXXVPARLSAISILYLXXXXXXXXXLKNYQDMVVEA

SEQ ID NO: 80134 - protein, 42 aa, Artificial Sequence
  GFR-binding peptide
  MOD_RES (6)..(7)..(39)..(41): Xaa is C or S
AAPASXXVPARLSAISILYLDAANNVVLKNYQDMVVEAXGXR

SEQ ID NO: 80135 - protein, 40 aa, Artificial Sequence; identical to SEQ ID NO: 6954
  GFR-binding peptide
  MOD_RES (4)..(5)..(39): Xaa is C or S
  MOD_RES (19)..(20)..(21)..(22)..(23): Xaa is A or G
  MOD_RES (24)..(25)..(26)..(27): Xaa is A or G or is absent

SEQ ID NO: 80136 - protein, 37 aa, Artificial Sequence; identical to SEQ ID NO: 6955
  GFR-binding peptide
  MOD_RES (4)..(5): Xaa is C or S
  MOD_RES (19)..(20)..(21)..(22)..(23): Xaa is A or G
  MOD_RES (24)..(25)..(26)..(27): Xaa is A or G or is absent

SEQ ID NO: 80137 - protein, 39 aa, Artificial Sequence; identical to SEQ ID NO: 6958
  GFR-binding peptide
  MOD_RES (4)..(5)..(38): Xaa is C or S
  MOD_RES (19)..(20)..(21)..(22)..(23): Xaa is A or G
  MOD_RES (24)..(25)..(26)..(27): Xaa is A or G or is absent

SEQ ID NO: 80138 - protein, 33 aa, Artificial Sequence; identical to SEQ ID NO: 6960
  GFR-binding peptide
  MOD_RES (32)..(32): Xaa is C or S

SEQ ID NO: 80139 - protein, 37 aa, Artificial Sequence; identical to SEQ ID NO: 6961
  GFR-binding peptide
  MOD_RES (1)..(34)..(36): Xaa is C or S
  MOD_RES (15)..(16)..(17)..(18)..(19): Xaa is A or G
  MOD_RES (20)..(21)..(22)..(23): Xaa is A or G or is absent

SEQ ID NO: 80140 - protein, 42 aa, Artificial Sequence; identical to SEQ ID NO: 30070
  GFR-binding peptide
  MOD_RES (5)..(6)..(40)..(42): Xaa is C or S
  MOD_RES (20)..(21)..(22)..(23)..(24): Xaa is A or G
  MOD_RES (25)..(26)..(27)..(28): Xaa is A or G or is absent

SEQ ID NO: 80141 - protein, 40 aa, Artificial Sequence; identical to SEQ ID NO: 6962
  GFR-binding peptide
  MOD_RES (6)..(7)..(40): Xaa is C or S
  MOD_RES (21)..(22)..(23)..(24)..(25): Xaa is A or G
  MOD_RES (26)..(27)..(28)..(29): Xaa is A or G or is absent

SEQ ID NO: 80142 - protein, 37 aa, Artificial Sequence
  GFR-binding peptide
  MOD_RES (2)..(3)..(35)..(37): Xaa is C or S
SXXVPARLSAISILYLDAANNVVLKNYQDMVVEAXGX

SEQ ID NO: 80143 - protein, 38 aa, Artificial Sequence
  GFR-binding peptide
  MOD_RES (3)..(4)..(36)..(38): Xaa is C or S
EPXXVPEKMSAISILYLDENKNVVLKNYQNMTVESXAX

SEQ ID NO: 80144 - protein, 37 aa, Artificial Sequence; identical to SEQ ID NO: 6965
  GFR-binding peptide
  MOD_RES (1)..(2)..(36): Xaa is C or S
  MOD_RES (16)..(17)..(18)..(19)..(20): Xaa is A or G
  MOD_RES (21)..(22)..(23)..(24): Xaa is A or G or is absent

SEQ ID NO: 80145 - protein, 36 aa, Artificial Sequence
  GFR-binding peptide
  MOD_RES (2)..(3): Xaa is C or S
  MOD_RES (17)..(18)..(19)..(20)..(21): Xaa is A or G
  MOD_RES (22)..(23)..(24)..(25): Xaa is A or G or is absent
AXXVPTKLSAISILYLXXXXXXXXXLKNYQGMAVSE

SEQ ID NO: 80146 - protein, 40 aa, Artificial Sequence; identical to SEQ ID NO: 8737
  GFR-binding peptide
  MOD_RES (6)..(7)..(39): Xaa is C or S

SEQ ID NO: 80147 - protein, 38 aa, Artificial Sequence
  GFR-binding peptide
  MOD_RES (1)..(2)..(36)..(38): Xaa is C or S
  MOD_RES (16)..(17)..(18)..(19)..(20): Xaa is A or G
  MOD_RES (21)..(22)..(23)..(24): Xaa is A or G or is absent
XXVPEKMSAISILYLXXXXXXXXXLKNYQNMTVESXAX

SEQ ID NO: 80148 - protein, 42 aa, Artificial Sequence; identical to SEQ ID NO: 8739
  GFR-binding peptide
  MOD_RES (6)..(7)..(41): Xaa is C or S
  MOD_RES (21)..(22)..(23)..(24)..(25): Xaa is A or G
  MOD_RES (26)..(27)..(28)..(29): Xaa is A or G or is absent

SEQ ID NO: 80149 - protein, 35 aa, Artificial Sequence; identical to SEQ ID NO: 6970
  GFR-binding peptide
  MOD_RES (1)..(2): Xaa is C or S
  MOD_RES (16)..(17)..(18)..(19)..(20): Xaa is A or G
  MOD_RES (21)..(22)..(23)..(24): Xaa is A or G or is absent

SEQ ID NO: 80150 - protein, 35 aa, Artificial Sequence; identical to SEQ ID NO: 8740
  GFR-binding peptide
  MOD_RES (1)..(33)..(35): Xaa is C or S

SEQ ID NO: 80151 - protein, 39 aa, Artificial Sequence; identical to SEQ ID NO: 58083
  GFR-binding peptide
  MOD_RES (5)..(6)..(39): Xaa is C or S
  MOD_RES (20)..(21)..(22)..(23)..(24): Xaa is A or G
  MOD_RES (25)..(26)..(27)..(28): Xaa is A or G or is absent

SEQ ID NO: 80152 - protein, 39 aa, Artificial Sequence; identical to SEQ ID NO: 8741
  GFR-binding peptide
  MOD_RES (5)..(6): Xaa is C or S
  MOD_RES (20)..(21)..(22)..(23)..(24): Xaa is A or G
  MOD_RES (25)..(26)..(27)..(28): Xaa is A or G or is absent

SEQ ID NO: 80153 - protein, 36 aa, Artificial Sequence; identical to SEQ ID NO: 6973
  GFR-binding peptide
  MOD_RES (34)..(36): Xaa is C or S
  MOD_RES (14)..(15)..(16)..(17)..(18): Xaa is A or G
  MOD_RES (19)..(20)..(21)..(22): Xaa is A or G or is absent

SEQ ID NO: 80154 - protein, 37 aa, Artificial Sequence; identical to SEQ ID NO: 6974
  GFR-binding peptide
  MOD_RES (2)..(3)..(35)..(37): Xaa is C or S

SEQ ID NO: 80155 - protein, 38 aa, Artificial Sequence; identical to SEQ ID NO: 6975
  GFR-binding peptide
  MOD_RES (4)..(5): Xaa is C or S
  MOD_RES (19)..(20)..(21)..(22)..(23): Xaa is A or G
  MOD_RES (24)..(25)..(26)..(27): Xaa is A or G or is absent

SEQ ID NO: 80156 - protein, 35 aa, Artificial Sequence
  GFR-binding peptide
  MOD_RES (2)..(3): Xaa is C or S
  MOD_RES (17)..(18)..(19)..(20)..(21): Xaa is A or G
  MOD_RES (22)..(23)..(24)..(25): Xaa is A or G or is absent
PXXTPTKMSAISMLYLXXXXXXXXXLKNYQGMVVD

SEQ ID NO: 80157 - protein, 40 aa, Artificial Sequence; identical to SEQ ID NO: 16037
  GFR-binding peptide
  MOD_RES (4)..(5)..(37)..(39): Xaa is C or S

SEQ ID NO: 80158 - protein, 32 aa, Artificial Sequence; identical to SEQ ID NO: 6976
  GFR-binding peptide
  MOD_RES (14)..(15)..(16)..(17)..(18): Xaa is A or G
  MOD_RES (19)..(20)..(21)..(22): Xaa is A or G or is absent

SEQ ID NO: 80159 - protein, 41 aa, Artificial Sequence; identical to SEQ ID NO: 8743
  GFR-binding peptide
  MOD_RES (5)..(6)..(39)..(41): Xaa is C or S
  MOD_RES (20)..(21)..(22)..(23)..(24): Xaa is A or G
  MOD_RES (25)..(26)..(27)..(28): Xaa is A or G or is absent

SEQ ID NO: 80160 - protein, 35 aa, Artificial Sequence
  GFR-binding peptide
  MOD_RES (2)..(3): Xaa is C or S
  MOD_RES (17)..(18)..(19)..(20)..(21): Xaa is A or G
  MOD_RES (22)..(23)..(24)..(25): Xaa is A or G or is absent
AXXVPTKLSAISILYLXXXXXXXXXLKNYQGMAVS

SEQ ID NO: 80161 - protein, 36 aa, Artificial Sequence; identical to SEQ ID NO: 8744
  GFR-binding peptide
  MOD_RES (5)..(6): Xaa is C or S

SEQ ID NO: 80162 - protein, 39 aa, Artificial Sequence
  GFR-binding peptide
  MOD_RES (4)..(5)..(37)..(39): Xaa is C or S
PEPXXVPEKMSAISILYLDENKNVVLKNYQNMTVESXAX

SEQ ID NO: 80163 - protein, 33 aa, Artificial Sequence; identical to SEQ ID NO: 6981
  GFR-binding peptide
  MOD_RES (1)..(1): Xaa is C or S
  MOD_RES (15)..(16)..(17)..(18)..(19): Xaa is A or G
  MOD_RES (20)..(21)..(22)..(23): Xaa is A or G or is absent

SEQ ID NO: 80164 - protein, 38 aa, Artificial Sequence; identical to SEQ ID NO: 8750
  GFR-binding peptide
  MOD_RES (2)..(3)..(37): Xaa is C or S
  MOD_RES (17)..(18)..(19)..(20)..(21): Xaa is A or G
  MOD_RES (22)..(23)..(24)..(25): Xaa is A or G or is absent

SEQ ID NO: 80165 - protein, 42 aa, Artificial Sequence; identical to SEQ ID NO: 8751
  GFR-binding peptide
  MOD_RES (6)..(7)..(39)..(41): Xaa is C or S

SEQ ID NO: 80166 - protein, 36 aa, Artificial Sequence
  GFR-binding peptide
  MOD_RES (1)..(34)..(36): Xaa is C or S
  MOD_RES (15)..(16)..(17)..(18)..(19): Xaa is A or G
  MOD_RES (20)..(21)..(22)..(23): Xaa is A or G or is absent
XAPVKTSAISMLYLXXXXXXXXXLKNYQMIVEEXGX

SEQ ID NO: 80167 - protein, 36 aa, Artificial Sequence; identical to SEQ ID NO: 58090
  GFR-binding peptide
  MOD_RES (1)..(33)..(35): Xaa is C or S

SEQ ID NO: 80168 - protein, 34 aa, Artificial Sequence; identical to SEQ ID NO: 6984
  GFR-binding peptide
  MOD_RES (3)..(4): Xaa is C or S

SEQ ID NO: 80169 - protein, 36 aa, Artificial Sequence; identical to SEQ ID NO: 8752
  GFR-binding peptide
  MOD_RES (3)..(4)..(36): Xaa is C or S

SEQ ID NO: 80170 - protein, 32 aa, Artificial Sequence; identical to SEQ ID NO: 58092
  GFR-binding peptide
  MOD_RES (1)..(2): Xaa is C or S

SEQ ID NO: 80171 - protein, 34 aa, Artificial Sequence; identical to SEQ ID NO: 16051
  GFR-binding peptide
  MOD_RES (1)..(2)..(34): Xaa is C or S

SEQ ID NO: 80172 - protein, 34 aa, Artificial Sequence
  GFR-binding peptide
  MOD_RES (31)..(33): Xaa is C or S
APVKTSAISMLYLDNGRVLLLKNYQMIVEEXGXL

SEQ ID NO: 80173 - protein, 31 aa, Artificial Sequence; identical to SEQ ID NO: 6986
  GFR-binding peptide
  MOD_RES (1)..(1): Xaa is C or S

SEQ ID NO: 80174 - protein, 32 aa, Artificial Sequence
  GFR-binding peptide
  MOD_RES (1)..(32): Xaa is C or S
XAPVKTSAISMLYLDNGRVLLLKNYQMIVEEX

SEQ ID NO: 80175 - protein, 41 aa, Artificial Sequence; identical to SEQ ID NO: 8753
  GFR-binding peptide
  MOD_RES (5)..(6)..(41): Xaa is C or S
  MOD_RES (20)..(21)..(22)..(23)..(24): Xaa is A or G
  MOD_RES (25)..(26)..(27)..(28): Xaa is A or G or is absent

SEQ ID NO: 80176 - protein, 35 aa, Artificial Sequence; identical to SEQ ID NO: 8757
  GFR-binding peptide
  MOD_RES (1)..(2)..(33)..(35): Xaa is C or S

SEQ ID NO: 80177 - protein, 40 aa, Artificial Sequence; identical to SEQ ID NO: 28163
  GFR-binding peptide
  MOD_RES (6)..(7): Xaa is C or S
  MOD_RES (21)..(22)..(23)..(24)..(25): Xaa is A or G
  MOD_RES (26)..(27)..(28)..(29): Xaa is A or G or is absent

SEQ ID NO: 80178 - protein, 35 aa, Artificial Sequence; identical to SEQ ID NO: 30107
  GFR-binding peptide
  MOD_RES (3)..(4): Xaa is C or S

SEQ ID NO: 80179 - protein, 37 aa, Artificial Sequence
  GFR-binding peptide
  MOD_RES (3)..(4)..(36): Xaa is C or S
EPXXVPEKMSAISILYLDENKNVVLKNYQNMTVESXA

SEQ ID NO: 80180 - protein, 36 aa, Artificial Sequence; identical to SEQ ID NO: 69374
  GFR-binding peptide
  MOD_RES (3)..(4): Xaa is C or S
  MOD_RES (18)..(19)..(20)..(21)..(22): Xaa is A or G
  MOD_RES (23)..(24)..(25)..(26): Xaa is A or G or is absent

SEQ ID NO: 80181 - protein, 42 aa, Artificial Sequence; identical to SEQ ID NO: 8761
  GFR-binding peptide
  MOD_RES (6)..(7)..(41): Xaa is C or S
  MOD_RES (21)..(22)..(23)..(24)..(25): Xaa is A or G
  MOD_RES (26)..(27)..(28)..(29): Xaa is A or G or is absent

SEQ ID NO: 80182 - protein, 39 aa, Artificial Sequence
  GFR-binding peptide
  MOD_RES (4)..(5)..(37)..(39): Xaa is C or S
SKAXXVPTKLSAISILYLDKGVVTYLKNYQGMAVSEXGX

SEQ ID NO: 80183 - protein, 38 aa, Artificial Sequence; identical to SEQ ID NO: 8762
  GFR-binding peptide
  MOD_RES (1)..(2)..(36)..(38): Xaa is C or S
  MOD_RES (16)..(17)..(18)..(19)..(20): Xaa is A or G
  MOD_RES (21)..(22)..(23)..(24): Xaa is A or G or is absent

SEQ ID NO: 80184 - protein, 38 aa, Artificial Sequence; identical to SEQ ID NO: 6993
  GFR-binding peptide
  MOD_RES (6)..(7): Xaa is C or S

SEQ ID NO: 80185 - protein, 38 aa, Artificial Sequence; identical to SEQ ID NO: 8763
  GFR-binding peptide
  MOD_RES (6)..(7): Xaa is C or S

SEQ ID NO: 80186 - protein, 34 aa, Artificial Sequence; identical to SEQ ID NO: 67656
  GFR-binding peptide
  MOD_RES (32)..(34): Xaa is C or S

SEQ ID NO: 80187 - protein, 34 aa, Artificial Sequence; identical to SEQ ID NO: 30119
  GFR-binding peptide
  MOD_RES (1)..(2)..(34): Xaa is C or S

SEQ ID NO: 80188 - protein, 36 aa, Artificial Sequence; identical to SEQ ID NO: 8768
  GFR-binding peptide
  MOD_RES (2)..(3): Xaa is C or S
  MOD_RES (17)..(18)..(19)..(20)..(21): Xaa is A or G
  MOD_RES (22)..(23)..(24)..(25): Xaa is A or G or is absent

SEQ ID NO: 80189 - protein, 33 aa, Artificial Sequence; identical to SEQ ID NO: 6998
  GFR-binding peptide
  MOD_RES (14)..(15)..(16)..(17)..(18): Xaa is A or G
  MOD_RES (19)..(20)..(21)..(22): Xaa is A or G or is absent

SEQ ID NO: 80190 - protein, 39 aa, Artificial Sequence
  GFR-binding peptide
  MOD_RES (5)..(6): Xaa is C or S
  MOD_RES (20)..(21)..(22)..(23)..(24): Xaa is A or G
  MOD_RES (25)..(26)..(27)..(28): Xaa is A or G or is absent
APASXXVPARLSAISILYLXXXXXXXXXLKNYQDMVVEA

SEQ ID NO: 80191 - protein, 38 aa, Artificial Sequence; identical to SEQ ID NO: 8772
  GFR-binding peptide
  MOD_RES (2)..(3)..(35)..(37): Xaa is C or S

SEQ ID NO: 80192 - protein, 36 aa, Artificial Sequence; identical to SEQ ID NO: 16070
  GFR-binding peptide
  MOD_RES (4)..(5): Xaa is C or S

SEQ ID NO: 80193 - protein, 36 aa, Artificial Sequence; identical to SEQ ID NO: 8778
  GFR-binding peptide
  MOD_RES (4)..(5)..(36): Xaa is C or S

SEQ ID NO: 80194 - protein, 36 aa, Artificial Sequence
  GFR-binding peptide
  MOD_RES (1)..(33)..(35): Xaa is C or S
XVPEKMSAISILYLDENKNVVLKNYQNMTVESXAXR

SEQ ID NO: 80195 - protein, 44 aa, Artificial Sequence
  GFR-binding peptide
  MOD_RES (6)..(7)..(41)..(43): Xaa is C or S
  MOD_RES (21)..(22)..(23)..(24)..(25): Xaa is A or G
  MOD_RES (26)..(27)..(28)..(29): Xaa is A or G or is absent
HVPKPXXAPTKLSAISVLYLXXXXXXXXXLKNYQNMVVRSXGXH

SEQ ID NO: 80196 - protein, 35 aa, Artificial Sequence; identical to SEQ ID NO: 58107
  GFR-binding peptide
  MOD_RES (1)..(33)..(35): Xaa is C or S

SEQ ID NO: 80197 - protein, 35 aa, Artificial Sequence; identical to SEQ ID NO: 7006
  GFR-binding peptide
  MOD_RES (33)..(35): Xaa is C or S
  MOD_RES (14)..(15)..(16)..(17)..(18): Xaa is A or G
  MOD_RES (19)..(20)..(21)..(22): Xaa is A or G or is absent

SEQ ID NO: 80198 - protein, 36 aa, Artificial Sequence; identical to SEQ ID NO: 7007
  GFR-binding peptide
  MOD_RES (1)..(2)..(33)..(35): Xaa is C or S

SEQ ID NO: 80199 - protein, 40 aa, Artificial Sequence; identical to SEQ ID NO: 7008
  GFR-binding peptide
  MOD_RES (3)..(4)..(37)..(39): Xaa is C or S

SEQ ID NO: 80200 - protein, 37 aa, Artificial Sequence
  GFR-binding peptide
  MOD_RES (1)..(2)..(34)..(36): Xaa is C or S
XXVPTKLSAISILYLDKGVVTYLKNYQGMAVSEXGXR

SEQ ID NO: 80201 - protein, 40 aa, Artificial Sequence; identical to SEQ ID NO: 58114
  GFR-binding peptide
  MOD_RES (6)..(7)..(38)..(40): Xaa is C or S

SEQ ID NO: 80202 - protein, 38 aa, Artificial Sequence; identical to SEQ ID NO: 8782
  GFR-binding peptide
  MOD_RES (3)..(4)..(38): Xaa is C or S
  MOD_RES (18)..(19)..(20)..(21)..(22): Xaa is A or G
  MOD_RES (23)..(24)..(25)..(26): Xaa is A or G or is absent

SEQ ID NO: 80203 - protein, 34 aa, Artificial Sequence; identical to SEQ ID NO: 7010
  GFR-binding peptide
  MOD_RES (2)..(3)..(34): Xaa is C or S

SEQ ID NO: 80204 - protein, 33 aa, Artificial Sequence; identical to SEQ ID NO: 7011
  GFR-binding peptide
  MOD_RES (1)..(1): Xaa is C or S
  MOD_RES (15)..(16)..(17)..(18)..(19): Xaa is A or G
  MOD_RES (20)..(21)..(22)..(23): Xaa is A or G or is absent

SEQ ID NO: 80205 - protein, 38 aa, Artificial Sequence; identical to SEQ ID NO: 8783
  GFR-binding peptide
  MOD_RES (5)..(6): Xaa is C or S
  MOD_RES (20)..(21)..(22)..(23)..(24): Xaa is A or G
  MOD_RES (25)..(26)..(27)..(28): Xaa is A or G or is absent

SEQ ID NO: 80206 - protein, 35 aa, Artificial Sequence; identical to SEQ ID NO: 8784
  GFR-binding peptide
  MOD_RES (5)..(5): Xaa is C or S

SEQ ID NO: 80207 - protein, 30 aa, Artificial Sequence; identical to SEQ ID NO: 8785
  GFR-binding peptide

SEQ ID NO: 80208 - protein, 34 aa, Artificial Sequence
  GFR-binding peptide
  MOD_RES (32)..(34): Xaa is C or S
VPARLSAISILYLDAANNVVLKNYQDMVVEAXGX

SEQ ID NO: 80209 - protein, 35 aa, Artificial Sequence; identical to SEQ ID NO: 14348
  GFR-binding peptide
  MOD_RES (1)..(33)..(35): Xaa is C or S

SEQ ID NO: 80210 - protein, 39 aa, Artificial Sequence; identical to SEQ ID NO: 7015
  GFR-binding peptide
  MOD_RES (3)..(4)..(37)..(39): Xaa is C or S
  MOD_RES (18)..(19)..(20)..(21)..(22): Xaa is A or G
  MOD_RES (23)..(24)..(25)..(26): Xaa is A or G or is absent

SEQ ID NO: 80211 - protein, 37 aa, Artificial Sequence; identical to SEQ ID NO: 7017
  GFR-binding peptide
  MOD_RES (1)..(2)..(34)..(36): Xaa is C or S

SEQ ID NO: 80212 - protein, 37 aa, Artificial Sequence
  GFR-binding peptide
  MOD_RES (34)..(36): Xaa is C or S
  MOD_RES (14)..(15)..(16)..(17)..(18): Xaa is A or G
  MOD_RES (19)..(20)..(21)..(22): Xaa is A or G or is absent
VPEKMSAISILYLXXXXXXXXXLKNYQNMTVESXAXR

SEQ ID NO: 80213 - protein, 40 aa, Artificial Sequence; identical to SEQ ID NO: 16084
  GFR-binding peptide
  MOD_RES (5)..(6)..(38)..(40): Xaa is C or S

SEQ ID NO: 80214 - protein, 36 aa, Artificial Sequence; identical to SEQ ID NO: 30139
  GFR-binding peptide
  MOD_RES (2)..(3)..(35): Xaa is C or S

SEQ ID NO: 80215 - protein, 36 aa, Artificial Sequence; identical to SEQ ID NO: 7018
  GFR-binding peptide
  MOD_RES (2)..(3)..(36): Xaa is C or S

SEQ ID NO: 80216 - protein, 34 aa, Artificial Sequence; identical to SEQ ID NO: 28197
  GFR-binding peptide
  MOD_RES (1)..(33): Xaa is C or S

SEQ ID NO: 80217 - protein, 35 aa, Artificial Sequence
  GFR-binding peptide
  MOD_RES (4)..(5): Xaa is C or S
PSTXXAPVKTSAISMLYLDNGRVLLLKNYQMIVEE

SEQ ID NO: 80218 - protein, 35 aa, Artificial Sequence; identical to SEQ ID NO: 8792
  GFR-binding peptide
  MOD_RES (33)..(35): Xaa is C or S

SEQ ID NO: 80219 - protein, 36 aa, Artificial Sequence; identical to SEQ ID NO: 8793
  GFR-binding peptide
  MOD_RES (5)..(6): Xaa is C or S

SEQ ID NO: 80220 - protein, 34 aa, Artificial Sequence; identical to SEQ ID NO: 7020
  GFR-binding peptide
  MOD_RES (34)..(34): Xaa is C or S
  MOD_RES (14)..(15)..(16)..(17)..(18): Xaa is A or G
  MOD_RES (19)..(20)..(21)..(22): Xaa is A or G or is absent

SEQ ID NO: 80221 - protein, 41 aa, Artificial Sequence; identical to SEQ ID NO: 7021
  GFR-binding peptide
  MOD_RES (4)..(38)..(40): Xaa is C or S
  MOD_RES (18)..(19)..(20)..(21)..(22): Xaa is A or G
  MOD_RES (23)..(24)..(25)..(26): Xaa is A or G or is absent

SEQ ID NO: 80222 - protein, 32 aa, Artificial Sequence; identical to SEQ ID NO: 8795
  GFR-binding peptide
  MOD_RES (1)..(2): Xaa is C or S

SEQ ID NO: 80223 - protein, 43 aa, Artificial Sequence; identical to SEQ ID NO: 16089
  GFR-binding peptide
  MOD_RES (5)..(6)..(40)..(42): Xaa is C or S
  MOD_RES (20)..(21)..(22)..(23)..(24): Xaa is A or G
  MOD_RES (25)..(26)..(27)..(28): Xaa is A or G or is absent

SEQ ID NO: 80224 - protein, 37 aa, Artificial Sequence
  GFR-binding peptide
  MOD_RES (3)..(4)..(36): Xaa is C or S
KAXXVPTKLSAISILYLDKGVVTYLKNYQGMAVSEXG

SEQ ID NO: 80225 - protein, 39 aa, Artificial Sequence; identical to SEQ ID NO: 16090
  GFR-binding peptide
  MOD_RES (5)..(6)..(38): Xaa is C or S

SEQ ID NO: 80226 - protein, 36 aa, Artificial Sequence; identical to SEQ ID NO: 7025
  GFR-binding peptide
  MOD_RES (1)..(2)..(34)..(36): Xaa is C or S

SEQ ID NO: 80227 - protein, 42 aa, Artificial Sequence; identical to SEQ ID NO: 7026
  GFR-binding peptide
  MOD_RES (4)..(5)..(39)..(41): Xaa is C or S
  MOD_RES (19)..(20)..(21)..(22)..(23): Xaa is A or G
  MOD_RES (24)..(25)..(26)..(27): Xaa is A or G or is absent

SEQ ID NO: 80228 - protein, 35 aa, Artificial Sequence; identical to SEQ ID NO: 66001
  GFR-binding peptide
  MOD_RES (34)..(34): Xaa is C or S
  MOD_RES (14)..(15)..(16)..(17)..(18): Xaa is A or G
  MOD_RES (19)..(20)..(21)..(22): Xaa is A or G or is absent

SEQ ID NO: 80229 - protein, 34 aa, Artificial Sequence; identical to SEQ ID NO: 7028
  GFR-binding peptide
  MOD_RES (1)..(34): Xaa is C or S
  MOD_RES (15)..(16)..(17)..(18)..(19): Xaa is A or G
  MOD_RES (20)..(21)..(22)..(23): Xaa is A or G or is absent

SEQ ID NO: 80230 - protein, 41 aa, Artificial Sequence; identical to SEQ ID NO: 7031
  GFR-binding peptide
  MOD_RES (5)..(6)..(39)..(41): Xaa is C or S
  MOD_RES (20)..(21)..(22)..(23)..(24): Xaa is A or G
  MOD_RES (25)..(26)..(27)..(28): Xaa is A or G or is absent

SEQ ID NO: 80231 - protein, 36 aa, Artificial Sequence; identical to SEQ ID NO: 8800
  GFR-binding peptide
  MOD_RES (3)..(4): Xaa is C or S
  MOD_RES (18)..(19)..(20)..(21)..(22): Xaa is A or G
  MOD_RES (23)..(24)..(25)..(26): Xaa is A or G or is absent

SEQ ID NO: 80232 - protein, 39 aa, Artificial Sequence; identical to SEQ ID NO: 30153
  GFR-binding peptide
  MOD_RES (3)..(4)..(36)..(38): Xaa is C or S

SEQ ID NO: 80233 - protein, 34 aa, Artificial Sequence; identical to SEQ ID NO: 8802
  GFR-binding peptide
  MOD_RES (1)..(2): Xaa is C or S
  MOD_RES (16)..(17)..(18)..(19)..(20): Xaa is A or G
  MOD_RES (21)..(22)..(23)..(24): Xaa is A or G or is absent

SEQ ID NO: 80234 - protein, 42 aa, Artificial Sequence; identical to SEQ ID NO: 7037
  GFR-binding peptide
  MOD_RES (6)..(40)..(42): Xaa is C or S
  MOD_RES (20)..(21)..(22)..(23)..(24): Xaa is A or G
  MOD_RES (25)..(26)..(27)..(28): Xaa is A or G or is absent

SEQ ID NO: 80235 - protein, 38 aa, Artificial Sequence; identical to SEQ ID NO: 7039
  GFR-binding peptide
  MOD_RES (5)..(6): Xaa is C or S

SEQ ID NO: 80236 - protein, 44 aa, Artificial Sequence; identical to SEQ ID NO: 8808
  GFR-binding peptide
  MOD_RES (6)..(7)..(41)..(43): Xaa is C or S
  MOD_RES (21)..(22)..(23)..(24)..(25): Xaa is A or G
  MOD_RES (26)..(27)..(28)..(29): Xaa is A or G or is absent

SEQ ID NO: 80237 - protein, 42 aa, Artificial Sequence; identical to SEQ ID NO: 8809
  GFR-binding peptide
  MOD_RES (5)..(6)..(39)..(41): Xaa is C or S
  MOD_RES (20)..(21)..(22)..(23)..(24): Xaa is A or G
  MOD_RES (25)..(26)..(27)..(28): Xaa is A or G or is absent

SEQ ID NO: 80238 - protein, 37 aa, Artificial Sequence; identical to SEQ ID NO: 8810
  GFR-binding peptide
  MOD_RES (5)..(6): Xaa is C or S

SEQ ID NO: 80239 - protein, 39 aa, Artificial Sequence; identical to SEQ ID NO: 7043
  GFR-binding peptide
  MOD_RES (5)..(6): Xaa is C or S
  MOD_RES (20)..(21)..(22)..(23)..(24): Xaa is A or G
  MOD_RES (25)..(26)..(27)..(28): Xaa is A or G or is absent

SEQ ID NO: 80240 - protein, 34 aa, Artificial Sequence; identical to SEQ ID NO: 7044
  GFR-binding peptide
  MOD_RES (1)..(2): Xaa is C or S
  MOD_RES (16)..(17)..(18)..(19)..(20): Xaa is A or G
  MOD_RES (21)..(22)..(23)..(24): Xaa is A or G or is absent

SEQ ID NO: 80241 - protein, 40 aa, Artificial Sequence; identical to SEQ ID NO: 7045
  GFR-binding peptide
  MOD_RES (4)..(5)..(37)..(39): Xaa is C or S

SEQ ID NO: 80242 - protein, 43 aa, Artificial Sequence; identical to SEQ ID NO: 8813
  GFR-binding peptide
  MOD_RES (6)..(7)..(41)..(43): Xaa is C or S
  MOD_RES (21)..(22)..(23)..(24)..(25): Xaa is A or G
  MOD_RES (26)..(27)..(28)..(29): Xaa is A or G or is absent

SEQ ID NO: 80243 - protein, 32 aa, Artificial Sequence; identical to SEQ ID NO: 8814
  GFR-binding peptide
  MOD_RES (14)..(15)..(16)..(17)..(18): Xaa is A or G
  MOD_RES (19)..(20)..(21)..(22): Xaa is A or G or is absent

SEQ ID NO: 80244 - protein, 37 aa, Artificial Sequence; identical to SEQ ID NO: 7046
  GFR-binding peptide
  MOD_RES (3)..(37): Xaa is C or S
  MOD_RES (17)..(18)..(19)..(20)..(21): Xaa is A or G
  MOD_RES (22)..(23)..(24)..(25): Xaa is A or G or is absent

SEQ ID NO: 80245 - protein, 40 aa, Artificial Sequence; identical to SEQ ID NO: 30166
  GFR-binding peptide
  MOD_RES (2)..(3)..(37)..(39): Xaa is C or S
  MOD_RES (17)..(18)..(19)..(20)..(21): Xaa is A or G
  MOD_RES (22)..(23)..(24)..(25): Xaa is A or G or is absent

SEQ ID NO: 80246 - protein, 36 aa, Artificial Sequence
  GFR-binding peptide
  MOD_RES (2)..(3)..(35): Xaa is C or S
PXXTPTKMSAISMLYLNDKQQIILKNYQGMVVDRXG

SEQ ID NO: 80247 - protein, 39 aa, Artificial Sequence; identical to SEQ ID NO: 16116
  GFR-binding peptide
  MOD_RES (6)..(7)..(39): Xaa is C or S

SEQ ID NO: 80248 - protein, 38 aa, Artificial Sequence; identical to SEQ ID NO: 8816
  GFR-binding peptide
  MOD_RES (4)..(5)..(37): Xaa is C or S

SEQ ID NO: 80249 - protein, 33 aa, Artificial Sequence; identical to SEQ ID NO: 8817
  GFR-binding peptide
  MOD_RES (14)..(15)..(16)..(17)..(18): Xaa is A or G
  MOD_RES (19)..(20)..(21)..(22): Xaa is A or G or is absent

SEQ ID NO: 80250 - protein, 32 aa, Artificial Sequence; identical to SEQ ID NO: 8818
  GFR-binding peptide
  MOD_RES (32)..(32): Xaa is C or S

SEQ ID NO: 80251 - protein, 40 aa, Artificial Sequence; identical to SEQ ID NO: 8819
  GFR-binding peptide
  MOD_RES (2)..(3)..(37)..(39): Xaa is C or S
  MOD_RES (17)..(18)..(19)..(20)..(21): Xaa is A or G
  MOD_RES (22)..(23)..(24)..(25): Xaa is A or G or is absent

SEQ ID NO: 80252 - protein, 37 aa, Artificial Sequence; identical to SEQ ID NO: 14374
  GFR-binding peptide
  MOD_RES (4)..(5)..(37): Xaa is C or S

SEQ ID NO: 80253 - protein, 36 aa, Artificial Sequence; identical to SEQ ID NO: 71086
  GFR-binding peptide
  MOD_RES (4)..(5): Xaa is C or S

SEQ ID NO: 80254 - protein, 39 aa, Artificial Sequence; identical to SEQ ID NO: 14375
  GFR-binding peptide
  MOD_RES (6)..(7): Xaa is C or S
  MOD_RES (21)..(22)..(23)..(24)..(25): Xaa is A or G
  MOD_RES (26)..(27)..(28)..(29): Xaa is A or G or is absent

SEQ ID NO: 80255 - protein, 38 aa, Artificial Sequence
  GFR-binding peptide
  MOD_RES (4)..(5)..(36)..(38): Xaa is C or S
PSTXXAPVKTSAISMLYLDNGRVLLLKNYQMIVEEXGX

SEQ ID NO: 80256 - protein, 32 aa, Artificial Sequence; identical to SEQ ID NO: 28230
  GFR-binding peptide
  MOD_RES (1)..(1): Xaa is C or S

SEQ ID NO: 80257 - protein, 36 aa, Artificial Sequence; identical to SEQ ID NO: 58158
  GFR-binding peptide
  MOD_RES (1)..(2)..(36): Xaa is C or S
  MOD_RES (16)..(17)..(18)..(19)..(20): Xaa is A or G
  MOD_RES (21)..(22)..(23)..(24): Xaa is A or G or is absent

SEQ ID NO: 80258 - protein, 30 aa, Artificial Sequence
  GFR-binding peptide
VPEKMSAISILYLDENKNVVLKNYQNMTVE

SEQ ID NO: 80259 - protein, 35 aa, Artificial Sequence; identical to SEQ ID NO: 7052
  GFR-binding peptide
  MOD_RES (1)..(2)..(35): Xaa is C or S

SEQ ID NO: 80260 - protein, 40 aa, Artificial Sequence; identical to SEQ ID NO: 7053
  GFR-binding peptide
  MOD_RES (5)..(6)..(38)..(40): Xaa is C or S

SEQ ID NO: 80261 - protein, 40 aa, Artificial Sequence
  GFR-binding peptide
  MOD_RES (6)..(7)..(39): Xaa is C or S
GIPEPXXVPEKMSAISILYLDENKNVVLKNYQNMTVESXA

SEQ ID NO: 80262 - protein, 37 aa, Artificial Sequence; identical to SEQ ID NO: 7055
  GFR-binding peptide
  MOD_RES (1)..(2)..(36): Xaa is C or S
  MOD_RES (16)..(17)..(18)..(19)..(20): Xaa is A or G
  MOD_RES (21)..(22)..(23)..(24): Xaa is A or G or is absent

SEQ ID NO: 80263 - protein, 33 aa, Artificial Sequence; identical to SEQ ID NO: 69428
  GFR-binding peptide
  MOD_RES (1)..(33): Xaa is C or S

SEQ ID NO: 80264 - protein, 34 aa, Artificial Sequence
  GFR-binding peptide
  MOD_RES (1)..(2): Xaa is C or S
  MOD_RES (16)..(17)..(18)..(19)..(20): Xaa is A or G
  MOD_RES (21)..(22)..(23)..(24): Xaa is A or G or is absent
XXVPTKLSAISILYLXXXXXXXXXLKNYQGMAVS

SEQ ID NO: 80265 - protein, 37 aa, Artificial Sequence; identical to SEQ ID NO: 8820
  GFR-binding peptide
  MOD_RES (6)..(7): Xaa is C or S

SEQ ID NO: 80266 - protein, 33 aa, Artificial Sequence
  GFR-binding peptide
  MOD_RES (32)..(32): Xaa is C or S
VPEKMSAISILYLDENKNVVLKNYQNMTVESXA

SEQ ID NO: 80267 - protein, 40 aa, Artificial Sequence; identical to SEQ ID NO: 16128
  GFR-binding peptide
  MOD_RES (3)..(4)..(38)..(40): Xaa is C or S
  MOD_RES (18)..(19)..(20)..(21)..(22): Xaa is A or G
  MOD_RES (23)..(24)..(25)..(26): Xaa is A or G or is absent

SEQ ID NO: 80268 - protein, 34 aa, Artificial Sequence; identical to SEQ ID NO: 69433
  GFR-binding peptide
  MOD_RES (1)..(2)..(34): Xaa is C or S

SEQ ID NO: 80269 - protein, 39 aa, Artificial Sequence; identical to SEQ ID NO: 8823
  GFR-binding peptide
  MOD_RES (6)..(7)..(39): Xaa is C or S

SEQ ID NO: 80270 - protein, 36 aa, Artificial Sequence; identical to SEQ ID NO: 8824
  GFR-binding peptide
  MOD_RES (1)..(2)..(33)..(35): Xaa is C or S

SEQ ID NO: 80271 - protein, 43 aa, Artificial Sequence; identical to SEQ ID NO: 7061
  GFR-binding peptide
  MOD_RES (6)..(7)..(40)..(42): Xaa is C or S
  MOD_RES (21)..(22)..(23)..(24)..(25): Xaa is A or G
  MOD_RES (26)..(27)..(28)..(29): Xaa is A or G or is absent

SEQ ID NO: 80272 - protein, 42 aa, Artificial Sequence; identical to SEQ ID NO: 7063
  GFR-binding peptide
  MOD_RES (6)..(7)..(39)..(41): Xaa is C or S

SEQ ID NO: 80273 - protein, 37 aa, Artificial Sequence; identical to SEQ ID NO: 8825
  GFR-binding peptide
  MOD_RES (3)..(4): Xaa is C or S
  MOD_RES (18)..(19)..(20)..(21)..(22): Xaa is A or G
  MOD_RES (23)..(24)..(25)..(26): Xaa is A or G or is absent

SEQ ID NO: 80274 - protein, 41 aa, Artificial Sequence; identical to SEQ ID NO: 8826
  GFR-binding peptide
  MOD_RES (4)..(5)..(39)..(41): Xaa is C or S
  MOD_RES (19)..(20)..(21)..(22)..(23): Xaa is A or G
  MOD_RES (24)..(25)..(26)..(27): Xaa is A or G or is absent

SEQ ID NO: 80275 - protein, 34 aa, Artificial Sequence; identical to SEQ ID NO: 7066
  GFR-binding peptide
  MOD_RES (34)..(34): Xaa is C or S
  MOD_RES (14)..(15)..(16)..(17)..(18): Xaa is A or G
  MOD_RES (19)..(20)..(21)..(22): Xaa is A or G or is absent

SEQ ID NO: 80276 - protein, 41 aa, Artificial Sequence; identical to SEQ ID NO: 8827
  GFR-binding peptide
  MOD_RES (5)..(6)..(40): Xaa is C or S
  MOD_RES (20)..(21)..(22)..(23)..(24): Xaa is A or G
  MOD_RES (25)..(26)..(27)..(28): Xaa is A or G or is absent

SEQ ID NO: 80277 - protein, 31 aa, Artificial Sequence; identical to SEQ ID NO: 8828
  GFR-binding peptide
  MOD_RES (1)..(1): Xaa is C or S

SEQ ID NO: 80278 - protein, 36 aa, Artificial Sequence
  GFR-binding peptide
  MOD_RES (2)..(3): Xaa is C or S
  MOD_RES (17)..(18)..(19)..(20)..(21): Xaa is A or G
  MOD_RES (22)..(23)..(24)..(25): Xaa is A or G or is absent
PXXTPTKMSAISMLYLXXXXXXXXXLKNYQGMVVDR

SEQ ID NO: 80279 - protein, 33 aa, Artificial Sequence; identical to SEQ ID NO: 16137
  GFR-binding peptide
  MOD_RES (2)..(3): Xaa is C or S

SEQ ID NO: 80280 - protein, 38 aa, Artificial Sequence; identical to SEQ ID NO: 8829
  GFR-binding peptide
  MOD_RES (6)..(7): Xaa is C or S

SEQ ID NO: 80281 - protein, 42 aa, Artificial Sequence; identical to SEQ ID NO: 7070
  GFR-binding peptide
  MOD_RES (4)..(5)..(39)..(41): Xaa is C or S
  MOD_RES (19)..(20)..(21)..(22)..(23): Xaa is A or G
  MOD_RES (24)..(25)..(26)..(27): Xaa is A or G or is absent

SEQ ID NO: 80282 - protein, 36 aa, Artificial Sequence
  GFR-binding peptide
  MOD_RES (5)..(6): Xaa is C or S
VPSTXXAPVKTSAISMLYLDNGRVLLLKNYQMIVEE

SEQ ID NO: 80283 - protein, 36 aa, Artificial Sequence; identical to SEQ ID NO: 8830
  GFR-binding peptide
  MOD_RES (2)..(3)..(35): Xaa is C or S

SEQ ID NO: 80284 - protein, 39 aa, Artificial Sequence
  GFR-binding peptide
  MOD_RES (4)..(5)..(39): Xaa is C or S
  MOD_RES (19)..(20)..(21)..(22)..(23): Xaa is A or G
  MOD_RES (24)..(25)..(26)..(27): Xaa is A or G or is absent
AGPXXTPTKMSAISMLYLXXXXXXXXXLKNYQGMVVDRX

SEQ ID NO: 80285 - protein, 33 aa, Artificial Sequence; identical to SEQ ID NO: 7073
  GFR-binding peptide
  MOD_RES (1)..(2)..(33): Xaa is C or S

SEQ ID NO: 80286 - protein, 42 aa, Artificial Sequence; identical to SEQ ID NO: 8834
  GFR-binding peptide
  MOD_RES (7)..(41): Xaa is C or S
  MOD_RES (21)..(22)..(23)..(24)..(25): Xaa is A or G
  MOD_RES (26)..(27)..(28)..(29): Xaa is A or G or is absent

SEQ ID NO: 80287 - protein, 36 aa, Artificial Sequence; identical to SEQ ID NO: 30195
  GFR-binding peptide
  MOD_RES (1)..(2)..(34)..(36): Xaa is C or S

SEQ ID NO: 80288 - protein, 33 aa, Artificial Sequence; identical to SEQ ID NO: 58172
  GFR-binding peptide
  MOD_RES (1)..(1): Xaa is C or S
  MOD_RES (15)..(16)..(17)..(18)..(19): Xaa is A or G
  MOD_RES (20)..(21)..(22)..(23): Xaa is A or G or is absent

SEQ ID NO: 80289 - protein, 38 aa, Artificial Sequence; identical to SEQ ID NO: 8838
  GFR-binding peptide
  MOD_RES (5)..(6): Xaa is C or S
  MOD_RES (20)..(21)..(22)..(23)..(24): Xaa is A or G
  MOD_RES (25)..(26)..(27)..(28): Xaa is A or G or is absent

SEQ ID NO: 80290 - protein, 33 aa, Artificial Sequence; identical to SEQ ID NO: 7076
  GFR-binding peptide
  MOD_RES (1)..(1): Xaa is C or S

SEQ ID NO: 80291 - protein, 43 aa, Artificial Sequence; identical to SEQ ID NO: 8839
  GFR-binding peptide
  MOD_RES (6)..(40)..(42): Xaa is C or S
  MOD_RES (20)..(21)..(22)..(23)..(24): Xaa is A or G
  MOD_RES (25)..(26)..(27)..(28): Xaa is A or G or is absent

SEQ ID NO: 80292 - protein, 37 aa, Artificial Sequence; identical to SEQ ID NO: 58174
  GFR-binding peptide
  MOD_RES (1)..(2)..(35)..(37): Xaa is C or S
  MOD_RES (16)..(17)..(18)..(19)..(20): Xaa is A or G
  MOD_RES (21)..(22)..(23)..(24): Xaa is A or G or is absent

SEQ ID NO: 80293 - protein, 33 aa, Artificial Sequence; identical to SEQ ID NO: 7080
  GFR-binding peptide
  MOD_RES (2)..(3): Xaa is C or S

SEQ ID NO: 80294 - protein, 41 aa, Artificial Sequence; identical to SEQ ID NO: 8841
  GFR-binding peptide
  MOD_RES (3)..(4)..(38)..(40): Xaa is C or S
  MOD_RES (18)..(19)..(20)..(21)..(22): Xaa is A or G
  MOD_RES (23)..(24)..(25)..(26): Xaa is A or G or is absent

SEQ ID NO: 80295 - protein, 37 aa, Artificial Sequence; identical to SEQ ID NO: 8842
  GFR-binding peptide
  MOD_RES (3)..(4): Xaa is C or S
  MOD_RES (18)..(19)..(20)..(21)..(22): Xaa is A or G
  MOD_RES (23)..(24)..(25)..(26): Xaa is A or G or is absent

SEQ ID NO: 80296 - protein, 33 aa, Artificial Sequence; identical to SEQ ID NO: 7082
  GFR-binding peptide
  MOD_RES (2)..(3): Xaa is C or S

SEQ ID NO: 80297 - protein, 38 aa, Artificial Sequence; identical to SEQ ID NO: 58177
  GFR-binding peptide
  MOD_RES (2)..(3)..(35)..(37): Xaa is C or S

SEQ ID NO: 80298 - protein, 32 aa, Artificial Sequence; identical to SEQ ID NO: 8845
  GFR-binding peptide
  MOD_RES (1)..(2): Xaa is C or S

SEQ ID NO: 80299 - protein, 31 aa, Artificial Sequence
  GFR-binding peptide
  MOD_RES (31)..(31): Xaa is C or S
APVKTSAISMLYLDNGRVLLLKNYQMIVEEX

SEQ ID NO: 80300 - protein, 30 aa, Artificial Sequence; identical to SEQ ID NO: 8847
  GFR-binding peptide

SEQ ID NO: 80301 - protein, 32 aa, Artificial Sequence; identical to SEQ ID NO: 7087
  GFR-binding peptide
  MOD_RES (31)..(31): Xaa is C or S

SEQ ID NO: 80302 - protein, 41 aa, Artificial Sequence
  GFR-binding peptide
  MOD_RES (5)..(6)..(39)..(41): Xaa is C or S
  MOD_RES (20)..(21)..(22)..(23)..(24): Xaa is A or G
  MOD_RES (25)..(26)..(27)..(28): Xaa is A or G or is absent
VPSTXXAPVKTSAISMLYLXXXXXXXXXLKNYQMIVEEXGX

SEQ ID NO: 80303 - protein, 43 aa, Artificial Sequence
  GFR-binding peptide
  MOD_RES (6)..(7)..(41)..(43): Xaa is C or S
  MOD_RES (21)..(22)..(23)..(24)..(25): Xaa is A or G
  MOD_RES (26)..(27)..(28)..(29): Xaa is A or G or is absent
AAPASXXVPARLSAISILYLXXXXXXXXXLKNYQDMVVEAXGX

SEQ ID NO: 80304 - protein, 35 aa, Artificial Sequence; identical to SEQ ID NO: 7088
  GFR-binding peptide
  MOD_RES (1)..(35): Xaa is C or S
  MOD_RES (15)..(16)..(17)..(18)..(19): Xaa is A or G
  MOD_RES (20)..(21)..(22)..(23): Xaa is A or G or is absent

SEQ ID NO: 80305 - protein, 41 aa, Artificial Sequence; identical to SEQ ID NO: 14403
  GFR-binding peptide
  MOD_RES (3)..(4)..(38)..(40): Xaa is C or S
  MOD_RES (18)..(19)..(20)..(21)..(22): Xaa is A or G
  MOD_RES (23)..(24)..(25)..(26): Xaa is A or G or is absent

SEQ ID NO: 80306 - protein, 39 aa, Artificial Sequence; identical to SEQ ID NO: 7090
  GFR-binding peptide
  MOD_RES (3)..(4)..(37)..(39): Xaa is C or S
  MOD_RES (18)..(19)..(20)..(21)..(22): Xaa is A or G
  MOD_RES (23)..(24)..(25)..(26): Xaa is A or G or is absent

SEQ ID NO: 80307 - protein, 34 aa, Artificial Sequence; identical to SEQ ID NO: 8851
  GFR-binding peptide
  MOD_RES (1)..(2): Xaa is C or S
  MOD_RES (16)..(17)..(18)..(19)..(20): Xaa is A or G
  MOD_RES (21)..(22)..(23)..(24): Xaa is A or G or is absent

SEQ ID NO: 80308 - protein, 37 aa, Artificial Sequence; identical to SEQ ID NO: 58189
  GFR-binding peptide
  MOD_RES (4)..(5): Xaa is C or S
  MOD_RES (19)..(20)..(21)..(22)..(23): Xaa is A or G
  MOD_RES (24)..(25)..(26)..(27): Xaa is A or G or is absent

SEQ ID NO: 80309 - protein, 36 aa, Artificial Sequence; identical to SEQ ID NO: 7091
  GFR-binding peptide
  MOD_RES (1)..(33)..(35): Xaa is C or S

SEQ ID NO: 80310 - protein, 33 aa, Artificial Sequence; identical to SEQ ID NO: 8854
  GFR-binding peptide
  MOD_RES (14)..(15)..(16)..(17)..(18): Xaa is A or G
  MOD_RES (19)..(20)..(21)..(22): Xaa is A or G or is absent

SEQ ID NO: 80311 - protein, 39 aa, Artificial Sequence
  GFR-binding peptide
  MOD_RES (5)..(6): Xaa is C or S
  MOD_RES (20)..(21)..(22)..(23)..(24): Xaa is A or G
  MOD_RES (25)..(26)..(27)..(28): Xaa is A or G or is absent
IPEPXXVPEKMSAISILYLXXXXXXXXXLKNYQNMTVES

SEQ ID NO: 80312 - protein, 32 aa, Artificial Sequence; identical to SEQ ID NO: 58192
  GFR-binding peptide
  MOD_RES (14)..(15)..(16)..(17)..(18): Xaa is A or G
  MOD_RES (19)..(20)..(21)..(22): Xaa is A or G or is absent

SEQ ID NO: 80313 - protein, 32 aa, Artificial Sequence; identical to SEQ ID NO: 7094
  GFR-binding peptide
  MOD_RES (14)..(15)..(16)..(17)..(18): Xaa is A or G
  MOD_RES (19)..(20)..(21)..(22): Xaa is A or G or is absent

SEQ ID NO: 80314 - protein, 40 aa, Artificial Sequence
  GFR-binding peptide
  MOD_RES (3)..(4)..(38)..(40): Xaa is C or S
  MOD_RES (18)..(19)..(20)..(21)..(22): Xaa is A or G
  MOD_RES (23)..(24)..(25)..(26): Xaa is A or G or is absent
KAXXVPTKLSAISILYLXXXXXXXXXLKNYQGMAVSEXGX

SEQ ID NO: 80315 - protein, 35 aa, Artificial Sequence; identical to SEQ ID NO: 8857
  GFR-binding peptide
  MOD_RES (1)..(35): Xaa is C or S
  MOD_RES (15)..(16)..(17)..(18)..(19): Xaa is A or G
  MOD_RES (20)..(21)..(22)..(23): Xaa is A or G or is absent

SEQ ID NO: 80316 - protein, 41 aa, Artificial Sequence; identical to SEQ ID NO: 58194
  GFR-binding peptide
  MOD_RES (3)..(4)..(38)..(40): Xaa is C or S
  MOD_RES (18)..(19)..(20)..(21)..(22): Xaa is A or G
  MOD_RES (23)..(24)..(25)..(26): Xaa is A or G or is absent

SEQ ID NO: 80317 - protein, 36 aa, Artificial Sequence; identical to SEQ ID NO: 8858
  GFR-binding peptide
  MOD_RES (3)..(4)..(35): Xaa is C or S

SEQ ID NO: 80318 - protein, 37 aa, Artificial Sequence
  GFR-binding peptide
  MOD_RES (4)..(5): Xaa is C or S
  MOD_RES (19)..(20)..(21)..(22)..(23): Xaa is A or G
  MOD_RES (24)..(25)..(26)..(27): Xaa is A or G or is absent
PASXXVPARLSAISILYLXXXXXXXXXLKNYQDMVVE

SEQ ID NO: 80319 - protein, 35 aa, Artificial Sequence; identical to SEQ ID NO: 14419
  GFR-binding peptide
  MOD_RES (4)..(5): Xaa is C or S

SEQ ID NO: 80320 - protein, 32 aa, Artificial Sequence; identical to SEQ ID NO: 8861
  GFR-binding peptide

SEQ ID NO: 80321 - protein, 42 aa, Artificial Sequence; identical to SEQ ID NO: 7099
  GFR-binding peptide
  MOD_RES (6)..(7)..(39)..(41): Xaa is C or S

SEQ ID NO: 80322 - protein, 40 aa, Artificial Sequence; identical to SEQ ID NO: 8863
  GFR-binding peptide
  MOD_RES (3)..(4)..(38)..(40): Xaa is C or S
  MOD_RES (18)..(19)..(20)..(21)..(22): Xaa is A or G
  MOD_RES (23)..(24)..(25)..(26): Xaa is A or G or is absent

SEQ ID NO: 80323 - protein, 42 aa, Artificial Sequence; identical to SEQ ID NO: 7101
  GFR-binding peptide
  MOD_RES (5)..(6)..(40)..(42): Xaa is C or S
  MOD_RES (20)..(21)..(22)..(23)..(24): Xaa is A or G
  MOD_RES (25)..(26)..(27)..(28): Xaa is A or G or is absent

SEQ ID NO: 80324 - protein, 35 aa, Artificial Sequence; identical to SEQ ID NO: 8865
  GFR-binding peptide
  MOD_RES (1)..(33)..(35): Xaa is C or S

SEQ ID NO: 80325 - protein, 33 aa, Artificial Sequence; identical to SEQ ID NO: 8866
  GFR-binding peptide
  MOD_RES (1)..(1): Xaa is C or S
  MOD_RES (15)..(16)..(17)..(18)..(19): Xaa is A or G
  MOD_RES (20)..(21)..(22)..(23): Xaa is A or G or is absent

SEQ ID NO: 80326 - protein, 31 aa, Artificial Sequence; identical to SEQ ID NO: 58197
  GFR-binding peptide
  MOD_RES (1)..(1): Xaa is C or S

SEQ ID NO: 80327 - protein, 42 aa, Artificial Sequence; identical to SEQ ID NO: 7102
  GFR-binding peptide
  MOD_RES (6)..(7)..(39)..(41): Xaa is C or S

SEQ ID NO: 80328 - protein, 35 aa, Artificial Sequence; identical to SEQ ID NO: 8868
  GFR-binding peptide
  MOD_RES (3)..(4)..(35): Xaa is C or S

SEQ ID NO: 80329 - protein, 39 aa, Artificial Sequence; identical to SEQ ID NO: 8870
  GFR-binding peptide
  MOD_RES (2)..(3)..(37)..(39): Xaa is C or S
  MOD_RES (17)..(18)..(19)..(20)..(21): Xaa is A or G
  MOD_RES (22)..(23)..(24)..(25): Xaa is A or G or is absent

SEQ ID NO: 80330 - protein, 43 aa, Artificial Sequence
  GFR-binding peptide
  MOD_RES (5)..(6)..(40)..(42): Xaa is C or S
  MOD_RES (20)..(21)..(22)..(23)..(24): Xaa is A or G
  MOD_RES (25)..(26)..(27)..(28): Xaa is A or G or is absent
APASXXVPARLSAISILYLXXXXXXXXXLKNYQDMVVEAXGXR

SEQ ID NO: 80331 - protein, 34 aa, Artificial Sequence; identical to SEQ ID NO: 30234
  GFR-binding peptide
  MOD_RES (1)..(33): Xaa is C or S

SEQ ID NO: 80332 - protein, 39 aa, Artificial Sequence
  GFR-binding peptide
  MOD_RES (6)..(7)..(38): Xaa is C or S
RVPSTXXAPVKTSAISMLYLDNGRVLLLKNYQMIVEEXG

SEQ ID NO: 80333 - protein, 36 aa, Artificial Sequence; identical to SEQ ID NO: 8874
  GFR-binding peptide
  MOD_RES (3)..(4): Xaa is C or S

SEQ ID NO: 80334 - protein, 35 aa, Artificial Sequence; identical to SEQ ID NO: 7106
  GFR-binding peptide
  MOD_RES (2)..(3): Xaa is C or S
  MOD_RES (17)..(18)..(19)..(20)..(21): Xaa is A or G
  MOD_RES (22)..(23)..(24)..(25): Xaa is A or G or is absent

SEQ ID NO: 80335 - protein, 41 aa, Artificial Sequence; identical to SEQ ID NO: 7108
  GFR-binding peptide
  MOD_RES (6)..(7)..(40): Xaa is C or S

SEQ ID NO: 80336 - protein, 35 aa, Artificial Sequence; identical to SEQ ID NO: 8875
  GFR-binding peptide
  MOD_RES (1)..(35): Xaa is C or S
  MOD_RES (15)..(16)..(17)..(18)..(19): Xaa is A or G
  MOD_RES (20)..(21)..(22)..(23): Xaa is A or G or is absent

SEQ ID NO: 80337 - protein, 39 aa, Artificial Sequence; identical to SEQ ID NO: 8879
  GFR-binding peptide
  MOD_RES (6)..(7): Xaa is C or S
  MOD_RES (21)..(22)..(23)..(24)..(25): Xaa is A or G
  MOD_RES (26)..(27)..(28)..(29): Xaa is A or G or is absent

SEQ ID NO: 80338 - protein, 33 aa, Artificial Sequence; identical to SEQ ID NO: 7110
  GFR-binding peptide
  MOD_RES (1)..(32): Xaa is C or S

SEQ ID NO: 80339 - protein, 35 aa, Artificial Sequence; identical to SEQ ID NO: 8881
  GFR-binding peptide
  MOD_RES (1)..(2)..(35): Xaa is C or S
  MOD_RES (16)..(17)..(18)..(19)..(20): Xaa is A or G
  MOD_RES (21)..(22)..(23)..(24): Xaa is A or G or is absent

SEQ ID NO: 80340 - protein, 38 aa, Artificial Sequence
  GFR-binding peptide
  MOD_RES (1)..(2)..(36)..(38): Xaa is C or S
  MOD_RES (16)..(17)..(18)..(19)..(20): Xaa is A or G
  MOD_RES (21)..(22)..(23)..(24): Xaa is A or G or is absent
XXTPTKMSAISMLYLXXXXXXXXXLKNYQGMVVDRXGX

SEQ ID NO: 80341 - protein, 38 aa, Artificial Sequence; identical to SEQ ID NO: 57245
  GFR-binding peptide
  MOD_RES (6)..(7): Xaa is C or S

SEQ ID NO: 80342 - protein, 36 aa, Artificial Sequence
  GFR-binding peptide
  MOD_RES (1)..(33)..(35): Xaa is C or S
XVPTKLSAISILYLDKGVVTYLKNYQGMAVSEXGXR

SEQ ID NO: 80343 - protein, 35 aa, Artificial Sequence; identical to SEQ ID NO: 7112
  GFR-binding peptide
  MOD_RES (1)..(35): Xaa is C or S
  MOD_RES (15)..(16)..(17)..(18)..(19): Xaa is A or G
  MOD_RES (20)..(21)..(22)..(23): Xaa is A or G or is absent

SEQ ID NO: 80344 - protein, 36 aa, Artificial Sequence; identical to SEQ ID NO: 7117
  GFR-binding peptide
  MOD_RES (1)..(33)..(35): Xaa is C or S

SEQ ID NO: 80345 - protein, 32 aa, Artificial Sequence; identical to SEQ ID NO: 8886
  GFR-binding peptide
  MOD_RES (1)..(2): Xaa is C or S

SEQ ID NO: 80346 - protein, 41 aa, Artificial Sequence; identical to SEQ ID NO: 7121
  GFR-binding peptide
  MOD_RES (5)..(6)..(39)..(41): Xaa is C or S
  MOD_RES (20)..(21)..(22)..(23)..(24): Xaa is A or G
  MOD_RES (25)..(26)..(27)..(28): Xaa is A or G or is absent

SEQ ID NO: 80347 - protein, 41 aa, Artificial Sequence; identical to SEQ ID NO: 8888
  GFR-binding peptide
  MOD_RES (4)..(5)..(40): Xaa is C or S
  MOD_RES (19)..(20)..(21)..(22)..(23): Xaa is A or G
  MOD_RES (24)..(25)..(26)..(27): Xaa is A or G or is absent

SEQ ID NO: 80348 - protein, 39 aa, Artificial Sequence; identical to SEQ ID NO: 57250
  GFR-binding peptide
  MOD_RES (3)..(4)..(37)..(39): Xaa is C or S
  MOD_RES (18)..(19)..(20)..(21)..(22): Xaa is A or G
  MOD_RES (23)..(24)..(25)..(26): Xaa is A or G or is absent

SEQ ID NO: 80349 - protein, 37 aa, Artificial Sequence; identical to SEQ ID NO: 8889
  GFR-binding peptide
  MOD_RES (1)..(2)..(35)..(37): Xaa is C or S
  MOD_RES (16)..(17)..(18)..(19)..(20): Xaa is A or G
  MOD_RES (21)..(22)..(23)..(24): Xaa is A or G or is absent

SEQ ID NO: 80350 - protein, 40 aa, Artificial Sequence; identical to SEQ ID NO: 8890
  GFR-binding peptide
  MOD_RES (5)..(6)..(38)..(40): Xaa is C or S

SEQ ID NO: 80351 - protein, 37 aa, Artificial Sequence; identical to SEQ ID NO: 7126
  GFR-binding peptide
  MOD_RES (34)..(36): Xaa is C or S
  MOD_RES (14)..(15)..(16)..(17)..(18): Xaa is A or G
  MOD_RES (19)..(20)..(21)..(22): Xaa is A or G or is absent

SEQ ID NO: 80352 - protein, 35 aa, Artificial Sequence; identical to SEQ ID NO: 8891
  GFR-binding peptide
  MOD_RES (1)..(2)..(34): Xaa is C or S

SEQ ID NO: 80353 - protein, 36 aa, Artificial Sequence
  GFR-binding peptide
  MOD_RES (1)..(35): Xaa is C or S
  MOD_RES (15)..(16)..(17)..(18)..(19): Xaa is A or G
  MOD_RES (20)..(21)..(22)..(23): Xaa is A or G or is absent
XVPEKMSAISILYLXXXXXXXXXLKNYQNMTVESXA

SEQ ID NO: 80354 - protein, 40 aa, Artificial Sequence; identical to SEQ ID NO: 8892
  GFR-binding peptide
  MOD_RES (5)..(6)..(37)..(39): Xaa is C or S

SEQ ID NO: 80355 - protein, 36 aa, Artificial Sequence; identical to SEQ ID NO: 30257
  GFR-binding peptide
  MOD_RES (5)..(6): Xaa is C or S

SEQ ID NO: 80356 - protein, 39 aa, Artificial Sequence; identical to SEQ ID NO: 7127
  GFR-binding peptide
  MOD_RES (3)..(4)..(39): Xaa is C or S
  MOD_RES (18)..(19)..(20)..(21)..(22): Xaa is A or G
  MOD_RES (23)..(24)..(25)..(26): Xaa is A or G or is absent

SEQ ID NO: 80357 - protein, 37 aa, Artificial Sequence; identical to SEQ ID NO: 8895
  GFR-binding peptide
  MOD_RES (6)..(7): Xaa is C or S

SEQ ID NO: 80358 - protein, 42 aa, Artificial Sequence; identical to SEQ ID NO: 8896
  GFR-binding peptide
  MOD_RES (5)..(6)..(41): Xaa is C or S
  MOD_RES (20)..(21)..(22)..(23)..(24): Xaa is A or G
  MOD_RES (25)..(26)..(27)..(28): Xaa is A or G or is absent

SEQ ID NO: 80359 - protein, 40 aa, Artificial Sequence; identical to SEQ ID NO: 28306
  GFR-binding peptide
  MOD_RES (6)..(7): Xaa is C or S
  MOD_RES (21)..(22)..(23)..(24)..(25): Xaa is A or G
  MOD_RES (26)..(27)..(28)..(29): Xaa is A or G or is absent

SEQ ID NO: 80360 - protein, 40 aa, Artificial Sequence; identical to SEQ ID NO: 67789
  GFR-binding peptide
  MOD_RES (4)..(5)..(39): Xaa is C or S
  MOD_RES (19)..(20)..(21)..(22)..(23): Xaa is A or G
  MOD_RES (24)..(25)..(26)..(27): Xaa is A or G or is absent

SEQ ID NO: 80361 - protein, 41 aa, Artificial Sequence; identical to SEQ ID NO: 8898
  GFR-binding peptide
  MOD_RES (6)..(7)..(38)..(40): Xaa is C or S

SEQ ID NO: 80362 - protein, 35 aa, Artificial Sequence; identical to SEQ ID NO: 30264
  GFR-binding peptide
  MOD_RES (1)..(2)..(34): Xaa is C or S

SEQ ID NO: 80363 - protein, 39 aa, Artificial Sequence; identical to SEQ ID NO: 57264
  GFR-binding peptide
  MOD_RES (4)..(5)..(38): Xaa is C or S
  MOD_RES (19)..(20)..(21)..(22)..(23): Xaa is A or G
  MOD_RES (24)..(25)..(26)..(27): Xaa is A or G or is absent

SEQ ID NO: 80364 - protein, 37 aa, Artificial Sequence; identical to SEQ ID NO: 57265
  GFR-binding peptide
  MOD_RES (1)..(2)..(34)..(36): Xaa is C or S

SEQ ID NO: 80365 - protein, 36 aa, Artificial Sequence; identical to SEQ ID NO: 7130
  GFR-binding peptide
  MOD_RES (2)..(3)..(35): Xaa is C or S

SEQ ID NO: 80366 - protein, 37 aa, Artificial Sequence; identical to SEQ ID NO: 7131
  GFR-binding peptide
  MOD_RES (7)..(7): Xaa is C or S

SEQ ID NO: 80367 - protein, 35 aa, Artificial Sequence; identical to SEQ ID NO: 8901
  GFR-binding peptide
  MOD_RES (2)..(3): Xaa is C or S
  MOD_RES (17)..(18)..(19)..(20)..(21): Xaa is A or G
  MOD_RES (22)..(23)..(24)..(25): Xaa is A or G or is absent

SEQ ID NO: 80368 - protein, 34 aa, Artificial Sequence
  GFR-binding peptide
  MOD_RES (3)..(4): Xaa is C or S
EPXXVPEKMSAISILYLDENKNVVLKNYQNMTVE

SEQ ID NO: 80369 - protein, 39 aa, Artificial Sequence; identical to SEQ ID NO: 8902
  GFR-binding peptide
  MOD_RES (1)..(2)..(36)..(38): Xaa is C or S
  MOD_RES (16)..(17)..(18)..(19)..(20): Xaa is A or G
  MOD_RES (21)..(22)..(23)..(24): Xaa is A or G or is absent

SEQ ID NO: 80370 - protein, 37 aa, Artificial Sequence; identical to SEQ ID NO: 57267
  GFR-binding peptide
  MOD_RES (3)..(4)..(36): Xaa is C or S

SEQ ID NO: 80371 - protein, 35 aa, Artificial Sequence; identical to SEQ ID NO: 8904
  GFR-binding peptide
  MOD_RES (2)..(3): Xaa is C or S

SEQ ID NO: 80372 - protein, 30 aa, Artificial Sequence; identical to SEQ ID NO: 28317
  GFR-binding peptide

SEQ ID NO: 80373 - protein, 41 aa, Artificial Sequence; identical to SEQ ID NO: 7136
  GFR-binding peptide
  MOD_RES (6)..(7): Xaa is C or S
  MOD_RES (21)..(22)..(23)..(24)..(25): Xaa is A or G
  MOD_RES (26)..(27)..(28)..(29): Xaa is A or G or is absent

SEQ ID NO: 80374 - protein, 32 aa, Artificial Sequence; identical to SEQ ID NO: 14458
  GFR-binding peptide
  MOD_RES (1)..(1): Xaa is C or S

SEQ ID NO: 80375 - protein, 37 aa, Artificial Sequence; identical to SEQ ID NO: 16207
  GFR-binding peptide
  MOD_RES (2)..(3)..(35)..(37): Xaa is C or S

SEQ ID NO: 80376 - protein, 36 aa, Artificial Sequence; identical to SEQ ID NO: 8905
  GFR-binding peptide
  MOD_RES (4)..(5)..(36): Xaa is C or S

SEQ ID NO: 80377 - protein, 36 aa, Artificial Sequence; identical to SEQ ID NO: 71160
  GFR-binding peptide
  MOD_RES (1)..(2)..(34)..(36): Xaa is C or S

SEQ ID NO: 80378 - protein, 34 aa, Artificial Sequence; identical to SEQ ID NO: 7145
  GFR-binding peptide
  MOD_RES (33)..(33): Xaa is C or S

SEQ ID NO: 80379 - protein, 37 aa, Artificial Sequence; identical to SEQ ID NO: 69511
  GFR-binding peptide
  MOD_RES (34)..(36): Xaa is C or S
  MOD_RES (14)..(15)..(16)..(17)..(18): Xaa is A or G
  MOD_RES (19)..(20)..(21)..(22): Xaa is A or G or is absent

SEQ ID NO: 80380 - protein, 40 aa, Artificial Sequence; identical to SEQ ID NO: 57277
  GFR-binding peptide
  MOD_RES (4)..(5)..(37)..(39): Xaa is C or S

SEQ ID NO: 80381 - protein, 33 aa, Artificial Sequence; identical to SEQ ID NO: 67811
  GFR-binding peptide
  MOD_RES (1)..(2): Xaa is C or S

SEQ ID NO: 80382 - protein, 31 aa, Artificial Sequence; identical to SEQ ID NO: 8908
  GFR-binding peptide
  MOD_RES (1)..(1): Xaa is C or S

SEQ ID NO: 80383 - protein, 36 aa, Artificial Sequence
  GFR-binding peptide
  MOD_RES (4)..(5): Xaa is C or S
PEPXXVPEKMSAISILYLDENKNVVLKNYQNMTVES

SEQ ID NO: 80384 - protein, 40 aa, Artificial Sequence; identical to SEQ ID NO: 7150
  GFR-binding peptide
  MOD_RES (3)..(4)..(38)..(40): Xaa is C or S
  MOD_RES (18)..(19)..(20)..(21)..(22): Xaa is A or G
  MOD_RES (23)..(24)..(25)..(26): Xaa is A or G or is absent

SEQ ID NO: 80385 - protein, 37 aa, Artificial Sequence; identical to SEQ ID NO: 7151
  GFR-binding peptide
  MOD_RES (1)..(35)..(37): Xaa is C or S
  MOD_RES (15)..(16)..(17)..(18)..(19): Xaa is A or G
  MOD_RES (20)..(21)..(22)..(23): Xaa is A or G or is absent

SEQ ID NO: 80386 - protein, 42 aa, Artificial Sequence; identical to SEQ ID NO: 8910
  GFR-binding peptide
  MOD_RES (5)..(6)..(39)..(41): Xaa is C or S
  MOD_RES (20)..(21)..(22)..(23)..(24): Xaa is A or G
  MOD_RES (25)..(26)..(27)..(28): Xaa is A or G or is absent

SEQ ID NO: 80387 - protein, 40 aa, Artificial Sequence
  GFR-binding peptide
  MOD_RES (5)..(6)..(37)..(39): Xaa is C or S
VPSTXXAPVKTSAISMLYLDNGRVLLLKNYQMIVEEXGXL

SEQ ID NO: 80388 - protein, 43 aa, Artificial Sequence; identical to SEQ ID NO: 30282
  GFR-binding peptide
  MOD_RES (6)..(7)..(41)..(43): Xaa is C or S
  MOD_RES (21)..(22)..(23)..(24)..(25): Xaa is A or G
  MOD_RES (26)..(27)..(28)..(29): Xaa is A or G or is absent

SEQ ID NO: 80389 - protein, 36 aa, Artificial Sequence; identical to SEQ ID NO: 7152
  GFR-binding peptide
  MOD_RES (1)..(33)..(35): Xaa is C or S

SEQ ID NO: 80390 - protein, 41 aa, Artificial Sequence; identical to SEQ ID NO: 8912
  GFR-binding peptide
  MOD_RES (6)..(7)..(40): Xaa is C or S
  MOD_RES (21)..(22)..(23)..(24)..(25): Xaa is A or G
  MOD_RES (26)..(27)..(28)..(29): Xaa is A or G or is absent

SEQ ID NO: 80391 - protein, 41 aa, Artificial Sequence; identical to SEQ ID NO: 8913
  GFR-binding peptide
  MOD_RES (6)..(7)..(40): Xaa is C or S
  MOD_RES (21)..(22)..(23)..(24)..(25): Xaa is A or G
  MOD_RES (26)..(27)..(28)..(29): Xaa is A or G or is absent

SEQ ID NO: 80392 - protein, 39 aa, Artificial Sequence; identical to SEQ ID NO: 8915
  GFR-binding peptide
  MOD_RES (2)..(3)..(37)..(39): Xaa is C or S
  MOD_RES (17)..(18)..(19)..(20)..(21): Xaa is A or G
  MOD_RES (22)..(23)..(24)..(25): Xaa is A or G or is absent

SEQ ID NO: 80393 - protein, 35 aa, Artificial Sequence; identical to SEQ ID NO: 8916
  GFR-binding peptide
  MOD_RES (32)..(34): Xaa is C or S

SEQ ID NO: 80394 - protein, 30 aa, Artificial Sequence; identical to SEQ ID NO: 71172
  GFR-binding peptide

SEQ ID NO: 80395 - protein, 39 aa, Artificial Sequence; identical to SEQ ID NO: 7155
  GFR-binding peptide
  MOD_RES (6)..(7): Xaa is C or S

SEQ ID NO: 80396 - protein, 41 aa, Artificial Sequence
  GFR-binding peptide
  MOD_RES (5)..(6)..(38)..(40): Xaa is C or S
APASXXVPARLSAISILYLDAANNVVLKNYQDMVVEAXGXR

SEQ ID NO: 80397 - protein, 39 aa, Artificial Sequence; identical to SEQ ID NO: 7159
  GFR-binding peptide
  MOD_RES (6)..(7)..(39): Xaa is C or S

SEQ ID NO: 80398 - protein, 34 aa, Artificial Sequence; identical to SEQ ID NO: 30289
  GFR-binding peptide
  MOD_RES (2)..(3): Xaa is C or S

SEQ ID NO: 80399 - protein, 42 aa, Artificial Sequence; identical to SEQ ID NO: 69522
  GFR-binding peptide
  MOD_RES (5)..(6)..(40)..(42): Xaa is C or S
  MOD_RES (20)..(21)..(22)..(23)..(24): Xaa is A or G
  MOD_RES (25)..(26)..(27)..(28): Xaa is A or G or is absent

SEQ ID NO: 80400 - protein, 36 aa, Artificial Sequence; identical to SEQ ID NO: 16218
  GFR-binding peptide
  MOD_RES (34)..(36): Xaa is C or S
  MOD_RES (14)..(15)..(16)..(17)..(18): Xaa is A or G
  MOD_RES (19)..(20)..(21)..(22): Xaa is A or G or is absent

SEQ ID NO: 80401 - protein, 37 aa, Artificial Sequence; identical to SEQ ID NO: 14474
  GFR-binding peptide
  MOD_RES (3)..(4)..(36): Xaa is C or S

SEQ ID NO: 80402 - protein, 37 aa, Artificial Sequence; identical to SEQ ID NO: 69525
  GFR-binding peptide
  MOD_RES (4)..(5)..(37): Xaa is C or S

SEQ ID NO: 80403 - protein, 33 aa, Artificial Sequence; identical to SEQ ID NO: 16220
  GFR-binding peptide
  MOD_RES (32)..(32): Xaa is C or S

SEQ ID NO: 80404 - protein, 38 aa, Artificial Sequence; identical to SEQ ID NO: 7161
  GFR-binding peptide
  MOD_RES (2)..(3)..(36)..(38): Xaa is C or S
  MOD_RES (17)..(18)..(19)..(20)..(21): Xaa is A or G
  MOD_RES (22)..(23)..(24)..(25): Xaa is A or G or is absent

SEQ ID NO: 80405 - protein, 39 aa, Artificial Sequence
  GFR-binding peptide
  MOD_RES (5)..(6)..(38): Xaa is C or S
APASXXVPARLSAISILYLDAANNVVLKNYQDMVVEAXG

SEQ ID NO: 80406 - protein, 39 aa, Artificial Sequence; identical to SEQ ID NO: 8919
  GFR-binding peptide
  MOD_RES (2)..(3)..(36)..(38): Xaa is C or S

SEQ ID NO: 80407 - protein, 35 aa, Artificial Sequence; identical to SEQ ID NO: 57296
  GFR-binding peptide
  MOD_RES (1)..(2)..(35): Xaa is C or S
  MOD_RES (16)..(17)..(18)..(19)..(20): Xaa is A or G
  MOD_RES (21)..(22)..(23)..(24): Xaa is A or G or is absent

SEQ ID NO: 80408 - protein, 38 aa, Artificial Sequence; identical to SEQ ID NO: 8920
  GFR-binding peptide
  MOD_RES (3)..(4)..(36)..(38): Xaa is C or S

SEQ ID NO: 80409 - protein, 45 aa, Artificial Sequence; identical to SEQ ID NO: 8922
  GFR-binding peptide
  MOD_RES (6)..(7)..(42)..(44): Xaa is C or S
  MOD_RES (21)..(22)..(23)..(24)..(25): Xaa is A or G
  MOD_RES (26)..(27)..(28)..(29): Xaa is A or G or is absent

SEQ ID NO: 80410 - protein, 37 aa, Artificial Sequence; identical to SEQ ID NO: 8923
  GFR-binding peptide
  MOD_RES (3)..(4)..(37): Xaa is C or S

SEQ ID NO: 80411 - protein, 33 aa, Artificial Sequence; identical to SEQ ID NO: 8925
  GFR-binding peptide
  MOD_RES (1)..(1): Xaa is C or S
  MOD_RES (15)..(16)..(17)..(18)..(19): Xaa is A or G
  MOD_RES (20)..(21)..(22)..(23): Xaa is A or G or is absent

SEQ ID NO: 80412 - protein, 40 aa, Artificial Sequence; identical to SEQ ID NO: 8926
  GFR-binding peptide
  MOD_RES (5)..(6)..(38)..(40): Xaa is C or S

SEQ ID NO: 80413 - protein, 37 aa, Artificial Sequence; identical to SEQ ID NO: 7168
  GFR-binding peptide
  MOD_RES (5)..(6)..(37): Xaa is C or S

SEQ ID NO: 80414 - protein, 39 aa, Artificial Sequence; identical to SEQ ID NO: 8927
  GFR-binding peptide
  MOD_RES (6)..(7)..(38): Xaa is C or S

SEQ ID NO: 80415 - protein, 37 aa, Artificial Sequence; identical to SEQ ID NO: 7170
  GFR-binding peptide
  MOD_RES (2)..(3)..(36): Xaa is C or S
  MOD_RES (17)..(18)..(19)..(20)..(21): Xaa is A or G
  MOD_RES (22)..(23)..(24)..(25): Xaa is A or G or is absent

SEQ ID NO: 80416 - protein, 40 aa, Artificial Sequence; identical to SEQ ID NO: 8928
  GFR-binding peptide
  MOD_RES (4)..(5)..(39): Xaa is C or S
  MOD_RES (19)..(20)..(21)..(22)..(23): Xaa is A or G
  MOD_RES (24)..(25)..(26)..(27): Xaa is A or G or is absent

SEQ ID NO: 80417 - protein, 35 aa, Artificial Sequence
  GFR-binding peptide
  MOD_RES (1)..(2): Xaa is C or S
  MOD_RES (16)..(17)..(18)..(19)..(20): Xaa is A or G
  MOD_RES (21)..(22)..(23)..(24): Xaa is A or G or is absent
XXVPTKLSAISILYLXXXXXXXXXLKNYQGMAVSE

SEQ ID NO: 80418 - protein, 37 aa, Artificial Sequence; identical to SEQ ID NO: 7171
  GFR-binding peptide
  MOD_RES (5)..(6)..(37): Xaa is C or S

SEQ ID NO: 80419 - protein, 41 aa, Artificial Sequence; identical to SEQ ID NO: 7173
  GFR-binding peptide
  MOD_RES (6)..(7)..(41): Xaa is C or S
  MOD_RES (21)..(22)..(23)..(24)..(25): Xaa is A or G
  MOD_RES (26)..(27)..(28)..(29): Xaa is A or G or is absent

SEQ ID NO: 80420 - protein, 42 aa, Artificial Sequence; identical to SEQ ID NO: 16229
  GFR-binding peptide
  MOD_RES (6)..(7)..(41): Xaa is C or S
  MOD_RES (21)..(22)..(23)..(24)..(25): Xaa is A or G
  MOD_RES (26)..(27)..(28)..(29): Xaa is A or G or is absent

SEQ ID NO: 80421 - protein, 33 aa, Artificial Sequence
  GFR-binding peptide
  MOD_RES (2)..(3): Xaa is C or S
PXXTPTKMSAISMLYLNDKQQIILKNYQGMVVD

SEQ ID NO: 80422 - protein, 39 aa, Artificial Sequence; identical to SEQ ID NO: 8935
  GFR-binding peptide
  MOD_RES (3)..(4)..(37)..(39): Xaa is C or S
  MOD_RES (18)..(19)..(20)..(21)..(22): Xaa is A or G
  MOD_RES (23)..(24)..(25)..(26): Xaa is A or G or is absent

SEQ ID NO: 80423 - protein, 43 aa, Artificial Sequence
  GFR-binding peptide
  MOD_RES (6)..(7)..(41)..(43): Xaa is C or S
  MOD_RES (21)..(22)..(23)..(24)..(25): Xaa is A or G
  MOD_RES (26)..(27)..(28)..(29): Xaa is A or G or is absent
GIPEPXXVPEKMSAISILYLXXXXXXXXXLKNYQNMTVESXAX

SEQ ID NO: 80424 - protein, 35 aa, Artificial Sequence; identical to SEQ ID NO: 28346
  GFR-binding peptide
  MOD_RES (1)..(2): Xaa is C or S
  MOD_RES (16)..(17)..(18)..(19)..(20): Xaa is A or G
  MOD_RES (21)..(22)..(23)..(24): Xaa is A or G or is absent

SEQ ID NO: 80425 - protein, 35 aa, Artificial Sequence
  GFR-binding peptide
  MOD_RES (32)..(34): Xaa is C or S
VPARLSAISILYLDAANNVVLKNYQDMVVEAXGXR

SEQ ID NO: 80426 - protein, 37 aa, Artificial Sequence
  GFR-binding peptide
  MOD_RES (5)..(6): Xaa is C or S
IPEPXXVPEKMSAISILYLDENKNVVLKNYQNMTVES

SEQ ID NO: 80427 - protein, 35 aa, Artificial Sequence; identical to SEQ ID NO: 8937
  GFR-binding peptide
  MOD_RES (1)..(32)..(34): Xaa is C or S

SEQ ID NO: 80428 - protein, 36 aa, Artificial Sequence; identical to SEQ ID NO: 7176
  GFR-binding peptide
  MOD_RES (33)..(35): Xaa is C or S
  MOD_RES (14)..(15)..(16)..(17)..(18): Xaa is A or G
  MOD_RES (19)..(20)..(21)..(22): Xaa is A or G or is absent

SEQ ID NO: 80429 - protein, 37 aa, Artificial Sequence; identical to SEQ ID NO: 7179
  GFR-binding peptide
  MOD_RES (2)..(3)..(36): Xaa is C or S
  MOD_RES (17)..(18)..(19)..(20)..(21): Xaa is A or G
  MOD_RES (22)..(23)..(24)..(25): Xaa is A or G or is absent

SEQ ID NO: 80430 - protein, 40 aa, Artificial Sequence; identical to SEQ ID NO: 8938
  GFR-binding peptide
  MOD_RES (6)..(7): Xaa is C or S
  MOD_RES (21)..(22)..(23)..(24)..(25): Xaa is A or G
  MOD_RES (26)..(27)..(28)..(29): Xaa is A or G or is absent

SEQ ID NO: 80431 - protein, 37 aa, Artificial Sequence; identical to SEQ ID NO: 8939
  GFR-binding peptide
  MOD_RES (2)..(3): Xaa is C or S
  MOD_RES (17)..(18)..(19)..(20)..(21): Xaa is A or G
  MOD_RES (22)..(23)..(24)..(25): Xaa is A or G or is absent

SEQ ID NO: 80432 - protein, 37 aa, Artificial Sequence
  GFR-binding peptide
  MOD_RES (6)..(7): Xaa is C or S
HVPKPXXAPTKLSAISVLYLDDSSNVILKNYQNMVVR

SEQ ID NO: 80433 - protein, 35 aa, Artificial Sequence; identical to SEQ ID NO: 7183
  GFR-binding peptide
  MOD_RES (32)..(34): Xaa is C or S

SEQ ID NO: 80434 - protein, 43 aa, Artificial Sequence; identical to SEQ ID NO: 7185
  GFR-binding peptide
  MOD_RES (6)..(7)..(41)..(43): Xaa is C or S
  MOD_RES (21)..(22)..(23)..(24)..(25): Xaa is A or G
  MOD_RES (26)..(27)..(28)..(29): Xaa is A or G or is absent

SEQ ID NO: 80435 - protein, 40 aa, Artificial Sequence
  GFR-binding peptide
  MOD_RES (2)..(3)..(37)..(39): Xaa is C or S
  MOD_RES (17)..(18)..(19)..(20)..(21): Xaa is A or G
  MOD_RES (22)..(23)..(24)..(25): Xaa is A or G or is absent
PXXVPEKMSAISILYLXXXXXXXXXLKNYQNMTVESXAXR

SEQ ID NO: 80436 - protein, 35 aa, Artificial Sequence; identical to SEQ ID NO: 28352
  GFR-binding peptide
  MOD_RES (4)..(5): Xaa is C or S

SEQ ID NO: 80437 - protein, 36 aa, Artificial Sequence; identical to SEQ ID NO: 7187
  GFR-binding peptide
  MOD_RES (1)..(2)..(36): Xaa is C or S
  MOD_RES (16)..(17)..(18)..(19)..(20): Xaa is A or G
  MOD_RES (21)..(22)..(23)..(24): Xaa is A or G or is absent

SEQ ID NO: 80438 - protein, 37 aa, Artificial Sequence; identical to SEQ ID NO: 57314
  GFR-binding peptide
  MOD_RES (3)..(4): Xaa is C or S
  MOD_RES (18)..(19)..(20)..(21)..(22): Xaa is A or G
  MOD_RES (23)..(24)..(25)..(26): Xaa is A or G or is absent

SEQ ID NO: 80439 - protein, 41 aa, Artificial Sequence; identical to SEQ ID NO: 67843
  GFR-binding peptide
  MOD_RES (6)..(7)..(39)..(41): Xaa is C or S

SEQ ID NO: 80440 - protein, 39 aa, Artificial Sequence; identical to SEQ ID NO: 28356
  GFR-binding peptide
  MOD_RES (6)..(7)..(39): Xaa is C or S

SEQ ID NO: 80441 - protein, 42 aa, Artificial Sequence
  GFR-binding peptide
  MOD_RES (6)..(7)..(41): Xaa is C or S
  MOD_RES (21)..(22)..(23)..(24)..(25): Xaa is A or G
  MOD_RES (26)..(27)..(28)..(29): Xaa is A or G or is absent
KASKAXXVPTKLSAISILYLXXXXXXXXXLKNYQGMAVSEXG

SEQ ID NO: 80442 - protein, 33 aa, Artificial Sequence; identical to SEQ ID NO: 7193
  GFR-binding peptide
  MOD_RES (2)..(3): Xaa is C or S

SEQ ID NO: 80443 - protein, 39 aa, Artificial Sequence; identical to SEQ ID NO: 66145
  GFR-binding peptide
  MOD_RES (5)..(6): Xaa is C or S
  MOD_RES (20)..(21)..(22)..(23)..(24): Xaa is A or G
  MOD_RES (25)..(26)..(27)..(28): Xaa is A or G or is absent

SEQ ID NO: 80444 - protein, 36 aa, Artificial Sequence; identical to SEQ ID NO: 8950
  GFR-binding peptide
  MOD_RES (2)..(3): Xaa is C or S
  MOD_RES (17)..(18)..(19)..(20)..(21): Xaa is A or G
  MOD_RES (22)..(23)..(24)..(25): Xaa is A or G or is absent

SEQ ID NO: 80445 - protein, 38 aa, Artificial Sequence; identical to SEQ ID NO: 66147
  GFR-binding peptide
  MOD_RES (1)..(35)..(37): Xaa is C or S
  MOD_RES (15)..(16)..(17)..(18)..(19): Xaa is A or G
  MOD_RES (20)..(21)..(22)..(23): Xaa is A or G or is absent

SEQ ID NO: 80446 - protein, 35 aa, Artificial Sequence; identical to SEQ ID NO: 8951
  GFR-binding peptide
  MOD_RES (2)..(3)..(35): Xaa is C or S

SEQ ID NO: 80447 - protein, 37 aa, Artificial Sequence; identical to SEQ ID NO: 7195
  GFR-binding peptide
  MOD_RES (1)..(2)..(34)..(36): Xaa is C or S

SEQ ID NO: 80448 - protein, 36 aa, Artificial Sequence; identical to SEQ ID NO: 7197
  GFR-binding peptide
  MOD_RES (1)..(2)..(36): Xaa is C or S
  MOD_RES (16)..(17)..(18)..(19)..(20): Xaa is A or G
  MOD_RES (21)..(22)..(23)..(24): Xaa is A or G or is absent

SEQ ID NO: 80449 - protein, 41 aa, Artificial Sequence; identical to SEQ ID NO: 28366
  GFR-binding peptide
  MOD_RES (6)..(7)..(39)..(41): Xaa is C or S

SEQ ID NO: 80450 - protein, 37 aa, Artificial Sequence; identical to SEQ ID NO: 7199
  GFR-binding peptide
  MOD_RES (1)..(35)..(37): Xaa is C or S
  MOD_RES (15)..(16)..(17)..(18)..(19): Xaa is A or G
  MOD_RES (20)..(21)..(22)..(23): Xaa is A or G or is absent

SEQ ID NO: 80451 - protein, 42 aa, Artificial Sequence; identical to SEQ ID NO: 8955
  GFR-binding peptide
  MOD_RES (6)..(7)..(39)..(41): Xaa is C or S

SEQ ID NO: 80452 - protein, 42 aa, Artificial Sequence
  GFR-binding peptide
  MOD_RES (5)..(6)..(40)..(42): Xaa is C or S
  MOD_RES (20)..(21)..(22)..(23)..(24): Xaa is A or G
  MOD_RES (25)..(26)..(27)..(28): Xaa is A or G or is absent
ASKAXXVPTKLSAISILYLXXXXXXXXXLKNYQGMAVSEXGX

SEQ ID NO: 80453 - protein, 37 aa, Artificial Sequence; identical to SEQ ID NO: 7200
  GFR-binding peptide
  MOD_RES (3)..(4)..(35)..(37): Xaa is C or S

SEQ ID NO: 80454 - protein, 35 aa, Artificial Sequence; identical to SEQ ID NO: 8957
  GFR-binding peptide
  MOD_RES (1)..(33)..(35): Xaa is C or S

SEQ ID NO: 80455 - protein, 40 aa, Artificial Sequence; identical to SEQ ID NO: 8959
  GFR-binding peptide
  MOD_RES (3)..(4)..(37)..(39): Xaa is C or S
  MOD_RES (18)..(19)..(20)..(21)..(22): Xaa is A or G
  MOD_RES (23)..(24)..(25)..(26): Xaa is A or G or is absent

SEQ ID NO: 80456 - protein, 39 aa, Artificial Sequence; identical to SEQ ID NO: 8960
  GFR-binding peptide
  MOD_RES (6)..(7)..(38): Xaa is C or S

SEQ ID NO: 80457 - protein, 41 aa, Artificial Sequence
  GFR-binding peptide
  MOD_RES (6)..(7)..(41): Xaa is C or S
  MOD_RES (21)..(22)..(23)..(24)..(25): Xaa is A or G
  MOD_RES (26)..(27)..(28)..(29): Xaa is A or G or is absent
AAPASXXVPARLSAISILYLXXXXXXXXXLKNYQDMVVEAX

SEQ ID NO: 80458 - protein, 36 aa, Artificial Sequence; identical to SEQ ID NO: 7203
  GFR-binding peptide
  MOD_RES (3)..(4)..(35): Xaa is C or S

SEQ ID NO: 80459 - protein, 42 aa, Artificial Sequence
  GFR-binding peptide
  MOD_RES (4)..(5)..(39)..(41): Xaa is C or S
  MOD_RES (19)..(20)..(21)..(22)..(23): Xaa is A or G
  MOD_RES (24)..(25)..(26)..(27): Xaa is A or G or is absent
SKAXXVPTKLSAISILYLXXXXXXXXXLKNYQGMAVSEXGXR

SEQ ID NO: 80460 - protein, 42 aa, Artificial Sequence; identical to SEQ ID NO: 7204
  GFR-binding peptide
  MOD_RES (5)..(6)..(40)..(42): Xaa is C or S
  MOD_RES (20)..(21)..(22)..(23)..(24): Xaa is A or G
  MOD_RES (25)..(26)..(27)..(28): Xaa is A or G or is absent

SEQ ID NO: 80461 - protein, 34 aa, Artificial Sequence; identical to SEQ ID NO: 8964
  GFR-binding peptide
  MOD_RES (32)..(34): Xaa is C or S

SEQ ID NO: 80462 - protein, 34 aa, Artificial Sequence
  GFR-binding peptide
  MOD_RES (1)..(2): Xaa is C or S
  MOD_RES (16)..(17)..(18)..(19)..(20): Xaa is A or G
  MOD_RES (21)..(22)..(23)..(24): Xaa is A or G or is absent
XXAPVKTSAISMLYLXXXXXXXXXLKNYQMIVEE

SEQ ID NO: 80463 - protein, 36 aa, Artificial Sequence; identical to SEQ ID NO: 30338
  GFR-binding peptide
  MOD_RES (3)..(4)..(36): Xaa is C or S

SEQ ID NO: 80464 - protein, 35 aa, Artificial Sequence; identical to SEQ ID NO: 8968
  GFR-binding peptide
  MOD_RES (32)..(34): Xaa is C or S

SEQ ID NO: 80465 - protein, 36 aa, Artificial Sequence; identical to SEQ ID NO: 7207
  GFR-binding peptide
  MOD_RES (2)..(3)..(34)..(36): Xaa is C or S

SEQ ID NO: 80466 - protein, 36 aa, Artificial Sequence; identical to SEQ ID NO: 8971
  GFR-binding peptide
  MOD_RES (5)..(6): Xaa is C or S

SEQ ID NO: 80467 - protein, 41 aa, Artificial Sequence; identical to SEQ ID NO: 8972
  GFR-binding peptide
  MOD_RES (4)..(5)..(38)..(40): Xaa is C or S
  MOD_RES (19)..(20)..(21)..(22)..(23): Xaa is A or G
  MOD_RES (24)..(25)..(26)..(27): Xaa is A or G or is absent

SEQ ID NO: 80468 - protein, 38 aa, Artificial Sequence; identical to SEQ ID NO: 7209
  GFR-binding peptide
  MOD_RES (1)..(35)..(37): Xaa is C or S
  MOD_RES (15)..(16)..(17)..(18)..(19): Xaa is A or G
  MOD_RES (20)..(21)..(22)..(23): Xaa is A or G or is absent

SEQ ID NO: 80469 - protein, 39 aa, Artificial Sequence
  GFR-binding peptide
  MOD_RES (6)..(7): Xaa is C or S
  MOD_RES (21)..(22)..(23)..(24)..(25): Xaa is A or G
  MOD_RES (26)..(27)..(28)..(29): Xaa is A or G or is absent
AAPASXXVPARLSAISILYLXXXXXXXXXLKNYQDMVVE

SEQ ID NO: 80470 - protein, 39 aa, Artificial Sequence
  GFR-binding peptide
  MOD_RES (4)..(5)..(38): Xaa is C or S
  MOD_RES (19)..(20)..(21)..(22)..(23): Xaa is A or G
  MOD_RES (24)..(25)..(26)..(27): Xaa is A or G or is absent
PSTXXAPVKTSAISMLYLXXXXXXXXXLKNYQMIVEEXG

SEQ ID NO: 80471 - protein, 39 aa, Artificial Sequence; identical to SEQ ID NO: 7210
  GFR-binding peptide
  MOD_RES (5)..(6): Xaa is C or S
  MOD_RES (20)..(21)..(22)..(23)..(24): Xaa is A or G
  MOD_RES (25)..(26)..(27)..(28): Xaa is A or G or is absent

SEQ ID NO: 80472 - protein, 40 aa, Artificial Sequence; identical to SEQ ID NO: 14516
  GFR-binding peptide
  MOD_RES (5)..(6)..(38)..(40): Xaa is C or S

SEQ ID NO: 80473 - protein, 36 aa, Artificial Sequence; identical to SEQ ID NO: 7214
  GFR-binding peptide
  MOD_RES (1)..(33)..(35): Xaa is C or S

SEQ ID NO: 80474 - protein, 37 aa, Artificial Sequence; identical to SEQ ID NO: 57342
  GFR-binding peptide
  MOD_RES (1)..(35)..(37): Xaa is C or S
  MOD_RES (15)..(16)..(17)..(18)..(19): Xaa is A or G
  MOD_RES (20)..(21)..(22)..(23): Xaa is A or G or is absent

SEQ ID NO: 80475 - protein, 33 aa, Artificial Sequence; identical to SEQ ID NO: 57343
  GFR-binding peptide
  MOD_RES (14)..(15)..(16)..(17)..(18): Xaa is A or G
  MOD_RES (19)..(20)..(21)..(22): Xaa is A or G or is absent

SEQ ID NO: 80476 - protein, 40 aa, Artificial Sequence
  GFR-binding peptide
  MOD_RES (4)..(5)..(37)..(39): Xaa is C or S
PASXXVPARLSAISILYLDAANNVVLKNYQDMVVEAXGXR

SEQ ID NO: 80477 - protein, 39 aa, Artificial Sequence; identical to SEQ ID NO: 14518
  GFR-binding peptide
  MOD_RES (1)..(2)..(36)..(38): Xaa is C or S
  MOD_RES (16)..(17)..(18)..(19)..(20): Xaa is A or G
  MOD_RES (21)..(22)..(23)..(24): Xaa is A or G or is absent

SEQ ID NO: 80478 - protein, 40 aa, Artificial Sequence
  GFR-binding peptide
  MOD_RES (6)..(7)..(39): Xaa is C or S
KASKAXXVPTKLSAISILYLDKGVVTYLKNYQGMAVSEXG

SEQ ID NO: 80479 - protein, 40 aa, Artificial Sequence; identical to SEQ ID NO: 69557
  GFR-binding peptide
  MOD_RES (5)..(6)..(38)..(40): Xaa is C or S

SEQ ID NO: 80480 - protein, 44 aa, Artificial Sequence; identical to SEQ ID NO: 8976
  GFR-binding peptide
  MOD_RES (5)..(6)..(41)..(43): Xaa is C or S
  MOD_RES (20)..(21)..(22)..(23)..(24): Xaa is A or G
  MOD_RES (25)..(26)..(27)..(28): Xaa is A or G or is absent

SEQ ID NO: 80481 - protein, 39 aa, Artificial Sequence; identical to SEQ ID NO: 8977
  GFR-binding peptide
  MOD_RES (3)..(4)..(36)..(38): Xaa is C or S

SEQ ID NO: 80482 - protein, 32 aa, Artificial Sequence; identical to SEQ ID NO: 7215
  GFR-binding peptide
  MOD_RES (14)..(15)..(16)..(17)..(18): Xaa is A or G
  MOD_RES (19)..(20)..(21)..(22): Xaa is A or G or is absent

SEQ ID NO: 80483 - protein, 42 aa, Artificial Sequence; identical to SEQ ID NO: 8979
  GFR-binding peptide
  MOD_RES (6)..(7)..(41): Xaa is C or S
  MOD_RES (21)..(22)..(23)..(24)..(25): Xaa is A or G
  MOD_RES (26)..(27)..(28)..(29): Xaa is A or G or is absent

SEQ ID NO: 80484 - protein, 38 aa, Artificial Sequence; identical to SEQ ID NO: 8980
  GFR-binding peptide
  MOD_RES (5)..(6)..(38): Xaa is C or S

SEQ ID NO: 80485 - protein, 32 aa, Artificial Sequence; identical to SEQ ID NO: 8981
  GFR-binding peptide
  MOD_RES (31)..(31): Xaa is C or S

SEQ ID NO: 80486 - protein, 39 aa, Artificial Sequence; identical to SEQ ID NO: 57351
  GFR-binding peptide
  MOD_RES (2)..(3)..(37)..(39): Xaa is C or S
  MOD_RES (17)..(18)..(19)..(20)..(21): Xaa is A or G
  MOD_RES (22)..(23)..(24)..(25): Xaa is A or G or is absent

SEQ ID NO: 80487 - protein, 36 aa, Artificial Sequence; identical to SEQ ID NO: 7218
  GFR-binding peptide
  MOD_RES (3)..(4): Xaa is C or S

SEQ ID NO: 80488 - protein, 36 aa, Artificial Sequence; identical to SEQ ID NO: 16277
  GFR-binding peptide
  MOD_RES (3)..(4): Xaa is C or S
  MOD_RES (18)..(19)..(20)..(21)..(22): Xaa is A or G
  MOD_RES (23)..(24)..(25)..(26): Xaa is A or G or is absent

SEQ ID NO: 80489 - protein, 36 aa, Artificial Sequence
  GFR-binding peptide
  MOD_RES (1)..(33)..(35): Xaa is C or S
XVPARLSAISILYLDAANNVVLKNYQDMVVEAXGXR

SEQ ID NO: 80490 - protein, 37 aa, Artificial Sequence
  GFR-binding peptide
  MOD_RES (1)..(2)..(35)..(37): Xaa is C or S
  MOD_RES (16)..(17)..(18)..(19)..(20): Xaa is A or G
  MOD_RES (21)..(22)..(23)..(24): Xaa is A or G or is absent
XXAPVKTSAISMLYLXXXXXXXXXLKNYQMIVEEXGX

SEQ ID NO: 80491 - protein, 34 aa, Artificial Sequence; identical to SEQ ID NO: 7223
  GFR-binding peptide
  MOD_RES (1)..(2)..(34): Xaa is C or S

SEQ ID NO: 80492 - protein, 30 aa, Artificial Sequence; identical to SEQ ID NO: 16279
  GFR-binding peptide

SEQ ID NO: 80493 - protein, 36 aa, Artificial Sequence; identical to SEQ ID NO: 7225
  GFR-binding peptide
  MOD_RES (1)..(36): Xaa is C or S
  MOD_RES (15)..(16)..(17)..(18)..(19): Xaa is A or G
  MOD_RES (20)..(21)..(22)..(23): Xaa is A or G or is absent

SEQ ID NO: 80494 - protein, 35 aa, Artificial Sequence; identical to SEQ ID NO: 30366
  GFR-binding peptide
  MOD_RES (34)..(34): Xaa is C or S
  MOD_RES (14)..(15)..(16)..(17)..(18): Xaa is A or G
  MOD_RES (19)..(20)..(21)..(22): Xaa is A or G or is absent

SEQ ID NO: 80495 - protein, 41 aa, Artificial Sequence
  GFR-binding peptide
  MOD_RES (3)..(4)..(38)..(40): Xaa is C or S
  MOD_RES (18)..(19)..(20)..(21)..(22): Xaa is A or G
  MOD_RES (23)..(24)..(25)..(26): Xaa is A or G or is absent
EPXXVPEKMSAISILYLXXXXXXXXXLKNYQNMTVESXAXR

SEQ ID NO: 80496 - protein, 35 aa, Artificial Sequence; identical to SEQ ID NO: 8987
  GFR-binding peptide
  MOD_RES (3)..(3): Xaa is C or S
  MOD_RES (17)..(18)..(19)..(20)..(21): Xaa is A or G
  MOD_RES (22)..(23)..(24)..(25): Xaa is A or G or is absent

SEQ ID NO: 80497 - protein, 39 aa, Artificial Sequence; identical to SEQ ID NO: 8990
  GFR-binding peptide
  MOD_RES (1)..(36)..(38): Xaa is C or S
  MOD_RES (15)..(16)..(17)..(18)..(19): Xaa is A or G
  MOD_RES (20)..(21)..(22)..(23): Xaa is A or G or is absent

SEQ ID NO: 80498 - protein, 41 aa, Artificial Sequence; identical to SEQ ID NO: 8991
  GFR-binding peptide
  MOD_RES (5)..(6)..(40): Xaa is C or S
  MOD_RES (20)..(21)..(22)..(23)..(24): Xaa is A or G
  MOD_RES (25)..(26)..(27)..(28): Xaa is A or G or is absent

SEQ ID NO: 80499 - protein, 35 aa, Artificial Sequence; identical to SEQ ID NO: 8995
  GFR-binding peptide
  MOD_RES (1)..(34): Xaa is C or S
  MOD_RES (15)..(16)..(17)..(18)..(19): Xaa is A or G
  MOD_RES (20)..(21)..(22)..(23): Xaa is A or G or is absent

SEQ ID NO: 80500 - protein, 33 aa, Artificial Sequence; identical to SEQ ID NO: 8997
  GFR-binding peptide
  MOD_RES (1)..(33): Xaa is C or S

SEQ ID NO: 80501 - protein, 34 aa, Artificial Sequence; identical to SEQ ID NO: 28397
  GFR-binding peptide
  MOD_RES (34)..(34): Xaa is C or S
  MOD_RES (14)..(15)..(16)..(17)..(18): Xaa is A or G
  MOD_RES (19)..(20)..(21)..(22): Xaa is A or G or is absent

SEQ ID NO: 80502 - protein, 34 aa, Artificial Sequence; identical to SEQ ID NO: 57364
  GFR-binding peptide
  MOD_RES (3)..(4): Xaa is C or S

SEQ ID NO: 80503 - protein, 34 aa, Artificial Sequence
  GFR-binding peptide
  MOD_RES (3)..(4): Xaa is C or S
ASXXVPARLSAISILYLDAANNVVLKNYQDMVVE

SEQ ID NO: 80504 - protein, 37 aa, Artificial Sequence
  GFR-binding peptide
  MOD_RES (34)..(36): Xaa is C or S
  MOD_RES (14)..(15)..(16)..(17)..(18): Xaa is A or G
  MOD_RES (19)..(20)..(21)..(22): Xaa is A or G or is absent
TPTKMSAISMLYLXXXXXXXXXLKNYQGMVVDRXGXS

SEQ ID NO: 80505 - protein, 40 aa, Artificial Sequence; identical to SEQ ID NO: 7234
  GFR-binding peptide
  MOD_RES (6)..(7)..(40): Xaa is C or S
  MOD_RES (21)..(22)..(23)..(24)..(25): Xaa is A or G
  MOD_RES (26)..(27)..(28)..(29): Xaa is A or G or is absent

SEQ ID NO: 80506 - protein, 36 aa, Artificial Sequence; identical to SEQ ID NO: 9001
  GFR-binding peptide
  MOD_RES (2)..(3): Xaa is C or S
  MOD_RES (17)..(18)..(19)..(20)..(21): Xaa is A or G
  MOD_RES (22)..(23)..(24)..(25): Xaa is A or G or is absent

SEQ ID NO: 80507 - protein, 36 aa, Artificial Sequence; identical to SEQ ID NO: 7237
  GFR-binding peptide
  MOD_RES (3)..(4)..(35): Xaa is C or S

SEQ ID NO: 80508 - protein, 36 aa, Artificial Sequence; identical to SEQ ID NO: 7239
  GFR-binding peptide
  MOD_RES (3)..(4): Xaa is C or S
  MOD_RES (18)..(19)..(20)..(21)..(22): Xaa is A or G
  MOD_RES (23)..(24)..(25)..(26): Xaa is A or G or is absent

SEQ ID NO: 80509 - protein, 31 aa, Artificial Sequence; identical to SEQ ID NO: 9003
  GFR-binding peptide
  MOD_RES (1)..(1): Xaa is C or S

SEQ ID NO: 80510 - protein, 38 aa, Artificial Sequence; identical to SEQ ID NO: 9005
  GFR-binding peptide
  MOD_RES (3)..(4)..(36)..(38): Xaa is C or S

SEQ ID NO: 80511 - protein, 42 aa, Artificial Sequence; identical to SEQ ID NO: 9006
  GFR-binding peptide
  MOD_RES (5)..(6)..(40)..(42): Xaa is C or S
  MOD_RES (20)..(21)..(22)..(23)..(24): Xaa is A or G
  MOD_RES (25)..(26)..(27)..(28): Xaa is A or G or is absent

SEQ ID NO: 80512 - protein, 39 aa, Artificial Sequence; identical to SEQ ID NO: 9009
  GFR-binding peptide
  MOD_RES (1)..(2)..(36)..(38): Xaa is C or S
  MOD_RES (16)..(17)..(18)..(19)..(20): Xaa is A or G
  MOD_RES (21)..(22)..(23)..(24): Xaa is A or G or is absent

SEQ ID NO: 80513 - protein, 42 aa, Artificial Sequence; identical to SEQ ID NO: 16301
  GFR-binding peptide
  MOD_RES (4)..(5)..(39)..(41): Xaa is C or S
  MOD_RES (19)..(20)..(21)..(22)..(23): Xaa is A or G
  MOD_RES (24)..(25)..(26)..(27): Xaa is A or G or is absent

SEQ ID NO: 80514 - protein, 31 aa, Artificial Sequence; identical to SEQ ID NO: 16304
  GFR-binding peptide

SEQ ID NO: 80515 - protein, 40 aa, Artificial Sequence
  GFR-binding peptide
  MOD_RES (2)..(3)..(37)..(39): Xaa is C or S
  MOD_RES (17)..(18)..(19)..(20)..(21): Xaa is A or G
  MOD_RES (22)..(23)..(24)..(25): Xaa is A or G or is absent
SXXVPARLSAISILYLXXXXXXXXXLKNYQDMVVEAXGXR

SEQ ID NO: 80516 - protein, 33 aa, Artificial Sequence; identical to SEQ ID NO: 9011
  GFR-binding peptide
  MOD_RES (1)..(2): Xaa is C or S

SEQ ID NO: 80517 - protein, 32 aa, Artificial Sequence; identical to SEQ ID NO: 9012
  GFR-binding peptide
  MOD_RES (1)..(2): Xaa is C or S

SEQ ID NO: 80518 - protein, 44 aa, Artificial Sequence; identical to SEQ ID NO: 9014
  GFR-binding peptide
  MOD_RES (6)..(7)..(41)..(43): Xaa is C or S
  MOD_RES (21)..(22)..(23)..(24)..(25): Xaa is A or G
  MOD_RES (26)..(27)..(28)..(29): Xaa is A or G or is absent

SEQ ID NO: 80519 - protein, 37 aa, Artificial Sequence; identical to SEQ ID NO: 57389
  GFR-binding peptide
  MOD_RES (2)..(3)..(37): Xaa is C or S
  MOD_RES (17)..(18)..(19)..(20)..(21): Xaa is A or G
  MOD_RES (22)..(23)..(24)..(25): Xaa is A or G or is absent

SEQ ID NO: 80520 - protein, 36 aa, Artificial Sequence; identical to SEQ ID NO: 57390
  GFR-binding peptide
  MOD_RES (33)..(35): Xaa is C or S
  MOD_RES (14)..(15)..(16)..(17)..(18): Xaa is A or G
  MOD_RES (19)..(20)..(21)..(22): Xaa is A or G or is absent

SEQ ID NO: 80521 - protein, 34 aa, Artificial Sequence; identical to SEQ ID NO: 9015
  GFR-binding peptide
  MOD_RES (1)..(32)..(34): Xaa is C or S

SEQ ID NO: 80522 - protein, 43 aa, Artificial Sequence; identical to SEQ ID NO: 7248
  GFR-binding peptide
  MOD_RES (5)..(6)..(40)..(42): Xaa is C or S
  MOD_RES (20)..(21)..(22)..(23)..(24): Xaa is A or G
  MOD_RES (25)..(26)..(27)..(28): Xaa is A or G or is absent

SEQ ID NO: 80523 - protein, 39 aa, Artificial Sequence; identical to SEQ ID NO: 9017
  GFR-binding peptide
  MOD_RES (7)..(7): Xaa is C or S
  MOD_RES (21)..(22)..(23)..(24)..(25): Xaa is A or G
  MOD_RES (26)..(27)..(28)..(29): Xaa is A or G or is absent

SEQ ID NO: 80524 - protein, 45 aa, Artificial Sequence; identical to SEQ ID NO: 9018
  GFR-binding peptide
  MOD_RES (6)..(7)..(42)..(44): Xaa is C or S
  MOD_RES (21)..(22)..(23)..(24)..(25): Xaa is A or G
  MOD_RES (26)..(27)..(28)..(29): Xaa is A or G or is absent

SEQ ID NO: 80525 - protein, 37 aa, Artificial Sequence; identical to SEQ ID NO: 9019
  GFR-binding peptide
  MOD_RES (6)..(7): Xaa is C or S

SEQ ID NO: 80526 - protein, 40 aa, Artificial Sequence; identical to SEQ ID NO: 9020
  GFR-binding peptide
  MOD_RES (5)..(6)..(40): Xaa is C or S
  MOD_RES (20)..(21)..(22)..(23)..(24): Xaa is A or G
  MOD_RES (25)..(26)..(27)..(28): Xaa is A or G or is absent

SEQ ID NO: 80527 - protein, 35 aa, Artificial Sequence; identical to SEQ ID NO: 7252
  GFR-binding peptide
  MOD_RES (2)..(3)..(35): Xaa is C or S

SEQ ID NO: 80528 - protein, 39 aa, Artificial Sequence; identical to SEQ ID NO: 16319
  GFR-binding peptide
  MOD_RES (5)..(6): Xaa is C or S
  MOD_RES (20)..(21)..(22)..(23)..(24): Xaa is A or G
  MOD_RES (25)..(26)..(27)..(28): Xaa is A or G or is absent

SEQ ID NO: 80529 - protein, 35 aa, Artificial Sequence
  GFR-binding peptide
  MOD_RES (32)..(34): Xaa is C or S
VPEKMSAISILYLDENKNVVLKNYQNMTVESXAXR

SEQ ID NO: 80530 - protein, 38 aa, Artificial Sequence
  GFR-binding peptide
  MOD_RES (2)..(3)..(35)..(37): Xaa is C or S
PXXTPTKMSAISMLYLNDKQQIILKNYQGMVVDRXGXS

SEQ ID NO: 80531 - protein, 36 aa, Artificial Sequence; identical to SEQ ID NO: 57397
  GFR-binding peptide
  MOD_RES (5)..(6): Xaa is C or S

SEQ ID NO: 80532 - protein, 38 aa, Artificial Sequence
  GFR-binding peptide
  MOD_RES (2)..(3)..(36)..(38): Xaa is C or S
  MOD_RES (17)..(18)..(19)..(20)..(21): Xaa is A or G
  MOD_RES (22)..(23)..(24)..(25): Xaa is A or G or is absent
TXXAPVKTSAISMLYLXXXXXXXXXLKNYQMIVEEXGX

SEQ ID NO: 80533 - protein, 40 aa, Artificial Sequence; identical to SEQ ID NO: 28438
  GFR-binding peptide
  MOD_RES (5)..(6)..(38)..(40): Xaa is C or S

SEQ ID NO: 80534 - protein, 38 aa, Artificial Sequence; identical to SEQ ID NO: 7254
  GFR-binding peptide
  MOD_RES (3)..(4)..(38): Xaa is C or S
  MOD_RES (18)..(19)..(20)..(21)..(22): Xaa is A or G
  MOD_RES (23)..(24)..(25)..(26): Xaa is A or G or is absent

SEQ ID NO: 80535 - protein, 32 aa, Artificial Sequence
  GFR-binding peptide
  MOD_RES (1)..(1): Xaa is C or S
XTPTKMSAISMLYLNDKQQIILKNYQGMVVDR

SEQ ID NO: 80536 - protein, 37 aa, Artificial Sequence; identical to SEQ ID NO: 7255
  GFR-binding peptide
  MOD_RES (4)..(5): Xaa is C or S
  MOD_RES (19)..(20)..(21)..(22)..(23): Xaa is A or G
  MOD_RES (24)..(25)..(26)..(27): Xaa is A or G or is absent

SEQ ID NO: 80537 - protein, 40 aa, Artificial Sequence; identical to SEQ ID NO: 7256
  GFR-binding peptide
  MOD_RES (5)..(6)..(37)..(39): Xaa is C or S

SEQ ID NO: 80538 - protein, 44 aa, Artificial Sequence; identical to SEQ ID NO: 14555
  GFR-binding peptide
  MOD_RES (6)..(7)..(41)..(43): Xaa is C or S
  MOD_RES (21)..(22)..(23)..(24)..(25): Xaa is A or G
  MOD_RES (26)..(27)..(28)..(29): Xaa is A or G or is absent

SEQ ID NO: 80539 - protein, 40 aa, Artificial Sequence; identical to SEQ ID NO: 7257
  GFR-binding peptide
  MOD_RES (4)..(5)..(39): Xaa is C or S
  MOD_RES (19)..(20)..(21)..(22)..(23): Xaa is A or G
  MOD_RES (24)..(25)..(26)..(27): Xaa is A or G or is absent

SEQ ID NO: 80540 - protein, 35 aa, Artificial Sequence; identical to SEQ ID NO: 7258
  GFR-binding peptide
  MOD_RES (1)..(2): Xaa is C or S
  MOD_RES (16)..(17)..(18)..(19)..(20): Xaa is A or G
  MOD_RES (21)..(22)..(23)..(24): Xaa is A or G or is absent

SEQ ID NO: 80541 - protein, 36 aa, Artificial Sequence
  GFR-binding peptide
  MOD_RES (2)..(3)..(36): Xaa is C or S
  MOD_RES (17)..(18)..(19)..(20)..(21): Xaa is A or G
  MOD_RES (22)..(23)..(24)..(25): Xaa is A or G or is absent
TXXAPVKTSAISMLYLXXXXXXXXXLKNYQMIVEEX

SEQ ID NO: 80542 - protein, 30 aa, Artificial Sequence; identical to SEQ ID NO: 7259
  GFR-binding peptide

SEQ ID NO: 80543 - protein, 41 aa, Artificial Sequence; identical to SEQ ID NO: 9027
  GFR-binding peptide
  MOD_RES (6)..(7)..(41): Xaa is C or S
  MOD_RES (21)..(22)..(23)..(24)..(25): Xaa is A or G
  MOD_RES (26)..(27)..(28)..(29): Xaa is A or G or is absent

SEQ ID NO: 80544 - protein, 39 aa, Artificial Sequence; identical to SEQ ID NO: 16329
  GFR-binding peptide
  MOD_RES (5)..(6): Xaa is C or S
  MOD_RES (20)..(21)..(22)..(23)..(24): Xaa is A or G
  MOD_RES (25)..(26)..(27)..(28): Xaa is A or G or is absent

SEQ ID NO: 80545 - protein, 33 aa, Artificial Sequence; identical to SEQ ID NO: 9030
  GFR-binding peptide
  MOD_RES (2)..(3): Xaa is C or S

SEQ ID NO: 80546 - protein, 37 aa, Artificial Sequence; identical to SEQ ID NO: 30415
  GFR-binding peptide
  MOD_RES (1)..(2)..(36): Xaa is C or S
  MOD_RES (16)..(17)..(18)..(19)..(20): Xaa is A or G
  MOD_RES (21)..(22)..(23)..(24): Xaa is A or G or is absent

SEQ ID NO: 80547 - protein, 37 aa, Artificial Sequence
  GFR-binding peptide
  MOD_RES (6)..(7): Xaa is C or S
GIPEPXXVPEKMSAISILYLDENKNVVLKNYQNMTVE

SEQ ID NO: 80548 - protein, 35 aa, Artificial Sequence; identical to SEQ ID NO: 9031
  GFR-binding peptide
  MOD_RES (2)..(3): Xaa is C or S

SEQ ID NO: 80549 - protein, 33 aa, Artificial Sequence; identical to SEQ ID NO: 9032
  GFR-binding peptide
  MOD_RES (1)..(33): Xaa is C or S

SEQ ID NO: 80550 - protein, 40 aa, Artificial Sequence; identical to SEQ ID NO: 9033
  GFR-binding peptide
  MOD_RES (6)..(7): Xaa is C or S
  MOD_RES (21)..(22)..(23)..(24)..(25): Xaa is A or G
  MOD_RES (26)..(27)..(28)..(29): Xaa is A or G or is absent

SEQ ID NO: 80551 - protein, 42 aa, Artificial Sequence; identical to SEQ ID NO: 7262
  GFR-binding peptide
  MOD_RES (4)..(5)..(40)..(42): Xaa is C or S
  MOD_RES (19)..(20)..(21)..(22)..(23): Xaa is A or G
  MOD_RES (24)..(25)..(26)..(27): Xaa is A or G or is absent

SEQ ID NO: 80552 - protein, 36 aa, Artificial Sequence
  GFR-binding peptide
  MOD_RES (3)..(4): Xaa is C or S
  MOD_RES (18)..(19)..(20)..(21)..(22): Xaa is A or G
  MOD_RES (23)..(24)..(25)..(26): Xaa is A or G or is absent
EPXXVPEKMSAISILYLXXXXXXXXXLKNYQNMTVE

SEQ ID NO: 80553 - protein, 40 aa, Artificial Sequence; identical to SEQ ID NO: 7264
  GFR-binding peptide
  MOD_RES (3)..(4)..(37)..(39): Xaa is C or S

SEQ ID NO: 80554 - protein, 36 aa, Artificial Sequence; identical to SEQ ID NO: 9036
  GFR-binding peptide
  MOD_RES (2)..(34)..(36): Xaa is C or S

SEQ ID NO: 80555 - protein, 42 aa, Artificial Sequence
  GFR-binding peptide
  MOD_RES (6)..(7)..(39)..(41): Xaa is C or S
GIPEPXXVPEKMSAISILYLDENKNVVLKNYQNMTVESXAXR

SEQ ID NO: 80556 - protein, 37 aa, Artificial Sequence; identical to SEQ ID NO: 7266
  GFR-binding peptide
  MOD_RES (3)..(4): Xaa is C or S
  MOD_RES (18)..(19)..(20)..(21)..(22): Xaa is A or G
  MOD_RES (23)..(24)..(25)..(26): Xaa is A or G or is absent

SEQ ID NO: 80557 - protein, 36 aa, Artificial Sequence; identical to SEQ ID NO: 9038
  GFR-binding peptide
  MOD_RES (1)..(34)..(36): Xaa is C or S
  MOD_RES (15)..(16)..(17)..(18)..(19): Xaa is A or G
  MOD_RES (20)..(21)..(22)..(23): Xaa is A or G or is absent

SEQ ID NO: 80558 - protein, 36 aa, Artificial Sequence; identical to SEQ ID NO: 9040
  GFR-binding peptide
  MOD_RES (33)..(35): Xaa is C or S
  MOD_RES (14)..(15)..(16)..(17)..(18): Xaa is A or G
  MOD_RES (19)..(20)..(21)..(22): Xaa is A or G or is absent

SEQ ID NO: 80559 - protein, 37 aa, Artificial Sequence
  GFR-binding peptide
  MOD_RES (6)..(7): Xaa is C or S
AAPASXXVPARLSAISILYLDAANNVVLKNYQDMVVE

SEQ ID NO: 80560 - protein, 35 aa, Artificial Sequence; identical to SEQ ID NO: 16339
  GFR-binding peptide
  MOD_RES (1)..(2): Xaa is C or S
  MOD_RES (16)..(17)..(18)..(19)..(20): Xaa is A or G
  MOD_RES (21)..(22)..(23)..(24): Xaa is A or G or is absent

SEQ ID NO: 80561 - protein, 35 aa, Artificial Sequence; identical to SEQ ID NO: 30427
  GFR-binding peptide
  MOD_RES (4)..(5): Xaa is C or S

SEQ ID NO: 80562 - protein, 36 aa, Artificial Sequence; identical to SEQ ID NO: 7272
  GFR-binding peptide
  MOD_RES (3)..(4): Xaa is C or S
  MOD_RES (18)..(19)..(20)..(21)..(22): Xaa is A or G
  MOD_RES (23)..(24)..(25)..(26): Xaa is A or G or is absent

SEQ ID NO: 80563 - protein, 32 aa, Artificial Sequence; identical to SEQ ID NO: 28449
  GFR-binding peptide
  MOD_RES (32)..(32): Xaa is C or S

SEQ ID NO: 80564 - protein, 37 aa, Artificial Sequence
  GFR-binding peptide
  MOD_RES (34)..(36): Xaa is C or S
  MOD_RES (14)..(15)..(16)..(17)..(18): Xaa is A or G
  MOD_RES (19)..(20)..(21)..(22): Xaa is A or G or is absent
VPTKLSAISILYLXXXXXXXXXLKNYQGMAVSEXGXR

SEQ ID NO: 80565 - protein, 38 aa, Artificial Sequence; identical to SEQ ID NO: 7274
  GFR-binding peptide
  MOD_RES (6)..(7)..(38): Xaa is C or S

SEQ ID NO: 80566 - protein, 39 aa, Artificial Sequence; identical to SEQ ID NO: 9041
  GFR-binding peptide
  MOD_RES (3)..(4)..(37)..(39): Xaa is C or S
  MOD_RES (18)..(19)..(20)..(21)..(22): Xaa is A or G
  MOD_RES (23)..(24)..(25)..(26): Xaa is A or G or is absent

SEQ ID NO: 80567 - protein, 40 aa, Artificial Sequence; identical to SEQ ID NO: 28451
  GFR-binding peptide
  MOD_RES (4)..(5)..(39): Xaa is C or S
  MOD_RES (19)..(20)..(21)..(22)..(23): Xaa is A or G
  MOD_RES (24)..(25)..(26)..(27): Xaa is A or G or is absent

SEQ ID NO: 80568 - protein, 37 aa, Artificial Sequence
  GFR-binding peptide
  MOD_RES (1)..(35)..(37): Xaa is C or S
  MOD_RES (15)..(16)..(17)..(18)..(19): Xaa is A or G
  MOD_RES (20)..(21)..(22)..(23): Xaa is A or G or is absent
XVPTKLSAISILYLXXXXXXXXXLKNYQGMAVSEXGX

SEQ ID NO: 80569 - protein, 39 aa, Artificial Sequence; identical to SEQ ID NO: 9042
  GFR-binding peptide
  MOD_RES (3)..(37)..(39): Xaa is C or S
  MOD_RES (17)..(18)..(19)..(20)..(21): Xaa is A or G
  MOD_RES (22)..(23)..(24)..(25): Xaa is A or G or is absent

SEQ ID NO: 80570 - protein, 37 aa, Artificial Sequence
  GFR-binding peptide
  MOD_RES (3)..(4): Xaa is C or S
  MOD_RES (18)..(19)..(20)..(21)..(22): Xaa is A or G
  MOD_RES (23)..(24)..(25)..(26): Xaa is A or G or is absent
GPXXTPTKMSAISMLYLXXXXXXXXXLKNYQGMVVDR

SEQ ID NO: 80571 - protein, 41 aa, Artificial Sequence; identical to SEQ ID NO: 9043
  GFR-binding peptide
  MOD_RES (6)..(38)..(40): Xaa is C or S

SEQ ID NO: 80572 - protein, 39 aa, Artificial Sequence; identical to SEQ ID NO: 9044
  GFR-binding peptide
  MOD_RES (5)..(6)..(38): Xaa is C or S

SEQ ID NO: 80573 - protein, 33 aa, Artificial Sequence
  GFR-binding peptide
  MOD_RES (1)..(33): Xaa is C or S
XVPARLSAISILYLDAANNVVLKNYQDMVVEAX

SEQ ID NO: 80574 - protein, 34 aa, Artificial Sequence; identical to SEQ ID NO: 7279
  GFR-binding peptide
  MOD_RES (3)..(4): Xaa is C or S

SEQ ID NO: 80575 - protein, 37 aa, Artificial Sequence; identical to SEQ ID NO: 9047
  GFR-binding peptide
  MOD_RES (34)..(36): Xaa is C or S
  MOD_RES (14)..(15)..(16)..(17)..(18): Xaa is A or G
  MOD_RES (19)..(20)..(21)..(22): Xaa is A or G or is absent

SEQ ID NO: 80576 - protein, 39 aa, Artificial Sequence; identical to SEQ ID NO: 7281
  GFR-binding peptide
  MOD_RES (5)..(6)..(38): Xaa is C or S

SEQ ID NO: 80577 - protein, 40 aa, Artificial Sequence; identical to SEQ ID NO: 9050
  GFR-binding peptide
  MOD_RES (5)..(6)..(37)..(39): Xaa is C or S

SEQ ID NO: 80578 - protein, 36 aa, Artificial Sequence; identical to SEQ ID NO: 7282
  GFR-binding peptide
  MOD_RES (2)..(3)..(36): Xaa is C or S

SEQ ID NO: 80579 - protein, 43 aa, Artificial Sequence; identical to SEQ ID NO: 9053
  GFR-binding peptide
  MOD_RES (5)..(6)..(40)..(42): Xaa is C or S
  MOD_RES (20)..(21)..(22)..(23)..(24): Xaa is A or G
  MOD_RES (25)..(26)..(27)..(28): Xaa is A or G or is absent

SEQ ID NO: 80580 - protein, 40 aa, Artificial Sequence; identical to SEQ ID NO: 9054
  GFR-binding peptide
  MOD_RES (6)..(7): Xaa is C or S
  MOD_RES (21)..(22)..(23)..(24)..(25): Xaa is A or G
  MOD_RES (26)..(27)..(28)..(29): Xaa is A or G or is absent

SEQ ID NO: 80581 - protein, 37 aa, Artificial Sequence; identical to SEQ ID NO: 7283
  GFR-binding peptide
  MOD_RES (1)..(35)..(37): Xaa is C or S
  MOD_RES (15)..(16)..(17)..(18)..(19): Xaa is A or G
  MOD_RES (20)..(21)..(22)..(23): Xaa is A or G or is absent

SEQ ID NO: 80582 - protein, 35 aa, Artificial Sequence; identical to SEQ ID NO: 9055
  GFR-binding peptide
  MOD_RES (4)..(5): Xaa is C or S

SEQ ID NO: 80583 - protein, 42 aa, Artificial Sequence; identical to SEQ ID NO: 9056
  GFR-binding peptide
  MOD_RES (6)..(7)..(41): Xaa is C or S
  MOD_RES (21)..(22)..(23)..(24)..(25): Xaa is A or G
  MOD_RES (26)..(27)..(28)..(29): Xaa is A or G or is absent

SEQ ID NO: 80584 - protein, 32 aa, Artificial Sequence
  GFR-binding peptide
  MOD_RES (1)..(2): Xaa is C or S
XXVPARLSAISILYLDAANNVVLKNYQDMVVE

SEQ ID NO: 80585 - protein, 42 aa, Artificial Sequence; identical to SEQ ID NO: 16356
  GFR-binding peptide
  MOD_RES (6)..(7)..(39)..(41): Xaa is C or S

SEQ ID NO: 80586 - protein, 42 aa, Artificial Sequence; identical to SEQ ID NO: 14584
  GFR-binding peptide
  MOD_RES (5)..(6)..(40)..(42): Xaa is C or S
  MOD_RES (20)..(21)..(22)..(23)..(24): Xaa is A or G
  MOD_RES (25)..(26)..(27)..(28): Xaa is A or G or is absent

SEQ ID NO: 80587 - protein, 34 aa, Artificial Sequence; identical to SEQ ID NO: 28462
  GFR-binding peptide
  MOD_RES (2)..(3): Xaa is C or S

SEQ ID NO: 80588 - protein, 35 aa, Artificial Sequence; identical to SEQ ID NO: 57439
  GFR-binding peptide
  MOD_RES (32)..(34): Xaa is C or S

SEQ ID NO: 80589 - protein, 33 aa, Artificial Sequence; identical to SEQ ID NO: 30438
  GFR-binding peptide
  MOD_RES (32)..(32): Xaa is C or S

SEQ ID NO: 80590 - protein, 37 aa, Artificial Sequence; identical to SEQ ID NO: 7287
  GFR-binding peptide
  MOD_RES (3)..(4): Xaa is C or S
  MOD_RES (18)..(19)..(20)..(21)..(22): Xaa is A or G
  MOD_RES (23)..(24)..(25)..(26): Xaa is A or G or is absent

SEQ ID NO: 80591 - protein, 33 aa, Artificial Sequence; identical to SEQ ID NO: 28466
  GFR-binding peptide
  MOD_RES (14)..(15)..(16)..(17)..(18): Xaa is A or G
  MOD_RES (19)..(20)..(21)..(22): Xaa is A or G or is absent

SEQ ID NO: 80592 - protein, 42 aa, Artificial Sequence; identical to SEQ ID NO: 7288
  GFR-binding peptide
  MOD_RES (5)..(6)..(40)..(42): Xaa is C or S
  MOD_RES (20)..(21)..(22)..(23)..(24): Xaa is A or G
  MOD_RES (25)..(26)..(27)..(28): Xaa is A or G or is absent

SEQ ID NO: 80593 - protein, 35 aa, Artificial Sequence; identical to SEQ ID NO: 57446
  GFR-binding peptide
  MOD_RES (3)..(4): Xaa is C or S

SEQ ID NO: 80594 - protein, 34 aa, Artificial Sequence; identical to SEQ ID NO: 7289
  GFR-binding peptide
  MOD_RES (31)..(33): Xaa is C or S

SEQ ID NO: 80595 - protein, 41 aa, Artificial Sequence
  GFR-binding peptide
  MOD_RES (4)..(5)..(38)..(40): Xaa is C or S
  MOD_RES (19)..(20)..(21)..(22)..(23): Xaa is A or G
  MOD_RES (24)..(25)..(26)..(27): Xaa is A or G or is absent
PSTXXAPVKTSAISMLYLXXXXXXXXXLKNYQMIVEEXGXL

SEQ ID NO: 80596 - protein, 42 aa, Artificial Sequence; identical to SEQ ID NO: 14591
  GFR-binding peptide
  MOD_RES (6)..(7)..(41): Xaa is C or S
  MOD_RES (21)..(22)..(23)..(24)..(25): Xaa is A or G
  MOD_RES (26)..(27)..(28)..(29): Xaa is A or G or is absent

SEQ ID NO: 80597 - protein, 35 aa, Artificial Sequence; identical to SEQ ID NO: 7293
  GFR-binding peptide
  MOD_RES (4)..(5): Xaa is C or S

SEQ ID NO: 80598 - protein, 35 aa, Artificial Sequence; identical to SEQ ID NO: 7294
  GFR-binding peptide
  MOD_RES (33)..(35): Xaa is C or S

SEQ ID NO: 80599 - protein, 39 aa, Artificial Sequence; identical to SEQ ID NO: 16361
  GFR-binding peptide
  MOD_RES (5)..(6)..(38): Xaa is C or S

SEQ ID NO: 80600 - protein, 41 aa, Artificial Sequence; identical to SEQ ID NO: 57455
  GFR-binding peptide
  MOD_RES (6)..(7)..(40): Xaa is C or S
  MOD_RES (21)..(22)..(23)..(24)..(25): Xaa is A or G
  MOD_RES (26)..(27)..(28)..(29): Xaa is A or G or is absent

SEQ ID NO: 80601 - protein, 35 aa, Artificial Sequence
  GFR-binding peptide
  MOD_RES (33)..(35): Xaa is C or S
  MOD_RES (14)..(15)..(16)..(17)..(18): Xaa is A or G
  MOD_RES (19)..(20)..(21)..(22): Xaa is A or G or is absent
APVKTSAISMLYLXXXXXXXXXLKNYQMIVEEXGX

SEQ ID NO: 80602 - protein, 35 aa, Artificial Sequence; identical to SEQ ID NO: 7297
  GFR-binding peptide
  MOD_RES (1)..(2): Xaa is C or S
  MOD_RES (16)..(17)..(18)..(19)..(20): Xaa is A or G
  MOD_RES (21)..(22)..(23)..(24): Xaa is A or G or is absent

SEQ ID NO: 80603 - protein, 30 aa, Artificial Sequence; identical to SEQ ID NO: 57457
  GFR-binding peptide

SEQ ID NO: 80604 - protein, 39 aa, Artificial Sequence; identical to SEQ ID NO: 9070
  GFR-binding peptide
  MOD_RES (3)..(4)..(37)..(39): Xaa is C or S
  MOD_RES (18)..(19)..(20)..(21)..(22): Xaa is A or G
  MOD_RES (23)..(24)..(25)..(26): Xaa is A or G or is absent

SEQ ID NO: 80605 - protein, 38 aa, Artificial Sequence; identical to SEQ ID NO: 9071
  GFR-binding peptide
  MOD_RES (3)..(4)..(37): Xaa is C or S
  MOD_RES (18)..(19)..(20)..(21)..(22): Xaa is A or G
  MOD_RES (23)..(24)..(25)..(26): Xaa is A or G or is absent

SEQ ID NO: 80606 - protein, 32 aa, Artificial Sequence; identical to SEQ ID NO: 14597
  GFR-binding peptide
  MOD_RES (32)..(32): Xaa is C or S

SEQ ID NO: 80607 - protein, 35 aa, Artificial Sequence; identical to SEQ ID NO: 9072
  GFR-binding peptide
  MOD_RES (1)..(35): Xaa is C or S
  MOD_RES (15)..(16)..(17)..(18)..(19): Xaa is A or G
  MOD_RES (20)..(21)..(22)..(23): Xaa is A or G or is absent

SEQ ID NO: 80608 - protein, 39 aa, Artificial Sequence
  GFR-binding peptide
  MOD_RES (2)..(3)..(37)..(39): Xaa is C or S
  MOD_RES (17)..(18)..(19)..(20)..(21): Xaa is A or G
  MOD_RES (22)..(23)..(24)..(25): Xaa is A or G or is absent
AXXVPTKLSAISILYLXXXXXXXXXLKNYQGMAVSEXGX

SEQ ID NO: 80609 - protein, 41 aa, Artificial Sequence; identical to SEQ ID NO: 7302
  GFR-binding peptide
  MOD_RES (5)..(6)..(39)..(41): Xaa is C or S
  MOD_RES (20)..(21)..(22)..(23)..(24): Xaa is A or G
  MOD_RES (25)..(26)..(27)..(28): Xaa is A or G or is absent

SEQ ID NO: 80610 - protein, 37 aa, Artificial Sequence; identical to SEQ ID NO: 7303
  GFR-binding peptide
  MOD_RES (4)..(5): Xaa is C or S
  MOD_RES (19)..(20)..(21)..(22)..(23): Xaa is A or G
  MOD_RES (24)..(25)..(26)..(27): Xaa is A or G or is absent

SEQ ID NO: 80611 - protein, 40 aa, Artificial Sequence; identical to SEQ ID NO: 57462
  GFR-binding peptide
  MOD_RES (5)..(6)..(39): Xaa is C or S
  MOD_RES (20)..(21)..(22)..(23)..(24): Xaa is A or G
  MOD_RES (25)..(26)..(27)..(28): Xaa is A or G or is absent

SEQ ID NO: 80612 - protein, 37 aa, Artificial Sequence
  GFR-binding peptide
  MOD_RES (4)..(5): Xaa is C or S
  MOD_RES (19)..(20)..(21)..(22)..(23): Xaa is A or G
  MOD_RES (24)..(25)..(26)..(27): Xaa is A or G or is absent
PSTXXAPVKTSAISMLYLXXXXXXXXXLKNYQMIVEE

SEQ ID NO: 80613 - protein, 42 aa, Artificial Sequence; identical to SEQ ID NO: 30456
  GFR-binding peptide
  MOD_RES (6)..(7)..(41): Xaa is C or S
  MOD_RES (21)..(22)..(23)..(24)..(25): Xaa is A or G
  MOD_RES (26)..(27)..(28)..(29): Xaa is A or G or is absent

SEQ ID NO: 80614 - protein, 34 aa, Artificial Sequence; identical to SEQ ID NO: 7305
  GFR-binding peptide
  MOD_RES (1)..(2): Xaa is C or S
  MOD_RES (16)..(17)..(18)..(19)..(20): Xaa is A or G
  MOD_RES (21)..(22)..(23)..(24): Xaa is A or G or is absent

SEQ ID NO: 80615 - protein, 37 aa, Artificial Sequence
  GFR-binding peptide
  MOD_RES (1)..(2)..(34)..(36): Xaa is C or S
XXVPEKMSAISILYLDENKNVVLKNYQNMTVESXAXR

SEQ ID NO: 80616 - protein, 37 aa, Artificial Sequence; identical to SEQ ID NO: 9075
  GFR-binding peptide
  MOD_RES (1)..(2)..(34)..(36): Xaa is C or S

SEQ ID NO: 80617 - protein, 39 aa, Artificial Sequence; identical to SEQ ID NO: 7308
  GFR-binding peptide
  MOD_RES (3)..(4)..(38): Xaa is C or S
  MOD_RES (18)..(19)..(20)..(21)..(22): Xaa is A or G
  MOD_RES (23)..(24)..(25)..(26): Xaa is A or G or is absent

SEQ ID NO: 80618 - protein, 35 aa, Artificial Sequence; identical to SEQ ID NO: 28490
  GFR-binding peptide
  MOD_RES (2)..(3)..(35): Xaa is C or S

SEQ ID NO: 80619 - protein, 36 aa, Artificial Sequence; identical to SEQ ID NO: 9079
  GFR-binding peptide
  MOD_RES (1)..(35): Xaa is C or S
  MOD_RES (15)..(16)..(17)..(18)..(19): Xaa is A or G
  MOD_RES (20)..(21)..(22)..(23): Xaa is A or G or is absent

SEQ ID NO: 80620 - protein, 31 aa, Artificial Sequence; identical to SEQ ID NO: 9080
  GFR-binding peptide
  MOD_RES (1)..(1): Xaa is C or S

SEQ ID NO: 80621 - protein, 44 aa, Artificial Sequence; identical to SEQ ID NO: 9081
  GFR-binding peptide
  MOD_RES (5)..(6)..(41)..(43): Xaa is C or S
  MOD_RES (20)..(21)..(22)..(23)..(24): Xaa is A or G
  MOD_RES (25)..(26)..(27)..(28): Xaa is A or G or is absent

SEQ ID NO: 80622 - protein, 37 aa, Artificial Sequence; identical to SEQ ID NO: 57469
  GFR-binding peptide
  MOD_RES (4)..(5)..(37): Xaa is C or S

SEQ ID NO: 80623 - protein, 41 aa, Artificial Sequence; identical to SEQ ID NO: 9083
  GFR-binding peptide
  MOD_RES (6)..(7)..(39)..(41): Xaa is C or S

SEQ ID NO: 80624 - protein, 41 aa, Artificial Sequence
  GFR-binding peptide
  MOD_RES (5)..(6)..(40): Xaa is C or S
  MOD_RES (20)..(21)..(22)..(23)..(24): Xaa is A or G
  MOD_RES (25)..(26)..(27)..(28): Xaa is A or G or is absent
ASKAXXVPTKLSAISILYLXXXXXXXXXLKNYQGMAVSEXG

SEQ ID NO: 80625 - protein, 41 aa, Artificial Sequence
  GFR-binding peptide
  MOD_RES (4)..(5)..(39)..(41): Xaa is C or S
  MOD_RES (19)..(20)..(21)..(22)..(23): Xaa is A or G
  MOD_RES (24)..(25)..(26)..(27): Xaa is A or G or is absent
AGPXXTPTKMSAISMLYLXXXXXXXXXLKNYQGMVVDRXGX

SEQ ID NO: 80626 - protein, 36 aa, Artificial Sequence; identical to SEQ ID NO: 9085
  GFR-binding peptide
  MOD_RES (3)..(4): Xaa is C or S
  MOD_RES (18)..(19)..(20)..(21)..(22): Xaa is A or G
  MOD_RES (23)..(24)..(25)..(26): Xaa is A or G or is absent

SEQ ID NO: 80627 - protein, 38 aa, Artificial Sequence
  GFR-binding peptide
  MOD_RES (6)..(7): Xaa is C or S
AAPASXXVPARLSAISILYLDAANNVVLKNYQDMVVEA

SEQ ID NO: 80628 - protein, 43 aa, Artificial Sequence; identical to SEQ ID NO: 30466
  GFR-binding peptide
  MOD_RES (6)..(7)..(41)..(43): Xaa is C or S
  MOD_RES (21)..(22)..(23)..(24)..(25): Xaa is A or G
  MOD_RES (26)..(27)..(28)..(29): Xaa is A or G or is absent

SEQ ID NO: 80629 - protein, 35 aa, Artificial Sequence; identical to SEQ ID NO: 14610
  GFR-binding peptide
  MOD_RES (4)..(5): Xaa is C or S

SEQ ID NO: 80630 - protein, 31 aa, Artificial Sequence
  GFR-binding peptide
  MOD_RES (1)..(1): Xaa is C or S
XAPVKTSAISMLYLDNGRVLLLKNYQMIVEE

SEQ ID NO: 80631 - protein, 34 aa, Artificial Sequence; identical to SEQ ID NO: 57478
  GFR-binding peptide
  MOD_RES (1)..(2): Xaa is C or S
  MOD_RES (16)..(17)..(18)..(19)..(20): Xaa is A or G
  MOD_RES (21)..(22)..(23)..(24): Xaa is A or G or is absent

SEQ ID NO: 80632 - protein, 34 aa, Artificial Sequence
  GFR-binding peptide
  MOD_RES (1)..(2)..(34): Xaa is C or S
XXTPTKMSAISMLYLNDKQQIILKNYQGMVVDRX

SEQ ID NO: 80633 - protein, 33 aa, Artificial Sequence
  GFR-binding peptide
  MOD_RES (14)..(15)..(16)..(17)..(18): Xaa is A or G
  MOD_RES (19)..(20)..(21)..(22): Xaa is A or G or is absent
TPTKMSAISMLYLXXXXXXXXXLKNYQGMVVDR

SEQ ID NO: 80634 - protein, 40 aa, Artificial Sequence
  GFR-binding peptide
  MOD_RES (3)..(4)..(38)..(40): Xaa is C or S
  MOD_RES (18)..(19)..(20)..(21)..(22): Xaa is A or G
  MOD_RES (23)..(24)..(25)..(26): Xaa is A or G or is absent
ASXXVPARLSAISILYLXXXXXXXXXLKNYQDMVVEAXGX

SEQ ID NO: 80635 - protein, 36 aa, Artificial Sequence
  GFR-binding peptide
  MOD_RES (34)..(36): Xaa is C or S
  MOD_RES (14)..(15)..(16)..(17)..(18): Xaa is A or G
  MOD_RES (19)..(20)..(21)..(22): Xaa is A or G or is absent
VPEKMSAISILYLXXXXXXXXXLKNYQNMTVESXAX

SEQ ID NO: 80636 - protein, 35 aa, Artificial Sequence; identical to SEQ ID NO: 57483
  GFR-binding peptide
  MOD_RES (2)..(3): Xaa is C or S
  MOD_RES (17)..(18)..(19)..(20)..(21): Xaa is A or G
  MOD_RES (22)..(23)..(24)..(25): Xaa is A or G or is absent

SEQ ID NO: 80637 - protein, 34 aa, Artificial Sequence; identical to SEQ ID NO: 7319
  GFR-binding peptide
  MOD_RES (3)..(3): Xaa is C or S

SEQ ID NO: 80638 - protein, 36 aa, Artificial Sequence; identical to SEQ ID NO: 28506
  GFR-binding peptide
  MOD_RES (34)..(36): Xaa is C or S
  MOD_RES (14)..(15)..(16)..(17)..(18): Xaa is A or G
  MOD_RES (19)..(20)..(21)..(22): Xaa is A or G or is absent

SEQ ID NO: 80639 - protein, 39 aa, Artificial Sequence; identical to SEQ ID NO: 28507
  GFR-binding peptide
  MOD_RES (4)..(5)..(39): Xaa is C or S
  MOD_RES (19)..(20)..(21)..(22)..(23): Xaa is A or G
  MOD_RES (24)..(25)..(26)..(27): Xaa is A or G or is absent

SEQ ID NO: 80640 - protein, 36 aa, Artificial Sequence; identical to SEQ ID NO: 9099
  GFR-binding peptide
  MOD_RES (1)..(2)..(36): Xaa is C or S
  MOD_RES (16)..(17)..(18)..(19)..(20): Xaa is A or G
  MOD_RES (21)..(22)..(23)..(24): Xaa is A or G or is absent

SEQ ID NO: 80641 - protein, 31 aa, Artificial Sequence
  GFR-binding peptide
VPTKLSAISILYLDKGVVTYLKNYQGMAVSE

SEQ ID NO: 80642 - protein, 34 aa, Artificial Sequence; identical to SEQ ID NO: 7321
  GFR-binding peptide
  MOD_RES (1)..(1): Xaa is C or S
  MOD_RES (15)..(16)..(17)..(18)..(19): Xaa is A or G
  MOD_RES (20)..(21)..(22)..(23): Xaa is A or G or is absent

SEQ ID NO: 80643 - protein, 37 aa, Artificial Sequence; identical to SEQ ID NO: 7322
  GFR-binding peptide
  MOD_RES (2)..(3)..(34)..(36): Xaa is C or S

SEQ ID NO: 80644 - protein, 37 aa, Artificial Sequence; identical to SEQ ID NO: 7323
  GFR-binding peptide
  MOD_RES (1)..(2)..(35)..(37): Xaa is C or S
  MOD_RES (16)..(17)..(18)..(19)..(20): Xaa is A or G
  MOD_RES (21)..(22)..(23)..(24): Xaa is A or G or is absent

SEQ ID NO: 80645 - protein, 34 aa, Artificial Sequence; identical to SEQ ID NO: 7324
  GFR-binding peptide
  MOD_RES (1)..(33): Xaa is C or S

SEQ ID NO: 80646 - protein, 35 aa, Artificial Sequence; identical to SEQ ID NO: 68003
  GFR-binding peptide
  MOD_RES (2)..(3): Xaa is C or S
  MOD_RES (17)..(18)..(19)..(20)..(21): Xaa is A or G
  MOD_RES (22)..(23)..(24)..(25): Xaa is A or G or is absent

SEQ ID NO: 80647 - protein, 32 aa, Artificial Sequence; identical to SEQ ID NO: 9100
  GFR-binding peptide
  MOD_RES (1)..(2): Xaa is C or S

SEQ ID NO: 80648 - protein, 41 aa, Artificial Sequence
  GFR-binding peptide
  MOD_RES (4)..(5)..(39)..(41): Xaa is C or S
  MOD_RES (19)..(20)..(21)..(22)..(23): Xaa is A or G
  MOD_RES (24)..(25)..(26)..(27): Xaa is A or G or is absent
SKAXXVPTKLSAISILYLXXXXXXXXXLKNYQGMAVSEXGX

SEQ ID NO: 80649 - protein, 38 aa, Artificial Sequence; identical to SEQ ID NO: 9101
  GFR-binding peptide
  MOD_RES (1)..(35)..(37): Xaa is C or S
  MOD_RES (15)..(16)..(17)..(18)..(19): Xaa is A or G
  MOD_RES (20)..(21)..(22)..(23): Xaa is A or G or is absent

SEQ ID NO: 80650 - protein, 32 aa, Artificial Sequence; identical to SEQ ID NO: 71333
  GFR-binding peptide
  MOD_RES (32)..(32): Xaa is C or S

SEQ ID NO: 80651 - protein, 37 aa, Artificial Sequence; identical to SEQ ID NO: 16387
  GFR-binding peptide
  MOD_RES (2)..(3)..(37): Xaa is C or S
  MOD_RES (17)..(18)..(19)..(20)..(21): Xaa is A or G
  MOD_RES (22)..(23)..(24)..(25): Xaa is A or G or is absent

SEQ ID NO: 80652 - protein, 41 aa, Artificial Sequence; identical to SEQ ID NO: 7327
  GFR-binding peptide
  MOD_RES (4)..(5)..(38)..(40): Xaa is C or S
  MOD_RES (19)..(20)..(21)..(22)..(23): Xaa is A or G
  MOD_RES (24)..(25)..(26)..(27): Xaa is A or G or is absent

SEQ ID NO: 80653 - protein, 40 aa, Artificial Sequence; identical to SEQ ID NO: 7328
  GFR-binding peptide
  MOD_RES (6)..(7)..(39): Xaa is C or S

SEQ ID NO: 80654 - protein, 41 aa, Artificial Sequence
  GFR-binding peptide
  MOD_RES (5)..(6)..(38)..(40): Xaa is C or S
SAGPXXTPTKMSAISMLYLNDKQQIILKNYQGMVVDRXGXS

SEQ ID NO: 80655 - protein, 34 aa, Artificial Sequence
  GFR-binding peptide
  MOD_RES (1)..(32)..(34): Xaa is C or S
XAPVKTSAISMLYLDNGRVLLLKNYQMIVEEXGX

SEQ ID NO: 80656 - protein, 35 aa, Artificial Sequence; identical to SEQ ID NO: 9104
  GFR-binding peptide
  MOD_RES (33)..(35): Xaa is C or S
  MOD_RES (14)..(15)..(16)..(17)..(18): Xaa is A or G
  MOD_RES (19)..(20)..(21)..(22): Xaa is A or G or is absent

SEQ ID NO: 80657 - protein, 33 aa, Artificial Sequence; identical to SEQ ID NO: 16389
  GFR-binding peptide
  MOD_RES (14)..(15)..(16)..(17)..(18): Xaa is A or G
  MOD_RES (19)..(20)..(21)..(22): Xaa is A or G or is absent

SEQ ID NO: 80658 - protein, 34 aa, Artificial Sequence; identical to SEQ ID NO: 7329
  GFR-binding peptide
  MOD_RES (2)..(3)..(34): Xaa is C or S

SEQ ID NO: 80659 - protein, 33 aa, Artificial Sequence; identical to SEQ ID NO: 9107
  GFR-binding peptide
  MOD_RES (14)..(15)..(16)..(17)..(18): Xaa is A or G
  MOD_RES (19)..(20)..(21)..(22): Xaa is A or G or is absent

SEQ ID NO: 80660 - protein, 34 aa, Artificial Sequence; identical to SEQ ID NO: 9108
  GFR-binding peptide
  MOD_RES (1)..(33): Xaa is C or S

SEQ ID NO: 80661 - protein, 38 aa, Artificial Sequence; identical to SEQ ID NO: 28520
  GFR-binding peptide
  MOD_RES (2)..(3)..(35)..(37): Xaa is C or S

SEQ ID NO: 80662 - protein, 36 aa, Artificial Sequence; identical to SEQ ID NO: 7332
  GFR-binding peptide
  MOD_RES (2)..(3)..(34)..(36): Xaa is C or S

SEQ ID NO: 80663 - protein, 41 aa, Artificial Sequence; identical to SEQ ID NO: 9110
  GFR-binding peptide
  MOD_RES (4)..(5)..(39)..(41): Xaa is C or S
  MOD_RES (19)..(20)..(21)..(22)..(23): Xaa is A or G
  MOD_RES (24)..(25)..(26)..(27): Xaa is A or G or is absent

SEQ ID NO: 80664 - protein, 35 aa, Artificial Sequence; identical to SEQ ID NO: 28524
  GFR-binding peptide
  MOD_RES (2)..(3)..(35): Xaa is C or S

SEQ ID NO: 80665 - protein, 38 aa, Artificial Sequence; identical to SEQ ID NO: 7333
  GFR-binding peptide
  MOD_RES (3)..(4)..(35)..(37): Xaa is C or S

SEQ ID NO: 80666 - protein, 31 aa, Artificial Sequence; identical to SEQ ID NO: 9111
  GFR-binding peptide
  MOD_RES (31)..(31): Xaa is C or S

SEQ ID NO: 80667 - protein, 40 aa, Artificial Sequence; identical to SEQ ID NO: 9113
  GFR-binding peptide
  MOD_RES (5)..(6)..(39): Xaa is C or S
  MOD_RES (20)..(21)..(22)..(23)..(24): Xaa is A or G
  MOD_RES (25)..(26)..(27)..(28): Xaa is A or G or is absent

SEQ ID NO: 80668 - protein, 38 aa, Artificial Sequence; identical to SEQ ID NO: 7334
  GFR-binding peptide
  MOD_RES (4)..(5): Xaa is C or S
  MOD_RES (19)..(20)..(21)..(22)..(23): Xaa is A or G
  MOD_RES (24)..(25)..(26)..(27): Xaa is A or G or is absent

SEQ ID NO: 80669 - protein, 41 aa, Artificial Sequence; identical to SEQ ID NO: 9114
  GFR-binding peptide
  MOD_RES (4)..(5)..(38)..(40): Xaa is C or S

SEQ ID NO: 80670 - protein, 36 aa, Artificial Sequence; identical to SEQ ID NO: 7335
  GFR-binding peptide
  MOD_RES (4)..(5): Xaa is C or S

SEQ ID NO: 80671 - protein, 32 aa, Artificial Sequence; identical to SEQ ID NO: 57500
  GFR-binding peptide
  MOD_RES (14)..(15)..(16)..(17)..(18): Xaa is A or G
  MOD_RES (19)..(20)..(21)..(22): Xaa is A or G or is absent

SEQ ID NO: 80672 - protein, 33 aa, Artificial Sequence; identical to SEQ ID NO: 16397
  GFR-binding peptide
  MOD_RES (14)..(15)..(16)..(17)..(18): Xaa is A or G
  MOD_RES (19)..(20)..(21)..(22): Xaa is A or G or is absent

SEQ ID NO: 80673 - protein, 36 aa, Artificial Sequence; identical to SEQ ID NO: 9117
  GFR-binding peptide
  MOD_RES (34)..(36): Xaa is C or S
  MOD_RES (14)..(15)..(16)..(17)..(18): Xaa is A or G
  MOD_RES (19)..(20)..(21)..(22): Xaa is A or G or is absent

SEQ ID NO: 80674 - protein, 38 aa, Artificial Sequence; identical to SEQ ID NO: 7336
  GFR-binding peptide
  MOD_RES (4)..(5): Xaa is C or S
  MOD_RES (19)..(20)..(21)..(22)..(23): Xaa is A or G
  MOD_RES (24)..(25)..(26)..(27): Xaa is A or G or is absent

SEQ ID NO: 80675 - protein, 39 aa, Artificial Sequence; identical to SEQ ID NO: 9118
  GFR-binding peptide
  MOD_RES (1)..(36)..(38): Xaa is C or S
  MOD_RES (15)..(16)..(17)..(18)..(19): Xaa is A or G
  MOD_RES (20)..(21)..(22)..(23): Xaa is A or G or is absent

SEQ ID NO: 80676 - protein, 34 aa, Artificial Sequence; identical to SEQ ID NO: 28529
  GFR-binding peptide
  MOD_RES (3)..(4): Xaa is C or S

SEQ ID NO: 80677 - protein, 38 aa, Artificial Sequence; identical to SEQ ID NO: 57505
  GFR-binding peptide
  MOD_RES (3)..(4)..(35)..(37): Xaa is C or S

SEQ ID NO: 80678 - protein, 40 aa, Artificial Sequence
  GFR-binding peptide
  MOD_RES (4)..(5)..(39): Xaa is C or S
  MOD_RES (19)..(20)..(21)..(22)..(23): Xaa is A or G
  MOD_RES (24)..(25)..(26)..(27): Xaa is A or G or is absent
PEPXXVPEKMSAISILYLXXXXXXXXXLKNYQNMTVESXA

SEQ ID NO: 80679 - protein, 38 aa, Artificial Sequence
  GFR-binding peptide
  MOD_RES (5)..(6): Xaa is C or S
  MOD_RES (20)..(21)..(22)..(23)..(24): Xaa is A or G
  MOD_RES (25)..(26)..(27)..(28): Xaa is A or G or is absent
ASKAXXVPTKLSAISILYLXXXXXXXXXLKNYQGMAVS

SEQ ID NO: 80680 - protein, 36 aa, Artificial Sequence; identical to SEQ ID NO: 7341
  GFR-binding peptide
  MOD_RES (4)..(5): Xaa is C or S

SEQ ID NO: 80681 - protein, 38 aa, Artificial Sequence; identical to SEQ ID NO: 28532
  GFR-binding peptide
  MOD_RES (4)..(5)..(37): Xaa is C or S

SEQ ID NO: 80682 - protein, 31 aa, Artificial Sequence; identical to SEQ ID NO: 57511
  GFR-binding peptide

SEQ ID NO: 80683 - protein, 40 aa, Artificial Sequence; identical to SEQ ID NO: 16402
  GFR-binding peptide
  MOD_RES (6)..(7): Xaa is C or S
  MOD_RES (21)..(22)..(23)..(24)..(25): Xaa is A or G
  MOD_RES (26)..(27)..(28)..(29): Xaa is A or G or is absent

SEQ ID NO: 80684 - protein, 39 aa, Artificial Sequence; identical to SEQ ID NO: 9125
  GFR-binding peptide
  MOD_RES (3)..(4)..(39): Xaa is C or S
  MOD_RES (18)..(19)..(20)..(21)..(22): Xaa is A or G
  MOD_RES (23)..(24)..(25)..(26): Xaa is A or G or is absent

SEQ ID NO: 80685 - protein, 38 aa, Artificial Sequence; identical to SEQ ID NO: 28537
  GFR-binding peptide
  MOD_RES (1)..(2)..(36)..(38): Xaa is C or S
  MOD_RES (16)..(17)..(18)..(19)..(20): Xaa is A or G
  MOD_RES (21)..(22)..(23)..(24): Xaa is A or G or is absent

SEQ ID NO: 80686 - protein, 34 aa, Artificial Sequence; identical to SEQ ID NO: 30496
  GFR-binding peptide
  MOD_RES (1)..(2): Xaa is C or S
  MOD_RES (16)..(17)..(18)..(19)..(20): Xaa is A or G
  MOD_RES (21)..(22)..(23)..(24): Xaa is A or G or is absent

SEQ ID NO: 80687 - protein, 43 aa, Artificial Sequence; identical to SEQ ID NO: 14637
  GFR-binding peptide
  MOD_RES (6)..(7)..(41)..(43): Xaa is C or S
  MOD_RES (21)..(22)..(23)..(24)..(25): Xaa is A or G
  MOD_RES (26)..(27)..(28)..(29): Xaa is A or G or is absent

SEQ ID NO: 80688 - protein, 37 aa, Artificial Sequence; identical to SEQ ID NO: 7343
  GFR-binding peptide
  MOD_RES (2)..(3)..(36): Xaa is C or S

SEQ ID NO: 80689 - protein, 37 aa, Artificial Sequence; identical to SEQ ID NO: 9128
  GFR-binding peptide
  MOD_RES (4)..(5)..(36): Xaa is C or S

SEQ ID NO: 80690 - protein, 35 aa, Artificial Sequence
  GFR-binding peptide
  MOD_RES (1)..(2): Xaa is C or S
  MOD_RES (16)..(17)..(18)..(19)..(20): Xaa is A or G
  MOD_RES (21)..(22)..(23)..(24): Xaa is A or G or is absent
XXVPARLSAISILYLXXXXXXXXXLKNYQDMVVEA

SEQ ID NO: 80691 - protein, 38 aa, Artificial Sequence
  GFR-binding peptide
  MOD_RES (5)..(6)..(38): Xaa is C or S
SAGPXXTPTKMSAISMLYLNDKQQIILKNYQGMVVDRX

SEQ ID NO: 80692 - protein, 36 aa, Artificial Sequence
  GFR-binding peptide
  MOD_RES (2)..(3): Xaa is C or S
  MOD_RES (17)..(18)..(19)..(20)..(21): Xaa is A or G
  MOD_RES (22)..(23)..(24)..(25): Xaa is A or G or is absent
PXXVPEKMSAISILYLXXXXXXXXXLKNYQNMTVES

SEQ ID NO: 80693 - protein, 44 aa, Artificial Sequence; identical to SEQ ID NO: 9131
  GFR-binding peptide
  MOD_RES (6)..(7)..(41)..(43): Xaa is C or S
  MOD_RES (21)..(22)..(23)..(24)..(25): Xaa is A or G
  MOD_RES (26)..(27)..(28)..(29): Xaa is A or G or is absent

SEQ ID NO: 80694 - protein, 38 aa, Artificial Sequence; identical to SEQ ID NO: 9133
  GFR-binding peptide
  MOD_RES (5)..(6)..(38): Xaa is C or S

SEQ ID NO: 80695 - protein, 37 aa, Artificial Sequence; identical to SEQ ID NO: 9134
  GFR-binding peptide
  MOD_RES (3)..(4)..(37): Xaa is C or S
  MOD_RES (18)..(19)..(20)..(21)..(22): Xaa is A or G
  MOD_RES (23)..(24)..(25)..(26): Xaa is A or G or is absent

SEQ ID NO: 80696 - protein, 38 aa, Artificial Sequence; identical to SEQ ID NO: 7347
  GFR-binding peptide
  MOD_RES (3)..(4)..(36)..(38): Xaa is C or S

SEQ ID NO: 80697 - protein, 38 aa, Artificial Sequence; identical to SEQ ID NO: 9135
  GFR-binding peptide
  MOD_RES (1)..(2)..(35)..(37): Xaa is C or S

SEQ ID NO: 80698 - protein, 41 aa, Artificial Sequence; identical to SEQ ID NO: 14640
  GFR-binding peptide
  MOD_RES (5)..(6)..(40): Xaa is C or S
  MOD_RES (20)..(21)..(22)..(23)..(24): Xaa is A or G
  MOD_RES (25)..(26)..(27)..(28): Xaa is A or G or is absent

SEQ ID NO: 80699 - protein, 39 aa, Artificial Sequence; identical to SEQ ID NO: 71366
  GFR-binding peptide
  MOD_RES (2)..(3)..(37)..(39): Xaa is C or S
  MOD_RES (17)..(18)..(19)..(20)..(21): Xaa is A or G
  MOD_RES (22)..(23)..(24)..(25): Xaa is A or G or is absent

SEQ ID NO: 80700 - protein, 34 aa, Artificial Sequence; identical to SEQ ID NO: 7350
  GFR-binding peptide
  MOD_RES (1)..(2)..(33): Xaa is C or S

SEQ ID NO: 80701 - protein, 39 aa, Artificial Sequence; identical to SEQ ID NO: 9138
  GFR-binding peptide
  MOD_RES (4)..(5)..(38): Xaa is C or S
  MOD_RES (19)..(20)..(21)..(22)..(23): Xaa is A or G
  MOD_RES (24)..(25)..(26)..(27): Xaa is A or G or is absent

SEQ ID NO: 80702 - protein, 39 aa, Artificial Sequence; identical to SEQ ID NO: 9139
  GFR-binding peptide
  MOD_RES (2)..(3)..(38): Xaa is C or S
  MOD_RES (17)..(18)..(19)..(20)..(21): Xaa is A or G
  MOD_RES (22)..(23)..(24)..(25): Xaa is A or G or is absent

SEQ ID NO: 80703 - protein, 38 aa, Artificial Sequence; identical to SEQ ID NO: 57529
  GFR-binding peptide
  MOD_RES (1)..(2)..(35)..(37): Xaa is C or S
  MOD_RES (16)..(17)..(18)..(19)..(20): Xaa is A or G
  MOD_RES (21)..(22)..(23)..(24): Xaa is A or G or is absent

SEQ ID NO: 80704 - protein, 39 aa, Artificial Sequence; identical to SEQ ID NO: 7351
  GFR-binding peptide
  MOD_RES (4)..(5)..(39): Xaa is C or S
  MOD_RES (19)..(20)..(21)..(22)..(23): Xaa is A or G
  MOD_RES (24)..(25)..(26)..(27): Xaa is A or G or is absent

SEQ ID NO: 80705 - protein, 38 aa, Artificial Sequence; identical to SEQ ID NO: 30507
  GFR-binding peptide
  MOD_RES (5)..(6)..(38): Xaa is C or S

SEQ ID NO: 80706 - protein, 36 aa, Artificial Sequence
  GFR-binding peptide
  MOD_RES (3)..(4): Xaa is C or S
  MOD_RES (18)..(19)..(20)..(21)..(22): Xaa is A or G
  MOD_RES (23)..(24)..(25)..(26): Xaa is A or G or is absent
STXXAPVKTSAISMLYLXXXXXXXXXLKNYQMIVEE

SEQ ID NO: 80707 - protein, 34 aa, Artificial Sequence; identical to SEQ ID NO: 7352
  GFR-binding peptide
  MOD_RES (33)..(33): Xaa is C or S
  MOD_RES (14)..(15)..(16)..(17)..(18): Xaa is A or G
  MOD_RES (19)..(20)..(21)..(22): Xaa is A or G or is absent

SEQ ID NO: 80708 - protein, 32 aa, Artificial Sequence; identical to SEQ ID NO: 9146
  GFR-binding peptide
  MOD_RES (1)..(2): Xaa is C or S

SEQ ID NO: 80709 - protein, 40 aa, Artificial Sequence; identical to SEQ ID NO: 9148
  GFR-binding peptide
  MOD_RES (3)..(37)..(39): Xaa is C or S
  MOD_RES (17)..(18)..(19)..(20)..(21): Xaa is A or G
  MOD_RES (22)..(23)..(24)..(25): Xaa is A or G or is absent

SEQ ID NO: 80710 - protein, 42 aa, Artificial Sequence; identical to SEQ ID NO: 9149
  GFR-binding peptide
  MOD_RES (4)..(5)..(39)..(41): Xaa is C or S
  MOD_RES (19)..(20)..(21)..(22)..(23): Xaa is A or G
  MOD_RES (24)..(25)..(26)..(27): Xaa is A or G or is absent

SEQ ID NO: 80711 - protein, 35 aa, Artificial Sequence; identical to SEQ ID NO: 9152
  GFR-binding peptide
  MOD_RES (34)..(34): Xaa is C or S
  MOD_RES (14)..(15)..(16)..(17)..(18): Xaa is A or G
  MOD_RES (19)..(20)..(21)..(22): Xaa is A or G or is absent

SEQ ID NO: 80712 - protein, 40 aa, Artificial Sequence; identical to SEQ ID NO: 7353
  GFR-binding peptide
  MOD_RES (2)..(3)..(37)..(39): Xaa is C or S
  MOD_RES (17)..(18)..(19)..(20)..(21): Xaa is A or G
  MOD_RES (22)..(23)..(24)..(25): Xaa is A or G or is absent

SEQ ID NO: 80713 - protein, 34 aa, Artificial Sequence; identical to SEQ ID NO: 30510
  GFR-binding peptide
  MOD_RES (32)..(34): Xaa is C or S

SEQ ID NO: 80714 - protein, 34 aa, Artificial Sequence; identical to SEQ ID NO: 9153
  GFR-binding peptide
  MOD_RES (33)..(33): Xaa is C or S
  MOD_RES (14)..(15)..(16)..(17)..(18): Xaa is A or G
  MOD_RES (19)..(20)..(21)..(22): Xaa is A or G or is absent

SEQ ID NO: 80715 - protein, 39 aa, Artificial Sequence
  GFR-binding peptide
  MOD_RES (6)..(7): Xaa is C or S
  MOD_RES (21)..(22)..(23)..(24)..(25): Xaa is A or G
  MOD_RES (26)..(27)..(28)..(29): Xaa is A or G or is absent
HVPKPXXAPTKLSAISVLYLXXXXXXXXXLKNYQNMVVR

SEQ ID NO: 80716 - protein, 34 aa, Artificial Sequence; identical to SEQ ID NO: 7354
  GFR-binding peptide
  MOD_RES (2)..(3): Xaa is C or S

SEQ ID NO: 80717 - protein, 38 aa, Artificial Sequence
  GFR-binding peptide
  MOD_RES (3)..(4)..(36)..(38): Xaa is C or S
ASXXVPARLSAISILYLDAANNVVLKNYQDMVVEAXGX

SEQ ID NO: 80718 - protein, 39 aa, Artificial Sequence; identical to SEQ ID NO: 28559
  GFR-binding peptide
  MOD_RES (3)..(4)..(38): Xaa is C or S
  MOD_RES (18)..(19)..(20)..(21)..(22): Xaa is A or G
  MOD_RES (23)..(24)..(25)..(26): Xaa is A or G or is absent

SEQ ID NO: 80719 - protein, 39 aa, Artificial Sequence; identical to SEQ ID NO: 9155
  GFR-binding peptide
  MOD_RES (4)..(5)..(39): Xaa is C or S
  MOD_RES (19)..(20)..(21)..(22)..(23): Xaa is A or G
  MOD_RES (24)..(25)..(26)..(27): Xaa is A or G or is absent

SEQ ID NO: 80720 - protein, 37 aa, Artificial Sequence; identical to SEQ ID NO: 7355
  GFR-binding peptide
  MOD_RES (1)..(34)..(36): Xaa is C or S

SEQ ID NO: 80721 - protein, 40 aa, Artificial Sequence; identical to SEQ ID NO: 9156
  GFR-binding peptide
  MOD_RES (2)..(3)..(38)..(40): Xaa is C or S
  MOD_RES (17)..(18)..(19)..(20)..(21): Xaa is A or G
  MOD_RES (22)..(23)..(24)..(25): Xaa is A or G or is absent

SEQ ID NO: 80722 - protein, 35 aa, Artificial Sequence; identical to SEQ ID NO: 9157
  GFR-binding peptide
  MOD_RES (34)..(34): Xaa is C or S
  MOD_RES (14)..(15)..(16)..(17)..(18): Xaa is A or G
  MOD_RES (19)..(20)..(21)..(22): Xaa is A or G or is absent

SEQ ID NO: 80723 - protein, 36 aa, Artificial Sequence
  GFR-binding peptide
  MOD_RES (1)..(2)..(36): Xaa is C or S
  MOD_RES (16)..(17)..(18)..(19)..(20): Xaa is A or G
  MOD_RES (21)..(22)..(23)..(24): Xaa is A or G or is absent
XXTPTKMSAISMLYLXXXXXXXXXLKNYQGMVVDRX

SEQ ID NO: 80724 - protein, 41 aa, Artificial Sequence; identical to SEQ ID NO: 7358
  GFR-binding peptide
  MOD_RES (5)..(6)..(39)..(41): Xaa is C or S

SEQ ID NO: 80725 - protein, 39 aa, Artificial Sequence; identical to SEQ ID NO: 7359
  GFR-binding peptide
  MOD_RES (6)..(7)..(38): Xaa is C or S

SEQ ID NO: 80726 - protein, 40 aa, Artificial Sequence; identical to SEQ ID NO: 9161
  GFR-binding peptide
  MOD_RES (4)..(5)..(38)..(40): Xaa is C or S
  MOD_RES (19)..(20)..(21)..(22)..(23): Xaa is A or G
  MOD_RES (24)..(25)..(26)..(27): Xaa is A or G or is absent

SEQ ID NO: 80727 - protein, 35 aa, Artificial Sequence; identical to SEQ ID NO: 28572
  GFR-binding peptide
  MOD_RES (1)..(2): Xaa is C or S
  MOD_RES (16)..(17)..(18)..(19)..(20): Xaa is A or G
  MOD_RES (21)..(22)..(23)..(24): Xaa is A or G or is absent

SEQ ID NO: 80728 - protein, 39 aa, Artificial Sequence; identical to SEQ ID NO: 7363
  GFR-binding peptide
  MOD_RES (2)..(3)..(37)..(39): Xaa is C or S
  MOD_RES (17)..(18)..(19)..(20)..(21): Xaa is A or G
  MOD_RES (22)..(23)..(24)..(25): Xaa is A or G or is absent

SEQ ID NO: 80729 - protein, 36 aa, Artificial Sequence; identical to SEQ ID NO: 9162
  GFR-binding peptide
  MOD_RES (1)..(35): Xaa is C or S
  MOD_RES (15)..(16)..(17)..(18)..(19): Xaa is A or G
  MOD_RES (20)..(21)..(22)..(23): Xaa is A or G or is absent

SEQ ID NO: 80730 - protein, 35 aa, Artificial Sequence; identical to SEQ ID NO: 7365
  GFR-binding peptide
  MOD_RES (32)..(34): Xaa is C or S

SEQ ID NO: 80731 - protein, 36 aa, Artificial Sequence; identical to SEQ ID NO: 30526
  GFR-binding peptide
  MOD_RES (3)..(4)..(36): Xaa is C or S

SEQ ID NO: 80732 - protein, 36 aa, Artificial Sequence; identical to SEQ ID NO: 7366
  GFR-binding peptide
  MOD_RES (5)..(6): Xaa is C or S

SEQ ID NO: 80733 - protein, 40 aa, Artificial Sequence; identical to SEQ ID NO: 16439
  GFR-binding peptide
  MOD_RES (6)..(7): Xaa is C or S
  MOD_RES (21)..(22)..(23)..(24)..(25): Xaa is A or G
  MOD_RES (26)..(27)..(28)..(29): Xaa is A or G or is absent

SEQ ID NO: 80734 - protein, 33 aa, Artificial Sequence; identical to SEQ ID NO: 14670
  GFR-binding peptide
  MOD_RES (1)..(2): Xaa is C or S

SEQ ID NO: 80735 - protein, 41 aa, Artificial Sequence; identical to SEQ ID NO: 9165
  GFR-binding peptide
  MOD_RES (6)..(7)..(41): Xaa is C or S
  MOD_RES (21)..(22)..(23)..(24)..(25): Xaa is A or G
  MOD_RES (26)..(27)..(28)..(29): Xaa is A or G or is absent

SEQ ID NO: 80736 - protein, 32 aa, Artificial Sequence
  GFR-binding peptide
  MOD_RES (31)..(31): Xaa is C or S
APVKTSAISMLYLDNGRVLLLKNYQMIVEEXG

SEQ ID NO: 80737 - protein, 38 aa, Artificial Sequence; identical to SEQ ID NO: 57557
  GFR-binding peptide
  MOD_RES (5)..(6): Xaa is C or S
  MOD_RES (20)..(21)..(22)..(23)..(24): Xaa is A or G
  MOD_RES (25)..(26)..(27)..(28): Xaa is A or G or is absent

SEQ ID NO: 80738 - protein, 37 aa, Artificial Sequence; identical to SEQ ID NO: 7370
  GFR-binding peptide
  MOD_RES (4)..(5): Xaa is C or S
  MOD_RES (19)..(20)..(21)..(22)..(23): Xaa is A or G
  MOD_RES (24)..(25)..(26)..(27): Xaa is A or G or is absent

SEQ ID NO: 80739 - protein, 32 aa, Artificial Sequence; identical to SEQ ID NO: 57558
  GFR-binding peptide
  MOD_RES (1)..(2): Xaa is C or S

SEQ ID NO: 80740 - protein, 39 aa, Artificial Sequence; identical to SEQ ID NO: 57560
  GFR-binding peptide
  MOD_RES (4)..(5)..(37)..(39): Xaa is C or S

SEQ ID NO: 80741 - protein, 30 aa, Artificial Sequence; identical to SEQ ID NO: 7373
  GFR-binding peptide

SEQ ID NO: 80742 - protein, 39 aa, Artificial Sequence; identical to SEQ ID NO: 9174
  GFR-binding peptide
  MOD_RES (3)..(4)..(37)..(39): Xaa is C or S

SEQ ID NO: 80743 - protein, 38 aa, Artificial Sequence
  GFR-binding peptide
  MOD_RES (5)..(6)..(38): Xaa is C or S
IPEPXXVPEKMSAISILYLDENKNVVLKNYQNMTVESX

SEQ ID NO: 80744 - protein, 38 aa, Artificial Sequence
  GFR-binding peptide
  MOD_RES (2)..(3)..(35)..(37): Xaa is C or S
SXXVPARLSAISILYLDAANNVVLKNYQDMVVEAXGXR

SEQ ID NO: 80745 - protein, 38 aa, Artificial Sequence; identical to SEQ ID NO: 7375
  GFR-binding peptide
  MOD_RES (3)..(4)..(35)..(37): Xaa is C or S

SEQ ID NO: 80746 - protein, 40 aa, Artificial Sequence; identical to SEQ ID NO: 28585
  GFR-binding peptide
  MOD_RES (6)..(7)..(39): Xaa is C or S

SEQ ID NO: 80747 - protein, 36 aa, Artificial Sequence; identical to SEQ ID NO: 7377
  GFR-binding peptide
  MOD_RES (1)..(2)..(35): Xaa is C or S
  MOD_RES (16)..(17)..(18)..(19)..(20): Xaa is A or G
  MOD_RES (21)..(22)..(23)..(24): Xaa is A or G or is absent

SEQ ID NO: 80748 - protein, 43 aa, Artificial Sequence
  GFR-binding peptide
  MOD_RES (6)..(7)..(41)..(43): Xaa is C or S
  MOD_RES (21)..(22)..(23)..(24)..(25): Xaa is A or G
  MOD_RES (26)..(27)..(28)..(29): Xaa is A or G or is absent
GSAGPXXTPTKMSAISMLYLXXXXXXXXXLKNYQGMVVDRXGX

SEQ ID NO: 80749 - protein, 40 aa, Artificial Sequence; identical to SEQ ID NO: 7378
  GFR-binding peptide
  MOD_RES (4)..(5)..(39): Xaa is C or S
  MOD_RES (19)..(20)..(21)..(22)..(23): Xaa is A or G
  MOD_RES (24)..(25)..(26)..(27): Xaa is A or G or is absent

SEQ ID NO: 80750 - protein, 36 aa, Artificial Sequence
  GFR-binding peptide
  MOD_RES (1)..(2)..(33)..(35): Xaa is C or S
XXAPVKTSAISMLYLDNGRVLLLKNYQMIVEEXGXL

SEQ ID NO: 80751 - protein, 42 aa, Artificial Sequence
  GFR-binding peptide
  MOD_RES (4)..(5)..(39)..(41): Xaa is C or S
  MOD_RES (19)..(20)..(21)..(22)..(23): Xaa is A or G
  MOD_RES (24)..(25)..(26)..(27): Xaa is A or G or is absent
PASXXVPARLSAISILYLXXXXXXXXXLKNYQDMVVEAXGXR

SEQ ID NO: 80752 - protein, 38 aa, Artificial Sequence; identical to SEQ ID NO: 16459
  GFR-binding peptide
  MOD_RES (4)..(5)..(37): Xaa is C or S

SEQ ID NO: 80753 - protein, 37 aa, Artificial Sequence; identical to SEQ ID NO: 7383
  GFR-binding peptide
  MOD_RES (3)..(4): Xaa is C or S
  MOD_RES (18)..(19)..(20)..(21)..(22): Xaa is A or G
  MOD_RES (23)..(24)..(25)..(26): Xaa is A or G or is absent

SEQ ID NO: 80754 - protein, 40 aa, Artificial Sequence
  GFR-binding peptide
  MOD_RES (6)..(7): Xaa is C or S
  MOD_RES (21)..(22)..(23)..(24)..(25): Xaa is A or G
  MOD_RES (26)..(27)..(28)..(29): Xaa is A or G or is absent
GSAGPXXTPTKMSAISMLYLXXXXXXXXXLKNYQGMVVDR

SEQ ID NO: 80755 - protein, 36 aa, Artificial Sequence; identical to SEQ ID NO: 7390
  GFR-binding peptide
  MOD_RES (1)..(34)..(36): Xaa is C or S
  MOD_RES (15)..(16)..(17)..(18)..(19): Xaa is A or G
  MOD_RES (20)..(21)..(22)..(23): Xaa is A or G or is absent

SEQ ID NO: 80756 - protein, 38 aa, Artificial Sequence; identical to SEQ ID NO: 9182
  GFR-binding peptide
  MOD_RES (2)..(3)..(37): Xaa is C or S
  MOD_RES (17)..(18)..(19)..(20)..(21): Xaa is A or G
  MOD_RES (22)..(23)..(24)..(25): Xaa is A or G or is absent

SEQ ID NO: 80757 - protein, 39 aa, Artificial Sequence; identical to SEQ ID NO: 30552
  GFR-binding peptide
  MOD_RES (6)..(7): Xaa is C or S
  MOD_RES (21)..(22)..(23)..(24)..(25): Xaa is A or G
  MOD_RES (26)..(27)..(28)..(29): Xaa is A or G or is absent

SEQ ID NO: 80758 - protein, 39 aa, Artificial Sequence; identical to SEQ ID NO: 7391
  GFR-binding peptide
  MOD_RES (5)..(6)..(38): Xaa is C or S

SEQ ID NO: 80759 - protein, 41 aa, Artificial Sequence; identical to SEQ ID NO: 7394
  GFR-binding peptide
  MOD_RES (5)..(6)..(39)..(41): Xaa is C or S

SEQ ID NO: 80760 - protein, 39 aa, Artificial Sequence; identical to SEQ ID NO: 9186
  GFR-binding peptide
  MOD_RES (3)..(4)..(38): Xaa is C or S
  MOD_RES (18)..(19)..(20)..(21)..(22): Xaa is A or G
  MOD_RES (23)..(24)..(25)..(26): Xaa is A or G or is absent

SEQ ID NO: 80761 - protein, 39 aa, Artificial Sequence; identical to SEQ ID NO: 9187
  GFR-binding peptide
  MOD_RES (5)..(6): Xaa is C or S
  MOD_RES (20)..(21)..(22)..(23)..(24): Xaa is A or G
  MOD_RES (25)..(26)..(27)..(28): Xaa is A or G or is absent

SEQ ID NO: 80762 - protein, 36 aa, Artificial Sequence; identical to SEQ ID NO: 28609
  GFR-binding peptide
  MOD_RES (4)..(5): Xaa is C or S

SEQ ID NO: 80763 - protein, 38 aa, Artificial Sequence; identical to SEQ ID NO: 7397
  GFR-binding peptide
  MOD_RES (3)..(35)..(37): Xaa is C or S

SEQ ID NO: 80764 - protein, 38 aa, Artificial Sequence; identical to SEQ ID NO: 9188
  GFR-binding peptide
  MOD_RES (2)..(3)..(37): Xaa is C or S
  MOD_RES (17)..(18)..(19)..(20)..(21): Xaa is A or G
  MOD_RES (22)..(23)..(24)..(25): Xaa is A or G or is absent

SEQ ID NO: 80765 - protein, 34 aa, Artificial Sequence; identical to SEQ ID NO: 16468
  GFR-binding peptide
  MOD_RES (3)..(4): Xaa is C or S

SEQ ID NO: 80766 - protein, 35 aa, Artificial Sequence; identical to SEQ ID NO: 9191
  GFR-binding peptide
  MOD_RES (34)..(34): Xaa is C or S
  MOD_RES (14)..(15)..(16)..(17)..(18): Xaa is A or G
  MOD_RES (19)..(20)..(21)..(22): Xaa is A or G or is absent

SEQ ID NO: 80767 - protein, 42 aa, Artificial Sequence; identical to SEQ ID NO: 7401
  GFR-binding peptide
  MOD_RES (6)..(7)..(40)..(42): Xaa is C or S
  MOD_RES (21)..(22)..(23)..(24)..(25): Xaa is A or G
  MOD_RES (26)..(27)..(28)..(29): Xaa is A or G or is absent

SEQ ID NO: 80768 - protein, 40 aa, Artificial Sequence; identical to SEQ ID NO: 9192
  GFR-binding peptide
  MOD_RES (5)..(6)..(40): Xaa is C or S
  MOD_RES (20)..(21)..(22)..(23)..(24): Xaa is A or G
  MOD_RES (25)..(26)..(27)..(28): Xaa is A or G or is absent

SEQ ID NO: 80769 - protein, 35 aa, Artificial Sequence
  GFR-binding peptide
  MOD_RES (2)..(3)..(35): Xaa is C or S
PXXVPEKMSAISILYLDENKNVVLKNYQNMTVESX

SEQ ID NO: 80770 - protein, 34 aa, Artificial Sequence; identical to SEQ ID NO: 28615
  GFR-binding peptide
  MOD_RES (34)..(34): Xaa is C or S
  MOD_RES (14)..(15)..(16)..(17)..(18): Xaa is A or G
  MOD_RES (19)..(20)..(21)..(22): Xaa is A or G or is absent

SEQ ID NO: 80771 - protein, 36 aa, Artificial Sequence; identical to SEQ ID NO: 57586
  GFR-binding peptide
  MOD_RES (2)..(3)..(36): Xaa is C or S
  MOD_RES (17)..(18)..(19)..(20)..(21): Xaa is A or G
  MOD_RES (22)..(23)..(24)..(25): Xaa is A or G or is absent

SEQ ID NO: 80772 - protein, 40 aa, Artificial Sequence; identical to SEQ ID NO: 9195
  GFR-binding peptide
  MOD_RES (3)..(4)..(38)..(40): Xaa is C or S
  MOD_RES (18)..(19)..(20)..(21)..(22): Xaa is A or G
  MOD_RES (23)..(24)..(25)..(26): Xaa is A or G or is absent

SEQ ID NO: 80773 - protein, 34 aa, Artificial Sequence; identical to SEQ ID NO: 28617
  GFR-binding peptide
  MOD_RES (1)..(1): Xaa is C or S
  MOD_RES (15)..(16)..(17)..(18)..(19): Xaa is A or G
  MOD_RES (20)..(21)..(22)..(23): Xaa is A or G or is absent

SEQ ID NO: 80774 - protein, 38 aa, Artificial Sequence; identical to SEQ ID NO: 7407
  GFR-binding peptide
  MOD_RES (4)..(5)..(38): Xaa is C or S

SEQ ID NO: 80775 - protein, 31 aa, Artificial Sequence; identical to SEQ ID NO: 9197
  GFR-binding peptide

SEQ ID NO: 80776 - protein, 36 aa, Artificial Sequence; identical to SEQ ID NO: 9198
  GFR-binding peptide
  MOD_RES (1)..(34)..(36): Xaa is C or S
  MOD_RES (15)..(16)..(17)..(18)..(19): Xaa is A or G
  MOD_RES (20)..(21)..(22)..(23): Xaa is A or G or is absent

SEQ ID NO: 80777 - protein, 39 aa, Artificial Sequence; identical to SEQ ID NO: 7408
  GFR-binding peptide
  MOD_RES (5)..(6)..(37)..(39): Xaa is C or S

SEQ ID NO: 80778 - protein, 34 aa, Artificial Sequence; identical to SEQ ID NO: 9202
  GFR-binding peptide
  MOD_RES (31)..(33): Xaa is C or S

SEQ ID NO: 80779 - protein, 36 aa, Artificial Sequence; identical to SEQ ID NO: 30575
  GFR-binding peptide
  MOD_RES (4)..(5): Xaa is C or S

SEQ ID NO: 80780 - protein, 37 aa, Artificial Sequence; identical to SEQ ID NO: 30576
  GFR-binding peptide
  MOD_RES (34)..(36): Xaa is C or S
  MOD_RES (14)..(15)..(16)..(17)..(18): Xaa is A or G
  MOD_RES (19)..(20)..(21)..(22): Xaa is A or G or is absent

SEQ ID NO: 80781 - protein, 38 aa, Artificial Sequence; identical to SEQ ID NO: 14707
  GFR-binding peptide
  MOD_RES (4)..(5)..(37): Xaa is C or S

SEQ ID NO: 80782 - protein, 33 aa, Artificial Sequence
  GFR-binding peptide
  MOD_RES (1)..(1): Xaa is C or S
  MOD_RES (15)..(16)..(17)..(18)..(19): Xaa is A or G
  MOD_RES (20)..(21)..(22)..(23): Xaa is A or G or is absent
XAPVKTSAISMLYLXXXXXXXXXLKNYQMIVEE

SEQ ID NO: 80783 - protein, 34 aa, Artificial Sequence; identical to SEQ ID NO: 7413
  GFR-binding peptide
  MOD_RES (3)..(4): Xaa is C or S

SEQ ID NO: 80784 - protein, 32 aa, Artificial Sequence; identical to SEQ ID NO: 30578
  GFR-binding peptide
  MOD_RES (1)..(1): Xaa is C or S

SEQ ID NO: 80785 - protein, 34 aa, Artificial Sequence
  GFR-binding peptide
  MOD_RES (2)..(3): Xaa is C or S
PXXVPEKMSAISILYLDENKNVVLKNYQNMTVES

SEQ ID NO: 80786 - protein, 36 aa, Artificial Sequence; identical to SEQ ID NO: 68099
  GFR-binding peptide
  MOD_RES (2)..(3): Xaa is C or S
  MOD_RES (17)..(18)..(19)..(20)..(21): Xaa is A or G
  MOD_RES (22)..(23)..(24)..(25): Xaa is A or G or is absent

SEQ ID NO: 80787 - protein, 38 aa, Artificial Sequence; identical to SEQ ID NO: 28627
  GFR-binding peptide
  MOD_RES (1)..(2)..(36)..(38): Xaa is C or S
  MOD_RES (16)..(17)..(18)..(19)..(20): Xaa is A or G
  MOD_RES (21)..(22)..(23)..(24): Xaa is A or G or is absent

SEQ ID NO: 80788 - protein, 35 aa, Artificial Sequence
  GFR-binding peptide
  MOD_RES (1)..(2)..(35): Xaa is C or S
  MOD_RES (16)..(17)..(18)..(19)..(20): Xaa is A or G
  MOD_RES (21)..(22)..(23)..(24): Xaa is A or G or is absent
XXAPVKTSAISMLYLXXXXXXXXXLKNYQMIVEEX

SEQ ID NO: 80789 - protein, 34 aa, Artificial Sequence
  GFR-binding peptide
  MOD_RES (2)..(3): Xaa is C or S
PXXTPTKMSAISMLYLNDKQQIILKNYQGMVVDR

SEQ ID NO: 80790 - protein, 38 aa, Artificial Sequence; identical to SEQ ID NO: 7416
  GFR-binding peptide
  MOD_RES (5)..(6): Xaa is C or S
  MOD_RES (20)..(21)..(22)..(23)..(24): Xaa is A or G
  MOD_RES (25)..(26)..(27)..(28): Xaa is A or G or is absent

SEQ ID NO: 80791 - protein, 32 aa, Artificial Sequence
  GFR-binding peptide
  MOD_RES (14)..(15)..(16)..(17)..(18): Xaa is A or G
  MOD_RES (19)..(20)..(21)..(22): Xaa is A or G or is absent
VPARLSAISILYLXXXXXXXXXLKNYQDMVVE

SEQ ID NO: 80792 - protein, 37 aa, Artificial Sequence
  GFR-binding peptide
  MOD_RES (4)..(5)..(37): Xaa is C or S
PASXXVPARLSAISILYLDAANNVVLKNYQDMVVEAX

SEQ ID NO: 80793 - protein, 37 aa, Artificial Sequence; identical to SEQ ID NO: 14715
  GFR-binding peptide
  MOD_RES (2)..(3)..(37): Xaa is C or S
  MOD_RES (17)..(18)..(19)..(20)..(21): Xaa is A or G
  MOD_RES (22)..(23)..(24)..(25): Xaa is A or G or is absent

SEQ ID NO: 80794 - protein, 42 aa, Artificial Sequence; identical to SEQ ID NO: 9210
  GFR-binding peptide
  MOD_RES (3)..(4)..(39)..(41): Xaa is C or S
  MOD_RES (18)..(19)..(20)..(21)..(22): Xaa is A or G
  MOD_RES (23)..(24)..(25)..(26): Xaa is A or G or is absent

SEQ ID NO: 80795 - protein, 40 aa, Artificial Sequence; identical to SEQ ID NO: 7419
  GFR-binding peptide
  MOD_RES (3)..(4)..(37)..(39): Xaa is C or S
  MOD_RES (18)..(19)..(20)..(21)..(22): Xaa is A or G
  MOD_RES (23)..(24)..(25)..(26): Xaa is A or G or is absent

SEQ ID NO: 80796 - protein, 36 aa, Artificial Sequence; identical to SEQ ID NO: 28631
  GFR-binding peptide
  MOD_RES (5)..(6): Xaa is C or S

SEQ ID NO: 80797 - protein, 36 aa, Artificial Sequence; identical to SEQ ID NO: 9213
  GFR-binding peptide
  MOD_RES (1)..(35): Xaa is C or S
  MOD_RES (15)..(16)..(17)..(18)..(19): Xaa is A or G
  MOD_RES (20)..(21)..(22)..(23): Xaa is A or G or is absent

SEQ ID NO: 80798 - protein, 37 aa, Artificial Sequence; identical to SEQ ID NO: 57607
  GFR-binding peptide
  MOD_RES (2)..(3)..(34)..(36): Xaa is C or S

SEQ ID NO: 80799 - protein, 35 aa, Artificial Sequence; identical to SEQ ID NO: 7420
  GFR-binding peptide
  MOD_RES (1)..(34): Xaa is C or S

SEQ ID NO: 80800 - protein, 38 aa, Artificial Sequence; identical to SEQ ID NO: 9215
  GFR-binding peptide
  MOD_RES (1)..(2)..(37): Xaa is C or S
  MOD_RES (16)..(17)..(18)..(19)..(20): Xaa is A or G
  MOD_RES (21)..(22)..(23)..(24): Xaa is A or G or is absent

SEQ ID NO: 80801 - protein, 33 aa, Artificial Sequence; identical to SEQ ID NO: 7423
  GFR-binding peptide
  MOD_RES (1)..(33): Xaa is C or S

SEQ ID NO: 80802 - protein, 34 aa, Artificial Sequence
  GFR-binding peptide
  MOD_RES (34)..(34): Xaa is C or S
  MOD_RES (14)..(15)..(16)..(17)..(18): Xaa is A or G
  MOD_RES (19)..(20)..(21)..(22): Xaa is A or G or is absent
VPARLSAISILYLXXXXXXXXXLKNYQDMVVEAX

SEQ ID NO: 80803 - protein, 43 aa, Artificial Sequence; identical to SEQ ID NO: 7425
  GFR-binding peptide
  MOD_RES (6)..(7)..(41)..(43): Xaa is C or S
  MOD_RES (21)..(22)..(23)..(24)..(25): Xaa is A or G
  MOD_RES (26)..(27)..(28)..(29): Xaa is A or G or is absent

SEQ ID NO: 80804 - protein, 36 aa, Artificial Sequence; identical to SEQ ID NO: 9218
  GFR-binding peptide
  MOD_RES (2)..(3): Xaa is C or S
  MOD_RES (17)..(18)..(19)..(20)..(21): Xaa is A or G
  MOD_RES (22)..(23)..(24)..(25): Xaa is A or G or is absent

SEQ ID NO: 80805 - protein, 39 aa, Artificial Sequence
  GFR-binding peptide
  MOD_RES (6)..(7)..(39): Xaa is C or S
GIPEPXXVPEKMSAISILYLDENKNVVLKNYQNMTVESX

SEQ ID NO: 80806 - protein, 34 aa, Artificial Sequence
  GFR-binding peptide
  MOD_RES (3)..(4): Xaa is C or S
STXXAPVKTSAISMLYLDNGRVLLLKNYQMIVEE

SEQ ID NO: 80807 - protein, 38 aa, Artificial Sequence; identical to SEQ ID NO: 7427
  GFR-binding peptide
  MOD_RES (5)..(6): Xaa is C or S
  MOD_RES (20)..(21)..(22)..(23)..(24): Xaa is A or G
  MOD_RES (25)..(26)..(27)..(28): Xaa is A or G or is absent

SEQ ID NO: 80808 - protein, 39 aa, Artificial Sequence
  GFR-binding peptide
  MOD_RES (4)..(5)..(37)..(39): Xaa is C or S
AGPXXTPTKMSAISMLYLNDKQQIILKNYQGMVVDRXGX

SEQ ID NO: 80809 - protein, 34 aa, Artificial Sequence; identical to SEQ ID NO: 7428
  GFR-binding peptide
  MOD_RES (1)..(2)..(34): Xaa is C or S

SEQ ID NO: 80810 - protein, 38 aa, Artificial Sequence; identical to SEQ ID NO: 9220
  GFR-binding peptide
  MOD_RES (6)..(6): Xaa is C or S
  MOD_RES (20)..(21)..(22)..(23)..(24): Xaa is A or G
  MOD_RES (25)..(26)..(27)..(28): Xaa is A or G or is absent

SEQ ID NO: 80811 - protein, 39 aa, Artificial Sequence; identical to SEQ ID NO: 7429
  GFR-binding peptide
  MOD_RES (6)..(7): Xaa is C or S

SEQ ID NO: 80812 - protein, 33 aa, Artificial Sequence; identical to SEQ ID NO: 9221
  GFR-binding peptide
  MOD_RES (14)..(15)..(16)..(17)..(18): Xaa is A or G
  MOD_RES (19)..(20)..(21)..(22): Xaa is A or G or is absent

SEQ ID NO: 80813 - protein, 35 aa, Artificial Sequence; identical to SEQ ID NO: 9222
  GFR-binding peptide
  MOD_RES (2)..(3)..(34): Xaa is C or S

SEQ ID NO: 80814 - protein, 36 aa, Artificial Sequence; identical to SEQ ID NO: 9223
  GFR-binding peptide
  MOD_RES (2)..(3): Xaa is C or S
  MOD_RES (17)..(18)..(19)..(20)..(21): Xaa is A or G
  MOD_RES (22)..(23)..(24)..(25): Xaa is A or G or is absent

SEQ ID NO: 80815 - protein, 42 aa, Artificial Sequence; identical to SEQ ID NO: 9225
  GFR-binding peptide
  MOD_RES (5)..(6)..(40)..(42): Xaa is C or S
  MOD_RES (20)..(21)..(22)..(23)..(24): Xaa is A or G
  MOD_RES (25)..(26)..(27)..(28): Xaa is A or G or is absent

SEQ ID NO: 80816 - protein, 37 aa, Artificial Sequence
  GFR-binding peptide
  MOD_RES (6)..(7): Xaa is C or S
RVPSTXXAPVKTSAISMLYLDNGRVLLLKNYQMIVEE

SEQ ID NO: 80817 - protein, 38 aa, Artificial Sequence; identical to SEQ ID NO: 9228
  GFR-binding peptide
  MOD_RES (1)..(2)..(36)..(38): Xaa is C or S
  MOD_RES (16)..(17)..(18)..(19)..(20): Xaa is A or G
  MOD_RES (21)..(22)..(23)..(24): Xaa is A or G or is absent

SEQ ID NO: 80818 - protein, 35 aa, Artificial Sequence; identical to SEQ ID NO: 7434
  GFR-binding peptide
  MOD_RES (1)..(34): Xaa is C or S
  MOD_RES (15)..(16)..(17)..(18)..(19): Xaa is A or G
  MOD_RES (20)..(21)..(22)..(23): Xaa is A or G or is absent

SEQ ID NO: 80819 - protein, 36 aa, Artificial Sequence; identical to SEQ ID NO: 7436
  GFR-binding peptide
  MOD_RES (1)..(2)..(33)..(35): Xaa is C or S

SEQ ID NO: 80820 - protein, 40 aa, Artificial Sequence; identical to SEQ ID NO: 57635
  GFR-binding peptide
  MOD_RES (4)..(5)..(39): Xaa is C or S
  MOD_RES (19)..(20)..(21)..(22)..(23): Xaa is A or G
  MOD_RES (24)..(25)..(26)..(27): Xaa is A or G or is absent

SEQ ID NO: 80821 - protein, 36 aa, Artificial Sequence; identical to SEQ ID NO: 7437
  GFR-binding peptide
  MOD_RES (1)..(2)..(36): Xaa is C or S
  MOD_RES (16)..(17)..(18)..(19)..(20): Xaa is A or G
  MOD_RES (21)..(22)..(23)..(24): Xaa is A or G or is absent

SEQ ID NO: 80822 - protein, 32 aa, Artificial Sequence; identical to SEQ ID NO: 9232
  GFR-binding peptide
  MOD_RES (1)..(2): Xaa is C or S

SEQ ID NO: 80823 - protein, 35 aa, Artificial Sequence; identical to SEQ ID NO: 9233
  GFR-binding peptide
  MOD_RES (2)..(3): Xaa is C or S
  MOD_RES (17)..(18)..(19)..(20)..(21): Xaa is A or G
  MOD_RES (22)..(23)..(24)..(25): Xaa is A or G or is absent

SEQ ID NO: 80824 - protein, 37 aa, Artificial Sequence; identical to SEQ ID NO: 9235
  GFR-binding peptide
  MOD_RES (2)..(3)..(36): Xaa is C or S
  MOD_RES (17)..(18)..(19)..(20)..(21): Xaa is A or G
  MOD_RES (22)..(23)..(24)..(25): Xaa is A or G or is absent

SEQ ID NO: 80825 - protein, 39 aa, Artificial Sequence
  GFR-binding peptide
  MOD_RES (4)..(5)..(39): Xaa is C or S
  MOD_RES (19)..(20)..(21)..(22)..(23): Xaa is A or G
  MOD_RES (24)..(25)..(26)..(27): Xaa is A or G or is absent
SKAXXVPTKLSAISILYLXXXXXXXXXLKNYQGMAVSEX

SEQ ID NO: 80826 - protein, 37 aa, Artificial Sequence; identical to SEQ ID NO: 9236
  GFR-binding peptide
  MOD_RES (4)..(5): Xaa is C or S

SEQ ID NO: 80827 - protein, 39 aa, Artificial Sequence
  GFR-binding peptide
  MOD_RES (5)..(6)..(38): Xaa is C or S
IPEPXXVPEKMSAISILYLDENKNVVLKNYQNMTVESXA

SEQ ID NO: 80828 - protein, 32 aa, Artificial Sequence; identical to SEQ ID NO: 7440
  GFR-binding peptide
  MOD_RES (32)..(32): Xaa is C or S

SEQ ID NO: 80829 - protein, 33 aa, Artificial Sequence; identical to SEQ ID NO: 9237
  GFR-binding peptide
  MOD_RES (14)..(15)..(16)..(17)..(18): Xaa is A or G
  MOD_RES (19)..(20)..(21)..(22): Xaa is A or G or is absent

SEQ ID NO: 80830 - protein, 37 aa, Artificial Sequence; identical to SEQ ID NO: 9238
  GFR-binding peptide
  MOD_RES (1)..(2)..(35)..(37): Xaa is C or S
  MOD_RES (16)..(17)..(18)..(19)..(20): Xaa is A or G
  MOD_RES (21)..(22)..(23)..(24): Xaa is A or G or is absent

SEQ ID NO: 80831 - protein, 34 aa, Artificial Sequence; identical to SEQ ID NO: 57638
  GFR-binding peptide
  MOD_RES (1)..(33): Xaa is C or S

SEQ ID NO: 80832 - protein, 38 aa, Artificial Sequence; identical to SEQ ID NO: 7441
  GFR-binding peptide
  MOD_RES (5)..(6)..(38): Xaa is C or S

SEQ ID NO: 80833 - protein, 37 aa, Artificial Sequence; identical to SEQ ID NO: 7442
  GFR-binding peptide
  MOD_RES (6)..(7): Xaa is C or S

SEQ ID NO: 80834 - protein, 39 aa, Artificial Sequence; identical to SEQ ID NO: 9242
  GFR-binding peptide
  MOD_RES (2)..(3)..(37)..(39): Xaa is C or S
  MOD_RES (17)..(18)..(19)..(20)..(21): Xaa is A or G
  MOD_RES (22)..(23)..(24)..(25): Xaa is A or G or is absent

SEQ ID NO: 80835 - protein, 38 aa, Artificial Sequence; identical to SEQ ID NO: 7445
  GFR-binding peptide
  MOD_RES (2)..(3)..(37): Xaa is C or S
  MOD_RES (17)..(18)..(19)..(20)..(21): Xaa is A or G
  MOD_RES (22)..(23)..(24)..(25): Xaa is A or G or is absent

SEQ ID NO: 80836 - protein, 37 aa, Artificial Sequence; identical to SEQ ID NO: 57644
  GFR-binding peptide
  MOD_RES (4)..(5)..(36): Xaa is C or S

SEQ ID NO: 80837 - protein, 37 aa, Artificial Sequence; identical to SEQ ID NO: 7446
  GFR-binding peptide
  MOD_RES (3)..(4)..(37): Xaa is C or S
  MOD_RES (18)..(19)..(20)..(21)..(22): Xaa is A or G
  MOD_RES (23)..(24)..(25)..(26): Xaa is A or G or is absent

SEQ ID NO: 80838 - protein, 39 aa, Artificial Sequence
  GFR-binding peptide
  MOD_RES (3)..(4)..(36)..(38): Xaa is C or S
GPXXTPTKMSAISMLYLNDKQQIILKNYQGMVVDRXGXS

SEQ ID NO: 80839 - protein, 44 aa, Artificial Sequence
  GFR-binding peptide
  MOD_RES (6)..(7)..(41)..(43): Xaa is C or S
  MOD_RES (21)..(22)..(23)..(24)..(25): Xaa is A or G
  MOD_RES (26)..(27)..(28)..(29): Xaa is A or G or is absent
AAPASXXVPARLSAISILYLXXXXXXXXXLKNYQDMVVEAXGXR

SEQ ID NO: 80840 - protein, 37 aa, Artificial Sequence; identical to SEQ ID NO: 9244
  GFR-binding peptide
  MOD_RES (3)..(4)..(37): Xaa is C or S
  MOD_RES (18)..(19)..(20)..(21)..(22): Xaa is A or G
  MOD_RES (23)..(24)..(25)..(26): Xaa is A or G or is absent

SEQ ID NO: 80841 - protein, 34 aa, Artificial Sequence; identical to SEQ ID NO: 16520
  GFR-binding peptide
  MOD_RES (1)..(33): Xaa is C or S

SEQ ID NO: 80842 - protein, 41 aa, Artificial Sequence; identical to SEQ ID NO: 9245
  GFR-binding peptide
  MOD_RES (3)..(4)..(39)..(41): Xaa is C or S
  MOD_RES (18)..(19)..(20)..(21)..(22): Xaa is A or G
  MOD_RES (23)..(24)..(25)..(26): Xaa is A or G or is absent

SEQ ID NO: 80843 - protein, 34 aa, Artificial Sequence
  GFR-binding peptide
  MOD_RES (1)..(1): Xaa is C or S
  MOD_RES (15)..(16)..(17)..(18)..(19): Xaa is A or G
  MOD_RES (20)..(21)..(22)..(23): Xaa is A or G or is absent
XVPTKLSAISILYLXXXXXXXXXLKNYQGMAVSE

SEQ ID NO: 80844 - protein, 37 aa, Artificial Sequence; identical to SEQ ID NO: 69815
  GFR-binding peptide
  MOD_RES (4)..(5): Xaa is C or S
  MOD_RES (19)..(20)..(21)..(22)..(23): Xaa is A or G
  MOD_RES (24)..(25)..(26)..(27): Xaa is A or G or is absent

SEQ ID NO: 80845 - protein, 36 aa, Artificial Sequence
  GFR-binding peptide
  MOD_RES (34)..(36): Xaa is C or S
  MOD_RES (14)..(15)..(16)..(17)..(18): Xaa is A or G
  MOD_RES (19)..(20)..(21)..(22): Xaa is A or G or is absent
VPARLSAISILYLXXXXXXXXXLKNYQDMVVEAXGX

SEQ ID NO: 80846 - protein, 38 aa, Artificial Sequence
  GFR-binding peptide
  MOD_RES (2)..(3)..(37): Xaa is C or S
  MOD_RES (17)..(18)..(19)..(20)..(21): Xaa is A or G
  MOD_RES (22)..(23)..(24)..(25): Xaa is A or G or is absent
PXXVPEKMSAISILYLXXXXXXXXXLKNYQNMTVESXA

SEQ ID NO: 80847 - protein, 38 aa, Artificial Sequence
  GFR-binding peptide
  MOD_RES (1)..(35)..(37): Xaa is C or S
  MOD_RES (15)..(16)..(17)..(18)..(19): Xaa is A or G
  MOD_RES (20)..(21)..(22)..(23): Xaa is A or G or is absent
XVPTKLSAISILYLXXXXXXXXXLKNYQGMAVSEXGXR

SEQ ID NO: 80848 - protein, 34 aa, Artificial Sequence; identical to SEQ ID NO: 57652
  GFR-binding peptide
  MOD_RES (1)..(2)..(33): Xaa is C or S

SEQ ID NO: 80849 - protein, 39 aa, Artificial Sequence; identical to SEQ ID NO: 9252
  GFR-binding peptide
  MOD_RES (6)..(7): Xaa is C or S
  MOD_RES (21)..(22)..(23)..(24)..(25): Xaa is A or G
  MOD_RES (26)..(27)..(28)..(29): Xaa is A or G or is absent

SEQ ID NO: 80850 - protein, 33 aa, Artificial Sequence; identical to SEQ ID NO: 57653
  GFR-binding peptide
  MOD_RES (1)..(2): Xaa is C or S

SEQ ID NO: 80851 - protein, 36 aa, Artificial Sequence; identical to SEQ ID NO: 9253
  GFR-binding peptide
  MOD_RES (1)..(34)..(36): Xaa is C or S
  MOD_RES (15)..(16)..(17)..(18)..(19): Xaa is A or G
  MOD_RES (20)..(21)..(22)..(23): Xaa is A or G or is absent

SEQ ID NO: 80852 - protein, 39 aa, Artificial Sequence; identical to SEQ ID NO: 16533
  GFR-binding peptide
  MOD_RES (2)..(3)..(37)..(39): Xaa is C or S
  MOD_RES (17)..(18)..(19)..(20)..(21): Xaa is A or G
  MOD_RES (22)..(23)..(24)..(25): Xaa is A or G or is absent

SEQ ID NO: 80853 - protein, 38 aa, Artificial Sequence; identical to SEQ ID NO: 9255
  GFR-binding peptide
  MOD_RES (5)..(6)..(37): Xaa is C or S

SEQ ID NO: 80854 - protein, 36 aa, Artificial Sequence; identical to SEQ ID NO: 57655
  GFR-binding peptide
  MOD_RES (4)..(5): Xaa is C or S

SEQ ID NO: 80855 - protein, 35 aa, Artificial Sequence; identical to SEQ ID NO: 66409
  GFR-binding peptide
  MOD_RES (4)..(5): Xaa is C or S

SEQ ID NO: 80856 - protein, 41 aa, Artificial Sequence; identical to SEQ ID NO: 30628
  GFR-binding peptide
  MOD_RES (6)..(7)..(41): Xaa is C or S
  MOD_RES (21)..(22)..(23)..(24)..(25): Xaa is A or G
  MOD_RES (26)..(27)..(28)..(29): Xaa is A or G or is absent

SEQ ID NO: 80857 - protein, 36 aa, Artificial Sequence; identical to SEQ ID NO: 7455
  GFR-binding peptide
  MOD_RES (1)..(2)..(34)..(36): Xaa is C or S

SEQ ID NO: 80858 - protein, 34 aa, Artificial Sequence; identical to SEQ ID NO: 7456
  GFR-binding peptide
  MOD_RES (1)..(2): Xaa is C or S
  MOD_RES (16)..(17)..(18)..(19)..(20): Xaa is A or G
  MOD_RES (21)..(22)..(23)..(24): Xaa is A or G or is absent

SEQ ID NO: 80859 - protein, 37 aa, Artificial Sequence; identical to SEQ ID NO: 7457
  GFR-binding peptide
  MOD_RES (1)..(34)..(36): Xaa is C or S
  MOD_RES (15)..(16)..(17)..(18)..(19): Xaa is A or G
  MOD_RES (20)..(21)..(22)..(23): Xaa is A or G or is absent

SEQ ID NO: 80860 - protein, 36 aa, Artificial Sequence; identical to SEQ ID NO: 9257
  GFR-binding peptide
  MOD_RES (1)..(33)..(35): Xaa is C or S

SEQ ID NO: 80861 - protein, 40 aa, Artificial Sequence; identical to SEQ ID NO: 28684
  GFR-binding peptide
  MOD_RES (6)..(7)..(39): Xaa is C or S

SEQ ID NO: 80862 - protein, 39 aa, Artificial Sequence; identical to SEQ ID NO: 57665
  GFR-binding peptide
  MOD_RES (5)..(6): Xaa is C or S
  MOD_RES (20)..(21)..(22)..(23)..(24): Xaa is A or G
  MOD_RES (25)..(26)..(27)..(28): Xaa is A or G or is absent

SEQ ID NO: 80863 - protein, 38 aa, Artificial Sequence
  GFR-binding peptide
  MOD_RES (6)..(7): Xaa is C or S
KASKAXXVPTKLSAISILYLDKGVVTYLKNYQGMAVSE

SEQ ID NO: 80864 - protein, 37 aa, Artificial Sequence; identical to SEQ ID NO: 9258
  GFR-binding peptide
  MOD_RES (4)..(5)..(36): Xaa is C or S

SEQ ID NO: 80865 - protein, 34 aa, Artificial Sequence; identical to SEQ ID NO: 9261
  GFR-binding peptide
  MOD_RES (3)..(4): Xaa is C or S

SEQ ID NO: 80866 - protein, 41 aa, Artificial Sequence; identical to SEQ ID NO: 7462
  GFR-binding peptide
  MOD_RES (6)..(7)..(39)..(41): Xaa is C or S

SEQ ID NO: 80867 - protein, 34 aa, Artificial Sequence; identical to SEQ ID NO: 9262
  GFR-binding peptide
  MOD_RES (34)..(34): Xaa is C or S
  MOD_RES (14)..(15)..(16)..(17)..(18): Xaa is A or G
  MOD_RES (19)..(20)..(21)..(22): Xaa is A or G or is absent

SEQ ID NO: 80868 - protein, 41 aa, Artificial Sequence; identical to SEQ ID NO: 9263
  GFR-binding peptide
  MOD_RES (6)..(7)..(41): Xaa is C or S
  MOD_RES (21)..(22)..(23)..(24)..(25): Xaa is A or G
  MOD_RES (26)..(27)..(28)..(29): Xaa is A or G or is absent

SEQ ID NO: 80869 - protein, 40 aa, Artificial Sequence; identical to SEQ ID NO: 9264
  GFR-binding peptide
  MOD_RES (4)..(5)..(37)..(39): Xaa is C or S

SEQ ID NO: 80870 - protein, 37 aa, Artificial Sequence; identical to SEQ ID NO: 9265
  GFR-binding peptide
  MOD_RES (4)..(5): Xaa is C or S
  MOD_RES (19)..(20)..(21)..(22)..(23): Xaa is A or G
  MOD_RES (24)..(25)..(26)..(27): Xaa is A or G or is absent

SEQ ID NO: 80871 - protein, 35 aa, Artificial Sequence; identical to SEQ ID NO: 7465
  GFR-binding peptide
  MOD_RES (1)..(2)..(34): Xaa is C or S

SEQ ID NO: 80872 - protein, 39 aa, Artificial Sequence; identical to SEQ ID NO: 7467
  GFR-binding peptide
  MOD_RES (4)..(5)..(39): Xaa is C or S
  MOD_RES (19)..(20)..(21)..(22)..(23): Xaa is A or G
  MOD_RES (24)..(25)..(26)..(27): Xaa is A or G or is absent

SEQ ID NO: 80873 - protein, 40 aa, Artificial Sequence; identical to SEQ ID NO: 7468
  GFR-binding peptide
  MOD_RES (5)..(6)..(40): Xaa is C or S
  MOD_RES (20)..(21)..(22)..(23)..(24): Xaa is A or G
  MOD_RES (25)..(26)..(27)..(28): Xaa is A or G or is absent

SEQ ID NO: 80874 - protein, 32 aa, Artificial Sequence; identical to SEQ ID NO: 30644
  GFR-binding peptide
  MOD_RES (14)..(15)..(16)..(17)..(18): Xaa is A or G
  MOD_RES (19)..(20)..(21)..(22): Xaa is A or G or is absent

SEQ ID NO: 80875 - protein, 41 aa, Artificial Sequence
  GFR-binding peptide
  MOD_RES (6)..(7)..(41): Xaa is C or S
  MOD_RES (21)..(22)..(23)..(24)..(25): Xaa is A or G
  MOD_RES (26)..(27)..(28)..(29): Xaa is A or G or is absent
HVPKPXXAPTKLSAISVLYLXXXXXXXXXLKNYQNMVVRSX

SEQ ID NO: 80876 - protein, 35 aa, Artificial Sequence; identical to SEQ ID NO: 16546
  GFR-binding peptide
  MOD_RES (2)..(3)..(35): Xaa is C or S

SEQ ID NO: 80877 - protein, 34 aa, Artificial Sequence; identical to SEQ ID NO: 7475
  GFR-binding peptide
  MOD_RES (2)..(3)..(34): Xaa is C or S

SEQ ID NO: 80878 - protein, 34 aa, Artificial Sequence
  GFR-binding peptide
  MOD_RES (1)..(2): Xaa is C or S
  MOD_RES (16)..(17)..(18)..(19)..(20): Xaa is A or G
  MOD_RES (21)..(22)..(23)..(24): Xaa is A or G or is absent
XXVPEKMSAISILYLXXXXXXXXXLKNYQNMTVE

SEQ ID NO: 80879 - protein, 33 aa, Artificial Sequence; identical to SEQ ID NO: 57670
  GFR-binding peptide
  MOD_RES (1)..(33): Xaa is C or S

SEQ ID NO: 80880 - protein, 36 aa, Artificial Sequence; identical to SEQ ID NO: 28701
  GFR-binding peptide
  MOD_RES (3)..(4): Xaa is C or S
  MOD_RES (18)..(19)..(20)..(21)..(22): Xaa is A or G
  MOD_RES (23)..(24)..(25)..(26): Xaa is A or G or is absent

SEQ ID NO: 80881 - protein, 39 aa, Artificial Sequence
  GFR-binding peptide
  MOD_RES (6)..(7): Xaa is C or S
  MOD_RES (21)..(22)..(23)..(24)..(25): Xaa is A or G
  MOD_RES (26)..(27)..(28)..(29): Xaa is A or G or is absent
GSAGPXXTPTKMSAISMLYLXXXXXXXXXLKNYQGMVVD

SEQ ID NO: 80882 - protein, 35 aa, Artificial Sequence; identical to SEQ ID NO: 7478
  GFR-binding peptide
  MOD_RES (2)..(3): Xaa is C or S
  MOD_RES (17)..(18)..(19)..(20)..(21): Xaa is A or G
  MOD_RES (22)..(23)..(24)..(25): Xaa is A or G or is absent

SEQ ID NO: 80883 - protein, 35 aa, Artificial Sequence
  GFR-binding peptide
  MOD_RES (1)..(35): Xaa is C or S
  MOD_RES (15)..(16)..(17)..(18)..(19): Xaa is A or G
  MOD_RES (20)..(21)..(22)..(23): Xaa is A or G or is absent
XTPTKMSAISMLYLXXXXXXXXXLKNYQGMVVDRX

SEQ ID NO: 80884 - protein, 36 aa, Artificial Sequence; identical to SEQ ID NO: 9273
  GFR-binding peptide
  MOD_RES (2)..(3): Xaa is C or S
  MOD_RES (17)..(18)..(19)..(20)..(21): Xaa is A or G
  MOD_RES (22)..(23)..(24)..(25): Xaa is A or G or is absent

SEQ ID NO: 80885 - protein, 33 aa, Artificial Sequence; identical to SEQ ID NO: 30652
  GFR-binding peptide
  MOD_RES (1)..(1): Xaa is C or S
  MOD_RES (15)..(16)..(17)..(18)..(19): Xaa is A or G
  MOD_RES (20)..(21)..(22)..(23): Xaa is A or G or is absent

SEQ ID NO: 80886 - protein, 41 aa, Artificial Sequence; identical to SEQ ID NO: 9276
  GFR-binding peptide
  MOD_RES (6)..(7)..(38)..(40): Xaa is C or S

SEQ ID NO: 80887 - protein, 38 aa, Artificial Sequence; identical to SEQ ID NO: 7480
  GFR-binding peptide
  MOD_RES (1)..(2)..(36)..(38): Xaa is C or S
  MOD_RES (16)..(17)..(18)..(19)..(20): Xaa is A or G
  MOD_RES (21)..(22)..(23)..(24): Xaa is A or G or is absent

SEQ ID NO: 80888 - protein, 37 aa, Artificial Sequence
  GFR-binding peptide
  MOD_RES (2)..(3)..(37): Xaa is C or S
  MOD_RES (17)..(18)..(19)..(20)..(21): Xaa is A or G
  MOD_RES (22)..(23)..(24)..(25): Xaa is A or G or is absent
PXXTPTKMSAISMLYLXXXXXXXXXLKNYQGMVVDRX

SEQ ID NO: 80889 - protein, 39 aa, Artificial Sequence; identical to SEQ ID NO: 57678
  GFR-binding peptide
  MOD_RES (3)..(4)..(36)..(38): Xaa is C or S

SEQ ID NO: 80890 - protein, 39 aa, Artificial Sequence; identical to SEQ ID NO: 9279
  GFR-binding peptide
  MOD_RES (4)..(5)..(36)..(38): Xaa is C or S

SEQ ID NO: 80891 - protein, 36 aa, Artificial Sequence; identical to SEQ ID NO: 9282
  GFR-binding peptide
  MOD_RES (1)..(2)..(34)..(36): Xaa is C or S

SEQ ID NO: 80892 - protein, 38 aa, Artificial Sequence; identical to SEQ ID NO: 7481
  GFR-binding peptide
  MOD_RES (3)..(4)..(37): Xaa is C or S
  MOD_RES (18)..(19)..(20)..(21)..(22): Xaa is A or G
  MOD_RES (23)..(24)..(25)..(26): Xaa is A or G or is absent

SEQ ID NO: 80893 - protein, 41 aa, Artificial Sequence; identical to SEQ ID NO: 7482
  GFR-binding peptide
  MOD_RES (6)..(7)..(38)..(40): Xaa is C or S

SEQ ID NO: 80894 - protein, 40 aa, Artificial Sequence; identical to SEQ ID NO: 7484
  GFR-binding peptide
  MOD_RES (6)..(7)..(38)..(40): Xaa is C or S

SEQ ID NO: 80895 - protein, 34 aa, Artificial Sequence; identical to SEQ ID NO: 7485
  GFR-binding peptide
  MOD_RES (1)..(33): Xaa is C or S

SEQ ID NO: 80896 - protein, 41 aa, Artificial Sequence
  GFR-binding peptide
  MOD_RES (6)..(7)..(41): Xaa is C or S
  MOD_RES (21)..(22)..(23)..(24)..(25): Xaa is A or G
  MOD_RES (26)..(27)..(28)..(29): Xaa is A or G or is absent
GIPEPXXVPEKMSAISILYLXXXXXXXXXLKNYQNMTVESX

SEQ ID NO: 80897 - protein, 41 aa, Artificial Sequence; identical to SEQ ID NO: 7488
  GFR-binding peptide
  MOD_RES (6)..(7)..(40): Xaa is C or S
  MOD_RES (21)..(22)..(23)..(24)..(25): Xaa is A or G
  MOD_RES (26)..(27)..(28)..(29): Xaa is A or G or is absent

SEQ ID NO: 80898 - protein, 37 aa, Artificial Sequence; identical to SEQ ID NO: 7489
  GFR-binding peptide
  MOD_RES (6)..(7): Xaa is C or S

SEQ ID NO: 80899 - protein, 42 aa, Artificial Sequence; identical to SEQ ID NO: 66436
  GFR-binding peptide
  MOD_RES (4)..(5)..(39)..(41): Xaa is C or S
  MOD_RES (19)..(20)..(21)..(22)..(23): Xaa is A or G
  MOD_RES (24)..(25)..(26)..(27): Xaa is A or G or is absent

SEQ ID NO: 80900 - protein, 36 aa, Artificial Sequence; identical to SEQ ID NO: 7490
  GFR-binding peptide
  MOD_RES (1)..(36): Xaa is C or S
  MOD_RES (15)..(16)..(17)..(18)..(19): Xaa is A or G
  MOD_RES (20)..(21)..(22)..(23): Xaa is A or G or is absent

SEQ ID NO: 80901 - protein, 41 aa, Artificial Sequence; identical to SEQ ID NO: 7491
  GFR-binding peptide
  MOD_RES (4)..(5)..(38)..(40): Xaa is C or S

SEQ ID NO: 80902 - protein, 37 aa, Artificial Sequence; identical to SEQ ID NO: 57686
  GFR-binding peptide
  MOD_RES (6)..(7): Xaa is C or S

SEQ ID NO: 80903 - protein, 42 aa, Artificial Sequence; identical to SEQ ID NO: 7492
  GFR-binding peptide
  MOD_RES (6)..(7)..(41): Xaa is C or S
  MOD_RES (21)..(22)..(23)..(24)..(25): Xaa is A or G
  MOD_RES (26)..(27)..(28)..(29): Xaa is A or G or is absent

SEQ ID NO: 80904 - protein, 36 aa, Artificial Sequence; identical to SEQ ID NO: 7494
  GFR-binding peptide
  MOD_RES (1)..(2)..(33)..(35): Xaa is C or S

SEQ ID NO: 80905 - protein, 36 aa, Artificial Sequence; identical to SEQ ID NO: 7496
  GFR-binding peptide
  MOD_RES (5)..(6): Xaa is C or S

SEQ ID NO: 80906 - protein, 33 aa, Artificial Sequence; identical to SEQ ID NO: 9284
  GFR-binding peptide
  MOD_RES (32)..(32): Xaa is C or S

SEQ ID NO: 80907 - protein, 37 aa, Artificial Sequence; identical to SEQ ID NO: 9285
  GFR-binding peptide
  MOD_RES (4)..(5): Xaa is C or S
  MOD_RES (19)..(20)..(21)..(22)..(23): Xaa is A or G
  MOD_RES (24)..(25)..(26)..(27): Xaa is A or G or is absent

SEQ ID NO: 80908 - protein, 40 aa, Artificial Sequence; identical to SEQ ID NO: 14802
  GFR-binding peptide
  MOD_RES (2)..(3)..(37)..(39): Xaa is C or S
  MOD_RES (17)..(18)..(19)..(20)..(21): Xaa is A or G
  MOD_RES (22)..(23)..(24)..(25): Xaa is A or G or is absent

SEQ ID NO: 80909 - protein, 33 aa, Artificial Sequence; identical to SEQ ID NO: 7497
  GFR-binding peptide
  MOD_RES (1)..(2): Xaa is C or S

SEQ ID NO: 80910 - protein, 38 aa, Artificial Sequence
  GFR-binding peptide
  MOD_RES (3)..(4)..(35)..(37): Xaa is C or S
STXXAPVKTSAISMLYLDNGRVLLLKNYQMIVEEXGXL

SEQ ID NO: 80911 - protein, 40 aa, Artificial Sequence; identical to SEQ ID NO: 9286
  GFR-binding peptide
  MOD_RES (4)..(5)..(40): Xaa is C or S
  MOD_RES (19)..(20)..(21)..(22)..(23): Xaa is A or G
  MOD_RES (24)..(25)..(26)..(27): Xaa is A or G or is absent

SEQ ID NO: 80912 - protein, 36 aa, Artificial Sequence; identical to SEQ ID NO: 7498
  GFR-binding peptide
  MOD_RES (3)..(4): Xaa is C or S
  MOD_RES (18)..(19)..(20)..(21)..(22): Xaa is A or G
  MOD_RES (23)..(24)..(25)..(26): Xaa is A or G or is absent

SEQ ID NO: 80913 - protein, 40 aa, Artificial Sequence; identical to SEQ ID NO: 9287
  GFR-binding peptide
  MOD_RES (5)..(6)..(38)..(40): Xaa is C or S

SEQ ID NO: 80914 - protein, 33 aa, Artificial Sequence
  GFR-binding peptide
  MOD_RES (32)..(32): Xaa is C or S
VPARLSAISILYLDAANNVVLKNYQDMVVEAXG

SEQ ID NO: 80915 - protein, 41 aa, Artificial Sequence; identical to SEQ ID NO: 28727
  GFR-binding peptide
  MOD_RES (4)..(5)..(39)..(41): Xaa is C or S
  MOD_RES (19)..(20)..(21)..(22)..(23): Xaa is A or G
  MOD_RES (24)..(25)..(26)..(27): Xaa is A or G or is absent

SEQ ID NO: 80916 - protein, 34 aa, Artificial Sequence; identical to SEQ ID NO: 16578
  GFR-binding peptide
  MOD_RES (34)..(34): Xaa is C or S
  MOD_RES (14)..(15)..(16)..(17)..(18): Xaa is A or G
  MOD_RES (19)..(20)..(21)..(22): Xaa is A or G or is absent

SEQ ID NO: 80917 - protein, 37 aa, Artificial Sequence; identical to SEQ ID NO: 14808
  GFR-binding peptide
  MOD_RES (1)..(2)..(36): Xaa is C or S
  MOD_RES (16)..(17)..(18)..(19)..(20): Xaa is A or G
  MOD_RES (21)..(22)..(23)..(24): Xaa is A or G or is absent

SEQ ID NO: 80918 - protein, 37 aa, Artificial Sequence; identical to SEQ ID NO: 7501
  GFR-binding peptide
  MOD_RES (1)..(2)..(34)..(36): Xaa is C or S

SEQ ID NO: 80919 - protein, 40 aa, Artificial Sequence; identical to SEQ ID NO: 57704
  GFR-binding peptide
  MOD_RES (2)..(3)..(37)..(39): Xaa is C or S
  MOD_RES (17)..(18)..(19)..(20)..(21): Xaa is A or G
  MOD_RES (22)..(23)..(24)..(25): Xaa is A or G or is absent

SEQ ID NO: 80920 - protein, 38 aa, Artificial Sequence; identical to SEQ ID NO: 7502
  GFR-binding peptide
  MOD_RES (2)..(3)..(36)..(38): Xaa is C or S
  MOD_RES (17)..(18)..(19)..(20)..(21): Xaa is A or G
  MOD_RES (22)..(23)..(24)..(25): Xaa is A or G or is absent

SEQ ID NO: 80921 - protein, 42 aa, Artificial Sequence; identical to SEQ ID NO: 9291
  GFR-binding peptide
  MOD_RES (4)..(5)..(39)..(41): Xaa is C or S
  MOD_RES (19)..(20)..(21)..(22)..(23): Xaa is A or G
  MOD_RES (24)..(25)..(26)..(27): Xaa is A or G or is absent

SEQ ID NO: 80922 - protein, 39 aa, Artificial Sequence; identical to SEQ ID NO: 9292
  GFR-binding peptide
  MOD_RES (6)..(7): Xaa is C or S
  MOD_RES (21)..(22)..(23)..(24)..(25): Xaa is A or G
  MOD_RES (26)..(27)..(28)..(29): Xaa is A or G or is absent

SEQ ID NO: 80923 - protein, 44 aa, Artificial Sequence; identical to SEQ ID NO: 9294
  GFR-binding peptide
  MOD_RES (6)..(7)..(41)..(43): Xaa is C or S
  MOD_RES (21)..(22)..(23)..(24)..(25): Xaa is A or G
  MOD_RES (26)..(27)..(28)..(29): Xaa is A or G or is absent

SEQ ID NO: 80924 - protein, 36 aa, Artificial Sequence; identical to SEQ ID NO: 9296
  GFR-binding peptide
  MOD_RES (35)..(35): Xaa is C or S
  MOD_RES (14)..(15)..(16)..(17)..(18): Xaa is A or G
  MOD_RES (19)..(20)..(21)..(22): Xaa is A or G or is absent

SEQ ID NO: 80925 - protein, 36 aa, Artificial Sequence; identical to SEQ ID NO: 7507
  GFR-binding peptide
  MOD_RES (5)..(6): Xaa is C or S

SEQ ID NO: 80926 - protein, 31 aa, Artificial Sequence; identical to SEQ ID NO: 30685
  GFR-binding peptide
  MOD_RES (1)..(1): Xaa is C or S

SEQ ID NO: 80927 - protein, 39 aa, Artificial Sequence; identical to SEQ ID NO: 9298
  GFR-binding peptide
  MOD_RES (1)..(2)..(37)..(39): Xaa is C or S
  MOD_RES (16)..(17)..(18)..(19)..(20): Xaa is A or G
  MOD_RES (21)..(22)..(23)..(24): Xaa is A or G or is absent

SEQ ID NO: 80928 - protein, 40 aa, Artificial Sequence; identical to SEQ ID NO: 30687
  GFR-binding peptide
  MOD_RES (5)..(6)..(40): Xaa is C or S
  MOD_RES (20)..(21)..(22)..(23)..(24): Xaa is A or G
  MOD_RES (25)..(26)..(27)..(28): Xaa is A or G or is absent

SEQ ID NO: 80929 - protein, 42 aa, Artificial Sequence; identical to SEQ ID NO: 9302
  GFR-binding peptide
  MOD_RES (6)..(7)..(40)..(42): Xaa is C or S
  MOD_RES (21)..(22)..(23)..(24)..(25): Xaa is A or G
  MOD_RES (26)..(27)..(28)..(29): Xaa is A or G or is absent

SEQ ID NO: 80930 - protein, 34 aa, Artificial Sequence; identical to SEQ ID NO: 69860
  GFR-binding peptide
  MOD_RES (1)..(33): Xaa is C or S

SEQ ID NO: 80931 - protein, 37 aa, Artificial Sequence
  GFR-binding peptide
  MOD_RES (2)..(3)..(37): Xaa is C or S
  MOD_RES (17)..(18)..(19)..(20)..(21): Xaa is A or G
  MOD_RES (22)..(23)..(24)..(25): Xaa is A or G or is absent
SXXVPARLSAISILYLXXXXXXXXXLKNYQDMVVEAX

SEQ ID NO: 80932 - protein, 40 aa, Artificial Sequence; identical to SEQ ID NO: 30691
  GFR-binding peptide
  MOD_RES (5)..(6)..(38)..(40): Xaa is C or S

SEQ ID NO: 80933 - protein, 40 aa, Artificial Sequence
  GFR-binding peptide
  MOD_RES (6)..(7): Xaa is C or S
  MOD_RES (21)..(22)..(23)..(24)..(25): Xaa is A or G
  MOD_RES (26)..(27)..(28)..(29): Xaa is A or G or is absent
KASKAXXVPTKLSAISILYLXXXXXXXXXLKNYQGMAVSE

SEQ ID NO: 80934 - protein, 33 aa, Artificial Sequence
  GFR-binding peptide
  MOD_RES (2)..(3): Xaa is C or S
AXXVPTKLSAISILYLDKGVVTYLKNYQGMAVS

SEQ ID NO: 80935 - protein, 43 aa, Artificial Sequence; identical to SEQ ID NO: 9303
  GFR-binding peptide
  MOD_RES (6)..(7)..(40)..(42): Xaa is C or S
  MOD_RES (21)..(22)..(23)..(24)..(25): Xaa is A or G
  MOD_RES (26)..(27)..(28)..(29): Xaa is A or G or is absent

SEQ ID NO: 80936 - protein, 33 aa, Artificial Sequence; identical to SEQ ID NO: 9304
  GFR-binding peptide
  MOD_RES (31)..(33): Xaa is C or S

SEQ ID NO: 80937 - protein, 38 aa, Artificial Sequence
  GFR-binding peptide
  MOD_RES (2)..(3)..(37): Xaa is C or S
  MOD_RES (17)..(18)..(19)..(20)..(21): Xaa is A or G
  MOD_RES (22)..(23)..(24)..(25): Xaa is A or G or is absent
SXXVPARLSAISILYLXXXXXXXXXLKNYQDMVVEAXG

SEQ ID NO: 80938 - protein, 38 aa, Artificial Sequence; identical to SEQ ID NO: 7514
  GFR-binding peptide
  MOD_RES (3)..(4)..(37): Xaa is C or S
  MOD_RES (18)..(19)..(20)..(21)..(22): Xaa is A or G
  MOD_RES (23)..(24)..(25)..(26): Xaa is A or G or is absent

SEQ ID NO: 80939 - protein, 40 aa, Artificial Sequence; identical to SEQ ID NO: 9305
  GFR-binding peptide
  MOD_RES (6)..(40): Xaa is C or S
  MOD_RES (20)..(21)..(22)..(23)..(24): Xaa is A or G
  MOD_RES (25)..(26)..(27)..(28): Xaa is A or G or is absent

SEQ ID NO: 80940 - protein, 39 aa, Artificial Sequence; identical to SEQ ID NO: 30696
  GFR-binding peptide
  MOD_RES (3)..(4)..(36)..(38): Xaa is C or S

SEQ ID NO: 80941 - protein, 37 aa, Artificial Sequence
  GFR-binding peptide
  MOD_RES (1)..(2)..(34)..(36): Xaa is C or S
XXVPARLSAISILYLDAANNVVLKNYQDMVVEAXGXR

SEQ ID NO: 80942 - protein, 44 aa, Artificial Sequence
  GFR-binding peptide
  MOD_RES (6)..(7)..(41)..(43): Xaa is C or S
  MOD_RES (21)..(22)..(23)..(24)..(25): Xaa is A or G
  MOD_RES (26)..(27)..(28)..(29): Xaa is A or G or is absent
KASKAXXVPTKLSAISILYLXXXXXXXXXLKNYQGMAVSEXGXR

SEQ ID NO: 80943 - protein, 35 aa, Artificial Sequence; identical to SEQ ID NO: 68202
  GFR-binding peptide
  MOD_RES (3)..(4): Xaa is C or S

SEQ ID NO: 80944 - protein, 41 aa, Artificial Sequence
  GFR-binding peptide
  MOD_RES (3)..(4)..(38)..(40): Xaa is C or S
  MOD_RES (18)..(19)..(20)..(21)..(22): Xaa is A or G
  MOD_RES (23)..(24)..(25)..(26): Xaa is A or G or is absent
ASXXVPARLSAISILYLXXXXXXXXXLKNYQDMVVEAXGXR

SEQ ID NO: 80945 - protein, 41 aa, Artificial Sequence
  GFR-binding peptide
  MOD_RES (6)..(7)..(39)..(41): Xaa is C or S
HVPKPXXAPTKLSAISVLYLDDSSNVILKNYQNMVVRSXGX

SEQ ID NO: 80946 - protein, 40 aa, Artificial Sequence
  GFR-binding peptide
  MOD_RES (5)..(6)..(39): Xaa is C or S
  MOD_RES (20)..(21)..(22)..(23)..(24): Xaa is A or G
  MOD_RES (25)..(26)..(27)..(28): Xaa is A or G or is absent
VPSTXXAPVKTSAISMLYLXXXXXXXXXLKNYQMIVEEXG

SEQ ID NO: 80947 - protein, 35 aa, Artificial Sequence
  GFR-binding peptide
  MOD_RES (1)..(2)..(34): Xaa is C or S
XXVPEKMSAISILYLDENKNVVLKNYQNMTVESXA

SEQ ID NO: 80948 - protein, 39 aa, Artificial Sequence; identical to SEQ ID NO: 9309
  GFR-binding peptide
  MOD_RES (5)..(37)..(39): Xaa is C or S

SEQ ID NO: 80949 - protein, 38 aa, Artificial Sequence; identical to SEQ ID NO: 30702
  GFR-binding peptide
  MOD_RES (3)..(4)..(36)..(38): Xaa is C or S

SEQ ID NO: 80950 - protein, 41 aa, Artificial Sequence
  GFR-binding peptide
  MOD_RES (6)..(7)..(39)..(41): Xaa is C or S
GSAGPXXTPTKMSAISMLYLNDKQQIILKNYQGMVVDRXGX

SEQ ID NO: 80951 - protein, 33 aa, Artificial Sequence
  GFR-binding peptide
  MOD_RES (32)..(32): Xaa is C or S
VPTKLSAISILYLDKGVVTYLKNYQGMAVSEXG

SEQ ID NO: 80952 - protein, 33 aa, Artificial Sequence; identical to SEQ ID NO: 9313
  GFR-binding peptide
  MOD_RES (32)..(32): Xaa is C or S

SEQ ID NO: 80953 - protein, 38 aa, Artificial Sequence; identical to SEQ ID NO: 7521
  GFR-binding peptide
  MOD_RES (3)..(4)..(38): Xaa is C or S
  MOD_RES (18)..(19)..(20)..(21)..(22): Xaa is A or G
  MOD_RES (23)..(24)..(25)..(26): Xaa is A or G or is absent

SEQ ID NO: 80954 - protein, 39 aa, Artificial Sequence; identical to SEQ ID NO: 7522
  GFR-binding peptide
  MOD_RES (6)..(7): Xaa is C or S
  MOD_RES (21)..(22)..(23)..(24)..(25): Xaa is A or G
  MOD_RES (26)..(27)..(28)..(29): Xaa is A or G or is absent

SEQ ID NO: 80955 - protein, 36 aa, Artificial Sequence; identical to SEQ ID NO: 9316
  GFR-binding peptide
  MOD_RES (3)..(4): Xaa is C or S
  MOD_RES (18)..(19)..(20)..(21)..(22): Xaa is A or G
  MOD_RES (23)..(24)..(25)..(26): Xaa is A or G or is absent

SEQ ID NO: 80956 - protein, 36 aa, Artificial Sequence; identical to SEQ ID NO: 16617
  GFR-binding peptide
  MOD_RES (1)..(2)..(34)..(36): Xaa is C or S

SEQ ID NO: 80957 - protein, 40 aa, Artificial Sequence; identical to SEQ ID NO: 7524
  GFR-binding peptide
  MOD_RES (4)..(5)..(39): Xaa is C or S
  MOD_RES (19)..(20)..(21)..(22)..(23): Xaa is A or G
  MOD_RES (24)..(25)..(26)..(27): Xaa is A or G or is absent

SEQ ID NO: 80958 - protein, 41 aa, Artificial Sequence
  GFR-binding peptide
  MOD_RES (6)..(7)..(40): Xaa is C or S
  MOD_RES (21)..(22)..(23)..(24)..(25): Xaa is A or G
  MOD_RES (26)..(27)..(28)..(29): Xaa is A or G or is absent
RVPSTXXAPVKTSAISMLYLXXXXXXXXXLKNYQMIVEEXG

SEQ ID NO: 80959 - protein, 37 aa, Artificial Sequence; identical to SEQ ID NO: 9317
  GFR-binding peptide
  MOD_RES (3)..(4)..(37): Xaa is C or S
  MOD_RES (18)..(19)..(20)..(21)..(22): Xaa is A or G
  MOD_RES (23)..(24)..(25)..(26): Xaa is A or G or is absent

SEQ ID NO: 80960 - protein, 33 aa, Artificial Sequence; identical to SEQ ID NO: 7526
  GFR-binding peptide
  MOD_RES (33)..(33): Xaa is C or S

SEQ ID NO: 80961 - protein, 39 aa, Artificial Sequence; identical to SEQ ID NO: 7527
  GFR-binding peptide
  MOD_RES (5)..(6): Xaa is C or S
  MOD_RES (20)..(21)..(22)..(23)..(24): Xaa is A or G
  MOD_RES (25)..(26)..(27)..(28): Xaa is A or G or is absent

SEQ ID NO: 80962 - protein, 40 aa, Artificial Sequence; identical to SEQ ID NO: 7529
  GFR-binding peptide
  MOD_RES (6)..(7)..(40): Xaa is C or S

SEQ ID NO: 80963 - protein, 37 aa, Artificial Sequence; identical to SEQ ID NO: 7530
  GFR-binding peptide
  MOD_RES (3)..(4): Xaa is C or S
  MOD_RES (18)..(19)..(20)..(21)..(22): Xaa is A or G
  MOD_RES (23)..(24)..(25)..(26): Xaa is A or G or is absent

SEQ ID NO: 80964 - protein, 33 aa, Artificial Sequence; identical to SEQ ID NO: 9322
  GFR-binding peptide
  MOD_RES (1)..(32): Xaa is C or S

SEQ ID NO: 80965 - protein, 37 aa, Artificial Sequence; identical to SEQ ID NO: 28767
  GFR-binding peptide
  MOD_RES (6)..(7): Xaa is C or S

SEQ ID NO: 80966 - protein, 40 aa, Artificial Sequence; identical to SEQ ID NO: 9323
  GFR-binding peptide
  MOD_RES (5)..(6)..(40): Xaa is C or S
  MOD_RES (20)..(21)..(22)..(23)..(24): Xaa is A or G
  MOD_RES (25)..(26)..(27)..(28): Xaa is A or G or is absent

SEQ ID NO: 80967 - protein, 40 aa, Artificial Sequence; identical to SEQ ID NO: 57735
  GFR-binding peptide
  MOD_RES (6)..(7): Xaa is C or S
  MOD_RES (21)..(22)..(23)..(24)..(25): Xaa is A or G
  MOD_RES (26)..(27)..(28)..(29): Xaa is A or G or is absent

SEQ ID NO: 80968 - protein, 35 aa, Artificial Sequence; identical to SEQ ID NO: 9324
  GFR-binding peptide
  MOD_RES (1)..(33)..(35): Xaa is C or S

SEQ ID NO: 80969 - protein, 39 aa, Artificial Sequence; identical to SEQ ID NO: 9325
  GFR-binding peptide
  MOD_RES (5)..(6): Xaa is C or S
  MOD_RES (20)..(21)..(22)..(23)..(24): Xaa is A or G
  MOD_RES (25)..(26)..(27)..(28): Xaa is A or G or is absent

SEQ ID NO: 80970 - protein, 31 aa, Artificial Sequence; identical to SEQ ID NO: 28771
  GFR-binding peptide

SEQ ID NO: 80971 - protein, 37 aa, Artificial Sequence; identical to SEQ ID NO: 9327
  GFR-binding peptide
  MOD_RES (1)..(2)..(35)..(37): Xaa is C or S
  MOD_RES (16)..(17)..(18)..(19)..(20): Xaa is A or G
  MOD_RES (21)..(22)..(23)..(24): Xaa is A or G or is absent

SEQ ID NO: 80972 - protein, 36 aa, Artificial Sequence; identical to SEQ ID NO: 7535
  GFR-binding peptide
  MOD_RES (34)..(36): Xaa is C or S
  MOD_RES (14)..(15)..(16)..(17)..(18): Xaa is A or G
  MOD_RES (19)..(20)..(21)..(22): Xaa is A or G or is absent

SEQ ID NO: 80973 - protein, 37 aa, Artificial Sequence; identical to SEQ ID NO: 9328
  GFR-binding peptide
  MOD_RES (3)..(4)..(36): Xaa is C or S

SEQ ID NO: 80974 - protein, 38 aa, Artificial Sequence; identical to SEQ ID NO: 7536
  GFR-binding peptide
  MOD_RES (3)..(4): Xaa is C or S
  MOD_RES (18)..(19)..(20)..(21)..(22): Xaa is A or G
  MOD_RES (23)..(24)..(25)..(26): Xaa is A or G or is absent

SEQ ID NO: 80975 - protein, 35 aa, Artificial Sequence; identical to SEQ ID NO: 57744
  GFR-binding peptide
  MOD_RES (2)..(3): Xaa is C or S
  MOD_RES (17)..(18)..(19)..(20)..(21): Xaa is A or G
  MOD_RES (22)..(23)..(24)..(25): Xaa is A or G or is absent

SEQ ID NO: 80976 - protein, 36 aa, Artificial Sequence; identical to SEQ ID NO: 9330
  GFR-binding peptide
  MOD_RES (34)..(36): Xaa is C or S
  MOD_RES (14)..(15)..(16)..(17)..(18): Xaa is A or G
  MOD_RES (19)..(20)..(21)..(22): Xaa is A or G or is absent

SEQ ID NO: 80977 - protein, 31 aa, Artificial Sequence
  GFR-binding peptide
  MOD_RES (1)..(1): Xaa is C or S
XVPARLSAISILYLDAANNVVLKNYQDMVVE

SEQ ID NO: 80978 - protein, 37 aa, Artificial Sequence; identical to SEQ ID NO: 7537
  GFR-binding peptide
  MOD_RES (1)..(34)..(36): Xaa is C or S
  MOD_RES (15)..(16)..(17)..(18)..(19): Xaa is A or G
  MOD_RES (20)..(21)..(22)..(23): Xaa is A or G or is absent

SEQ ID NO: 80979 - protein, 33 aa, Artificial Sequence; identical to SEQ ID NO: 9331
  GFR-binding peptide
  MOD_RES (14)..(15)..(16)..(17)..(18): Xaa is A or G
  MOD_RES (19)..(20)..(21)..(22): Xaa is A or G or is absent

SEQ ID NO: 80980 - protein, 35 aa, Artificial Sequence; identical to SEQ ID NO: 9332
  GFR-binding peptide
  MOD_RES (3)..(4)..(35): Xaa is C or S

SEQ ID NO: 80981 - protein, 35 aa, Artificial Sequence; identical to SEQ ID NO: 28777
  GFR-binding peptide
  MOD_RES (2)..(3): Xaa is C or S
  MOD_RES (17)..(18)..(19)..(20)..(21): Xaa is A or G
  MOD_RES (22)..(23)..(24)..(25): Xaa is A or G or is absent

SEQ ID NO: 80982 - protein, 39 aa, Artificial Sequence; identical to SEQ ID NO: 7538
  GFR-binding peptide
  MOD_RES (5)..(6)..(37)..(39): Xaa is C or S

SEQ ID NO: 80983 - protein, 30 aa, Artificial Sequence
  GFR-binding peptide
VPARLSAISILYLDAANNVVLKNYQDMVVE

SEQ ID NO: 80984 - protein, 43 aa, Artificial Sequence; identical to SEQ ID NO: 9334
  GFR-binding peptide
  MOD_RES (6)..(7)..(41)..(43): Xaa is C or S
  MOD_RES (21)..(22)..(23)..(24)..(25): Xaa is A or G
  MOD_RES (26)..(27)..(28)..(29): Xaa is A or G or is absent

SEQ ID NO: 80985 - protein, 35 aa, Artificial Sequence; identical to SEQ ID NO: 9335
  GFR-binding peptide
  MOD_RES (2)..(3)..(34): Xaa is C or S

SEQ ID NO: 80986 - protein, 37 aa, Artificial Sequence; identical to SEQ ID NO: 7540
  GFR-binding peptide
  MOD_RES (2)..(3)..(37): Xaa is C or S
  MOD_RES (17)..(18)..(19)..(20)..(21): Xaa is A or G
  MOD_RES (22)..(23)..(24)..(25): Xaa is A or G or is absent

SEQ ID NO: 80987 - protein, 30 aa, Artificial Sequence; identical to SEQ ID NO: 57751
  GFR-binding peptide

SEQ ID NO: 80988 - protein, 36 aa, Artificial Sequence; identical to SEQ ID NO: 9336
  GFR-binding peptide
  MOD_RES (3)..(4)..(36): Xaa is C or S

SEQ ID NO: 80989 - protein, 37 aa, Artificial Sequence; identical to SEQ ID NO: 16639
  GFR-binding peptide
  MOD_RES (6)..(7): Xaa is C or S

SEQ ID NO: 80990 - protein, 39 aa, Artificial Sequence; identical to SEQ ID NO: 68230
  GFR-binding peptide
  MOD_RES (6)..(7): Xaa is C or S
  MOD_RES (21)..(22)..(23)..(24)..(25): Xaa is A or G
  MOD_RES (26)..(27)..(28)..(29): Xaa is A or G or is absent

SEQ ID NO: 80991 - protein, 36 aa, Artificial Sequence; identical to SEQ ID NO: 9337
  GFR-binding peptide
  MOD_RES (2)..(3): Xaa is C or S
  MOD_RES (17)..(18)..(19)..(20)..(21): Xaa is A or G
  MOD_RES (22)..(23)..(24)..(25): Xaa is A or G or is absent

SEQ ID NO: 80992 - protein, 38 aa, Artificial Sequence; identical to SEQ ID NO: 7543
  GFR-binding peptide
  MOD_RES (2)..(3)..(37): Xaa is C or S
  MOD_RES (17)..(18)..(19)..(20)..(21): Xaa is A or G
  MOD_RES (22)..(23)..(24)..(25): Xaa is A or G or is absent

SEQ ID NO: 80993 - protein, 37 aa, Artificial Sequence; identical to SEQ ID NO: 7544
  GFR-binding peptide
  MOD_RES (3)..(4): Xaa is C or S
  MOD_RES (18)..(19)..(20)..(21)..(22): Xaa is A or G
  MOD_RES (23)..(24)..(25)..(26): Xaa is A or G or is absent

SEQ ID NO: 80994 - protein, 34 aa, Artificial Sequence; identical to SEQ ID NO: 57755
  GFR-binding peptide
  MOD_RES (32)..(34): Xaa is C or S

SEQ ID NO: 80995 - protein, 40 aa, Artificial Sequence; identical to SEQ ID NO: 7545
  GFR-binding peptide
  MOD_RES (3)..(4)..(38)..(40): Xaa is C or S
  MOD_RES (18)..(19)..(20)..(21)..(22): Xaa is A or G
  MOD_RES (23)..(24)..(25)..(26): Xaa is A or G or is absent

SEQ ID NO: 80996 - protein, 37 aa, Artificial Sequence; identical to SEQ ID NO: 28785
  GFR-binding peptide
  MOD_RES (5)..(6): Xaa is C or S

SEQ ID NO: 80997 - protein, 38 aa, Artificial Sequence; identical to SEQ ID NO: 7546
  GFR-binding peptide
  MOD_RES (1)..(35)..(37): Xaa is C or S
  MOD_RES (15)..(16)..(17)..(18)..(19): Xaa is A or G
  MOD_RES (20)..(21)..(22)..(23): Xaa is A or G or is absent

SEQ ID NO: 80998 - protein, 36 aa, Artificial Sequence; identical to SEQ ID NO: 7548
  GFR-binding peptide
  MOD_RES (1)..(2)..(35): Xaa is C or S
  MOD_RES (16)..(17)..(18)..(19)..(20): Xaa is A or G
  MOD_RES (21)..(22)..(23)..(24): Xaa is A or G or is absent

SEQ ID NO: 80999 - protein, 37 aa, Artificial Sequence; identical to SEQ ID NO: 7549
  GFR-binding peptide
  MOD_RES (6)..(7): Xaa is C or S

SEQ ID NO: 81000 - protein, 35 aa, Artificial Sequence; identical to SEQ ID NO: 7551
  GFR-binding peptide
  MOD_RES (32)..(34): Xaa is C or S

SEQ ID NO: 81001 - protein, 40 aa, Artificial Sequence; identical to SEQ ID NO: 57764
  GFR-binding peptide
  MOD_RES (5)..(6)..(40): Xaa is C or S
  MOD_RES (20)..(21)..(22)..(23)..(24): Xaa is A or G
  MOD_RES (25)..(26)..(27)..(28): Xaa is A or G or is absent

SEQ ID NO: 81002 - protein, 41 aa, Artificial Sequence; identical to SEQ ID NO: 7553
  GFR-binding peptide
  MOD_RES (5)..(6)..(40): Xaa is C or S
  MOD_RES (20)..(21)..(22)..(23)..(24): Xaa is A or G
  MOD_RES (25)..(26)..(27)..(28): Xaa is A or G or is absent

SEQ ID NO: 81003 - protein, 39 aa, Artificial Sequence
  GFR-binding peptide
  MOD_RES (2)..(3)..(36)..(38): Xaa is C or S
  MOD_RES (17)..(18)..(19)..(20)..(21): Xaa is A or G
  MOD_RES (22)..(23)..(24)..(25): Xaa is A or G or is absent
TXXAPVKTSAISMLYLXXXXXXXXXLKNYQMIVEEXGXL

SEQ ID NO: 81004 - protein, 31 aa, Artificial Sequence; identical to SEQ ID NO: 9343
  GFR-binding peptide

SEQ ID NO: 81005 - protein, 39 aa, Artificial Sequence; identical to SEQ ID NO: 57769
  GFR-binding peptide
  MOD_RES (2)..(3)..(36)..(38): Xaa is C or S
  MOD_RES (17)..(18)..(19)..(20)..(21): Xaa is A or G
  MOD_RES (22)..(23)..(24)..(25): Xaa is A or G or is absent

SEQ ID NO: 81006 - protein, 37 aa, Artificial Sequence; identical to SEQ ID NO: 7556
  GFR-binding peptide
  MOD_RES (4)..(5): Xaa is C or S
  MOD_RES (19)..(20)..(21)..(22)..(23): Xaa is A or G
  MOD_RES (24)..(25)..(26)..(27): Xaa is A or G or is absent

SEQ ID NO: 81007 - protein, 41 aa, Artificial Sequence; identical to SEQ ID NO: 30733
  GFR-binding peptide
  MOD_RES (6)..(7)..(41): Xaa is C or S
  MOD_RES (21)..(22)..(23)..(24)..(25): Xaa is A or G
  MOD_RES (26)..(27)..(28)..(29): Xaa is A or G or is absent

SEQ ID NO: 81008 - protein, 38 aa, Artificial Sequence; identical to SEQ ID NO: 7558
  GFR-binding peptide
  MOD_RES (4)..(5)..(37): Xaa is C or S

SEQ ID NO: 81009 - protein, 34 aa, Artificial Sequence; identical to SEQ ID NO: 7559
  GFR-binding peptide
  MOD_RES (1)..(2): Xaa is C or S
  MOD_RES (16)..(17)..(18)..(19)..(20): Xaa is A or G
  MOD_RES (21)..(22)..(23)..(24): Xaa is A or G or is absent

SEQ ID NO: 81010 - protein, 39 aa, Artificial Sequence; identical to SEQ ID NO: 9345
  GFR-binding peptide
  MOD_RES (1)..(2)..(36)..(38): Xaa is C or S
  MOD_RES (16)..(17)..(18)..(19)..(20): Xaa is A or G
  MOD_RES (21)..(22)..(23)..(24): Xaa is A or G or is absent

SEQ ID NO: 81011 - protein, 35 aa, Artificial Sequence; identical to SEQ ID NO: 30735
  GFR-binding peptide
  MOD_RES (32)..(34): Xaa is C or S

SEQ ID NO: 81012 - protein, 37 aa, Artificial Sequence; identical to SEQ ID NO: 9347
  GFR-binding peptide
  MOD_RES (34)..(36): Xaa is C or S
  MOD_RES (14)..(15)..(16)..(17)..(18): Xaa is A or G
  MOD_RES (19)..(20)..(21)..(22): Xaa is A or G or is absent

SEQ ID NO: 81013 - protein, 36 aa, Artificial Sequence; identical to SEQ ID NO: 7564
  GFR-binding peptide
  MOD_RES (1)..(2)..(36): Xaa is C or S
  MOD_RES (16)..(17)..(18)..(19)..(20): Xaa is A or G
  MOD_RES (21)..(22)..(23)..(24): Xaa is A or G or is absent

SEQ ID NO: 81014 - protein, 39 aa, Artificial Sequence
  GFR-binding peptide
  MOD_RES (3)..(4)..(36)..(38): Xaa is C or S
ASXXVPARLSAISILYLDAANNVVLKNYQDMVVEAXGXR

SEQ ID NO: 81015 - protein, 31 aa, Artificial Sequence; identical to SEQ ID NO: 7565
  GFR-binding peptide
  MOD_RES (31)..(31): Xaa is C or S

SEQ ID NO: 81016 - protein, 38 aa, Artificial Sequence
  GFR-binding peptide
  MOD_RES (2)..(3)..(37): Xaa is C or S
  MOD_RES (17)..(18)..(19)..(20)..(21): Xaa is A or G
  MOD_RES (22)..(23)..(24)..(25): Xaa is A or G or is absent
AXXVPTKLSAISILYLXXXXXXXXXLKNYQGMAVSEXG

SEQ ID NO: 81017 - protein, 35 aa, Artificial Sequence
  GFR-binding peptide
  MOD_RES (1)..(2): Xaa is C or S
  MOD_RES (16)..(17)..(18)..(19)..(20): Xaa is A or G
  MOD_RES (21)..(22)..(23)..(24): Xaa is A or G or is absent
XXTPTKMSAISMLYLXXXXXXXXXLKNYQGMVVDR

SEQ ID NO: 81018 - protein, 39 aa, Artificial Sequence; identical to SEQ ID NO: 7567
  GFR-binding peptide
  MOD_RES (3)..(4)..(37)..(39): Xaa is C or S
  MOD_RES (18)..(19)..(20)..(21)..(22): Xaa is A or G
  MOD_RES (23)..(24)..(25)..(26): Xaa is A or G or is absent

SEQ ID NO: 81019 - protein, 35 aa, Artificial Sequence; identical to SEQ ID NO: 9350
  GFR-binding peptide
  MOD_RES (1)..(35): Xaa is C or S
  MOD_RES (15)..(16)..(17)..(18)..(19): Xaa is A or G
  MOD_RES (20)..(21)..(22)..(23): Xaa is A or G or is absent

SEQ ID NO: 81020 - protein, 34 aa, Artificial Sequence; identical to SEQ ID NO: 7569
  GFR-binding peptide
  MOD_RES (1)..(34): Xaa is C or S

SEQ ID NO: 81021 - protein, 39 aa, Artificial Sequence; identical to SEQ ID NO: 9352
  GFR-binding peptide
  MOD_RES (5)..(6)..(38): Xaa is C or S

SEQ ID NO: 81022 - protein, 38 aa, Artificial Sequence
  GFR-binding peptide
  MOD_RES (4)..(5): Xaa is C or S
  MOD_RES (19)..(20)..(21)..(22)..(23): Xaa is A or G
  MOD_RES (24)..(25)..(26)..(27): Xaa is A or G or is absent
SKAXXVPTKLSAISILYLXXXXXXXXXLKNYQGMAVSE

SEQ ID NO: 81023 - protein, 40 aa, Artificial Sequence
  GFR-binding peptide
  MOD_RES (5)..(6)..(40): Xaa is C or S
  MOD_RES (20)..(21)..(22)..(23)..(24): Xaa is A or G
  MOD_RES (25)..(26)..(27)..(28): Xaa is A or G or is absent
IPEPXXVPEKMSAISILYLXXXXXXXXXLKNYQNMTVESX

SEQ ID NO: 81024 - protein, 36 aa, Artificial Sequence; identical to SEQ ID NO: 9354
  GFR-binding peptide
  MOD_RES (3)..(4): Xaa is C or S
  MOD_RES (18)..(19)..(20)..(21)..(22): Xaa is A or G
  MOD_RES (23)..(24)..(25)..(26): Xaa is A or G or is absent

SEQ ID NO: 81025 - protein, 36 aa, Artificial Sequence; identical to SEQ ID NO: 7572
  GFR-binding peptide
  MOD_RES (34)..(36): Xaa is C or S
  MOD_RES (14)..(15)..(16)..(17)..(18): Xaa is A or G
  MOD_RES (19)..(20)..(21)..(22): Xaa is A or G or is absent

SEQ ID NO: 81026 - protein, 38 aa, Artificial Sequence; identical to SEQ ID NO: 71578
  GFR-binding peptide
  MOD_RES (2)..(3)..(35)..(37): Xaa is C or S

SEQ ID NO: 81027 - protein, 38 aa, Artificial Sequence; identical to SEQ ID NO: 57790
  GFR-binding peptide
  MOD_RES (2)..(3)..(36)..(38): Xaa is C or S
  MOD_RES (17)..(18)..(19)..(20)..(21): Xaa is A or G
  MOD_RES (22)..(23)..(24)..(25): Xaa is A or G or is absent

SEQ ID NO: 81028 - protein, 39 aa, Artificial Sequence
  GFR-binding peptide
  MOD_RES (4)..(5)..(39): Xaa is C or S
  MOD_RES (19)..(20)..(21)..(22)..(23): Xaa is A or G
  MOD_RES (24)..(25)..(26)..(27): Xaa is A or G or is absent
PASXXVPARLSAISILYLXXXXXXXXXLKNYQDMVVEAX

SEQ ID NO: 81029 - protein, 40 aa, Artificial Sequence; identical to SEQ ID NO: 14884
  GFR-binding peptide
  MOD_RES (5)..(6)..(40): Xaa is C or S
  MOD_RES (20)..(21)..(22)..(23)..(24): Xaa is A or G
  MOD_RES (25)..(26)..(27)..(28): Xaa is A or G or is absent

SEQ ID NO: 81030 - protein, 35 aa, Artificial Sequence; identical to SEQ ID NO: 7574
  GFR-binding peptide
  MOD_RES (34)..(34): Xaa is C or S
  MOD_RES (14)..(15)..(16)..(17)..(18): Xaa is A or G
  MOD_RES (19)..(20)..(21)..(22): Xaa is A or G or is absent

SEQ ID NO: 81031 - protein, 35 aa, Artificial Sequence; identical to SEQ ID NO: 68248
  GFR-binding peptide
  MOD_RES (2)..(3)..(35): Xaa is C or S

SEQ ID NO: 81032 - protein, 35 aa, Artificial Sequence; identical to SEQ ID NO: 9359
  GFR-binding peptide
  MOD_RES (4)..(5): Xaa is C or S

SEQ ID NO: 81033 - protein, 33 aa, Artificial Sequence; identical to SEQ ID NO: 66512
  GFR-binding peptide
  MOD_RES (1)..(1): Xaa is C or S
  MOD_RES (15)..(16)..(17)..(18)..(19): Xaa is A or G
  MOD_RES (20)..(21)..(22)..(23): Xaa is A or G or is absent

SEQ ID NO: 81034 - protein, 43 aa, Artificial Sequence; identical to SEQ ID NO: 68250
  GFR-binding peptide
  MOD_RES (5)..(6)..(40)..(42): Xaa is C or S
  MOD_RES (20)..(21)..(22)..(23)..(24): Xaa is A or G
  MOD_RES (25)..(26)..(27)..(28): Xaa is A or G or is absent

SEQ ID NO: 81035 - protein, 38 aa, Artificial Sequence; identical to SEQ ID NO: 9361
  GFR-binding peptide
  MOD_RES (3)..(4)..(38): Xaa is C or S
  MOD_RES (18)..(19)..(20)..(21)..(22): Xaa is A or G
  MOD_RES (23)..(24)..(25)..(26): Xaa is A or G or is absent

SEQ ID NO: 81036 - protein, 33 aa, Artificial Sequence; identical to SEQ ID NO: 7577
  GFR-binding peptide
  MOD_RES (1)..(33): Xaa is C or S

SEQ ID NO: 81037 - protein, 38 aa, Artificial Sequence; identical to SEQ ID NO: 7578
  GFR-binding peptide
  MOD_RES (5)..(6): Xaa is C or S
  MOD_RES (20)..(21)..(22)..(23)..(24): Xaa is A or G
  MOD_RES (25)..(26)..(27)..(28): Xaa is A or G or is absent

SEQ ID NO: 81038 - protein, 31 aa, Artificial Sequence; identical to SEQ ID NO: 7579
  GFR-binding peptide

SEQ ID NO: 81039 - protein, 38 aa, Artificial Sequence; identical to SEQ ID NO: 9364
  GFR-binding peptide
  MOD_RES (5)..(6)..(37): Xaa is C or S

SEQ ID NO: 81040 - protein, 40 aa, Artificial Sequence; identical to SEQ ID NO: 7580
  GFR-binding peptide
  MOD_RES (4)..(5)..(39): Xaa is C or S
  MOD_RES (19)..(20)..(21)..(22)..(23): Xaa is A or G
  MOD_RES (24)..(25)..(26)..(27): Xaa is A or G or is absent

SEQ ID NO: 81041 - protein, 37 aa, Artificial Sequence; identical to SEQ ID NO: 30756
  GFR-binding peptide
  MOD_RES (2)..(3)..(37): Xaa is C or S
  MOD_RES (17)..(18)..(19)..(20)..(21): Xaa is A or G
  MOD_RES (22)..(23)..(24)..(25): Xaa is A or G or is absent

SEQ ID NO: 81042 - protein, 37 aa, Artificial Sequence; identical to SEQ ID NO: 14888
  GFR-binding peptide
  MOD_RES (4)..(5): Xaa is C or S
  MOD_RES (19)..(20)..(21)..(22)..(23): Xaa is A or G
  MOD_RES (24)..(25)..(26)..(27): Xaa is A or G or is absent

SEQ ID NO: 81043 - protein, 36 aa, Artificial Sequence
  GFR-binding peptide
  MOD_RES (3)..(4): Xaa is C or S
  MOD_RES (18)..(19)..(20)..(21)..(22): Xaa is A or G
  MOD_RES (23)..(24)..(25)..(26): Xaa is A or G or is absent
ASXXVPARLSAISILYLXXXXXXXXXLKNYQDMVVE

SEQ ID NO: 81044 - protein, 40 aa, Artificial Sequence; identical to SEQ ID NO: 9366
  GFR-binding peptide
  MOD_RES (2)..(3)..(37)..(39): Xaa is C or S
  MOD_RES (17)..(18)..(19)..(20)..(21): Xaa is A or G
  MOD_RES (22)..(23)..(24)..(25): Xaa is A or G or is absent

SEQ ID NO: 81045 - protein, 31 aa, Artificial Sequence
  GFR-binding peptide
VPEKMSAISILYLDENKNVVLKNYQNMTVES

SEQ ID NO: 81046 - protein, 36 aa, Artificial Sequence
  GFR-binding peptide
  MOD_RES (5)..(6): Xaa is C or S
SAGPXXTPTKMSAISMLYLNDKQQIILKNYQGMVVD

SEQ ID NO: 81047 - protein, 40 aa, Artificial Sequence; identical to SEQ ID NO: 30762
  GFR-binding peptide
  MOD_RES (3)..(4)..(38)..(40): Xaa is C or S
  MOD_RES (18)..(19)..(20)..(21)..(22): Xaa is A or G
  MOD_RES (23)..(24)..(25)..(26): Xaa is A or G or is absent

SEQ ID NO: 81048 - protein, 39 aa, Artificial Sequence
  GFR-binding peptide
  MOD_RES (5)..(6)..(39): Xaa is C or S
  MOD_RES (20)..(21)..(22)..(23)..(24): Xaa is A or G
  MOD_RES (25)..(26)..(27)..(28): Xaa is A or G or is absent
VPSTXXAPVKTSAISMLYLXXXXXXXXXLKNYQMIVEEX

SEQ ID NO: 81049 - protein, 35 aa, Artificial Sequence
  GFR-binding peptide
  MOD_RES (1)..(35): Xaa is C or S
  MOD_RES (15)..(16)..(17)..(18)..(19): Xaa is A or G
  MOD_RES (20)..(21)..(22)..(23): Xaa is A or G or is absent
XVPTKLSAISILYLXXXXXXXXXLKNYQGMAVSEX

SEQ ID NO: 81050 - protein, 38 aa, Artificial Sequence; identical to SEQ ID NO: 69926
  GFR-binding peptide
  MOD_RES (3)..(4)..(38): Xaa is C or S
  MOD_RES (18)..(19)..(20)..(21)..(22): Xaa is A or G
  MOD_RES (23)..(24)..(25)..(26): Xaa is A or G or is absent

SEQ ID NO: 81051 - protein, 39 aa, Artificial Sequence; identical to SEQ ID NO: 7585
  GFR-binding peptide
  MOD_RES (6)..(7): Xaa is C or S
  MOD_RES (21)..(22)..(23)..(24)..(25): Xaa is A or G
  MOD_RES (26)..(27)..(28)..(29): Xaa is A or G or is absent

SEQ ID NO: 81052 - protein, 41 aa, Artificial Sequence
  GFR-binding peptide
  MOD_RES (6)..(7)..(41): Xaa is C or S
  MOD_RES (21)..(22)..(23)..(24)..(25): Xaa is A or G
  MOD_RES (26)..(27)..(28)..(29): Xaa is A or G or is absent
KASKAXXVPTKLSAISILYLXXXXXXXXXLKNYQGMAVSEX

SEQ ID NO: 81053 - protein, 43 aa, Artificial Sequence
  GFR-binding peptide
  MOD_RES (5)..(6)..(40)..(42): Xaa is C or S
  MOD_RES (20)..(21)..(22)..(23)..(24): Xaa is A or G
  MOD_RES (25)..(26)..(27)..(28): Xaa is A or G or is absent
SAGPXXTPTKMSAISMLYLXXXXXXXXXLKNYQGMVVDRXGXS

SEQ ID NO: 81054 - protein, 35 aa, Artificial Sequence; identical to SEQ ID NO: 57809
  GFR-binding peptide
  MOD_RES (33)..(35): Xaa is C or S
  MOD_RES (14)..(15)..(16)..(17)..(18): Xaa is A or G
  MOD_RES (19)..(20)..(21)..(22): Xaa is A or G or is absent

SEQ ID NO: 81055 - protein, 38 aa, Artificial Sequence; identical to SEQ ID NO: 71599
  GFR-binding peptide
  MOD_RES (6)..(7): Xaa is C or S

SEQ ID NO: 81056 - protein, 39 aa, Artificial Sequence; identical to SEQ ID NO: 7588
  GFR-binding peptide
  MOD_RES (2)..(3)..(36)..(38): Xaa is C or S
  MOD_RES (17)..(18)..(19)..(20)..(21): Xaa is A or G
  MOD_RES (22)..(23)..(24)..(25): Xaa is A or G or is absent

SEQ ID NO: 81057 - protein, 41 aa, Artificial Sequence; identical to SEQ ID NO: 9371
  GFR-binding peptide
  MOD_RES (6)..(7)..(39)..(41): Xaa is C or S

SEQ ID NO: 81058 - protein, 35 aa, Artificial Sequence; identical to SEQ ID NO: 7592
  GFR-binding peptide
  MOD_RES (1)..(2)..(35): Xaa is C or S
  MOD_RES (16)..(17)..(18)..(19)..(20): Xaa is A or G
  MOD_RES (21)..(22)..(23)..(24): Xaa is A or G or is absent

SEQ ID NO: 81059 - protein, 39 aa, Artificial Sequence; identical to SEQ ID NO: 9373
  GFR-binding peptide
  MOD_RES (4)..(5)..(36)..(38): Xaa is C or S

SEQ ID NO: 81060 - protein, 39 aa, Artificial Sequence
  GFR-binding peptide
  MOD_RES (6)..(7)..(39): Xaa is C or S
AAPASXXVPARLSAISILYLDAANNVVLKNYQDMVVEAX

SEQ ID NO: 81061 - protein, 40 aa, Artificial Sequence; identical to SEQ ID NO: 69934
  GFR-binding peptide
  MOD_RES (5)..(6)..(40): Xaa is C or S
  MOD_RES (20)..(21)..(22)..(23)..(24): Xaa is A or G
  MOD_RES (25)..(26)..(27)..(28): Xaa is A or G or is absent

SEQ ID NO: 81062 - protein, 37 aa, Artificial Sequence; identical to SEQ ID NO: 57813
  GFR-binding peptide
  MOD_RES (4)..(5): Xaa is C or S
  MOD_RES (19)..(20)..(21)..(22)..(23): Xaa is A or G
  MOD_RES (24)..(25)..(26)..(27): Xaa is A or G or is absent

SEQ ID NO: 81063 - protein, 37 aa, Artificial Sequence
  GFR-binding peptide
  MOD_RES (2)..(3)..(36): Xaa is C or S
  MOD_RES (17)..(18)..(19)..(20)..(21): Xaa is A or G
  MOD_RES (22)..(23)..(24)..(25): Xaa is A or G or is absent
TXXAPVKTSAISMLYLXXXXXXXXXLKNYQMIVEEXG

SEQ ID NO: 81064 - protein, 34 aa, Artificial Sequence; identical to SEQ ID NO: 14899
  GFR-binding peptide
  MOD_RES (32)..(34): Xaa is C or S

SEQ ID NO: 81065 - protein, 37 aa, Artificial Sequence; identical to SEQ ID NO: 9376
  GFR-binding peptide
  MOD_RES (5)..(6): Xaa is C or S

SEQ ID NO: 81066 - protein, 39 aa, Artificial Sequence
  GFR-binding peptide
  MOD_RES (3)..(4)..(38): Xaa is C or S
  MOD_RES (18)..(19)..(20)..(21)..(22): Xaa is A or G
  MOD_RES (23)..(24)..(25)..(26): Xaa is A or G or is absent
ASXXVPARLSAISILYLXXXXXXXXXLKNYQDMVVEAXG

SEQ ID NO: 81067 - protein, 37 aa, Artificial Sequence; identical to SEQ ID NO: 9377
  GFR-binding peptide
  MOD_RES (1)..(34)..(36): Xaa is C or S
  MOD_RES (15)..(16)..(17)..(18)..(19): Xaa is A or G
  MOD_RES (20)..(21)..(22)..(23): Xaa is A or G or is absent

SEQ ID NO: 81068 - protein, 38 aa, Artificial Sequence; identical to SEQ ID NO: 7599
  GFR-binding peptide
  MOD_RES (2)..(3)..(35)..(37): Xaa is C or S

SEQ ID NO: 81069 - protein, 37 aa, Artificial Sequence; identical to SEQ ID NO: 9380
  GFR-binding peptide
  MOD_RES (3)..(4)..(37): Xaa is C or S
  MOD_RES (18)..(19)..(20)..(21)..(22): Xaa is A or G
  MOD_RES (23)..(24)..(25)..(26): Xaa is A or G or is absent

SEQ ID NO: 81070 - protein, 42 aa, Artificial Sequence; identical to SEQ ID NO: 9382
  GFR-binding peptide
  MOD_RES (5)..(6)..(39)..(41): Xaa is C or S
  MOD_RES (20)..(21)..(22)..(23)..(24): Xaa is A or G
  MOD_RES (25)..(26)..(27)..(28): Xaa is A or G or is absent

SEQ ID NO: 81071 - protein, 32 aa, Artificial Sequence; identical to SEQ ID NO: 9383
  GFR-binding peptide
  MOD_RES (14)..(15)..(16)..(17)..(18): Xaa is A or G
  MOD_RES (19)..(20)..(21)..(22): Xaa is A or G or is absent

SEQ ID NO: 81072 - protein, 38 aa, Artificial Sequence; identical to SEQ ID NO: 7600
  GFR-binding peptide
  MOD_RES (2)..(3)..(36)..(38): Xaa is C or S
  MOD_RES (17)..(18)..(19)..(20)..(21): Xaa is A or G
  MOD_RES (22)..(23)..(24)..(25): Xaa is A or G or is absent

SEQ ID NO: 81073 - protein, 39 aa, Artificial Sequence; identical to SEQ ID NO: 7601
  GFR-binding peptide
  MOD_RES (6)..(7)..(39): Xaa is C or S

SEQ ID NO: 81074 - protein, 35 aa, Artificial Sequence; identical to SEQ ID NO: 7603
  GFR-binding peptide
  MOD_RES (2)..(3)..(34): Xaa is C or S

SEQ ID NO: 81075 - protein, 32 aa, Artificial Sequence
  GFR-binding peptide
  MOD_RES (32)..(32): Xaa is C or S
VPTKLSAISILYLDKGVVTYLKNYQGMAVSEX

SEQ ID NO: 81076 - protein, 31 aa, Artificial Sequence; identical to SEQ ID NO: 7604
  GFR-binding peptide

SEQ ID NO: 81077 - protein, 32 aa, Artificial Sequence; identical to SEQ ID NO: 16687
  GFR-binding peptide
  MOD_RES (1)..(2): Xaa is C or S

SEQ ID NO: 81078 - protein, 39 aa, Artificial Sequence; identical to SEQ ID NO: 9387
  GFR-binding peptide
  MOD_RES (4)..(5)..(39): Xaa is C or S
  MOD_RES (19)..(20)..(21)..(22)..(23): Xaa is A or G
  MOD_RES (24)..(25)..(26)..(27): Xaa is A or G or is absent

SEQ ID NO: 81079 - protein, 42 aa, Artificial Sequence; identical to SEQ ID NO: 57822
  GFR-binding peptide
  MOD_RES (6)..(7)..(39)..(41): Xaa is C or S

SEQ ID NO: 81080 - protein, 35 aa, Artificial Sequence; identical to SEQ ID NO: 7607
  GFR-binding peptide
  MOD_RES (4)..(5): Xaa is C or S

SEQ ID NO: 81081 - protein, 38 aa, Artificial Sequence; identical to SEQ ID NO: 9390
  GFR-binding peptide
  MOD_RES (1)..(2)..(35)..(37): Xaa is C or S
  MOD_RES (16)..(17)..(18)..(19)..(20): Xaa is A or G
  MOD_RES (21)..(22)..(23)..(24): Xaa is A or G or is absent

SEQ ID NO: 81082 - protein, 36 aa, Artificial Sequence; identical to SEQ ID NO: 57825
  GFR-binding peptide
  MOD_RES (1)..(34)..(36): Xaa is C or S
  MOD_RES (15)..(16)..(17)..(18)..(19): Xaa is A or G
  MOD_RES (20)..(21)..(22)..(23): Xaa is A or G or is absent

SEQ ID NO: 81083 - protein, 36 aa, Artificial Sequence; identical to SEQ ID NO: 57826
  GFR-binding peptide
  MOD_RES (3)..(4)..(35): Xaa is C or S

SEQ ID NO: 81084 - protein, 42 aa, Artificial Sequence
  GFR-binding peptide
  MOD_RES (4)..(5)..(39)..(41): Xaa is C or S
  MOD_RES (19)..(20)..(21)..(22)..(23): Xaa is A or G
  MOD_RES (24)..(25)..(26)..(27): Xaa is A or G or is absent
AGPXXTPTKMSAISMLYLXXXXXXXXXLKNYQGMVVDRXGXS

SEQ ID NO: 81085 - protein, 37 aa, Artificial Sequence; identical to SEQ ID NO: 9394
  GFR-binding peptide
  MOD_RES (35)..(37): Xaa is C or S
  MOD_RES (14)..(15)..(16)..(17)..(18): Xaa is A or G
  MOD_RES (19)..(20)..(21)..(22): Xaa is A or G or is absent

SEQ ID NO: 81086 - protein, 38 aa, Artificial Sequence; identical to SEQ ID NO: 9395
  GFR-binding peptide
  MOD_RES (3)..(4)..(38): Xaa is C or S
  MOD_RES (18)..(19)..(20)..(21)..(22): Xaa is A or G
  MOD_RES (23)..(24)..(25)..(26): Xaa is A or G or is absent

SEQ ID NO: 81087 - protein, 38 aa, Artificial Sequence; identical to SEQ ID NO: 9397
  GFR-binding peptide
  MOD_RES (5)..(6): Xaa is C or S
  MOD_RES (20)..(21)..(22)..(23)..(24): Xaa is A or G
  MOD_RES (25)..(26)..(27)..(28): Xaa is A or G or is absent

SEQ ID NO: 81088 - protein, 34 aa, Artificial Sequence; identical to SEQ ID NO: 9398
  GFR-binding peptide
  MOD_RES (1)..(2): Xaa is C or S
  MOD_RES (16)..(17)..(18)..(19)..(20): Xaa is A or G
  MOD_RES (21)..(22)..(23)..(24): Xaa is A or G or is absent

SEQ ID NO: 81089 - protein, 32 aa, Artificial Sequence; identical to SEQ ID NO: 7611
  GFR-binding peptide
  MOD_RES (32)..(32): Xaa is C or S

SEQ ID NO: 81090 - protein, 34 aa, Artificial Sequence
  GFR-binding peptide
  MOD_RES (33)..(33): Xaa is C or S
  MOD_RES (14)..(15)..(16)..(17)..(18): Xaa is A or G
  MOD_RES (19)..(20)..(21)..(22): Xaa is A or G or is absent
APVKTSAISMLYLXXXXXXXXXLKNYQMIVEEXG

SEQ ID NO: 81091 - protein, 34 aa, Artificial Sequence
  GFR-binding peptide
  MOD_RES (3)..(4): Xaa is C or S
GPXXTPTKMSAISMLYLNDKQQIILKNYQGMVVD

SEQ ID NO: 81092 - protein, 39 aa, Artificial Sequence; identical to SEQ ID NO: 9400
  GFR-binding peptide
  MOD_RES (4)..(5)..(39): Xaa is C or S
  MOD_RES (19)..(20)..(21)..(22)..(23): Xaa is A or G
  MOD_RES (24)..(25)..(26)..(27): Xaa is A or G or is absent

SEQ ID NO: 81093 - protein, 40 aa, Artificial Sequence; identical to SEQ ID NO: 57836
  GFR-binding peptide
  MOD_RES (6)..(7)..(39): Xaa is C or S

SEQ ID NO: 81094 - protein, 38 aa, Artificial Sequence; identical to SEQ ID NO: 9401
  GFR-binding peptide
  MOD_RES (4)..(5)..(38): Xaa is C or S
  MOD_RES (19)..(20)..(21)..(22)..(23): Xaa is A or G
  MOD_RES (24)..(25)..(26)..(27): Xaa is A or G or is absent

SEQ ID NO: 81095 - protein, 43 aa, Artificial Sequence; identical to SEQ ID NO: 7614
  GFR-binding peptide
  MOD_RES (6)..(7)..(41)..(43): Xaa is C or S
  MOD_RES (21)..(22)..(23)..(24)..(25): Xaa is A or G
  MOD_RES (26)..(27)..(28)..(29): Xaa is A or G or is absent

SEQ ID NO: 81096 - protein, 39 aa, Artificial Sequence; identical to SEQ ID NO: 30804
  GFR-binding peptide
  MOD_RES (5)..(6)..(38): Xaa is C or S

SEQ ID NO: 81097 - protein, 38 aa, Artificial Sequence
  GFR-binding peptide
  MOD_RES (5)..(6): Xaa is C or S
  MOD_RES (20)..(21)..(22)..(23)..(24): Xaa is A or G
  MOD_RES (25)..(26)..(27)..(28): Xaa is A or G or is absent
SAGPXXTPTKMSAISMLYLXXXXXXXXXLKNYQGMVVD

SEQ ID NO: 81098 - protein, 39 aa, Artificial Sequence
  GFR-binding peptide
  MOD_RES (6)..(7): Xaa is C or S
  MOD_RES (21)..(22)..(23)..(24)..(25): Xaa is A or G
  MOD_RES (26)..(27)..(28)..(29): Xaa is A or G or is absent
RVPSTXXAPVKTSAISMLYLXXXXXXXXXLKNYQMIVEE

SEQ ID NO: 81099 - protein, 40 aa, Artificial Sequence
  GFR-binding peptide
  MOD_RES (6)..(7)..(39): Xaa is C or S
HVPKPXXAPTKLSAISVLYLDDSSNVILKNYQNMVVRSXG

SEQ ID NO: 81100 - protein, 38 aa, Artificial Sequence; identical to SEQ ID NO: 16705
  GFR-binding peptide
  MOD_RES (3)..(4)..(38): Xaa is C or S
  MOD_RES (18)..(19)..(20)..(21)..(22): Xaa is A or G
  MOD_RES (23)..(24)..(25)..(26): Xaa is A or G or is absent

SEQ ID NO: 81101 - protein, 35 aa, Artificial Sequence
  GFR-binding peptide
  MOD_RES (1)..(2)..(34): Xaa is C or S
XXTPTKMSAISMLYLNDKQQIILKNYQGMVVDRXG

SEQ ID NO: 81102 - protein, 37 aa, Artificial Sequence
  GFR-binding peptide
  MOD_RES (4)..(5)..(37): Xaa is C or S
AGPXXTPTKMSAISMLYLNDKQQIILKNYQGMVVDRX

SEQ ID NO: 81103 - protein, 39 aa, Artificial Sequence
  GFR-binding peptide
  MOD_RES (3)..(4)..(36)..(38): Xaa is C or S
KAXXVPTKLSAISILYLDKGVVTYLKNYQGMAVSEXGXR

SEQ ID NO: 81104 - protein, 36 aa, Artificial Sequence
  GFR-binding peptide
  MOD_RES (5)..(6): Xaa is C or S
APASXXVPARLSAISILYLDAANNVVLKNYQDMVVE

SEQ ID NO: 81105 - protein, 34 aa, Artificial Sequence; identical to SEQ ID NO: 9404
  GFR-binding peptide
  MOD_RES (1)..(2)..(34): Xaa is C or S

SEQ ID NO: 81106 - protein, 35 aa, Artificial Sequence; identical to SEQ ID NO: 9405
  GFR-binding peptide
  MOD_RES (35)..(35): Xaa is C or S
  MOD_RES (14)..(15)..(16)..(17)..(18): Xaa is A or G
  MOD_RES (19)..(20)..(21)..(22): Xaa is A or G or is absent

SEQ ID NO: 81107 - protein, 41 aa, Artificial Sequence; identical to SEQ ID NO: 16710
  GFR-binding peptide
  MOD_RES (5)..(6)..(38)..(40): Xaa is C or S

SEQ ID NO: 81108 - protein, 37 aa, Artificial Sequence; identical to SEQ ID NO: 9406
  GFR-binding peptide
  MOD_RES (4)..(5)..(36): Xaa is C or S

SEQ ID NO: 81109 - protein, 39 aa, Artificial Sequence; identical to SEQ ID NO: 7620
  GFR-binding peptide
  MOD_RES (6)..(38): Xaa is C or S

SEQ ID NO: 81110 - protein, 35 aa, Artificial Sequence; identical to SEQ ID NO: 57845
  GFR-binding peptide
  MOD_RES (1)..(2): Xaa is C or S
  MOD_RES (16)..(17)..(18)..(19)..(20): Xaa is A or G
  MOD_RES (21)..(22)..(23)..(24): Xaa is A or G or is absent

SEQ ID NO: 81111 - protein, 38 aa, Artificial Sequence; identical to SEQ ID NO: 9408
  GFR-binding peptide
  MOD_RES (3)..(4)..(38): Xaa is C or S
  MOD_RES (18)..(19)..(20)..(21)..(22): Xaa is A or G
  MOD_RES (23)..(24)..(25)..(26): Xaa is A or G or is absent

SEQ ID NO: 81112 - protein, 36 aa, Artificial Sequence; identical to SEQ ID NO: 9409
  GFR-binding peptide
  MOD_RES (1)..(2)..(35): Xaa is C or S

SEQ ID NO: 81113 - protein, 43 aa, Artificial Sequence; identical to SEQ ID NO: 9412
  GFR-binding peptide
  MOD_RES (6)..(7)..(42): Xaa is C or S
  MOD_RES (21)..(22)..(23)..(24)..(25): Xaa is A or G
  MOD_RES (26)..(27)..(28)..(29): Xaa is A or G or is absent

SEQ ID NO: 81114 - protein, 33 aa, Artificial Sequence
  GFR-binding peptide
  MOD_RES (1)..(33): Xaa is C or S
XVPEKMSAISILYLDENKNVVLKNYQNMTVESX

SEQ ID NO: 81115 - protein, 40 aa, Artificial Sequence; identical to SEQ ID NO: 16715
  GFR-binding peptide
  MOD_RES (6)..(7)..(39): Xaa is C or S

SEQ ID NO: 81116 - protein, 38 aa, Artificial Sequence; identical to SEQ ID NO: 28887
  GFR-binding peptide
  MOD_RES (5)..(6): Xaa is C or S
  MOD_RES (20)..(21)..(22)..(23)..(24): Xaa is A or G
  MOD_RES (25)..(26)..(27)..(28): Xaa is A or G or is absent

SEQ ID NO: 81117 - protein, 40 aa, Artificial Sequence; identical to SEQ ID NO: 7625
  GFR-binding peptide
  MOD_RES (6)..(7)..(39): Xaa is C or S

SEQ ID NO: 81118 - protein, 37 aa, Artificial Sequence
  GFR-binding peptide
  MOD_RES (5)..(6): Xaa is C or S
APASXXVPARLSAISILYLDAANNVVLKNYQDMVVEA

SEQ ID NO: 81119 - protein, 40 aa, Artificial Sequence
  GFR-binding peptide
  MOD_RES (3)..(4)..(37)..(39): Xaa is C or S
  MOD_RES (18)..(19)..(20)..(21)..(22): Xaa is A or G
  MOD_RES (23)..(24)..(25)..(26): Xaa is A or G or is absent
STXXAPVKTSAISMLYLXXXXXXXXXLKNYQMIVEEXGXL

SEQ ID NO: 81120 - protein, 38 aa, Artificial Sequence; identical to SEQ ID NO: 28892
  GFR-binding peptide
  MOD_RES (3)..(4)..(38): Xaa is C or S
  MOD_RES (18)..(19)..(20)..(21)..(22): Xaa is A or G
  MOD_RES (23)..(24)..(25)..(26): Xaa is A or G or is absent

SEQ ID NO: 81121 - protein, 34 aa, Artificial Sequence; identical to SEQ ID NO: 7626
  GFR-binding peptide
  MOD_RES (1)..(2)..(33): Xaa is C or S

SEQ ID NO: 81122 - protein, 32 aa, Artificial Sequence; identical to SEQ ID NO: 9416
  GFR-binding peptide
  MOD_RES (1)..(32): Xaa is C or S

SEQ ID NO: 81123 - protein, 36 aa, Artificial Sequence; identical to SEQ ID NO: 57854
  GFR-binding peptide
  MOD_RES (1)..(2)..(34)..(36): Xaa is C or S

SEQ ID NO: 81124 - protein, 36 aa, Artificial Sequence; identical to SEQ ID NO: 7629
  GFR-binding peptide
  MOD_RES (3)..(4): Xaa is C or S
  MOD_RES (18)..(19)..(20)..(21)..(22): Xaa is A or G
  MOD_RES (23)..(24)..(25)..(26): Xaa is A or G or is absent

SEQ ID NO: 81125 - protein, 40 aa, Artificial Sequence; identical to SEQ ID NO: 9419
  GFR-binding peptide
  MOD_RES (6)..(38)..(40): Xaa is C or S

SEQ ID NO: 81126 - protein, 38 aa, Artificial Sequence
  GFR-binding peptide
  MOD_RES (4)..(5)..(37): Xaa is C or S
PASXXVPARLSAISILYLDAANNVVLKNYQDMVVEAXG

SEQ ID NO: 81127 - protein, 36 aa, Artificial Sequence; identical to SEQ ID NO: 9420
  GFR-binding peptide
  MOD_RES (2)..(3): Xaa is C or S
  MOD_RES (17)..(18)..(19)..(20)..(21): Xaa is A or G
  MOD_RES (22)..(23)..(24)..(25): Xaa is A or G or is absent

SEQ ID NO: 81128 - protein, 38 aa, Artificial Sequence; identical to SEQ ID NO: 14940
  GFR-binding peptide
  MOD_RES (2)..(3)..(37): Xaa is C or S
  MOD_RES (17)..(18)..(19)..(20)..(21): Xaa is A or G
  MOD_RES (22)..(23)..(24)..(25): Xaa is A or G or is absent

SEQ ID NO: 81129 - protein, 38 aa, Artificial Sequence
  GFR-binding peptide
  MOD_RES (4)..(5)..(37): Xaa is C or S
AGPXXTPTKMSAISMLYLNDKQQIILKNYQGMVVDRXG

SEQ ID NO: 81130 - protein, 35 aa, Artificial Sequence; identical to SEQ ID NO: 69985
  GFR-binding peptide
  MOD_RES (1)..(33)..(35): Xaa is C or S

SEQ ID NO: 81131 - protein, 37 aa, Artificial Sequence; identical to SEQ ID NO: 66583
  GFR-binding peptide
  MOD_RES (2)..(3)..(37): Xaa is C or S
  MOD_RES (17)..(18)..(19)..(20)..(21): Xaa is A or G
  MOD_RES (22)..(23)..(24)..(25): Xaa is A or G or is absent

SEQ ID NO: 81132 - protein, 37 aa, Artificial Sequence
  GFR-binding peptide
  MOD_RES (3)..(4)..(36): Xaa is C or S
GPXXTPTKMSAISMLYLNDKQQIILKNYQGMVVDRXG

SEQ ID NO: 81133 - protein, 33 aa, Artificial Sequence
  GFR-binding peptide
  MOD_RES (1)..(1): Xaa is C or S
  MOD_RES (15)..(16)..(17)..(18)..(19): Xaa is A or G
  MOD_RES (20)..(21)..(22)..(23): Xaa is A or G or is absent
XVPARLSAISILYLXXXXXXXXXLKNYQDMVVE

SEQ ID NO: 81134 - protein, 37 aa, Artificial Sequence; identical to SEQ ID NO: 7634
  GFR-binding peptide
  MOD_RES (2)..(3)..(37): Xaa is C or S
  MOD_RES (17)..(18)..(19)..(20)..(21): Xaa is A or G
  MOD_RES (22)..(23)..(24)..(25): Xaa is A or G or is absent

SEQ ID NO: 81135 - protein, 36 aa, Artificial Sequence; identical to SEQ ID NO: 7635
  GFR-binding peptide
  MOD_RES (2)..(3)..(34)..(36): Xaa is C or S

SEQ ID NO: 81136 - protein, 32 aa, Artificial Sequence; identical to SEQ ID NO: 9429
  GFR-binding peptide
  MOD_RES (1)..(32): Xaa is C or S

SEQ ID NO: 81137 - protein, 38 aa, Artificial Sequence; identical to SEQ ID NO: 9431
  GFR-binding peptide
  MOD_RES (1)..(35)..(37): Xaa is C or S
  MOD_RES (15)..(16)..(17)..(18)..(19): Xaa is A or G
  MOD_RES (20)..(21)..(22)..(23): Xaa is A or G or is absent

SEQ ID NO: 81138 - protein, 39 aa, Artificial Sequence; identical to SEQ ID NO: 57867
  GFR-binding peptide
  MOD_RES (6)..(7)..(38): Xaa is C or S

SEQ ID NO: 81139 - protein, 38 aa, Artificial Sequence; identical to SEQ ID NO: 7639
  GFR-binding peptide
  MOD_RES (4)..(5): Xaa is C or S
  MOD_RES (19)..(20)..(21)..(22)..(23): Xaa is A or G
  MOD_RES (24)..(25)..(26)..(27): Xaa is A or G or is absent

SEQ ID NO: 81140 - protein, 41 aa, Artificial Sequence; identical to SEQ ID NO: 7640
  GFR-binding peptide
  MOD_RES (3)..(4)..(38)..(40): Xaa is C or S
  MOD_RES (18)..(19)..(20)..(21)..(22): Xaa is A or G
  MOD_RES (23)..(24)..(25)..(26): Xaa is A or G or is absent

SEQ ID NO: 81141 - protein, 40 aa, Artificial Sequence; identical to SEQ ID NO: 7641
  GFR-binding peptide
  MOD_RES (6)..(7): Xaa is C or S
  MOD_RES (21)..(22)..(23)..(24)..(25): Xaa is A or G
  MOD_RES (26)..(27)..(28)..(29): Xaa is A or G or is absent

SEQ ID NO: 81142 - protein, 39 aa, Artificial Sequence; identical to SEQ ID NO: 9432
  GFR-binding peptide
  MOD_RES (3)..(4)..(37)..(39): Xaa is C or S

SEQ ID NO: 81143 - protein, 38 aa, Artificial Sequence; identical to SEQ ID NO: 9433
  GFR-binding peptide
  MOD_RES (1)..(2)..(35)..(37): Xaa is C or S
  MOD_RES (16)..(17)..(18)..(19)..(20): Xaa is A or G
  MOD_RES (21)..(22)..(23)..(24): Xaa is A or G or is absent

SEQ ID NO: 81144 - protein, 36 aa, Artificial Sequence; identical to SEQ ID NO: 9434
  GFR-binding peptide
  MOD_RES (1)..(2)..(36): Xaa is C or S
  MOD_RES (16)..(17)..(18)..(19)..(20): Xaa is A or G
  MOD_RES (21)..(22)..(23)..(24): Xaa is A or G or is absent

SEQ ID NO: 81145 - protein, 42 aa, Artificial Sequence; identical to SEQ ID NO: 7643
  GFR-binding peptide
  MOD_RES (6)..(7)..(41): Xaa is C or S
  MOD_RES (21)..(22)..(23)..(24)..(25): Xaa is A or G
  MOD_RES (26)..(27)..(28)..(29): Xaa is A or G or is absent

SEQ ID NO: 81146 - protein, 41 aa, Artificial Sequence; identical to SEQ ID NO: 16738
  GFR-binding peptide
  MOD_RES (6)..(7)..(39)..(41): Xaa is C or S

SEQ ID NO: 81147 - protein, 39 aa, Artificial Sequence; identical to SEQ ID NO: 14954
  GFR-binding peptide
  MOD_RES (4)..(5)..(37)..(39): Xaa is C or S

SEQ ID NO: 81148 - protein, 37 aa, Artificial Sequence
  GFR-binding peptide
  MOD_RES (2)..(3)..(35)..(37): Xaa is C or S
PXXTPTKMSAISMLYLNDKQQIILKNYQGMVVDRXGX

SEQ ID NO: 81149 - protein, 39 aa, Artificial Sequence; identical to SEQ ID NO: 57875
  GFR-binding peptide
  MOD_RES (6)..(7): Xaa is C or S
  MOD_RES (21)..(22)..(23)..(24)..(25): Xaa is A or G
  MOD_RES (26)..(27)..(28)..(29): Xaa is A or G or is absent

SEQ ID NO: 81150 - protein, 38 aa, Artificial Sequence; identical to SEQ ID NO: 7647
  GFR-binding peptide
  MOD_RES (3)..(4)..(36)..(38): Xaa is C or S

SEQ ID NO: 81151 - protein, 38 aa, Artificial Sequence
  GFR-binding peptide
  MOD_RES (5)..(6): Xaa is C or S
  MOD_RES (20)..(21)..(22)..(23)..(24): Xaa is A or G
  MOD_RES (25)..(26)..(27)..(28): Xaa is A or G or is absent
IPEPXXVPEKMSAISILYLXXXXXXXXXLKNYQNMTVE

SEQ ID NO: 81152 - protein, 31 aa, Artificial Sequence; identical to SEQ ID NO: 9440
  GFR-binding peptide
  MOD_RES (31)..(31): Xaa is C or S

SEQ ID NO: 81153 - protein, 36 aa, Artificial Sequence; identical to SEQ ID NO: 9441
  GFR-binding peptide
  MOD_RES (2)..(3)..(35): Xaa is C or S

SEQ ID NO: 81154 - protein, 37 aa, Artificial Sequence
  GFR-binding peptide
  MOD_RES (4)..(5)..(37): Xaa is C or S
PEPXXVPEKMSAISILYLDENKNVVLKNYQNMTVESX

SEQ ID NO: 81155 - protein, 31 aa, Artificial Sequence; identical to SEQ ID NO: 70008
  GFR-binding peptide

SEQ ID NO: 81156 - protein, 34 aa, Artificial Sequence; identical to SEQ ID NO: 9443
  GFR-binding peptide
  MOD_RES (31)..(33): Xaa is C or S

SEQ ID NO: 81157 - protein, 30 aa, Artificial Sequence; identical to SEQ ID NO: 9444
  GFR-binding peptide

SEQ ID NO: 81158 - protein, 41 aa, Artificial Sequence
  GFR-binding peptide
  MOD_RES (6)..(7)..(39)..(41): Xaa is C or S
GIPEPXXVPEKMSAISILYLDENKNVVLKNYQNMTVESXAX

SEQ ID NO: 81159 - protein, 41 aa, Artificial Sequence; identical to SEQ ID NO: 7651
  GFR-binding peptide
  MOD_RES (5)..(6)..(40): Xaa is C or S
  MOD_RES (20)..(21)..(22)..(23)..(24): Xaa is A or G
  MOD_RES (25)..(26)..(27)..(28): Xaa is A or G or is absent

SEQ ID NO: 81160 - protein, 39 aa, Artificial Sequence
  GFR-binding peptide
  MOD_RES (5)..(6): Xaa is C or S
  MOD_RES (20)..(21)..(22)..(23)..(24): Xaa is A or G
  MOD_RES (25)..(26)..(27)..(28): Xaa is A or G or is absent
ASKAXXVPTKLSAISILYLXXXXXXXXXLKNYQGMAVSE

SEQ ID NO: 81161 - protein, 33 aa, Artificial Sequence
  GFR-binding peptide
  MOD_RES (2)..(3): Xaa is C or S
SXXVPARLSAISILYLDAANNVVLKNYQDMVVE

SEQ ID NO: 81162 - protein, 36 aa, Artificial Sequence
  GFR-binding peptide
  MOD_RES (3)..(4)..(36): Xaa is C or S
KAXXVPTKLSAISILYLDKGVVTYLKNYQGMAVSEX

SEQ ID NO: 81163 - protein, 38 aa, Artificial Sequence; identical to SEQ ID NO: 9446
  GFR-binding peptide
  MOD_RES (5)..(6)..(37): Xaa is C or S

SEQ ID NO: 81164 - protein, 35 aa, Artificial Sequence; identical to SEQ ID NO: 16748
  GFR-binding peptide
  MOD_RES (32)..(34): Xaa is C or S

SEQ ID NO: 81165 - protein, 38 aa, Artificial Sequence; identical to SEQ ID NO: 9448
  GFR-binding peptide
  MOD_RES (4)..(5)..(36)..(38): Xaa is C or S

SEQ ID NO: 81166 - protein, 42 aa, Artificial Sequence; identical to SEQ ID NO: 7654
  GFR-binding peptide
  MOD_RES (5)..(6)..(39)..(41): Xaa is C or S
  MOD_RES (20)..(21)..(22)..(23)..(24): Xaa is A or G
  MOD_RES (25)..(26)..(27)..(28): Xaa is A or G or is absent

SEQ ID NO: 81167 - protein, 38 aa, Artificial Sequence; identical to SEQ ID NO: 14960
  GFR-binding peptide
  MOD_RES (1)..(35)..(37): Xaa is C or S
  MOD_RES (15)..(16)..(17)..(18)..(19): Xaa is A or G
  MOD_RES (20)..(21)..(22)..(23): Xaa is A or G or is absent

SEQ ID NO: 81168 - protein, 41 aa, Artificial Sequence; identical to SEQ ID NO: 9451
  GFR-binding peptide
  MOD_RES (5)..(6)..(41): Xaa is C or S
  MOD_RES (20)..(21)..(22)..(23)..(24): Xaa is A or G
  MOD_RES (25)..(26)..(27)..(28): Xaa is A or G or is absent

SEQ ID NO: 81169 - protein, 42 aa, Artificial Sequence; identical to SEQ ID NO: 71674
  GFR-binding peptide
  MOD_RES (6)..(7)..(39)..(41): Xaa is C or S

SEQ ID NO: 81170 - protein, 37 aa, Artificial Sequence; identical to SEQ ID NO: 7656
  GFR-binding peptide
  MOD_RES (3)..(4)..(37): Xaa is C or S

SEQ ID NO: 81171 - protein, 35 aa, Artificial Sequence; identical to SEQ ID NO: 9452
  GFR-binding peptide
  MOD_RES (3)..(4)..(35): Xaa is C or S

SEQ ID NO: 81172 - protein, 39 aa, Artificial Sequence; identical to SEQ ID NO: 9453
  GFR-binding peptide
  MOD_RES (5)..(6): Xaa is C or S
  MOD_RES (20)..(21)..(22)..(23)..(24): Xaa is A or G
  MOD_RES (25)..(26)..(27)..(28): Xaa is A or G or is absent

SEQ ID NO: 81173 - protein, 35 aa, Artificial Sequence; identical to SEQ ID NO: 14961
  GFR-binding peptide
  MOD_RES (3)..(4): Xaa is C or S

SEQ ID NO: 81174 - protein, 36 aa, Artificial Sequence; identical to SEQ ID NO: 70015
  GFR-binding peptide
  MOD_RES (2)..(3)..(35): Xaa is C or S

SEQ ID NO: 81175 - protein, 32 aa, Artificial Sequence
  GFR-binding peptide
  MOD_RES (1)..(2): Xaa is C or S
XXVPTKLSAISILYLDKGVVTYLKNYQGMAVS

SEQ ID NO: 81176 - protein, 36 aa, Artificial Sequence; identical to SEQ ID NO: 7658
  GFR-binding peptide
  MOD_RES (5)..(6): Xaa is C or S

SEQ ID NO: 81177 - protein, 36 aa, Artificial Sequence
  GFR-binding peptide
  MOD_RES (1)..(2)..(36): Xaa is C or S
  MOD_RES (16)..(17)..(18)..(19)..(20): Xaa is A or G
  MOD_RES (21)..(22)..(23)..(24): Xaa is A or G or is absent
XXVPTKLSAISILYLXXXXXXXXXLKNYQGMAVSEX

SEQ ID NO: 81178 - protein, 33 aa, Artificial Sequence; identical to SEQ ID NO: 57891
  GFR-binding peptide
  MOD_RES (2)..(3): Xaa is C or S

SEQ ID NO: 81179 - protein, 34 aa, Artificial Sequence; identical to SEQ ID NO: 16758
  GFR-binding peptide
  MOD_RES (1)..(1): Xaa is C or S
  MOD_RES (15)..(16)..(17)..(18)..(19): Xaa is A or G
  MOD_RES (20)..(21)..(22)..(23): Xaa is A or G or is absent

SEQ ID NO: 81180 - protein, 39 aa, Artificial Sequence; identical to SEQ ID NO: 7659
  GFR-binding peptide
  MOD_RES (4)..(5)..(37)..(39): Xaa is C or S

SEQ ID NO: 81181 - protein, 44 aa, Artificial Sequence
  GFR-binding peptide
  MOD_RES (6)..(7)..(41)..(43): Xaa is C or S
  MOD_RES (21)..(22)..(23)..(24)..(25): Xaa is A or G
  MOD_RES (26)..(27)..(28)..(29): Xaa is A or G or is absent
GIPEPXXVPEKMSAISILYLXXXXXXXXXLKNYQNMTVESXAXR

SEQ ID NO: 81182 - protein, 43 aa, Artificial Sequence; identical to SEQ ID NO: 57898
  GFR-binding peptide
  MOD_RES (5)..(6)..(40)..(42): Xaa is C or S
  MOD_RES (20)..(21)..(22)..(23)..(24): Xaa is A or G
  MOD_RES (25)..(26)..(27)..(28): Xaa is A or G or is absent

SEQ ID NO: 81183 - protein, 36 aa, Artificial Sequence; identical to SEQ ID NO: 9460
  GFR-binding peptide
  MOD_RES (35)..(35): Xaa is C or S
  MOD_RES (14)..(15)..(16)..(17)..(18): Xaa is A or G
  MOD_RES (19)..(20)..(21)..(22): Xaa is A or G or is absent

SEQ ID NO: 81184 - protein, 42 aa, Artificial Sequence
  GFR-binding peptide
  MOD_RES (6)..(7)..(40)..(42): Xaa is C or S
  MOD_RES (21)..(22)..(23)..(24)..(25): Xaa is A or G
  MOD_RES (26)..(27)..(28)..(29): Xaa is A or G or is absent
RVPSTXXAPVKTSAISMLYLXXXXXXXXXLKNYQMIVEEXGX

SEQ ID NO: 81185 - protein, 31 aa, Artificial Sequence
  GFR-binding peptide
VPARLSAISILYLDAANNVVLKNYQDMVVEA

SEQ ID NO: 81186 - protein, 40 aa, Artificial Sequence; identical to SEQ ID NO: 7662
  GFR-binding peptide
  MOD_RES (5)..(6): Xaa is C or S
  MOD_RES (20)..(21)..(22)..(23)..(24): Xaa is A or G
  MOD_RES (25)..(26)..(27)..(28): Xaa is A or G or is absent

SEQ ID NO: 81187 - protein, 38 aa, Artificial Sequence; identical to SEQ ID NO: 7663
  GFR-binding peptide
  MOD_RES (4)..(5)..(36)..(38): Xaa is C or S

SEQ ID NO: 81188 - protein, 41 aa, Artificial Sequence; identical to SEQ ID NO: 30862
  GFR-binding peptide
  MOD_RES (6)..(7)..(39)..(41): Xaa is C or S

SEQ ID NO: 81189 - protein, 37 aa, Artificial Sequence; identical to SEQ ID NO: 9463
  GFR-binding peptide
  MOD_RES (2)..(3)..(36): Xaa is C or S
  MOD_RES (17)..(18)..(19)..(20)..(21): Xaa is A or G
  MOD_RES (22)..(23)..(24)..(25): Xaa is A or G or is absent

SEQ ID NO: 81190 - protein, 34 aa, Artificial Sequence; identical to SEQ ID NO: 16767
  GFR-binding peptide
  MOD_RES (1)..(1): Xaa is C or S
  MOD_RES (15)..(16)..(17)..(18)..(19): Xaa is A or G
  MOD_RES (20)..(21)..(22)..(23): Xaa is A or G or is absent

SEQ ID NO: 81191 - protein, 38 aa, Artificial Sequence; identical to SEQ ID NO: 57907
  GFR-binding peptide
  MOD_RES (4)..(5)..(36)..(38): Xaa is C or S

SEQ ID NO: 81192 - protein, 34 aa, Artificial Sequence; identical to SEQ ID NO: 9466
  GFR-binding peptide
  MOD_RES (3)..(4): Xaa is C or S

SEQ ID NO: 81193 - protein, 35 aa, Artificial Sequence
  GFR-binding peptide
  MOD_RES (4)..(5): Xaa is C or S
PASXXVPARLSAISILYLDAANNVVLKNYQDMVVE

SEQ ID NO: 81194 - protein, 40 aa, Artificial Sequence; identical to SEQ ID NO: 7670
  GFR-binding peptide
  MOD_RES (5)..(6)..(38)..(40): Xaa is C or S

SEQ ID NO: 81195 - protein, 41 aa, Artificial Sequence; identical to SEQ ID NO: 9467
  GFR-binding peptide
  MOD_RES (5)..(6)..(39)..(41): Xaa is C or S
  MOD_RES (20)..(21)..(22)..(23)..(24): Xaa is A or G
  MOD_RES (25)..(26)..(27)..(28): Xaa is A or G or is absent

SEQ ID NO: 81196 - protein, 36 aa, Artificial Sequence; identical to SEQ ID NO: 9468
  GFR-binding peptide
  MOD_RES (3)..(4)..(35): Xaa is C or S

SEQ ID NO: 81197 - protein, 34 aa, Artificial Sequence; identical to SEQ ID NO: 7671
  GFR-binding peptide
  MOD_RES (32)..(34): Xaa is C or S

SEQ ID NO: 81198 - protein, 39 aa, Artificial Sequence; identical to SEQ ID NO: 16772
  GFR-binding peptide
  MOD_RES (6)..(7)..(39): Xaa is C or S

SEQ ID NO: 81199 - protein, 39 aa, Artificial Sequence; identical to SEQ ID NO: 9473
  GFR-binding peptide
  MOD_RES (6)..(7): Xaa is C or S
  MOD_RES (21)..(22)..(23)..(24)..(25): Xaa is A or G
  MOD_RES (26)..(27)..(28)..(29): Xaa is A or G or is absent

SEQ ID NO: 81200 - protein, 35 aa, Artificial Sequence; identical to SEQ ID NO: 9474
  GFR-binding peptide
  MOD_RES (2)..(3)..(34): Xaa is C or S

SEQ ID NO: 81201 - protein, 39 aa, Artificial Sequence; identical to SEQ ID NO: 9475
  GFR-binding peptide
  MOD_RES (5)..(6)..(38): Xaa is C or S

SEQ ID NO: 81202 - protein, 36 aa, Artificial Sequence; identical to SEQ ID NO: 7673
  GFR-binding peptide
  MOD_RES (2)..(3)..(35): Xaa is C or S

SEQ ID NO: 81203 - protein, 35 aa, Artificial Sequence; identical to SEQ ID NO: 71703
  GFR-binding peptide
  MOD_RES (32)..(34): Xaa is C or S

SEQ ID NO: 81204 - protein, 37 aa, Artificial Sequence; identical to SEQ ID NO: 7675
  GFR-binding peptide
  MOD_RES (2)..(3)..(34)..(36): Xaa is C or S

SEQ ID NO: 81205 - protein, 37 aa, Artificial Sequence; identical to SEQ ID NO: 57918
  GFR-binding peptide
  MOD_RES (5)..(6)..(37): Xaa is C or S

SEQ ID NO: 81206 - protein, 32 aa, Artificial Sequence; identical to SEQ ID NO: 28970
  GFR-binding peptide
  MOD_RES (32)..(32): Xaa is C or S

SEQ ID NO: 81207 - protein, 37 aa, Artificial Sequence; identical to SEQ ID NO: 9479
  GFR-binding peptide
  MOD_RES (5)..(6): Xaa is C or S

SEQ ID NO: 81208 - protein, 39 aa, Artificial Sequence
  GFR-binding peptide
  MOD_RES (1)..(2)..(36)..(38): Xaa is C or S
  MOD_RES (16)..(17)..(18)..(19)..(20): Xaa is A or G
  MOD_RES (21)..(22)..(23)..(24): Xaa is A or G or is absent
XXVPTKLSAISILYLXXXXXXXXXLKNYQGMAVSEXGXR

SEQ ID NO: 81209 - protein, 37 aa, Artificial Sequence; identical to SEQ ID NO: 30885
  GFR-binding peptide
  MOD_RES (5)..(6): Xaa is C or S

SEQ ID NO: 81210 - protein, 41 aa, Artificial Sequence; identical to SEQ ID NO: 9485
  GFR-binding peptide
  MOD_RES (3)..(4)..(38)..(40): Xaa is C or S
  MOD_RES (18)..(19)..(20)..(21)..(22): Xaa is A or G
  MOD_RES (23)..(24)..(25)..(26): Xaa is A or G or is absent

SEQ ID NO: 81211 - protein, 37 aa, Artificial Sequence; identical to SEQ ID NO: 9486
  GFR-binding peptide
  MOD_RES (6)..(7): Xaa is C or S

SEQ ID NO: 81212 - protein, 36 aa, Artificial Sequence; identical to SEQ ID NO: 9488
  GFR-binding peptide
  MOD_RES (5)..(5): Xaa is C or S

SEQ ID NO: 81213 - protein, 35 aa, Artificial Sequence
  GFR-binding peptide
  MOD_RES (4)..(5): Xaa is C or S
AGPXXTPTKMSAISMLYLNDKQQIILKNYQGMVVD

SEQ ID NO: 81214 - protein, 36 aa, Artificial Sequence
  GFR-binding peptide
  MOD_RES (1)..(33)..(35): Xaa is C or S
XTPTKMSAISMLYLNDKQQIILKNYQGMVVDRXGXS

SEQ ID NO: 81215 - protein, 34 aa, Artificial Sequence; identical to SEQ ID NO: 9490
  GFR-binding peptide
  MOD_RES (2)..(3): Xaa is C or S

SEQ ID NO: 81216 - protein, 31 aa, Artificial Sequence
  GFR-binding peptide
  MOD_RES (1)..(1): Xaa is C or S
XVPEKMSAISILYLDENKNVVLKNYQNMTVE

SEQ ID NO: 81217 - protein, 37 aa, Artificial Sequence; identical to SEQ ID NO: 7680
  GFR-binding peptide
  MOD_RES (1)..(35)..(37): Xaa is C or S
  MOD_RES (15)..(16)..(17)..(18)..(19): Xaa is A or G
  MOD_RES (20)..(21)..(22)..(23): Xaa is A or G or is absent

SEQ ID NO: 81218 - protein, 37 aa, Artificial Sequence; identical to SEQ ID NO: 30891
  GFR-binding peptide
  MOD_RES (4)..(5): Xaa is C or S
  MOD_RES (19)..(20)..(21)..(22)..(23): Xaa is A or G
  MOD_RES (24)..(25)..(26)..(27): Xaa is A or G or is absent

SEQ ID NO: 81219 - protein, 40 aa, Artificial Sequence; identical to SEQ ID NO: 9492
  GFR-binding peptide
  MOD_RES (2)..(3)..(37)..(39): Xaa is C or S
  MOD_RES (17)..(18)..(19)..(20)..(21): Xaa is A or G
  MOD_RES (22)..(23)..(24)..(25): Xaa is A or G or is absent

SEQ ID NO: 81220 - protein, 35 aa, Artificial Sequence; identical to SEQ ID NO: 7682
  GFR-binding peptide
  MOD_RES (4)..(5): Xaa is C or S

SEQ ID NO: 81221 - protein, 41 aa, Artificial Sequence; identical to SEQ ID NO: 7683
  GFR-binding peptide
  MOD_RES (6)..(7)..(40): Xaa is C or S
  MOD_RES (21)..(22)..(23)..(24)..(25): Xaa is A or G
  MOD_RES (26)..(27)..(28)..(29): Xaa is A or G or is absent

SEQ ID NO: 81222 - protein, 40 aa, Artificial Sequence; identical to SEQ ID NO: 9493
  GFR-binding peptide
  MOD_RES (3)..(4)..(38)..(40): Xaa is C or S
  MOD_RES (18)..(19)..(20)..(21)..(22): Xaa is A or G
  MOD_RES (23)..(24)..(25)..(26): Xaa is A or G or is absent

SEQ ID NO: 81223 - protein, 33 aa, Artificial Sequence; identical to SEQ ID NO: 57932
  GFR-binding peptide
  MOD_RES (32)..(32): Xaa is C or S

SEQ ID NO: 81224 - protein, 41 aa, Artificial Sequence; identical to SEQ ID NO: 14986
  GFR-binding peptide
  MOD_RES (3)..(4)..(38)..(40): Xaa is C or S
  MOD_RES (18)..(19)..(20)..(21)..(22): Xaa is A or G
  MOD_RES (23)..(24)..(25)..(26): Xaa is A or G or is absent

SEQ ID NO: 81225 - protein, 40 aa, Artificial Sequence; identical to SEQ ID NO: 7686
  GFR-binding peptide
  MOD_RES (5)..(6)..(39): Xaa is C or S

SEQ ID NO: 81226 - protein, 42 aa, Artificial Sequence
  GFR-binding peptide
  MOD_RES (6)..(7)..(41): Xaa is C or S
  MOD_RES (21)..(22)..(23)..(24)..(25): Xaa is A or G
  MOD_RES (26)..(27)..(28)..(29): Xaa is A or G or is absent
GSAGPXXTPTKMSAISMLYLXXXXXXXXXLKNYQGMVVDRXG

SEQ ID NO: 81227 - protein, 32 aa, Artificial Sequence; identical to SEQ ID NO: 9495
  GFR-binding peptide
  MOD_RES (1)..(2): Xaa is C or S

SEQ ID NO: 81228 - protein, 34 aa, Artificial Sequence; identical to SEQ ID NO: 9496
  GFR-binding peptide
  MOD_RES (1)..(2): Xaa is C or S
  MOD_RES (16)..(17)..(18)..(19)..(20): Xaa is A or G
  MOD_RES (21)..(22)..(23)..(24): Xaa is A or G or is absent

SEQ ID NO: 81229 - protein, 34 aa, Artificial Sequence
  GFR-binding peptide
  MOD_RES (1)..(1): Xaa is C or S
  MOD_RES (15)..(16)..(17)..(18)..(19): Xaa is A or G
  MOD_RES (20)..(21)..(22)..(23): Xaa is A or G or is absent
XVPEKMSAISILYLXXXXXXXXXLKNYQNMTVES

SEQ ID NO: 81230 - protein, 39 aa, Artificial Sequence; identical to SEQ ID NO: 7690
  GFR-binding peptide
  MOD_RES (6)..(7): Xaa is C or S
  MOD_RES (21)..(22)..(23)..(24)..(25): Xaa is A or G
  MOD_RES (26)..(27)..(28)..(29): Xaa is A or G or is absent

SEQ ID NO: 81231 - protein, 34 aa, Artificial Sequence
  GFR-binding peptide
  MOD_RES (3)..(4): Xaa is C or S
KAXXVPTKLSAISILYLDKGVVTYLKNYQGMAVS

SEQ ID NO: 81232 - protein, 37 aa, Artificial Sequence; identical to SEQ ID NO: 7694
  GFR-binding peptide
  MOD_RES (2)..(34)..(36): Xaa is C or S

SEQ ID NO: 81233 - protein, 34 aa, Artificial Sequence; identical to SEQ ID NO: 9499
  GFR-binding peptide
  MOD_RES (34)..(34): Xaa is C or S
  MOD_RES (14)..(15)..(16)..(17)..(18): Xaa is A or G
  MOD_RES (19)..(20)..(21)..(22): Xaa is A or G or is absent

SEQ ID NO: 81234 - protein, 36 aa, Artificial Sequence; identical to SEQ ID NO: 9501
  GFR-binding peptide
  MOD_RES (3)..(4): Xaa is C or S
  MOD_RES (18)..(19)..(20)..(21)..(22): Xaa is A or G
  MOD_RES (23)..(24)..(25)..(26): Xaa is A or G or is absent

SEQ ID NO: 81235 - protein, 41 aa, Artificial Sequence
  GFR-binding peptide
  MOD_RES (5)..(6)..(38)..(40): Xaa is C or S
IPEPXXVPEKMSAISILYLDENKNVVLKNYQNMTVESXAXR

SEQ ID NO: 81236 - protein, 43 aa, Artificial Sequence; identical to SEQ ID NO: 9503
  GFR-binding peptide
  MOD_RES (6)..(7)..(40)..(42): Xaa is C or S
  MOD_RES (21)..(22)..(23)..(24)..(25): Xaa is A or G
  MOD_RES (26)..(27)..(28)..(29): Xaa is A or G or is absent

SEQ ID NO: 81237 - protein, 33 aa, Artificial Sequence
  GFR-binding peptide
  MOD_RES (1)..(33): Xaa is C or S
XTPTKMSAISMLYLNDKQQIILKNYQGMVVDRX

SEQ ID NO: 81238 - protein, 41 aa, Artificial Sequence; identical to SEQ ID NO: 9504
  GFR-binding peptide
  MOD_RES (6)..(7)..(38)..(40): Xaa is C or S

SEQ ID NO: 81239 - protein, 35 aa, Artificial Sequence
  GFR-binding peptide
  MOD_RES (1)..(33)..(35): Xaa is C or S
XVPARLSAISILYLDAANNVVLKNYQDMVVEAXGX

SEQ ID NO: 81240 - protein, 35 aa, Artificial Sequence; identical to SEQ ID NO: 9505
  GFR-binding peptide
  MOD_RES (4)..(5): Xaa is C or S

SEQ ID NO: 81241 - protein, 38 aa, Artificial Sequence; identical to SEQ ID NO: 7698
  GFR-binding peptide
  MOD_RES (5)..(6): Xaa is C or S
  MOD_RES (20)..(21)..(22)..(23)..(24): Xaa is A or G
  MOD_RES (25)..(26)..(27)..(28): Xaa is A or G or is absent

SEQ ID NO: 81242 - protein, 35 aa, Artificial Sequence; identical to SEQ ID NO: 9506
  GFR-binding peptide
  MOD_RES (1)..(2)..(34): Xaa is C or S

SEQ ID NO: 81243 - protein, 32 aa, Artificial Sequence; identical to SEQ ID NO: 57942
  GFR-binding peptide
  MOD_RES (31)..(31): Xaa is C or S

SEQ ID NO: 81244 - protein, 36 aa, Artificial Sequence; identical to SEQ ID NO: 9507
  GFR-binding peptide
  MOD_RES (1)..(33)..(35): Xaa is C or S

SEQ ID NO: 81245 - protein, 35 aa, Artificial Sequence; identical to SEQ ID NO: 7701
  GFR-binding peptide
  MOD_RES (2)..(3)..(35): Xaa is C or S

SEQ ID NO: 81246 - protein, 35 aa, Artificial Sequence; identical to SEQ ID NO: 7702
  GFR-binding peptide
  MOD_RES (2)..(3): Xaa is C or S
  MOD_RES (17)..(18)..(19)..(20)..(21): Xaa is A or G
  MOD_RES (22)..(23)..(24)..(25): Xaa is A or G or is absent

SEQ ID NO: 81247 - protein, 36 aa, Artificial Sequence; identical to SEQ ID NO: 28997
  GFR-binding peptide
  MOD_RES (1)..(33)..(35): Xaa is C or S

SEQ ID NO: 81248 - protein, 40 aa, Artificial Sequence
  GFR-binding peptide
  MOD_RES (4)..(5)..(39): Xaa is C or S
  MOD_RES (19)..(20)..(21)..(22)..(23): Xaa is A or G
  MOD_RES (24)..(25)..(26)..(27): Xaa is A or G or is absent
PASXXVPARLSAISILYLXXXXXXXXXLKNYQDMVVEAXG

SEQ ID NO: 81249 - protein, 39 aa, Artificial Sequence; identical to SEQ ID NO: 9509
  GFR-binding peptide
  MOD_RES (5)..(6)..(39): Xaa is C or S
  MOD_RES (20)..(21)..(22)..(23)..(24): Xaa is A or G
  MOD_RES (25)..(26)..(27)..(28): Xaa is A or G or is absent

SEQ ID NO: 81250 - protein, 35 aa, Artificial Sequence; identical to SEQ ID NO: 7704
  GFR-binding peptide
  MOD_RES (1)..(2)..(33)..(35): Xaa is C or S

SEQ ID NO: 81251 - protein, 35 aa, Artificial Sequence; identical to SEQ ID NO: 15003
  GFR-binding peptide
  MOD_RES (3)..(4): Xaa is C or S

SEQ ID NO: 81252 - protein, 41 aa, Artificial Sequence; identical to SEQ ID NO: 16810
  GFR-binding peptide
  MOD_RES (4)..(5)..(39)..(41): Xaa is C or S
  MOD_RES (19)..(20)..(21)..(22)..(23): Xaa is A or G
  MOD_RES (24)..(25)..(26)..(27): Xaa is A or G or is absent

SEQ ID NO: 81253 - protein, 38 aa, Artificial Sequence; identical to SEQ ID NO: 9511
  GFR-binding peptide
  MOD_RES (3)..(4)..(36)..(38): Xaa is C or S

SEQ ID NO: 81254 - protein, 35 aa, Artificial Sequence; identical to SEQ ID NO: 9512
  GFR-binding peptide
  MOD_RES (1)..(35): Xaa is C or S
  MOD_RES (15)..(16)..(17)..(18)..(19): Xaa is A or G
  MOD_RES (20)..(21)..(22)..(23): Xaa is A or G or is absent

SEQ ID NO: 81255 - protein, 40 aa, Artificial Sequence; identical to SEQ ID NO: 57954
  GFR-binding peptide
  MOD_RES (6)..(7)..(40): Xaa is C or S
  MOD_RES (21)..(22)..(23)..(24)..(25): Xaa is A or G
  MOD_RES (26)..(27)..(28)..(29): Xaa is A or G or is absent

SEQ ID NO: 81256 - protein, 33 aa, Artificial Sequence; identical to SEQ ID NO: 9515
  GFR-binding peptide
  MOD_RES (33)..(33): Xaa is C or S
  MOD_RES (14)..(15)..(16)..(17)..(18): Xaa is A or G
  MOD_RES (19)..(20)..(21)..(22): Xaa is A or G or is absent

SEQ ID NO: 81257 - protein, 38 aa, Artificial Sequence; identical to SEQ ID NO: 16814
  GFR-binding peptide
  MOD_RES (2)..(3)..(37): Xaa is C or S
  MOD_RES (17)..(18)..(19)..(20)..(21): Xaa is A or G
  MOD_RES (22)..(23)..(24)..(25): Xaa is A or G or is absent

SEQ ID NO: 81258 - protein, 39 aa, Artificial Sequence; identical to SEQ ID NO: 29009
  GFR-binding peptide
  MOD_RES (5)..(6): Xaa is C or S
  MOD_RES (20)..(21)..(22)..(23)..(24): Xaa is A or G
  MOD_RES (25)..(26)..(27)..(28): Xaa is A or G or is absent

SEQ ID NO: 81259 - protein, 38 aa, Artificial Sequence; identical to SEQ ID NO: 7712
  GFR-binding peptide
  MOD_RES (6)..(38): Xaa is C or S

SEQ ID NO: 81260 - protein, 36 aa, Artificial Sequence; identical to SEQ ID NO: 9520
  GFR-binding peptide
  MOD_RES (34)..(36): Xaa is C or S
  MOD_RES (14)..(15)..(16)..(17)..(18): Xaa is A or G
  MOD_RES (19)..(20)..(21)..(22): Xaa is A or G or is absent

SEQ ID NO: 81261 - protein, 38 aa, Artificial Sequence; identical to SEQ ID NO: 7713
  GFR-binding peptide
  MOD_RES (1)..(2)..(35)..(37): Xaa is C or S
  MOD_RES (16)..(17)..(18)..(19)..(20): Xaa is A or G
  MOD_RES (21)..(22)..(23)..(24): Xaa is A or G or is absent

SEQ ID NO: 81262 - protein, 35 aa, Artificial Sequence; identical to SEQ ID NO: 7714
  GFR-binding peptide
  MOD_RES (1)..(2)..(33)..(35): Xaa is C or S

SEQ ID NO: 81263 - protein, 42 aa, Artificial Sequence; identical to SEQ ID NO: 9522
  GFR-binding peptide
  MOD_RES (4)..(5)..(39)..(41): Xaa is C or S
  MOD_RES (19)..(20)..(21)..(22)..(23): Xaa is A or G
  MOD_RES (24)..(25)..(26)..(27): Xaa is A or G or is absent

SEQ ID NO: 81264 - protein, 33 aa, Artificial Sequence
  GFR-binding peptide
  MOD_RES (1)..(1): Xaa is C or S
  MOD_RES (15)..(16)..(17)..(18)..(19): Xaa is A or G
  MOD_RES (20)..(21)..(22)..(23): Xaa is A or G or is absent
XVPTKLSAISILYLXXXXXXXXXLKNYQGMAVS

SEQ ID NO: 81265 - protein, 34 aa, Artificial Sequence
  GFR-binding peptide
  MOD_RES (1)..(2)..(34): Xaa is C or S
XXVPARLSAISILYLDAANNVVLKNYQDMVVEAX

SEQ ID NO: 81266 - protein, 32 aa, Artificial Sequence; identical to SEQ ID NO: 9523
  GFR-binding peptide
  MOD_RES (31)..(31): Xaa is C or S

SEQ ID NO: 81267 - protein, 39 aa, Artificial Sequence; identical to SEQ ID NO: 9525
  GFR-binding peptide
  MOD_RES (2)..(3)..(36)..(38): Xaa is C or S
  MOD_RES (17)..(18)..(19)..(20)..(21): Xaa is A or G
  MOD_RES (22)..(23)..(24)..(25): Xaa is A or G or is absent

SEQ ID NO: 81268 - protein, 38 aa, Artificial Sequence; identical to SEQ ID NO: 9526
  GFR-binding peptide
  MOD_RES (3)..(4)..(38): Xaa is C or S
  MOD_RES (18)..(19)..(20)..(21)..(22): Xaa is A or G
  MOD_RES (23)..(24)..(25)..(26): Xaa is A or G or is absent

SEQ ID NO: 81269 - protein, 37 aa, Artificial Sequence; identical to SEQ ID NO: 30922
  GFR-binding peptide
  MOD_RES (1)..(2)..(34)..(36): Xaa is C or S

SEQ ID NO: 81270 - protein, 41 aa, Artificial Sequence; identical to SEQ ID NO: 7718
  GFR-binding peptide
  MOD_RES (7)..(39)..(41): Xaa is C or S

SEQ ID NO: 81271 - protein, 39 aa, Artificial Sequence; identical to SEQ ID NO: 7719
  GFR-binding peptide
  MOD_RES (2)..(3)..(37)..(39): Xaa is C or S
  MOD_RES (17)..(18)..(19)..(20)..(21): Xaa is A or G
  MOD_RES (22)..(23)..(24)..(25): Xaa is A or G or is absent

SEQ ID NO: 81272 - protein, 39 aa, Artificial Sequence; identical to SEQ ID NO: 7720
  GFR-binding peptide
  MOD_RES (3)..(4)..(38): Xaa is C or S
  MOD_RES (18)..(19)..(20)..(21)..(22): Xaa is A or G
  MOD_RES (23)..(24)..(25)..(26): Xaa is A or G or is absent

SEQ ID NO: 81273 - protein, 34 aa, Artificial Sequence; identical to SEQ ID NO: 7721
  GFR-binding peptide
  MOD_RES (32)..(34): Xaa is C or S

SEQ ID NO: 81274 - protein, 38 aa, Artificial Sequence; identical to SEQ ID NO: 9529
  GFR-binding peptide
  MOD_RES (3)..(37): Xaa is C or S
  MOD_RES (17)..(18)..(19)..(20)..(21): Xaa is A or G
  MOD_RES (22)..(23)..(24)..(25): Xaa is A or G or is absent

SEQ ID NO: 81275 - protein, 40 aa, Artificial Sequence
  GFR-binding peptide
  MOD_RES (5)..(6)..(40): Xaa is C or S
  MOD_RES (20)..(21)..(22)..(23)..(24): Xaa is A or G
  MOD_RES (25)..(26)..(27)..(28): Xaa is A or G or is absent
APASXXVPARLSAISILYLXXXXXXXXXLKNYQDMVVEAX

SEQ ID NO: 81276 - protein, 40 aa, Artificial Sequence; identical to SEQ ID NO: 9532
  GFR-binding peptide
  MOD_RES (2)..(3)..(37)..(39): Xaa is C or S
  MOD_RES (17)..(18)..(19)..(20)..(21): Xaa is A or G
  MOD_RES (22)..(23)..(24)..(25): Xaa is A or G or is absent

SEQ ID NO: 81277 - protein, 40 aa, Artificial Sequence; identical to SEQ ID NO: 7723
  GFR-binding peptide
  MOD_RES (6)..(7): Xaa is C or S
  MOD_RES (21)..(22)..(23)..(24)..(25): Xaa is A or G
  MOD_RES (26)..(27)..(28)..(29): Xaa is A or G or is absent

SEQ ID NO: 81278 - protein, 37 aa, Artificial Sequence
  GFR-binding peptide
  MOD_RES (1)..(2)..(36): Xaa is C or S
  MOD_RES (16)..(17)..(18)..(19)..(20): Xaa is A or G
  MOD_RES (21)..(22)..(23)..(24): Xaa is A or G or is absent
XXVPEKMSAISILYLXXXXXXXXXLKNYQNMTVESXA

SEQ ID NO: 81279 - protein, 38 aa, Artificial Sequence; identical to SEQ ID NO: 15021
  GFR-binding peptide
  MOD_RES (3)..(4)..(36)..(38): Xaa is C or S

SEQ ID NO: 81280 - protein, 39 aa, Artificial Sequence; identical to SEQ ID NO: 7726
  GFR-binding peptide
  MOD_RES (3)..(4)..(36)..(38): Xaa is C or S

SEQ ID NO: 81281 - protein, 43 aa, Artificial Sequence; identical to SEQ ID NO: 7727
  GFR-binding peptide
  MOD_RES (6)..(7)..(40)..(42): Xaa is C or S
  MOD_RES (21)..(22)..(23)..(24)..(25): Xaa is A or G
  MOD_RES (26)..(27)..(28)..(29): Xaa is A or G or is absent

SEQ ID NO: 81282 - protein, 42 aa, Artificial Sequence
  GFR-binding peptide
  MOD_RES (4)..(5)..(39)..(41): Xaa is C or S
  MOD_RES (19)..(20)..(21)..(22)..(23): Xaa is A or G
  MOD_RES (24)..(25)..(26)..(27): Xaa is A or G or is absent
PEPXXVPEKMSAISILYLXXXXXXXXXLKNYQNMTVESXAXR

SEQ ID NO: 81283 - protein, 38 aa, Artificial Sequence; identical to SEQ ID NO: 9536
  GFR-binding peptide
  MOD_RES (6)..(7): Xaa is C or S

SEQ ID NO: 81284 - protein, 32 aa, Artificial Sequence
  GFR-binding peptide
  MOD_RES (1)..(2): Xaa is C or S
XXVPEKMSAISILYLDENKNVVLKNYQNMTVE

SEQ ID NO: 81285 - protein, 37 aa, Artificial Sequence; identical to SEQ ID NO: 15027
  GFR-binding peptide
  MOD_RES (34)..(36): Xaa is C or S
  MOD_RES (14)..(15)..(16)..(17)..(18): Xaa is A or G
  MOD_RES (19)..(20)..(21)..(22): Xaa is A or G or is absent

SEQ ID NO: 81286 - protein, 39 aa, Artificial Sequence; identical to SEQ ID NO: 68399
  GFR-binding peptide
  MOD_RES (5)..(6)..(38): Xaa is C or S

SEQ ID NO: 81287 - protein, 38 aa, Artificial Sequence; identical to SEQ ID NO: 7730
  GFR-binding peptide
  MOD_RES (5)..(6): Xaa is C or S
  MOD_RES (20)..(21)..(22)..(23)..(24): Xaa is A or G
  MOD_RES (25)..(26)..(27)..(28): Xaa is A or G or is absent

SEQ ID NO: 81288 - protein, 40 aa, Artificial Sequence; identical to SEQ ID NO: 9538
  GFR-binding peptide
  MOD_RES (5)..(6)..(37)..(39): Xaa is C or S

SEQ ID NO: 81289 - protein, 37 aa, Artificial Sequence
  GFR-binding peptide
  MOD_RES (6)..(7): Xaa is C or S
KASKAXXVPTKLSAISILYLDKGVVTYLKNYQGMAVS

SEQ ID NO: 81290 - protein, 34 aa, Artificial Sequence; identical to SEQ ID NO: 70085
  GFR-binding peptide
  MOD_RES (2)..(3): Xaa is C or S

SEQ ID NO: 81291 - protein, 37 aa, Artificial Sequence; identical to SEQ ID NO: 9539
  GFR-binding peptide
  MOD_RES (4)..(36): Xaa is C or S

SEQ ID NO: 81292 - protein, 38 aa, Artificial Sequence; identical to SEQ ID NO: 29032
  GFR-binding peptide
  MOD_RES (4)..(5): Xaa is C or S
  MOD_RES (19)..(20)..(21)..(22)..(23): Xaa is A or G
  MOD_RES (24)..(25)..(26)..(27): Xaa is A or G or is absent

SEQ ID NO: 81293 - protein, 33 aa, Artificial Sequence
  GFR-binding peptide
  MOD_RES (1)..(2)..(33): Xaa is C or S
XXAPVKTSAISMLYLDNGRVLLLKNYQMIVEEX

SEQ ID NO: 81294 - protein, 34 aa, Artificial Sequence; identical to SEQ ID NO: 7737
  GFR-binding peptide
  MOD_RES (1)..(34): Xaa is C or S
  MOD_RES (15)..(16)..(17)..(18)..(19): Xaa is A or G
  MOD_RES (20)..(21)..(22)..(23): Xaa is A or G or is absent

SEQ ID NO: 81295 - protein, 33 aa, Artificial Sequence
  GFR-binding peptide
  MOD_RES (2)..(3): Xaa is C or S
PXXVPEKMSAISILYLDENKNVVLKNYQNMTVE

SEQ ID NO: 81296 - protein, 33 aa, Artificial Sequence
  GFR-binding peptide
  MOD_RES (1)..(2): Xaa is C or S
XXVPARLSAISILYLDAANNVVLKNYQDMVVEA

SEQ ID NO: 81297 - protein, 41 aa, Artificial Sequence
  GFR-binding peptide
  MOD_RES (3)..(4)..(38)..(40): Xaa is C or S
  MOD_RES (18)..(19)..(20)..(21)..(22): Xaa is A or G
  MOD_RES (23)..(24)..(25)..(26): Xaa is A or G or is absent
GPXXTPTKMSAISMLYLXXXXXXXXXLKNYQGMVVDRXGXS

SEQ ID NO: 81298 - protein, 41 aa, Artificial Sequence; identical to SEQ ID NO: 15038
  GFR-binding peptide
  MOD_RES (6)..(7)..(41): Xaa is C or S
  MOD_RES (21)..(22)..(23)..(24)..(25): Xaa is A or G
  MOD_RES (26)..(27)..(28)..(29): Xaa is A or G or is absent

SEQ ID NO: 81299 - protein, 35 aa, Artificial Sequence; identical to SEQ ID NO: 30937
  GFR-binding peptide
  MOD_RES (1)..(2)..(34): Xaa is C or S

SEQ ID NO: 81300 - protein, 39 aa, Artificial Sequence; identical to SEQ ID NO: 9546
  GFR-binding peptide
  MOD_RES (6)..(7)..(38): Xaa is C or S

SEQ ID NO: 81301 - protein, 37 aa, Artificial Sequence; identical to SEQ ID NO: 9548
  GFR-binding peptide
  MOD_RES (1)..(2)..(35)..(37): Xaa is C or S

SEQ ID NO: 81302 - protein, 39 aa, Artificial Sequence; identical to SEQ ID NO: 7740
  GFR-binding peptide
  MOD_RES (6)..(7): Xaa is C or S
  MOD_RES (21)..(22)..(23)..(24)..(25): Xaa is A or G
  MOD_RES (26)..(27)..(28)..(29): Xaa is A or G or is absent

SEQ ID NO: 81303 - protein, 34 aa, Artificial Sequence; identical to SEQ ID NO: 15042
  GFR-binding peptide
  MOD_RES (1)..(2)..(34): Xaa is C or S

SEQ ID NO: 81304 - protein, 32 aa, Artificial Sequence
  GFR-binding peptide
  MOD_RES (32)..(32): Xaa is C or S
VPEKMSAISILYLDENKNVVLKNYQNMTVESX

SEQ ID NO: 81305 - protein, 41 aa, Artificial Sequence; identical to SEQ ID NO: 9549
  GFR-binding peptide
  MOD_RES (4)..(5)..(38)..(40): Xaa is C or S
  MOD_RES (19)..(20)..(21)..(22)..(23): Xaa is A or G
  MOD_RES (24)..(25)..(26)..(27): Xaa is A or G or is absent

SEQ ID NO: 81306 - protein, 36 aa, Artificial Sequence; identical to SEQ ID NO: 68411
  GFR-binding peptide
  MOD_RES (1)..(35): Xaa is C or S
  MOD_RES (15)..(16)..(17)..(18)..(19): Xaa is A or G
  MOD_RES (20)..(21)..(22)..(23): Xaa is A or G or is absent

SEQ ID NO: 81307 - protein, 36 aa, Artificial Sequence; identical to SEQ ID NO: 16846
  GFR-binding peptide
  MOD_RES (3)..(4)..(36): Xaa is C or S

SEQ ID NO: 81308 - protein, 34 aa, Artificial Sequence; identical to SEQ ID NO: 7743
  GFR-binding peptide
  MOD_RES (3)..(4): Xaa is C or S

SEQ ID NO: 81309 - protein, 40 aa, Artificial Sequence; identical to SEQ ID NO: 9553
  GFR-binding peptide
  MOD_RES (6)..(7)..(40): Xaa is C or S

SEQ ID NO: 81310 - protein, 37 aa, Artificial Sequence; identical to SEQ ID NO: 9555
  GFR-binding peptide
  MOD_RES (1)..(2)..(37): Xaa is C or S
  MOD_RES (16)..(17)..(18)..(19)..(20): Xaa is A or G
  MOD_RES (21)..(22)..(23)..(24): Xaa is A or G or is absent

SEQ ID NO: 81311 - protein, 32 aa, Artificial Sequence; identical to SEQ ID NO: 9556
  GFR-binding peptide
  MOD_RES (1)..(1): Xaa is C or S

SEQ ID NO: 81312 - protein, 36 aa, Artificial Sequence; identical to SEQ ID NO: 7745
  GFR-binding peptide
  MOD_RES (2)..(3)..(34)..(36): Xaa is C or S

SEQ ID NO: 81313 - protein, 34 aa, Artificial Sequence; identical to SEQ ID NO: 7746
  GFR-binding peptide
  MOD_RES (32)..(34): Xaa is C or S

SEQ ID NO: 81314 - protein, 39 aa, Artificial Sequence; identical to SEQ ID NO: 57991
  GFR-binding peptide
  MOD_RES (5)..(6)..(38): Xaa is C or S

SEQ ID NO: 81315 - protein, 41 aa, Artificial Sequence; identical to SEQ ID NO: 7748
  GFR-binding peptide
  MOD_RES (4)..(5)..(39)..(41): Xaa is C or S
  MOD_RES (19)..(20)..(21)..(22)..(23): Xaa is A or G
  MOD_RES (24)..(25)..(26)..(27): Xaa is A or G or is absent

SEQ ID NO: 81316 - protein, 33 aa, Artificial Sequence; identical to SEQ ID NO: 57994
  GFR-binding peptide
  MOD_RES (33)..(33): Xaa is C or S
  MOD_RES (14)..(15)..(16)..(17)..(18): Xaa is A or G
  MOD_RES (19)..(20)..(21)..(22): Xaa is A or G or is absent

SEQ ID NO: 81317 - protein, 39 aa, Artificial Sequence; identical to SEQ ID NO: 7749
  GFR-binding peptide
  MOD_RES (4)..(5)..(38): Xaa is C or S
  MOD_RES (19)..(20)..(21)..(22)..(23): Xaa is A or G
  MOD_RES (24)..(25)..(26)..(27): Xaa is A or G or is absent

SEQ ID NO: 81318 - protein, 38 aa, Artificial Sequence; identical to SEQ ID NO: 7750
  GFR-binding peptide
  MOD_RES (4)..(38): Xaa is C or S
  MOD_RES (18)..(19)..(20)..(21)..(22): Xaa is A or G
  MOD_RES (23)..(24)..(25)..(26): Xaa is A or G or is absent

SEQ ID NO: 81319 - protein, 40 aa, Artificial Sequence
  GFR-binding peptide
  MOD_RES (6)..(7): Xaa is C or S
  MOD_RES (21)..(22)..(23)..(24)..(25): Xaa is A or G
  MOD_RES (26)..(27)..(28)..(29): Xaa is A or G or is absent
GIPEPXXVPEKMSAISILYLXXXXXXXXXLKNYQNMTVES

SEQ ID NO: 81320 - protein, 34 aa, Artificial Sequence; identical to SEQ ID NO: 9559
  GFR-binding peptide
  MOD_RES (1)..(32)..(34): Xaa is C or S

SEQ ID NO: 81321 - protein, 33 aa, Artificial Sequence; identical to SEQ ID NO: 9560
  GFR-binding peptide
  MOD_RES (14)..(15)..(16)..(17)..(18): Xaa is A or G
  MOD_RES (19)..(20)..(21)..(22): Xaa is A or G or is absent

SEQ ID NO: 81322 - protein, 37 aa, Artificial Sequence; identical to SEQ ID NO: 16856
  GFR-binding peptide
  MOD_RES (5)..(6): Xaa is C or S

SEQ ID NO: 81323 - protein, 40 aa, Artificial Sequence; identical to SEQ ID NO: 9562
  GFR-binding peptide
  MOD_RES (5)..(6)..(39): Xaa is C or S
  MOD_RES (20)..(21)..(22)..(23)..(24): Xaa is A or G
  MOD_RES (25)..(26)..(27)..(28): Xaa is A or G or is absent

SEQ ID NO: 81324 - protein, 40 aa, Artificial Sequence
  GFR-binding peptide
  MOD_RES (6)..(7)..(38)..(40): Xaa is C or S
RVPSTXXAPVKTSAISMLYLDNGRVLLLKNYQMIVEEXGX

SEQ ID NO: 81325 - protein, 36 aa, Artificial Sequence; identical to SEQ ID NO: 7752
  GFR-binding peptide
  MOD_RES (2)..(3)..(36): Xaa is C or S
  MOD_RES (17)..(18)..(19)..(20)..(21): Xaa is A or G
  MOD_RES (22)..(23)..(24)..(25): Xaa is A or G or is absent

SEQ ID NO: 81326 - protein, 43 aa, Artificial Sequence; identical to SEQ ID NO: 16861
  GFR-binding peptide
  MOD_RES (5)..(6)..(40)..(42): Xaa is C or S
  MOD_RES (20)..(21)..(22)..(23)..(24): Xaa is A or G
  MOD_RES (25)..(26)..(27)..(28): Xaa is A or G or is absent

SEQ ID NO: 81327 - protein, 41 aa, Artificial Sequence; identical to SEQ ID NO: 9565
  GFR-binding peptide
  MOD_RES (3)..(4)..(39)..(41): Xaa is C or S
  MOD_RES (18)..(19)..(20)..(21)..(22): Xaa is A or G
  MOD_RES (23)..(24)..(25)..(26): Xaa is A or G or is absent

SEQ ID NO: 81328 - protein, 33 aa, Artificial Sequence; identical to SEQ ID NO: 7755
  GFR-binding peptide
  MOD_RES (2)..(3): Xaa is C or S

SEQ ID NO: 81329 - protein, 37 aa, Artificial Sequence; identical to SEQ ID NO: 58001
  GFR-binding peptide
  MOD_RES (34)..(36): Xaa is C or S
  MOD_RES (14)..(15)..(16)..(17)..(18): Xaa is A or G
  MOD_RES (19)..(20)..(21)..(22): Xaa is A or G or is absent

SEQ ID NO: 81330 - protein, 39 aa, Artificial Sequence; identical to SEQ ID NO: 7756
  GFR-binding peptide
  MOD_RES (5)..(39): Xaa is C or S
  MOD_RES (19)..(20)..(21)..(22)..(23): Xaa is A or G
  MOD_RES (24)..(25)..(26)..(27): Xaa is A or G or is absent

SEQ ID NO: 81331 - protein, 35 aa, Artificial Sequence; identical to SEQ ID NO: 58002
  GFR-binding peptide
  MOD_RES (2)..(3)..(35): Xaa is C or S

SEQ ID NO: 81332 - protein, 42 aa, Artificial Sequence; identical to SEQ ID NO: 29060
  GFR-binding peptide
  MOD_RES (6)..(7)..(39)..(41): Xaa is C or S

SEQ ID NO: 81333 - protein, 37 aa, Artificial Sequence; identical to SEQ ID NO: 66704
  GFR-binding peptide
  MOD_RES (1)..(35)..(37): Xaa is C or S
  MOD_RES (15)..(16)..(17)..(18)..(19): Xaa is A or G
  MOD_RES (20)..(21)..(22)..(23): Xaa is A or G or is absent

SEQ ID NO: 81334 - protein, 36 aa, Artificial Sequence; identical to SEQ ID NO: 9571
  GFR-binding peptide
  MOD_RES (33)..(35): Xaa is C or S
  MOD_RES (14)..(15)..(16)..(17)..(18): Xaa is A or G
  MOD_RES (19)..(20)..(21)..(22): Xaa is A or G or is absent

SEQ ID NO: 81335 - protein, 31 aa, Artificial Sequence; identical to SEQ ID NO: 16866
  GFR-binding peptide
  MOD_RES (1)..(1): Xaa is C or S

SEQ ID NO: 81336 - protein, 38 aa, Artificial Sequence
  GFR-binding peptide
  MOD_RES (5)..(6): Xaa is C or S
  MOD_RES (20)..(21)..(22)..(23)..(24): Xaa is A or G
  MOD_RES (25)..(26)..(27)..(28): Xaa is A or G or is absent
APASXXVPARLSAISILYLXXXXXXXXXLKNYQDMVVE

SEQ ID NO: 81337 - protein, 33 aa, Artificial Sequence; identical to SEQ ID NO: 9572
  GFR-binding peptide
  MOD_RES (1)..(1): Xaa is C or S
  MOD_RES (15)..(16)..(17)..(18)..(19): Xaa is A or G
  MOD_RES (20)..(21)..(22)..(23): Xaa is A or G or is absent

SEQ ID NO: 81338 - protein, 38 aa, Artificial Sequence; identical to SEQ ID NO: 16870
  GFR-binding peptide
  MOD_RES (5)..(6)..(38): Xaa is C or S

SEQ ID NO: 81339 - protein, 39 aa, Artificial Sequence; identical to SEQ ID NO: 7767
  GFR-binding peptide
  MOD_RES (4)..(5)..(37)..(39): Xaa is C or S

SEQ ID NO: 81340 - protein, 40 aa, Artificial Sequence; identical to SEQ ID NO: 7768
  GFR-binding peptide
  MOD_RES (3)..(4)..(38)..(40): Xaa is C or S
  MOD_RES (18)..(19)..(20)..(21)..(22): Xaa is A or G
  MOD_RES (23)..(24)..(25)..(26): Xaa is A or G or is absent

SEQ ID NO: 81341 - protein, 41 aa, Artificial Sequence; identical to SEQ ID NO: 9576
  GFR-binding peptide
  MOD_RES (3)..(4)..(38)..(40): Xaa is C or S
  MOD_RES (18)..(19)..(20)..(21)..(22): Xaa is A or G
  MOD_RES (23)..(24)..(25)..(26): Xaa is A or G or is absent

SEQ ID NO: 81342 - protein, 38 aa, Artificial Sequence; identical to SEQ ID NO: 30971
  GFR-binding peptide
  MOD_RES (3)..(4)..(38): Xaa is C or S
  MOD_RES (18)..(19)..(20)..(21)..(22): Xaa is A or G
  MOD_RES (23)..(24)..(25)..(26): Xaa is A or G or is absent

SEQ ID NO: 81343 - protein, 35 aa, Artificial Sequence; identical to SEQ ID NO: 71796
  GFR-binding peptide
  MOD_RES (1)..(2): Xaa is C or S
  MOD_RES (16)..(17)..(18)..(19)..(20): Xaa is A or G
  MOD_RES (21)..(22)..(23)..(24): Xaa is A or G or is absent

SEQ ID NO: 81344 - protein, 38 aa, Artificial Sequence; identical to SEQ ID NO: 9577
  GFR-binding peptide
  MOD_RES (4)..(5)..(37): Xaa is C or S

SEQ ID NO: 81345 - protein, 34 aa, Artificial Sequence; identical to SEQ ID NO: 9579
  GFR-binding peptide
  MOD_RES (3)..(4): Xaa is C or S

SEQ ID NO: 81346 - protein, 41 aa, Artificial Sequence; identical to SEQ ID NO: 9580
  GFR-binding peptide
  MOD_RES (6)..(7)..(41): Xaa is C or S
  MOD_RES (21)..(22)..(23)..(24)..(25): Xaa is A or G
  MOD_RES (26)..(27)..(28)..(29): Xaa is A or G or is absent

SEQ ID NO: 81347 - protein, 37 aa, Artificial Sequence; identical to SEQ ID NO: 9581
  GFR-binding peptide
  MOD_RES (4)..(5): Xaa is C or S
  MOD_RES (19)..(20)..(21)..(22)..(23): Xaa is A or G
  MOD_RES (24)..(25)..(26)..(27): Xaa is A or G or is absent

SEQ ID NO: 81348 - protein, 35 aa, Artificial Sequence
  GFR-binding peptide
  MOD_RES (1)..(2): Xaa is C or S
  MOD_RES (16)..(17)..(18)..(19)..(20): Xaa is A or G
  MOD_RES (21)..(22)..(23)..(24): Xaa is A or G or is absent
XXVPEKMSAISILYLXXXXXXXXXLKNYQNMTVES

SEQ ID NO: 81349 - protein, 39 aa, Artificial Sequence; identical to SEQ ID NO: 29070
  GFR-binding peptide
  MOD_RES (5)..(6)..(38): Xaa is C or S

SEQ ID NO: 81350 - protein, 33 aa, Artificial Sequence
  GFR-binding peptide
  MOD_RES (32)..(32): Xaa is C or S
TPTKMSAISMLYLNDKQQIILKNYQGMVVDRXG

SEQ ID NO: 81351 - protein, 36 aa, Artificial Sequence; identical to SEQ ID NO: 7771
  GFR-binding peptide
  MOD_RES (4)..(5)..(36): Xaa is C or S

SEQ ID NO: 81352 - protein, 36 aa, Artificial Sequence; identical to SEQ ID NO: 58018
  GFR-binding peptide
  MOD_RES (1)..(35): Xaa is C or S
  MOD_RES (15)..(16)..(17)..(18)..(19): Xaa is A or G
  MOD_RES (20)..(21)..(22)..(23): Xaa is A or G or is absent

SEQ ID NO: 81353 - protein, 39 aa, Artificial Sequence; identical to SEQ ID NO: 9585
  GFR-binding peptide
  MOD_RES (5)..(6)..(39): Xaa is C or S

SEQ ID NO: 81354 - protein, 35 aa, Artificial Sequence; identical to SEQ ID NO: 9586
  GFR-binding peptide
  MOD_RES (1)..(2)..(34): Xaa is C or S

SEQ ID NO: 81355 - protein, 36 aa, Artificial Sequence; identical to SEQ ID NO: 9591
  GFR-binding peptide
  MOD_RES (1)..(34)..(36): Xaa is C or S
  MOD_RES (15)..(16)..(17)..(18)..(19): Xaa is A or G
  MOD_RES (20)..(21)..(22)..(23): Xaa is A or G or is absent

SEQ ID NO: 81356 - protein, 40 aa, Artificial Sequence; identical to SEQ ID NO: 9593
  GFR-binding peptide
  MOD_RES (5)..(6)..(40): Xaa is C or S
  MOD_RES (20)..(21)..(22)..(23)..(24): Xaa is A or G
  MOD_RES (25)..(26)..(27)..(28): Xaa is A or G or is absent

SEQ ID NO: 81357 - protein, 38 aa, Artificial Sequence; identical to SEQ ID NO: 70127
  GFR-binding peptide
  MOD_RES (3)..(4)..(36)..(38): Xaa is C or S

SEQ ID NO: 81358 - protein, 32 aa, Artificial Sequence; identical to SEQ ID NO: 9595
  GFR-binding peptide
  MOD_RES (14)..(15)..(16)..(17)..(18): Xaa is A or G
  MOD_RES (19)..(20)..(21)..(22): Xaa is A or G or is absent

SEQ ID NO: 81359 - protein, 43 aa, Artificial Sequence
  GFR-binding peptide
  MOD_RES (5)..(6)..(40)..(42): Xaa is C or S
  MOD_RES (20)..(21)..(22)..(23)..(24): Xaa is A or G
  MOD_RES (25)..(26)..(27)..(28): Xaa is A or G or is absent
ASKAXXVPTKLSAISILYLXXXXXXXXXLKNYQGMAVSEXGXR

SEQ ID NO: 81360 - protein, 41 aa, Artificial Sequence; identical to SEQ ID NO: 7774
  GFR-binding peptide
  MOD_RES (2)..(3)..(38)..(40): Xaa is C or S
  MOD_RES (17)..(18)..(19)..(20)..(21): Xaa is A or G
  MOD_RES (22)..(23)..(24)..(25): Xaa is A or G or is absent

SEQ ID NO: 81361 - protein, 36 aa, Artificial Sequence; identical to SEQ ID NO: 9596
  GFR-binding peptide
  MOD_RES (6)..(6): Xaa is C or S

SEQ ID NO: 81362 - protein, 42 aa, Artificial Sequence; identical to SEQ ID NO: 9598
  GFR-binding peptide
  MOD_RES (6)..(7)..(40)..(42): Xaa is C or S
  MOD_RES (21)..(22)..(23)..(24)..(25): Xaa is A or G
  MOD_RES (26)..(27)..(28)..(29): Xaa is A or G or is absent

SEQ ID NO: 81363 - protein, 37 aa, Artificial Sequence; identical to SEQ ID NO: 30992
  GFR-binding peptide
  MOD_RES (2)..(3)..(35)..(37): Xaa is C or S

SEQ ID NO: 81364 - protein, 36 aa, Artificial Sequence; identical to SEQ ID NO: 7775
  GFR-binding peptide
  MOD_RES (2)..(3)..(35): Xaa is C or S

SEQ ID NO: 81365 - protein, 34 aa, Artificial Sequence; identical to SEQ ID NO: 7777
  GFR-binding peptide
  MOD_RES (33)..(33): Xaa is C or S
  MOD_RES (14)..(15)..(16)..(17)..(18): Xaa is A or G
  MOD_RES (19)..(20)..(21)..(22): Xaa is A or G or is absent

SEQ ID NO: 81366 - protein, 37 aa, Artificial Sequence
  GFR-binding peptide
  MOD_RES (1)..(34)..(36): Xaa is C or S
  MOD_RES (15)..(16)..(17)..(18)..(19): Xaa is A or G
  MOD_RES (20)..(21)..(22)..(23): Xaa is A or G or is absent
XAPVKTSAISMLYLXXXXXXXXXLKNYQMIVEEXGXL

SEQ ID NO: 81367 - protein, 38 aa, Artificial Sequence; identical to SEQ ID NO: 7778
  GFR-binding peptide
  MOD_RES (3)..(4)..(36)..(38): Xaa is C or S

SEQ ID NO: 81368 - protein, 41 aa, Artificial Sequence; identical to SEQ ID NO: 29077
  GFR-binding peptide
  MOD_RES (3)..(4)..(38)..(40): Xaa is C or S
  MOD_RES (18)..(19)..(20)..(21)..(22): Xaa is A or G
  MOD_RES (23)..(24)..(25)..(26): Xaa is A or G or is absent

SEQ ID NO: 81369 - protein, 40 aa, Artificial Sequence; identical to SEQ ID NO: 9600
  GFR-binding peptide
  MOD_RES (6)..(7)..(40): Xaa is C or S
  MOD_RES (21)..(22)..(23)..(24)..(25): Xaa is A or G
  MOD_RES (26)..(27)..(28)..(29): Xaa is A or G or is absent

SEQ ID NO: 81370 - protein, 37 aa, Artificial Sequence; identical to SEQ ID NO: 7780
  GFR-binding peptide
  MOD_RES (5)..(6)..(37): Xaa is C or S

SEQ ID NO: 81371 - protein, 39 aa, Artificial Sequence
  GFR-binding peptide
  MOD_RES (4)..(5)..(39): Xaa is C or S
  MOD_RES (19)..(20)..(21)..(22)..(23): Xaa is A or G
  MOD_RES (24)..(25)..(26)..(27): Xaa is A or G or is absent
PEPXXVPEKMSAISILYLXXXXXXXXXLKNYQNMTVESX

SEQ ID NO: 81372 - protein, 40 aa, Artificial Sequence; identical to SEQ ID NO: 70135
  GFR-binding peptide
  MOD_RES (6)..(7): Xaa is C or S
  MOD_RES (21)..(22)..(23)..(24)..(25): Xaa is A or G
  MOD_RES (26)..(27)..(28)..(29): Xaa is A or G or is absent

SEQ ID NO: 81373 - protein, 39 aa, Artificial Sequence; identical to SEQ ID NO: 15087
  GFR-binding peptide
  MOD_RES (3)..(4)..(36)..(38): Xaa is C or S

SEQ ID NO: 81374 - protein, 33 aa, Artificial Sequence; identical to SEQ ID NO: 30998
  GFR-binding peptide
  MOD_RES (32)..(32): Xaa is C or S

SEQ ID NO: 81375 - protein, 34 aa, Artificial Sequence; identical to SEQ ID NO: 7784
  GFR-binding peptide
  MOD_RES (2)..(2): Xaa is C or S
  MOD_RES (16)..(17)..(18)..(19)..(20): Xaa is A or G
  MOD_RES (21)..(22)..(23)..(24): Xaa is A or G or is absent

SEQ ID NO: 81376 - protein, 34 aa, Artificial Sequence; identical to SEQ ID NO: 15090
  GFR-binding peptide
  MOD_RES (1)..(2): Xaa is C or S
  MOD_RES (16)..(17)..(18)..(19)..(20): Xaa is A or G
  MOD_RES (21)..(22)..(23)..(24): Xaa is A or G or is absent

SEQ ID NO: 81377 - protein, 42 aa, Artificial Sequence
  GFR-binding peptide
  MOD_RES (6)..(7)..(39)..(41): Xaa is C or S
HVPKPXXAPTKLSAISVLYLDDSSNVILKNYQNMVVRSXGXH

SEQ ID NO: 81378 - protein, 37 aa, Artificial Sequence; identical to SEQ ID NO: 7787
  GFR-binding peptide
  MOD_RES (1)..(2)..(36): Xaa is C or S
  MOD_RES (16)..(17)..(18)..(19)..(20): Xaa is A or G
  MOD_RES (21)..(22)..(23)..(24): Xaa is A or G or is absent

SEQ ID NO: 81379 - protein, 36 aa, Artificial Sequence; identical to SEQ ID NO: 70140
  GFR-binding peptide
  MOD_RES (1)..(33)..(35): Xaa is C or S

SEQ ID NO: 81380 - protein, 36 aa, Artificial Sequence
  GFR-binding peptide
  MOD_RES (2)..(3)..(35): Xaa is C or S
AXXVPTKLSAISILYLDKGVVTYLKNYQGMAVSEXG

SEQ ID NO: 81381 - protein, 33 aa, Artificial Sequence
  GFR-binding peptide
  MOD_RES (14)..(15)..(16)..(17)..(18): Xaa is A or G
  MOD_RES (19)..(20)..(21)..(22): Xaa is A or G or is absent
VPARLSAISILYLXXXXXXXXXLKNYQDMVVEA

SEQ ID NO: 81382 - protein, 34 aa, Artificial Sequence; identical to SEQ ID NO: 71825
  GFR-binding peptide
  MOD_RES (1)..(1): Xaa is C or S
  MOD_RES (15)..(16)..(17)..(18)..(19): Xaa is A or G
  MOD_RES (20)..(21)..(22)..(23): Xaa is A or G or is absent

SEQ ID NO: 81383 - protein, 32 aa, Artificial Sequence; identical to SEQ ID NO: 7791
  GFR-binding peptide
  MOD_RES (32)..(32): Xaa is C or S

SEQ ID NO: 81384 - protein, 43 aa, Artificial Sequence; identical to SEQ ID NO: 9612
  GFR-binding peptide
  MOD_RES (6)..(7)..(40)..(42): Xaa is C or S

SEQ ID NO: 81385 - protein, 41 aa, Artificial Sequence; identical to SEQ ID NO: 7793
  GFR-binding peptide
  MOD_RES (4)..(5)..(39)..(41): Xaa is C or S
  MOD_RES (19)..(20)..(21)..(22)..(23): Xaa is A or G
  MOD_RES (24)..(25)..(26)..(27): Xaa is A or G or is absent

SEQ ID NO: 81386 - protein, 38 aa, Artificial Sequence; identical to SEQ ID NO: 15103
  GFR-binding peptide
  MOD_RES (2)..(3)..(35)..(37): Xaa is C or S

SEQ ID NO: 81387 - protein, 37 aa, Artificial Sequence; identical to SEQ ID NO: 16898
  GFR-binding peptide
  MOD_RES (1)..(2)..(36): Xaa is C or S
  MOD_RES (16)..(17)..(18)..(19)..(20): Xaa is A or G
  MOD_RES (21)..(22)..(23)..(24): Xaa is A or G or is absent

SEQ ID NO: 81388 - protein, 38 aa, Artificial Sequence
  GFR-binding peptide
  MOD_RES (4)..(5): Xaa is C or S
  MOD_RES (19)..(20)..(21)..(22)..(23): Xaa is A or G
  MOD_RES (24)..(25)..(26)..(27): Xaa is A or G or is absent
AGPXXTPTKMSAISMLYLXXXXXXXXXLKNYQGMVVDR

SEQ ID NO: 81389 - protein, 42 aa, Artificial Sequence; identical to SEQ ID NO: 9614
  GFR-binding peptide
  MOD_RES (6)..(7)..(41): Xaa is C or S
  MOD_RES (21)..(22)..(23)..(24)..(25): Xaa is A or G
  MOD_RES (26)..(27)..(28)..(29): Xaa is A or G or is absent

SEQ ID NO: 81390 - protein, 36 aa, Artificial Sequence; identical to SEQ ID NO: 15108
  GFR-binding peptide
  MOD_RES (2)..(3): Xaa is C or S
  MOD_RES (17)..(18)..(19)..(20)..(21): Xaa is A or G
  MOD_RES (22)..(23)..(24)..(25): Xaa is A or G or is absent

SEQ ID NO: 81391 - protein, 35 aa, Artificial Sequence; identical to SEQ ID NO: 16902
  GFR-binding peptide
  MOD_RES (1)..(2): Xaa is C or S
  MOD_RES (16)..(17)..(18)..(19)..(20): Xaa is A or G
  MOD_RES (21)..(22)..(23)..(24): Xaa is A or G or is absent

SEQ ID NO: 81392 - protein, 39 aa, Artificial Sequence; identical to SEQ ID NO: 7798
  GFR-binding peptide
  MOD_RES (5)..(6)..(39): Xaa is C or S

SEQ ID NO: 81393 - protein, 44 aa, Artificial Sequence; identical to SEQ ID NO: 15109
  GFR-binding peptide
  MOD_RES (6)..(7)..(41)..(43): Xaa is C or S
  MOD_RES (21)..(22)..(23)..(24)..(25): Xaa is A or G
  MOD_RES (26)..(27)..(28)..(29): Xaa is A or G or is absent

SEQ ID NO: 81394 - protein, 35 aa, Artificial Sequence; identical to SEQ ID NO: 9621
  GFR-binding peptide
  MOD_RES (1)..(2): Xaa is C or S
  MOD_RES (16)..(17)..(18)..(19)..(20): Xaa is A or G
  MOD_RES (21)..(22)..(23)..(24): Xaa is A or G or is absent

SEQ ID NO: 81395 - protein, 40 aa, Artificial Sequence; identical to SEQ ID NO: 9622
  GFR-binding peptide
  MOD_RES (4)..(5)..(38)..(40): Xaa is C or S
  MOD_RES (19)..(20)..(21)..(22)..(23): Xaa is A or G
  MOD_RES (24)..(25)..(26)..(27): Xaa is A or G or is absent

SEQ ID NO: 81396 - protein, 40 aa, Artificial Sequence
  GFR-binding peptide
  MOD_RES (6)..(7)..(39): Xaa is C or S
AAPASXXVPARLSAISILYLDAANNVVLKNYQDMVVEAXG

SEQ ID NO: 81397 - protein, 39 aa, Artificial Sequence; identical to SEQ ID NO: 70154
  GFR-binding peptide
  MOD_RES (4)..(5)..(37)..(39): Xaa is C or S

SEQ ID NO: 81398 - protein, 36 aa, Artificial Sequence; identical to SEQ ID NO: 29096
  GFR-binding peptide
  MOD_RES (1)..(35): Xaa is C or S
  MOD_RES (15)..(16)..(17)..(18)..(19): Xaa is A or G
  MOD_RES (20)..(21)..(22)..(23): Xaa is A or G or is absent

SEQ ID NO: 81399 - protein, 37 aa, Artificial Sequence; identical to SEQ ID NO: 9624
  GFR-binding peptide
  MOD_RES (2)..(3)..(37): Xaa is C or S
  MOD_RES (17)..(18)..(19)..(20)..(21): Xaa is A or G
  MOD_RES (22)..(23)..(24)..(25): Xaa is A or G or is absent

SEQ ID NO: 81400 - protein, 42 aa, Artificial Sequence; identical to SEQ ID NO: 7801
  GFR-binding peptide
  MOD_RES (4)..(5)..(39)..(41): Xaa is C or S
  MOD_RES (19)..(20)..(21)..(22)..(23): Xaa is A or G
  MOD_RES (24)..(25)..(26)..(27): Xaa is A or G or is absent

SEQ ID NO: 81401 - protein, 39 aa, Artificial Sequence; identical to SEQ ID NO: 29098
  GFR-binding peptide
  MOD_RES (4)..(5)..(37)..(39): Xaa is C or S

SEQ ID NO: 81402 - protein, 39 aa, Artificial Sequence; identical to SEQ ID NO: 16910
  GFR-binding peptide
  MOD_RES (4)..(5)..(39): Xaa is C or S
  MOD_RES (19)..(20)..(21)..(22)..(23): Xaa is A or G
  MOD_RES (24)..(25)..(26)..(27): Xaa is A or G or is absent

SEQ ID NO: 81403 - protein, 37 aa, Artificial Sequence
  GFR-binding peptide
  MOD_RES (3)..(4)..(35)..(37): Xaa is C or S
STXXAPVKTSAISMLYLDNGRVLLLKNYQMIVEEXGX

SEQ ID NO: 81404 - protein, 37 aa, Artificial Sequence; identical to SEQ ID NO: 16912
  GFR-binding peptide
  MOD_RES (6)..(7): Xaa is C or S

SEQ ID NO: 81405 - protein, 40 aa, Artificial Sequence; identical to SEQ ID NO: 7806
  GFR-binding peptide
  MOD_RES (2)..(3)..(37)..(39): Xaa is C or S
  MOD_RES (17)..(18)..(19)..(20)..(21): Xaa is A or G
  MOD_RES (22)..(23)..(24)..(25): Xaa is A or G or is absent

SEQ ID NO: 81406 - protein, 31 aa, Artificial Sequence
  GFR-binding peptide
  MOD_RES (1)..(1): Xaa is C or S
XVPTKLSAISILYLDKGVVTYLKNYQGMAVS

SEQ ID NO: 81407 - protein, 42 aa, Artificial Sequence; identical to SEQ ID NO: 16914
  GFR-binding peptide
  MOD_RES (4)..(5)..(39)..(41): Xaa is C or S
  MOD_RES (19)..(20)..(21)..(22)..(23): Xaa is A or G
  MOD_RES (24)..(25)..(26)..(27): Xaa is A or G or is absent

SEQ ID NO: 81408 - protein, 40 aa, Artificial Sequence; identical to SEQ ID NO: 7808
  GFR-binding peptide
  MOD_RES (5)..(6)..(40): Xaa is C or S
  MOD_RES (20)..(21)..(22)..(23)..(24): Xaa is A or G
  MOD_RES (25)..(26)..(27)..(28): Xaa is A or G or is absent

SEQ ID NO: 81409 - protein, 40 aa, Artificial Sequence; identical to SEQ ID NO: 7809
  GFR-binding peptide
  MOD_RES (5)..(6)..(39): Xaa is C or S
  MOD_RES (20)..(21)..(22)..(23)..(24): Xaa is A or G
  MOD_RES (25)..(26)..(27)..(28): Xaa is A or G or is absent

SEQ ID NO: 81410 - protein, 35 aa, Artificial Sequence
  GFR-binding peptide
  MOD_RES (3)..(4)..(35): Xaa is C or S
STXXAPVKTSAISMLYLDNGRVLLLKNYQMIVEEX

SEQ ID NO: 81411 - protein, 41 aa, Artificial Sequence; identical to SEQ ID NO: 71859
  GFR-binding peptide
  MOD_RES (5)..(6)..(40): Xaa is C or S
  MOD_RES (20)..(21)..(22)..(23)..(24): Xaa is A or G
  MOD_RES (25)..(26)..(27)..(28): Xaa is A or G or is absent

SEQ ID NO: 81412 - protein, 39 aa, Artificial Sequence; identical to SEQ ID NO: 7813
  GFR-binding peptide
  MOD_RES (6)..(7): Xaa is C or S
  MOD_RES (21)..(22)..(23)..(24)..(25): Xaa is A or G
  MOD_RES (26)..(27)..(28)..(29): Xaa is A or G or is absent

SEQ ID NO: 81413 - protein, 42 aa, Artificial Sequence; identical to SEQ ID NO: 7814
  GFR-binding peptide
  MOD_RES (6)..(7)..(42): Xaa is C or S
  MOD_RES (21)..(22)..(23)..(24)..(25): Xaa is A or G
  MOD_RES (26)..(27)..(28)..(29): Xaa is A or G or is absent

SEQ ID NO: 81414 - protein, 40 aa, Artificial Sequence
  GFR-binding peptide
  MOD_RES (4)..(5)..(38)..(40): Xaa is C or S
  MOD_RES (19)..(20)..(21)..(22)..(23): Xaa is A or G
  MOD_RES (24)..(25)..(26)..(27): Xaa is A or G or is absent
PSTXXAPVKTSAISMLYLXXXXXXXXXLKNYQMIVEEXGX

SEQ ID NO: 81415 - protein, 35 aa, Artificial Sequence; identical to SEQ ID NO: 7816
  GFR-binding peptide
  MOD_RES (33)..(35): Xaa is C or S
  MOD_RES (14)..(15)..(16)..(17)..(18): Xaa is A or G
  MOD_RES (19)..(20)..(21)..(22): Xaa is A or G or is absent

SEQ ID NO: 81416 - protein, 38 aa, Artificial Sequence; identical to SEQ ID NO: 7817
  GFR-binding peptide
  MOD_RES (2)..(3)..(35)..(37): Xaa is C or S

SEQ ID NO: 81417 - protein, 32 aa, Artificial Sequence; identical to SEQ ID NO: 9635
  GFR-binding peptide
  MOD_RES (1)..(32): Xaa is C or S

SEQ ID NO: 81418 - protein, 36 aa, Artificial Sequence; identical to SEQ ID NO: 7818
  GFR-binding peptide
  MOD_RES (33)..(35): Xaa is C or S
  MOD_RES (14)..(15)..(16)..(17)..(18): Xaa is A or G
  MOD_RES (19)..(20)..(21)..(22): Xaa is A or G or is absent

SEQ ID NO: 81419 - protein, 35 aa, Artificial Sequence; identical to SEQ ID NO: 7819
  GFR-binding peptide
  MOD_RES (2)..(34): Xaa is C or S

SEQ ID NO: 81420 - protein, 36 aa, Artificial Sequence
  GFR-binding peptide
  MOD_RES (1)..(35): Xaa is C or S
  MOD_RES (15)..(16)..(17)..(18)..(19): Xaa is A or G
  MOD_RES (20)..(21)..(22)..(23): Xaa is A or G or is absent
XVPARLSAISILYLXXXXXXXXXLKNYQDMVVEAXG

SEQ ID NO: 81421 - protein, 33 aa, Artificial Sequence; identical to SEQ ID NO: 15132
  GFR-binding peptide
  MOD_RES (1)..(33): Xaa is C or S

SEQ ID NO: 81422 - protein, 34 aa, Artificial Sequence; identical to SEQ ID NO: 9638
  GFR-binding peptide
  MOD_RES (1)..(1): Xaa is C or S
  MOD_RES (15)..(16)..(17)..(18)..(19): Xaa is A or G
  MOD_RES (20)..(21)..(22)..(23): Xaa is A or G or is absent

SEQ ID NO: 81423 - protein, 40 aa, Artificial Sequence; identical to SEQ ID NO: 9640
  GFR-binding peptide
  MOD_RES (4)..(5)..(39): Xaa is C or S
  MOD_RES (19)..(20)..(21)..(22)..(23): Xaa is A or G
  MOD_RES (24)..(25)..(26)..(27): Xaa is A or G or is absent

SEQ ID NO: 81424 - protein, 36 aa, Artificial Sequence; identical to SEQ ID NO: 9641
  GFR-binding peptide
  MOD_RES (4)..(5): Xaa is C or S

SEQ ID NO: 81425 - protein, 32 aa, Artificial Sequence; identical to SEQ ID NO: 7823
  GFR-binding peptide
  MOD_RES (31)..(31): Xaa is C or S

SEQ ID NO: 81426 - protein, 34 aa, Artificial Sequence; identical to SEQ ID NO: 9643
  GFR-binding peptide
  MOD_RES (1)..(1): Xaa is C or S
  MOD_RES (15)..(16)..(17)..(18)..(19): Xaa is A or G
  MOD_RES (20)..(21)..(22)..(23): Xaa is A or G or is absent

SEQ ID NO: 81427 - protein, 33 aa, Artificial Sequence; identical to SEQ ID NO: 7824
  GFR-binding peptide
  MOD_RES (1)..(1): Xaa is C or S
  MOD_RES (15)..(16)..(17)..(18)..(19): Xaa is A or G
  MOD_RES (20)..(21)..(22)..(23): Xaa is A or G or is absent

SEQ ID NO: 81428 - protein, 39 aa, Artificial Sequence; identical to SEQ ID NO: 9646
  GFR-binding peptide
  MOD_RES (2)..(3)..(37)..(39): Xaa is C or S
  MOD_RES (17)..(18)..(19)..(20)..(21): Xaa is A or G
  MOD_RES (22)..(23)..(24)..(25): Xaa is A or G or is absent

SEQ ID NO: 81429 - protein, 38 aa, Artificial Sequence
  GFR-binding peptide
  MOD_RES (4)..(5)..(37): Xaa is C or S
SKAXXVPTKLSAISILYLDKGVVTYLKNYQGMAVSEXG

SEQ ID NO: 81430 - protein, 35 aa, Artificial Sequence; identical to SEQ ID NO: 7826
  GFR-binding peptide
  MOD_RES (3)..(4): Xaa is C or S

SEQ ID NO: 81431 - protein, 40 aa, Artificial Sequence; identical to SEQ ID NO: 7829
  GFR-binding peptide
  MOD_RES (2)..(3)..(37)..(39): Xaa is C or S
  MOD_RES (17)..(18)..(19)..(20)..(21): Xaa is A or G
  MOD_RES (22)..(23)..(24)..(25): Xaa is A or G or is absent

SEQ ID NO: 81432 - protein, 41 aa, Artificial Sequence; identical to SEQ ID NO: 9649
  GFR-binding peptide
  MOD_RES (5)..(6)..(38)..(40): Xaa is C or S

SEQ ID NO: 81433 - protein, 32 aa, Artificial Sequence; identical to SEQ ID NO: 9650
  GFR-binding peptide
  MOD_RES (31)..(31): Xaa is C or S

SEQ ID NO: 81434 - protein, 42 aa, Artificial Sequence; identical to SEQ ID NO: 9652
  GFR-binding peptide
  MOD_RES (6)..(7)..(40)..(42): Xaa is C or S
  MOD_RES (21)..(22)..(23)..(24)..(25): Xaa is A or G
  MOD_RES (26)..(27)..(28)..(29): Xaa is A or G or is absent

SEQ ID NO: 81435 - protein, 35 aa, Artificial Sequence; identical to SEQ ID NO: 58074
  GFR-binding peptide
  MOD_RES (3)..(4)..(35): Xaa is C or S

SEQ ID NO: 81436 - protein, 37 aa, Artificial Sequence; identical to SEQ ID NO: 16930
  GFR-binding peptide
  MOD_RES (4)..(5)..(37): Xaa is C or S

SEQ ID NO: 81437 - protein, 39 aa, Artificial Sequence; identical to SEQ ID NO: 7832
  GFR-binding peptide
  MOD_RES (4)..(5)..(39): Xaa is C or S
  MOD_RES (19)..(20)..(21)..(22)..(23): Xaa is A or G
  MOD_RES (24)..(25)..(26)..(27): Xaa is A or G or is absent

SEQ ID NO: 81438 - protein, 38 aa, Artificial Sequence; identical to SEQ ID NO: 7833
  GFR-binding peptide
  MOD_RES (35)..(37): Xaa is C or S
  MOD_RES (14)..(15)..(16)..(17)..(18): Xaa is A or G
  MOD_RES (19)..(20)..(21)..(22): Xaa is A or G or is absent

SEQ ID NO: 81439 - protein, 41 aa, Artificial Sequence; identical to SEQ ID NO: 9654
  GFR-binding peptide
  MOD_RES (4)..(5)..(39)..(41): Xaa is C or S
  MOD_RES (19)..(20)..(21)..(22)..(23): Xaa is A or G
  MOD_RES (24)..(25)..(26)..(27): Xaa is A or G or is absent

SEQ ID NO: 81440 - protein, 35 aa, Artificial Sequence
  GFR-binding peptide
  MOD_RES (2)..(3)..(34): Xaa is C or S
TXXAPVKTSAISMLYLDNGRVLLLKNYQMIVEEXG

SEQ ID NO: 81441 - protein, 41 aa, Artificial Sequence; identical to SEQ ID NO: 9655
  GFR-binding peptide
  MOD_RES (6)..(7)..(41): Xaa is C or S
  MOD_RES (21)..(22)..(23)..(24)..(25): Xaa is A or G
  MOD_RES (26)..(27)..(28)..(29): Xaa is A or G or is absent

SEQ ID NO: 81442 - protein, 37 aa, Artificial Sequence; identical to SEQ ID NO: 9656
  GFR-binding peptide
  MOD_RES (1)..(2)..(34)..(36): Xaa is C or S

SEQ ID NO: 81443 - protein, 32 aa, Artificial Sequence; identical to SEQ ID NO: 15144
  GFR-binding peptide
  MOD_RES (32)..(32): Xaa is C or S

SEQ ID NO: 81444 - protein, 35 aa, Artificial Sequence
  GFR-binding peptide
  MOD_RES (1)..(32)..(34): Xaa is C or S
XAPVKTSAISMLYLDNGRVLLLKNYQMIVEEXGXL

SEQ ID NO: 81445 - protein, 44 aa, Artificial Sequence; identical to SEQ ID NO: 9659
  GFR-binding peptide
  MOD_RES (6)..(7)..(42)..(44): Xaa is C or S
  MOD_RES (21)..(22)..(23)..(24)..(25): Xaa is A or G
  MOD_RES (26)..(27)..(28)..(29): Xaa is A or G or is absent

SEQ ID NO: 81446 - protein, 33 aa, Artificial Sequence; identical to SEQ ID NO: 31061
  GFR-binding peptide
  MOD_RES (1)..(2): Xaa is C or S

SEQ ID NO: 81447 - protein, 38 aa, Artificial Sequence; identical to SEQ ID NO: 29130
  GFR-binding peptide
  MOD_RES (2)..(3)..(37): Xaa is C or S
  MOD_RES (17)..(18)..(19)..(20)..(21): Xaa is A or G
  MOD_RES (22)..(23)..(24)..(25): Xaa is A or G or is absent

SEQ ID NO: 81448 - protein, 36 aa, Artificial Sequence; identical to SEQ ID NO: 9661
  GFR-binding peptide
  MOD_RES (3)..(4)..(36): Xaa is C or S

SEQ ID NO: 81449 - protein, 37 aa, Artificial Sequence; identical to SEQ ID NO: 68517
  GFR-binding peptide
  MOD_RES (2)..(3)..(35)..(37): Xaa is C or S

SEQ ID NO: 81450 - protein, 41 aa, Artificial Sequence; identical to SEQ ID NO: 29133
  GFR-binding peptide
  MOD_RES (5)..(6)..(40): Xaa is C or S
  MOD_RES (20)..(21)..(22)..(23)..(24): Xaa is A or G
  MOD_RES (25)..(26)..(27)..(28): Xaa is A or G or is absent

SEQ ID NO: 81451 - protein, 41 aa, Artificial Sequence; identical to SEQ ID NO: 7838
  GFR-binding peptide
  MOD_RES (6)..(7): Xaa is C or S
  MOD_RES (21)..(22)..(23)..(24)..(25): Xaa is A or G
  MOD_RES (26)..(27)..(28)..(29): Xaa is A or G or is absent

SEQ ID NO: 81452 - protein, 39 aa, Artificial Sequence
  GFR-binding peptide
  MOD_RES (5)..(6)..(37)..(39): Xaa is C or S
VPSTXXAPVKTSAISMLYLDNGRVLLLKNYQMIVEEXGX

SEQ ID NO: 81453 - protein, 35 aa, Artificial Sequence; identical to SEQ ID NO: 7839
  GFR-binding peptide
  MOD_RES (2)..(3): Xaa is C or S
  MOD_RES (17)..(18)..(19)..(20)..(21): Xaa is A or G
  MOD_RES (22)..(23)..(24)..(25): Xaa is A or G or is absent

SEQ ID NO: 81454 - protein, 39 aa, Artificial Sequence; identical to SEQ ID NO: 9665
  GFR-binding peptide
  MOD_RES (4)..(5)..(37)..(39): Xaa is C or S

SEQ ID NO: 81455 - protein, 38 aa, Artificial Sequence; identical to SEQ ID NO: 7844
  GFR-binding peptide
  MOD_RES (4)..(5): Xaa is C or S
  MOD_RES (19)..(20)..(21)..(22)..(23): Xaa is A or G
  MOD_RES (24)..(25)..(26)..(27): Xaa is A or G or is absent

SEQ ID NO: 81456 - protein, 30 aa, Artificial Sequence; identical to SEQ ID NO: 7845
  GFR-binding peptide

SEQ ID NO: 81457 - protein, 38 aa, Artificial Sequence; identical to SEQ ID NO: 7846
  GFR-binding peptide
  MOD_RES (1)..(2)..(36)..(38): Xaa is C or S
  MOD_RES (16)..(17)..(18)..(19)..(20): Xaa is A or G
  MOD_RES (21)..(22)..(23)..(24): Xaa is A or G or is absent

SEQ ID NO: 81458 - protein, 36 aa, Artificial Sequence; identical to SEQ ID NO: 7847
  GFR-binding peptide
  MOD_RES (3)..(4): Xaa is C or S
  MOD_RES (18)..(19)..(20)..(21)..(22): Xaa is A or G
  MOD_RES (23)..(24)..(25)..(26): Xaa is A or G or is absent

SEQ ID NO: 81459 - protein, 43 aa, Artificial Sequence; identical to SEQ ID NO: 9667
  GFR-binding peptide
  MOD_RES (6)..(7)..(41)..(43): Xaa is C or S
  MOD_RES (21)..(22)..(23)..(24)..(25): Xaa is A or G
  MOD_RES (26)..(27)..(28)..(29): Xaa is A or G or is absent

SEQ ID NO: 81460 - protein, 43 aa, Artificial Sequence; identical to SEQ ID NO: 9668
  GFR-binding peptide
  MOD_RES (5)..(6)..(40)..(42): Xaa is C or S
  MOD_RES (20)..(21)..(22)..(23)..(24): Xaa is A or G
  MOD_RES (25)..(26)..(27)..(28): Xaa is A or G or is absent

SEQ ID NO: 81461 - protein, 35 aa, Artificial Sequence; identical to SEQ ID NO: 9669
  GFR-binding peptide
  MOD_RES (4)..(5): Xaa is C or S

SEQ ID NO: 81462 - protein, 40 aa, Artificial Sequence; identical to SEQ ID NO: 7854
  GFR-binding peptide
  MOD_RES (6)..(7)..(38)..(40): Xaa is C or S

SEQ ID NO: 81463 - protein, 38 aa, Artificial Sequence; identical to SEQ ID NO: 7855
  GFR-binding peptide
  MOD_RES (5)..(6)..(38): Xaa is C or S

SEQ ID NO: 81464 - protein, 34 aa, Artificial Sequence; identical to SEQ ID NO: 7856
  GFR-binding peptide
  MOD_RES (1)..(34): Xaa is C or S
  MOD_RES (15)..(16)..(17)..(18)..(19): Xaa is A or G
  MOD_RES (20)..(21)..(22)..(23): Xaa is A or G or is absent

SEQ ID NO: 81465 - protein, 38 aa, Artificial Sequence; identical to SEQ ID NO: 7857
  GFR-binding peptide
  MOD_RES (6)..(7)..(38): Xaa is C or S

SEQ ID NO: 81466 - protein, 37 aa, Artificial Sequence; identical to SEQ ID NO: 7858
  GFR-binding peptide
  MOD_RES (1)..(36): Xaa is C or S
  MOD_RES (15)..(16)..(17)..(18)..(19): Xaa is A or G
  MOD_RES (20)..(21)..(22)..(23): Xaa is A or G or is absent

SEQ ID NO: 81467 - protein, 36 aa, Artificial Sequence; identical to SEQ ID NO: 7859
  GFR-binding peptide
  MOD_RES (1)..(2)..(36): Xaa is C or S
  MOD_RES (16)..(17)..(18)..(19)..(20): Xaa is A or G
  MOD_RES (21)..(22)..(23)..(24): Xaa is A or G or is absent

SEQ ID NO: 81468 - protein, 39 aa, Artificial Sequence; identical to SEQ ID NO: 7860
  GFR-binding peptide
  MOD_RES (5)..(6)..(37)..(39): Xaa is C or S

SEQ ID NO: 81469 - protein, 38 aa, Artificial Sequence; identical to SEQ ID NO: 7861
  GFR-binding peptide
  MOD_RES (3)..(4)..(37): Xaa is C or S

SEQ ID NO: 81470 - protein, 39 aa, Artificial Sequence; identical to SEQ ID NO: 9676
  GFR-binding peptide
  MOD_RES (2)..(3)..(36)..(38): Xaa is C or S
  MOD_RES (17)..(18)..(19)..(20)..(21): Xaa is A or G
  MOD_RES (22)..(23)..(24)..(25): Xaa is A or G or is absent

SEQ ID NO: 81471 - protein, 35 aa, Artificial Sequence; identical to SEQ ID NO: 9679
  GFR-binding peptide
  MOD_RES (2)..(3): Xaa is C or S
  MOD_RES (17)..(18)..(19)..(20)..(21): Xaa is A or G
  MOD_RES (22)..(23)..(24)..(25): Xaa is A or G or is absent

SEQ ID NO: 81472 - protein, 36 aa, Artificial Sequence; identical to SEQ ID NO: 9680
  GFR-binding peptide
  MOD_RES (3)..(3): Xaa is C or S
  MOD_RES (17)..(18)..(19)..(20)..(21): Xaa is A or G
  MOD_RES (22)..(23)..(24)..(25): Xaa is A or G or is absent

SEQ ID NO: 81473 - protein, 34 aa, Artificial Sequence; identical to SEQ ID NO: 7863
  GFR-binding peptide
  MOD_RES (3)..(4): Xaa is C or S

SEQ ID NO: 81474 - protein, 35 aa, Artificial Sequence
  GFR-binding peptide
  MOD_RES (4)..(5): Xaa is C or S
SKAXXVPTKLSAISILYLDKGVVTYLKNYQGMAVS

SEQ ID NO: 81475 - protein, 42 aa, Artificial Sequence; identical to SEQ ID NO: 7865
  GFR-binding peptide
  MOD_RES (5)..(6)..(40)..(42): Xaa is C or S
  MOD_RES (20)..(21)..(22)..(23)..(24): Xaa is A or G
  MOD_RES (25)..(26)..(27)..(28): Xaa is A or G or is absent

SEQ ID NO: 81476 - protein, 41 aa, Artificial Sequence; identical to SEQ ID NO: 7866
  GFR-binding peptide
  MOD_RES (5)..(6)..(40): Xaa is C or S
  MOD_RES (20)..(21)..(22)..(23)..(24): Xaa is A or G
  MOD_RES (25)..(26)..(27)..(28): Xaa is A or G or is absent

SEQ ID NO: 81477 - protein, 35 aa, Artificial Sequence; identical to SEQ ID NO: 7868
  GFR-binding peptide
  MOD_RES (2)..(3): Xaa is C or S
  MOD_RES (17)..(18)..(19)..(20)..(21): Xaa is A or G
  MOD_RES (22)..(23)..(24)..(25): Xaa is A or G or is absent

SEQ ID NO: 81478 - protein, 34 aa, Artificial Sequence
  GFR-binding peptide
  MOD_RES (34)..(34): Xaa is C or S
  MOD_RES (14)..(15)..(16)..(17)..(18): Xaa is A or G
  MOD_RES (19)..(20)..(21)..(22): Xaa is A or G or is absent
VPTKLSAISILYLXXXXXXXXXLKNYQGMAVSEX

SEQ ID NO: 81479 - protein, 36 aa, Artificial Sequence; identical to SEQ ID NO: 9683
  GFR-binding peptide
  MOD_RES (5)..(6): Xaa is C or S

SEQ ID NO: 81480 - protein, 38 aa, Artificial Sequence; identical to SEQ ID NO: 16967
  GFR-binding peptide
  MOD_RES (1)..(2)..(36)..(38): Xaa is C or S
  MOD_RES (16)..(17)..(18)..(19)..(20): Xaa is A or G
  MOD_RES (21)..(22)..(23)..(24): Xaa is A or G or is absent

SEQ ID NO: 81481 - protein, 34 aa, Artificial Sequence; identical to SEQ ID NO: 9684
  GFR-binding peptide
  MOD_RES (1)..(2)..(33): Xaa is C or S

SEQ ID NO: 81482 - protein, 36 aa, Artificial Sequence; identical to SEQ ID NO: 7874
  GFR-binding peptide
  MOD_RES (1)..(2)..(33)..(35): Xaa is C or S

SEQ ID NO: 81483 - protein, 36 aa, Artificial Sequence; identical to SEQ ID NO: 7875
  GFR-binding peptide
  MOD_RES (3)..(4)..(36): Xaa is C or S

SEQ ID NO: 81484 - protein, 36 aa, Artificial Sequence
  GFR-binding peptide
  MOD_RES (34)..(36): Xaa is C or S
  MOD_RES (14)..(15)..(16)..(17)..(18): Xaa is A or G
  MOD_RES (19)..(20)..(21)..(22): Xaa is A or G or is absent
TPTKMSAISMLYLXXXXXXXXXLKNYQGMVVDRXGX

SEQ ID NO: 81485 - protein, 40 aa, Artificial Sequence; identical to SEQ ID NO: 9686
  GFR-binding peptide
  MOD_RES (5)..(37)..(39): Xaa is C or S

SEQ ID NO: 81486 - protein, 36 aa, Artificial Sequence; identical to SEQ ID NO: 7877
  GFR-binding peptide
  MOD_RES (5)..(6): Xaa is C or S

SEQ ID NO: 81487 - protein, 41 aa, Artificial Sequence
  GFR-binding peptide
  MOD_RES (6)..(7)..(39)..(41): Xaa is C or S
KASKAXXVPTKLSAISILYLDKGVVTYLKNYQGMAVSEXGX

SEQ ID NO: 81488 - protein, 40 aa, Artificial Sequence
  GFR-binding peptide
  MOD_RES (4)..(5)..(39): Xaa is C or S
  MOD_RES (19)..(20)..(21)..(22)..(23): Xaa is A or G
  MOD_RES (24)..(25)..(26)..(27): Xaa is A or G or is absent
AGPXXTPTKMSAISMLYLXXXXXXXXXLKNYQGMVVDRXG

SEQ ID NO: 81489 - protein, 40 aa, Artificial Sequence; identical to SEQ ID NO: 7878
  GFR-binding peptide
  MOD_RES (1)..(2)..(37)..(39): Xaa is C or S
  MOD_RES (16)..(17)..(18)..(19)..(20): Xaa is A or G
  MOD_RES (21)..(22)..(23)..(24): Xaa is A or G or is absent

SEQ ID NO: 81490 - protein, 36 aa, Artificial Sequence
  GFR-binding peptide
  MOD_RES (5)..(6): Xaa is C or S
IPEPXXVPEKMSAISILYLDENKNVVLKNYQNMTVE

SEQ ID NO: 81491 - protein, 35 aa, Artificial Sequence; identical to SEQ ID NO: 7881
  GFR-binding peptide
  MOD_RES (4)..(5): Xaa is C or S

SEQ ID NO: 81492 - protein, 37 aa, Artificial Sequence; identical to SEQ ID NO: 9688
  GFR-binding peptide
  MOD_RES (6)..(7): Xaa is C or S

SEQ ID NO: 81493 - protein, 41 aa, Artificial Sequence; identical to SEQ ID NO: 9689
  GFR-binding peptide
  MOD_RES (6)..(7)..(40): Xaa is C or S
  MOD_RES (21)..(22)..(23)..(24)..(25): Xaa is A or G
  MOD_RES (26)..(27)..(28)..(29): Xaa is A or G or is absent

SEQ ID NO: 81494 - protein, 37 aa, Artificial Sequence; identical to SEQ ID NO: 7884
  GFR-binding peptide
  MOD_RES (5)..(6)..(37): Xaa is C or S

SEQ ID NO: 81495 - protein, 39 aa, Artificial Sequence; identical to SEQ ID NO: 7886
  GFR-binding peptide
  MOD_RES (2)..(3)..(36)..(38): Xaa is C or S

SEQ ID NO: 81496 - protein, 39 aa, Artificial Sequence
  GFR-binding peptide
  MOD_RES (6)..(7)..(39): Xaa is C or S
KASKAXXVPTKLSAISILYLDKGVVTYLKNYQGMAVSEX

SEQ ID NO: 81497 - protein, 33 aa, Artificial Sequence
  GFR-binding peptide
  MOD_RES (1)..(33): Xaa is C or S
XVPTKLSAISILYLDKGVVTYLKNYQGMAVSEX

SEQ ID NO: 81498 - protein, 37 aa, Artificial Sequence; identical to SEQ ID NO: 7888
  GFR-binding peptide
  MOD_RES (4)..(5)..(37): Xaa is C or S

SEQ ID NO: 81499 - protein, 37 aa, Artificial Sequence; identical to SEQ ID NO: 9690
  GFR-binding peptide
  MOD_RES (4)..(5): Xaa is C or S
  MOD_RES (19)..(20)..(21)..(22)..(23): Xaa is A or G
  MOD_RES (24)..(25)..(26)..(27): Xaa is A or G or is absent

SEQ ID NO: 81500 - protein, 41 aa, Artificial Sequence; identical to SEQ ID NO: 7889
  GFR-binding peptide
  MOD_RES (4)..(5)..(38)..(40): Xaa is C or S
  MOD_RES (19)..(20)..(21)..(22)..(23): Xaa is A or G
  MOD_RES (24)..(25)..(26)..(27): Xaa is A or G or is absent

SEQ ID NO: 81501 - protein, 37 aa, Artificial Sequence; identical to SEQ ID NO: 66794
  GFR-binding peptide
  MOD_RES (6)..(7): Xaa is C or S

SEQ ID NO: 81502 - protein, 36 aa, Artificial Sequence
  GFR-binding peptide
  MOD_RES (1)..(2)..(34)..(36): Xaa is C or S
XXVPTKLSAISILYLDKGVVTYLKNYQGMAVSEXGX

SEQ ID NO: 81503 - protein, 37 aa, Artificial Sequence
  GFR-binding peptide
  MOD_RES (1)..(2)..(36): Xaa is C or S
  MOD_RES (16)..(17)..(18)..(19)..(20): Xaa is A or G
  MOD_RES (21)..(22)..(23)..(24): Xaa is A or G or is absent
XXVPTKLSAISILYLXXXXXXXXXLKNYQGMAVSEXG

SEQ ID NO: 81504 - protein, 37 aa, Artificial Sequence; identical to SEQ ID NO: 7890
  GFR-binding peptide
  MOD_RES (1)..(2)..(36): Xaa is C or S
  MOD_RES (16)..(17)..(18)..(19)..(20): Xaa is A or G
  MOD_RES (21)..(22)..(23)..(24): Xaa is A or G or is absent

SEQ ID NO: 81505 - protein, 35 aa, Artificial Sequence; identical to SEQ ID NO: 9691
  GFR-binding peptide
  MOD_RES (1)..(2)..(35): Xaa is C or S
  MOD_RES (16)..(17)..(18)..(19)..(20): Xaa is A or G
  MOD_RES (21)..(22)..(23)..(24): Xaa is A or G or is absent

SEQ ID NO: 81506 - protein, 35 aa, Artificial Sequence
  GFR-binding peptide
  MOD_RES (2)..(3): Xaa is C or S
  MOD_RES (17)..(18)..(19)..(20)..(21): Xaa is A or G
  MOD_RES (22)..(23)..(24)..(25): Xaa is A or G or is absent
PXXVPEKMSAISILYLXXXXXXXXXLKNYQNMTVE

SEQ ID NO: 81507 - protein, 42 aa, Artificial Sequence; identical to SEQ ID NO: 9692
  GFR-binding peptide
  MOD_RES (6)..(7)..(40)..(42): Xaa is C or S

SEQ ID NO: 81508 - protein, 40 aa, Artificial Sequence; identical to SEQ ID NO: 7894
  GFR-binding peptide
  MOD_RES (3)..(4)..(39): Xaa is C or S
  MOD_RES (18)..(19)..(20)..(21)..(22): Xaa is A or G
  MOD_RES (23)..(24)..(25)..(26): Xaa is A or G or is absent

SEQ ID NO: 81509 - protein, 35 aa, Artificial Sequence; identical to SEQ ID NO: 29172
  GFR-binding peptide
  MOD_RES (34)..(34): Xaa is C or S
  MOD_RES (14)..(15)..(16)..(17)..(18): Xaa is A or G
  MOD_RES (19)..(20)..(21)..(22): Xaa is A or G or is absent

SEQ ID NO: 81510 - protein, 40 aa, Artificial Sequence; identical to SEQ ID NO: 7898
  GFR-binding peptide
  MOD_RES (6)..(7)..(40): Xaa is C or S
  MOD_RES (21)..(22)..(23)..(24)..(25): Xaa is A or G
  MOD_RES (26)..(27)..(28)..(29): Xaa is A or G or is absent

SEQ ID NO: 81511 - protein, 34 aa, Artificial Sequence; identical to SEQ ID NO: 7901
  GFR-binding peptide
  MOD_RES (34)..(34): Xaa is C or S
  MOD_RES (14)..(15)..(16)..(17)..(18): Xaa is A or G
  MOD_RES (19)..(20)..(21)..(22): Xaa is A or G or is absent

SEQ ID NO: 81512 - protein, 30 aa, Artificial Sequence; identical to SEQ ID NO: 9695
  GFR-binding peptide

SEQ ID NO: 81513 - protein, 32 aa, Artificial Sequence; identical to SEQ ID NO: 66807
  GFR-binding peptide
  MOD_RES (14)..(15)..(16)..(17)..(18): Xaa is A or G
  MOD_RES (19)..(20)..(21)..(22): Xaa is A or G or is absent

SEQ ID NO: 81514 - protein, 37 aa, Artificial Sequence; identical to SEQ ID NO: 16987
  GFR-binding peptide
  MOD_RES (5)..(6): Xaa is C or S

SEQ ID NO: 81515 - protein, 42 aa, Artificial Sequence; identical to SEQ ID NO: 9697
  GFR-binding peptide
  MOD_RES (5)..(6)..(39)..(41): Xaa is C or S

SEQ ID NO: 81516 - protein, 37 aa, Artificial Sequence; identical to SEQ ID NO: 7903
  GFR-binding peptide
  MOD_RES (1)..(2)..(34)..(36): Xaa is C or S

SEQ ID NO: 81517 - protein, 44 aa, Artificial Sequence; identical to SEQ ID NO: 9699
  GFR-binding peptide
  MOD_RES (6)..(7)..(41)..(43): Xaa is C or S
  MOD_RES (21)..(22)..(23)..(24)..(25): Xaa is A or G
  MOD_RES (26)..(27)..(28)..(29): Xaa is A or G or is absent

SEQ ID NO: 81518 - protein, 38 aa, Artificial Sequence; identical to SEQ ID NO: 66808
  GFR-binding peptide
  MOD_RES (2)..(3)..(37): Xaa is C or S
  MOD_RES (17)..(18)..(19)..(20)..(21): Xaa is A or G
  MOD_RES (22)..(23)..(24)..(25): Xaa is A or G or is absent

SEQ ID NO: 81519 - protein, 37 aa, Artificial Sequence; identical to SEQ ID NO: 9702
  GFR-binding peptide
  MOD_RES (4)..(5): Xaa is C or S
  MOD_RES (19)..(20)..(21)..(22)..(23): Xaa is A or G
  MOD_RES (24)..(25)..(26)..(27): Xaa is A or G or is absent

SEQ ID NO: 81520 - protein, 38 aa, Artificial Sequence; identical to SEQ ID NO: 31114
  GFR-binding peptide
  MOD_RES (2)..(3)..(35)..(37): Xaa is C or S

SEQ ID NO: 81521 - protein, 35 aa, Artificial Sequence
  GFR-binding peptide
  MOD_RES (1)..(34): Xaa is C or S
  MOD_RES (15)..(16)..(17)..(18)..(19): Xaa is A or G
  MOD_RES (20)..(21)..(22)..(23): Xaa is A or G or is absent
XAPVKTSAISMLYLXXXXXXXXXLKNYQMIVEEXG

SEQ ID NO: 81522 - protein, 40 aa, Artificial Sequence; identical to SEQ ID NO: 7904
  GFR-binding peptide
  MOD_RES (6)..(7)..(40): Xaa is C or S
  MOD_RES (21)..(22)..(23)..(24)..(25): Xaa is A or G
  MOD_RES (26)..(27)..(28)..(29): Xaa is A or G or is absent

SEQ ID NO: 81523 - protein, 35 aa, Artificial Sequence; identical to SEQ ID NO: 7905
  GFR-binding peptide
  MOD_RES (1)..(33)..(35): Xaa is C or S

SEQ ID NO: 81524 - protein, 38 aa, Artificial Sequence; identical to SEQ ID NO: 9704
  GFR-binding peptide
  MOD_RES (2)..(3)..(38): Xaa is C or S
  MOD_RES (17)..(18)..(19)..(20)..(21): Xaa is A or G
  MOD_RES (22)..(23)..(24)..(25): Xaa is A or G or is absent

SEQ ID NO: 81525 - protein, 40 aa, Artificial Sequence
  GFR-binding peptide
  MOD_RES (4)..(5)..(37)..(39): Xaa is C or S
SKAXXVPTKLSAISILYLDKGVVTYLKNYQGMAVSEXGXR

SEQ ID NO: 81526 - protein, 38 aa, Artificial Sequence
  GFR-binding peptide
  MOD_RES (6)..(7): Xaa is C or S
GIPEPXXVPEKMSAISILYLDENKNVVLKNYQNMTVES

SEQ ID NO: 81527 - protein, 33 aa, Artificial Sequence; identical to SEQ ID NO: 9706
  GFR-binding peptide
  MOD_RES (31)..(33): Xaa is C or S

SEQ ID NO: 81528 - protein, 39 aa, Artificial Sequence; identical to SEQ ID NO: 9708
  GFR-binding peptide
  MOD_RES (6)..(7): Xaa is C or S
  MOD_RES (21)..(22)..(23)..(24)..(25): Xaa is A or G
  MOD_RES (26)..(27)..(28)..(29): Xaa is A or G or is absent

SEQ ID NO: 81529 - protein, 40 aa, Artificial Sequence; identical to SEQ ID NO: 9709
  GFR-binding peptide
  MOD_RES (5)..(6)..(39): Xaa is C or S
  MOD_RES (20)..(21)..(22)..(23)..(24): Xaa is A or G
  MOD_RES (25)..(26)..(27)..(28): Xaa is A or G or is absent

SEQ ID NO: 81530 - protein, 36 aa, Artificial Sequence; identical to SEQ ID NO: 7909
  GFR-binding peptide
  MOD_RES (5)..(6): Xaa is C or S

SEQ ID NO: 81531 - protein, 37 aa, Artificial Sequence; identical to SEQ ID NO: 16999
  GFR-binding peptide
  MOD_RES (1)..(35)..(37): Xaa is C or S
  MOD_RES (15)..(16)..(17)..(18)..(19): Xaa is A or G
  MOD_RES (20)..(21)..(22)..(23): Xaa is A or G or is absent

SEQ ID NO: 81532 - protein, 39 aa, Artificial Sequence; identical to SEQ ID NO: 7911
  GFR-binding peptide
  MOD_RES (4)..(36)..(38): Xaa is C or S

SEQ ID NO: 81533 - protein, 38 aa, Artificial Sequence; identical to SEQ ID NO: 7912
  GFR-binding peptide
  MOD_RES (2)..(3)..(37): Xaa is C or S
  MOD_RES (17)..(18)..(19)..(20)..(21): Xaa is A or G
  MOD_RES (22)..(23)..(24)..(25): Xaa is A or G or is absent

SEQ ID NO: 81534 - protein, 34 aa, Artificial Sequence; identical to SEQ ID NO: 15206
  GFR-binding peptide
  MOD_RES (2)..(3): Xaa is C or S

SEQ ID NO: 81535 - protein, 35 aa, Artificial Sequence; identical to SEQ ID NO: 9713
  GFR-binding peptide
  MOD_RES (4)..(5): Xaa is C or S

SEQ ID NO: 81536 - protein, 37 aa, Artificial Sequence; identical to SEQ ID NO: 9716
  GFR-binding peptide
  MOD_RES (2)..(3): Xaa is C or S
  MOD_RES (17)..(18)..(19)..(20)..(21): Xaa is A or G
  MOD_RES (22)..(23)..(24)..(25): Xaa is A or G or is absent

SEQ ID NO: 81537 - protein, 39 aa, Artificial Sequence; identical to SEQ ID NO: 7920
  GFR-binding peptide
  MOD_RES (1)..(2)..(36)..(38): Xaa is C or S
  MOD_RES (16)..(17)..(18)..(19)..(20): Xaa is A or G
  MOD_RES (21)..(22)..(23)..(24): Xaa is A or G or is absent

SEQ ID NO: 81538 - protein, 34 aa, Artificial Sequence; identical to SEQ ID NO: 9718
  GFR-binding peptide
  MOD_RES (2)..(3): Xaa is C or S

SEQ ID NO: 81539 - protein, 35 aa, Artificial Sequence; identical to SEQ ID NO: 7921
  GFR-binding peptide
  MOD_RES (34)..(34): Xaa is C or S
  MOD_RES (14)..(15)..(16)..(17)..(18): Xaa is A or G
  MOD_RES (19)..(20)..(21)..(22): Xaa is A or G or is absent

SEQ ID NO: 81540 - protein, 34 aa, Artificial Sequence; identical to SEQ ID NO: 7922
  GFR-binding peptide
  MOD_RES (1)..(2): Xaa is C or S

SEQ ID NO: 81541 - protein, 33 aa, Artificial Sequence; identical to SEQ ID NO: 31134
  GFR-binding peptide
  MOD_RES (2)..(3): Xaa is C or S

SEQ ID NO: 81542 - protein, 35 aa, Artificial Sequence; identical to SEQ ID NO: 9720
  GFR-binding peptide
  MOD_RES (1)..(34): Xaa is C or S
  MOD_RES (15)..(16)..(17)..(18)..(19): Xaa is A or G
  MOD_RES (20)..(21)..(22)..(23): Xaa is A or G or is absent

SEQ ID NO: 81543 - protein, 37 aa, Artificial Sequence; identical to SEQ ID NO: 9721
  GFR-binding peptide
  MOD_RES (4)..(5)..(37): Xaa is C or S

SEQ ID NO: 81544 - protein, 35 aa, Artificial Sequence; identical to SEQ ID NO: 7923
  GFR-binding peptide
  MOD_RES (3)..(4): Xaa is C or S

SEQ ID NO: 81545 - protein, 34 aa, Artificial Sequence; identical to SEQ ID NO: 9724
  GFR-binding peptide
  MOD_RES (1)..(2): Xaa is C or S
  MOD_RES (16)..(17)..(18)..(19)..(20): Xaa is A or G
  MOD_RES (21)..(22)..(23)..(24): Xaa is A or G or is absent

SEQ ID NO: 81546 - protein, 38 aa, Artificial Sequence; identical to SEQ ID NO: 7925
  GFR-binding peptide
  MOD_RES (1)..(35)..(37): Xaa is C or S
  MOD_RES (15)..(16)..(17)..(18)..(19): Xaa is A or G
  MOD_RES (20)..(21)..(22)..(23): Xaa is A or G or is absent

SEQ ID NO: 81547 - protein, 35 aa, Artificial Sequence; identical to SEQ ID NO: 7926
  GFR-binding peptide
  MOD_RES (1)..(35): Xaa is C or S
  MOD_RES (15)..(16)..(17)..(18)..(19): Xaa is A or G
  MOD_RES (20)..(21)..(22)..(23): Xaa is A or G or is absent

SEQ ID NO: 81548 - protein, 38 aa, Artificial Sequence; identical to SEQ ID NO: 7928
  GFR-binding peptide
  MOD_RES (2)..(36)..(38): Xaa is C or S
  MOD_RES (16)..(17)..(18)..(19)..(20): Xaa is A or G
  MOD_RES (21)..(22)..(23)..(24): Xaa is A or G or is absent

SEQ ID NO: 81549 - protein, 38 aa, Artificial Sequence; identical to SEQ ID NO: 7932
  GFR-binding peptide
  MOD_RES (3)..(4)..(35)..(37): Xaa is C or S

SEQ ID NO: 81550 - protein, 30 aa, Artificial Sequence; identical to SEQ ID NO: 9729
  GFR-binding peptide

SEQ ID NO: 81551 - protein, 40 aa, Artificial Sequence; identical to SEQ ID NO: 9731
  GFR-binding peptide
  MOD_RES (6)..(7)..(39): Xaa is C or S

SEQ ID NO: 81552 - protein, 37 aa, Artificial Sequence; identical to SEQ ID NO: 9733
  GFR-binding peptide
  MOD_RES (3)..(4)..(35)..(37): Xaa is C or S

SEQ ID NO: 81553 - protein, 34 aa, Artificial Sequence
  GFR-binding peptide
  MOD_RES (32)..(34): Xaa is C or S
VPEKMSAISILYLDENKNVVLKNYQNMTVESXAX

SEQ ID NO: 81554 - protein, 40 aa, Artificial Sequence; identical to SEQ ID NO: 9735
  GFR-binding peptide
  MOD_RES (5)..(6)..(40): Xaa is C or S
  MOD_RES (20)..(21)..(22)..(23)..(24): Xaa is A or G
  MOD_RES (25)..(26)..(27)..(28): Xaa is A or G or is absent

SEQ ID NO: 81555 - protein, 37 aa, Artificial Sequence; identical to SEQ ID NO: 9738
  GFR-binding peptide
  MOD_RES (4)..(5)..(37): Xaa is C or S

SEQ ID NO: 81556 - protein, 38 aa, Artificial Sequence; identical to SEQ ID NO: 7934
  GFR-binding peptide
  MOD_RES (6)..(7)..(38): Xaa is C or S

SEQ ID NO: 81557 - protein, 37 aa, Artificial Sequence
  GFR-binding peptide
  MOD_RES (2)..(3)..(35)..(37): Xaa is C or S
AXXVPTKLSAISILYLDKGVVTYLKNYQGMAVSEXGX

SEQ ID NO: 81558 - protein, 33 aa, Artificial Sequence; identical to SEQ ID NO: 15228
  GFR-binding peptide
  MOD_RES (32)..(32): Xaa is C or S

SEQ ID NO: 81559 - protein, 34 aa, Artificial Sequence; identical to SEQ ID NO: 7937
  GFR-binding peptide
  MOD_RES (2)..(3): Xaa is C or S

SEQ ID NO: 81560 - protein, 34 aa, Artificial Sequence; identical to SEQ ID NO: 68586
  GFR-binding peptide
  MOD_RES (34)..(34): Xaa is C or S
  MOD_RES (14)..(15)..(16)..(17)..(18): Xaa is A or G
  MOD_RES (19)..(20)..(21)..(22): Xaa is A or G or is absent

SEQ ID NO: 81561 - protein, 40 aa, Artificial Sequence; identical to SEQ ID NO: 9741
  GFR-binding peptide
  MOD_RES (4)..(5)..(38)..(40): Xaa is C or S
  MOD_RES (19)..(20)..(21)..(22)..(23): Xaa is A or G
  MOD_RES (24)..(25)..(26)..(27): Xaa is A or G or is absent

SEQ ID NO: 81562 - protein, 37 aa, Artificial Sequence; identical to SEQ ID NO: 9745
  GFR-binding peptide
  MOD_RES (34)..(36): Xaa is C or S
  MOD_RES (14)..(15)..(16)..(17)..(18): Xaa is A or G
  MOD_RES (19)..(20)..(21)..(22): Xaa is A or G or is absent

SEQ ID NO: 81563 - protein, 40 aa, Artificial Sequence; identical to SEQ ID NO: 9748
  GFR-binding peptide
  MOD_RES (4)..(5)..(39): Xaa is C or S
  MOD_RES (19)..(20)..(21)..(22)..(23): Xaa is A or G
  MOD_RES (24)..(25)..(26)..(27): Xaa is A or G or is absent

SEQ ID NO: 81564 - protein, 35 aa, Artificial Sequence
  GFR-binding peptide
  MOD_RES (1)..(2)..(34): Xaa is C or S
XXVPTKLSAISILYLDKGVVTYLKNYQGMAVSEXG

SEQ ID NO: 81565 - protein, 33 aa, Artificial Sequence; identical to SEQ ID NO: 66844
  GFR-binding peptide
  MOD_RES (2)..(3): Xaa is C or S

SEQ ID NO: 81566 - protein, 36 aa, Artificial Sequence; identical to SEQ ID NO: 7945
  GFR-binding peptide
  MOD_RES (1)..(2): Xaa is C or S
  MOD_RES (16)..(17)..(18)..(19)..(20): Xaa is A or G
  MOD_RES (21)..(22)..(23)..(24): Xaa is A or G or is absent

SEQ ID NO: 81567 - protein, 40 aa, Artificial Sequence; identical to SEQ ID NO: 9752
  GFR-binding peptide
  MOD_RES (6)..(7)..(39): Xaa is C or S

SEQ ID NO: 81568 - protein, 36 aa, Artificial Sequence; identical to SEQ ID NO: 9753
  GFR-binding peptide
  MOD_RES (1)..(34)..(36): Xaa is C or S

SEQ ID NO: 81569 - protein, 40 aa, Artificial Sequence; identical to SEQ ID NO: 31170
  GFR-binding peptide
  MOD_RES (4)..(5)..(37)..(39): Xaa is C or S

SEQ ID NO: 81570 - protein, 35 aa, Artificial Sequence; identical to SEQ ID NO: 9754
  GFR-binding peptide
  MOD_RES (1)..(2)..(34): Xaa is C or S

SEQ ID NO: 81571 - protein, 39 aa, Artificial Sequence; identical to SEQ ID NO: 9755
  GFR-binding peptide
  MOD_RES (3)..(4)..(36)..(38): Xaa is C or S

SEQ ID NO: 81572 - protein, 38 aa, Artificial Sequence; identical to SEQ ID NO: 9756
  GFR-binding peptide
  MOD_RES (1)..(35)..(37): Xaa is C or S
  MOD_RES (15)..(16)..(17)..(18)..(19): Xaa is A or G
  MOD_RES (20)..(21)..(22)..(23): Xaa is A or G or is absent

SEQ ID NO: 81573 - protein, 35 aa, Artificial Sequence
  GFR-binding peptide
  MOD_RES (1)..(33)..(35): Xaa is C or S
XTPTKMSAISMLYLNDKQQIILKNYQGMVVDRXGX

SEQ ID NO: 81574 - protein, 41 aa, Artificial Sequence; identical to SEQ ID NO: 7948
  GFR-binding peptide
  MOD_RES (6)..(7)..(38)..(40): Xaa is C or S

SEQ ID NO: 81575 - protein, 38 aa, Artificial Sequence
  GFR-binding peptide
  MOD_RES (1)..(35)..(37): Xaa is C or S
  MOD_RES (15)..(16)..(17)..(18)..(19): Xaa is A or G
  MOD_RES (20)..(21)..(22)..(23): Xaa is A or G or is absent
XTPTKMSAISMLYLXXXXXXXXXLKNYQGMVVDRXGXS

SEQ ID NO: 81576 - protein, 32 aa, Artificial Sequence; identical to SEQ ID NO: 7949
  GFR-binding peptide
  MOD_RES (14)..(15)..(16)..(17)..(18): Xaa is A or G
  MOD_RES (19)..(20)..(21)..(22): Xaa is A or G or is absent

SEQ ID NO: 81577 - protein, 33 aa, Artificial Sequence; identical to SEQ ID NO: 58178
  GFR-binding peptide
  MOD_RES (1)..(2)..(33): Xaa is C or S

SEQ ID NO: 81578 - protein, 39 aa, Artificial Sequence; identical to SEQ ID NO: 31178
  GFR-binding peptide
  MOD_RES (1)..(2)..(36)..(38): Xaa is C or S
  MOD_RES (16)..(17)..(18)..(19)..(20): Xaa is A or G
  MOD_RES (21)..(22)..(23)..(24): Xaa is A or G or is absent

SEQ ID NO: 81579 - protein, 37 aa, Artificial Sequence; identical to SEQ ID NO: 7952
  GFR-binding peptide
  MOD_RES (1)..(35)..(37): Xaa is C or S
  MOD_RES (15)..(16)..(17)..(18)..(19): Xaa is A or G
  MOD_RES (20)..(21)..(22)..(23): Xaa is A or G or is absent

SEQ ID NO: 81580 - protein, 38 aa, Artificial Sequence; identical to SEQ ID NO: 7954
  GFR-binding peptide
  MOD_RES (2)..(3)..(37): Xaa is C or S
  MOD_RES (17)..(18)..(19)..(20)..(21): Xaa is A or G
  MOD_RES (22)..(23)..(24)..(25): Xaa is A or G or is absent

SEQ ID NO: 81581 - protein, 32 aa, Artificial Sequence; identical to SEQ ID NO: 9758
  GFR-binding peptide
  MOD_RES (1)..(1): Xaa is C or S

SEQ ID NO: 81582 - protein, 34 aa, Artificial Sequence; identical to SEQ ID NO: 31179
  GFR-binding peptide
  MOD_RES (32)..(34): Xaa is C or S

SEQ ID NO: 81583 - protein, 41 aa, Artificial Sequence; identical to SEQ ID NO: 17035
  GFR-binding peptide
  MOD_RES (5)..(6)..(40): Xaa is C or S
  MOD_RES (20)..(21)..(22)..(23)..(24): Xaa is A or G
  MOD_RES (25)..(26)..(27)..(28): Xaa is A or G or is absent

SEQ ID NO: 81584 - protein, 39 aa, Artificial Sequence; identical to SEQ ID NO: 15243
  GFR-binding peptide
  MOD_RES (2)..(3)..(37)..(39): Xaa is C or S
  MOD_RES (17)..(18)..(19)..(20)..(21): Xaa is A or G
  MOD_RES (22)..(23)..(24)..(25): Xaa is A or G or is absent

SEQ ID NO: 81585 - protein, 38 aa, Artificial Sequence
  GFR-binding peptide
  MOD_RES (6)..(7): Xaa is C or S
GSAGPXXTPTKMSAISMLYLNDKQQIILKNYQGMVVDR

SEQ ID NO: 81586 - protein, 41 aa, Artificial Sequence; identical to SEQ ID NO: 70283
  GFR-binding peptide
  MOD_RES (4)..(5)..(39)..(41): Xaa is C or S
  MOD_RES (19)..(20)..(21)..(22)..(23): Xaa is A or G
  MOD_RES (24)..(25)..(26)..(27): Xaa is A or G or is absent

SEQ ID NO: 81587 - protein, 32 aa, Artificial Sequence; identical to SEQ ID NO: 68609
  GFR-binding peptide
  MOD_RES (1)..(2): Xaa is C or S

SEQ ID NO: 81588 - protein, 35 aa, Artificial Sequence; identical to SEQ ID NO: 15246
  GFR-binding peptide
  MOD_RES (1)..(33)..(35): Xaa is C or S

SEQ ID NO: 81589 - protein, 33 aa, Artificial Sequence; identical to SEQ ID NO: 7958
  GFR-binding peptide
  MOD_RES (1)..(1): Xaa is C or S
  MOD_RES (15)..(16)..(17)..(18)..(19): Xaa is A or G
  MOD_RES (20)..(21)..(22)..(23): Xaa is A or G or is absent

SEQ ID NO: 81590 - protein, 35 aa, Artificial Sequence
  GFR-binding peptide
  MOD_RES (1)..(2)..(34): Xaa is C or S
XXVPARLSAISILYLDAANNVVLKNYQDMVVEAXG

SEQ ID NO: 81591 - protein, 35 aa, Artificial Sequence; identical to SEQ ID NO: 7961
  GFR-binding peptide
  MOD_RES (34)..(34): Xaa is C or S
  MOD_RES (14)..(15)..(16)..(17)..(18): Xaa is A or G
  MOD_RES (19)..(20)..(21)..(22): Xaa is A or G or is absent

SEQ ID NO: 81592 - protein, 37 aa, Artificial Sequence; identical to SEQ ID NO: 7962
  GFR-binding peptide
  MOD_RES (2)..(3)..(37): Xaa is C or S
  MOD_RES (17)..(18)..(19)..(20)..(21): Xaa is A or G
  MOD_RES (22)..(23)..(24)..(25): Xaa is A or G or is absent

SEQ ID NO: 81593 - protein, 37 aa, Artificial Sequence; identical to SEQ ID NO: 9764
  GFR-binding peptide
  MOD_RES (3)..(4)..(35)..(37): Xaa is C or S

SEQ ID NO: 81594 - protein, 38 aa, Artificial Sequence; identical to SEQ ID NO: 9766
  GFR-binding peptide
  MOD_RES (1)..(36)..(38): Xaa is C or S
  MOD_RES (15)..(16)..(17)..(18)..(19): Xaa is A or G
  MOD_RES (20)..(21)..(22)..(23): Xaa is A or G or is absent

SEQ ID NO: 81595 - protein, 35 aa, Artificial Sequence
  GFR-binding peptide
  MOD_RES (32)..(34): Xaa is C or S
VPTKLSAISILYLDKGVVTYLKNYQGMAVSEXGXR

SEQ ID NO: 81596 - protein, 39 aa, Artificial Sequence; identical to SEQ ID NO: 9769
  GFR-binding peptide
  MOD_RES (3)..(4)..(38): Xaa is C or S
  MOD_RES (18)..(19)..(20)..(21)..(22): Xaa is A or G
  MOD_RES (23)..(24)..(25)..(26): Xaa is A or G or is absent

SEQ ID NO: 81597 - protein, 32 aa, Artificial Sequence; identical to SEQ ID NO: 7966
  GFR-binding peptide
  MOD_RES (1)..(32): Xaa is C or S

SEQ ID NO: 81598 - protein, 35 aa, Artificial Sequence; identical to SEQ ID NO: 68612
  GFR-binding peptide
  MOD_RES (1)..(35): Xaa is C or S
  MOD_RES (15)..(16)..(17)..(18)..(19): Xaa is A or G
  MOD_RES (20)..(21)..(22)..(23): Xaa is A or G or is absent

SEQ ID NO: 81599 - protein, 35 aa, Artificial Sequence; identical to SEQ ID NO: 9770
  GFR-binding peptide
  MOD_RES (1)..(32)..(34): Xaa is C or S

SEQ ID NO: 81600 - protein, 31 aa, Artificial Sequence; identical to SEQ ID NO: 7967
  GFR-binding peptide
  MOD_RES (31)..(31): Xaa is C or S

SEQ ID NO: 81601 - protein, 37 aa, Artificial Sequence; identical to SEQ ID NO: 7969
  GFR-binding peptide
  MOD_RES (1)..(2)..(36): Xaa is C or S
  MOD_RES (16)..(17)..(18)..(19)..(20): Xaa is A or G
  MOD_RES (21)..(22)..(23)..(24): Xaa is A or G or is absent

SEQ ID NO: 81602 - protein, 33 aa, Artificial Sequence; identical to SEQ ID NO: 9775
  GFR-binding peptide
  MOD_RES (2)..(3): Xaa is C or S

SEQ ID NO: 81603 - protein, 40 aa, Artificial Sequence; identical to SEQ ID NO: 7972
  GFR-binding peptide
  MOD_RES (6)..(7)..(38)..(40): Xaa is C or S

SEQ ID NO: 81604 - protein, 33 aa, Artificial Sequence; identical to SEQ ID NO: 9776
  GFR-binding peptide
  MOD_RES (1)..(32): Xaa is C or S

SEQ ID NO: 81605 - protein, 42 aa, Artificial Sequence; identical to SEQ ID NO: 17047
  GFR-binding peptide
  MOD_RES (2)..(36): Xaa is C or S
  MOD_RES (14)..(15)..(16)..(17)..(18): Xaa is A or G
  MOD_RES (19)..(20)..(21)..(22): Xaa is A or G or is absent

SEQ ID NO: 81606 - protein, 34 aa, Artificial Sequence; identical to SEQ ID NO: 17846
  GFR-binding peptide
  MOD_RES (13)..(14)..(15)..(16)..(17): Xaa is A or G
  MOD_RES (18)..(19)..(20)..(21): Xaa is A or G or is absent

SEQ ID NO: 81607 - protein, 41 aa, Artificial Sequence; identical to SEQ ID NO: 50102
  GFR-binding peptide
  MOD_RES (2)..(4)..(35)..(36): Xaa is C or S

SEQ ID NO: 81608 - protein, 36 aa, Artificial Sequence; identical to SEQ ID NO: 17847
  GFR-binding peptide
  MOD_RES (13)..(14)..(15)..(16)..(17): Xaa is A or G
  MOD_RES (18)..(19)..(20)..(21): Xaa is A or G or is absent

SEQ ID NO: 81609 - protein, 39 aa, Artificial Sequence; identical to SEQ ID NO: 48856
  GFR-binding peptide
  MOD_RES (2)..(33)..(34): Xaa is C or S

SEQ ID NO: 81610 - protein, 40 aa, Artificial Sequence; identical to SEQ ID NO: 17849
  GFR-binding peptide
  MOD_RES (1)..(3)..(40): Xaa is C or S
  MOD_RES (16)..(17)..(18)..(19)..(20): Xaa is A or G
  MOD_RES (21)..(22)..(23)..(24): Xaa is A or G or is absent

SEQ ID NO: 81611 - protein, 34 aa, Artificial Sequence; identical to SEQ ID NO: 46304
  GFR-binding peptide
  MOD_RES (1)..(3)..(34): Xaa is C or S

SEQ ID NO: 81612 - protein, 36 aa, Artificial Sequence; identical to SEQ ID NO: 50116
  GFR-binding peptide
  MOD_RES (2)..(35)..(36): Xaa is C or S
  MOD_RES (13)..(14)..(15)..(16)..(17): Xaa is A or G
  MOD_RES (18)..(19)..(20)..(21): Xaa is A or G or is absent

SEQ ID NO: 81613 - protein, 32 aa, Artificial Sequence; identical to SEQ ID NO: 48862
  GFR-binding peptide
  MOD_RES (11)..(12)..(13)..(14)..(15): Xaa is A or G
  MOD_RES (16)..(17)..(18)..(19): Xaa is A or G or is absent

SEQ ID NO: 81614 - protein, 32 aa, Artificial Sequence; identical to SEQ ID NO: 17854
  GFR-binding peptide

SEQ ID NO: 81615 - protein, 36 aa, Artificial Sequence; identical to SEQ ID NO: 46314
  GFR-binding peptide
  MOD_RES (2)..(4): Xaa is C or S
  MOD_RES (15)..(16)..(17)..(18)..(19): Xaa is A or G
  MOD_RES (20)..(21)..(22)..(23): Xaa is A or G or is absent

SEQ ID NO: 81616 - protein, 41 aa, Artificial Sequence; identical to SEQ ID NO: 50125
  GFR-binding peptide
  MOD_RES (1)..(3)..(36)..(37): Xaa is C or S
  MOD_RES (14)..(15)..(16)..(17)..(18): Xaa is A or G
  MOD_RES (19)..(20)..(21)..(22): Xaa is A or G or is absent

SEQ ID NO: 81617 - protein, 39 aa, Artificial Sequence; identical to SEQ ID NO: 17056
  GFR-binding peptide
  MOD_RES (2)..(36): Xaa is C or S
  MOD_RES (14)..(15)..(16)..(17)..(18): Xaa is A or G
  MOD_RES (19)..(20)..(21)..(22): Xaa is A or G or is absent

SEQ ID NO: 81618 - protein, 41 aa, Artificial Sequence; identical to SEQ ID NO: 17859
  GFR-binding peptide
  MOD_RES (1)..(3)..(37): Xaa is C or S

SEQ ID NO: 81619 - protein, 36 aa, Artificial Sequence; identical to SEQ ID NO: 17860
  GFR-binding peptide
  MOD_RES (2)..(36): Xaa is C or S
  MOD_RES (14)..(15)..(16)..(17)..(18): Xaa is A or G
  MOD_RES (19)..(20)..(21)..(22): Xaa is A or G or is absent

SEQ ID NO: 81620 - protein, 36 aa, Artificial Sequence; identical to SEQ ID NO: 46321
  GFR-binding peptide
  MOD_RES (2)..(33)..(34): Xaa is C or S

SEQ ID NO: 81621 - protein, 32 aa, Artificial Sequence; identical to SEQ ID NO: 17862
  GFR-binding peptide

SEQ ID NO: 81622 - protein, 42 aa, Artificial Sequence; identical to SEQ ID NO: 17863
  GFR-binding peptide
  MOD_RES (1)..(38): Xaa is C or S

SEQ ID NO: 81623 - protein, 32 aa, Artificial Sequence; identical to SEQ ID NO: 17057
  GFR-binding peptide

SEQ ID NO: 81624 - protein, 42 aa, Artificial Sequence; identical to SEQ ID NO: 17058
  GFR-binding peptide
  MOD_RES (1)..(38): Xaa is C or S

SEQ ID NO: 81625 - protein, 40 aa, Artificial Sequence; identical to SEQ ID NO: 47612
  GFR-binding peptide
  MOD_RES (2)..(4)..(35)..(36): Xaa is C or S

SEQ ID NO: 81626 - protein, 34 aa, Artificial Sequence; identical to SEQ ID NO: 17059
  GFR-binding peptide
  MOD_RES (33)..(33): Xaa is C or S
  MOD_RES (11)..(12)..(13)..(14)..(15): Xaa is A or G
  MOD_RES (16)..(17)..(18)..(19): Xaa is A or G or is absent

SEQ ID NO: 81627 - protein, 35 aa, Artificial Sequence; identical to SEQ ID NO: 17060
  GFR-binding peptide
  MOD_RES (35)..(35): Xaa is C or S
  MOD_RES (11)..(12)..(13)..(14)..(15): Xaa is A or G
  MOD_RES (16)..(17)..(18)..(19): Xaa is A or G or is absent

SEQ ID NO: 81628 - protein, 43 aa, Artificial Sequence; identical to SEQ ID NO: 17062
  GFR-binding peptide
  MOD_RES (1)..(3)..(37): Xaa is C or S
  MOD_RES (15)..(16)..(17)..(18)..(19): Xaa is A or G
  MOD_RES (20)..(21)..(22)..(23): Xaa is A or G or is absent

SEQ ID NO: 81629 - protein, 33 aa, Artificial Sequence; identical to SEQ ID NO: 17866
  GFR-binding peptide
  MOD_RES (12)..(13)..(14)..(15)..(16): Xaa is A or G
  MOD_RES (17)..(18)..(19)..(20): Xaa is A or G or is absent

SEQ ID NO: 81630 - protein, 40 aa, Artificial Sequence; identical to SEQ ID NO: 17868
  GFR-binding peptide
  MOD_RES (1)..(3)..(40): Xaa is C or S
  MOD_RES (16)..(17)..(18)..(19)..(20): Xaa is A or G
  MOD_RES (21)..(22)..(23)..(24): Xaa is A or G or is absent

SEQ ID NO: 81631 - protein, 40 aa, Artificial Sequence; identical to SEQ ID NO: 17063
  GFR-binding peptide
  MOD_RES (34)..(34): Xaa is C or S
  MOD_RES (12)..(13)..(14)..(15)..(16): Xaa is A or G
  MOD_RES (17)..(18)..(19)..(20): Xaa is A or G or is absent

SEQ ID NO: 81632 - protein, 38 aa, Artificial Sequence; identical to SEQ ID NO: 17064
  GFR-binding peptide
  MOD_RES (37)..(37): Xaa is C or S
  MOD_RES (13)..(14)..(15)..(16)..(17): Xaa is A or G
  MOD_RES (18)..(19)..(20)..(21): Xaa is A or G or is absent

SEQ ID NO: 81633 - protein, 30 aa, Artificial Sequence; identical to SEQ ID NO: 46334
  GFR-binding peptide

SEQ ID NO: 81634 - protein, 41 aa, Artificial Sequence; identical to SEQ ID NO: 17065
  GFR-binding peptide
  MOD_RES (2)..(4)..(38): Xaa is C or S
  MOD_RES (16)..(17)..(18)..(19)..(20): Xaa is A or G
  MOD_RES (21)..(22)..(23)..(24): Xaa is A or G or is absent

SEQ ID NO: 81635 - protein, 37 aa, Artificial Sequence; identical to SEQ ID NO: 17869
  GFR-binding peptide
  MOD_RES (1)..(3): Xaa is C or S

SEQ ID NO: 81636 - protein, 36 aa, Artificial Sequence; identical to SEQ ID NO: 17066
  GFR-binding peptide
  MOD_RES (2)..(36): Xaa is C or S
  MOD_RES (14)..(15)..(16)..(17)..(18): Xaa is A or G
  MOD_RES (19)..(20)..(21)..(22): Xaa is A or G or is absent

SEQ ID NO: 81637 - protein, 40 aa, Artificial Sequence; identical to SEQ ID NO: 48893
  GFR-binding peptide
  MOD_RES (2)..(4)..(37)..(38): Xaa is C or S
  MOD_RES (15)..(16)..(17)..(18)..(19): Xaa is A or G
  MOD_RES (20)..(21)..(22)..(23): Xaa is A or G or is absent

SEQ ID NO: 81638 - protein, 43 aa, Artificial Sequence; identical to SEQ ID NO: 17871
  GFR-binding peptide
  MOD_RES (2)..(4)..(38): Xaa is C or S

SEQ ID NO: 81639 - protein, 33 aa, Artificial Sequence; identical to SEQ ID NO: 46341
  GFR-binding peptide
  MOD_RES (1)..(32)..(33): Xaa is C or S

SEQ ID NO: 81640 - protein, 35 aa, Artificial Sequence; identical to SEQ ID NO: 48896
  GFR-binding peptide
  MOD_RES (2)..(4)..(35): Xaa is C or S

SEQ ID NO: 81641 - protein, 36 aa, Artificial Sequence; identical to SEQ ID NO: 50147
  GFR-binding peptide
  MOD_RES (2)..(4): Xaa is C or S
  MOD_RES (15)..(16)..(17)..(18)..(19): Xaa is A or G
  MOD_RES (20)..(21)..(22)..(23): Xaa is A or G or is absent

SEQ ID NO: 81642 - protein, 40 aa, Artificial Sequence; identical to SEQ ID NO: 17875
  GFR-binding peptide
  MOD_RES (36)..(36): Xaa is C or S

SEQ ID NO: 81643 - protein, 36 aa, Artificial Sequence; identical to SEQ ID NO: 17071
  GFR-binding peptide
  MOD_RES (1)..(3): Xaa is C or S

SEQ ID NO: 81644 - protein, 38 aa, Artificial Sequence; identical to SEQ ID NO: 17876
  GFR-binding peptide
  MOD_RES (2)..(4)..(38): Xaa is C or S
  MOD_RES (16)..(17)..(18)..(19)..(20): Xaa is A or G
  MOD_RES (21)..(22)..(23)..(24): Xaa is A or G or is absent

SEQ ID NO: 81645 - protein, 39 aa, Artificial Sequence; identical to SEQ ID NO: 46344
  GFR-binding peptide
  MOD_RES (2)..(33)..(34): Xaa is C or S

SEQ ID NO: 81646 - protein, 34 aa, Artificial Sequence; identical to SEQ ID NO: 50151
  GFR-binding peptide
  MOD_RES (2)..(33)..(34): Xaa is C or S

SEQ ID NO: 81647 - protein, 35 aa, Artificial Sequence; identical to SEQ ID NO: 17877
  GFR-binding peptide

SEQ ID NO: 81648 - protein, 40 aa, Artificial Sequence; identical to SEQ ID NO: 17072
  GFR-binding peptide
  MOD_RES (2)..(39): Xaa is C or S
  MOD_RES (15)..(16)..(17)..(18)..(19): Xaa is A or G
  MOD_RES (20)..(21)..(22)..(23): Xaa is A or G or is absent

SEQ ID NO: 81649 - protein, 37 aa, Artificial Sequence; identical to SEQ ID NO: 17073
  GFR-binding peptide
  MOD_RES (34)..(34): Xaa is C or S
  MOD_RES (12)..(13)..(14)..(15)..(16): Xaa is A or G
  MOD_RES (17)..(18)..(19)..(20): Xaa is A or G or is absent

SEQ ID NO: 81650 - protein, 36 aa, Artificial Sequence; identical to SEQ ID NO: 17878
  GFR-binding peptide
  MOD_RES (35)..(35): Xaa is C or S

SEQ ID NO: 81651 - protein, 38 aa, Artificial Sequence; identical to SEQ ID NO: 17879
  GFR-binding peptide
  MOD_RES (2)..(4)..(38): Xaa is C or S
  MOD_RES (16)..(17)..(18)..(19)..(20): Xaa is A or G
  MOD_RES (21)..(22)..(23)..(24): Xaa is A or G or is absent

SEQ ID NO: 81652 - protein, 35 aa, Artificial Sequence; identical to SEQ ID NO: 50155
  GFR-binding peptide
  MOD_RES (1)..(32)..(33): Xaa is C or S

SEQ ID NO: 81653 - protein, 37 aa, Artificial Sequence; identical to SEQ ID NO: 17074
  GFR-binding peptide
  MOD_RES (36)..(36): Xaa is C or S
  MOD_RES (12)..(13)..(14)..(15)..(16): Xaa is A or G
  MOD_RES (17)..(18)..(19)..(20): Xaa is A or G or is absent

SEQ ID NO: 81654 - protein, 40 aa, Artificial Sequence; identical to SEQ ID NO: 17075
  GFR-binding peptide
  MOD_RES (2)..(4): Xaa is C or S
  MOD_RES (17)..(18)..(19)..(20)..(21): Xaa is A or G
  MOD_RES (22)..(23)..(24)..(25): Xaa is A or G or is absent

SEQ ID NO: 81655 - protein, 37 aa, Artificial Sequence; identical to SEQ ID NO: 17076
  GFR-binding peptide
  MOD_RES (37)..(37): Xaa is C or S

SEQ ID NO: 81656 - protein, 39 aa, Artificial Sequence; identical to SEQ ID NO: 47643
  GFR-binding peptide
  MOD_RES (1)..(3)..(36)..(37): Xaa is C or S
  MOD_RES (14)..(15)..(16)..(17)..(18): Xaa is A or G
  MOD_RES (19)..(20)..(21)..(22): Xaa is A or G or is absent

SEQ ID NO: 81657 - protein, 33 aa, Artificial Sequence; identical to SEQ ID NO: 50160
  GFR-binding peptide
  MOD_RES (1)..(32)..(33): Xaa is C or S

SEQ ID NO: 81658 - protein, 36 aa, Artificial Sequence; identical to SEQ ID NO: 17078
  GFR-binding peptide
  MOD_RES (2)..(2): Xaa is C or S
  MOD_RES (15)..(16)..(17)..(18)..(19): Xaa is A or G
  MOD_RES (20)..(21)..(22)..(23): Xaa is A or G or is absent

SEQ ID NO: 81659 - protein, 37 aa, Artificial Sequence; identical to SEQ ID NO: 17886
  GFR-binding peptide
  MOD_RES (1)..(3): Xaa is C or S

SEQ ID NO: 81660 - protein, 39 aa, Artificial Sequence; identical to SEQ ID NO: 17888
  GFR-binding peptide
  MOD_RES (2)..(39): Xaa is C or S
  MOD_RES (15)..(16)..(17)..(18)..(19): Xaa is A or G
  MOD_RES (20)..(21)..(22)..(23): Xaa is A or G or is absent

SEQ ID NO: 81661 - protein, 37 aa, Artificial Sequence; identical to SEQ ID NO: 17889
  GFR-binding peptide
  MOD_RES (2)..(2): Xaa is C or S
  MOD_RES (15)..(16)..(17)..(18)..(19): Xaa is A or G
  MOD_RES (20)..(21)..(22)..(23): Xaa is A or G or is absent

SEQ ID NO: 81662 - protein, 34 aa, Artificial Sequence; identical to SEQ ID NO: 17081
  GFR-binding peptide

SEQ ID NO: 81663 - protein, 39 aa, Artificial Sequence; identical to SEQ ID NO: 17890
  GFR-binding peptide
  MOD_RES (1)..(38): Xaa is C or S

SEQ ID NO: 81664 - protein, 37 aa, Artificial Sequence; identical to SEQ ID NO: 17082
  GFR-binding peptide
  MOD_RES (2)..(4): Xaa is C or S

SEQ ID NO: 81665 - protein, 37 aa, Artificial Sequence; identical to SEQ ID NO: 17893
  GFR-binding peptide
  MOD_RES (1)..(3): Xaa is C or S

SEQ ID NO: 81666 - protein, 38 aa, Artificial Sequence; identical to SEQ ID NO: 46367
  GFR-binding peptide
  MOD_RES (2)..(35)..(36): Xaa is C or S
  MOD_RES (13)..(14)..(15)..(16)..(17): Xaa is A or G
  MOD_RES (18)..(19)..(20)..(21): Xaa is A or G or is absent

SEQ ID NO: 81667 - protein, 34 aa, Artificial Sequence; identical to SEQ ID NO: 50171
  GFR-binding peptide
  MOD_RES (1)..(3)..(34): Xaa is C or S

SEQ ID NO: 81668 - protein, 37 aa, Artificial Sequence; identical to SEQ ID NO: 17084
  GFR-binding peptide
  MOD_RES (1)..(1): Xaa is C or S
  MOD_RES (14)..(15)..(16)..(17)..(18): Xaa is A or G
  MOD_RES (19)..(20)..(21)..(22): Xaa is A or G or is absent

SEQ ID NO: 81669 - protein, 43 aa, Artificial Sequence; identical to SEQ ID NO: 17894
  GFR-binding peptide
  MOD_RES (2)..(4)..(38): Xaa is C or S

SEQ ID NO: 81670 - protein, 37 aa, Artificial Sequence; identical to SEQ ID NO: 48924
  GFR-binding peptide
  MOD_RES (1)..(3)..(36)..(37): Xaa is C or S
  MOD_RES (14)..(15)..(16)..(17)..(18): Xaa is A or G
  MOD_RES (19)..(20)..(21)..(22): Xaa is A or G or is absent

SEQ ID NO: 81671 - protein, 32 aa, Artificial Sequence; identical to SEQ ID NO: 50173
  GFR-binding peptide
  MOD_RES (1)..(32): Xaa is C or S

SEQ ID NO: 81672 - protein, 33 aa, Artificial Sequence; identical to SEQ ID NO: 17896
  GFR-binding peptide
  MOD_RES (12)..(13)..(14)..(15)..(16): Xaa is A or G
  MOD_RES (17)..(18)..(19)..(20): Xaa is A or G or is absent

SEQ ID NO: 81673 - protein, 42 aa, Artificial Sequence; identical to SEQ ID NO: 17898
  GFR-binding peptide
  MOD_RES (1)..(38): Xaa is C or S
  MOD_RES (14)..(15)..(16)..(17)..(18): Xaa is A or G
  MOD_RES (19)..(20)..(21)..(22): Xaa is A or G or is absent

SEQ ID NO: 81674 - protein, 36 aa, Artificial Sequence; identical to SEQ ID NO: 50177
  GFR-binding peptide
  MOD_RES (2)..(35)..(36): Xaa is C or S
  MOD_RES (13)..(14)..(15)..(16)..(17): Xaa is A or G
  MOD_RES (18)..(19)..(20)..(21): Xaa is A or G or is absent

SEQ ID NO: 81675 - protein, 33 aa, Artificial Sequence; identical to SEQ ID NO: 46370
  GFR-binding peptide
  MOD_RES (1)..(3): Xaa is C or S

SEQ ID NO: 81676 - protein, 39 aa, Artificial Sequence; identical to SEQ ID NO: 17900
  GFR-binding peptide
  MOD_RES (33)..(33): Xaa is C or S
  MOD_RES (11)..(12)..(13)..(14)..(15): Xaa is A or G
  MOD_RES (16)..(17)..(18)..(19): Xaa is A or G or is absent

SEQ ID NO: 81677 - protein, 40 aa, Artificial Sequence; identical to SEQ ID NO: 17088
  GFR-binding peptide
  MOD_RES (1)..(3)..(37): Xaa is C or S
  MOD_RES (15)..(16)..(17)..(18)..(19): Xaa is A or G
  MOD_RES (20)..(21)..(22)..(23): Xaa is A or G or is absent

SEQ ID NO: 81678 - protein, 36 aa, Artificial Sequence; identical to SEQ ID NO: 48932
  GFR-binding peptide
  MOD_RES (2)..(33)..(34): Xaa is C or S

SEQ ID NO: 81679 - protein, 33 aa, Artificial Sequence; identical to SEQ ID NO: 50179
  GFR-binding peptide
  MOD_RES (1)..(3): Xaa is C or S

SEQ ID NO: 81680 - protein, 38 aa, Artificial Sequence; identical to SEQ ID NO: 17901
  GFR-binding peptide
  MOD_RES (1)..(38): Xaa is C or S

SEQ ID NO: 81681 - protein, 41 aa, Artificial Sequence; identical to SEQ ID NO: 17091
  GFR-binding peptide
  MOD_RES (1)..(35): Xaa is C or S
  MOD_RES (13)..(14)..(15)..(16)..(17): Xaa is A or G
  MOD_RES (18)..(19)..(20)..(21): Xaa is A or G or is absent

SEQ ID NO: 81682 - protein, 35 aa, Artificial Sequence; identical to SEQ ID NO: 17902
  GFR-binding peptide

SEQ ID NO: 81683 - protein, 35 aa, Artificial Sequence; identical to SEQ ID NO: 46381
  GFR-binding peptide
  MOD_RES (1)..(3)..(34)..(35): Xaa is C or S

SEQ ID NO: 81684 - protein, 35 aa, Artificial Sequence; identical to SEQ ID NO: 47663
  GFR-binding peptide
  MOD_RES (1)..(3)..(34)..(35): Xaa is C or S

SEQ ID NO: 81685 - protein, 40 aa, Artificial Sequence; identical to SEQ ID NO: 17092
  GFR-binding peptide
  MOD_RES (2)..(39): Xaa is C or S

SEQ ID NO: 81686 - protein, 36 aa, Artificial Sequence; identical to SEQ ID NO: 17094
  GFR-binding peptide
  MOD_RES (33)..(33): Xaa is C or S
  MOD_RES (11)..(12)..(13)..(14)..(15): Xaa is A or G
  MOD_RES (16)..(17)..(18)..(19): Xaa is A or G or is absent

SEQ ID NO: 81687 - protein, 38 aa, Artificial Sequence; identical to SEQ ID NO: 17095
  GFR-binding peptide
  MOD_RES (2)..(36): Xaa is C or S

SEQ ID NO: 81688 - protein, 38 aa, Artificial Sequence; identical to SEQ ID NO: 17096
  GFR-binding peptide
  MOD_RES (2)..(2): Xaa is C or S

SEQ ID NO: 81689 - protein, 32 aa, Artificial Sequence; identical to SEQ ID NO: 17904
  GFR-binding peptide
  MOD_RES (11)..(12)..(13)..(14)..(15): Xaa is A or G
  MOD_RES (16)..(17)..(18)..(19): Xaa is A or G or is absent

SEQ ID NO: 81690 - protein, 39 aa, Artificial Sequence; identical to SEQ ID NO: 17099
  GFR-binding peptide
  MOD_RES (35)..(35): Xaa is C or S
  MOD_RES (11)..(12)..(13)..(14)..(15): Xaa is A or G
  MOD_RES (16)..(17)..(18)..(19): Xaa is A or G or is absent

SEQ ID NO: 81691 - protein, 38 aa, Artificial Sequence; identical to SEQ ID NO: 17906
  GFR-binding peptide
  MOD_RES (36)..(36): Xaa is C or S

SEQ ID NO: 81692 - protein, 42 aa, Artificial Sequence; identical to SEQ ID NO: 47667
  GFR-binding peptide
  MOD_RES (2)..(4)..(37)..(38): Xaa is C or S
  MOD_RES (15)..(16)..(17)..(18)..(19): Xaa is A or G
  MOD_RES (20)..(21)..(22)..(23): Xaa is A or G or is absent

SEQ ID NO: 81693 - protein, 38 aa, Artificial Sequence; identical to SEQ ID NO: 17101
  GFR-binding peptide
  MOD_RES (36)..(36): Xaa is C or S

SEQ ID NO: 81694 - protein, 38 aa, Artificial Sequence; identical to SEQ ID NO: 50193
  GFR-binding peptide
  MOD_RES (2)..(4)..(35)..(36): Xaa is C or S

SEQ ID NO: 81695 - protein, 39 aa, Artificial Sequence; identical to SEQ ID NO: 17102
  GFR-binding peptide
  MOD_RES (37)..(37): Xaa is C or S

SEQ ID NO: 81696 - protein, 44 aa, Artificial Sequence; identical to SEQ ID NO: 17911
  GFR-binding peptide
  MOD_RES (2)..(4)..(41): Xaa is C or S
  MOD_RES (17)..(18)..(19)..(20)..(21): Xaa is A or G
  MOD_RES (22)..(23)..(24)..(25): Xaa is A or G or is absent

SEQ ID NO: 81697 - protein, 39 aa, Artificial Sequence; identical to SEQ ID NO: 17912
  GFR-binding peptide
  MOD_RES (35)..(35): Xaa is C or S
  MOD_RES (11)..(12)..(13)..(14)..(15): Xaa is A or G
  MOD_RES (16)..(17)..(18)..(19): Xaa is A or G or is absent

SEQ ID NO: 81698 - protein, 43 aa, Artificial Sequence; identical to SEQ ID NO: 17103
  GFR-binding peptide
  MOD_RES (2)..(39): Xaa is C or S
  MOD_RES (15)..(16)..(17)..(18)..(19): Xaa is A or G
  MOD_RES (20)..(21)..(22)..(23): Xaa is A or G or is absent

SEQ ID NO: 81699 - protein, 40 aa, Artificial Sequence; identical to SEQ ID NO: 17913
  GFR-binding peptide
  MOD_RES (34)..(34): Xaa is C or S
  MOD_RES (12)..(13)..(14)..(15)..(16): Xaa is A or G
  MOD_RES (17)..(18)..(19)..(20): Xaa is A or G or is absent

SEQ ID NO: 81700 - protein, 42 aa, Artificial Sequence; identical to SEQ ID NO: 17104
  GFR-binding peptide
  MOD_RES (1)..(3)..(37): Xaa is C or S

SEQ ID NO: 81701 - protein, 34 aa, Artificial Sequence; identical to SEQ ID NO: 17914
  GFR-binding peptide
  MOD_RES (12)..(13)..(14)..(15)..(16): Xaa is A or G
  MOD_RES (17)..(18)..(19)..(20): Xaa is A or G or is absent

SEQ ID NO: 81702 - protein, 39 aa, Artificial Sequence; identical to SEQ ID NO: 17915
  GFR-binding peptide
  MOD_RES (33)..(33): Xaa is C or S

SEQ ID NO: 81703 - protein, 35 aa, Artificial Sequence; identical to SEQ ID NO: 17106
  GFR-binding peptide
  MOD_RES (13)..(14)..(15)..(16)..(17): Xaa is A or G
  MOD_RES (18)..(19)..(20)..(21): Xaa is A or G or is absent

SEQ ID NO: 81704 - protein, 35 aa, Artificial Sequence; identical to SEQ ID NO: 47679
  GFR-binding peptide
  MOD_RES (33)..(34): Xaa is C or S
  MOD_RES (11)..(12)..(13)..(14)..(15): Xaa is A or G
  MOD_RES (16)..(17)..(18)..(19): Xaa is A or G or is absent

SEQ ID NO: 81705 - protein, 42 aa, Artificial Sequence; identical to SEQ ID NO: 17916
  GFR-binding peptide
  MOD_RES (2)..(39): Xaa is C or S
  MOD_RES (15)..(16)..(17)..(18)..(19): Xaa is A or G
  MOD_RES (20)..(21)..(22)..(23): Xaa is A or G or is absent

SEQ ID NO: 81706 - protein, 35 aa, Artificial Sequence; identical to SEQ ID NO: 46400
  GFR-binding peptide
  MOD_RES (2)..(35): Xaa is C or S
  MOD_RES (13)..(14)..(15)..(16)..(17): Xaa is A or G
  MOD_RES (18)..(19)..(20)..(21): Xaa is A or G or is absent

SEQ ID NO: 81707 - protein, 37 aa, Artificial Sequence; identical to SEQ ID NO: 48964
  GFR-binding peptide
  MOD_RES (1)..(32)..(33): Xaa is C or S

SEQ ID NO: 81708 - protein, 38 aa, Artificial Sequence; identical to SEQ ID NO: 17107
  GFR-binding peptide
  MOD_RES (35)..(35): Xaa is C or S

SEQ ID NO: 81709 - protein, 37 aa, Artificial Sequence; identical to SEQ ID NO: 17108
  GFR-binding peptide
  MOD_RES (33)..(33): Xaa is C or S

SEQ ID NO: 81710 - protein, 44 aa, Artificial Sequence; identical to SEQ ID NO: 17918
  GFR-binding peptide
  MOD_RES (1)..(3)..(40): Xaa is C or S

SEQ ID NO: 81711 - protein, 38 aa, Artificial Sequence; identical to SEQ ID NO: 17109
  GFR-binding peptide
  MOD_RES (2)..(4)..(38): Xaa is C or S

SEQ ID NO: 81712 - protein, 32 aa, Artificial Sequence; identical to SEQ ID NO: 48971
  GFR-binding peptide
  MOD_RES (1)..(32): Xaa is C or S

SEQ ID NO: 81713 - protein, 37 aa, Artificial Sequence; identical to SEQ ID NO: 50205
  GFR-binding peptide
  MOD_RES (2)..(4)..(35)..(36): Xaa is C or S

SEQ ID NO: 81714 - protein, 40 aa, Artificial Sequence; identical to SEQ ID NO: 17920
  GFR-binding peptide
  MOD_RES (2)..(36): Xaa is C or S

SEQ ID NO: 81715 - protein, 39 aa, Artificial Sequence; identical to SEQ ID NO: 17921
  GFR-binding peptide
  MOD_RES (1)..(3)..(37): Xaa is C or S

SEQ ID NO: 81716 - protein, 37 aa, Artificial Sequence; identical to SEQ ID NO: 17922
  GFR-binding peptide
  MOD_RES (2)..(2): Xaa is C or S
  MOD_RES (15)..(16)..(17)..(18)..(19): Xaa is A or G
  MOD_RES (20)..(21)..(22)..(23): Xaa is A or G or is absent

SEQ ID NO: 81717 - protein, 35 aa, Artificial Sequence; identical to SEQ ID NO: 17112
  GFR-binding peptide
  MOD_RES (35)..(35): Xaa is C or S

SEQ ID NO: 81718 - protein, 34 aa, Artificial Sequence; identical to SEQ ID NO: 47690
  GFR-binding peptide
  MOD_RES (2)..(33)..(34): Xaa is C or S

SEQ ID NO: 81719 - protein, 41 aa, Artificial Sequence; identical to SEQ ID NO: 17925
  GFR-binding peptide
  MOD_RES (2)..(4)..(41): Xaa is C or S
  MOD_RES (17)..(18)..(19)..(20)..(21): Xaa is A or G
  MOD_RES (22)..(23)..(24)..(25): Xaa is A or G or is absent

SEQ ID NO: 81720 - protein, 38 aa, Artificial Sequence; identical to SEQ ID NO: 17926
  GFR-binding peptide
  MOD_RES (2)..(2): Xaa is C or S
  MOD_RES (15)..(16)..(17)..(18)..(19): Xaa is A or G
  MOD_RES (20)..(21)..(22)..(23): Xaa is A or G or is absent

SEQ ID NO: 81721 - protein, 38 aa, Artificial Sequence; identical to SEQ ID NO: 17927
  GFR-binding peptide
  MOD_RES (1)..(3): Xaa is C or S
  MOD_RES (16)..(17)..(18)..(19)..(20): Xaa is A or G
  MOD_RES (21)..(22)..(23)..(24): Xaa is A or G or is absent

SEQ ID NO: 81722 - protein, 33 aa, Artificial Sequence; identical to SEQ ID NO: 17928
  GFR-binding peptide

SEQ ID NO: 81723 - protein, 35 aa, Artificial Sequence; identical to SEQ ID NO: 17114
  GFR-binding peptide
  MOD_RES (33)..(33): Xaa is C or S

SEQ ID NO: 81724 - protein, 40 aa, Artificial Sequence; identical to SEQ ID NO: 17115
  GFR-binding peptide
  MOD_RES (37)..(37): Xaa is C or S
  MOD_RES (13)..(14)..(15)..(16)..(17): Xaa is A or G
  MOD_RES (18)..(19)..(20)..(21): Xaa is A or G or is absent

SEQ ID NO: 81725 - protein, 41 aa, Artificial Sequence; identical to SEQ ID NO: 17929
  GFR-binding peptide
  MOD_RES (1)..(38): Xaa is C or S
  MOD_RES (14)..(15)..(16)..(17)..(18): Xaa is A or G
  MOD_RES (19)..(20)..(21)..(22): Xaa is A or G or is absent

SEQ ID NO: 81726 - protein, 37 aa, Artificial Sequence; identical to SEQ ID NO: 17930
  GFR-binding peptide
  MOD_RES (34)..(34): Xaa is C or S
  MOD_RES (12)..(13)..(14)..(15)..(16): Xaa is A or G
  MOD_RES (17)..(18)..(19)..(20): Xaa is A or G or is absent

SEQ ID NO: 81727 - protein, 38 aa, Artificial Sequence; identical to SEQ ID NO: 17118
  GFR-binding peptide
  MOD_RES (2)..(4)..(38): Xaa is C or S

SEQ ID NO: 81728 - protein, 38 aa, Artificial Sequence; identical to SEQ ID NO: 46411
  GFR-binding peptide
  MOD_RES (1)..(32)..(33): Xaa is C or S

SEQ ID NO: 81729 - protein, 36 aa, Artificial Sequence; identical to SEQ ID NO: 17932
  GFR-binding peptide
  MOD_RES (1)..(1): Xaa is C or S

SEQ ID NO: 81730 - protein, 36 aa, Artificial Sequence; identical to SEQ ID NO: 50215
  GFR-binding peptide
  MOD_RES (1)..(32)..(33): Xaa is C or S

SEQ ID NO: 81731 - protein, 39 aa, Artificial Sequence; identical to SEQ ID NO: 17934
  GFR-binding peptide
  MOD_RES (1)..(3)..(37): Xaa is C or S

SEQ ID NO: 81732 - protein, 38 aa, Artificial Sequence; identical to SEQ ID NO: 17936
  GFR-binding peptide
  MOD_RES (33)..(33): Xaa is C or S

SEQ ID NO: 81733 - protein, 41 aa, Artificial Sequence; identical to SEQ ID NO: 17939
  GFR-binding peptide
  MOD_RES (2)..(36): Xaa is C or S

SEQ ID NO: 81734 - protein, 36 aa, Artificial Sequence; identical to SEQ ID NO: 50219
  GFR-binding peptide
  MOD_RES (1)..(34)..(35): Xaa is C or S
  MOD_RES (12)..(13)..(14)..(15)..(16): Xaa is A or G
  MOD_RES (17)..(18)..(19)..(20): Xaa is A or G or is absent

SEQ ID NO: 81735 - protein, 34 aa, Artificial Sequence; identical to SEQ ID NO: 17940
  GFR-binding peptide
  MOD_RES (11)..(12)..(13)..(14)..(15): Xaa is A or G
  MOD_RES (16)..(17)..(18)..(19): Xaa is A or G or is absent

SEQ ID NO: 81736 - protein, 42 aa, Artificial Sequence; identical to SEQ ID NO: 17122
  GFR-binding peptide
  MOD_RES (2)..(4)..(38): Xaa is C or S
  MOD_RES (16)..(17)..(18)..(19)..(20): Xaa is A or G
  MOD_RES (21)..(22)..(23)..(24): Xaa is A or G or is absent

SEQ ID NO: 81737 - protein, 32 aa, Artificial Sequence; identical to SEQ ID NO: 17126
  GFR-binding peptide

SEQ ID NO: 81738 - protein, 41 aa, Artificial Sequence; identical to SEQ ID NO: 17941
  GFR-binding peptide
  MOD_RES (2)..(4)..(41): Xaa is C or S
  MOD_RES (17)..(18)..(19)..(20)..(21): Xaa is A or G
  MOD_RES (22)..(23)..(24)..(25): Xaa is A or G or is absent

SEQ ID NO: 81739 - protein, 36 aa, Artificial Sequence; identical to SEQ ID NO: 17942
  GFR-binding peptide
  MOD_RES (1)..(3): Xaa is C or S

SEQ ID NO: 81740 - protein, 40 aa, Artificial Sequence; identical to SEQ ID NO: 17944
  GFR-binding peptide
  MOD_RES (1)..(38): Xaa is C or S
  MOD_RES (14)..(15)..(16)..(17)..(18): Xaa is A or G
  MOD_RES (19)..(20)..(21)..(22): Xaa is A or G or is absent

SEQ ID NO: 81741 - protein, 40 aa, Artificial Sequence; identical to SEQ ID NO: 46422
  GFR-binding peptide
  MOD_RES (1)..(3)..(34)..(35): Xaa is C or S

SEQ ID NO: 81742 - protein, 41 aa, Artificial Sequence; identical to SEQ ID NO: 17129
  GFR-binding peptide
  MOD_RES (2)..(4)..(38): Xaa is C or S
  MOD_RES (16)..(17)..(18)..(19)..(20): Xaa is A or G
  MOD_RES (21)..(22)..(23)..(24): Xaa is A or G or is absent

SEQ ID NO: 81743 - protein, 34 aa, Artificial Sequence; identical to SEQ ID NO: 50225
  GFR-binding peptide
  MOD_RES (1)..(3)..(34): Xaa is C or S

SEQ ID NO: 81744 - protein, 36 aa, Artificial Sequence; identical to SEQ ID NO: 50229
  GFR-binding peptide
  MOD_RES (2)..(4): Xaa is C or S
  MOD_RES (15)..(16)..(17)..(18)..(19): Xaa is A or G
  MOD_RES (20)..(21)..(22)..(23): Xaa is A or G or is absent

SEQ ID NO: 81745 - protein, 35 aa, Artificial Sequence; identical to SEQ ID NO: 17130
  GFR-binding peptide
  MOD_RES (34)..(34): Xaa is C or S
  MOD_RES (12)..(13)..(14)..(15)..(16): Xaa is A or G
  MOD_RES (17)..(18)..(19)..(20): Xaa is A or G or is absent

SEQ ID NO: 81746 - protein, 39 aa, Artificial Sequence; identical to SEQ ID NO: 17945
  GFR-binding peptide
  MOD_RES (36)..(36): Xaa is C or S
  MOD_RES (12)..(13)..(14)..(15)..(16): Xaa is A or G
  MOD_RES (17)..(18)..(19)..(20): Xaa is A or G or is absent

SEQ ID NO: 81747 - protein, 41 aa, Artificial Sequence; identical to SEQ ID NO: 49000
  GFR-binding peptide
  MOD_RES (2)..(4)..(37)..(38): Xaa is C or S
  MOD_RES (15)..(16)..(17)..(18)..(19): Xaa is A or G
  MOD_RES (20)..(21)..(22)..(23): Xaa is A or G or is absent

SEQ ID NO: 81748 - protein, 32 aa, Artificial Sequence; identical to SEQ ID NO: 17946
  GFR-binding peptide
  MOD_RES (11)..(12)..(13)..(14)..(15): Xaa is A or G
  MOD_RES (16)..(17)..(18)..(19): Xaa is A or G or is absent

SEQ ID NO: 81749 - protein, 36 aa, Artificial Sequence; identical to SEQ ID NO: 46425
  GFR-binding peptide
  MOD_RES (2)..(35)..(36): Xaa is C or S
  MOD_RES (13)..(14)..(15)..(16)..(17): Xaa is A or G
  MOD_RES (18)..(19)..(20)..(21): Xaa is A or G or is absent

SEQ ID NO: 81750 - protein, 33 aa, Artificial Sequence; identical to SEQ ID NO: 17134
  GFR-binding peptide

SEQ ID NO: 81751 - protein, 37 aa, Artificial Sequence; identical to SEQ ID NO: 47726
  GFR-binding peptide
  MOD_RES (33)..(34): Xaa is C or S
  MOD_RES (11)..(12)..(13)..(14)..(15): Xaa is A or G
  MOD_RES (16)..(17)..(18)..(19): Xaa is A or G or is absent

SEQ ID NO: 81752 - protein, 40 aa, Artificial Sequence; identical to SEQ ID NO: 17948
  GFR-binding peptide
  MOD_RES (37)..(37): Xaa is C or S
  MOD_RES (13)..(14)..(15)..(16)..(17): Xaa is A or G
  MOD_RES (18)..(19)..(20)..(21): Xaa is A or G or is absent

SEQ ID NO: 81753 - protein, 39 aa, Artificial Sequence; identical to SEQ ID NO: 46429
  GFR-binding peptide
  MOD_RES (2)..(4)..(35)..(36): Xaa is C or S

SEQ ID NO: 81754 - protein, 40 aa, Artificial Sequence; identical to SEQ ID NO: 17949
  GFR-binding peptide
  MOD_RES (1)..(3)..(37): Xaa is C or S
  MOD_RES (15)..(16)..(17)..(18)..(19): Xaa is A or G
  MOD_RES (20)..(21)..(22)..(23): Xaa is A or G or is absent

SEQ ID NO: 81755 - protein, 35 aa, Artificial Sequence; identical to SEQ ID NO: 47729
  GFR-binding peptide
  MOD_RES (1)..(3)..(34)..(35): Xaa is C or S

SEQ ID NO: 81756 - protein, 42 aa, Artificial Sequence; identical to SEQ ID NO: 17951
  GFR-binding peptide
  MOD_RES (2)..(39): Xaa is C or S

SEQ ID NO: 81757 - protein, 40 aa, Artificial Sequence; identical to SEQ ID NO: 17952
  GFR-binding peptide
  MOD_RES (2)..(36): Xaa is C or S

SEQ ID NO: 81758 - protein, 34 aa, Artificial Sequence; identical to SEQ ID NO: 47730
  GFR-binding peptide
  MOD_RES (31)..(32): Xaa is C or S

SEQ ID NO: 81759 - protein, 36 aa, Artificial Sequence; identical to SEQ ID NO: 17135
  GFR-binding peptide
  MOD_RES (34)..(34): Xaa is C or S
  MOD_RES (12)..(13)..(14)..(15)..(16): Xaa is A or G
  MOD_RES (17)..(18)..(19)..(20): Xaa is A or G or is absent

SEQ ID NO: 81760 - protein, 39 aa, Artificial Sequence; identical to SEQ ID NO: 47731
  GFR-binding peptide
  MOD_RES (1)..(3)..(36)..(37): Xaa is C or S
  MOD_RES (14)..(15)..(16)..(17)..(18): Xaa is A or G
  MOD_RES (19)..(20)..(21)..(22): Xaa is A or G or is absent

SEQ ID NO: 81761 - protein, 36 aa, Artificial Sequence; identical to SEQ ID NO: 50245
  GFR-binding peptide
  MOD_RES (2)..(33)..(34): Xaa is C or S

SEQ ID NO: 81762 - protein, 37 aa, Artificial Sequence; identical to SEQ ID NO: 49004
  GFR-binding peptide
  MOD_RES (2)..(4)..(35)..(36): Xaa is C or S

SEQ ID NO: 81763 - protein, 35 aa, Artificial Sequence; identical to SEQ ID NO: 17138
  GFR-binding peptide

SEQ ID NO: 81764 - protein, 39 aa, Artificial Sequence; identical to SEQ ID NO: 17139
  GFR-binding peptide
  MOD_RES (1)..(3)..(37): Xaa is C or S

SEQ ID NO: 81765 - protein, 38 aa, Artificial Sequence; identical to SEQ ID NO: 47734
  GFR-binding peptide
  MOD_RES (1)..(34)..(35): Xaa is C or S
  MOD_RES (12)..(13)..(14)..(15)..(16): Xaa is A or G
  MOD_RES (17)..(18)..(19)..(20): Xaa is A or G or is absent

SEQ ID NO: 81766 - protein, 42 aa, Artificial Sequence; identical to SEQ ID NO: 17954
  GFR-binding peptide
  MOD_RES (2)..(4)..(41): Xaa is C or S

SEQ ID NO: 81767 - protein, 41 aa, Artificial Sequence; identical to SEQ ID NO: 17140
  GFR-binding peptide
  MOD_RES (37)..(37): Xaa is C or S

SEQ ID NO: 81768 - protein, 35 aa, Artificial Sequence; identical to SEQ ID NO: 17141
  GFR-binding peptide
  MOD_RES (2)..(2): Xaa is C or S

SEQ ID NO: 81769 - protein, 34 aa, Artificial Sequence; identical to SEQ ID NO: 17956
  GFR-binding peptide
  MOD_RES (34)..(34): Xaa is C or S

SEQ ID NO: 81770 - protein, 39 aa, Artificial Sequence; identical to SEQ ID NO: 17957
  GFR-binding peptide
  MOD_RES (2)..(4): Xaa is C or S
  MOD_RES (17)..(18)..(19)..(20)..(21): Xaa is A or G
  MOD_RES (22)..(23)..(24)..(25): Xaa is A or G or is absent

SEQ ID NO: 81771 - protein, 37 aa, Artificial Sequence; identical to SEQ ID NO: 17142
  GFR-binding peptide
  MOD_RES (2)..(36): Xaa is C or S
  MOD_RES (14)..(15)..(16)..(17)..(18): Xaa is A or G
  MOD_RES (19)..(20)..(21)..(22): Xaa is A or G or is absent

SEQ ID NO: 81772 - protein, 38 aa, Artificial Sequence; identical to SEQ ID NO: 17143
  GFR-binding peptide
  MOD_RES (37)..(37): Xaa is C or S
  MOD_RES (13)..(14)..(15)..(16)..(17): Xaa is A or G
  MOD_RES (18)..(19)..(20)..(21): Xaa is A or G or is absent

SEQ ID NO: 81773 - protein, 34 aa, Artificial Sequence; identical to SEQ ID NO: 17145
  GFR-binding peptide
  MOD_RES (11)..(12)..(13)..(14)..(15): Xaa is A or G
  MOD_RES (16)..(17)..(18)..(19): Xaa is A or G or is absent

SEQ ID NO: 81774 - protein, 44 aa, Artificial Sequence; identical to SEQ ID NO: 17961
  GFR-binding peptide
  MOD_RES (1)..(3)..(40): Xaa is C or S

SEQ ID NO: 81775 - protein, 38 aa, Artificial Sequence; identical to SEQ ID NO: 17962
  GFR-binding peptide
  MOD_RES (2)..(4): Xaa is C or S
  MOD_RES (17)..(18)..(19)..(20)..(21): Xaa is A or G
  MOD_RES (22)..(23)..(24)..(25): Xaa is A or G or is absent

SEQ ID NO: 81776 - protein, 42 aa, Artificial Sequence; identical to SEQ ID NO: 17147
  GFR-binding peptide
  MOD_RES (2)..(4)..(38): Xaa is C or S
  MOD_RES (16)..(17)..(18)..(19)..(20): Xaa is A or G
  MOD_RES (21)..(22)..(23)..(24): Xaa is A or G or is absent

SEQ ID NO: 81777 - protein, 40 aa, Artificial Sequence; identical to SEQ ID NO: 46461
  GFR-binding peptide
  MOD_RES (1)..(34)..(35): Xaa is C or S
  MOD_RES (12)..(13)..(14)..(15)..(16): Xaa is A or G
  MOD_RES (17)..(18)..(19)..(20): Xaa is A or G or is absent

SEQ ID NO: 81778 - protein, 35 aa, Artificial Sequence; identical to SEQ ID NO: 49017
  GFR-binding peptide
  MOD_RES (33)..(34): Xaa is C or S
  MOD_RES (11)..(12)..(13)..(14)..(15): Xaa is A or G
  MOD_RES (16)..(17)..(18)..(19): Xaa is A or G or is absent

SEQ ID NO: 81779 - protein, 38 aa, Artificial Sequence; identical to SEQ ID NO: 17964
  GFR-binding peptide
  MOD_RES (1)..(3): Xaa is C or S
  MOD_RES (16)..(17)..(18)..(19)..(20): Xaa is A or G
  MOD_RES (21)..(22)..(23)..(24): Xaa is A or G or is absent

SEQ ID NO: 81780 - protein, 39 aa, Artificial Sequence; identical to SEQ ID NO: 17968
  GFR-binding peptide
  MOD_RES (35)..(35): Xaa is C or S

SEQ ID NO: 81781 - protein, 38 aa, Artificial Sequence; identical to SEQ ID NO: 17149
  GFR-binding peptide
  MOD_RES (33)..(33): Xaa is C or S
  MOD_RES (11)..(12)..(13)..(14)..(15): Xaa is A or G
  MOD_RES (16)..(17)..(18)..(19): Xaa is A or G or is absent

SEQ ID NO: 81782 - protein, 36 aa, Artificial Sequence; identical to SEQ ID NO: 17970
  GFR-binding peptide
  MOD_RES (1)..(3): Xaa is C or S
  MOD_RES (15)..(16)..(17)..(18)..(19): Xaa is A or G
  MOD_RES (20)..(21)..(22)..(23): Xaa is A or G or is absent

SEQ ID NO: 81783 - protein, 37 aa, Artificial Sequence; identical to SEQ ID NO: 47753
  GFR-binding peptide
  MOD_RES (2)..(35)..(36): Xaa is C or S
  MOD_RES (13)..(14)..(15)..(16)..(17): Xaa is A or G
  MOD_RES (18)..(19)..(20)..(21): Xaa is A or G or is absent

SEQ ID NO: 81784 - protein, 38 aa, Artificial Sequence; identical to SEQ ID NO: 17973
  GFR-binding peptide
  MOD_RES (35)..(35): Xaa is C or S

SEQ ID NO: 81785 - protein, 38 aa, Artificial Sequence; identical to SEQ ID NO: 17974
  GFR-binding peptide
  MOD_RES (34)..(34): Xaa is C or S
  MOD_RES (12)..(13)..(14)..(15)..(16): Xaa is A or G
  MOD_RES (17)..(18)..(19)..(20): Xaa is A or G or is absent

SEQ ID NO: 81786 - protein, 42 aa, Artificial Sequence; identical to SEQ ID NO: 47756
  GFR-binding peptide
  MOD_RES (1)..(3)..(36)..(37): Xaa is C or S
  MOD_RES (14)..(15)..(16)..(17)..(18): Xaa is A or G
  MOD_RES (19)..(20)..(21)..(22): Xaa is A or G or is absent

SEQ ID NO: 81787 - protein, 36 aa, Artificial Sequence; identical to SEQ ID NO: 17152
  GFR-binding peptide
  MOD_RES (1)..(35): Xaa is C or S

SEQ ID NO: 81788 - protein, 33 aa, Artificial Sequence; identical to SEQ ID NO: 49022
  GFR-binding peptide
  MOD_RES (33)..(33): Xaa is C or S
  MOD_RES (11)..(12)..(13)..(14)..(15): Xaa is A or G
  MOD_RES (16)..(17)..(18)..(19): Xaa is A or G or is absent

SEQ ID NO: 81789 - protein, 37 aa, Artificial Sequence; identical to SEQ ID NO: 17153
  GFR-binding peptide
  MOD_RES (37)..(37): Xaa is C or S

SEQ ID NO: 81790 - protein, 35 aa, Artificial Sequence; identical to SEQ ID NO: 46479
  GFR-binding peptide
  MOD_RES (33)..(34): Xaa is C or S
  MOD_RES (11)..(12)..(13)..(14)..(15): Xaa is A or G
  MOD_RES (16)..(17)..(18)..(19): Xaa is A or G or is absent

SEQ ID NO: 81791 - protein, 41 aa, Artificial Sequence; identical to SEQ ID NO: 50281
  GFR-binding peptide
  MOD_RES (1)..(3)..(36)..(37): Xaa is C or S
  MOD_RES (14)..(15)..(16)..(17)..(18): Xaa is A or G
  MOD_RES (19)..(20)..(21)..(22): Xaa is A or G or is absent

SEQ ID NO: 81792 - protein, 43 aa, Artificial Sequence; identical to SEQ ID NO: 17976
  GFR-binding peptide
  MOD_RES (1)..(3)..(40): Xaa is C or S

SEQ ID NO: 81793 - protein, 40 aa, Artificial Sequence; identical to SEQ ID NO: 17154
  GFR-binding peptide
  MOD_RES (1)..(38): Xaa is C or S

SEQ ID NO: 81794 - protein, 33 aa, Artificial Sequence; identical to SEQ ID NO: 50284
  GFR-binding peptide
  MOD_RES (1)..(32)..(33): Xaa is C or S

SEQ ID NO: 81795 - protein, 45 aa, Artificial Sequence; identical to SEQ ID NO: 17155
  GFR-binding peptide
  MOD_RES (2)..(4)..(41): Xaa is C or S
  MOD_RES (17)..(18)..(19)..(20)..(21): Xaa is A or G
  MOD_RES (22)..(23)..(24)..(25): Xaa is A or G or is absent

SEQ ID NO: 81796 - protein, 43 aa, Artificial Sequence; identical to SEQ ID NO: 17977
  GFR-binding peptide
  MOD_RES (1)..(3)..(40): Xaa is C or S

SEQ ID NO: 81797 - protein, 41 aa, Artificial Sequence; identical to SEQ ID NO: 17978
  GFR-binding peptide
  MOD_RES (1)..(3)..(40): Xaa is C or S
  MOD_RES (16)..(17)..(18)..(19)..(20): Xaa is A or G
  MOD_RES (21)..(22)..(23)..(24): Xaa is A or G or is absent

SEQ ID NO: 81798 - protein, 34 aa, Artificial Sequence; identical to SEQ ID NO: 17979
  GFR-binding peptide
  MOD_RES (1)..(1): Xaa is C or S

SEQ ID NO: 81799 - protein, 39 aa, Artificial Sequence; identical to SEQ ID NO: 17156
  GFR-binding peptide
  MOD_RES (1)..(3): Xaa is C or S

SEQ ID NO: 81800 - protein, 38 aa, Artificial Sequence; identical to SEQ ID NO: 49031
  GFR-binding peptide
  MOD_RES (1)..(3)..(36)..(37): Xaa is C or S
  MOD_RES (14)..(15)..(16)..(17)..(18): Xaa is A or G
  MOD_RES (19)..(20)..(21)..(22): Xaa is A or G or is absent

SEQ ID NO: 81801 - protein, 43 aa, Artificial Sequence; identical to SEQ ID NO: 17157
  GFR-binding peptide
  MOD_RES (2)..(4)..(38): Xaa is C or S

SEQ ID NO: 81802 - protein, 41 aa, Artificial Sequence; identical to SEQ ID NO: 49034
  GFR-binding peptide
  MOD_RES (2)..(35)..(36): Xaa is C or S
  MOD_RES (13)..(14)..(15)..(16)..(17): Xaa is A or G
  MOD_RES (18)..(19)..(20)..(21): Xaa is A or G or is absent

SEQ ID NO: 81803 - protein, 39 aa, Artificial Sequence; identical to SEQ ID NO: 17158
  GFR-binding peptide
  MOD_RES (1)..(3): Xaa is C or S
  MOD_RES (16)..(17)..(18)..(19)..(20): Xaa is A or G
  MOD_RES (21)..(22)..(23)..(24): Xaa is A or G or is absent

SEQ ID NO: 81804 - protein, 41 aa, Artificial Sequence; identical to SEQ ID NO: 17980
  GFR-binding peptide
  MOD_RES (2)..(36): Xaa is C or S
  MOD_RES (14)..(15)..(16)..(17)..(18): Xaa is A or G
  MOD_RES (19)..(20)..(21)..(22): Xaa is A or G or is absent

SEQ ID NO: 81805 - protein, 37 aa, Artificial Sequence; identical to SEQ ID NO: 17981
  GFR-binding peptide
  MOD_RES (35)..(35): Xaa is C or S
  MOD_RES (11)..(12)..(13)..(14)..(15): Xaa is A or G
  MOD_RES (16)..(17)..(18)..(19): Xaa is A or G or is absent

SEQ ID NO: 81806 - protein, 35 aa, Artificial Sequence; identical to SEQ ID NO: 47772
  GFR-binding peptide
  MOD_RES (2)..(33)..(34): Xaa is C or S

SEQ ID NO: 81807 - protein, 37 aa, Artificial Sequence; identical to SEQ ID NO: 49037
  GFR-binding peptide
  MOD_RES (2)..(35)..(36): Xaa is C or S
  MOD_RES (13)..(14)..(15)..(16)..(17): Xaa is A or G
  MOD_RES (18)..(19)..(20)..(21): Xaa is A or G or is absent

SEQ ID NO: 81808 - protein, 40 aa, Artificial Sequence; identical to SEQ ID NO: 17161
  GFR-binding peptide
  MOD_RES (2)..(39): Xaa is C or S

SEQ ID NO: 81809 - protein, 41 aa, Artificial Sequence; identical to SEQ ID NO: 17983
  GFR-binding peptide
  MOD_RES (1)..(38): Xaa is C or S

SEQ ID NO: 81810 - protein, 35 aa, Artificial Sequence; identical to SEQ ID NO: 17162
  GFR-binding peptide
  MOD_RES (34)..(34): Xaa is C or S

SEQ ID NO: 81811 - protein, 41 aa, Artificial Sequence; identical to SEQ ID NO: 17985
  GFR-binding peptide
  MOD_RES (1)..(3)..(37): Xaa is C or S

SEQ ID NO: 81812 - protein, 36 aa, Artificial Sequence; identical to SEQ ID NO: 17986
  GFR-binding peptide
  MOD_RES (35)..(35): Xaa is C or S

SEQ ID NO: 81813 - protein, 40 aa, Artificial Sequence; identical to SEQ ID NO: 46487
  GFR-binding peptide
  MOD_RES (1)..(3)..(34)..(35): Xaa is C or S

SEQ ID NO: 81814 - protein, 39 aa, Artificial Sequence; identical to SEQ ID NO: 17987
  GFR-binding peptide
  MOD_RES (34)..(34): Xaa is C or S

SEQ ID NO: 81815 - protein, 42 aa, Artificial Sequence; identical to SEQ ID NO: 47780
  GFR-binding peptide
  MOD_RES (1)..(3)..(36)..(37): Xaa is C or S
  MOD_RES (14)..(15)..(16)..(17)..(18): Xaa is A or G
  MOD_RES (19)..(20)..(21)..(22): Xaa is A or G or is absent

SEQ ID NO: 81816 - protein, 35 aa, Artificial Sequence; identical to SEQ ID NO: 17165
  GFR-binding peptide
